United States Patent Application Publication US 2008/0034453 A1 - sequence listing, part 11

SEQ ID NO: 87012 - DNA, 506 bp, Zea mays
  unsure (1)..(506): unsure at all n locations
ggggtaaaggctgtctaagcggtgttgggggagagagaaatgcttctaccggttcggaattcccgggtcgacccacgcgtccggccgccgccgcctcgccgacgagcactttaagatcgcctcgttcggggacctgggggacaccgtgttcggcgcgcacgggcggttcgccgtggacgtgatgctggtgctcagccaattcagcttctgcgtcggctacctcatcttcatctccaacaccatggcgcacctctatccgattgccgcgtcgtcctcctccgcgctcctctcccccaaggcgctcgtcatctgggcgatgctgcctttccagctggggctcaactccatcaagacgctgacgctgctcgcgccgctcagcatcttcgccgacgtcgtcgacctcggcgccatgggcgtggtcctcggccaggacgtcgccgnctggctcgccaagcccgtgcccgtggtcggcttcggcggcgcatgcgcgcttctctacgggctgg

SEQ ID NO: 87013 - DNA, 502 bp, Zea mays
  unsure (1)..(502): unsure at all n locations
ggttaaaggcttgtttgcggggagggtattgtcaacctctctcggaattcccgggtcgacccactcgtccggcctccgccgccgacagcagcgtactgttttgtatctcccgagaagggttgtgagaaggagtagtatcctcaatgtccacgggaggaagctgttgatgctgaggtcctcattgaccgacgtgccagcagaggtcccggcggtccaggtggccgatgcgcccaaagcgaaaaatgcgcccacagagaagaaggcgcctaaggagaagaagctttccgcggcgaaaaagccggcggcgcaccctacctacgctgagatgattgtagaggcgatcgctgccctcaaggagaggaaggtgtcgagctcggtggccatcatcaagtacgtctagggtgagcatggcggcaaagctcacaccaacttgcgcaagcagctcactgtgcagctgaagaagctcgcttncgccggcaagctgaccagggtgaaaaacccc

SEQ ID NO: 87014 - DNA, 511 bp, Zea mays
ggaggggtaaagtgtagagtacagcgagcgggggacaaagtagtgctctaccggtctcggaattcccggctcgacccacgcgtccgctcgatcctagcttcccttccaagaagtcgcagcgcccatggccatggccacgcaagcctccgccgccacgcgccacctgctggccgccgcctgggcgccggcggcgaagccgcggcagctgagctcgcagctcgcgctgccgtcgtcgtcctcccgcgggccggccccgctccgcgcgtccaccgaggaggcggtggaggcgcccaaggggttcgtggccccgcagctggaccccagcacgccgtccccgatcttcggcggcagcacgggcgggctgctccgcaaggcgcaggtggaggagttctacgtcatcacgtggacgtcccccaaggagcaggtgttcgagatgcccaccggcggcgccgccatcatgcgggagggccccaacctcttgaaagctgcgcgcaaagagcaatgcctggcg

SEQ ID NO: 87015 - DNA, 504 bp, Zea mays
  unsure (1)..(504): unsure at all n locations
aggtntnaaatggtggttacggggagggggggaaacagtagactctaccggttcggaattcccggctcgacccacgcgtccggcaagatgaagatcaagatgatccagatgaacgacatgatcctgactctgatatggaagtggatgaccacaaggctgtggaagagtcatcgaggaggagcattctaggtataaaaatcaagagagaatttggtgaaaatgcgaccagagtacaggatggtggcagggttgcatctgaacatagaggactggaacccatggcagaagacattggttcctccaagcaagctcctgcagatgccagtgcaatggccatcgatgaaccaagcaatgtcaagaatgaacctgagagctcaactaaattgcaaggccaagcagctgcgtaccacaagccatagctgcgaccatcaagagttgctgggtttctgctaggcaacttcctgcttgatttggacagtccaggatacagaagtgaatccgcat

SEQ ID NO: 87016 - DNA, 515 bp, Zea mays
  unsure (1)..(515): unsure at all n locations
tgtaggtgtgagagttttnttgagtgtctgttacacgacaaggaggggtaactgttcatcccgttcggaattcccggctcgacccacgcgtccgcgcctactggcgcatggcgcgcaagctctgcgccaccgagctcttctccgcgcgccgcgtggactcgttcgagcgcgtccgcgcccaggagatgcgcgcgctcgcgcgcggcctgttcgagtgcgccggccgcggcgccgtcgcggtcagggagcacgtggcgggcgccacgctgcggaacatcctccgcatggcggtcggggagaagtggtcgggctgctacggtagccccgagggcgaggcgttccggcgcacgctggacgaggcgttcgcggtcaccggcgcggtcagcaacgtcggcgagtgggtcccgtggctgggctggctcgacctgcagggctgcgtccgccggatgaagcgcctncgcgcgcagtacgaccgcttcttcgagcagatcctcgacgaccacgaccaccagaag

SEQ ID NO: 87017 - DNA, 520 bp, Zea mays
tggagtttggggagagtttatgagtgctggattccacgccgcacggggagacaatgttatacctcgttcggaattcccggctcgacccacgcgtcacgcgtccgcttatacaaaatggattgagtgagagggtagtacttagggtggacggtggattcaggagtggtcaagatgttcttattgctgctgctatgggagctgatgaatatggctttggttctgtagccatgatagctactggatgtgtcatggcacggatttgtcacacaaataattgtccagttggagtggctagtcagagagaagagcttcgtgcaaggtttcctggtgttcctggggatcttgttaactacttcctctttggtgccgaggaggttcgagctgcattagcccagttgggttatgagaagttggatgacatcattgcgcgaacagatgtgcttaacccaaagcacatctcattggtgaacacgcaacacattgatcttggatacctcctatcagatgctggattgcctga

SEQ ID NO: 87018 - DNA, 502 bp, Zea mays
  unsure (1)..(502): unsure at all n locations
gagtnnnnaaagctattacggggagggggtaacagtatgctctaccggtccggaattcccgggtcgacccacgcgtccgcgcgagtgagtgaacaccagccgtattgtcccgaccccgaccgatcctcgcctgctgcagccatggcgacctccgcggcgctctccaccgccgccaatcccacccagctctaccggtcccgcgctttgctgggcaagccggtgaaggggcttggcctgagcatgggccgcgagcgcgcccagcggagcattgtgtgccaggcggcgagcagcatctccgccgaccgcgtccccgacatggagaagcggaagctgatgaacctcctcctcctcggcgccatctcgttgcccaccgtcggcatggtcgtcccctacggcgccttcttcgtccctgccggctccgggaacgccggcggcgggacctacgcgaaagacaagctgggcaacgacatcacggtgggagccttggctcaacacgccacgt

SEQ ID NO: 87019 - DNA, 516 bp, Zea mays
  unsure (1)..(516): unsure at all n locations
ngtaggtttgggaagtttntttcagtgttgatacagaagaggganaagtaagtcttatacccgttcggaattcccgggtcgacccacgcgtccgagtgaggatagcgttacattaggtgatctggttgtgaaggatcaggaatttattgaagctacaaaggagccagggcttaccttcatggttgcaaaatttgatggcattcttgggctaggctttcaagaaatctctgttgggaatgcaacaccagtgtggtataacatggtgaaacaaggtctcatcagcgaccctgttttctctttctggtttaaccgacatgctgatgaaggagaaggtggtgaaattgtgtttggtggaatggattctagccactacaagggcgatcacacgtttgtcccagtcactcggaagggatactggcagttcaacatgggtgatgtcctggttgatggaaagtccactgggttttgtgccggtggctgtgcaaccatcgcagattctggaactttncttgcttg

SEQ ID NO: 87020 - DNA, 502 bp, Zea mays
gatgttggggagtttttccgcttgtactccccgaacaatagtgttatactcgttcggaattcccggctcgacccacgcgtccgccttgcccaccggctcccctaatcactatgctccgccaccgccgccgacttcgtacggcgggccctaaacccctttcctcgttcccttccgtctctcagttaggcacaatgatgctagctaataagcttggtggtctgctcaagaatgctacgagttcaaatatgtctgtctaccaagcaatcacatgcatgtcatcatccaagctctttgttggagggctttcttatggaaccgatgatcacagtctcagagacgagtttgccaaatatggacatgtcattgaagctaagattatccttgatcgtgagtctgggaggtccagacggttcggctctataacttacacgtcatttgaggaggcttctgctgccatcactgccatggatcgaaagactctggatggactgaacatacggtg

SEQ ID NO: 87021 - DNA, 510 bp, Zea mays
  unsure (1)..(510): unsure at all n locations
ngtaagtngtgaggttgaggtnnnntactgagatgattctctcgcctcaanccctntnngntttnggattccgggctactccctgaatgtccctctagatgatgggattgatgatgataggttaccagtccctttttaagccaatcatgggcaaagttatggaggttttccgccctggtgcagttgtgcttcagtgtggtgctgattccttgtctggggataggttgggctgcttcaacctctcaatcaaaggtcatgcggaatgtgttaggtatatgaggtctttcaacgttccattgttgctccttggtggtggtggatataccataagaaatgttgcacgctgttggtgttatgagacgggagttgctcttggccaagagcctgaagacaagatgcctgttaatgagtactatgaatacttcggtccagattacactcttcatgttgcaccaagtaacatggagaacaaaaatacacgacaacaactggatgatatacgatctaaac

SEQ ID NO: 87022 - DNA, 503 bp, Zea mays
  unsure (1)..(503): unsure at all n locations
agtnttagatgatgtggtaatgaccctggagaggagtaagtctcttcggaattcccggcccgacccacgcgtacgggcgacgaccgccagcagcggccggatcaccatgggcaacgacctgtggtacggcccggaccgcgtcaagtacctgggccccttctccgcccagacgccctcgtacctgaccggcgagttccccggcgactacggctgggacaccgccgggctgtccgcggacccggaggcgttcgcgcggaacagggcgctggaggtgatccacgggcggtgggcgatgctgggtgcgctgggctgcatcaccccggaggtgctggagaagtgcgtgcgcgtggacttcaaggagcccgtgtggttcaaggccggcgcgcagatcttctcggagggcgggctggactacctgggcaaccccaacctggtgcacgcgcagagcatcctggccgtgctcggctttcaagtcatcctcatgggcccttgtcagggcttcc

SEQ ID NO: 87023 - DNA, 558 bp, Zea mays
  unsure (1)..(558): unsure at all n locations
ggaganaatgttaggcgtatatctgagtactgacatagaaagcatgactcaccggtcttgaattcccgggtcgacccacgcgtccgcgacggccttcaccgtcaaggcggagggcatcgccaagaacgccccgcccgagttccagaagagcaagctcatgacccgcctcacgtacacgctggacgagatcgagggcccgctcgaggtcggctccgacggcacgctcaagttcgaggagaaggacggcatcgactacgccgccgtcaccgtgcagctcccggggggcgagcgcgtgccgttcctcttcaccgtcaagcagctcgtcgccaccggcaagcccgagagcttcngcggggcccttctcgtgcccagctaccgtgggctctncttnctcgaccccaaaggcccgnggggcttcaaccgctaccaaaaacgccgccggcctccccggccggggcagaaggttaccaaggagggacttcaagagggagaaccttaagaacgccggcttcttcaacggaaaaaacacttggggcgtcacaaagagcacccgggaac

SEQ ID NO: 87024 - DNA, 547 bp, Zea mays
  unsure (1)..(547): unsure at all n locations
nagtnnagcaagagttgtcattgataggggagaatatatcatncgctcctgaattcctgggtcgacccacgcgtccgcggacgcgtgggtggatgttctacgcaaaaatcctagtgttgcattgccagttattctaactagactcaggacaaaacaggaggagtggtcaaggtgtcgatcaaattccaacatagtttgggccgaaatatatgccaaaaattatcacaagtcacttgaccatcgtagtttctatttcaagcagcaagatacgaagaacctgagcacaaagtctctcctgacagagataaaagaaattaatgagaagaaaaggaaggaagatgatgtgctccttgccattgctgctggaaataggcggcctatagttcccaatatgtcattcgagtatatagactcggaaatccattgagatcttcattaaatcaataagtactcctgtgcttgagtctgcaactcttcagatcaattagataagtgatgaaagtatggacaacttttcttggaccaagttttggtgttcaagaaaaac

SEQ ID NO: 87025 - DNA, 555 bp, Zea mays
  unsure (1)..(555): unsure at all n locations
ngaggtttaaggcgaggatctgagatcttgaaaacgaaagcatatctcaccggcnttgaattcccgggtcgacccacgcgtccggtgcgagtggtcaatttcaggatagaatggttccattccgcttgaccttaaaataattttaggggtttgttttgttaattaagaaaaggtccccgatctcaacaaattacttctgattaccttcaaaattcatttggaagacccataccatttcccgattcatgggtaaatttactttgattctctatagaccaataatgtgagaccattaacacggttaaaagctaaactgcttgaagtccgggcaaaaaggggtactctttctacaactacattagtattagtctcgaaatgctttaaaccggaaattacctagtgtagaatttaacctgatttagaacactcatatcgattaaataatttgaacttattactagaagggcacgcaacccttttttccaatgccaaatcgacgaactatgtataaaaaaaggagaaatttttggatttgaaganaaataaagggatttt

SEQ ID NO: 87026 - DNA, 555 bp, Zea mays
  unsure (1)..(555): unsure at all n locations
gcattataaggggagcagtgcgtctgacgcctgcnnctaccgctcacttcgnacgnatttccggnctggagttaacgggtcgacccacgcgtccgcggcgtcggatgttgagtaccgctgcttcgtcggcggcctcgcctgggccacggaggaccacgccctccacaacgccttcagcacctacggcgaggtcctcgagtccaagatcatcctcgatcgggagacgcagaggtcccgcggcttcggcttcgtcaccttctccacggaggaggcgatgcggaacgccatcgagggcatgaacggcaaggagctggacggccgcaacatcaccgtcaacgaggcccagtcccgcggcggccgtggaggcggcggcggcggctacggtggtggccgtggaagcggcggctacggcggtggcgggcgccttgatggcggcggcggctacggcggtggcggcggcggctacggtggcggcggtggctacggtggtggtggtggccgctacggcggtggcaaccgtggcggttgttacggaaactccgacggaaactggag

SEQ ID NO: 87027 - DNA, 547 bp, Zea mays
gaggtatgcgtgattgatagtgcgcgggggggagattgtagtgctgcaccggtccggaattcccgggtcgacccacgcgtccgcgatcctgctcttagaaggtttggtcggtttgatcgtgagattgatatcggtgttcgagatggagttgggcgccttgaggttcttcggattcacacgaaaaacatgaagctggctgaagatgttgacttggagatcattgcgaaggatactcatggttatgttggtgctgatcttgctgccctttgtactgaagctgctcttcaatgcattcgtgagaagatggatattatagatcttgaggatgagacaatagatgctgagatactgaactctatggctgtctcaaatgatcatttcaagactgcacttgggacaagcaacccatctgctctgcgtgaaactgttgttgaagtgccaaatgtctcttgggaagatattggtggcctggaaaatgttaagagggagctacaggagactgttcaatatccagtggagcatccagagaaatttgaaaagtttgcat

SEQ ID NO: 87028 - DNA, 517 bp, Zea mays
  unsure (1)..(517): unsure at all n locations
aggaagaggggagtctgacctagtaggattaacggtatggtagtcttcgtccggatctgcatttccgacgccaagcgtcccatacagggcaaacggagttattactgttgggggtatacagagtaaccactgccgtgcgacagccgtggctgctaagtatctcaatcttgattgctacctgatactacgtacctccaagcttcttgtggataaggaccctggtttggttggcaatcttcttgtcgagagactagttggggcacacgttgatcttgtgtcaaaagaagaatatggaaaaattggcagtgtggctttagctgacctgctgaaaaaaaggcttctggaagaagggaggaagccgtatgtgattcctgttggtggatcatactcattgngaaacttgggatatatngaggcaataagggagattgagcaacanattcagcaatctgctgatgttcagtttgatgatatngntgttgcatgntgcantggtggaaccattgctggcctngct

SEQ ID NO: 87029 - DNA, 526 bp, Zea mays
  unsure (1)..(526): unsure at all n locations
gggngagagnnngggggaaggggtgtctttatgagggacgggagaaagattagagctcgtaccggtccggaattcccgggtcgacccacgcgtccggcggatagagcagcgagccatcgacacgatcgcgagcgcaagcacgtacgttgtcggaagctcaagttagaagaagcaccagtgcctgatcgatggcggcccaggctctcctctccggccggcagctgctgggccgccccgtgcagtcggccgtctctaggtcgtcggcgaggaaggcgcccttcgtcgtcagggccagctccagccctccagccaagcaaggtgccgacaggcagctgtggttcgcgtccaagcagtccctctcctacctcgatggcacgctgcccggcgactatggcttcgacccgctgggcctctcggacccggagggcaccggnggcttcatcgagcccaagtggctggcctatggcgaggtgatcaacggccgctacgccatgctgggcgcggtgggcgccatcgncccggagat

SEQ ID NO: 87030 - DNA, 504 bp, Zea mays
  unsure (1)..(504): unsure at all n locations
ggaaaggcgtgnctgatgaaggtggtgggtatgagtaatgctcgtaccggtccggaattcccgggtcgacccacgcgtccgcagcactgcgaccccccacagcggcgctacccgctggagaagggcgttcctgcaccgtggtggcctaccggcgacgaggagtggtggccggagcttggcattcccaaggaccagggcccacccccctacaagaagccccatgaccttaagaaggcctggaaggtgagcgtgctcaccgctgtcatcaagcacatgtcaccagacatagagaagatccgtcgcctcgttcgccagtccaagtgcctccaggacaagatgactgccaaggagatctcgacctggctggcggtcgtcaagcaggaagaggagctgtacctgaagatgcaccctggcgcacgcccgccggcatccgctggtggcatcgccagtgccatatctttcaacaccacctcaagcgagtacgacgtggacatangtgatgag

SEQ ID NO: 87031 - DNA, 551 bp, Zea mays
  unsure (1)..(551): unsure at all n locations
naggtgtggcagagatggtgtcacgagagaaggcgagagtgtactgcatcggctctgaattcccgggtcgacccacgcgtccgctgaagcgcgcgagagacagacgcgtatactcaggcggcggttgaggaggaggagaagaagaagaagaagatggcttcctccgcgtacgcctcatggtccaagcggtggatccgtcccgaggtgtacccgctgttcgtgccgatggccgtggccctgggtatctgctcgtaccagcttgtgcgcaacatcacgggcaaccccgaggtgcgggtgaccaaggagaagagggcggccggcgtcctggacaaccacgacgagggcgagaggtacgccatgcacggcctcaggaagttcgtccgcgggaagaagcccgagatcatggcttccatcaactccttcttcgccgaccctcccaaggacgattaagctagattccgtcatggatggatgagtatgttttaccaatcattagctgccgggggcgcgccttgattcgtagccatnggnggtacttttttttttggttt

SEQ ID NO: 87032 - DNA, 562 bp, Zea mays
  unsure (1)..(562): unsure at all n locations
tgagannnnatgcagagagtgtganctatgttgacgtgagagttagttgcatccgctcctgaattcctcgggtcgacccacgcgtccggtatgatgcgcaacattattcactttatcactttggccaaataagcctatggagccggccaactggtacctggatggcattataatacataccatggtataaaacaatcggtgggggatcctatttatcgcctatgatcccaaaaattcgaggatccctcagaatgcgaacaaaccttgttcggcaaattttaaaagactttatgacgaccttaccactgggttccgcaacctacaagatgaggcacggtgaactgctatagattttgtgtgagaccattattgcttctcaatgtgttataacgtacggaaattgtagatagctaccatgtatgagaattcttcttaccggtacttatctgtttggcaccactattttagtcattagtgctggattggcaccctgcttattttgacgtaccctttaatgctatagaatcgtaataagcgatgggcatgcttgtatttgaataaa

SEQ ID NO: 87033 - DNA, 543 bp, Zea mays
  unsure (1)..(543): unsure at all n locations
tagttatcgaagactggtgnttgaatcttgttcccattgcnatgagtctcaattatcggatcgagccacgcgtccaggatggtgctcaacattattcacttcaacactttgacatatcaggctgctgagcggccaacttgtactgtgtgccatattataacagtacagtctcataaaacatcagttggtggatctatactatctcctagtatccaaaaagttcgagaatcctgcacaatgcgaacaagctttggtcggcaagtttaagatactgtattacgaccttaccactgcgttccttaacctataagatgagtcacggtcaactgctgcacattttatctaagacattacctggctgccaaatgtcttataaggtacggtaaatgtagattgccaccatctattaaaatttttcttacctattcttatatgtttgccacaacttttttacccttcattgctcagaagccactttttttaatttttacttaccttttttgccattaaatcaaaatatccaatcaactttctttaatttaa

SEQ ID NO: 87034 - DNA, 547 bp, Zea mays
  unsure (1)..(547): unsure at all n locations
agggagccatggtgtgtgccatgcnatatgatcacgtcgcatngctcttccggtcttgaattcccgggtcgacccacgcgtgcggaagacaaacgccggcacgcgcacgcagacacgatggcgatctgcagcgcgcacacgaccacgggcctgcgctccccatgcacgaccgtctcgaacgcaggtctgaggcagaagcaagtcatcttcgtcaccagcaacaggaggagcggcggcggcaggaggcacggaggggcaaggagcttccaggtctcgtgctccgtcgacaagccggtggtgattggcctggcggcagactcagggtgcggcaagagcaccttcatgcgccggctcaccagcgtcttcggtggcgccgcggagccgcccaagggcgggaacccggactccaacacgctcatcagtgacaccacgacagtgatatgcctcgacgactaccattccctggacaggaacggcangaaggagaaaggtgtgactcgccttgaccctagggccaacaactttgatctcatgtatgagcaggtga

SEQ ID NO: 87035 - DNA, 516 bp, Zea mays
  unsure (1)..(516): unsure at all n locations
ggaggatagagatgctcntncngttgnctcagtccagtacagcantacacttctgattcggaatacccaccgcgacccacgcgtccgcgaatatatttgattgggggtctcgttcttgtgtagaactttatcacaaggggactgtaatataaatctatcgcatgagtcgcaagaagatgcaacgtccttggcggattgatgactttgacatgttcaaaaagagaatgcttactgataggaaggaccaatcatacaaaatagcactgctttttgttgataactcaggtgctgatgtggtccttggaatgcttcctttagctagggagcttttacgccatggaacagaggtagttcttgttgcaaattcgttgccggctttgaatgatgttaccgctaatgaacttccagaagttatagctgaaacctcaaagcactgtggtatccttcggaaagctgcataagctggtggattgatagtcgatgcaatggctggcatccaagatgatctcaaggata

SEQ ID NO: 87036 - DNA, 510 bp, Zea mays
  unsure (1)..(510): unsure at all n locations
gggaagagtgctgttttatgaggggggggggtaagagatngctcgtaccggtccggaattcccgggtcgacccacgcgtccggccgaccacacggccatccttgcggcgccggagacccgggtcaccacgctgcccaagggcctgcgcgtggccacggagtcgtccctcgccgcgcgcacggctacggtgggtgtgtggatcgatgcgggcagcaggtacgagaacgaggaggcggccggcgtcgcgcattttgtcgagcacatgctgttcaagggcacagggaagcgtagcgccgcgcagctggagcaggagattgaggacatgggtggccacctcaacgcttacacgtcgcgggagcagacgacctactacgccaaggtgcttgacaaggacgtgccccgtgcgatggaggtcctcgcggacatcctgcagaactccaatctcgaccaggcccgcattgaacgtgagcgcgaagtgatcctacgagagatggaagaggttgagggaca

SEQ ID NO: 87037 - DNA, 543 bp, Zea mays
  unsure (1)..(543): unsure at all n locations
nagtaagccaggattgctagatgcacggggggaggaatgtaccgctccggaattcccgggctctattcccattccaagtccgcgctcttggattcccgacgacgagctcggagcttcttcttccctgctcggtgctcgtggcaacgagctgccgccatgtctgccgggaaccagctcgccgctctggtcagcaacatgtacgccacgggtttgcttgacgatcagttccagcagctccagctgctccaggaccccagcgcccctgacttcgtctccgaggtcgtcacgctcttctgtcaggacggcgagcggatcatcgaagagctggccaaactgctggagaagcccaacgtggattttgacagggttgacgcctttgtgcatcagctcaagggaagcaatgcaaatattggtgctcaaaanggtaagaacactngcaatcagtttcgcgaattctgtcagcagaagagcagagatgggtgcctcaaggtactggagacaatgaggattaactctatgaacctgctggcaagtttcaaaccc

SEQ ID NO: 87038 - DNA, 550 bp, Zea mays
  unsure (1)..(550): unsure at all n locations
ngaggagtgcgtaagttgctagcgagtagggggaggatatcatcgcttccggaattcctcgggtcgacccacgcgtccgcgccctgctggtggttttccattcatcatcgatcttcctgcgtctctgaactttttctgctgggtctggtggccggtagcagaggttgctacacgtatatattctgaagaagagatcgagatgaccagcgtgtggaagaccaaggttctgcctggcctcaacaagatctttgacaaggatggcaagaaagctgcagctgcaggcttcttgaagtccttcaacaaggaggagattgacaaggagattgaggacaagaagacagagctggagcccaaggtcgtggaagcctacgaagcatctcctcctgaggtcaaggctctgttcaaggataagaagccagtcaaggtcagcaagaagaactcggctgcagtcaccaagttcctcgatgagctggctaagattgacttccctggagccaaggtggtgaacgaaggcggtggccaaatccggaaccttgcccttgtttctggg

SEQ ID NO: 87039 - DNA, 557 bp, Zea mays
  unsure (1)..(557): unsure at all n locations
gagggaggcagagagttgtgatgtccgttgttgggagggaagagatagtgctctaccggtccggaattcccgggtcgacccacgcgtccgagtgcccaaataaaatcccctaaacctagcgccgccgccgccatgcttcgccgtctggccggggtcgcccagcggaccttctcctcctcttccccgcacgccccgccgctggctgcgtcgggctacaccccgcgccgcgagtacggcctggtgcccatggtgatcgagcatacctcccgcggggagcgcgcctacgacatcttctcgcgcttgctcaaggagcgcatcgtatgcatccatggccccatcactgacgatacggcgtccctcgtcgtcgcccagctgctcttccttgaatccgagaaccccgccaagcccgtccacctctacatcaactccccggngggcgtcgtcactgcgggcctngccatctacgataccatgcagtacatccgntcccccgtcaccacgctctgcatcggtcaggccgcctccatggcgtcgctactcctngccgttggggcgac

SEQ ID NO: 87040 - DNA, 503 bp, Zea mays
  unsure (1)..(503): unsure at all n locations
gagaagcttntctgacagaaggggggaggagagagaaggctcgtaccggtccggaattcccgggtcgacccacgcgtccgcggacgcgtgggcggacgcgtgggcggacgcgtgggcggacgcgtgggtcgcttgggccgccgccgcgtccgcctagccaagcgcagcagccgccgcagcacatcgctctcttgatctcagccatggcggaggtggagcagcaacaggacacgccgaagctcttcaaccgctggaccttcgatgatgtccaggtgaacgacatctcgctgaacgactacctcgctgtgaacgcgacgaagcacgcgatgtacctgccgcacaccgcggggcgctactccaagaagcggttccgcaaggcgcagtgcccgatcgttgagcgccttacaaactccctcatgatgcacgggcgcaacaacggcaagaaggtcatggctgtccgcatcatcaagcataccctggagatcattcacctgctcaccgat

SEQ ID NO: 87041 - DNA, 549 bp, Zea mays
  unsure (1)..(549): unsure at all n locations
taggggagggagagtttgagcatcgaaacaaagaatagtatcgcaccgccnctgaattcccgggtcgacccacgcgtccgcaagcaagcagcgagtacatacatactaggcagccaggcagccatggcgcccaccgtgatgagtggcctggtcggccaccgccgtcgcttccgttccaggggctcaagtccaccgccagcctccccatcgcccgccgctcctccagaagcctcggcaacgtcagcaacggcggaaggatccggtgcatgcaggtgtggccggcctactgcaacaagaagttcgagacgctgtcgtacctgccgncgctgtcgacggacgacctgctgaagcangtggactacctgctgcgcaacggctggataccctgcctcgagttcagcaaggtcggcttcgtgtaccgcgagaaccttcactccccgtgctactacgacggncgctaactgaccatgtggaagctgccatngtcggttgaaacaaccccaccaagtgtacaaggagcctcaggaggccatcaaatcctacccggac

SEQ ID NO: 87042 - DNA, 555 bp, Zea mays
  unsure (1)..(555): unsure at all n locations
natgggttggcagagatgtgntgtaagtgagttggggggtaggatgtgagtgctctaccggtccggaattcccgggtcgacccacgcgtccgctcgacaccagcgtctaacgggatggcgagcctgaccatgccgacggtgccggcgtggccgcggcaggacgccatcgacctccacaaagcattcagagggttcggttgcgacagcacgacggtgaccaacatcctggcgcaccgcgacgcgacgcagcgctcgctgatccagcaggagtaccgggccgtgttcaaccaggacctgtcccggcgcatcgcgtccgagctgagcggccaccacaagcgggcgatgctgctgtggatcctggacccggtcactcgcgacgccaccatcctgaagcatgcgctcacgggcgacatcaccaacctgcgggcggccacggagatcgtctgctcccggacgccgtcgcagctgcagatcatgcgccagacgtaccgngccaggttcggctgctacgtcgagcacgacgtcaccgaacgcacgtcccgcgaccaccacggt

SEQ ID NO: 87043 - DNA, 541 bp, Zea mays
  unsure (1)..(541): unsure at all n locations
taggaagcgagtgttgagnccggctccacgctcaccatcgcaccgccatggaattcccgggctcgtagctcctctactcgcgagtcgccatgggcaagattaagatctgaatcaacggcttcggaaggatcggcaggctcntgaccggggtcgccctccagagcgaggatgtcgagctcgtcgacgtcaacgaccccttcatcaccacggactacatgacctacatgttcaagtacgacaccgtccacggccactggaagcacagctacatcacactcaaggactccaagacccttctcttcggtgacaagccggtcaccgtctttggcatcaggaaccctgatgaaatcccgtggggtgaggctggcgctgagtatgtcgttgagtacaccggcgtcttcactgacaaggacaangcttctgcacatcttaagggtggtgccaagattgttggtatctttgccccaacatagaccccccatgtttggtgtggtgtaaatgaggcaagttcaccttggatgttacattgtttcaaggcttc

SEQ ID NO: 87044 - DNA, 549 bp, Zea mays
  unsure (1)..(549): unsure at all n locations
taggagtgccgtagttgtgcctgcnacaccgacaggatagtaggactgcaccggtcttgaattcccgggtcgacccacgcgtccggtttcgaaagactctggcccagagctcgagttcacatgcacagccttccgcgaggaggtcacggtcgatgatatgctgatagtggagaaaacagacgacgacgacggagaagagaagttcccctacgagggccccgagttcaccgagctccctgtgaatgttcagaaaggcctgttcaagtacctggagcaaagaggggtaacgctgtcggctaccaactatatgcacgattacatggtgactaagcaggctcaggagtacatccggtggatgactaagctgaaggatttcgtggcgcagtgaggaacagcgtcgtgattcggcagcattgtttggttagcctagccttagcatgtgttacagccttacaggaacactacgactacaccgaattggccacactccccaaaaacanaaaagggggagcattgtatctgctttaatgtatctggaatagttgggac

SEQ ID NO: 87045 - DNA, 556 bp, Zea mays
  unsure (1)..(556): unsure at all n locations
nagtttttagcgtgagttgttatggaagtcgcggggaatattgtatngcttgcaccggtccggaattcccgggtcgacccacgcgtccgcaagtgctacgagaaccccaagcacaaggtcaccgctgtccccgccgacgaagaagagatctggggtgccactttcaaggtggtggaagggtctactgtcctgacggcgctgcactgatcgatcatcatcaggcggaggcgatgcgacgatacagaactttgtacatgcgtggtgggtgtaacatagtggctggcaacaagccatgctcatgcaaaccgatgaatctatctctgtatcatgcatcgatctcggttgcttgctagtccagactccagactccagacatggctatatatagctggtgctaataaataggagtataatcgtcatatcgatcggttgcgtgtggaatgccaatcaagtgtgtaatctgttccaaataacaaacctatgttcctccaaaaaaaaaaaaaaaaagggcggccgctctagaggatccaagcttactacgcgtgcatgccacgtc

SEQ ID NO: 87046 - DNA, 552 bp, Zea mays
gaggagtgccagtgttgtgttatcgcaacgggggaaatataagttagtgctgcaccggtccggaattcccgggtcgacccacgcgtccgcgcgagcggccccctttttttttttttttttttttttttttttactaaaacctatcgtctgagtatcaggctaatgacattttgtctttacaatactgtgatgcaataaaactgggcaaaccattgataccaccgtatacagtaactcaataccatccaattctatgaggattaaaaatgtattggaatggattggtatgtattttgacttgctataaatttaaaccaactcaataccatccaattcacttagattaacggtgaaacgaacaaggcctaaggggagtggtaacagtctaacatcattgtacaacagcctttccgaagcccatagacattgtgagacaagatccgtaaaccatgaatcgttcttcacttaggatgaccatcttagctggtcacgaaatggtaccgggaatccacaaatctctcaacgtcccagaggaacgatcctggagcttgt

SEQ ID NO: 87047 - DNA, 498 bp, Zea mays
  unsure (1)..(498): unsure at all n locations
ngggagctgtgttatggaggggggagtaagtgacactcgtaccggtccggaattcccgggtcgacccacgcgtccgctcttgtccgcaccatcgcctccgctccgattcgccgaatcggcgctggcgggcgagacgtggatctcgacggaggagactccgaccatcgctccatggaggccgcggactctgaatccgtcatctccaccttcacctgtccgcactgtcagcgggaggttccatcttcaaacattgcattgcacagcgcgcactgcgctcggaaccttcagaagtgcgaacattgcggagatatggttgccaggaagcttatggatgaacactacgatgaaaaccatgctccgatgaattgctcactttgcaaacacacagtagaacgcgagctatgggatcctaatacaggcatacaaggcccacaaaggatgctcgcgtgccaatactgtcagtttgaactgcctgcagttgatctttatgaacatcag

SEQ ID NO: 87048 - DNA, 501 bp, Zea mays
ggagggagcttctttgcatgaggtgagagaaaagaagactcgtaccggtccggaattcccgggtcgacccacgcgtccggccacacatgcctgagccatatcacgcctgcaggccccatgcatccatgcgtgcacgggatttcctcctaaagatcgatcgcagactttacttaggccgtcacaaggagaccctcctcagccgctagtaccagtagtcgtcgcgtttgcagctaggcagatctgagttagccggcggatccgatccgtgcgcgtgcgcagtgtgtgtgtgtgtgtgtgtgtgtgtgtgtgtcggtggagagatggccacagcttacgctcccatggcgagccaggtgatgaagagcagcctcgtcgtgcactcgaggccgaagggcctgtcaggcgctgctgcgctcacgaggcggcccggccggttcaccgtcaaggccatccagcccgagaaggcaacgtaccatgtggtgcagcccatcaacggcgacc

SEQ ID NO: 87049 - DNA, 542 bp, Zea mays
  unsure (1)..(542): unsure at all n locations
gagttaggcaagattgttaagagtagcgggaggagagatgctccgaatcctggtcgacccacgcgtccgctgaagtctgagttgttttttcacaggctatctaccacagaatctgtactgccttgactcatgttatggtgtccctccatgagctaaaattgttgcttcataaaatgagcgaacataatgtaagggctatggcagatgttgttatcaaccatcgaattggaactactcaaggatccaatggcatgtataatcgttatgatggcatcccagtatcatgggatgaacatgctgttacatcttgttctggcgggaagggaaacaagagcactggggataactttgatggggttcccaatatagatcatacacaaccatttgtacgcaaagatattatcgaatggttgatctggcttcgaaaatcagttggttttcaagattttcgctttgatttcacgaaaggtgcagttatgcanccaagtttgtaaaaaaatacattgaggaatcaaaacctcttttgcanttggggaatactg

SEQ ID NO: 87050 - DNA, 549 bp, Zea mays
  unsure (1)..(549): unsure at all n locations
agggatccattactgatttttctntaaccgcctcgctacnatccactatccggnatcgaatcaacccacccgtcacgcatagggacttggtatacaaccacctactttcacgcttctccaacatcaacactgacgactcgaanactgtcaaaatccaacaattgcttcactctcctcaatgtccactgatatcaaccccatccagtccgactcattcttcaacccggtcctaactagcactcctcatcccaaccttattatcctacaccacagtgtcaaaagaaatgcatacagcacaaccaagtttttcagtaaaacaagcatctcagcattcatgcgtacacaataaatccacatccacatcacataatgccatacatctacaaacatcgacctgtctaattttcttacacactttactacgattttcaacactacaaataccaacttttcaaccaccacaactcaatctattccttctctacatcacatcaaattatttcaatcctaacccttctacactgcaaaagaccaccctctatatttccc

SEQ ID NO: 87051 - DNA, 548 bp, Zea mays
gagtaagcatgattgttaagtagatggcggggggatagtatcactcctgaattcccgggtcgacccacgcgtccgtgacaatgtcaacttgaattgactaattcagttccgcctattccacattaatgggagtacatttatgttgctgctttacgaatatgatattttttggacatttctaataatagcaagccttattcctattttggtattttggatttcaggacttttagccccggttagtgaaggaccagagaagctttctagttatgaatcgggtatagaacccatggggggggcttggttacaattccgaatacgctattacatgtttgcgctagtttttgttggttttgatgtggaaacagtctttctctacccttgggcaatgagtttcgacgtattgggtgtatccgtttttatcgaagctttcatttttgtgcttatcctagttgttggtttagtttatgcatggcgaaaaggagccttggaatggtcttaactgaatattcagaaaaaaaaaaaaaaaaaaagggcggccgctctaa

SEQ ID NO: 87052 - DNA, 549 bp, Zea mays
  unsure (1)..(549): unsure at all n locations
aggtatgcagagttgtgtaatgaacgcggggagtattgtagtgctgcaccggtccggaattcccgggtcgacccacgcgtccgtagttctctgatcctcagcacttagcatcaagcttagcacaccggcgagatggcctgcacctggaccttcctgtccaccctcgccagcaggtccgcggcagccgatagcctgcgcagcgccgtgccgtccttcgccaagatcgtcaggttcttgcccgcgcaggcgcagatcagccgcaggcggcgcgcggcggtgctgcccacgccgagggcggcgctgtcgggcaccgagaaggcgccgtcgagcaagcacgagcgcgtggtcagggtgcacagcacccaggagttcgacgacgcgctcaaggccgncaagaaccggctggtggtggtggagttcgcggcgagcgacagcgaggacagcagccagatctacccgaccatggtgcaactcagccgaacctgcggcgacgtggacttnctgctgttcctgcgcgacgacgagtcggaggccaccgaggagctgttc

SEQ ID NO: 87053 - DNA, 549 bp, Zea mays
  unsure (1)..(549): unsure at all n locations
gagggcagcnagagtttgttatagtatagcggggaatattggagtgcttcaccggtccggaattcccgggtcgacccacgcgtccgatcacacctgtagtgctcttcccgtcatttgcatctccaccatggtcgctgtcactgtacccagtcagacttagttcttcacccatcttgttgtacacaagtccatggttcactgtccctgcaatgtatctgagaactcgcttcatagccaccaagtgttcttgtctgggatcctgcatgaaacgactcaaatatccaactgagaaggcgagatctggccttgtgttcatcagatagcgcagacttccaatcaggcttctgtacttggttgcatcaacctgaggtgaatcactgtccttcagcagcttgagccttgttccattggtgntcacttgngtacaggtgctcagtcctgcattctccaatactttcacagcataggatgtcntggatagcctgatgcattttggttcctggctcacttttaataccaagattaatggtgagtccacccaaatcattc

SEQ ID NO: 87054 - DNA, 503 bp, Zea mays
  unsure (1)..(503): unsure at all n locations
nggaaagactttgttatgtgggtgaggggaagagaaaactcgtaccggtccggaattcccgggtcgacccacgcgtccgcacttgccacagctaaaactggtgctaattaatttcagctcatcgcacgctgatcaccaccgcttcaccacagcgaaccaccatggaaagattctactacgtcgccgtggccaccttcgtgctcgtcttcctgctccaccacctcttgacgaggaagaagcagcaacgtctgccacccggcccgcggttcgcgtaccccatcctcggccacctccccttgctcaagaagccgctccagacctcgttcgccgacctcgtgtcgcgccacggcccaattattcacctgcgcctcggccgccgccacgccgtcgtcgtcggctcggcggcggtggcgaaggagtgcttctccggagagctcgacgtcgcgatcgccaaaccgccgcacttcccgtccgcgcgcgaggtcaccttcgactactcggtg

SEQ ID NO: 87055 - DNA, 563 bp, Zea mays
  unsure (1)..(563): unsure at all n locations
tgatagagtnaatgagtnttgctgtgtcnnnaatcgatcattcgataatatagtacgctctgaattcccgggtcgacccacgcgtccggacgcctgggagggtgagagccccgtccggtccggaccctgtcgcaccacgaggcgccgtcggggaagcgggagtttgggatgatcgaagacagcaaggcccgtacactggacgagaggatcaagaagcagaggcgtgcactgatgaacctacatcttcgtcgccacgacctgaccaaggaagtgaccaggacgctcatggacctggctgagtgatgcagtggactgagctgagtatcatctaagaattctattttatggtatttaagtgcactgatgatcgattaccagcaaatgttgtatgacctactcaagcatggtaggtgaatcttgattttgttatctatctggtgttcaagtttttagtggtcatggggtcagacatgtggcaccgtcagtgttaatcaggaagtgccgtattttccacttgttagtttttaggtttaaattgggtcccaaatttttagaataaaaaa

SEQ ID NO: 87056 - DNA, 551 bp, Zea mays
  unsure (1)..(551): unsure at all n locations
gagttaaggcaatgttgctatgtggacgcggggtggaagaggagtgctgcaccggtccggaattcccgggtcgacccacgcgtccgccatttcgctcccgcaagcaccgatttgtttactgctctctccgacgcgcggcggcggagctggctacgacgactgaaccatgtgcggcggcgcgatccttgccaaccttcgcgagccggcgccgcgccggctcacagagcgggacatctggcagcagaaaaagaagctcaagaggggcggcggcggcgggaggcgctcgttcgcggcggaggacgatgaggacttcgaggccgactttgaggtcttcgaggccgactccagtgattcagatttggagctcagggaggggactgacgacgacgtcgtcgagatcaagcccttcactgccaagaggactttctccagcgatggcttaagcaccatgactagtgctgtagcaaggtcagccaagaggaagagaaagaatctatacaggggtatccgncagcggccttggggcaagtgggctgctgagatcagagatc

SEQ ID NO: 87057 - DNA, 507 bp, Zea mays
  unsure (1)..(507): unsure at all n locations
gagatggggtnnnccatgaacatgattgtcttcgtcagactcnttccggtccggaattcccgggtcgacccacgcgtccggcaggagccgggcaaccctaccaaatcggccaaggccatgggaagggacctgagggtgcacttcaagaacacaagggagacagcttttgcgcttcgcaagctgcctttgaccaaggctaagcgataccttgaggatgttattgctcacaagcaggcaattcccttccggagatactgtggaggtgttggtcgcaccgcacaagcaaagtctcgccactccaatgggcagggtcgctggcctgttaagtcagccaggttcatattggatttgctgaagaatgctgagagtaacgctgatgtgaaaggcttggacgtggacaacctctatgtttcacacatccaggtgaaccaagcccagaagcagaggcgccgcacctaccgtgctcacggacgcattaacccttacatgtcctncccttgccacatt

SEQ ID NO: 87058 - DNA, 504 bp, Zea mays
  unsure (1)..(504): unsure at all n locations
agttagagcgttttgatcacgacacgaaagtagcgtattgctttaccggttttcggctcgacccacgcgtccgtgaggttcttcggattcacacgaaaatcatgattctggctgaagatgttgacttggagatcattgcgaaggatactcatggttatgttggtgctgatcttgctgccctttgtactgaagctgctcttcaatgcattcgtgagaagatggatattatagatcttgaggatgagacaatagatgctgagatactgaactctatggctgtctcaaatgatcatttcaagactgcacttgggacaagcaacccatctgctctgcgtgaaactgttgttgaagtgccaaatgtctcttgggaagatattggtggcctggaaaatgttaagagggagctacaggagactgttcaatatccagtggagcatccatagaaaaattgaaaagtttgcatgtctncttcaaagggtgtttggtttatgcccctctggctgt

SEQ ID NO: 87059 - DNA, 520 bp, Zea mays
gaggtttaggaggtgtctgttctcaggctagtacagtcactgctctaccggtctcggaattcccgggtcgacccacgcgtccggaggaaaagggcaaaagccaaaaggcatcaccgtcgcgacgacgatggcagcctcgctccaagccgcggccaccctgatgcagccggccaagatcggcggccgggcgccctttgcctcgctgccgtcccgcccgtcgtcgcaactcgcctgcagggcgttcggcgtcgacgccggcgccgccaggatcacgtgctccctgcaggacgtcgccagcaggtgcgtcgacgccgcgaagctcgccggcttcgcgctcgccacctcggcgctcctcgtctcgggcgcgagcgcggagggcacgcccaagaggctgacctacgacgagatccagagcaaaacgtacatggaggtgaagggcacgggcacggcgaaccagtgcccgaccatcgacggcggcgtggagtcgttcccgttcaaggccggcaagtaccagatgaag

SEQ ID NO: 87060 - DNA, 518 bp, Zea mays
gagggtagagggctctgattcacgccatacagaatagtagtattgctcgtaccggttcggagattccgaggctcgacccacgcgtccgcggacgcgtgggttcaagaatagattttatctatccggctgcactttagaatattcgtagtattttttttgataaataagaaaaggtgcacgatctcgacgaattacttctgaataacttcagaaatcatatggaagaaccatagcatttcgcgattcattggtaaatttactttgattctctatagaccaataatgtgagaccattaacacggttaaagctaaactgcttgaagtccgggcaaaaaggggtactctttctacaactacattagtattagtctcgaaatgctttaaacgggaaatagctagtgtagaatttatctgatatagaacactcatatcgataaaatagtttgaactatttactagaagggcacgcagtcctttttccaatgccaaatcgacgacctatgtataaaaaaaaaggg

SEQ ID NO: 87061 - DNA, 524 bp, Zea mays
tggtgttagtagggtaggcgggtctgatttacgcataacgaatcatcagcattgctcgtaccggttcggaattcccgggtcgacccacgcgtccgcttagggatcctaatttccagctggatgcattcagataccgaacgtctcggttgctacacagtgtcgctgctcggctacagaaacacagcaagacgcttggaggtttcggtgcgtggaatagatgtctgaaccatctgcttacgcttgcggaatcacacatcgagtccgtcatacttgcaaagttcattgaatcggtgaaaagctgccctgacgaaaaatcacgggaagtattgaagctggtatgcgacctttatgcgctcgacaggatttggcaagatatctgaacgtatcggaatgtatactacgttgccccaaacaaagctaaggctattcataagctgacagactacctgagttaccaagtgaagcttgtggcgcgagaactcgtctacgcatttgaccttgcagatcttatcatccgtgcccca

SEQ ID NO: 87062 - DNA, 511 bp, Zea mays
ttgtttagaggctgagatggttccgggtgctagctattcgttccggtctcggaattcccggctcgacccactcgttcgtgcatggctactgccccctattcgttctcgccgtatagctcctgcatcgcgagtgcggcttgcgccatccgctgcccgtggtgccgctgttctagaggctggccgacctgcagtcgacgccctcgttcatggagcgcctcttctcggcggactgatacatggaccggatcaagggcaagcagcaggtcatggtcggctactgctactccgacaaggactcctgccgactgtccacggcgtggcagctgtacagggcgcatgacgagatggcgcaagtggccaagcgctacggcgtcaagctcaccttgttccacggcctgggaggcaccgtggacaagggtggcggtcccacgcaccttgccatcctgttccagccgccggacaccatcaacggttccatccctgtgactgttcaaggccaggtcatcgtagt

SEQ ID NO: 87063 - DNA, 513 bp, Zea mays
  unsure (1)..(513): unsure at all n locations
naggggntaagtgtctatgaaaaaagacatgcggggaaaaagtaatactcttcnnnnntnnggnnaannnncnnnacccacgcgtccgccgggcctcttcttctgcgcccctcttttcccaaactgcggatagagcagcgagccatcgacacgatcgcgagcgcaagcacgtacgttgtcggaagctcaagttagaagaagcaccagtgcctgatcgatggcggcccaggctctcctctccggccggcagctgctgggccgccccgtgcagtcggccgtctctaggtcgtcggcgaggaaggcgcccttcgtcgtcagggccagctccagccctccagccaagcaaggtgccgacaggcagctgtggttcgcgtccaagcagtccctctcctacctcgatggcacgctgcccggcgactatggcttcgacccgctgggcctctcggacccggagggcaccgggggcttcatcgagcccaatggctggcctatggctaggtgatcaacggcccc

SEQ ID NO: 87064 - DNA, 511 bp, Zea mays
  unsure (1)..(511): unsure at all n locations
tggttttagaggattgatccagcaaggagcgtattgtatttctgttcggaattcccgggtcgacccacgcgttcggccggtccagcaggaaccagcccatggtcgacctgcaccatggccctttcctccacagccttggccggcaaggcagtgaacgtgccgtcgtctctcttcggctaggcccgcgtgactatgcgcaagacggctgctaaggcaaagccggcggcgagctccggcagcccgtggtacgggcccgaccgcgtgctctacctgggcccgctgtccggcgcgctctcgagctacctgacggtcgagttcccgggcgactacggctgggacaccgcggngctgtcggcggacccggagacgttcgccaagaaccgggagctggaggtcatccactcccgctgggccatgctgggcgcgttgggctgcgtgttcccggagctgctcgcccgcaacggcgtcaagttcggcgaggccgtgtggttcaaggccgggtcgcaaatct

SEQ ID NO: 87065 - DNA, 534 bp, Zea mays
  unsure (1)..(534): unsure at all n locations
ngggaggtagtaggtntttagagatgctcntgtaccgaggggcagggagaaaagtaaagctcgtaccggtccggaattcccgggtcgacccacgcgtccgcccgcatccataaacaagaaaaagaatagaaaacccccgctgccagcgacagaagaagaaggggtcccttctccttggttgcgttgcgcctccctcctgtctgcgtgcgtgcaatcgacgcataggcgcgggcgctcgcaccaccacgaccacgacccgatggctttcatgcgctcccgctcaaatgcatcttctggcatgggagttgctcctaacattagggagacattcgtcgagcttcaaatgaagaaggcattccgatatgttatcttcaaaatcgaagagaagcaaaagcaggtggttgtggagaagacaggggctactactgaaagctatgatgactttttggcctctctcccagagaatgactgccgatatgcgctgtatgattttgattntgttactggggagaatgtgccagaaaagcaggattt

SEQ ID NO: 87066 - DNA, 520 bp, Zea mays
  unsure (1)..(520): unsure at all n locations
nagggttagaagagctcgattcacgtatcaacgccatatatagcaagngctcgtaccggtccggaattcccgggtcgacccacgcgtccggcgtcgtccatgctctccgctaccaccgtgccactccagcaggggggcggcctgtccgagttctccgggctcaggagctccgcgtcgctgcccatgcgccggaatgccacctccgacgacttcatgtccgccgtctccttcaggacccacgcggtcggcacgagcggcgggtcgcggcgggcgccgacggaggcgaagctgaaggtggccatcaacgggttcggccgcatcgggcgcaacttcctgcggtgctggcacgggcgcggcgacgcctcgcccctcgacgtcatcgccatcaacgacaccggcggtgtcaagcaggcgttccacctgctcaagtacgactccacgctcggcatcttcgacgccgacgtcaagcccgtcggcgacaacgccatctccgtcgactgcaaggtcatcaaggtcgtgt

SEQ ID NO: 87067 - DNA, 519 bp, Zea mays
  unsure (1)..(519): unsure at all n locations
tgggttttagagagctcgtctactgaccccgccatatanagcnatagctcgtaccggttccggattcccgggtcgacccacgcgtccgacgctcaccgtcgccacagcttgtgctcgcgcaatggcactcgtgtccgcctcctcgtcctccaccaccgccgtcgcggcgctccccaggaatgggcagcagcgggcgtcgtcgtcgttgttctcctcctcctcctcttcctccttcctcgtcggcaagacgctgctgaggcaggccgaggcagcccggccgtcgttcgccgtgcgcgccgcggcggattccgacaggccgatctggttccccggcagcacccctccgccgtggctcgacggcagccttcccggcgacttcggctttgatccctggggcctcggatctgacccggagagcctgcggtggaacgtgcaggctgagctggtgcactgccggtgggcgatgctcggcgcggcgggtatcttcatcccggagttcctgaccaagatcggcgtcct

SEQ ID NO: 87068 - DNA, 509 bp, Zea mays
  unsure (1)..(509): unsure at all n locations
nagggtttnaggtgcttgttaaggaggggaggagtattgtgtatacctcttcggaattcccgggtcgacccacgcgtccggaagaaaaagcgcgtaactgatgaagacttagtagcgttattgtcggatgagatattgcagcctaaggttatttggtcccttgctgatgtacaggcaacatgtggtacacttgctttatctacggcaacagtgaaattgatagcaccagatggagaggagaaaatagcatgttcagtcggaacaggtccagtcgatgcagcttacaaggctgttgacaaaataatccagattccaacggttctccgagaatacagtatgacatcagtcacagaaggcattgacgcaatcgcgacaactcgggttgttgtcactggagatgtgagcaacaacgccaaacatgccctgactggccagtctttcaaccgctccttcagcgggagcggtgcatccatggacattgtggtgtccagtgtcaaagcttacctgag

SEQ ID NO: 87069 - DNA, 514 bp, Zea mays
agattagagtgatttgttccagccatgactgcatggctgtaccgcgtccggaattcccgggtcgacccacgcgtccgcacagctctccaccctcaaaccatggttgttgctgacttaggctgctcatctgggcctaacacactacgcttcgtatccgaggtgattggcatcatagctcgccattgcaaagaatatggccgacaacatgaccacacacagcttcagttcttcctgaatgacctgcccggaaacgacttcaacaatctcttccagctgatccagcagttcaataagtcgacggcaataaaccacaagagtgaggcagctgaggcactacctcctccgtgctatatctctgggttgcctggctcctactacactaggatcttccctagcgaaagtgttcaccttttccattctttgttctgccttcagtggcgctctgaggcaccagagggcatcaaataaacatgcctagatatctacatcacaaagactatgtcaccgtcgatgg

SEQ ID NO: 87070 - DNA, 527 bp, Zea mays
  unsure (1)..(527): unsure at all n locations
gggttggagtagaggttttaggagctgntctcacgaaaggggggagtaaagtatagctctaccggtccggaattcccgggtcgacccacgcgtccgagcagaccccagcagaagaagcgaagtcgtcgccggagcaggaggaagagcgagcagcaagatgtcgtggcaggcgtacgtcgatgaccacctgctgtgcgacatcgaaggccagcacctcagcgccgccgccatcgtcggccacgacggcagcgtctgggcacagtccgagaacttccccgagttaaagcctgaggaggttgctgggatgataaaggactttgatgaacctggaactcttgcaccaactggtctttttgttggaggtacgaagtacatggtgatccaaggtgaacctggagttgtcatccgaggaaagaagggcactggaggcattactatcaagaaaactggcatgtccttgattatcggtatctatgatgagccaatgactccagggcaatgcaatatggtggtggagaggctcggcn

SEQ ID NO: 87071 - DNA, 519 bp, Zea mays
tgttagtgtagagtttaaggctgtgtcagtaaaccgacttatagtatagctctaccggttcggaattcccgggtcgacccacgcgtccgctgttaagctagctatccttgcttactcccttcactttcttattgagagctctctggcgtgctgtaccggacgacaggggttggtaggtcgtaggtgtagctagctcggctagcgagcaatccggccaacagcacacgcgtcgatcgccatgccgagcggctgcggcaatggcgttggcagtagtcgcagtagagtgatgcccaacctgccggccggattgcgcttacaccagactgacgaggagctcatggtgcactacctcatgaggcaagccgacttcttgccgtgcccagtcctcatcatcgccgaggtcaacatctaccattgcaacccctgagatctccctgccaaggcattgatcggcgacaaggagtggttattcttcagacttcgggaccgcaagtacccaacggcgcccgacccaaccgc

SEQ ID NO: 87072 - DNA, 504 bp, Zea mays
  unsure (1)..(504): unsure at all n locations
agggtcaagggttaataagacacggggggaaagagaaaacttctaccggtccggaattcccgggtcgacccacgcgtccggttgaggaagttgatgagaatccaatctctccgttgcaatgcattatataaccacagcgctaccagattatctgtagtccctatccacgcatcacgctctcaggccctaaggtacctgtgtatacgattggggatagaagtgccaaatgttgcagtcctcgtgggtgaaagcggcgattcagattacgaggaactgctggggggtctccataggaccgttatcctaaagggcgagttcaacatcgccgcaaacaggatccacacggtgaggagataccccctgcaggatgtcgtcgccctcgatagctcaaacatcatcggtgtcgacggctacaccacggatgatctgaggtctgccctgcagcagatgggtatactggcacggtaacaccttncggagcttncgtttncacttacaggtcaa

SEQ ID NO: 87073 - DNA, 502 bp, Zea mays
gagggtaaagattgaaaaagcaggtaagtattgtcaacctcgttcggaattcccgggtcgacccacgcgtccgtgaagacgacctgcatgccgatgagaccataaatattttcgtaggaaacaattacaagacctacacttttggtggaaagaagagcatagtcctgtcgactgcgtcctggctaggcggcaagaacgacttccttggacacgcttatattgtcactggttcgttgagcatcatcatatcgattctctttgctctgatccatgtgaagtacccaaggccgcaaggtgaccccaattgcctatcctggaacaggaaaaacagcaatagctaaggggcccgcctgtacctaccatctatgtgggcgcctgtgtaccaacatgaatcagtattacacatctgtatctgaaacatgtcagacactgtgccgcaaggttaatcccagatgatgaaaagaaactgcgtacaccatgtccatcagaaatactaatttcc

SEQ ID NO: 87074 - DNA, 505 bp, Zea mays
  unsure (1)..(505): unsure at all n locations
tagtttagtagagtttgtctcgcacccgcnctatgcgactctttcggaattcccgggtcgacccacgcgtccggctgcccgcggtcttgatataccaaatgttgatttgattatccattacgaattgccaaatgagccagaaacttttgtccatcgttctggacgcactggacgtgctgggaaagcaggaactgcaatcttgatttaccagcagccaaaaaaggacagttaagtcacttgagcgtgatgttggttgcaagtttgagtttataagccctgcgtccatagaagaagtgctggagtcatctgctgagcatgtcattgctacattgcgaggggtgcacccagagtcaactcaataactttttggagcagctgagaaaataacagatgaactaggaccttatgcccttgcttctgcacttgcacatatgaattgattttgtcagacaccttattcacgttctttgatcagttatgagcagggatgggtgacattgctcct

SEQ ID NO: 87075 - DNA, 522 bp, Zea mays
  unsure (1)..(522): unsure at all n locations
ngtgtgtagtagttttagagtgttattaagaatcgaaagatacagtatagctcgttaccggttcggaattcccgggtcgacccactcgtccggcgccatagaatagagataaaagcattaccataggctcattcatcgaaacgcaaatgagagagacaggaaaagaaaaaagaattttgatcaaatcaatagaaggaaggatcccttacctgatttgaatttcatcctcctttaaataggatatgctctaagtcttcccatactttcctataatgactgcaacgattttctccattttgcgaattcctattttatttgaagtatattactatcatatacattatctaaatcgatccactttaaataaaatagaaaaaatcgaaagaaaaaaaaaaagaaagagtaaataataaaacaggatattctgtttcataattctgaaatagagttcttttttttagtattactcctcattaggatgtatatattaatcatcctattttaatatatattaatcatcct

SEQ ID NO: 87076 - DNA, 515 bp, Zea mays
  unsure (1)..(515): unsure at all n locations
ggaggggnnaataaggttggtttacggagatgggggggtaaaagggagagcttgtaccggttcggaattcccgggtcgacccacgcgtccgcgacgggctcctggtctgggactccatcaggcagtgggcgtccgagtacgtcaacgtgtactacaagtccgacgaggccgtggccgccgaccccgagctgagggcgttctgggacgaggtgcgcaacgtggggcacggcgacaagaaggacgagccgtggtggcccgtgctggacacccgcgacagcctggtggagacgctgaccaccatcatgtgggtcacctccggccaccactcggccgtcaacttcggccagtaccacttcgccggctacttccccaaccggccgaccaccatccggaagaacatgccggtggaggagggcgggccgggcgaggagatggagaagttcctcaagcagccggagacgacgctgctggacatgcttgccacgcaaatgcatgcccatcaagtcatgacgacc

SEQ ID NO: 87077 - DNA, 498 bp, Zea mays
  unsure (1)..(498): unsure at all n locations
ngtgnaaagattgatgaggggggggagaaatgtaaacctctccggaattcccgggtcgacccacgcgtccggagaattcttaattcatgagttgtaaggagggtcttatggcaccacaaaccggaactggaaccaggggtggatttaaagctggtggtaaaggttataaattggcttactacaccccggagtacgaaaccaaggatactgatatcttggcagcattccgagtaactcctcagctcggggttccgcctgaagaagcaggagctgcagtagctgcggaatcttctactggtacatggacaactgtttggactgatggacttaccagtcttgatcgttacaaaggacgatgctatcacatcgagcccgttcctggggacccagatcaatatatctgttatgtagcttatccattagacctatttgaagagggttctgttactaacatgtttacttccattgtgggtaacgtatttggtttcaaagccttaa

SEQ ID NO: 87078 - DNA, 506 bp, Zea mays
agggtcttagcgtgtatacggaatggggggaaaaaagtagtctctaccggttcggaattcccgggtcgacccacgcgtccgcgacggtcttccctcacaagattggcccagccgaggagacattgatgtgaaagatctgaaggttcggtatcgtcaaaacacgcctctaatcttgaaaggcattactgtgagcatcaaaggtggagaaaaggttggagttgtgggaaggactggcagtggaaagtcgactttggtgcaggctttattcaggatcgtggagcctgcagatggccatatcatcatcgatggtgtcaacatctgcactctggggcttcgtgatctgaggtctcgcttcggtgtgattccccaagaacctgtgctcttcgaaggaactgtacggagcaacatagacccagcacggcggtattccgaggctgagatatggcaagccctcgagtgctgccagctaaaggatatagtagcctcaaaaccggaaaaacttgatg

SEQ ID NO: 87079 - DNA, 499 bp, Zea mays
agtattaaaggtggatcacgagaggagggtattgtatctcctttcgaattcccggctcgacccacgcgtccgcagatggccaccgtcctgagcagcccctctgcgtccgccttctccttctcccttcgggccgggccagcgcccactaccggggccatgacccgtggcggtggcgccagcagcaggctgcgcgcgcaggccacctacaacgtgaagctcatcacgccggagggggaggtggagctgcaggtgcccgacgacgtctacatcctggactacgccgaggaggaaggcatcgacctgccctactcctgccgcgcggggtcctgctcctcctgcgccggcaaggtcgtctccggctccctcgaccagtccgaccagagcttcctcgacgacagccaggtcgccgacggctgggtgctcacctgcgttgcgtaccccaccttcgacgtcgtcatcgaaacgcacaaggaggatgaccttatcttctaagccaatt

SEQ ID NO: 87080 - DNA, 505 bp, Zea mays
  unsure (1)..(505): unsure at all n locations
gttttggaggttgatcacgcaagtatgtattctcaactcgtttcggaattcccgggtcgacccacgcgtccgccagagtatgctcgaggtggacacgcatcaacatgcggggatgtttacagttttggaatagtgcttctagagatgcttacagggagaaggccaactgatcatgtgtttgtggacgaactaaacattgtcaaattcgtggagaggagcttccctaataaaatattggatgtgattgatggttccttatgtgatgacttcaagagtgcccaaataaacatggtaacagagcgtgagacctaccgatgcttgttttctctactgcaagtagcactttcttgcacacgtgagattcctggtgaacgaacgaccatggaagaagcagctagcagaattggttcaatccagaccacatatgctagaggaattgaaaacgcaagcaggcattgaatngaaaccatctctatgttgagcgaacatacgtggggatggacat

SEQ ID NO: 87081 - DNA, 522 bp, Zea mays
  unsure (1)..(522): unsure at all n locations
gtnggtagtggagttttaggaggcttggaaacgaaggggcgggtactgtcatcccgtccggaattcccgggtcgacccacgcgttcggccgcaccagcacactcccgcagcagtagccgtcgccgccgtcgccgcagcccagccgtaggaaacaggaggaagatgccggcggggcacgggcttcggtcgcggacccgcgacctgttcgcgcggccgttccgcaagaagggttacatcccgctcaccacgtacctgcgcacctacaagatcggcgactacgtcgacgtcaaggtgaacggcgccgtgcacaagggcatgccgcacaagttctaccacggccgcaccggtcgcgtctggaacgtcaccaagcgcgccatcggcgttgagatcaacaagcaggttaatggccgcatcatcaggaagcgtatccatgtccgtgtggagcatgtgcagccctnccgttgcacagaggagttccgcttgaggaaagccaagaacgatcagctcaaggttgatgcccan

SEQ ID NO: 87082 - DNA, 523 bp, Zea mays
  unsure (1)..(523): unsure at all n locations
cgtaagtagaagagttttagtaatgtgtactaagtttaccgaacttattctttttatattcataatcacggacacgatccttcgtccgcgcgacaggcacactcccgcagcactttccgttgccgccgccgccgcagcccaaccggaaggacaggaggaagangccggcggcgcacgggccncggccgcggacccgcgaccagaccgcgcggccgcaccgcaagaagggcgacagcccgcacaccacgaaccngcgcaccnacaagaacggcgactacgtcgacgtcaaggtgaacggcgccgtgcacaagggcatgccgcacaagttctaccacggccgctaccgtcgcgtctggaacgtcaccaagcgctccatctgcgttgagatcaacaagcatgttaatggccgcatcatcaggaagcgtatccatgtccgtgtggagcatgtgcaacccttcccttgcacatgagagttccgtttgatgaaagccaagaacgatcagttcaaggttgatgcccaggc

SEQ ID NO: 87083 - DNA, 516 bp, Zea mays
  unsure (1)..(516): unsure at all n locations
ggggtagtggggttaaaggttngttacgcaagaaggtattgcataactgtaccggttcggaattcccgggtcgacccacgcgtccgccgttaccttctataatacgtctgcggtgtcaaaatttccctctcagccgtgttgctcgccgccgccccgccgtgttgctcgccgacaccgccccgccggcagccaaaatgccgttcaagaggttcgtggagatcgggcgagtggcccttgtaaactacggcaaggagtatggccgcctcgtcgtcatcgtcgacgtcgtcgaccagaacagggctcttgttgatgcccccgacatggttcgttgccaaatgaacttcaagcggctttccctgactgacatcaagattgacattaaacgtgtcccaaagaagactacactgatcaaggcaatggaggaagctgatgtgaaaagcaagtgggagaatagctcatggggcaagaagctgattgttcagaagaagagagcatcactcaatggacttgacaagt

SEQ ID NO: 87084 - DNA, 509 bp, Zea mays
gtttaagacttgagccacgcacagaagttattgtatagctcgtaccggtctcggaattcccgggtcgacccacgcgtccgtggacccagacgtagttcagctagcctcttctaccttcctctcccaccccgcctgcgcgctgccgcgagagctcgttcctgatggggaactgcgccggcgtggaggggaacgccgagatcaacccttccttcagtgcccccaattcctcagggaccgtcggttctaagagcgtcagcaagaacgcggccgacaccggcaccttcggcaccaagacgtccggctcgtcgtcgtcggtgccgtcaacccctcgtacggaggcggagatcctggagtcgtcgaatgtccgcaagttcagcttcggcgagctcaaaggctccacgaggaacttcaggccggacagcctgctcggggaggggggcttcgggtccgtgttcaaggggtggatggatgagcgcacgctcgcgcccgtgaggccgggcaccgtgatt

SEQ ID NO: 87085 - DNA, 507 bp, Zea mays
agtattagctgtgtatcatgtctcatgtctattagctataatataccggttcggaatataccggctcgacccacgcgtccgtagacccagacctcgttcagctagccttttctaccttcctctcccaacccgggggcgggcttcctcgagagctcgttactcatggggaactgcgccgccgtggatgggaacgcctagatcaacccttccttcagtgcccccaattcctcagggaccgccggttctaagagcgtcatcaagaactccgtcgactccgtcaccttctgcaccaacacttccggctcgtcgtcgtctgtgccgtctacccctcgtacggaggctgagatcctggagtcatcgaatgttcgcaagttcagcttctgcgagctcaaaggctccacgaggaacttcaggcctgacagcctgctcggacaagcgggctaaggtttcgtgttcaaagagtatgctggattaacccacgctcccgcccttgatgccgacctcctt

SEQ ID NO: 87086 - DNA, 505 bp, Zea mays
  unsure (1)..(505): unsure at all n locations
agtgtttaaaggctgtttctgtctactgtcatcagtactaacattccggtttcgaaaacccggctcgacccactcgtccggcgagatgaagatcaagacgatccatattaacgacatgatcctgactctgagggggagttggatgaccacaaggctgtggaagagtcatcgaggaggagcattctaggtataaaaatcacgagagaatttggtgaaaatgcgaccagagtacaggatggtggcaggattgcatctgaacatacaggactggaacccatggcagatgacattggttcctccaagcaagctcctgcagatgccagtgcaatggccatcgatgaaccatgctatgtccataatgaacctgagagctcaactaaattgcaaggccaagcatctgcgtaccacaagccatagctgcgaccatcaagagttgctgggtatctgctatgcaacttnctgcttgatttggacagtccaaaaaacagaagtgaattcgcaattc

SEQ ID NO: 87087 - DNA, 506 bp, Zea mays
gtgttaagacttgttcacaaaagaccaatattgtattactgtaccggttggaattccggctcgacccacgcgtccgaaagccaaaaggcatcaccgtcgcgactacgatggcagcctcgctccaagccgcggccaccctgatgcagccggccaagatcggcggccgggcgccctttgcctcgctgccgtcccgcccgtcgtcgcaactcgcctgcagggcgttcggcgtctacgccggcgccgtcaggatcacgtgctccctgcaggacgtcgccagcaggtgcgtcgacaccgcgaagctcgccggcttcgcgctcgccacctcggcgctcctcgtctcgggcgcgagcgcggatggcacgcccaagaggctgacctacgacgagatccagagcaaaacgtacatggaggtgaaaggcacgggcacggtgaaccagtgcccgaccatcgacggccgcgtggagtcgttcccggtcaaagggcggcaagtcccagatgatgaaccc

SEQ ID NO: 87088 - DNA, 511 bp, Zea mays
  unsure (1)..(511): unsure at all n locations
ggggnnatagggcgtgtatacagacgtgggggagaagaagtaagtctctaccggttcggaattcccgggtcgacccacgcgtccgatggccggcacccccatcaaggtgggctccttcggcgagggccgtatcaccatgcgcaagaccgtgggcaagcccaaggtggcggcgtccggcagcccctggtacggtcccgaccgcgtcaagtacctcggccccttctccggcgagcccccgagctacctcaccggcgagttccccggcgactacggctgggacaccgccgggctgtccgccgaccccgagaccttcgccaagaaccgcgagctggaggtgatccactcccgctgggccatgctcggcgcgctcggctgcgtcttccccgagctgctcttccgcaacggcgtcaagttcggcgaggccgtctggttcaaggccggctcccagatcttcagcgagggcgggctggactatcctggcaaccccaggctgatccacgcgcagagcatc

SEQ ID NO: 87089 - DNA, 511 bp, Zea mays
gggatgaggatgctcgtctaccgtataccgccattatagcatgctctaccggttcggaattcccgggtcgacccacgcgtccgcctgccgctaaccctagtccagcacccgagatctactccgcgcaaacagccatggcggagacgctcgacatgaccctcgacgacatcatcaagaacaacaagaagagtaacccctcatctcgcggggcccgccgcagccgcggcggatccgcccctggcggcgggaccggcggggtcgggccgaccaggcgcccctttaaaagggctgggaacaggcaggcgccctaccagccgccgaaggcccccgacgctgcgtggcagcacgacatgtaccctgcggtcgccgcaggaggcggcggcggcgggagggtctcggctctcgagacgggcgccaagctctacatctccaacctggactttggggtttcgaacgaggatattaaggagcttttctctgagctaggtgatttgaagcgtttttcgataat

SEQ ID NO: 87090 - DNA, 526 bp, Zea mays
  unsure (1)..(526): unsure at all n locations
ngggtggtagttggttttgcgtgtctgtttacccgaacgggaggaagaaagtaaaactcttaccggtccggaattcccgggtcgacccacgcgtccgcgcagcagcacgagcagcacgtcgtgccgctccaaccatctcgcttccgtgcttaggttcccgccgcgccatggcgtcgaccaaggctcccggccccggcgagaagcaccactccatcgacgcgcagctccgtcagctggtcccaggcaaggtctccgaggacgacaagctcatcgagtacgatgcgctgctcgtcgaccgcttcctcaacatccttcaggacctccacgggcctagccttcgcgaatttgtccaggagtgctacgaggtatcggccgactacgagggcaaaggagacacgacgaagctgggcgagctcggcgccaagctcacggggctggcccctgccgacgccatcctcgtggcgagctccatcctgcacatgctcaacctcgccaacctggccgangaagtgcanatcgggcaccc

SEQ ID NO: 87091 - DNA, 497 bp, Zea mays
  unsure (1)..(497): unsure at all n locations
gagtataaagatttatactagcatanagcactgcgactctttcgaattccggtcgcccacgcgtccggcaactacggccagcacggccggatctccattgtcaacgacctgtggtacggcccgggccagttcaagtacctgggccccttctccgcccagacgccctcgtacctgaccggcgagttccccggcgactacggctgggacaccgccgggctgtccgcggacccggaggcgttcgcgcggaacagggcgctggaggtgatccacgggcggtgggcgatgctgggtgcgctgggctgcatcaccccggtagtgctggagaagtgggtgctcgtggacttcaaggagcccgtgtggttcaaggccgtctctcagatcttctcggatggcggtctggactacctgtgcaaccccaaccctgtgcacgcgcatagcattccggccgtgctcggctttcaggtcattctcattggcctggtccaaggctttcccag

SEQ ID NO: 87092 - DNA, 516 bp, Zea mays
  unsure (1)..(516): unsure at all n locations
ggggtagagtgagtttntaaggntnnnaatcgaactcgttgcaatcgtcanaacnctcngnnntnggaactancgggcttgcgtgctcgcgcgcgagctctcgtggcgcagcctcaactaggcgaccgccgtcgtccctacgccacgtgcgcgagtctagcctcgtcgattgcttccccagtttaattgatctacaagcttcagaacatgttcaagaatacatttcagtctgggttcctgtccattctttatagcctcgggaccaagccattgcagatatgggataaggaagttgtgaatgggcacattaaacgaccccaagatgaagatatccaatctaatgtacttgaaattgttggaacaaatgtacagtcaacttacatcacatgcccagctgatccttctgctactcttgggattaagcttgcatttctggctattattgcgaaaaatcttaagaaatacttcacgtttgagatccaagttctggatgacaagaatgtccgacctcgattt

SEQ ID NO: 87093 - DNA, 515 bp, Zea mays
  unsure (1)..(515): unsure at all n locations
agtntagagagtttgttatagaaaggggaggggaagtgtacctgctcccggaattcccgggtcgacccacgcgtccgtggacgagtaccccgtcaccactgagctccatatccgctgcgtaaacatgatagctcacctgttgaacgcgccgatcaaggaggacgagaccgctataggggtcggaacagtgggatcctcggaagcgatcatgctngcaagtctaacggtcaagaaggaaatgccgaaccaggaggaaggaccagggaaaccgggttacaaaaccaacattggtaacggtgccaacggtcaagtctggttggaaaaggttgcaagggattttgaagtggaacttaaagaaggtaagctatcagaagggtactacgttatggaccccgtcaagggtggtgaaaaggtggaccagaacactatctgggtcgcggcgatcttggggtcgactcttaacgganagttccaggatttcaagcaagttaacgaacttcttaccgagaagaaca

SEQ ID NO: 87094 - DNA, 513 bp, Zea mays
agaaagaaggttagtccagctcagaactgattgctagcctcaccggtctgagttcccgggtcgacccacgcgtccgcgcggaccaggccaagctcgagctgcaggaggtcgtggatttcctcaagaaccccgacgagtacgagcgcgctcggagccaagatccccaagggttgtctcctcgtcggcccgcctgggaccgggaagaccctccttgcgcctgccgtcgcttgggaagcccgggtgcccttcttcttctgggctgcctcttaattccgcgagctcttcgtcggtgtcggtgccttcagggtgcgcgacctttttgagaaggccaaggccaaggcgccctgcattggcttcattgatgagattgatgccgttggaaggcaactcggtgccggacttggtgggggtaatggccagagaaagcagcccttaaccaactcttgacggaaatggatggctttgctggcaacagcggtgtcattgggcttgccggcaaccacaggcccgatc

SEQ ID NO: 87095 - DNA, 539 bp, Zea mays
  unsure (1)..(539): unsure at all n locations
gaggaggcagagcttctgcctgcntttcgccatatgatcgcangactcaaccggtctggagttaacgggtcgacccacgcgtccgccgtaggaccgtaccctcagctagtcagctttctccatccaccagaccagaccatacgagaccggaccagaccaatggccctgcgcctaccaatctcatcgtcccacgggctggcctccacgccggcgccaatctccacgacgacgtgccggccggccgtcttggcgacggccgcggcccagaagaggagcctgctgctggcgacggcctccgagacgaggggagtcgcgccggtgaggtccagcgggatcgagacgagcacggtgggtctgggatgtgaggccgtcaccgggcaggtcacggaggtcaacatggacaccttctggcccatcgtcgaggccgtcggcgacaaggtcgtcgttctcgacatgtacaccgaatggtgcgggccttgcaaagtgatggcttccgaatttcaggaaaagtctgagaagaacctgnatgttgggttcct

SEQ ID NO: 87096 - DNA, 523 bp, Zea mays
gaggggtagtgttcattatggggtagtttttgggatgaggaggcagtcaccggtccggaattcccgggtcgacccacgcgtccgggattcagcacgccgtccgttgggaagggagcttcgaggcggcccgccgcggctcgtcagccgggcaggctgagccaatggcacgggcccttgtggcgcgaacgccctaacgtgggtcggagcgggcagcgagcagaagcgccggttgctaacttggaattcttacttaaaaggcgttcaagtattaatccggaacacggaacctttgtgccaattgcctttcaacccaacgccgatgcccaatggttgaattaaccggttcttttggaactaggttgattacttttcacgaaccgttattaataagggtaaacttaacttgcttaacaacggtttaacccaacttaaggtccctattggtaggtggaccattcaacaattggtgaattctggttcaccatgataagaagaagcggccttcaatggtcaaaaagccacc

SEQ ID NO: 87097 - DNA, 545 bp, Zea mays
  unsure (1)..(545): unsure at all n locations
gagtaaggagatgttgtgccatgcnttttgtctatgatgcatgactcttctcgtattgaattacggatcgacccacgcgtgcgtttgtgtgtatgtatgagagtctttgtgcatttcgcgagcgcgaagggcacgcccggtaagctgtcctatgacgagagccagatcaaaacgtacatgtatgtaaagggcactgactcggctaaccagtgctggaccatcgacagttgcttcttgtcgttatcgatcaaggccggtaagaaccatatgaagaagctttgactgtaaccgacgtccatgaccgccaaggcaaagggcatctccaagtactcgtcttccaagttctagaagacttagctcatggcaagtctaatgtacacgctctactatactaaggagctgatcctaggaagaatctacagctcaattaacgtctattaaaaatacggcttgtactaaagcgtagtaactttcaattccatggaacaaatcacttacagttcctttaaatattcaaggtggtaggagaccccagcttgctccat

SEQ ID NO: 87098 - DNA, 503 bp, Zea mays
  unsure (1)..(503): unsure at all n locations
agtttgttctagctccgactgactcagcatgnacaaccggtcctgaattcccgggtcgacccacgcgtccgtctatagcaaccggtccaacactttcacgctctggcgctcagctctagcaatggctgcctgcacgatggcgatctcctccacggcgatggccggtacccccatcaaggtgggctccttcggcgagggccgcatcaccatgcgcaagaccgtgggcaagcccaaagtggccgcgtccggcagcccctggtacgggcccgaccgggtcaagtaccttggccccttcttcggcgagcccccgagctaccttaccggcgagttccccggcgactaccgctgggacaccggcgggcttgccggcgaccccgagaccttcggcaagaaccgcgagctggaagtgatccacttccgcttggccatgctcggcgcgctcggctggctcttccccgaacttgtcttccgcaaccgcgtcaaggtcggccaggccgtctggt

SEQ ID NO: 87099 - DNA, 546 bp, Zea mays
  unsure (1)..(546): unsure at all n locations
gaggcggcgagtagttgtngcctgccnctctgacgtatcatgcactaccntccggtctggaattaccgggtcgacccacgcgtccgcgcgatcgtgggcgcggacggcgttaactcttgcgtggccaaggacatgggcgcgggcgactgcgagtacgccatcgcgttccaggagcgcgtcaagatccccgacgacaagatggtgtactacgaggagcgcgcggagatgtacgtcggcgacgacgtctctcccgacttctacggctgggtgttccccaagtgcgaccacgtcgccgtcggcaccggcaccgtcacgcacaaggccgacatcaagaagtttcaggccgtcacgcgcctacgcgccaaggacaagattgagggcggcaagatcatccgcgtcgaggcgcaccccatcctcgagcactccatgcctaagagggtgtccgggcgggttgacgctggtggcgacgcccccgggtacctgcacaatgcttccggcagggcctttaacttgcgggtaataaccggccgatttccccgaagccat

SEQ ID NO: 87100 - DNA, 536 bp, Zea mays
  unsure (1)..(536): unsure at all n locations
ngagggatgagtagttgtgatgtgagatgggcagttaatgggatgcctctaccggtccggaattcccgggtcgacccacgcgtccgtgtcgttgtgagaattcttaattcatgagttgtagggagggacttatgtcaccacagacagaaactaaagcaagtgttggatttaaagctggtgttaaggattataaattgacttactacaccccggagtacgaaaccaaggatactgatatcttggcagcattccgagtaactcctcagctcggggttccgcctgaagaagcaggagctgcagtagctgcggaatcttctactggtacatggacaactgtttggactgatggacttaccagtcttgatcgttacaaaggacgatgctatcacatcgagcccgttcctggggacccagatcaatatatcttgtatgtagcttatccattagacctatttgaagagggttctgttactaacatgtttacttccattgtgggtaacgtatttggtttcaaagccttacgcgctctacggttg

SEQ ID NO: 87101 - DNA, 523 bp, Zea mays
  unsure (1)..(523): unsure at all n locations
aggtatgaaatagtggctattgaatattgggtaggacagtatcactccctgaattcccgggtcgacccacgcgtccggaatgtgcaaaggccgcgctggatccttctgtagaacttcatgtagaaggtgtggtcttaacggcgccagctattcatgttcaaccatctcatccaatcatcaaagtaagcaatagatgtttgtcttcaacgaaacaataccctngttgttttctgggtgacgccatccttctacacgaagtcctgaaggaaaatggcttgcattgtcaaattggtccttaatttaatgattaaatggaattaaccagcctttttaacctgccattcaagggaaaattgaattttccatgattcattaacattcctggttctattagatccagaaaccattttgtggtaagtcttacaccagaattgcttgttgacttgagcacaaaacccattcatttaatggtcctctttaaggcaattttaaggtttgaacctgattatgtgggtattaaccg

SEQ ID NO: 87102 - DNA, 521 bp, Zea mays
  unsure (1)..(521): unsure at all n locations
agtntttagatgttggcttacgctacagaactatctgagtacctctctggtctggaattcccgggtcgacccacgcgtccgtatacgaccaccgcgtcaaatgcatatgactttagctggaggacgtactgccatggcgagttcgcgagcccttcaccgcagtatgacacttgcttgggagacctgtatagtgttgcttggatggaagacagtgatttccacaatctgcgaactgaatctttcagccaccaatccacctggtccaaggttagaaaagtgttcaaggttccatcaacttttggttccaatttaatccattatggttaattgaattggaatgtaaaccttttgtttcgtaccattgccccaaaccttgttaccgttaccaccccttcattagagaccaattggttgccttaatcttaaaagcttgttattaacgccaaccttaactctggcaactattgccaaagttcccgaaattggccaaacagttacacttaaaaaaattgaactccgaa

SEQ ID NO: 87103 - DNA, 499 bp, Zea mays
  unsure (1)..(499): unsure at all n locations
aggagaatgtatacgaagtgggagaaggtagcctcaccggtcctgaattcccgggtcgacccacgcgtccgcgtcgtgctccattaatattggcagcaagctaggatcatcagcatctgagcttatatatgactagatcgatcggttgccaaatggcggggatgacagtcggcaataagctggcgctggctgcggtgctgctgtccccggcggcggccatggccacggcgcagcaggcctccggcgtgcgcgcaacttacaacttttacaaccggaagcaaaccaactggaacctaaaccgccgaggcgcttatctgccaacgtgggacgccagcaagccgttgtcgtggcccatgaagtacggttggacggccttgtgcgggcccgccggccccaccggccaggcccgttgccgccagtgtctttcgggagacaacactgnaacggggccgtccattcgggaggggatcgggcacacaggcagaaacggggctttgac

SEQ ID NO: 87104 - DNA, 506 bp, Zea mays
aggagaggtgtgtttatgccgggaggaactagttgtacctgctacttaaattcccggttcgacccacgcgtccgcgctgcgccgattcgccacgaagccgcactgttagatagggacgcggcccgttgtcctcggctggtacgcaatccttccgtcgctgcgaagctgatccctcgtgttcgccatggcccccagcgtcgccgtggaaaacctcaaccccaaggtcttggaatgggaatatgcagtccgtggcgagattgtaatccatgcttagcgcttgcagcaacaactacaaacacaaccagggtctcttccttttgatgagatccttgtttgcaccattgggaatcctaaatcccttggtcagcaaccttggacgttcttcagggaggttcttgctctttgggatcatccatgccttttggaaaaagaagaaaccaaatcattgttcaaggctgatgcttttttttggcaaagccattttttggaactattcctggacgggg

SEQ ID NO: 87105 - DNA, 523 bp, Zea mays
  unsure (1)..(523): unsure at all n locations
agggtntagaggtagttagtggattgggggggattgtattactcatccggtcttgaattcccgggtcgacccacgcgtccgcccacgcgtccgggccggcagggccaacgagtgggtggtgacggcgaagctcggcagcgccatgaagatgaaatcggctaacaaagcggggctcaggaagcagttcatgaggatatgggagaggctgcacgtcacggagctcggggtggcagccttcctcttctcctgcggctggtacgatcttgcgtacgggagggaccatntcttcatctaacctctcttccagtctgtcgcgtttttcatcgtcggcgtcggctacgtcggcaccatcgtcccgcagtcgtagcggaagcgtgtccagatcatccgcttctctctggttttcgcattgtgtcttgggtaagtttcgtagtggatgaccggtttgaggtaaagatcatgcatgcggtnctctcttccatccgtcttttttggggaccggccgtgtgtgcttcgtcgacct

SEQ ID NO: 87106 - DNA, 508 bp, Zea mays
  unsure (1)..(508): unsure at all n locations
gttagaggtgtactaagtatttgggttgatagtatgactcaccggtcctgaattcccgggtcgacccacgcgtccgactctttccggttcgttcccctacgcccgtttctctctcgtcgcgcaacatcagagcacaagcgaggaacccagtccagtcccgggaatggagtgcgtattgggcgtggttggccgcgacttcgtgctggtggcggccgacaccttcgccgtgcagagtattctcgtccacaagaccgacgaggacaaagtgatggtgctcgactcgcaaaagctgatgggcgcttcangggagccttgtgatcgggtgcaatttacggagttcatacagaagaaccttcacctgtaccagttncggaacaccattccggtttcacccgncggcgncgctcaacttacacgcggcgaaactcgncacaggccttcggcaggatccatatattgtcaatattactcttggttgttatgaataggatggtggtgctttcctctt

SEQ ID NO: 87107 - DNA, 507 bp, Zea mays
  unsure (1)..(507): unsure at all n locations
agatagagtgttgttacgaggggggagaggagtgttaccagtnccggaattcccgggtcgacccacgcgtccgaaaggattcagcacgccgcccgttgggaaggtagcttcgaggcggcccgccgcggcgcgtcggccgggcgggctgagccaatggcacgggcccttggggcgcgaacgccctaacgtgggtcggggcgggcggcgagcaaaagcgccggttgctagcttggattcttacttaaaagccgtcaatcataatccggcacaccgtaacttcgcgccaatggcttttcaaccaagcgcgatgaccaattgtgtgaatcaaccggtccttttgtactaaggtgaattactatcgcggcgcggtcattagtagggtaaaactaacctgtgttacgacagtctaaacccaggttaggttccctattggggggtgaacaatccaacactttgtggaatctggtttacaatgtttggaaaagccacctttgaaggttcaaaaag

SEQ ID NO: 87108 - DNA, 510 bp, Zea mays
  unsure (1)..(510): unsure at all n locations
naggaagaggtgtgttatggagcgagaaggtagtgctacacagctccggaattcccgggtcgacccacgcgtccgcaaaggattcagcacgccgcccgttgggaaggtagcttcgaggcggcccgccgcggcgcgtcgggcgngcgggctgagccaatggcacgggcccttggggcgcgaacgccctaacgtgggtcggggcgggcggcgagcaaaagccccgggtggtagcttggattctgacttaaaagccttcaatcataatccggcacaacggaactttgggccaatggcttttcaaccaagcgccatgaccaattgggtgaattaaccggtccttttggactaaggtggattactattgcggcgccgtcattaatagggtgaaacttacctgtgttaagaacggctaaacccaggttaaggtccctattggggggtgaacaattcaacacttggggaattctgcgttaccatgattggaagagcccccatttaaagatccaaaac

SEQ ID NO: 87109 - DNA, 510 bp, Zea mays
gggagaggtgtatcaagtagtggggtagatagtagtgactcaccggtccggaattcccgggtcgacccacgcgtccgctcgccatcacataaaaccagtgcaagcagaatcagcgcaatggcgagcagcaccatggccctgtgctccacagccttcgccggcaaggcagtgaacgtgccgtcgtctctcttcggcgaggcccgcgtgacgatgcgcaagacggcggcaaaggcaaagccggcggcgagctccggcagcccgtggtacggccccgaccgcgtgctctacctgggcccgctgtccggcgcgcccccgagctacctgacgggcgagttcccgggcgactacggctgggataccgcggggctgtcggcggacccggagacgttcgccaagaaccgggagctggaggtcatccactcccgctgggccatgcttggcgcgttgggctgcgtgttcccggagcttgttggcccgaaacggcgttaagttcgggcaaggccgtgtggt

SEQ ID NO: 87110 - DNA, 535 bp, Zea mays
  unsure (1)..(535): unsure at all n locations
ngagtaggcatagttgngatagtaattctgttagattgcangctcaccggtcttgaattcccgggtcgacccacgcgtccgggggacacagacagtgcgctccagctgttctcggaaatgctgaagggcgggatagagcccaacgtaatgagctacaccattgtcatccaatgcctcgggaaggcgcataggatacagcaagcggtggaggtgcttgagtccgggctggagaagggtctcaagcccgacgatcggctctgtgggtgcttgctctctgtcatcgctctgagcagcgtcgaggagatggaaatggtgctttcctcactggaaaaggtcaaccagaacctgggcaagctgatcagagcgctcggcgacgcccatgtcgactgtgacgatatcacaaatgagcataagagcgttgctaacggggctgtcgctgaagtacgccgtccttactgcaactgtctgatcgatatatgccccaaacagaggtttccttcacaaaaggccatgtggaggccttcaaatttggcac

SEQ ID NO: 87111 - DNA, 543 bp, Zea mays
  unsure (1)..(543): unsure at all n locations
nagggggganaagagcttgtgtacgattctgccgatagattgtatgcctcaccggtccggaattcccgggtcgacccacgcgtccgccgctccttcctccccctatctagctagccttcccgttcctgcatcgcggcggagatgggcgcgtccaccacgccgctcgcgtcggcggcggcgctgcttctgctgctgctcgcgccgctcgccgcggcggcggacagcatgtcgatcgtctcctacggcgagcggagcgaggaggaggcgcggcggatgtacgccgagtggatggcggcgcacggccggacctacaacgccgtcggcgaggaggagcgcaggttcgaggtgttcagggacaacctccgctacgtcgacgcccacaacgccgccgccgacgcgggcgtccactccttccgnctcgggctcaaaccgttcggcgaacctaacaaccgccaagaccgtggccacctacttcgccgttaggagcatgcccgaanagggagaggaggctcggtgacgggtacttgcccgccgacaacaaga

SEQ ID NO: 87112 - DNA, 511 bp, Zea mays
agtgagaagattgggcacgccaagtacgtagtactcaccgctcctgaattcccgggtcgacccacgcgtccggtttcacttgctgtgtgcaaagctggagctatggtgaagaagattcctctttaccagcacatcggatatcttgctgggaacaaaactctggtgctccctgtacctgcctctaatgtgattaatggatggtcacatgctggaaacaagcttgccatgcaggagttcatgatccttccaactggtggcttctcggttaaaggggccattgaaaagggaagtgaaggttaccaaaacctgtgctagcgctacccagaagcatttcaggcaaggatccacaaacgtttgggaataaaggtgttttagccttaaacttcaggaaaacaacaaagggcttgaacttttgaaggccagccataaaaaaggctggtttcactggaaaggcggccatgggaactggatcctggtggtttcaaaattttcgggaagaaagccaggcctt

SEQ ID NO: 87113 - DNA, 510 bp, Zea mays
agatgaggtccgtcacgatcgcgggtagatagtatgactcaccggtcctgaattcccgggtcgacccacgcgtccggagaagcgaaaccgacctttccccctcccccgtattccacctcgcggagatccagtccagccctggggtttcgccagcggcgagccaaactccacgagcgggggaagaggggaaagcagggacgacgagggggcagccatggggcagcagtcgctgatctacgcgttcgtggcccgtggcacggtcatactggccgagtacacggagttcaccggcaacttcaccaccatcgactcccagtgcctcatgaagctacccgcaagcaacaacaggttcacctacaactgcgacggtcacactttcaattacctcgtggaagacggattcacatactgggttgttgctgttgaatcggtgggccaacaatatccaatgcgttcatggataggggtaagggaggatttcacaaaaaggtattggtggtgggaaagctt

SEQ ID NO: 87114 - DNA, 563 bp, Zea mays
  unsure (1)..(563): unsure at all n locations
gaggtttaagatggttttngatgatgactanactatctattacctcacccatttgncaatcggacgagccacgcttgcgcccgcggagccatgctcggcgcgctcggctgtgtcttccccgagctgctctcccgcgacnactgcaagttctgcgaggccgactggttcaagatcgcctcccagatcttaatccttgaccgcatgaacttaccctgccagaatcagcctaatcaaaacaccttaatgcaaagcttaatatgctaccgtacaagcctgatccactgccacggtgacagaaccagcttccaaaaagctccagaacaatggggttgtttctgccaacattaccctaatttaaagcttatgcccggtttcaagttttacttataaaaccaatcattataattccctgatattatcccttccaaaggactatatctctttttattacaataccactatatctaaaaaatatattcccttaaaaaaaatattaatataaagaaaaataattttaattatttctattaccatttttatgaatattataacctcctactaaa

SEQ ID NO: 87115 - DNA, 537 bp, Zea mays
  unsure (1)..(537): unsure at all n locations
naggtagccagagttgtgcatgantctcgcatatatagttggactcaccggtcctgaattcccgggtcgacccacgcgtccgtgttcaagtacctcggcagcgcgctggcgtttcggagctggggcagcaaggacctggtgttccgcgtctgcctcgtgtccgccgtggccagcgcgctcttcaccaacgacacctgctgcgtggtgctcaccgagttcatcctcaagctggcgcggcagaacaacctgcccccgcagccgttcctgctggccctcgcctccagctccaacatcggctcctccgccacgcccatcggcaacccgcagaacctcgtcatcgccgtgcagagcggcatcaccttcggccagttcctcgtcggcgtcttcccggccatgatcgtcggcgtcgccgccaacacctgcatcctgctctgctacttctggaggtgcctctccgcgccggagaaggaccaggagggcggcgccgncgncgcggggcccgacgtcgccgtcgtggccgacgaggaggtcacctcg

SEQ ID NO: 87116 - DNA, 546 bp, Zea mays
  unsure (1)..(546): unsure at all n locations
ngaggaatgccagtagctgtgtgcctacnctatagatcacatcgcatgtcactcatctcggtctggaattcccgggtcgacccacgcgtccgaagaagacgagtgtcaagtgaacctgaaactttcggtgtcactggctggtagcctgagtgtgagtgagtgatcgagctagctgagctccgatcctcgctagctaggataccgccataccacaagtcttcttcacaagtttaggagtgacagcaacaagagatcgatggcctctgccaccgtgctcaagtcctccttccttcccaagaagtccgaatggggcgccaccaggcaggccgccgcgcccaggccgcccaccgtcttcatggtcgtccgcgcctccgcctacgccgatgagctcgtgaagaccgcgaaaacaatcgcgtcgccggggcggggcatcctggcgatggacgagtcaaacgcgacttgcgggaagcggctgacgtccatcgggctgaagaacacggaggccaaccggaaggcttaccgaacgctgttggtcacggtgccgtn

SEQ ID NO: 87117 - DNA, 547 bp, Zea mays
  unsure (1)..(547): unsure at all n locations
gagtaagggcgtgntnnnnncactgatncccctgaggagntactaaaggtncnctcnnnnnntnntnnaaggatgcctgcgacgcgtcggctcgtgtcgctcccctctttgcgccgcccctagatccggcaccgcccgctgctcgagcccgcggcccacgcccgcaggccgggaccggtgggcgcgcgccgggcagtaggagggagaggaagggcggcatggcggcgccgccggcgagggcccgggccgactacgactaccttatcaagcttcttctcattggggatagcggtgttggcaagagttgcctcctgttgcggttctctgatggttccttcactacaagctttattaccacaattggtattgactttaagatacggacaatagaattggatggtaagcgtataaagctacagatttgggatacatgcggccaagaacgcttncgtactattaccactgcgtactaccgtggagctatgggtatctggctgggttatgatgtcaccgatgaaatctctttcaacaacatcccgaaactgat

SEQ ID NO: 87118 - DNA, 517 bp, Zea mays
  unsure (1)..(517): unsure at all n locations
gaggtgttctgccacgatccgtcgnatgcgttacaggtccggaattcccgggtcgacccacgcgtccgaaaacccatatccctccggcataaacccaaaaagctgcaagcagtgtgaccaaaagcaggcctgacggcgatcctcggctctctagccaggcagcaggagatggagcacgacgtgcaccaccagcaccagcaggccatggagctgccgccggggttccgattccaccccaccgacgaggagctcatcacgcactacctcgccaggaaggccgccgacgcccgcttcgccccgcgcgccgtcggcgaggccgacctcaacaagtgcgagccatgggacctgccatcccgggcgacgatgggcgagaaggagtggtacttcttctgcgtcaaggaccgcaagtacccgacggggctgaggacgaaccgggccaccgagtccggatactggaaggcgacgggcaaggacagggagatcttcaggaagcaggggcctcggtcggatgaagaaa

SEQ ID NO: 87119 - DNA, 522 bp, Zea mays
  unsure (1)..(522): unsure at all n locations
agagggctcggggttgaaatttgttatagaagcaatgctccgcaaggctcggaattcccgggtcgacccacgcgtccggaagctattacagaagctgtctctgtggctgaaaggattaatacaaattatggttcttcaagttacaagcctgttgtcctaattgatcaccacataccattttatgaaaagattgcattctatgctgcgtctgattgctgtattgtaaatgctgtgagggatggcatgaacttagtaccatatgagtatactgtttgccgacagggaaatgaggagattgataaactcagaggtcttggcaaagacacccatcacacaagcacacttattgtttcggagtttgtgggttgctccccatctcttagtggtgctttcagggtaaatcctttgagtgtcgatgatgtggcngatgccttgtgccgtgcaactgatttgactgaattcgagaaacggctgccgcatgaaaagctttatcgctatgtcagtactcatgatngtgcttac

SEQ ID NO: 87120 - DNA, 517 bp, Zea mays
gttgtgagaggctgagttggttagcattaagtagtatcgcagtccggaatccgggctccacctggtgctccgttgcgaggtggtatgcagatctttgtgaagaccttgactggcaagaccataaccctggaggttgagagctccgacaccatcgacaacgtgaaggcaaagatccaggacaaagagggcatccccccagaccagcagcgtctgatcttcgctggcaagcagctggaggatggccgcaccctagcagactacaacatccagaaggagagcactctccacctggtgctccgcctccgtggtggtcagtaagccatggttcatttaagctgctgctgtacctgggtatctgcgtcgtctggtgccctctggtgtacctctatatggatgtcgtcgtctaataaacatctgtggtttgtgtgtcatgaatcgtggttgtggcttcgctggattaatggacctgttgtgtcctctgtgttgtacccaaaaactttctgcaacagtatggctt

SEQ ID NO: 87121 - DNA, 518 bp, Zea mays
  unsure (1)..(518): unsure at all n locations
aggggtcggtcntgctgcagcngcctacgtaccatcgcaggccggactnttgggtagacccacgcgtacgaagcgtattggcttccgatctactgaagcggttcagccgcagcagactgcgacgggcgacgaggacaacgcaggctctatacatgggatgccagctatgcggcgccgtgccccggttccacggcctgcggggctacgccgtgccgacgtccgcggtggtagagctgacctacgagaagctgatcacgaagtaaggtgtcctcgaagggcatccgctgccactacatccgctgcgccaccaacctggtcatggtgaccacgaccacgctatatgctgctggcatcgcggctgacgatggcgcagaacgatagccgttaggctacggcagggatcaagcttgacgcacgcgactgcggactgaccgagggagacacttccggaactagaatgggcgagacactgacctgcagaaccttacgacacaagctctttgttgggaatataactc

SEQ ID NO: 87122 - DNA, 532 bp, Zea mays
  unsure (1)..(532): unsure at all n locations
agcgtncatcaaagtggtgncatggatctacaaagtcaattatagccattgctcgtaccggttcggaattcccgggtcgacccacgcgtccgcaaaggagcgcggcggcccctcattccttcctcccacttctctcgcgctgcgctcgggtacctcgcttcgcattccgttcgagcaggggagcggccgtgagaagggaagggagggaattaaggcaagatgttcatcgagagcttccgcgtcgagagcccccacgtgcggtacggcccgacggagatcgagtcggagtaccggtacgacacgacggagctggtgcacgaggccaaggacggcgcctcccgctgggtcgtccgccccaagtccgtcaagtacaacttccggaccagcaccgncgtccccaagctcggggtcatgcttgtggggtggggaggcaacaacgggtccacgctgacggctggggtcattgccaacagggaggggatctcatgggcgaccaaggacaaggtgcaacaagccaactactacggntccc

SEQ ID NO: 87123 - DNA, 528 bp, Zea mays
  unsure (1)..(528): unsure at all n locations
ggtagtggagaggcgtgaggttgcaaaagcataaaagtaattatgcgcacggcccggaattcccgggtcgacccacgcgtccggataagcagcagctcatcacctgaaggagagcagcccggaggagggggagcaagcagcagccgtgcgtggaagaagatgtcgtacctgctgccgcatctgcactcggggtgggcggtggaccaggccatcctcgccgaggaggagcgcctcgtcatcatccgcttcggccatgactgggacgagacctgcatgcagatggatgaagtgctggcagcagtagctgagaccataaagaactttgcggtcatctaccttggtgacatcacagaggtccctgatttcaacaccatgtatgagctgtacgacccttcgacagtgatgttcttcttccggaacaagcacatcatgattgatctcgggactggganacacaacaagatcaactgggccctgaaggacaagcaagagttcatcgacattgtggagaccgtatacaggggcgcc

SEQ ID NO: 87124 - DNA, 533 bp, Zea mays
  unsure (1)..(533): unsure at all n locations
aggagggcgtgaggtgcgtgnctcgtagtctacaaagcaagtatagtattgctcgtaccggtccggaattcccgggtcgacccacgcgtccgaccagctgccattgccatctactgacctgtgacctccgcatttccaaacagcccgagcgagctagagctagcagagcggcaggcacctccctcctcaaggaacatggcccgcacgcagcagttggcagtagtggcgaccgccgtggtggccttggtgctgctggcggcggcggcgacctcggaggcggccatcagctgcgggcaggtggcgtcggccatcgcgccctgcatctcctacgcgcgcggccagggctcggggccctccgccggctgctgcagcggcgtcaggagccttaacaaacgccgccgcaccaccgncgaccggcgngccggctgccactgcctcaagaacgcgcgccgccggcgttaggggccttcaccgccggcaacgccgncagaatcccctccaatgcggcgtcagcatcccctacaccatcagca

SEQ ID NO: 87125 - DNA, 528 bp, Zea mays
  unsure (1)..(528): unsure at all n locations
agtaggcgtcaggtggtgccatcgacctaaaagctangatcgccatgntcgtaccggtccggaattcccgggtcgacccacgcgtccggcgagatacgaggctgtgattgatgcttaccttgatgggctagaggctggtggcttgagcgacttatcttgagttaccagcgtcgcatgcttctttgtcagtcgagtctacacccttatcgacaaaatgcttgagaagattggaacacctgaggcacttgccttgagagggaaggctgccgacgtacaggccaaactagcaaatcggctctaccagaagaaattctctggcccgaggtgggaagcgtctgccaagaaaggtgccaagaaacagatgttgttgcgggcgttcacccgtgtcaagaacccagcttatcccgacactctttacatcgacagtcttattggacctgacacggtcaacacgattcccgaccaagctctgcatgcattcatagaccacggtacttgttcgaggaccagtgatgcgaatgtgtccca

SEQ ID NO: 87126 - DNA, 528 bp, Zea mays
  unsure (1)..(528): unsure at all n locations
agaggcgtcagggtctgccatgcatctaccagacattgattgtactgctcgtaccggttcggaattcccgggtcgacccacgcgtccgctatagcaaccggtccagcactttcacgctcagctccagcaatggctgcctccaccggggcgatctcctccacggcgatggccggcacccccatcaaggtgggctccttcggcgagggccgcatcaccatgcgcaagaccgtgggcaagcccaaggtggcggcgtccggcagcccctggtacggccccgaccgcgtcaagtacctcggccccttctccggcgagcccccgagctacctcaccggcgagttccccggcgactacggctgggacaccgncgggctgtccgncgaccccgagaccttcgccaaagaccgcgagctggaggtgatccactcccgctgggccatgctcggcgcgctcggctgcgtcttccccgagctgctctcccgcaacggcgtcaagttcggcgaggccgtctggttcaaggcccggctccan

SEQ ID NO: 87127 - DNA, 516 bp, Zea mays
  unsure (1)..(516): unsure at all n locations
gggagctaggtttactcgtactacagaaatgtgtcccggtccggaattcccgggtcgacccacgcgtccggccgcgttggtggtggtatttataccaaggctgctgatgttggtgctgaccttgtggggaaggtagaaagaaacattcctgaggacgatccaagatacccagctgttattgctgacaatgttggtgataatgcttgagatattgctggaatgggatcagatctctttggctcatatgctgaatcatcatgtgctgctcttgttgtggcctctatctcgtcttttggaatcaaccatgaatttactccgatggtgtaccctcttctcgtcagttctgttggtattatagcatgtctcataacaacgctgtttgcaactgatttcttcgagataaaggctgtggatgaaatagagcctgctctcaagaaacagctcataatttccacaattgtgatgaccattggcattgcactaatcagttggcttggtcttncatacactttcact

SEQ ID NO: 87128 - DNA, 527 bp, Zea mays
  unsure (1)..(527): unsure at all n locations
agggagcgtggggttganctccgaatttgagggaattnatgcgccggtctcggaattcccgggtcgacccacgcgtccgcactcgtagagagaaggaaaaatatccccaaaccctagctcccgatctcgatggcgaaccctcgcgtcttcttcgacatgaccgtcggcggcgccccggcgggccggatcgtgatggagctgtacgccaacgaggtgcccaagaccgcggagaacttccgcgcgctgtgcacgggcgagaagggcgtgggcaagtccgggaagccgctccactacaagggctccaccttccaccgcgtcatccccgagttcatgtgccagggcggcgacttcacccgcggcaacggcaccggcggcgagtccatctacggcgagaagttccccgacgagaagttcgtgcgcaagcacaccgnccccggtgtgctctncatggccaacgccgggcccaacaccaacggctcccagttcttcatctgcaccgtcgcgaccccttggctcgacggcagcac

SEQ ID NO: 87129 - DNA, 519 bp, Zea mays
agaggctcggggtgggtatagccaaacagcaatgtcggacaggctccgattcccgggtcgacccacgcgtccgggtggagacaggatgccggctggccacggcctgcgctcgcggacgcgcgacctcttcgcgcgccccttccgcaagaagggctacatcccgctcaccacctacctccgcacctacaagatcggcgattacgtcgatgtcaaggtgaacggcgccgtccacaaggggatgccgcacaagttctaccacggccgcaccggtcgcgtctggaacgtcaccaagcgcgccatcggcgtcgaggtcaacaagcaggtcaatgggcgcatcatcaggaagcgtatccatgtccgtgtggagcatgtgcagccgtcccgctgcacagaagagttccgcctgaggaaggcgaagaatgaccagctgaaggcggatgccaaaaagcgcggcgagggtatcagcaccaagaggcagccatgggggtccaaagcccggttcatggtcgagggcaccac

SEQ ID NO: 87130 - DNA, 519 bp, Zea mays
agaggctcgggtgggcacgaaataaagttaggatggccaggtccggaattcccgggtcgacccacgcgtccgcgtctgtccgctacccctccccgaccagatcgctacgagacgccgcgcgatccgacgcaggccgacgccgacgacccctctcgccgccggcggccatggcgtacggcgaccgcgtcaccaccttcgaggactccgagaaggagagcgagtacggctatgtccgcaaggtctctggacctgtggttgtggctgatggaatgggtggtgctgccatgtatgaacttgttcgtgtcggacatgataacctcattggggaaattatccgtcttgagggcgattcagctacaatccaagtttatgaggaaacagctggactgatggttaatgaccctgtattgagaacaagaaagcctctttcagttgaattgggacctggaattcttggaaacatttttgacggtatccagcgacctctaaaaaccatcgctattaagtcaggagatgtgt

SEQ ID NO: 87131 - DNA, 524 bp, Zea mays
  unsure (1)..(524): unsure at all n locations
aggagctcggtctgncctagcctacacgatattantgtattgctcgtaccggtccggaattcccgggtcgacccacgcgtccgcaacttggtggtgacgtgccatttcagaaggtttatttacatcctatgattcggcatgcacatggccgaaagatgtcaaaatcacttggtaacgttgttgaccctcttgaggtgataaatggcatgtcactggatggtcttctgaaacgtttggaagaaggcaatctggatccaaatgaattaaacattgcaagagatgggaagacgaaggattttcctgatggcatagcagaatgtggtaccgatgcgctccgcttcgcactgatatcgtacacctcccaggttcttatggcacccagttgagttttttcatgtttaatgtagcatacatggctttatgcaatccccccctcttcagtctgacaggataaatcttgatatcaagagggtggttggatatagacaatggtgcaacaaattatggaatgccattcgttttgc

SEQ ID NO: 87132 - DNA, 524 bp, Zea mays
  unsure (1)..(524): unsure at all n locations
taggagctcggtctgncatgagtctcacgacattattgtattgctctaccggttcggaattcccgggtcgacccacgcgttcgcccacgcgtccgatgcaacgccatgtacttgttgatggcaaggtcaagactgacaagacctaccctgctgggttcatggatgtcatttccatccctaagacaatggagaactacaggctgctttatgacaccaagggccgcttccgtgttcacccaatcagggatgacgatgccaagttcaagctctgcaaggtgaggtccgttcagtttggccagaaaggcatcccctacctgaacacctacgacggtcgtaccatccgataccccgacccgctcatcaaggccaacgacaccatcaagatcgatctggagaccaacaagatcatggacttcatcaagtatgacgtcggcaacgtggtcatggtgaccggcgttaggaacaccgggcgtgtaggtgtgatcaaacacagtgagaatcacaatggccggttcgataccatc

SEQ ID NO: 87133 - DNA, 524 bp, Zea mays
  unsure (1)..(524): unsure at all n locations
aggagcttaggtcgacttagtactaaaagctatngttccgccacggcccggaattcccgggtcgacccacgcgtccggtcatctccatctccagctccagcgccgccttgctctgtgtgcttccgcccgctctgtgttgctattgctaaactagtgtgttctgtcgctatgggctccctggccaccgcggacgggccgttgccgccgctcaagtaccctcaggctcgccgggacgaagacatcgtcgacgactaccacggcgtcctcgtgccggacccttacagatggatggagcaggtggattcgaaggaggtgaaggagttcgtggacgcgcaggcggccgtgaccagcgccgtgctgtccagctgcgaccaccgcgggcgcctgcgcgggcagctcaccgcgctcttcgaccacccgcgcttncgcgcgcccttcaaagcgccgggcagctacttctacttncacaaacccggccttcgnccgnacagngcgctctacgtgcaacacgggctgggcggcan

SEQ ID NO: 87134 - DNA, 520 bp, Zea mays
gggactaaagtcgtgctatgaactacagaaaagttcgcaggtctggaattcccgggtcgacccacgcgtccgctttcacgctcagctccagcaatggctgcctccaccatggcgatctcctccacggcgatggccgggacccccatcaaggtgggctccttcggcgagggccgcatcaccatgcgcaagaccgtgggcaagcccaaggtggcggcgtccggcagcccctggtacggccccgaccgcgtcaagtacctcggccccttctccggcgagcccccgagctacctcaccggcgagttccccggcgactacggctgggacaccgccgggctgtccgccgaccccgagaccttcgccaagaaccgcgagctggaggtgatccactcccgctgggccatgctcggcgcgctcggctgcgtcttccccgagctgctctcccgcaacggcgtcaagttcggcgaggccgtctggttcaagggccggctccagatcttcagcgagggcgggctggactacc

SEQ ID NO: 87135 - DNA, 525 bp, Zea mays
  unsure (1)..(525): unsure at all n locations
agtaggctgggtctgataagtagctaccagctattatatgcattgctcgtaccggtccggaattcccgggtcgacccacgcgtccgaatttttaagttgggtgcctgctgctctcaaaatgcctgaggatgagttgattagccgtgccggtctggattcagctgtgtatctgaggatttacttggtcggacttaaaatatttgctccaatctcagttctagctttcattgttcttgtccctgttaattggaccaatgatactctgcaattctcgaagttagagcacagcaatgttgataagctttcaatatcaaacataccagttggatcaaaaaggtttatagcccacttggcaatggcgtatgttttcacattttggacctgctatgtactattacgtgagtatgaagtagttgcaaagatgagactgcgatttctttcatcagagaaacgcagaccagatcagttcacggtccttgtgcggaatataccgnctgatccagatgaatcaattagtgagcttgt

SEQ ID NO: 87136 - DNA, 527 bp, Zea mays
  unsure (1)..(527): unsure at all n locations
aggaggctcgagtgntgncaccgatctacacgacaattattgcattgctcgtaccggtccggaattcccgggtcgacccacgcgtccggccagagcaaagccgcagagatgatttggaatcgatcggatacgttcttctgtattggcttaggggaagtcttccttggcagggcttgaaagcagccacaaagaaacagaagtatgacaaaataagtgagaagaagctttcgactcctattgaggctctatgtaaatcccatcctgtggaatttgcttcctatttccactactgccattctctgacatttgatcagcgtcccgattatagtttcttgaggcatgtctttcgagaattgtttgagcgcgaaggctatcaatttgattatgtgtatgactggactttgctgaagtgtaagcaatcccagaaggctaaggttcagcaaggatgctctcatgatgcatgcgtaagcagccgtccagttgcaacatacgtggacaagcaccaagttggtggtgcacgcccaatt

SEQ ID NO: 87137 - DNA, 528 bp, Zea mays
  unsure (1)..(528): unsure at all n locations
agtaggcgtcgaagtgctgaactgaactacaagctatgatagcattgccgtaccggttcggaattcccgggctaactcaggggacacgagcgccatggccgtcacatcgaccgttgccgtcgtgctgtccccgccgtacgtgggcgggctccgcctggcgccgtctaccggccgggcgcgcgtgtcgttccgcgcggcgccggcgccggcgcggcggtccgtggcggcgcgcgcggagctgagctcggcgctggtgatcagcctgagcacgggcgtgtcgctcttcctgggccgcttcgtcttcttcaacttccagcgggagaacgtggcgaagcatgtgcccgcgcagaacggcaagacgcacttcgacgccggcgactagcgcgccaaggagttcgcggtcctgctcaagttcaacgaccccgtgggcttcaacctagtagacgtcctcgcctggggctcgctcggacacatcgtcgnctactacatcctgngacacattcagcaacggatacgatgcccactttt

SEQ ID NO: 87138 - DNA, 521 bp, Zea mays
  unsure (1)..(521): unsure at all n locations
agaggtnaagtcggatagtaagatgcggggaatattgtaaggctcggaattcccgggtcgacccacgcgtccgcgatcgcgagcgcaagcacgtacgttgtcggaagctcaagttagaagaagcaccagtgcctgatcgatggcggcccaggctctcctctccggccggcagctgctgggccgccccgtgcagtcggccgtctctaggtcgtcggcgaggaaggcgcccttcgtcgtcagggccagctccagccctccagccaagcaaggtgccgacaggcagctgtggttcgcgtccaagcagtccctctcctacctcgatggcacgctgcccggcgactatggcttcgacccgctgggcctctcggacccggagggcaccgggggcttcatcgagcccaagtggctggcctatggcgaggtgatcaacggccgctacgccatgctgggcgcggtgggcgccatcgncccggagatcttncgcaagatgggcatcattcccccggagaccgngctgncgn

SEQ ID NO: 87139 - DNA, 526 bp, Zea mays
  unsure (1)..(526): unsure at all n locations
aggagctcggttgtgcncctagttcataccgctattatatgcacgctcgtaccggtgcggcgacccacgcgtccggtcaaccaagtcgaagacttacacaaagaatggagaatcttgtacgataacatatgggtctgggcggatcgctggcttcttcagtgaggacaatgtgttggttggcaaccttgttgtgcataatcagaaatttattgagacaactcgagaaaccagccctactttcatcattgggaagtttgatggaattcttggtctcggatttcctgaaatttctgtaggaggagcccctccaatttggcagagcatgaaacagcagaaactggtcgcaaaggatgtcttctctttctggcttaatcgtgaccctgatgcatcttctggaggaggcgagcttgtcttttgtggtgttgaccccaaacactacaaaggggaccatacatatgttccccgtacacgccaaggctactggcacgttgacattggagaatcttataatggtggccactcaacc

SEQ ID NO: 87140 - DNA, 521 bp, Zea mays
  unsure (1)..(521): unsure at all n locations
agaggctcgaatctgttagtatctctcgaaagtatagtattgctctaccggtccggaattcccgggtcgacccacgcgtccggcttcgtgaagaggagaggcctgaaaccggccatcagagcgtatgacaagctggtcctcatagggtgcgagcctggccaggtcacctacgcatcagtcatcaacgtgtactgccggctcgggcgcagcgacagagcagaggccatcttctccgagatgatcgagcgaggcttcgacaggtgcgtggttgcctatggcaacatgatctcgatgtacggcaagatcaggagggcgtcggaagccacgaggctgctggccctgatgaagcagaaggggtgcgagcccaacgtgctggtgtacaactccctgctcgacatgcacggcaagctggggaactcgaagcaggccgagaagatctggaaggagatggtgcggcgcaaggtccggnccgaccggatcagctacacggncatcatnctggcgaacaaccnggcggngga

SEQ ID NO: 87141 - DNA, 501 bp, Zea mays
cgggagtgttttggccatgacacgtagctattctcaaccgcttcggaattcccggctcgacccacgcgtccgctcttcatcatgagaggaacactagagagtaccacaacaaatggtgggcaaactggttgcttcaactctaatgttctaaaaggtggagacttctgtggtgaagagctcctcacgtgggcccttgaccccacttcagcttcaaatcttcctggctcaactaggacagtgaagacgttgtctgaagtcgaagcttttgctctgagggctgacgacttgaagtttgttgccacacaatttaggaggctccacagcaaacaacttcagcataccttccggttttactcacagcaatggaagacctgggctgcttgcttcatacaagcagcttggcacagatactgtaagaagaagctggaagaggctttatatgagaaggagaagaggttacaagcagcaatttgtagtgatggcactacttcgctcagtctc

SEQ ID NO: 87142 - DNA, 523 bp, Zea mays
  unsure (1)..(523): unsure at all n locations
tggtaagtgcatctgcgcacgtaaagaggtaatagcatagctctaccggtccggaattcccgggtcgacccacgcgtccgctggtttcgctgccccgattcgccacgaagccgcactgtgagagagggacgcggcccgttgtcctcggcttgtacgcaatccttccgtcgctgcgaagctgatccctcgtgttcgccatggcccccagcgtcgccgtggaaaacctcaaccccaaggtcttgaaatgtgagtatgcagtccgtggcgagattgtcatccatgctcagcgcttgcagcaacaactacaaacacaaccagggtctcttccttttgatgagatcctgttctgcaacattgggaatcctcaatcccttggtcagcaacctgtgacgttcttcagggaggttcttgctctttgtgatcatccatgcctcttgtaaaaagaggaggacacnatcattgttgcacgctgatgctgactttcgtgcagaacagaatattgcgaacaattcttggagggggg

SEQ ID NO: 87143 - DNA, 510 bp, Zea mays
  unsure (1)..(510): unsure at all n locations
tgagcgatgtgactcgtcgacctggaacttgncacatcagctacattcctcgtaatacgggcacgacccacgcgtccgctcgtcatcgggagaggaacactagagtttacctttacaaatggtgggcaaactggtggcttcggctctaatgttctaaaaggtggagacttctgtggtgaagagctcctcacgtgggcccttgaccccacttcagcttcaaatcttcctggctcaactaggacagtgaagacgttgtctgaagtcgaagcttttgctctgagggctgacgacttgaagtatgttgccacacaatttaagaggcttcacagcaaacaacttcagcatacctttcggttttactcacagcaatggaagacctgtgctgcttgctttatacaagccagttggcacagatactgtatgaaaaaactgtaagaagctttatatgagaaggagaagaggtttcaagccccaatttgtaagtgatggcactactttgcttcaatctcg

SEQ ID NO: 87144 - DNA, 512 bp, Zea mays
  unsure (1)..(512): unsure at all n locations
gggagggggtctacgctacgcataggggatatttgcacagcttcggattccgggtcgacccacgcgtccgccgcgacgccaccaccacacgttcacggtagcgagagcttatcgtcgtcggcggcgaagatggtgtcgctgaagctgcagaagcggctcgccgcgagcgtcctcaagtgtgggaaaggcaaagtctggcttgaccccaatgaagtcagcgagatctccatggctaactcccgccagaacatccggaagttggttaaggatgggtttatcatcaggaagcctcagaaggttcactctaggtcccgtgcaagaagggcacatgaggccaagcagaagggaaagcactctggatatggcaagcgcaggggtaccagggaggctaggctccccaccaagattctgtggatgaggaggatgcgtgttctgaggcgcctgctccgcaagtaccgtgaggccaagaagatcgacaggcacatgtatcatgacatgtacatgaaggtcan

SEQ ID NO: 87145 - DNA, 502 bp, Zea mays
  unsure (1)..(502): unsure at all n locations
gagtaagggatctacctatgaaaaagaatatttcaccgcttcggaattccggtcgacccacgcgtccgctccggcatcgacgaggcgaaccccagcgcccgatccctctcctgctcccacgacccatggcggcggatatggcgtacgcgccgncgatgaaggcggcaaggccgggttnaggctggcatgatggatccgcacacaggatccgcatcacgctctcctccaagagcgtcaagaacctcgagaaagtctgcggggatctggtgaagggcgccaagggtaaggagctcaaggtcaagggccccgtgcggatgcctaccaaggtgctccacatcaccaccaggaagtctccctgtggagaaggtaccaacacctgggatcgctttgagatgaggattcacaagagggtgatcgatctcgtcagtacaccagacgttgtcaagcagatcacctcaatcaccattgaaccaggtgtcgaggttgaggtgactatcantga

SEQ ID NO: 87146 - DNA, 510 bp, Zea mays
  unsure (1)..(510): unsure at all n locations
ggagaggggtcntgctatgcatcgacgcagtcgctatactctccgttcggaattcccgggtcgaccacgcgtccgngcagtagccacagccagaacaccagctgacagcagcatcagcagggaggaacacgatgagcggcgccggtccggatctgcagctgccaccggggttccggttccacccgacggacgaggagctggtgatgcactacctctgccgccgctgcgccggcctgcccatcgccgtccccatcatcgccgagatcgacctctacaagttcgacccatggcagctcccaaggatggcgctgtacggcgagaaggagtggtacttcttctccccgcgggaccgcaagtacccgaacgggtccaggcccaaccgcgccgacggggctgggtactggaaggccaccggcgctgacaagcccgtgggcacgcccaagccgctggccatcaagaaagcgctcgtcttctacgccgggcagggcgcccaaggcgagaagaccaacc

SEQ ID NO: 87147 - DNA, 514 bp, Zea mays
  unsure (1)..(514): unsure at all n locations
tgtaggggatcggcctcacgcacgacgcaaatcgcataccgctccggttcggaattcccgggtcgacccacgcgtccgctactagctggtacacatactagccagtctgccagccagcttgccatggcgcccaccgtgatgatggcctcgtcggcaaccgccgtcgccccgttccagggtctcaagtccgccgccagcctccccgtcgcccgccgcagcaccaggagcctcggcaacgtcagcaacggcggaaggatccggtgcatgcaagtgtggccggcctacggcaacaagaagttcgagacgctgtcgtacctgccgncgctgtcgacggacgacctgctgaaacaggtggactacctgctgcgcaacggctggataccctgcctcgagttcagcanngctcggttcgtgtaccgngaggaactcaccttcccgggctactacgacggncgctactggaccatgtggaagctgaccatgtttcgcttgaccgacgccgcgcaagttttca

SEQ ID NO: 87148 - DNA, 511 bp, Zea mays
  unsure (1)..(511): unsure at all n locations
gaggagggtttcgcctatgacaagaaagtaggtgcaaccgcttcggaattcccgggtcgacccacgcgtccgggtgcatccatgctctggaagcacagacagtgattgcatttatgaacaacaccaagccactgaaggatgttgtgtttaagttggaggcccgtggtatcaaagccactgagctacatggagaccttggaaagcttgcaaggtcgacagttttgaaaaagttcaaggatggtgaattcagagttctcgttacgaatgagctgtctgccagaggactggacgtgccagaatgtgaccttgtggttaatctggaccttccaactgactccacacattatgctcacagagctggaagaactggacgtcttgggcggaaagggatcgtggtcacaatatgcgaagaaagcgagggatttgttgtaagaaaaatgcgcaagcagttagatgtggccatcaagccatgcgagttcacttgaagcgagctttgtgtncacaagggagg

SEQ ID NO: 87149 - DNA, 501 bp, Zea mays
  unsure (1)..(501): unsure at all n locations
aggaacggatctgcgccatgaacagggggtagnagtcatcctntcggaattcccgggtcgacccacgcgtccgctgcccactgcgcctaaaaatggccgtgtcccactgaaccaatcgtctgcacatcctgttgctgttgccgctcgctcgccgtgccgcaatggctacggccgtcgcctcccatacgttgctctcctccgccttcgctccgcgccactaccaccgccgcctgacccggaccgcgtccgtggggccgtgccgggccgccccggtgggactggccgtgcggtgcgagaagagcgacaagcagaagaagcagccgctcgccgcgctcgggccccgcgagcagcgcttcatgttcgagggagacgagctctgcggccccgacatatggaatacaacctggtatcctaaagctgcagatcatgtaactaccgagaagacatggtatgttgttgatgcaacagacaagatcctaggcaggctagcatccaccattg

SEQ ID NO: 87150 - DNA, 508 bp, Zea mays
  unsure (1)..(508): unsure at all n locations
gagattgggtgtnncggctgctactgaccttactgcagacctgtccgttcggaattccgggtcgactcacgcgtccgaggattcttgaagagatcgagcttcttttgcaccacaaggtcgaggatgtcttgcagctgcggatcaagctgcggctgcggctcaagctgcaagtgcggcaagaagtaccctgacctggaggagacgagcaccgccgcgcaggccaccgtcgtcctcggcgtggccccggagaagaaggccgcgcccgagttcgtcgaggccgcggcggagtccggcgaggccgaccacgcctgcggctgcggtagcagctgcaagtgcgacccctgcaactgctgatcacatcgatcgacgaccatggatatgattattatctatctaacttgaggtggtgggtgaacaataataagcgaagccgagctggctgacatacataggtatcgtgtggtgtgtgagagagagagagacacagagttcttcaagttgctatctc

SEQ ID NO: 87151 - DNA, 508 bp, Zea mays
  unsure (1)..(508): unsure at all n locations
gttagggggtctcgtacgacaggaagctatgttcagcactcttcggaattcccgggtcgacccacgcgtccgaaacgcgccattgacgcgcactcgtagtcttgactcttgcgtgcttccctcgtcttctcggacgttccgttccatcgccatggcggaccagcttagcgaggagcagattgccgagttcaaggaagctttcagcctcttcgacaaggacggcgacggttgcatcacaaccaaggagctcggaaccgtgatgcggtctctcgggcagaaccccaccgaggcggagctgcaggacatgatcgccgaggtggacagcaacggcagcggcaccatcgacgagcaggagttcctgggcctgatggcgcgcaagatgagggacgccgagtcggaggaggagctcangggagcgttncgcgtgttcgacaaggaccagaacggggtgatcctccgcgggcgagctccggcacgtgatgaccaancctcggggagagctctaaca

SEQ ID NO: 87152 - DNA, 504 bp, Zea mays
  unsure (1)..(504): unsure at all n locations
agtagagggttgtcctatgaaaggggggtatnatgcacactcgtcggaattcccgggtcgacccacgcgtccggtgaaagccgtggaggtggcaggatgttactggattcatgtcgatgtcatggacgggcgctttgtgccaaatatcacaattggacctttggttgttgatgctctgcgtcctgtgactgatcttccattggatgtacatctgatgattgtggaacctgagcagcgagtccctgattttatcaaggcaggtgctgatattgttagtgtccactgtgaacaaacatcgaccatccatttgcacagaacagtcaatcagattaaaagtctaggagcaaaagcaggagttgttttgaatccagcgactccactcaatgcaattgattacattcttgatgttgttgacctggtgttgattatgtctgtgaatcctgggtttggtggccagagctttatcgagagtcaagtnaggaaaattgcagaattgagaaggtt

SEQ ID NO: 87153 - DNA, 508 bp, Zea mays
  unsure (1)..(508): unsure at all n locations
gttagaggtattgagtattgacatggaagtaaagtgcaaccgcttcggaattcccgggtcgacccacgcgtccggtggaacgggcagaggatgtggctggtccggagaacgacctcgtacctctacggcttcgtcgacaccgtcagggactcgctggggctgtccaagatgggcttcgtggtgtcgtccaaggtgagcgacgaggacgaggccaagaggtacgagcaggagatgatggagttcgggacggcgtcgccggagtacgtgatcgtcgcggccgtcgcgctgctcaacctcgtgtgcctggcagggatggcggcggcactggatgtgttcttcgtccaagtcgctctctgcggggtgctggtgctcctcaacgtcccggtctatgaagccatgttcgtcaggaaggacaaggggaggatgccgttcccgatcacgctagcctncgttggctttgtgacgctggccctcattgtgccattcttttgactttgaggtgctaatn

SEQ ID NO: 87154 - DNA, 502 bp, Zea mays
ggaagaggtttcggctacgactagaagtaagttgcaccgcttcggaattcccgggtcgacccacgcgtccgggatttttggatattttttttgatttggcattattcaacaagaaaaaaaatttcgacgaattcctttttttttgaaaattatgtgataattatgagaaccaatcctactacttcgcgtcccgggatttccacaattgaagaaaaaagcgtagggcgtattgatcaaattattggacccgtgctggatatcacttttcccccgggcaagttgccttatatttataatgctttgatagtcaagagtcgagacactgccgataagcaaattaatgtgacttgtgaggtacaacaattattaggaaataatcgagttagagctgtggctatgagtgctacagaggggttgatgagaggaatggaagtgattgacacgggaactcctctcagtgttccagtcggtggagctactctcggacgaattttaacgttct

SEQ ID NO: 87155 - DNA, 507 bp, Zea mays
  unsure (1)..(507): unsure at all n locations
agaaagggctcgtgtacgagacggaaagtaggtgcaaccgcttcggaattcccgggtcgacccacgcgtccggaataggagaggcaggcgatgacgatggcgacgaaggcggcgtgcgtgctggcggtgtgggtgctcgtcgccttgggcctgtgcgacctgggctcaacgcgcgcgcccctgggcagcaagccgcagcgggagttcgactacttcgcgctctccctccagtggcccggcaccatctgcgcctncacccgccactgctgcgccaccaacggctgctgccgctcggagcctctccagacgttcacgatccacgggctatggccggactacgacgacgggacctggccggcgtgctgccggcggacccaattcgagatggacaagatattgccactggaagaagtgcttgacaagtactggccgtccctctactgctccaaatctggaacatgcttcagcggcaagggactcttctgggctcacgagtgggagaaacat

SEQ ID NO: 87156 - DNA, 505 bp, Zea mays
  unsure (1)..(505): unsure at all n locations
gaggagagggctgtctatgtatcacgacaatatagtcatgctctaccggttcggaattcccgggtcgacccacgcgtccgaagcaagctcgatctactactactactagctggtacacatactagccagcctgccagccagcttgccatggcgcccaccgtgatgatggcctcgtcggcaaccgccgtcgccccgttccagggtctcaagtccgccgccagcctccccgtcgcccgccgcagcaccaggagcctcggcaacgtcagcaacggcggaaggatccggtgcatgcaggtgtggccggcctacggcaacaagaagttcgagacgctgtcgtacctgccgncgctgtcgacggacgacctgctgaaacaagtggactacctgctgcgcaacggctggataccctgcctcgagttcagcaagctcgggttcgtgtaccgcgagaacttcaccttcccgtgctactacgacggccgctactggaccatgtggaagctgcccc

SEQ ID NO: 87157 - DNA, 504 bp, Zea mays
  unsure (1)..(504): unsure at all n locations
gtaagggttttgctatggggacgggggggaaatagtaacactctcggaattcccggggcgaggcaaaagcgcaaacgcgaccacagacagagcgcgcttcaaggccttttttttttttgagataacaaggaggagaggaggagatggcggtcacgatcacctgggtgaaggcgaggcagatcttcgacagccgcggcaaccccaccgtcgaggtggacgtgggcctcagcgacggcagctacgcgaggggggccgtacccagcggcgcatccactggaatatatgaggccttggagttgagggatggaggatctgattatcttggcaagggtgttcttaaggctgtcagcaacgtaaacaacattattggaccagcgattgttggaaaggaccccactgagcaggttgagattgacaacttcatggtccaacagcttgatggaaccttcaatgagtggggctggtgcaaacagaagcttggagcaaatgccatccttgcggttn

SEQ ID NO: 87158 - DNA, 511 bp, Zea mays
  unsure (1)..(511): unsure at all n locations
gagtnaggtggttnnccggatgaagtcccgaatatattatcactgctcgtaccgattcccgggatttggttgtattgtttgctcctgtcctagtgaatgcctatggttcaagttaccattttgtggtaattgtgttgtaaaaactatatgtatcgaattatattagtactgtagctttacacagttagttctttacggaagatttatgaggtgtttggtttgatgaatcactctatccaaaatgaagtggtgcatcatgggtccattcctcaaatttggggggatgacttcattccacatattagtactaaacaactaactatgaaggaataaggtgtgaatggataacttacttcattccacaaaccaaaccaaaaaatgaaggatgagaaaaataatggctatataaatctttaaaaccaacactccattaatctcttgggcttcctttttggaatataacagtcctatcattgaatgcttgtcagggaaggcttgtgcctaaccaaaa

SEQ ID NO: 87159 - DNA, 519 bp, Zea mays
  unsure (1)..(519): unsure at all n locations
tagttaagaggatcggngctccagcctcagcagcaaatcgctacgactgtaccggttcggaattcccgggtcgacccacgcgtccgtatctggtgcacatgcatagccgactgtaggtctttgggacaaggacaggtgcatgtgggcccaataacttagaggttctgccacatggcacaagaagaataagaaatatgcatttgtaccaaacgaaagagacatgatcaaaggtatataaatgagcaatgtgtgcaatttttcaatcgaagttctgagaatctaagatgtttagctcaaaaaaaaaaaaaaaaataaaaaaaaaagggcggccgctctagaagatccaagcttacgtacgcgtgcatgcgacgtcatagctcttctatagtgtcacctaaattcaattcactggccgtcgttttacaacgtcgtgactgggaaaaccctggcgttacccaacttaatcgccttgcagcacatcacccttttgccagctggcgtaataagcgaaaaggcccg

SEQ ID NO: 87160 - DNA, 508 bp, Zea mays
  unsure (1)..(508): unsure at all n locations
gagaaaagtgtttncggctagctcaagacacatacgcataccgtaccggttcggaattcccggctcgacccacgcgtccgaatggaaggaggtgctattaagttatttgattcccggtcatatgacaagggtgcattggacactttcttggttggtggagatacagctgaagtttctgacatcaaatttagcaacgatggcaagtctatgcttttgacaacaactaacaaccatatatatgttctggatgcatatggaggggataagaggtgtggctttagtttagagccatctcccaatgtaacaaatgaagctgctttcactccagatggtcaatatgtaatttcaggatcaggtgatggaaccctgcacgcttggaacatcaatacagtacaagagcattgaagtgggcccctcgtcgagcgatgtttgcaactgcatcaactgccctaactttctggattcccaaccaatcgaattaggatcaggtgcatggagaaagaagggt

SEQ ID NO: 87161 - DNA, 509 bp, Zea mays
  unsure (1)..(509): unsure at all n locations
ngagatgaggatctgctcatgaaacggggagtatgctcaacctcttcggaattcccgggtcgacccacgcgtccggaaaattctaccattctgattctttttcttttgctacaatacaatacacttttacattgtcattttccaacaataacactataatatttttgaaacaagaaatttggtcatgggacatagttgtttgtcctaatgcagctagctcatttgttttcctttgattcagctacaacatcagtagccacattcgttgttctggtagtcactgcactctatctttcactgaagaaaagatataatgaagcaatacatctcanagtagaaatgtttctcaaaacatatggcacatcaaaacccacaaggtacactttctccgaagttaagaagatagctaggcggttcaaggaaaaagtaagccaaggtggattcggaactgtttacaaagggcagctaccaaatggtgttccagtggcggtcaaaatgctagagaactn

SEQ ID NO: 87162 - DNA, 513 bp, Zea mays
  unsure (1)..(513): unsure at all n locations
aggtnaggtgttgcgcgctccgcatgggggtatgagcatactctcggattcccgggtcgactcacgcgtccgggggagctcgccgcgcggtggcgggaggtccacggcagcaacaactgggagggtctgctggaccccatcgacggcgtgctcctccaggagctcatccgctacggcgagttcgcccaggccacctacgacagcttcgactacgaccgcttctccccctactgcggcagctgcaagtacccggcgaagaccttcttccacgacgtcggcctcggcggcatcggctacgaggtcacccgctacctctacgccacctgcaacgacctcaagttccccaacttcggcatcaagacggccgncaacgccaagatgtggagcgagtccggcacgttcatcgggtacgtggccgtgtccaccgacgaggagacggcgcggctcggccgccgggacatcgccgtggcgtggcgcggcaccatcacccgnctcgagtgggtgggccgatct

SEQ ID NO: 87163 - DNA, 510 bp, Zea mays
  unsure (1)..(510): unsure at all n locations
agaaaatgggctcgntgctaggcgagggggggagaaagtatgctcgtccggttcggaattcccgggtcgacccacgcgtccgtcgatcacgacaagatggcatgcacaaacaatgcgatgagagccttgttcctcctggtgctcttctgcatcgtgcatggtgagaaggaagagtcaaagggcatcgatgcgaaagcgtccgggcctggtgggtccttcgacatcaccaagttgggcgccttcggcaatggcaagacagacaacacgaaggctgtgcaggaggcatgggcatcggcgtgcggcggcactgggaagcagacaatcctcatacccaagggcgacttccttgtcggacaactcaacttcacaggcccttgcaagggcgacgtgaccattcaagtggatggcaatctgctggcgaccacggacctaagccagtacaaggaccatggtaattggatcgagaatctacgcgtggataacccgttcatcancggcaaagggaacctt

SEQ ID NO: 87164 - DNA, 505 bp, Zea mays
  unsure (1)..(505): unsure at all n locations
agaaagtctgntgcatgagtaagaaatatagcacgctctaccggttcggaattcccgggtcgacccacgcgtccgcagaggcagcgacacgatcgcgagcgcacgcacgtaagcacgttgtcggaagctcaagttagaagaagcaccagtgcctgatcgatggcggcccaggctctcctctccggccggcagctgctgggccgtcccgtgcagtcggccgtctctaggtcgtcggcgaggaaggcgcccttcgtcgtcagggccagctccagcccttcagccaagcaaggtgccgacaggcagctgtggttcgcgtccaagcagtccctctcctacctcgatggcacgctgcccggcgactatggcttcgacccgcttggcctctcggaccccggaggcaccgggggcttcatcgagcccaagtggctggcctacggcgaggtgatcaacggccgctacgccatgctgggcgcggtgggcgccatcggcccggagatcttcggca

SEQ ID NO: 87165 - DNA, 510 bp, Zea mays
  unsure (1)..(510): unsure at all n locations
ngagaggtgtgatctgatctacgaatagaaaggtactgtcaaccgcttcggaattcccgggtcgacccacgcgtccgaggaaatgggactacttgagattaaacatggactgctacaagttgcagagacgttagattttcttcataacaatgctcatcttgcccatcgagctatatcacctgagacggtctttataacttctaacggatcttggaagcttggtgggtttggttttgctctttcagttgatcaagccacaggtggtttgacttcatcacagctattccattattcggactatgatgtcgaggatacagctttacctcttcaaccgtcgttgaactatactgcaccagaattggttcgaagtggagattctaaagttggctctgcttgtgatatgtttagctttggatgtctagcttaccatctggttgctcgtagaccacttctggactgccataacaatgttaaaatgtacatgaatgccttgacatatttaacaagtga

SEQ ID NO: 87166 - DNA, 518 bp, Zea mays
  unsure (1)..(518): unsure at all n locations
gagaaggtcnnntncncccacgaacatcgagcnctccgcaanactctaccggttcggaattcccggctcgactcacgcgtaagccgcggttcgatgctctgacgccgaatgagatgagcggcgggaggccccaattccggaaagtgcccatgccgcagcaccggttcgcgccgctcaagcgatgctggatggaaatctacaaacccgtatacgagcacatgaagatcgatatacgcatgaacctcaaggtactggactggagtctacccatattgggctttcttgttttatgtgaatgagcttttcgtgctctattccttgcaagaaccatagattgtatacttcagatcgccgtcaagaagctcaacccggagagcgtccaaggcctgcagagtggcaggataacatggagaacttcaaccctttcggtgagaatggagagtanggtacagggtcaccatagaatgttctgggctcttcagtactnctgtactaacaacggtacccaatgggggccc

SEQ ID NO: 87167 - DNA, 529 bp, Zea mays
  unsure (1)..(529): unsure at all n locations
ggggagagttatttgactcagtcgtatatgctngctctaccggtccggaattcccgggtcgacccacgcgtccggcaaccggtccaacactttcacgctcaggcgctcagctctagcaatggctgcctccagcatggcgatctcctccacggcgatggccggtacccccatcaaggtgggctccttcggcgagggccgcatcaccatgcgcaagaccgtgggcaagccccaaggggcgggcgtccggcagcccctggtacggccccgaccgcgtcaagtacctcggccccttctccggcgagcccccgagctacctcaccggcaagttccccggcgactacggctgggacaccgccgggctgtccgccgaccccgagaccttcgccaagaaccgcaagctgaaggtgatccattcccgttgggccatgctcggcccccttgggttgggttttcccggaatttgtttcccgaaccggcgtaaagttcggcaaggcccccttggttaaaggccggttcccaaaattttacc

SEQ ID NO: 87168 - DNA, 532 bp, Zea mays
  unsure (1)..(532): unsure at all n locations
ggaggaagtgctctcgttcgctgcctacgcnagtaacgcatgacgtaccggtccggaattcccgggagccgcatccataaacaagaaaaagaaaagaaaacccccgctgccagcgacagaagaagaaggggtcccggctggtgtggttgcgttgcgcctccctcctgtctgcgtgcgtgcaatcgacgcacaggcgcgggcgctcgcaccaccacgaccacgacccgatggctttcatgcgctcccgctcaaatgcatcttctggcatgggagttgctcctaacattagggagacattcgtcgagcttcaaatgaagaaggcattccgatatgttatcttcaaaatcgaagagaagcaaaagcacgtggttgcggagaagacaggggctactactgaaagctatgatgactttatggcctctcttccagagaatgactgccgatatgcgctgtatgatattgattctgctactgtggagaatgtgcacaacagcaagactttcttcaatgcctgggccccaatacattcccc

SEQ ID NO: 87169 - DNA, 525 bp, Zea mays
  unsure (1)..(525): unsure at all n locations
ggtnaaggaggcgtgngtcactcatagagattattgcactgctgtaccggtccggaattcccgggtcgactcacgcgtccgcttgatcctctggtccgtggccatggcgtcgtccatgctctccgctaccaccgggccgctccagcaggggggcggcctgtccgagttctccgggctcaggagctccgcgtcgctgcccatgcgccggaatgccacctccgacgacttcatgtccgccgtctccttcaggacccacgcggtcggcacgagcggcgggtcgcggcgggcgccgacggaggcgaagctgaaggtggccatcaacgggttcggccgcatcgggcgcaacttcctgcggtgctggcacgggcgcggcgacgcctcggccctcgacgtcatcgccatcaacgacacccgcggtgtcaagcaggcgtnccacctgctcaagtacgactncacgctcggcattttcgacgccgacgtcaagccccgtccgcgacaacggcatttccgtcgaccgccaggtca

SEQ ID NO: 87170 - DNA, 532 bp, Zea mays
  unsure (1)..(532): unsure at all n locations
agtgaagggaaatggcttctgtgctaccagcccaaaagtattatactacccgtccggaattcccgggtcgacccacgcgtccgatagcaaccggtccagcactttcacgctcagctccagcaatggctgcctccaccatggggatctcctccacggcgatggccggcacccccatcaaggtgggctccttcggcgagggccgcatcaccatgcgcaagaccgtgggcaagcccaaggtggcggcgtccggcagcccctggtacggccccgaccgcgtcaagtacctcggccccttctccggcgagcccccgagctacctcaccggcgagttccccggcgactacggctgggacaccgncgggctgtccgncgacctcgagaccttcgccaagaaccgcgagctggaggtgatccactcccgctgggccatgctcggcgcgctcggctgcgtcttccccgagcttgctttccgcaacgggcgtcaagttcgcgaggccgtcttggttaagggccgnttccaaacttaaagcag

SEQ ID NO: 87171 - DNA, 516 bp, Zea mays
  unsure (1)..(516): unsure at all n locations
ngagggaaagtgatctgtctacgagtagaagtattgtataccgttcggattcccggtggacgccagcgtccgcccacgcgtccggagaccaactagcgacatagaaagcacaatagtgtaccaacaatgtgagccaaaatattgtgcctccttatgctccttggtctttctgcaagtgctgctaccgcgaccattttcccgcaatgctcacaagctcctatagcttcccttcttcccccgtacctctcaccagcggtgtcttcggtatgtgaaaacccaattcttcaaccctataggatccaacaggcaatcgcagctggcatcttacctttatcacccttgttcctccaacaatcatcagccctattacagcagttacctttggtgcatttattggcacaaaacatcagggcacaacaactacaacaacttgtgctagcaaaccttgctgcctactctcagcaacagcagtttcttccattcaaccaactagctgcattgaactctgctgcttat

SEQ ID NO: 87172 - DNA, 522 bp, Zea mays
  unsure (1)..(522): unsure at all n locations
ggggggaggggctcnatcacgtatagagagtattgctcatgctgtaccggtccggaattcccgggtcgacccacgcgtccgatcatcgaggccgggttcccggcctcctcccccgacgacctcgacgccgtgcgctccgtcgccatcgaggtcggcaacccggcgccaggacccgccggggaggaggacgccgtccacgtgccggtcatctgcggcctctcgcggtgcaaccggagggacatcgacgccgcgtgggaggccgtgcgccacgcgcgccggccccggatccacaccttcatcgccaccagcgacattcacatgcagcataagctcaggaagacgcccgaccaggtggtcgccattgccagggagatggtggcctacgcccgcagcctcggatgcactgacgtcgagttcagccccgaggacgccggcaggtcaaatagagagttcttgtatcatattctaggggaagtcataaaaactggagctacgactctcaatattccggacactgtcngg

SEQ ID NO: 87173 - DNA, 520 bp, Zea mays
gagaaaagtggatctgtctatgaaagtacgtattctcaacccgttcggaattcccgggtcgacgccacgcgtccgcaaaagccggtccaactggggataaaacccatgtatccacacaagtcatgggtactcagtgatatgcagctccagagtacattgcaacagcttttaaagggagatgtcaataatacttcctagtcttctacaaagtgtgttggcaaaccaccaaaggagacctcatggctgtaattgaatccttccaaaaccagcgctgcaacgatctaaacctcctaaacaaagcaaacatagttctcatcctgaaaaaagaaggagcaaatgcatcacggactaccgccctatcagcctcatccactcggtggctaaggttataacaaagatcctagcactccggctagaacctctcatggataaactaatctcgcaatcacaaagtgagctattatcatcatgacgtggtgcatctggaggtgcagaaacaattggatcttcaacgaaattt

SEQ ID NO: 87174 - DNA, 539 bp, Zea mays
  unsure (1)..(539): unsure at all n locations
ggtaaggtgttgtgtatctgtaccactccgactatatgtttgctactaccggttcggaattcccgggtcgacccacgcgtccgaattttttggatttgaagaaaaaataaaaggaattctatcaatttttattttccattgagttagttagtttttcttaatgaaattgaaattattaactaacagagcaaacacaaataaagaaacaactttgctgaccatgatagatttttatctagttggaagagtcctcttaatattcatctagtcttatataagtttgggtatatagaaatacaaacagaaaagagaggatagaggataggctcattacataaaaaaaagatatggaaatagccataatacataacanaaaagaaaaaaaggagcgggagagccaaatgaatcgaaagattcatgtttggttcgggaagagatcataaaaattgtaaacttaatagcaagataatctactttcattaaaagatttattagataatcgaaaacaagagggtttttaatgctattctaaatttggg

SEQ ID NO: 87175 - DNA, 523 bp, Zea mays
  unsure (1)..(523): unsure at all n locations
gtaggagaggtgtctgtacctacgcctagagtacgctctaccgtccggattcccgggtcgacccacgcgtccgctacactacaccacacccacccgacgacgatcacacacgcagaagatcgagttcgttggatcgtgaccgtgacgcaggaagctataagctagccaagacaggaataataatggcggcgtcgacggtggcgagcctctctgtcccggtgacgacgacgaccttcgcggcggcgggcggcggcgacgtgctgatcgtcgtcccgaggagggcgggcgccaagcgcgtcgtctggttccccgcggcggcgcgccgcggcggcgggcggttggtcgccgtgcggtccagcgggccggccacgccgccggagatctccgacaaggtgtcggagagcatcaagcaggcggaggagacgtgcgcggacgaccagaagggcgacgccgagtgcgcggcggcgtgggacgaggtggaggagctcancgccacgggcagtcacgcccgcgacagacttta

SEQ ID NO: 87176 - DNA, 535 bp, Zea mays
ggttgggggtaatggtttcgtcgtacgaatagacatgtatagctacgctctaccggttcggaattcccgggtcgacccacgcgtccgtcttaattcatgagttgtagggagggacttatgtcaccacaaacagaaactaaggcaagtgttggatttaaagctggtgttaaggattataaattgacttactacaccccggagtacgaaaccaaggatactgatatcttggcagcattccgagtaactcctcagctcggggttccgcctgaagaagcaggagctgcagtagctgcggaatcttctactggtacatggacaactgtttggactgatggacttaccagtcttgatcgttacaaaggacgatgctatcacatcgagcccgttcctggggacccagatcaatatatctgttatgtagcttatccattagacctatttgaagagggttctgttactaacatgtttacttccattgtgggtaacgtatttgggttcaaagccttacccgctctacatttggaggatataccat

SEQ ID NO: 87177 - DNA, 523 bp, Zea mays
  unsure (1)..(523): unsure at all n locations
ngggggaaggctttgtctagaaggaagatgatgcacgctctaccggtccggaattcccgggtcgacccacgcgtccgatttgccgatggactcttggtggtgagcagcgagagatagagagggtgaaactacatgtgcatatacaaatacatgtagctagcggcgtagtactggatactgtgccatacggagtatagtatatatactcgctgtattagcagtagaggcggccgtgcagcgatcggtcgacgatggttgttgccgccatgagagacgagggagaggagggacgacgacgggcggtggtggcgatacgggactacgatcccaagacggaccgcgacggcacggaggccgtcgagcgggagtgcgaggtcggcccggccgccgccgccggcgggatgtcgctgcacgccgacctgctcggcgaccccgtcgcgcgcatccgccactcgccgcactacctcatgctggtagctgaaacgtncgggccggacaggccgatacggtccctttttcgggg

SEQ ID NO: 87178 - DNA, 516 bp, Zea mays
gaggaaagtgatctgtcctcatctggacgtattctctacccgtctcggattcccggtggacgccacgcgtccgatgatggctggggtgttgctgtgctggtgggtgtgccacataaggacgctgagttcagtacccacccgatgaacttgctgaacgaaaggaccctgaaggggaccttctttggcaactataagccacgcactgatctgccaaatgtggtggagctgtacatgaaaaaggagctggaggtggagaagttcatcacgcacagcgtcccgttcgccgagatcaacaaggcgttcgacctgatggccaagggggagggcatccgctgcatcatccgcatggagaactagatttcgctgtctagtttgtgatctggcctgggcttggggttaataaaagaggcaatgctagcctgccctttcgatgaggaagtacatacacgctggcgatggaccgcgcttgtgtgtcgcgttcagtttggcttttgccaagcaatatggtagctttcc

SEQ ID NO: 87179 - DNA, 521 bp, Zea mays
  unsure (1)..(521): unsure at all n locations
ggggggaaaggctgnagttatgaaggggggattattgctacgctctaccggtccggaattcccgggtcgacccacgcgtccggtatttcttgtgcctgcttattgctgggctagccgccggtctcttgctctgagagctggctccaggacgtacgtacgtacgtagatcgatccatcgatcgctagctagctgacgaccatggcgtccctctcctctgccgccatcaccgccccttccttcacggccgcgcccgctcgcgcagtggtcagcaggaggtccttcaccgtgcgtgcctctctccgcaaggccactgccaccgccgccgtggccgttgccgccagcgtcctgcttgccggcggcggcgccatggcccaggaagtgctgctgggcgcaggcgacggcgggctcgtcttcgagcccagccagttcaccgtcaaggccggcgacaccatcaccttcaagaacaacgccggctttccgcacaacgtcgtgttcgacgaagacgaggtgccgagcggcn

SEQ ID NO: 87180 - DNA, 523 bp, Zea mays
  unsure (1)..(523): unsure at all n locations
ngagaaaatggatctgtgtattgacgacgacagtaattctctacccgttcggaattcccgggtcgacgcacgcgtccgaaaaaatgaaaattctcttctatcaaagactatgaggatttacaacactaattatcgtgtcctcatcacaggcactccactccagaataatctccatgagctctgggctctcctcaatttcttgctacctgaaatatttagctctgcggagacctttgatgaatggtttcaaatatctggggaaaatgatcaacaggaggtggtgcagcagcttcataaggttcttcgcccattccttcttaggaggctcaagtctgatgtagaaaagggcctacctccaaagaaggaaacaattcttaaagttggaatgtctcagatgcaaaagcagtactatcgtgctctgcttcagaaagatttgggagggtattaaatccggtggtgaacgcaagcgattgcttaacattgccatgcagttgcgcaagtgctgcaaccatccatatttatt

SEQ ID NO: 87181 - DNA, 531 bp, Zea mays
  unsure (1)..(531): unsure at all n locations
gggggaggtttatctgtgcctacgctctatcagtangccctgtaccggtccggaattcccgggtcgacccacgcgtccgcaagaagggaaaaaaaaagagggacaggaaaaaaaatcattctcgtttcgctctccgcgagacgccgcccgaatcaatggagattagggctccgccgacgagcctgaggctcgcgccgccgcccgccgccgccagcttccgccgaaccccgcttaggacctccttccttcgcggcagcgtgtcacttaaagttgtgcaagtacggcagtcaaatgtcaacagatttaagtgcaatagcatacgaagtaacctctttgataggctaacaagggttgtcaggtcctacgcaaatgcagttctaagttcgtttgaagaccctgagaagattctagaccaggcagttctggagatgaatgatgacttgacaaagatgcggcaggccactgcacaggtcttggcatctcaaaagcggcttgagaataaatataaagctgcagaacaagcgtttttct

SEQ ID NO: 87182 - DNA, 528 bp, Zea mays
  unsure (1)..(528): unsure at all n locations
tgggagaaaggacttatgtccatgctcaagnagtaccgcatgacgtaccggtccggaattcccgggtcgacccacgcgtccgggtttggtgatgctgatgccggtgccgcatgtctatattgggtaggtgacgctgagggctcgttccccaatcagacttgttcggcctcttcgacggcgtgcccgtctccccgagctcattcgccatgccttcctcagcctccgcgagaggaggacgagggctcctcttgccggcggctgctgaggcggttgtggtgctaatattgggtgcagtggcgccagcggcgggttgttatccgcgcgtgttcagcttcggggactcgctggccgacacggggaactacccgttcgtctacggcaacgactctgggtctggcggggccgcgctccggccaccctacggcgagaccttcttccaccgcgccaccgggcgcgcctncaatgggcgcctcgtggtcgacttcatcgcggacacgctgggccttccgttcgtgcgaacgtatttgn

SEQ ID NO: 87183 - DNA, 515 bp, Zea mays
  unsure (1)..(515): unsure at all n locations
gagagaaaggctgngtaactgctcagccgtgatgcatgacgtaccgtctcggattcccgggtcgacccacgcgtccgcaaagtccaggtcttctacctcaagatgaagggtgattactacaggatattggtttggaggagttggcccccttatcctattaggctttggctgatgcttaacctctcaactctcctgatcttgctcgtggtctccccaaacaggtttggtttctagatccattacatggagtgtgtagtgtttttcctcttttttgcaatcctcatgatgtgccaccaggtctggtctaatcgttcccctaaaattgtggcctataatcagcttcttggcctatgatccttttgtatgtaggcaaagccaacgaatgaaagggactcactcgcagcaacaaccaanaagctgatcacgcattctccttttcacatttgttgcatttaattaattcatccaatagcatanattggcactccttttgtgttattgctctttggttggcn

SEQ ID NO: 87184 - DNA, 524 bp, Zea mays
  unsure (1)..(524): unsure at all n locations
tgagaaaagaggtcntgtctcatcgtaactacggtattcttatacccgttcggaattcccgggtcgacgccacgcgtccgcccacgcgtccggcaacatagaaagcacaatagtgtaccaacaatggcagccaaaatagtttggctccttatgctccttggtctttctgcaagtgctgctaccgcgaccattttcccgcaatgctcacaagctcctatagcttcccttcttcccccgtacctctcaccagcggtgtcttcggtatgtgaaaacccaattcttcaaccctataggatccaacaggcaatcgcagctggcatcttacctttatcacccttgttcctccaacaatcatcagccctattacagcagttacctttggtgcatttattggcacaaaacatcagggcacaacaactacaacaacttgtgctagcaaaccttgctgcctactctcagcaacagcagtttcttccattcaaccaactagctgcattgaactctgctgcttatttgcaacaaca

SEQ ID NO: 87185 - DNA, 517 bp, Zea mays
  unsure (1)..(517): unsure at all n locations
ggggaaaagggtgcgtcatgtagagaangcttagcatgnctgtaccgtccggattcccgggtcgacccacgcgtccggcaaaagccaaaaggcatcaccgccgcgacgacgatggcagcctcgctccaaggcgcggccaccctgatgcagccggccaagatcggcggccgggcgccctttgcctcgctgccgtcccgcccgtcgtcgcaactcgcctgcagggcgttcggcgtcgacgccggcgccgccaggatcacgtgctccctgcaggacgtcgccagcaggtgcgtcgacgccgcgaagctcgccggcttcgcgctcgccacctcggcgctcctcgtctcgggcgcgagcgcggagggcacgcccaagaggctgacctacgacgagatccagagcaaaacgtacatggaggtgaagggcacgggcacggcgaaccagtgcccgaccatcgacggcggcgtggagtcgttcccgttcaaggccggcaagtaccagatgaagaagctgtgcctgg

SEQ ID NO: 87186 - DNA, 523 bp, Zea mays
  unsure (1)..(523): unsure at all n locations
ngagaaaatggatctgtgtcattgaaagcataggtattgctctacccgttcggaattcccgggtcgagccacgcgtccgcccacgcgtccgcccacgcgtccgcccacgcgtccgcccacgcgtccgattcgttccggctcctgagcactttctcctcgtcccagacaagccaatcgaagccgagatacgaccatggactccaccggcaccggagcagggggtaaggggaagaagggagcggccgggcgcaaggtcggcgggccaaggaagaagtcggtgtcgaggtccgtgaaggccggtctccagttccccgtcggccgcatcgggcgctacttgaagaagggccgctacgcgcagcgtgtcggcaccggcgcccccgtctacctcgccgctgtcctcgaatacctcgccgctgaggttctggagctcgccggtaatgctgccagggacaacaagaagactcgcattattccgcgccacgtgcttatggcgatccggaacgaccagggacttgtgaagctt

SEQ ID NO: 87187 - DNA, 523 bp, Zea mays
  unsure (1)..(523): unsure at all n locations
ggggaggttatttttctaccgactatagtatgctctaccggtccggaattcccgggtcgacccacgcgtccgaataagacgacttgtttcattgattcttgaagagatcgagcttcttttgcaccacaaggtcgaggatgtcttgcaactgcggatcaagctgcggctgcggctcaagctgcaagtgcggcaagaagtaccctgacctggaggagacgagcaccgccgcgcaggccaccgtcgtcctcggcgtggccccggagaagaaggccgcgcccgagttcgtcgaggccgcggcggagtccggcgaggccgcccacggctgcagctgcggtggcaactgcaagtgcgacccctgcaactgctgatcacatcgatcgacgaccatggatatgattattatctatctagcttgtggtggtggttgaacaataataagcgaagccgagctggctgccatacataggtatngngtggtgtgtgtgagagaaagagaaaccgaagtctttaaattgctatctct

SEQ ID NO: 87188 - DNA, 711 bp, Zea mays
  unsure (1)..(711): unsure at all n locations
nagaaacatggcgtctgtgcctaccgaattgattgtattgcttctacctggtctcggaattcccgggtgcgactccactgccgtctcgcaaagggaattcccttcccctttagctcgccgctctgccgctcgcttcnngtctcccttgtagagggtgctcggggaccngnatggaacttggcctgagtactttaggtnnagagaatcngnngtttttctttgtctttctagcctcggggtctgctttgcgtnnctggtggtgnnngtgaagggggnnagaaatnntcgtgagaatnnctgttctncggatctaggtncgtgcntgagcctcgnnnggaatnncagggngnntttcactacctatagcnnttcgtcngnnatttganaatttnngatgtacctaannntggagtcttaaggggggtggcaannaaagtcttagnncagtagnntcgttcttatttgatgtnnatgaagcttccnnnccttggcttacangnncattgagggaccgtnntcgacnnctgcnncggagggcccgtgannagaagtntccccaagtcttgcttggcttaacttcncannacttgcgccgannagaagctcattccctnnngatatcncnctnntttgggcttttcccctcaatttctttaagtaagttttaaagagttttttctttttctcgtacgacatctttggagatctttg

SEQ ID NO: 87189 - DNA, 532 bp, Zea mays
  unsure (1)..(532): unsure at all n locations
gggaaaagtgctttcgtctcagtttcagttncagtacgnnagtancgctctccctattgccgtctggaccgacgcgtccgcaaggaagtccctcccctagccgccgttttcgtcgctcgtctccctgagaggtgccgggaccgagtaactggccgagtgctaggtagagaatcggtttttcttgtctcagcccggggtctgctgcgtctggtggtggtgaaggggagaaattcgtgagatctgttccggatcaggcgtgcgagctcgggaatcatgggtttcacacatagcttcgtcgatttgaatttgatgtactaatggagtctaagggtggcaaaaagtctagcagtagtcgttctatgatgtatgaagctccccttggctacagcattgaggacgttcgacctgccggaagcgtgaagaagttccagtctgctgcttacttcaactgcgctaagaagccattctgatattccttttggctttctcattctactaatttacgatttcttttctgacactcttattttcg

SEQ ID NO: 87190 - DNA, 519 bp, Zea mays
  unsure (1)..(519): unsure at all n locations
ngagggaagtgcttntgtgcatgcttagctagtaagcacgcctaccggccggattcccgggcaaggagaggatctcgatccgacacctcacgcctctcttcctctcgccccaggacaacgaaaacggaaagaagagaaccaaaggaaacagagcaagagcatcgctctcgaagcaaaacgcgcaccacgccgtcgccggccggccacttcgcacgtacgtaggacgcgcacgcaccggtgcatatatggggctcctgaaccagctgtgggacgacacggtggccgggccgcgcccggactccggcctcggcaagctccgcaagtacgcctccttctccccctcgtcgtcgtcgtcggcggcggtggcggcggcggcggcggcgggctccgcgccgacttcgggcgccgtgacgcggagcttgaccatgctgcggcggccggcggcgctgtccgtcgtcacgtcgccccgcagcgagttcaagttcccgcccggngtccccgttctcccgaaaggggtgt

SEQ ID NO: 87191 - DNA, 529 bp, Zea mays
ggtaaaggcttctttgcctgcacgtctatcactgcacgaccgtaccggtccggaattcccgggtcgacccacgcgtccggttcggagcgcacacacacacaaccagatctcccccaaatccacccgtcggcaggtcggcttcaagatgcagatctttgtgaaaaccctgactggcaagactatcaccctcgaggtggagtcgtctgacaccattgacaacgttaaggccaagatccatgacaaggagggcatccccccagaccagcatcggctcatctatgctggcaaacagcttgaggacgggcgcacgcttgctgactacaacatccacaaggagagcaccctccaccttgtgctccgtctcaagggaggcatgcagatctttgtgaaaaccctgaccggcaagactatcaccctcgaggtggagtcctctgacaccattgacaacgtcaaagccaagatccaggacaaggtaggcattccttcaaaccagcagcgggtgatatctgctttgaaacccattgtgggc

SEQ ID NO: 87192 - DNA, 517 bp, Zea mays
  unsure (1)..(517): unsure at all n locations
gagaaaaggctgngtgtcgtataagaattttatgcatgacgtaccggtccggaattcccgggtcgacccacgcgtccgcttggatgggtggtgaccgcgatggaaatccaagagttaccccggaggtgacgggagatgtatgcttgctggccagaatgatggctgcaaacttgtacatcgatcagattgaagagctgatgtttgagctctctatgtggcgctgcaacgatgagcttcgcgttcgtgccgaagagctccacagttcgtctggttccaaagttaccaagtattacatagaattctggaagcaaattcctccaaacgagccctaccgggtgatactaggccatgtaagggacaagctgtacaacacacgcgagcgtgctcgccatctgctggcatctggagtttctgaaatttcagcggaatcgtcatttaccagtatcgaagagttccttgagccacttgagctgtgctacaaatcactgtgtgactgcggcgacaaggccatcgcgga

SEQ ID NO: 87193 - DNA, 525 bp, Zea mays
  unsure (1)..(525): unsure at all n locations
ggaggggtgtctctgtgttaagaagggantgtatgctgtaccggtccggaattcccgggtcgacccacgcgtccgatccgatcccacccggcagcggcgctgcgcaatggccacccacgcagctctcgccgcgtcccgcatccccgccggcgcccggctgcacagcagggcgccggcgtcgtccaggcacggcgtgcagaggctggacttcgccgacttctccgggctcaggccggggtcgtgctccgtgagcgctgccgcgcgggaggcgtccttctccgacgtccttggcgcgcagctcgtcgccaaggccaccggggagaacgccgtgagggcgcccgcagaggcgaagctgaaggtggcgatcaacggcttcggccgcatcggccggaacttcctccggtgctggcacggccgcgaggactcggcgatcgacgtcgtcgtcgtgaacgacagcggaggcgtcaggaacgcgtnccacctnctcaagtacgactcgatgctcgggacccttcaagccgaact

SEQ ID NO: 87194 - DNA, 527 bp, Zea mays
  unsure (1)..(527): unsure at all n locations
ngaggagagtggatcntgtcttaccccagtacacctatnctccactgactgttccggtccggaattgccgggtcgacccacgcgtccggtcttcacactcctcgccatcacataaaaccagtgcaagcagaagcagcgcagtggcgagcagcaccatggccgtctcctccacagccttcgccggcaaggcagtgaacgtgccgtcgtctctcttcggcgaggcccgcgtgacgatgcgcaagacggcggcgaaggcaaagccggcggcgagctccggcagcccgtggtacggccccgaccgcgtgctctacctgggcccgctgtccggcgcgcccccgagctacctgacgggcgagttcccgggcgactacggctgggacaccgcggggctgtcggcggacccggagacgttcgccaagaaccgggagctggaggtcatccactcccgctgggccatgctgggcgcgttgggctgcgtgttcccggagctgctcgcccgcaaccgcgtcaaatttcgccaaggccct

SEQ ID NO: 87195 - DNA, 523 bp, Zea mays
  unsure (1)..(523): unsure at all n locations
ngggtgggtgcgtctgttctactgattatctcatgctctaccggccggattcccgggtcgacccacgcgtccgggcggcagcgctgcgagcaagggagggagggagcggggatgaggatgctgtcgaaggcgtgctcgattgtggcctcctccctcccgcgctgctcctcctccgccgccgcccccacgatgagggggcagccgtccttgctgccaagcgtgcggaagcaatggcccgggaagccactgctgtatggaatcggcaccctgttggtcatgccactgaggacactgtatggagtgggtcgtgtttttggcgcaggacggtttctctgcaacatgaccaacgtctcttcgtcgctgcaaattgagcttgtaccatgccttcgagataactatgcgtatatcctgcatgatgttgatactggaacagttggagtagtggatccttctgaggctatgcctattataaatgcattggaaaagagaaaccagaacttggcttatataccggacacccctt

SEQ ID NO: 87196 - DNA, 525 bp, Zea mays
ggaatgctttgtcgacgtaaagacaatgaagttatgctctaccggtccggaattcccgggtcgacccacgcgtccgaaccggtccagcactttcacgctcagctccagcaatggctgcctccaccatggcgatgtcctccacggcgatggccggcacccccatcaaggtgggctccttcggcgagggccgcatcaccatgcgcaagaccgtgggcaagcccaaggtggcggcgtccggcagcccctggtacggccccgaccgcgtcaagtacctcggccccttctccggcgagcccccgagctacctcaccggcgagttccccggcgactacggctgggacaccgccgggctgtccgccgaccccgagaccttcgccaagaaccgcgagctggaggtgatccactcccgctgggccatgctcggcgcgctcggctgcgtcttccccgagctgctctcccgcaacggcgtcaagttcggcgaggccgtctgggtcaaaggccggtttcagatatttataagggggg

SEQ ID NO: 87197 - DNA, 527 bp, Zea mays
  unsure (1)..(527): unsure at all n locations
tactcnaatgtatatctgatannttcgaaatcgcncacttcgcctataccacttntaattcaccaatcgacgcagtcgaactccaacatataaagcacaatcatataccttcaatttcaaccaaaatattttgcttccttgtctcgttaaactttatgcaagtgctgctaccgcaaccattttcccacaatgctcacaagctcctatagcttcctttcttcccccatacctctcaccagctgtgtcttcactatgtgaaaacccaattcttcaaccctacaagatccaacatgcaatcgcagcatgcatcttacctttatcacccttgttcctccaacaaccgtcagccctattacagcacttacctttcgtgcattttttggcacaaaacatcaatgcacaacaactacaacaactttttctatgaaaccttgctacctactctcatcaacagcactttcttccattcaaccaacttgcttcatttaactctactgcttattttcaacaacaactaccatttattn

SEQ ID NO: 87198 - DNA, 533 bp, Zea mays
  unsure (1)..(533): unsure at all n locations
tggggggaatgtgtatctgtcgccccgacctcgcagttacgacgtaccggttcggaattcccgggtcgacccacgcgtccggttgccaaagaattccctcccctagccgtcgccgccgctcgtctccctgagaggtgcggggagcgangaactggccgagttctaggtagagaatcggttttgcttgtctcagcacggggtctgctgcgtctggtggtggtgaaggggagaaattcgtgagatctgttccggatcaggcgtgcgagctcgggaatcaggggtttcacacatagcttcgtcgatttgaatttgatgtactaatggagtctaagggtggcaaaaagtctagcagtagtcgttccatgatgtatgaagctccccttggctacagcattgaggacgttcgacctgccggaggcgtgaagaagttccagtctgctgcttactccaactgcgcgaagaagccatcctgatatccctttgggtttcctaattttaggagttaaggaattcttttttgaacactttgattt

SEQ ID NO: 87199 - DNA, 530 bp, Zea mays
tgggaggatgctgctctgtcgcctaagcctctagtacgctctaccggttcggaattcccgggctcgacccacgcgtccgcccacgcgtccgcccacgcgtccgcccacgcgtccgcccacgcgtccggtcggatctgggacgagacgagacgatcccgcctcccctcaaccggaacttgttttaccccatctcatcccactgactccacccacccacccgcccgctgcctccgccggatctcgtcggactcggatccgcccgaccacgaccaccccgcgtcgtcgccgcgcagcagcagcagatcagagaagatggccggactcgacaccttcctcttcacctcggagtccgtgaacgagggacaccctgacaagctctgcgaccaggtctcagatgctgttctggacgcttgccttgctgaggaccctgacagcaaggttgcttgcgagacctgcaccaagaccaacatggtcatggtctttggtgagatcaccaccaaagccaatggggacttcccaaaaattgtatt

SEQ ID NO: 87200 - DNA, 529 bp, Zea mays
  unsure (1)..(529): unsure at all n locations
gaggagggggcgtacgtgatggcacgcagcgctacgncatgccgtaccggttcggaattcccgggctctcctcttgcgattcgctcgctcgatcctagcttcccttccaagaagcgcagcgcccatggccatgggcacgcaagcctccgccgccacgcgccacctgctggccgccgcctgggcgccggcggcgaagccgcggcagctgagctcgcagctcgcgctgccgtcgtcgtcctcccgcgggccggccccgctccgcgcgtccaccgaggaggcggtggaggcgcccaaggggttcgtggccccgcagctggaccccagcacgccgtccccgatcttcggcggcagcacgggcgggctgctccgcaaggcgcaggtggaggagttctacgtcatcacgtggacgtcccccaaggagcaggtgttcgagatgcccaccggcggcgccgncatcatgcgggagggccccaacctcttgaagctggcccgcaaggagcaatgcctggcgcttgggaccaagttcgcc

SEQ ID NO: 87201 - DNA, 523 bp, Zea mays
  unsure (1)..(523): unsure at all n locations
nggttaagagtgcatctgatcccagctcgtangctacagctatgccgttccggttcggaattgcggggtcgacccacgcgtccgcttggttacagaggaatttttccagctgacacaataccacccctagttgagtgtgacgaagaagcagatgaacgccattatcaactttggcggatagaaaatggagtcgcagaaggttcaactgagatcccaaaaggtgaagcaatcccgctggagtacaatcttgctggcttgaacgccatttcgttcgagaagggctgctacatcgggcaggagcttatcgcgcggacgcaccatcgcggtgtcatccggaagcgcctaatgccaatgaagttcgtcgacgggaatgggcaagaactcgagcatgccgtcgctccaggctcggaggtcgtggacgaggcttcaggcaagaaggtccgagcagtgagcaccgctctgggctcccgcgggatgggcctggtaagactcgaaaaaacactgaaacccggctcggntcttn

SEQ ID NO: 87202 - DNA, 522 bp, Zea mays
gaggaaagtggctgtggtcatgtgaccgacgctcagcacgccgtaccgttcggaattccgggtcgactcacgcgtccgcgcgtccctgctcctctcccagctgctgctgcttccggtggtaacggttgtggccggggagaccgccgcgcacccgggctacgcgcacgctgaggaggcatgcagcggtatgctagaggcagaggcggagaaagcaacggtgctggtgcctgcgccggagcggcgcgaagagttcgacggcgggcggatcgtggacatcagccactactaccgcgaggacatgccggagtgggagtcatcagagggctccggcgagttcctgcagctggcgcggtccatgcgcaacggctccgacatcgctaacttctcggagctccggctcactgcgcactccggcacccacgtcgacgcgccgggacacgtcttcgagcactactacgacaccggcttcgacgtcgacaccctcgacctcgctgtcctcaacggaccagcgctgttggttga

SEQ ID NO: 87203 - DNA, 524 bp, Zea mays
  unsure (1)..(524): unsure at all n locations
gggtgagtggtaaggttggagtggtttctgaatactcgccatgacgcggtaaagctaggctcgtaccggtccggaattcccgggtcgacccacgcgtccggacctaccacagggctgggccaaccagtcccgatcgatcagccagcatggcgtcctcctccaaacggtcgctgccatgcgtgctcctcctcctcctcgctgtcttccaccacggctgctcgtcggcgagggcccacagacgcgccggcgacatggaggggagcatgagcaccgacgacagctcgatgatagagcggttccagcggtggaaggcggcgtacaacaagtcctacgccacggtcgccgaggagcggcggcggttccgggtgtacgcgcgcaacatggcgtacatcgaggccaccaacgccgaggccgaggcggcggggctcacgtacgagctcggcgagacggcctacaccgacctcaccaaccaagagttcatggccctgtacacggcgcccgnggcggccgcacttgccggcgaa

SEQ ID NO: 87204 - DNA, 509 bp, Zea mays
  unsure (1)..(509): unsure at all n locations
ggtgaaggtctctttttacgacaagcatatattgtattgctcgtaccggtccggaattcccgggtcgacccacgcgtccgcgccatggcctccctctcctctgccgccgtcaccgccccttccttcgccgcggcagggccagcccgcgccgtggtcagaaggaggtccttcaccgtgcgcgcctctctccgcaaggccaccggcaccgccgccgtggcaatggctgccagcgccctgcttgccggcggtgccatggcccaggaggtgctgctgggcgcaggcgacggcgggctcgtcttcgagcccagccagttcaccgtcaaggccggcgacaccatcacattcaagaacaacgccggctttccgcacaacgtcgtcttcgacgaagacgaggtgccgagcggcgtcgacgccaccaagatctcgcangatgagtacctcaacgcgccaggcgagacctactccgtcaccctcaccgtgccgggaacctacggcttctactgcgagcc

SEQ ID NO: 87205 - DNA, 498 bp, Zea mays
agttaagttatttgattatccgcaaaagtatcgcatactcttccggtccggaattgcggggcgacccacgcgtccggtgggaggaacatccgtccgtgaggaccaaaggattcttggcagtggtgtgcgtggtgttgttggtacacctggtcgtgtgtttgatatgctgcgcagacagtccctccgccctgataacatcaagatgtttgttctagatgaagctgatgaaatgctttctcgtggtttcaaggatcagatttacgacatcttccagcttctcccagccaagattcaggttggagtcttctctgctaccatgccccctgaggcccttgagattacccgcaagttcatgaacaagccagtgagaatcctcgtgaagagagatgagctgactcttgagggtatcaagcagttctatgtgaatgtggataaggaagactggaagctggacacactgtgtgacctgtacgagacccttgccatcacccaaagtgt

SEQ ID NO: 87206 - DNA, 488 bp, Zea mays
  unsure (1)..(488): unsure at all n locations
aaggtnnttcnaagctgcagccctacgtacgccgtaccggtccggaattcccgggtcgacccacgcgtccgcctgaggctggtgcccctcctggcggccatgatcgtgccctgcacgctcatcgcgcagacgagcacgctgttcgtgaagcagggcacgacgatggaccggcacatgggcccgcgcttcgagatcccggcggcgagcctgggcgcgttcgtgacgctgaccatgctggtggccgtggtggtgtacgaccgggtgttcgtgagggccgtccggcggtacaccaaggacccgcgcgggatcacgatcctgaggcggatgggcacgggcatgctgctgcaggtggcgaccatggcggtggcgtcggcgatcgagagccggaggctggcctacgcgcggagccacggtctggacgccacggggggccagctgaggctcaccatcttcgcgctggttccggaattcgtgctgatgggactggc

SEQ ID NO: 87207 - DNA, 498 bp, Zea mays
  unsure (1)..(498): unsure at all n locations
cggaagagatgggagtaatgagttttgtactngtnngtaggtatgtctcggttcggaattcccggctggagccacgcatccgccgcactgcacgcgagtcctccactcctaccgcacgatggctgcgctgcgcctcgcatgcttcaccctacgtcgcgccgctgccgagtcctccgcctcctccggcgcgaccccagccgcgtccggctccgtctccttcgcccgcgcggcgcgggggctgccctccctccgcctggccccgccccgccgccgcggtgacctcgccaggccccgcgccgcggccgatgccgcggcggagagctacgcgtccgcgctgtcggacgtggccgtcgagaacggcaccctcgaacagacggtctccgacctggagaagctggaaaaggtcttcgcggacgaagccgtcgccgagttcttcgacaaccccaccgtcccgctcgaagagaaggcctaactcaatcacgagatcgtcaagtcatc

SEQ ID NO: 87208 - DNA, 486 bp, Zea mays
  unsure (1)..(486): unsure at all n locations
tagtgtatgtgaggctggacggcancgtacgtacgtcgtacttgtttcggactactggaggcacgcgtccgcctgaggctggtgcccctcctggcggtcatgatcgtgccctgcacgctcatcgcgcatgccaacactctgttcgtggagcagggcacgacgatggaccggcacatgggcccgcgcttcgagatcccggcggcgagcctgggcgcgttcgtgacgctgaccatgctggtggccgtggtggtgtacgaccgggtgttcgtgagggccgtccggcggtacaccaaggacccgcgcgggatcacgatcctgaggcggatgggcacgggcatgctgctgcaggtggcgaccatggcggtggcgtcggcgatcgagagccggatgctggcctacgcgcggagccacggcctggacgccactgtgggccagctgaggctcaccatcttcgcgctgcttccgcagttcgtgctgatgggactg

SEQ ID NO: 87209 - DNA, 499 bp, Zea mays
  unsure (1)..(499): unsure at all n locations
agtaaagggctgtgttaaggaggaagagtattgtagtactggtccggaattcccgggcaagacaaatgattccggccttgcttcctacgttgctggtcaagttgaccgcaccctttcctggaaggacgggaagtggctgcagacaattacctcgttgccgatcctagtcaaagggatcgtgactgcagaagacactaggcttgcgatcgaatatggcgctgctgggatcatcgtgtccaaccacggcgcgcgccagctagattatgttcctgcgactatcagctgcctggaagaggtcgtcagggaagcgaaaggccggctaccggtgttcctcgacggcggcgtccgccgtggcacggacgtcttcaaggccctggcgttgggagcttcaggagtgttcatcggccggcccgtgctgttctcgctggcggtggacggcgaggccggcgtgccggaagtgctgcagatgctgnaggacgagcttggactcaacatggcg

SEQ ID NO: 87210 - DNA, 506 bp, Zea mays
ggtgaagtgttcgtcgacgacacgcatgtaagtcattgctcgtaccggtccggaattcccgggtcgacccacgcgtccgggcgccggcgaaccccaaggacgagtaccagcactggatcaaggacatgcgggggggcacgagcatcaaggacgaggaaggttacccggcgttcgcgctggtgaacaaggcgaccggggaggccatcaagcactcgctggggcagtcccacccggtgcgcctggtgccctacaacccggacttcctggacgagtcggtgctgtggacggagagccgcgacgtcggcaacggcttccgctgcgtccgcatggtcaacaacatctacctcaacttcgatgccctccacggcgacaagtggcacggcggcgtccgtgacggcaccaacgtcgtgctctggaagtggtgcgagggcgacaaccagcgctggaagatccagccctactactgaacccaacgatgatttacccatggggccatcgatcgtgca

SEQ ID NO: 87211 - DNA, 510 bp, Zea mays
cgtaggatggggttaaagggtttgttacgaaaagcatgtatagcatactcgtaccggtccggaattcccgggtcgacccacgcgtccggtcgttgtgagaattcttaattcatgagttgtagggagggacttatgtcacggacagcagaaactaaagcaagtgttggatttaaagctggtgttaaggattataaattgacttactacaccccggagtacgaaaccaaggatactgatatcttggcagcattccgagtaactcctcagctcggggttccgcctgaagaagcaggagctgcagtagctgcggaatcttctactggtacatggacaactgtttggactgatggacttaccagtcttgatcgttacaaaggacgatgctatcacatcgagcccgttcctggggacccagatcaatatatctgttatgtagcttatccattagacctatttgaagaaggttctgttactaacatgtttactttcaattggggtaacgtaattggt

SEQ ID NO: 87212 - DNA, 486 bp, Zea mays
tgggtgtagtaacagaggggggtggacggctctcccggtccggaattcccgggtcgacccacgcgtccgcgccgacttctccgggctcaggccggggtcgtgctccgtgagcgctgccgcgcgggaggcgtccttctccgacgtccttggcgcgcagctcgtcgccaaggccaccggggagaacgccgtgagggcgcccgcagaggcgaagctgaaggtggcgatcaacggcttcggccgcatcggccggaacttcctccggtgctggcacggccgcgaggactcgccgatcgacgtcgtcgtcgtgaacgacagcggaggcgtcaggaacgcgtcccacctcctcaagtacgactcgatgctcggcaccttcaaggccgacgtcaagatcgtggacgacactaccatcagcgtcgacggcaagcccatcacggtcgtctccagcagggacccgctcaagctcccatggggtgagctcggcattga

SEQ ID NO: 87213 - DNA, 489 bp, Zea mays
  unsure (1)..(489): unsure at all n locations
ngagaggtgtattataaatgacaagacagtatgcttccccggtccggaattcccgggtcgacccacgcgtccggttgtgagaattcttaattcatgagttgtagggagggacttatgtcaccacaaacagggactaaagcaagtgttggatttaaagctggtgttaaggattataaattgacttactacaccccggagtacgaaaccaaggatactgatatcttggcagcattccgagtaactcctcagctcggggttccgcctgaagaagcaggagctgcagtagctgcggaatcttctactggtacatggacaactgtttggactgatggacttaccagtcttgatcgttacaaaggacgatgctatcacatcgagcccgttcctggggacccagatcaatatatctgttatgtagcttatccattagacctatttgaagagggttctgttactaacatgtttacttccattgtgggtaacgtattn

SEQ ID NO: 87214 - DNA, 495 bp, Zea mays
aggttagagggttttttacgagggagagtacgcagtcctgtccggattcccgggtcgacccacgcgtccgagcgactagcgagcgagagcagcacacacgcagctagctaggagcagcagcagaggagcggcgatggcggcctccatgatctcctcgtcagctctggcggtggcgcctcagggcctgccgcccctcggccgccgcgccttctccttcgccgtcgtctgctccaagaagaagatcaagaccgacaagccctacgggattgggggtggcctgaccgtcgacgtcgacgccaacgggagaaagggcaagggcaagggcgtgtaccagttcgtcgacaagtacggcgcgaacgtcgacggatacagcccaatctacaacgaggatgactggtctcccaccggcgacgtctacgtcggtggaaccactgagcttctgatctgggccgtcaccctcgctgggatcctcggcaggagcgcccttctcgtcta

SEQ ID NO: 87215 - DNA, 487 bp, Zea mays
gggagggatatgataacgccaagatgtatgctcgtcccggtccggaattcccgggtcgacccacgcgtccgaaccatagttggcattgaggacgatggcgagcgtgacgcttacgttcttgtacgagtgcgcgcgctacacaaccctttaaaggttcgcttttcaacggtggagagggtaacatatggttttgctgctggagactgggtgcggctgagggaggaggacaagaagcgctctcaggttggcattcttcacagcatcgaccgtgacggtgcagtggcagttggtctgataggagtggataccccttggaagggcaattattcagacctccagatggctgaagcctactgtgtcggacagtttgtgcgcctgaaggccagcatttcaagcccaaggttcgaatggcagcgaaagcggggtggattagcttctactggccgaatttcacagatacatccgaacgggttgctcgtcgtgaaat

SEQ ID NO: 87216 - DNA, 505 bp, Zea mays
  unsure (1)..(505): unsure at all n locations
ggttgaggggatctgtttacagcacgtagctctatgctcgtaccggtccggaattcccgggtcgacccacgcgtccgatcctatgctgccacatcgaaggaagatgatgacttcctcaaatcttgcccatcggatcgatgccacaagcatggaccagagatccggttcccctttcggcttccaagccaccctccatcctgtggcacacctgggatgcaattatcatgctctgggcatgacaccatccttgatcatccagttcttggctcctgcagagtgacagcaatatattacaggcatcgtgtcatgaatgtcatcccgccagaggactcatcgtcacactgccaacttcagaagcttgttaaaagaaatcaatcaactgatgtgtacacacctgtagcacatcctgtctcagtagttgtaggatgctcaagagaagcaacaaaccaagatgatattgcangcccaagctcttngccgagcctcattaacaatgcanaccagn

SEQ ID NO: 87217 - DNA, 512 bp, Zea mays
aggttcaggtgtctgagacacagcatacaacgtattgctcgtaccggtccggaattcccgggtcgacccacgcgtccgcggacgcgtgggcggacgcgtgggcgaagccgcactgtgagagagggacgcggccggttgtcctcggcttgtacgcaatccttccgtcgctgcgaagctgatccctcgtgttcgccatggcccccagcgtcgccgtggaaaacctcaaccccaaggtcttgaaatgtgagtatgcagtccgtggcgagattgtcatccatgctcagcgcttgcagcaacaactacaaacacaaccagggtctcttccttttgatgagatcctgttctgcaacattgggaatcctcaatcccttggtcagcaacctgtgacgttcttcagggaggttcttgctctttgtgatcatccatgcctcttggaaaaagaggaaaccaaatcattgttcagtgctgatgctatttctcgagcatagcagattcttgcaactattcctgga

SEQ ID NO: 87218 - DNA, 510 bp, Zea mays
  unsure (1)..(510): unsure at all n locations
aggggaaggtgtcntataaaagaacacatcgtatggctcgtctcggtccggaattcccgggtcgacccacgcgtccgaacctatattggatgtggttttatttgtccgcatattgttaattgttctacacttggtggtgccataatatcgtggggtattctttggccatatatctccacaaaagctggggactggtatccagctgaccttggaagcaatgacttcaaaggactctatggatacaaggtttttatatctgtatctgtgatacttggggatggtctttataacctcatcaagatcatttatgctactatcaaggaaataatgaatgcacgggctaagcaaggaagactgccactagcccaagttcaggatggcgatgaaggttcaaatttatcagctgaggaaaagcatctgaatgagacattcataaaggacagtatccctccctggttggcaggatctggttacattgggcctgcagcaatatcgattgcaaccgtccaa

SEQ ID NO: 87219 - DNA, 491 bp, Zea mays
  unsure (1)..(491): unsure at all n locations
gggagatggnatcctaaacaaagacaagattgttaggctctcccggtccggaattcccgggtcgacccacgcgtccggcagggtcatcccaagatcctcttgaccttctatttatcaggcaaggtaatctatccgagggaaagtgctcttatgttgtaattggaagggttattttcagcattttggggatattcatggctgcggttgtcacatatactgtcatcactgatggactaccttttaggaaggaattgttgacaccgtggatggcggcaaccttaattgatttctacataaatgtctttgcgatatcggtctgggttgctcacaaggaatcatcatggatatcaactaccatttggattgtcttgctgatatgctttggaagcatcacaacatgcggctacattgtcatccaacttttcaaagtatcatatcaagatccaatctaccacgtgctattgaactcccacagcaggtaccacaattaa

SEQ ID NO: 87220 - DNA, 487 bp, Zea mays
ggtgagggattctataaagaagggatggtgagactccccggtccggaattcccgggtcgacccacgcgtccgaagaaattgttagattaaatggtgtgtatcagaggatccttaccagtgccggtgtgagaatgattgaaggggcatgcagtctagttgatgctcatactgttgaagttagccagcctgatggttcaaagcaaaggtatacagcgaagcacattttgatcgcgactggtagccgtgctcaacgtgtcaacatacctggaaaggatctggctattacttctgatgaggccttgagcttggaggagcttccaaagcgcgctgtaatcctgggtggcggatatattgctgatgaatttgcttctatctggagggggatgggtgctgaagtagatctgttttatcgaagagatcttcctctaagaggttttgatgatgagatgagagctattgttgcaagcaacctttgaggaagggggat

SEQ ID NO: 87221 - DNA, 514 bp, Zea mays
  unsure (1)..(514): unsure at all n locations
nggggacaggtgtgtgagacggagggggcgacagaaaggctcgtcccggtccggaattcccggggcgacccacgcgtccgagaggcgactccaggtttgttggcgatgctgcgagcgggaggcaggcggctcctggccccggggctccgtcggctcggcctgggcacaggcgcctccggcgaggcgggccctgccgcggcggcggcgggggtgagggcgtaccacgagcgggtggtggaccactacaacaacccgcggaacgtaggttccttcgacaaggacgaccccaacgtcggcactgggttggtcggcgcgccggcctgcggcgacgtcatgaagctgcagatccgcgtcgacgagaactccggcaagatcgtcgacgcctgcttcaagacttttggctgcggctccgccatagcgtcctcgtccgtggctactgaatgggtgaagggaaaaccaatggatgaagttttgacaatcaagaacacggagatcgcgaagcacttgtcccttc

SEQ ID NO: 87222 - DNA, 505 bp, Zea mays
gaggttagaagggtttgtgtacgaccagcaagtacgcattgctcgtaccggtccggaattcccgggtcgacccacgcgtccggaggcagcgacacgatcgcgagcgcacgcacgtaagcacgttgtcggaagctgaaggtagaagaagcaccagtgcctgatcgatggcggcccaggctctcctctccggccggcagctgctgggccgccccgtgcagtcggccgtctctaggtcgtcggcgaggaaggcgcccttcgtcgtcagggccagctccagccctccagccaagcaaggtgccgacaggcagctgtggttcgcgtccaagcagtccctctcctacctcgatggcacgctgcccggcgactatggcttcgacccgctgggcctctcggacccggagggcaccgggggcttcatcgagcccaagtggctggcctacggcgaggtgatcaacggccgctacgccatgctgggcgcggtggccgccatggccccgaagatttt

SEQ ID NO: 87223 - DNA, 507 bp, Zea mays
gggaagtttcgtgtagacaagcaagtacgccaaactcgtaccggtccggaattcccgggtcgacccacgcgtccgggaccaaatacacgctcccgtctcatccgatggctcctctcctttccccggggctggtcgcggacagcgtcaccaagttccatgcggcctcaacgccagtctcgtgctccggtagcccacaacgctacgtcatcacagggttggctggggccggaaggggagagcacgactggcgtcggaggacgtggggaagaacgaacctgagggtgaaagcggtggcggcagagtcccgcagctcggaggggggaatcgctgaagattattacgctgttcttggcgttatgccagatgcaacgccgaagcagatcaagaaagcatactacaactgcatgaaatcgtgccatcctgatctcagtgggaatgaccctgacgtgacaaatttctgcatgttcatcaatgaagtttacacggtgcttaccgatcccatccagc

SEQ ID NO: 87224 - DNA, 496 bp, Zea mays
  unsure (1)..(496): unsure at all n locations
nggatgaaggtgattctgtattcatgaacacantcgtacgtcgtaccggtccggaattcccgggtcgacccacgcgtccgggtgggttggcttctcctccccctccggttcgggttcgggttcgtgaggttctccggggtgcggtttcgtgggtgagcggatcgagatggcggcgtcggatgttgagtaccgctgcttcgtcggcggcctcgcctgggccacggacgaccactccctccacaacgccttcagcacctacggcgaggtcctcgagtccaagatcatcctcgatcgggagacgcagaggtcccgcggcttcggcttcgtcaccttctccacggaggaggcgatgcggaacgccatcgagggcatgaacggcaaggagctggacggccgcaacatcaccgtcaacgaggcccagtcccgcggcggccgtggaggctgcggcggcggcgggtacggtggtggccgtggaggccgcggctacggcngtggc

SEQ ID NO: 87225 - DNA, 486 bp, Zea mays
gggaaggattctatagggaggggatggtaggctcgcccggtccggaattcccgggtcgacccacgcgtccgcaagaaccgcgagctggaggtgatccactcccgctgggccatgctcggcgcgctcggctgcgtcttccccgagctgctctcccgcaacggcgtcaagttcggcgaggccgtctggttcaaggccggctcccagatcttcagcgagggcgggctggactaccttggcaaccccagcctgatccacgcgcagagcatcctcgccatctgggcctgccaggtcgtgctcatgggcgccgtcgagggctaccgtattgccggcgggccgctcggcgaggtcgtcgacccgctgtaccctggcggcagcttcgaccccctcggcctggccgacgaccccgaggccttcgccgagctcaaggtgaaggagctcaagaacggccgtctcgccatgttttccatgttcggcttcttcgtccag

SEQ ID NO: 87226 - DNA, 496 bp, Zea mays
  unsure (1)..(496): unsure at all n locations
gggggagtgtagtctattaaacgcaacgattgatatactctcccggtccggaattcccgggtcgacccacgcgtccgccagctttgaccgccgnctgccttcccctccgctactgctcctccccaccccactgggccgcatgatcggcggcggcggcggcgaggtcgtaccccacatcggcgagcggcggcggcaccgccggaggcaaaggcaagatgttcgggcgcgcgccgaagaagagcgacaacaccaagtactacgagatcctcggggtgcccaagtcggcgtcccaggacgatctcaagaaggcctaccgcaaggctgctatcaagaaccaccccgacatgggcggtgaccccgagaagttcaaggagctcgcacaagcctatgaggttttgagtgatccagagaaacgtgagatttatgatcagtatggtgaagatgcccttaaggaaggaatgggcggtggaggatcccatgttgatccatttgacat

SEQ ID NO: 87227 - DNA, 505 bp, Zea mays
  unsure (1)..(505): unsure at all n locations
gggtttagggggtctgttaaaagacagacgtatgctgtactcgtccggaattcccgggtcgacccacgcgtccgcaaaacacaagtagggttaggaaggcggcggccagcggcgagagcgcgagaggagggggggtcggccatgacggggaaggcgaagccgaagaagcacacagcgaaggagatcgccgcgaagatcgacgcggcgacgacgaaccggggcggcggcaaggccgggcaggcggaccggctggggcaggacaagggcgggcacgcgaagctggcgtgccccctctgccgcaccccggcgcccgacatcaagtccatgcagatccaccacgaggcgcgccaccccaagctccccttcgagccggagaagctcctcaacctgcactcctccgcccccgctgctgctgccgccgtcgccgncactgccgaggccaccaacttcaagcccaagcccggcgtncgcggcagcctcaagaagtaagcttgctggctagttn

SEQ ID NO: 87228 - DNA, 512 bp, Zea mays
  unsure (1)..(512): unsure at all n locations
nggggaatgttctgtgacagaaagacgaagtactgctcgtaccggtccggaattcccgggtcgacccacgcgtccgggatgtcgctcttgagcttgcgtggatgaacaacatgttggactttgccttcccagaccggttgcagttcatccgtgaatacactagcaaggtggatgatttagtgaaggacagaattgagtcacagaatgaagaaagagtcaaagagaaggaggagaaagatcttgttgctcagcagaacatgtatgcgcaattgcttcctcttgctttgcctgctccgtcaatgcctggcatgggtggccctccaccttcgatgggtgggatgggcatgcctacaatgggtggaatgggtatgccgccgatgggccctggtccgatgccagcattcgggatgccagcaatgggaagctactgagatgtttttgcagagagcttagacgatgatctgaatcgtccctgtgtaagcgaaagtggaaacttcattggagttgtagan

SEQ ID NO: 87229 - DNA, 509 bp, Zea mays
  unsure (1)..(509): unsure at all n locations
ggtgaagtgttgtctcgtaccgacgtacgncatgcagtaccggtccggaattcccgggtcgacccacgcgtccgacagccagtacgtgctccaccggggcatccctacgctcggcgacggcggcaaggggacggcgacggctgccgcgtcggcattggggacggcagaccggttagcggtcaggcagcggtcctacaccgagctgcagctgttcaacaggaggtggaagaaggccgtggcggaggacgggtgctggaccgacccttacccgaacccggcgacgaccaccggctgaccgttggacggagcgaggcagcgcagggaagtacagtagttggtagctgtcagattgaccttgcctagaagatggtagtagatcatacactcgcattaatttacaggttcacagagagctatacatataatgtacagaactacagattgttttttttccaaaaaaaaaaaaaaagggcggccgctctagaggatccaagcttacgtacgcgtgn

SEQ ID NO: 87230 - DNA, 485 bp, Zea mays
ggagaggtcttctataaagacaagatgtacgctcgtccggtccggattcccgggatcgaccttagtctcgctacgtagcagtgcaataaaaaaagcagccgcaatggcgagcagcaccatggcccgctgctccacggccttcgccggcaaggccgtgaacgtgccgtcgtcgtccgccttcggcgaggcccgcgtgacgatgcgcaagacggcggcgaaggccaagccagcggcggcgtccgggagcccgtggtacggccccgaccgcgtgctgtacctgggcccactgtccggcgagccaccgagctacctgacgggcgagttcccgggcgactacggctgggacaccgcggggctgtcggcggacccggagacgttcgccaagaaccgggagctggaggtgatccactcccgctgggccatgctgggcgcgctcggctgcgtcttccccgagctgctcgcccgcaacggggtcaagttcggcg

SEQ ID NO: 87231 - DNA, 488 bp, Zea mays
  unsure (1)..(488): unsure at all n locations
gaggtgaggctgtctttaaagaacgaacgtagtatctcncngttcggaattcccgggtcgagccacgcgtccgctgtttctgtgctctgcttccctgtgaatttgaaacagctgctcccttttacacactgcagttcgccaaagaaaatgctcttgagcttgaccttccagcgatcaagctcggtgagcacgaagacgtaaccgaggaagccgtgtctactactttgagaagggcaatcagccgtctttctactctccaggcacatgatggacactggcctggggattatggtggccctatgttccttatgccaggcttgatcataacattgtatgtgactggagcactaaacactgtcttgtcatcagaacaccagaaggagatccgtcggtatctttataatcatcagaatgaagatggtggctggggcttgcacattgagggtccaagcaccatgtttggctcagcactgacctacgttactttg

SEQ ID NO: 87232 - DNA, 508 bp, Zea mays
  unsure (1)..(508): unsure at all n locations
ggttagaggttgtctttacctaggccattcnangncgtactgttccggattcccggggcgaccgcacgcgtccgcggttcgggttcgggttcgtgaggttctcctttgttcggtttcgtgggtgggcggggcgagatggctgcgtcggatggtgagtaccgctgcttcgtcggcagcctcacctgagccacggacgaccactccctgcacaacgccttcagcacctacggcgaggtcctcgagtccaagatcatcctcgatcggtagacgcagaggtcccgcgtgcttctgcttcatcaccttctccacggaggacgcgatactgaacgccatcgacggcatgaaccgcaaggaactgtacctacgcaacatcaccgttaacgaggctcaagcccgactaggtcgtttaagcacctgcagcagctacagtagtggccgcagaagccgctgctacggcggaaggcttctcctgaaatggctcgattgagcttccggaatcggtcgaacg

SEQ ID NO: 87233 - DNA, 502 bp, Zea mays
  unsure (1)..(502): unsure at all n locations
agttgagggtgtcttatcacgactattgtaggctcgtccggttcggattcccgggtcgacccacgcgtccgctcccggtgaccatgcgactcctggaccctcccctccacgagttccttccagaagggaacattgaggacattgtaagtgaattatgtgctgagacgggagccaaccaggaggatgccctcgcgcgaattgaaaagctttcagaagtaaacccgatgcttggcttacgtgggtgcaggcttggtatatcgtaccctgaattgacagagatgcaagcccgggccatttttgaagctgctatagcaatgaccaaccagggtgttcaagtgttcccagagataatggttcctcttgttggaacaccacaggaactggggcatcaagtgactcttatccgccaagttgctgagaaagtgttcgccaatgtgggcaagactatcgggtacaaagttggaacantgattgagaatcccaatgcagctcttggtgcttg

SEQ ID NO: 87234 - DNA, 515 bp, Zea mays
  unsure (1)..(515): unsure at all n locations
agtttaggggggttnntncctgactgcatacgatcgcatactgtaccggtccggaattcccgggtcgacccacgcgtccgcttccttacgcgaactatgtattctttaatacacgagtatcctttcagaagggaacgttgattacattgttagtgaattatgtcctgagactccatccaaccaccaagattccctcgctcgaattgaaaagctttcacaagtaaacccgatgcttggcttacgtgggtacaggcttggtatatcataccctgaattgacagagatgcaagcccgtaccatttttgaagctgctatagcaatgaccaacctatgtgttcaagtgttcccagacataatgcttactcttgttggaacaccacagtaacttgggcatcaagtgactcttattcgccaagttgctgataaagtgttctccaatgttagcaagactatccggtacaaagttagaacaatgattgatatccccattgcagcttctaaacttgattagatan

SEQ ID NO: 87235 - DNA, 505 bp, Zea mays
tggttagagggctttgtcatgacagaaatcatgtactgcagtaccggtccggaattcccgggtcgacccacgcgtccggatgagattgtgaaggaagtctcttcctacctgaagaaggttggatacaaccctgggaagatccacttcgttccaatctctggttttgaaggtgacaacatgattgagaggtccaccaaccttgactggtacaagggcccaaccctacttgaggctctggacttgatcaatgagccaaagaggccttcagacaagcccctgcgtctcccccttcaggatgtgtacaagattggtggtattggaactgtccctgttggacgtgttgagactggtgtcattaagcctggtatggttgttacttttgggcctactggtcttactactgaggttaagtccgttgagatgcaccatgaggctctacaggaggccctttccggtgacaatgttggcttcaacgtgaagaatggtgctttgaaagatctgaacc

SEQ ID NO: 87236 - DNA, 510 bp, Zea mays
  unsure (1)..(510): unsure at all n locations
agtttagtgcttctttctacgacaagcanatgactgtcagtgctcgtaccggtccggaattcccgggtcgacccacgcgtccgaagaggatcaataaccttcatctgcagatgcagctgcagtgcagtcataagcgtactacttagtgtcatgtcatctcatcaggactctgattgatcaaatcaccgtacatgcacccggcccgcagtgggcgtgcaccacgagcgtggacttctcgctggcgcatctgatccaggtgatcatcctgctgagcaccgtcggggccaacggcggcggctacctcgcctccaagtacgtcgtgcttgccatctacaccgccatcctcgtcgtgcacggcctcatcaacagcctgcacatccagtggctctcctggttcggacagctcggagccttgtggaacgtcgcgggcgtgttcgtgctcgtcatcctggtcccgtccgttgccaaagacagggcgagcgccgagttcgtttttacccacctaacaac

SEQ ID NO: 87237 - DNA, 497 bp, Zea mays
  unsure (1)..(497): unsure at all n locations
aggggatggaaggttataatagtcagtcgnaccagtatgtacttccgttcggaattcccgggtcgacccacgcgtccgggccgaagaagaggagaagcgaagcaagcaggcttcgagaacaagggggagggggaggaccgggcgaaagggggaactagagcaagatgggcggcgaactgctgcttgcgctcctcctcgtctctgctgctgccgcccctcaggtacttggagttggcaatggagacaatcacatgagaatcatccaggaggacatcattgagacagtcaacaaccatcccagtgctgggtggacagcctcacgtaatccttacttttcaaactataccattgcgcaatttaagcacatacttggagtgaaaccagcaccacagaatgcactaagcaatgttcctgtcaaaacttattcaagatcactggaacttccaaaagagtttgacgctagatctgcatggtcccgttgcagcacaatttggaat

SEQ ID NO: 87238 - DNA, 516 bp, Zea mays
  unsure (1)..(516): unsure at all n locations
tgggaagtagtgtgtatgaattttcgggaatcgnctgnacgttctggttcggaattcccggcggagaggggcctcctgtagcctctcacttccctcagtcctcgttcgtctgctccctcctctctctacctatctggaggtatccttcctgtggcgcggcagagatggctgcccctgcctccaccacggctgctgctgctgcagcgctgctgctgctgctcctactgtcgctcgccgcggctgcggacatgtcgatcgtgtcctacagcgagcgcatcgtctaggaggctctgcggatgtactctcaatctattgctgtgctctgtctctcccactatgcccttactcttttttaatttcttttttttataattctttttgttgtttgttttttatttatacttattttttatttatttaaataattattttttttttattttttatcatattttatatttaatatattttcttatttcgttttacttatttttatattatatatctatccatttt

SEQ ID NO: 87239 - DNA, 498 bp, Zea mays
gtgtagtgtctcgtattatgtctaccgaacacggtcagctacgtctgtaccggttctcggaattcccgggtcgacccacgcgtccgctttaggggaacaattagatatgcgagtgtccatgctcatttggggtgcactggtaggaggagggatgatttagagtcactggcatacacccttattttcctgataagaggaagattaccttggcaaggctaccagggagataccaagagtttccttgtttgcaagaagaaaatggctacttctccggagatgctttgttgttattgtccagctccattcaaacagtttcttgagattgtcacaaatatgaaatttgacgaagagccaaattatgccaagcttatctctctttttgatgggttgattgaagcacctgcttcgagacaaatcagaattgatggggctctcaaggttggacagaaacgtggaagattggttgcagatctagaagaagatgaacaacctaaaaag

SEQ ID NO: 87240 - DNA, 498 bp, Zea mays
  unsure (1)..(498): unsure at all n locations
tgggggagagcggtctgtgatttcttgcccttcgctaggnctgtccggtctcggaattcccgggtcgacccactcgtccgctggtccgtggccatggcgtcgtccatgctctccgctaccaccgtgccactccagcagtggggctgcctgtccgagttctccgggctcaggagctccgcgtcgctgcccatgctccggaatgccacctccgacgacttcatgtccgccgtctccttcaggacccacgcggtcggcacgagcggcgggtcgcggcgggcgccgactgaggctaagctgaaggtggccatcaacgggttcggccgcatcgggcgcaacttcctgcggtgctggcacgggctcggcgacgcctcgcccctcgacgtcatcgccatcaacgacaccggcggtgtcaagcatgcgttccacctgctcaagtacgactccacgctcggcatcttcgacgcccacgtttagcccggtgtctacaacgccattttg

SEQ ID NO: 87241 - DNA, 491 bp, Zea mays
aaggtgtgtatgtcacccgcacattacagtatcgccgtaccggtccggaattcccgggtcgacccactcgtccgcataggctcattcatcgaaactcaaatcagagagactggaaaagaaaaaagaatggggatcaaatcaatagaaggaaggatcccttacctgatttgaatttcatcctcctttaaataggatatgctctaagtcttcccatactttcctataatgactgcaacgattttctccattttgcgaattcctattttatttgaagtatattactatcatatacattatctaaatcgatccactttaaataaaatagaaaaaatcgaaagaaaaaaaaaaaaagaaagagtaaataataaaacaggatattctgtttcataattctgaaatagagttcttttttttagtattactcctcattaagatgtatatattaatcatcctattttaatatatattaatcatcctattttaattagggg

SEQ ID NO: 87242 - DNA, 506 bp, Zea mays
  unsure (1)..(506): unsure at all n locations
cgttagatgttcatcgtaattttccggaaatcgcnncttacgtatcntgatccgtaattcccgtctggagccactcttccttgattcatcactcctcccgttgggaatttatcttctagtctgccctcctcttctcatcgtcctttcttactaagccagtggcactttcccttgttgctctaactccctaacgtgtgtcggttctgtcttctagcatattctcctgttgctatcttggattcttacttatattctttcattcataattcctcacactttatcttctctccactgtctttttaaccaatctctattaccaattgtttgaatcaacagttccttttcttactattttgaattactattacttttccttcattatttattatataaattatatattatttaaaactttctaattctatttcaaatttttactaattatttctttatatatatttctatttttttaatttttttttattattatattttaatattttttt

SEQ ID NO: 87243 - DNA, 523 bp, Zea mays
  unsure (1)..(523): unsure at all n locations
nagtgttagaggtgtattagtcctacggcaacatagtagtgcatctctcggttctcggaattcccgggtcgtacccactcgtctcgagattggtgagggtcggctatgtgacctgtctacaaggtgaacactcaaggtatgggtacagggtatgtgccctaaaggttcgtgtctttacattctacgacaagggtcaaacggagtttcgttaatgagtcttcttgcaatcttctgatgtaacacatgangaatcttgtcaaatctctatggtctgctgtgctagaaggaaaccacaggtatccttgtctacaattatctgtgaaaataatagtcttgcacatacccttctagattcgcgacacagcaacatccagttcaactggagaactcgggtaaatatctgcatcggtgttgcccaaggattagctttcctccatggcagtgtcagccctcacattgttcaccgtgacatcaaggcgagcaatatacttcttgataaggacatgacgcccaaaatatctgt

SEQ ID NO: 87244 - DNA, 500 bp, Zea mays
ggggtgtaggtgtttctgattcttcaccctcgtagtctctactggtctcggaattcccgggtcgacccactcgtccgctccgactcctccggcggcggaaccccttccggcgaggatggggaacatcttcgtgagagaagcccaagatcaccgaagtggacagggccatcctcaccctcaagactcatcgcctcaagctcgcccagttccagcagcagcttgagaaggtaattgaagcagaaaaggaagctgcacggcagttggttcaacagaagaagagagacagagctttgattgcactgaagaagaagaaagctcaggaagagctgttgaaacaagttgacacatggcaaatgaatgttgaacaacagctctcagatattgaactagcatgtaaacaaaaggctgtatttgaaagcctgaaggctggaaactctgtccttaagtctattcataatgagatatacatggatgatgttcaaaatctgattgttgacact

SEQ ID NO: 87245 - DNA, 496 bp, Zea mays
  unsure (1)..(496): unsure at all n locations
ttggttatagtgtgtatatttnttcgaaatcgnctcncntncgtacccgtttcgaattcccggctggactccacttcttcctccagtttttcttggtccctaaacttaattccttttttctcttttttgttccttggctgtattaaaattacatgtggttgaagtcatcaatagaaccccacaattttttgggtcctacttattttcattgtcttcggaatagtataataatttaatttggaatatctgccaatatcttgggaaaatctaagttaatgattaataagataaagaatttatgaaggatattctcatattgactcaatacaaagataagtatattcaaaatctatccctttttagttaaaggatatctacatctgagcatcccataatatctaataaatacaaaatcgaatatctgataatcccttatgaaagaaactgaatacattcttttaataatcaagattcgaatcaatccttgtcttgtttg

SEQ ID NO: 87246 - DNA, 491 bp, Zea mays
agatgtgtgtatgtaaaacgaacaatgatagtatcgctctaccggtccggaattcccgggtcgacccacgcgtccgcgaccttcaagtctcgctacgtagcagtgcaataaaaaaagcagccgcaatggcgagcagcaccatggccctctcctccacggccttcgccggcaaggccgtgaacgtgccgtcgtcgtccgccttcggcgaggcccgcgtgacgatgcgcaagacggcggcgaaggccaagccagcggcggcgtccgggagcccgtggtacggccccgaccgcgtgctgtacctgggcccactgtccggcgagccaccgagctacctgacgggcgagttcccgggcgactactgctgggacaccgcggggctgtcggcggacccggagacgttcgccaagaaccgggagctggaggtgatccactcccgctgggccatgctgggcgcgctcggctgcgtcttccccgagctgctcgcccgcaac

SEQ ID NO: 87247 - DNA, 504 bp, Zea mays
  unsure (1)..(504): unsure at all n locations
tgtgatagatgtactcgagtttctgggccactngcttgccagctcctcgcttcggaattcccggctcgacccactcttcctgaggaaaagggtccgttgtgtctacgttttatagggtcgtcggctgcccttactagaggaggatcacctctttctcgacgggccctatcgtgcctgtgttccgatccttgctgtctcggctctctctgctcctagtcctcatacctctgtactctctcttgctttgtcttctgctactatcacgtctcctcttcacactccggtcaatcttacaatctctctcaaactgtccaaaaagaaagcgaccatatcccgcatctcgatgatgcctattggtactccacgtgttccttaccgaacacctgttgaaagaacctgtcaatggcttgacatatggaacgctctgtaccgtgagcggattatcttcattggggacaatatagatgaagaattcagcaaccaaatgttggcaagcattctctn

SEQ ID NO: 87248 - DNA, 502 bp, Zea mays
ggttgtgatgtgtattgttccaccgaacaaggtagtattcgctctaccggtccggaattcccgggtcgacccactcgtccgcaagctgtcccccgaccactccgccgtccgctccaatggcggcgccggccagctcctgatgcttccacccacgcgcgaccgccagcccgccgtcttctctcagcgtcggcaccaaggtcttcgtcgggctcagggcgcagaccaagctcggttcgtcggagtcgtcatgcccgaatgtcagcgctgggttccacactgcggtcaaccggagaatctctctcaggttgtccaaaaagaaggcgaccagagcccgcatctcgatgatgcctattggtactccacgtgtgccttaccgaacacctggtgaaggaacctggcaatggcttgacatatggaacgctctgtaccgtgagcggattatcttcattggggacaatatagatgaagaattcagcaaccaagtgttggcaagcatgctcta

SEQ ID NO: 87249 - DNA, 484 bp, Zea mays
tattgtcttgtatctgccaagatagtatcgccgtaccggtccggaattcccgggtcgacccacgcgtccgcatcaatctcctcgatttggatgtccacgagcttattgagctgttgctcctgcgtcgtgagatcctctggctgctgcgcaacagtttgttcatcctcatccccaatctcatgtgtccaatacacagcaaaagatgcctccttattgaaactggttggcatctgcaacagacgcttcctgttagttccagaggcactgccaaggatctcccccttcatgaggtcatatatgcaggccctgaagttgtccatgctcttatgatcctgagagtcgaggcttatgaagatcagaatttcccagctccggatgaactgtttcttctttatcttcagcttctaacgaacagtctccatcaggtcagccggtggaaccattctcaaactttgggccctttttgacaggttggtcttcttca

SEQ ID NO: 87250 - DNA, 630 bp, Zea mays
  unsure (1)..(630): unsure at all n locations
nggtagagagtagttctctgtataaagaacatatatagtcattgctcgtaccggttccgtgaattcccgggtgcgtacccacgtcgtctcgtcacatactccatcgtcatctcatcctcactatatgctgcaactagcatcatgctgctcatcctgcttgcgcttccttcctgtcatgtgatagggttgtctacatcgtatcatattcgtgatagaacgagatctgatgatgatccatgcgtgctggaaagatccataggttctagcctaggctactcaatcatagacnnctttgacatagggactggctaagcaagtgtctgcatgactgcatggccttccttagaagtcgcttacaatcaagnngaggagtattagaccaatgagagattagatggaccatagatagacatgcagtctggtagccctcaaagggtctgtggtaggccctatcgatagcctatctcgctctctggaagggtcatatggcntttctgttcaaaggggataagatagctcaagtcatagggtcattgcaaggatagatacttcggtctggcagttcatccaatagttccctcggatgaagcctggcctaaagatttgactttcccctgggaagccaagggg

SEQ ID NO: 87251 - DNA, 501 bp, Zea mays
  unsure (1)..(501): unsure at all n locations
tggtataacgtgtactatgtttcattnctcgatgcactacgtaccggtctcggaattcccgggtgcgacccactcgtccggccggtcaagaaaactccccagtccagtctgcgagttggatggccttcttcttggcggtcttgttcatcctcatcttgctagccatcgcctcctacgtccagtacactcgctggcaaaaggggaaaggccgcttcggcagccatgggaggtctgctcccttgaatctgcctcctggctccatggtctggccttaccttggctagaccctccagctttactcccaggaccccagcttcttcttcgcttccaaacagaagaggtactgcgagatcttcaagactcaccttctgggttgcccgttcgtgatgctggctagcccggaagctgctcggttcgtgctggtgactcaagcgcacctgttcaagccgacctacccactgatctaggatcgcatgatctgtccgttcgctctttttttct

SEQ ID NO: 87252 - DNA, 496 bp, Zea mays
tggtgagagtattgtgattcatcgaaccacgtcagtatctctgtaccggttcggaattcccgggtggacccacgcgtccgggaagaaaaaaaaaataactccaccattcccttccctctcgcgagctcagatcgctgtaagcatggaaaaaagaaaaatggcgcagctggtggagacgtacgcgtgctcgccggccacggaacgcggccgtggaatcctcctggccggggaccccaagacagacacgatcgcctactgcaccggccgcagcgttatcatccgccgcctcgatgcgcctctcgacgcttgggcctaccccgaccacgcctaccccacgaccgtcgcccgcttctcccccaacggcgagtgggtcgcctccgccgacgcctcctgctgcgtccgcgtctggggccgctacggtgaccgcgctctcaaggccgagtttcggcccctctcgggacgcgtcgactactctcgcttgtcccccgaccgccta

SEQ ID NO: 87253 - DNA, 475 bp, Zea mays
  unsure (1)..(475): unsure at all n locations
cggtagttttagtangtccctagcctcgtacgtcgtactggttcggaattcccgggtcgacccactcgtctcgagtcggaaggagcaggtggacgtggctgtcgcgaccaagttcgcagctcttccatgggggttcggtcgtgggagcgtcatctgcgcgctcaaggcctcgctggatcgcctcggtgtctcgtcggttgagctctaccaactccattggccagggatatggggcaactaatactacctggacggccttggagactctgtggagcaagggcttgtgaaggccgtcggggtctcaaactacagcgagaaacgtcttcgagactcgtacgagcgcctcatgaagaggggggtcccgctcgccttcaaccaggtgaactacagcctgatttccgggacccggagaagaccgggtgaatgcggcctgcgacaagctcggcgtacctttaatgcgtacttcccgatggcg

SEQ ID NO: 87254 - DNA, 473 bp, Zea mays
ggtaattgtattatcacccgaaaaagatagctactctcggttcggaattcccgggtcgacccactcgtccgatatcaagctgccaaacccttttccaaggttaacatatgcagaggcaatggatcgctgatgggacagataggcctgatctccggttcgattgggagctgaaagatgttagtgatgtatttttggggagtagcttcaaggtttttgctgatacattggaaagtggaggcgtaataaaggcactgtgtgttcctggtggtgccactgttttttcaaacactgacctgaagaaaggaactgtttacactgaagcttccaaagctggagccaagggcttgcctttcctcaaagttatggagaatggggagcttgaaggaatcggtccactgttatcgagtctgaaacctgaaaagaaagaccagctcatggaacttctggacacaaagactgttgaccttatcctg

SEQ ID NO: 87255 - DNA, 488 bp, Zea mays
gtgtctgtattatttcatgcacatcgacgtcacgccgtaccggttccggattcccggctggacccactcgtccgctcgtctcctcggtctcccctccctgtcttccagagactcagagcagggcgctcgtgagtcggaggagaagcgcgaccactaccatgggctttatctcgttcgtcggccgggttctcttcgcctccctcttcctcctctcggcctaccaagagttcattgaatttggaaatgactgtggacctgcagcgaagaccttgaagccaaagttcaatttgttcgtcaagctagtgtccaagaatactggactggggctgccgcatatggatataaaaactgtcattgcagctaccatgtttcttaaaggctttggtggtcttctgttcatagtcagcagctcatttggagcattcctcctgctcatttacttggcgtttataacccctattgtgtatgacttctactaccatggaatt

SEQ ID NO: 87256 - DNA, 360 bp, Zea mays
tgggaggtgttttctacccgaaaagtacgtacgctctactcggtccggaattcccgggtcgacccacgcgtccgggccaagatccaggacaaggatggcatcccttcagaccagcagcggctcatgtttgctgggaagcagcttgaggacgggcgcacgcttgccgactacaacatccagaaggagagcaccctccacttggtgctgcgcctcaggggaggcatgcagatcttcgtgaagaccctgaccggcaagactatcaccctcgaggtggagtcttcagacaccatcgacaacgtcaaggccaagatccaggacaaggagggcattcccccagaccagcagcggctcatctttttt

SEQ ID NO: 87257 - DNA, 377 bp, Zea mays
  unsure (1)..(377): unsure at all n locations
nggttgagtgtgtgtttcactacagacagcatagncatgctcgtaccggtctcggaattcccgggtcgacccacgcgtccggcacaccaaggagagtacgtggaggagcagccatggcttcatcggtggccgccgcggggagcacattcctgggcacccgcctggcggacccggcgccacagaacgggcgcatcgtggcccggttcgggttcgggttgggcggcaaggcgaagcctgctccgaagaaggtggcgaagacatcgacctcctctgaccggccgctgtggttccccggcgccgtggcgcccgactacctggacggctcgctggtcggcgactacgggttcgacccgttcggtctcgggaagcccgttttt

SEQ ID NO: 87258 - DNA, 361 bp, Zea mays
  unsure (1)..(361): unsure at all n locations
gttgagttttatgtagacggggggatagtatgctctactcggttcggaattcccgggtcgacccacgcgtccgggctctgcagccttggtttcccttgcactatttggtgcgtttgtaagccgggctagtatctccactgttgatgttctgactcctaaagtattcatcgggcttattgtcggtgctatgctcccgtactggttctcggcaatgaccatgaagagtgtgggcagtgctgcgctcaagatggtggaggaagttcgtcggcagttcaacaacatccctgggctcatggaaggcaccacaaagcctgactacgcaacttgtgtcaagatctcaacggatgcatccatcaannaa

SEQ ID NO: 87259 - DNA, 489 bp, Zea mays
ggtgagaggttaattttcaccgtatgggggggatagtattactctttcggtttggaattccgggcgggacccacgcgtccgatgcgatccatggctctgcattctccacaatccatgtgacgcccgagactgttgatctattccagttatgaggttatgggcttggatgccactgctctgtcttatggtgaccttgtcaagagggtccttcggtgctttggcccctcggagttttccgttgccgtgaccatcttcggcgggcgtggccatgccgggacatggggaaaggcacttggtgcagaggtctatgactgcatcaacatggtggagcaggagctgcctggaggcgggctcctcgtgtaccagatcttctgtgctgctgaagactctgttgctacctcgcccaaatctgtttgccactgctttgacggcttaaacgttgatagtgcttcttatactatgtaatttgtctacttcttgcttaattcc

SEQ ID NO: 87260 - DNA, 484 bp, Zea mays
  unsure (1)..(484): unsure at all n locations
nagtgagatttgtatagtagcgagagggtatgctctctcggtccggaattcccgggtcgacccactcgtccggtcgttgtgagaattcttaattcatgagttgtagggagggacttatgtcaccacatagggagactaaagcaagtgttggatttaaagctggtgttaaggattataaattgacttactacaccccggagtacgaaaccaaggatactgatatcttggcagcattccgagtaactcctcagctcggggttccgcctgaagaagcatgagctgcagtagctgcggaatcttctactggtacatggacaactgtttggactgatggacttaccagtcttgatcgttacaaaggacgatgctatcacatcgagcccgttcctggggacccagatcaatatatctgttatgtagcttatccattagacctatttgaagagggttctgttactaacatgtttacttccattgtgggtat

SEQ ID NO: 87261 - DNA, 368 bp, Zea mays
  unsure (1)..(368): unsure at all n locations
nggttggagagactacgcacgatgtgaagggagaaagtagtctcggttcggaattcccggcggagcacgacgcacgcagagccgcagagatccgtcacactgcatgttttgaaaactgaactgtaagatggcatgagggtagctttcccgtgaggaaaatgtgtacatggcgaagctcgccgagcaggcagagaggtacgaggaaatggttgagttcatggagaaggtagcgaaaactgttgactcggaggagctcactgtggaggagcgcaacctcctgtctgttgcatacaagaacgtcattggagcccgccgtgcctcatggcgcatcatctcctccatcgagcagaangaggagggtcggggan

SEQ ID NO: 87262 - DNA, 380 bp, Zea mays
gaggtgagacgtgtcttgttcacccgcacagtgacgtatcgctgtaccggtccggaattcccgggtcgacccacgcgtccgatcctcggcgtcgtctcctgtcctctccacgccaagcaacctccccaccccgcgccgccctccatgctcgcctcgagatcttagcgggcagctccggagagcgccgacgagccccctgatccctcctcgccgccgccgccaaccgaccgggggaggagaggaggggaggggagcgatggagaccgccgactactccgggaagctcttcgtcggcggcatctcatgggagacggacgaggaccgcctccgcgagtacttcggccgcttcggtgaggtcactgaggccgtcatcatttggg

SEQ ID NO: 87263 - DNA, 488 bp, Zea mays
gagggagagagtatgttatagagggggggacggtatgctctcccggtccggaattcccgggtcgacgcactcgtccgcttctcagcacgtacctcgagtggtgtcacacaaaggccggtgtcagtgaccgcttcgttggatcacaaaaccagcgatgccagaaggaagttcctaaaacttgcacttgggaaccttggagttggactgcccaccttgttgggcgctaagaaagctctcgctgatgagcaaggcgtctcgtcctcgaggatgtcttattcgaggttccttgagtatcttgacaaggatagagtgaagaaggttgatttgtttgagaatgggacaattgctattgtggaggccatttctcctgagcttggtaaccgcgtgcaaagagtccgtgtgcagcttcctggtctaagccaggagcttcttcagaagttgagggagaagaacatcgattttgctgctcacagcaaccaggaagactc

SEQ ID NO: 87264 - DNA, 360 bp, Zea mays
ggtagaggctcttgtacgccagccaagtaagtacgctctactcgtccggaattcccgggtggacccacgcgtccgacttctacagcccctctgctgcagcaagaaggaaagaagctagcgcttatagcttcgcagccatggccaccggcgccgcgtctagcctcctcaagtcctccttcgcgggctcccagctcccggccgccacgcggaccacaccggcgtccctcgaggtggccaccggcccgcgcggcgccggcgcggggcccatctgcgcgtccatgtccatgtcctcctacaacccagcctacgacctgacgatcttacagttcatccccatcaaggcatccattccgtttcccc

SEQ ID NO: 87265 - DNA, 372 bp, Zea mays
agatgtctctggcaccgacacgatagtagtgctctaccggttcggaattcccgggtggacgcatgcgtcccagggtcgataagtatactaggatacattgagactatgtcgccatagtaaagaacccgacgcagctcatccctgccaggtttatgatcaatgatcttggttcctgcttagagtggaataaagctatgcagaagattaccggtataaagagggaagatgcgataaacaaattgttaattggggaggtcttcacgcttcatgattatggctgtagggtgaaagatcatgcaactctaacgaaacttagcatactgatgaatgcagtgatttctggtcaggatcctgagaagctcttttttgttt

SEQ ID NO: 87266 - DNA, 381 bp, Zea mays
  unsure (1)..(381): unsure at all n locations
gagagagatgtatcttgnctacccgaaccatcgtagtcatcctccggttcggaattcccgggtcgacgtacgcgtccgggccgtgatcctcctgcagggccggttcgccggcaggaaggcggtgatcgtgcgcttgttctaggagggcacccgcgaccgcccctacggccactgcctcgtcgccggcctcgccaagtaccccaagaaggtggtccgcagggactcggccaagaagacggcgaagaagtcgcgcgtcaagtgcttcatcaagctcgtcaacttcacccacctcatgcccacccgctacaccctcgacgtcgacttcaaggacgtggccaccggcgggcccgacgcgctctccacccgcgacaagaagggggg

SEQ ID NO: 87267 - DNA, 482 bp, Zea mays
  unsure (1)..(482): unsure at all n locations
ggtagagagttgctctcaaacgacattatgnacctcttggtccgtaattcccgggtcgacgcactcgtccgaaatatgaaaggtgtcacatttatgacgattttgcattggtcttaatgacaaattttgacttttcatcactaaagtcaatcatcccctacgaaacgtcataagtaggagaggcttatgacattttgatctattgtcacaaggtattcgtcatagaaggctatatgtgttgtagtgagagtttatacacatggttagggtactcactatcttcaaagccgggaggttgctcaacatagacctcttccttgattggtccattgaggaaggcacttttcacgtccatttgataaagcttaaagccatggtaagtagcataggccaataatatgcgaattgactcaagcctagctacgggtgcataggtttcaccgaaatccaaacctttgacttgggagtatcctttggccaca

SEQ ID NO: 87268 - DNA, 484 bp, Zea mays
atgttgagctttttattcatcgcacacgtagtatgccgtaccgttctgattcccgctcgacccacttcttcctatcctgctgcactttagaatatttttagtattttttttgataaataagaaaagttgcacgatctcgactaattacttctgaataacttcagaaatcatatggaagaaccatagcatttcgcgattcattggtaaatttactttgattctctatagaccaataatgtgagaccattaacactgttaaagctaaactgcttgaagtccggtcaaaaaggggtactctttctacaactacattagtattagtctcgaaattctttaaactgtaaatatctagtgtagaatttatctgatatataactctcatatcgatataatagtttgaactatttactataatgtcacgcatccctttttacaattccaatattaatatcttatttatttttatttaaaatattattctttt

SEQ ID NO: 87269 - DNA, 485 bp, Zea mays
gagagagtgtattatcaaagaacgatggtaggctctcccgtttcggaattcccgggtcgacgcactcgtccggatctacacacatacatagtttcttctactacacgacgacaaacatggggaagccttgtagagatcggagagtggggtggatactccggcgatcgtcgggatctgagggctactccggaccggctgatcgaggtgaaggtcacggcggacaacagcagctgcatccgctccatctccttcatctacatcggagccgatggcaaaccgtacgaggaggggccatggggtttcggccatgctggcacggagtacaagattgatctgtgcaggttcgacgagagcttgacggagatctccgggaccacgggcccagcctacaacattgacaatctggtcaagtctctcaaattcgtcaccaacaaacgcgcttacggaccgtacggcagggacgagggcaccccgttccgtgtcat

SEQ ID NO: 87270 - DNA, 388 bp, Zea mays
  unsure (1)..(388): unsure at all n locations
atggtagatgtatgtgtctctcacgccctaaacgtangtnctgactgtactcggtctcggaattcccgtgtcgacccacgcgtccggcctcagcttgcaggttgcagccgattagaatcgagcgtgatctccacatggggacgtgtgactgagaaactagctacacgaaaaattctaggattcaagagaaaactatgtttcagatcaagcctgtccttgaggaggccacaagagcagtatacacagctctccaccctcaaaccatggttgttgctgacttaggctgctcatctgggcctaacacattacgcttcgtatccgaggtgattggcatcatagctcgccattgcaaagaacatggccgacaacatgaccacccacagttttt

SEQ ID NO: 87271 - DNA, 486 bp, Zea mays
gtggtggagcgttttctccatcgcaatagtagtatgctctacctgtccggattcccggtcgacccacgcgtccgcatggatctacacacatacatagtttcttctactacacgacgactaacatgggtaagcctgcgaagatcggagagtggggtggatacgccggctatcgtcgggatctgagggctactccggaccggctgatcgaggtgaaggtcacggcggacaacagcagctgcatccgctccatctccttcatctacatcggagccgatggcaaaccgtacgaggaggggccatggggtttcggccatgctggctcggagtacaagattgatctgcgcaggttcgactagagcttgacggagatctccaggtccactgcctcatccttcaacatcgacaatctggtctagcctcttatacttttcaccaactattgcacttacttacacgtactgctaaggttaattccttaacttttct

SEQ ID NO: 87272 - DNA, 370 bp, Zea mays
atgggagatgttatgtacaaccgacatggtagcattactcgtctcggattcccgggtcgacccacgcgtccgctgaaagaagccagagactgttctatattgtctttgtggcactgtacactgtaccaggtcggtatgagaaatatgaggacaaggttgatgcttttggtgagaaggctatgactgaactgaagaagtattatgccattttcgatgagaagtgcctatcgaagattccaaagggcccccttaaggataagaagcactagattggtagtaaggtatttgctatgaatcaacatctacattatgtcactagctgtcacctctttctctgaaggatggtgcttggtcctggtctctaggtttt

SEQ ID NO: 87273 - DNA, 373 bp, Zea mays
ggggggagatgtctgtcgtaccgaacgatcgtaggatctctccgttcggaattcccgggtcgacccacgcgtccggggctgaagaacgacaccgacctcacggcctctgacctcaaagagctcgtgggtcagtagaaggaggtctacctctcagccaagggagagccattcccctcagaccccaagaagcagctggagctagcagtgctggctgtgttcaactcgtgggagagccccagggccaagaagtacaggagcatcaaccagatcactggcctcaggggcaccgccgtgaacgtgcagtgcatggtgttcggcaacatggggaacacttctggcaccggcgtgctcttcaccaggaaccccaaaaacc

SEQ ID NO: 87274 - DNA, 379 bp, Zea mays
  unsure (1)..(379): unsure at all n locations
gagtaagtntttttccacgccagacatgtatgctctctcggtccggaattcccgggtcgacccacgcgtccgcagatccctctcccgtcccagctcgatcctgcccgatggccaccggatcgtacgcgggtggcgtccgacgctgagcaaccaggacaacgacctgcgacgaccctccgagcacccacgagatggtcgcggaggctgcgccgttctcctcatcggcgatctggtcgtgtcaccgcgacgagatcaccttcgaccgcctccacaagttttggagtgccctgtcacctcatgcacgacatgagctgctaagacttgataaacagacccttattgagcatgctcgcaagaatttgcactgttcaaggggggg

SEQ ID NO: 87275 - DNA, 386 bp, Zea mays
  unsure (1)..(386): unsure at all n locations
tgagtaaggnnntnnntntttgaatgcaatatcatagtcannacgctnctggttcggaattcccgggtcgacccacgcgtccgctctctgataccatctcaaggttccccatagacattcagccattcagggacaggagggaaggtatgaggagtgatcttaggaagacaaggtataacaacttcgacgagctctacatgtactgctactatgttgctggaactgtcgggttaatgagcgtacctgtgatgggcatcgcaaccgagtctaaagcaacaactgaaagcgtatacagtgctgccttggctctgggaattgcgaaccaactcacgaacatactccgggatgttggagaggatgctagaagaggaaggatatattttttt

SEQ ID NO: 87276 - DNA, 487 bp, Zea mays
  unsure (1)..(487): unsure at all n locations
ngggaaaatgttttgatctacgcttactgtacgctaaactcggtccggatttcccgggtcgacccactcgtccggtcgaacttggtacttactccaggcatgaatgcttctagaagttctcatgatgcagtggaggtgtctgatgaaggcaagactggcaatgaaacattgctttctgccgagggaggggagaggttgggaccatctttaaatggcaccagcgagggaattaaagggcgcctaaataatgatggttctgtgccccacacttcaaaagttgaaagagaagagggtgaattgtcgcctaacggagattttgaagaggaccattttgttcctttcgaagatggaacatctaaaggaaaggaagattctacaagcagaccattccatggtaggcctggggaagtggtaccctcttctgccgaggcagctggtgagaatgattctgattctgatgacagggtgatgaaaagtctcataagtt

SEQ ID NO: 87277 - DNA, 510 bp, Zea mays
  unsure (1)..(510): unsure at all n locations
taggtttttaagttttattattttagtctanatcactccgtcttgttctgtattcccgctgtacgccactcttcctcgacttctttcattgattcttgaagatatctatcttcttttgcaccacaatgtctacagtntctttcaacttcggatcaagcttccgctgctgctcaagctgcaagttctcttcaatccattttctctctgtccttttcagcaagaagtaccctgacctttatgagactagcaccgcctctcattccaccttcatcctcttcgtttcccctgataatatattccctcccttattctttttattcctctttattattttttttatctttttattctacttttatttttttttcttgttttctactcttttaacttcttttcttatttatcttcttttttatatttttttattattttttatttttttttatttattttttttttttttatatctttataattttaattattttttttttttatttaattattttc

SEQ ID NO: 87278 - DNA, 494 bp, Zea mays
tgatagagctacgtagtccagcggaaagaaagtacgtcatctactggtctcggtattcccggttcgacccactcgtccggtgttgtgttgtgctgttctgcgagaagatagagaagaggaggaagaagagcaggttcggagaatcctgcctgcgcgcgttacgacaagcatatatgggggagatcaccaatgtcatggagtaccaggccatcgcgaatcagaagcttccgaagatggcctacgactactactcgtccggctcctaggacgagtggactctgcaggagaacagggaggccttctccaggatcttgttccgtccgcgcatactgatcgacgtgtccaagatcgacatgaccaccaccgtgctggggttcaagatctccatgcccatcatggtctcccccactgctattcataaaatggctcacccaaatttggagaacgcctctgctctcgcctcttctgctgcaagcaccattattacacttttc

SEQ ID NO: 87279 - DNA, 505 bp, Zea mays
tggttttagtctctttatcccacgcaacacgtacgcactacagtgtctcggaattcccgggtcgacccactcgtctcgcgcaccacaagcgagctagggacccttctctgaagaagagagagaagacgtctctcggcggtctgcatccccgttccgcaacctctcgtctgctgcctgcctgcctgcctgcctgcaaaaaggagtttgtcatggcgtctaagcgcatcctcaaggagctgaatgacctgcataaagaccccatcacatcatgcagtgcaagtcctgctggtgaggacatgtttcattggcaagcaacaattatgggaccacctgacagtccctatgctggtggtgttctcttagtgaacattcatttcccgccagattaccccttcaaacctacaaaggtttctttcaagacaaaggtcttccatcctaatatcaacagcaatggaagtatatgccctgacattctcaaagagcaatggagccctgctttgacaat

SEQ ID NO: 87280 - DNA, 487 bp, Zea mays
  unsure (1)..(487): unsure at all n locations
ggtntgagtgtatgttttcaccccgaaaagtatgctctacatgtccggtattcccgggtcgacccactcgtccggttcgctgttgctctctccagtagtcccgttgagtgacctcccctgctcgacaactagttcgaccgccgccgccccacgcctgctggccaggtcttcggcggaccctttgccgtcgacgggcatccaccacaccagggttttgcacattaatgaagacttaaaagttccagaacaaagcactaagggtgctcgaaggaaaaatgctttaggttagatcaaaccatggtttttaaagcggtaaggcggtccaaggcgttggagcaccgtctggacgcctaggcgaggtaggtgggcaaggcgcctaggcgttagaccaccgcccagactcctaggctactccttaagaacagtggatcaaactgtagatcttgccactgccttcaagcatcctatggccacattgtttagaccg

SEQ ID NO: 87281 - DNA, 527 bp, Zea mays
  unsure (1)..(527): unsure at all n locations
agttttattagctttattaatccgattcgncttangtcgntactgntccgtattcccggtctgctccgtggccatggcgtcgtccattctctccgctaccacctttccactccatcaaggtgtcttcctgtcgtaggtctccttgctcatgagctcctcgtcactgcccatgctcctgaatgccaccttcgacgacttcatataccccgtctcctatagaacccactcagaagacaccagcaaattttcgcttcaatctctattattatcttatcatctatattccactttaatatcaatttactacataaaatttatcttatatttatttcattattatatattatttttaacatatctttcttctatctccttatattaacttttttttatatattttacttcttatttttaattttataaatatatttatcattatttattatatttatattttttatttattattctatcatttttaatattttcaatctttatttataattttatttttatattatacataa

SEQ ID NO: 87282 - DNA, 509 bp, Zea mays
ttgctatagctttactgttctcagccctcgtcgtactgcgttccggtccgattcccgggtcgacccacttcttcctagcccggtccatttttgaagctgctatatcaatgaccaaccagggtgttcaagggtgcccatatataatggttcctcttgttggaacaccacaggaactggggcatcaagtgactcttatccgccaagttgctgagaaagtgttcgccaatgtgggcaagactatcgggtacaaagttggaacaatgattgagatccccagggcagctctggtggctgatgagatagcttatcatgctgaattcttcttcttctgaacgaacgacctgactcagatgacctttgggttcatcaggtatcatgtgtgtatgttcaattttatttttattttttaatattattttttattattttctatttttatttattctatttatttattaattatatttttttttaaactctttttttttatattatatatttttattttg

SEQ ID NO: 87283 - DNA, 601 bp, Zea mays
  unsure (1)..(601): unsure at all n locations
nagggnatgagatggctgttantaaccgacaacgatagtagtgcatctaccggttctcggaattcccgggtgcgacgccactcgtccggcagaccggtctcagcatctttcacgtctcagtctccatgctatggtctgtcctccatccatggtcggggtctgcctccacgtgctgatgtgcgcggtcatctccccaatcaaggggtgggcctcnncttcggtcgagtggctctgcatcatccatgtctcatagatccgttgggcatagtcccaagtgtggccggctgtcccggccagtccccttggtaccggtctcccgatcctgcgtcatagtatcctctggtcccctttcttccggtcgagtctccccgagcctatcctcatccggctgatgttccccggctgactatcggcttgggacatccgtccgggccttgtccgtccgatcccctgagacccttcgtccatagaacccgtcgagcctggaaggtngnnatccatctcccgtctgggtccatgtctcgtgctgcgccctcggtctgcgtnncttccccgagcccttgctctcccgcatacggcgtcaaagttcggcgaggtccgt

SEQ ID NO: 87284 - DNA, 498 bp, Zea mays
  unsure (1)..(498): unsure at all n locations
gaagaaagattactgatttcaagaaaaagtagttaaactgtaccgttctnattcccgctcgacccacttcttcctactcccttctatctctacctatctctatctagccttcctgtatctcttcagatatgacttctcttgcctccaccacggcggctacctctacagctcttctgctactactactactgtcactcacctattcatcaaacatctctatctctttatacacttatattcacatcatattaacacttttaattctaaatcttttctaatacctctcttaaatattatatttaatttacttcatcttttctattaattttaattatttatacatactattatttcaataatcctatactttatattttattacatacaatcctatactatattatttcttcttttctatattatttaattatattatattctatcatatttattatatttatctttatttatctttcttattttcttaatattctattc

SEQ ID NO: 87285 - DNA, 537 bp, Zea mays
  unsure (1)..(537): unsure at all n locations
tagtttctatgcttctgatttttcgatcgtctcagtcgntcatgtccggtattcccggctcgacgcactcgttcggtctgggacaccgcggtgctgtcggcttaccctgagactttcgccaagaacctttatcgttttgtcatccactctcgctgggccatgctgttctcgttggtctgcgtgttcccggagctgctcgcccgcatctgcttcaagttcggctagtccctattttttatgtctcatttctcttatttttcatctttttttttcctttttcttctattttcttctttctttttcatcttttttatcttttttcttttcttaatttttacttctttcttttttcttcttacttttttattttttttttcttttgttttatttatttttttttttattctatattttatctttttttctttatcattattattctattttttttattctttttactttatattttttttatattttatttaatttttttttattttttatttctttttatttctatccttttttcttttt

SEQ ID NO: 87286 - DNA, 504 bp, Zea mays
  unsure (1)..(504): unsure at all n locations
tagtttttagatgttactgttttcaggggtgtacgtantatgtactggttcgaattccctcggtacgccactcttccttcgtcatcttgcaagttgcatcctattttaatcgatcgtgatctccacatttcgacagtttttctttataaactagctacactaaaaattctaggattcaagagaaaactatgtttcagatcaatcctgtccttgatgaggccacaagatcagtatacacatctctccaccctcaaaccatggttgttgctgacttatgctgctcatctgttcctaacacattactcttcgtatcctaggtgattgtcatcatatctcgccatttcaaataacatgtcctacaacattaccactcacatcttcaattcttcctgaatgaccttcccttaaactacttcaacaatctctttcagcttatccatcatttcaatataccttctcaatttaccacaatattaaggcatcctaaccattccttctttcttc

SEQ ID NO: 87287 - DNA, 509 bp, Zea mays
agttagttttaagatttttgttcccagccctcgtacgtcattgccgtaccggttcggaattcccggctcgactccactcttcctagaatagaaagattcagaataaacaatttttataggattcaaataatcaaataaagtaaatgtttgctggtaataaccttatttatgacaagtttcaaattggtaaagtatacccctaggataaagaagaagaaggggctgagaaaactcgcaagaaaagttccaacctatcgtctacttaaattcgaacgggttttcaaagcacaaaatctcatacatatgtctgttttcaaagcacaaagagttctagatgagattcgctggcgttactactaggaaaccgttatgatactgaatcttattccttatcgtgcattgtattccatcttaaagttggtatattctgtttcatctaattcatcttattataggtgatttctacattctaatttatttatattatatttattatttttttgttttct

SEQ ID NO: 87288 - DNA, 490 bp, Zea mays
  unsure (1)..(490): unsure at all n locations
gaggggtggagagtactcgntagcacgggaagacggatagtcatctctcgttccggtattcccgggtcgacccactcgtcctcacggttaactcacaacgaangcaacgactatgcttggaataatcccaccctttgtncgtcaaactccaaagacacgattgtagttggattaattcccaccccacaaccccccaccacaagaacttgttcgatcgaattcttcttcaactacccgcctcgttaacccaaggaaggaggcaaagcaaaggcttctcgcaaggtttcccgtgagcggcttctgcggctgtctccatgaacagcatcaagcatgctctgatttacagcttcgtggccaagggctccgtcgtgctgtctgatcacacggccttctccggcaacttcagcaccgttgccgtccagtgcctccagaatcttccccccaacagcaccagatccacctactcctgtgacggccacaccttcaactt

SEQ ID NO: 87289 - DNA, 508 bp, Zea mays
  unsure (1)..(508): unsure at all n locations
tggttttttaagctttattattccagctccattcgntatgtacgtaccggtctcggaattcccgggtcgacccactcgtcctatgataaacttcggattctatctctctcttccattcttacgtttccatattacactggaggctttctactcaaatctactaatactactctaatatgcccattggtgttccaaaagtaccttaccgcattccggagatgaataatcaacttcgattgacttatacaatgttatctatctagaaatgacactttttttaggtcaagagattcccttctagatcactactcatattacacgtctgatactatatctcaatacacaagatggacatacccacatgaatttgtacattaactcccctaacgggttgctaatctcaagtatcacacttatagatacgattcatacgtctacacttgatatatattcatgataccctaggatacccgaattcatagcctacttaatctactttaatgatacc

SEQ ID NO: 87290 - DNA, 538 bp, Zea mays
  unsure (1)..(538): unsure at all n locations
gtttagtttatagtctttctctgnttcttacttcttcttcgtctgtacatttttcggtattcccgactcgacccactcgtccctatctactacatcaaatatattaatagatctttctatatacccatctcttactcaataggcagtcttctacttacacttactaaatattactccaatattcccattgttgttccaaaactaccttacctcattcccttacattaataatctacttcattttacttatacaatgctatctatctagaaatgacactttttttacatcaatatattcctttctatatcacaaatcatattacacatcttatactatatctcaatatataatattgatattaccaatatttattttctcattaatcttccttaaccttttttcttaatattaattatattaccctttatttatttcaattctattattacttaatctcttaacataattttctaatatattccctattaatatttttaatttaatacatcttaatattattattattatttaaatcat

SEQ ID NO: 87291 - DNA, 522 bp, Zea mays
  unsure (1)..(522): unsure at all n locations
gtagtttttaagagntnnntaccttgattgcatacgatngtgctttctcacttnttcaantaacggtccggagccactcttgctccgactcgttcaagcccaacccgcggtctcacgtgcaggagtactgtctcgtggtcagctttctttctcacctggccgagagcctgcacaccttcttcttcctcttcgactacttggtcgtgccgtccgactaccgccacatggaagggttcggcgtgaacacgtacacgttcgtgagctctgctgtgaaggctcattacttcaagttccactggaatctctacttctgtattcggttcatcctgactttctatttttcttttcttttttcttattcttttctctcttttttttttctcttttattttttctatttttatttatctttttattttttttttattctattagattttttcttctttttttatttctttattcttttttatttttttatatattcttttttttttttcttcattatcctttattctattg

SEQ ID NO: 87292 - DNA, 489 bp, Zea mays
agagtttagatgtgcttgatcacgactagtctcacgacgtaccggtccggaattcccggggtgcgcagccgcatccgctgcttttcgttcgtcttcatcctactcgagggcgaaacccacaaaccctctccctgccgtactccggcctacacatgcaggggcgatgactctgggtagctccggcgccggatcgagcgtcgtcgttccccgaaacttcaggctattagaggagctcgagcgtggagagaagggcattggtgatggaacagtgagctatggaatggatgatgccgatgacatctacatgcggtcatggactggtaccatcattggccctcacaatactgtacatgagggtcgcatctaccagctgaagttgttttgtgacaaggactatccggagaagccaccatctgtcagattccactcaagaatcaacatgacatgcgttaatcacgagacaggaatggttgatccaaaggaagttgt

SEQ ID NO: 87293 - DNA, 535 bp, Zea mays
  unsure (1)..(535): unsure at all n locations
agtttatgtttttgatttctggatcncttcgcagtactgttcgattcccgtctcgacccacgcgttcgccagcactgaacacttgattgattcattaggtagctagctagctgaatcacaatgggtcctgccaagttccatgcgtggcagtagccacgacacgactgtgacgactactaacgctggcgctcctgtgtggaacgacaacgaggctctgactgtgggtcctctcggtcccattctgcttgaggactaccaccttatctagtaggttgctctacttttgctttagtctcatttatatctgctttgtttatatttcttttttaattttttattatttatttttttattattttacattgtgtttgttgtttttatttttatattttattttattttaattattattatttttttatattttattattattttttttatttttttattataattttatatattactttattttatttatttattctaattttatttatttatatttatttattttttttttattttttta

SEQ ID NO: 87294 - DNA, 511 bp, Zea mays
  unsure (1)..(511): unsure at all n locations
caggaaaagacacgttcatantttccttgaacctntcgcatgantctnaaaccataaaaaaaacaacagacaaaaaaaaacaaaggaacaaaaaaaaaaaaaaataaaataaaaacaaaaaaaaaaaaaaaaaagaaagaaaaaaaaaaatgtataacacccaaccaataaatacatcaaccaaaccaaaaaaaaaaaacacaaaaaaaaaaaaaaaaaaaaaaaaaacaaaaaaaaacaaaaacaaaaaaaacaaaaaaaaaaaaaaaaaaaaacaaaaacaaaaaaaaaaaacacaaaaaaaaaaaaaaaaaataaaacaaaaaaaaaaaaaaacaaaaaaaaaacaaaacaaaaaaatacaaaaaaaaaaaaataaaaaaaaaaaaaaaacaaaaaaacaaaaaaaaaaaaaaaaaaaaaaaaaaaaaaaaaaaaaacaaaaaaaaaaaaaaaaaaaaaacaaaaaacaaaaacaaaaaacaaaaacaaaaaaaaaaaaaaaacaaat

SEQ ID NO: 87295 - DNA, 528 bp, Zea mays
  unsure (1)..(528): unsure at all n locations
agtgttcgagcgttgttacccctagtcttcgatcactncgtaccgtctcgnattcccggctcgacccacgcgtccgcgacgagcagagggccccccttagctttcggagcaatggcggcgggatacgtggcgtatgacaactagcggactacctttttaatgttgttctttatctgctactccggctgtctcatgttcaatctgctctcacgcttcacgcgcaactagttcatcctttagtccaagtccaccatcatcgtttagttttccaccctctttctccagtttttctgcattttatataagtttcttattttttatctttctttttcttttatctatatttttctaattttttattttatattttttaggtgttttttttatttatttatattttttttttatatttatatattttattttctattatatttatattattttttttattttttttctcttatattattttttatgttatattattttattttattttattttatatttttatttttttatttt

SEQ ID NO: 87296 - DNA, 557 bp, Zea mays
gagtttgaattttgtcatttttgactctttgtacgtcgtctcgtctcggattcccggcgcgacccacgcatccgaccccagcctgatccacgctctagatatcctcgccatctgggcctgccaggtcgggctcataagcacggtttggggctaccgtattgccttctggccgttcggctaggttttttttttttttatattcttttttttttatgttgatttctttatttttttttttatttttttttttataaaatttttattttatttatttatattttttttttaatattttttttctttttatattttatttattttatatatttttttttattttatatttttttttaatttttttttattttttttttttattgtgtgttatttattatttttttttttatatatatattattcttaatttttttttttatttttttttttttattttatctttattttattttttttttatttattattatattttttattttattattttaatttttattttttttatttcttttattttttttattatttatactttt

SEQ ID NO: 87297 - DNA, 533 bp, Zea mays
  unsure (1)..(533): unsure at all n locations
gggttacaaatgtctctgtgnnttttacctctcgnactcnactatcgttccggtccggaatatcccgcgtcgacccacgcgtccggagatccttgttgatggccctcatgtcattgatcgctgcgcttacgtcacgganagcgtccttgctgcgtgctacaaggcgctcaacgagcaccatgtcctcctggagggtaccctcctgaagcccaacatggtgactccaggctccgactccaataatgttacccctgatgtgattgctgagttacaccttccgtaccctccataggaccgttcatgcttcttttttttctattgtttttctctttttattatcctttttatttttttcttttatctttttttatctctgttattgttttatatttatttttttttttatttattttttttatattatcaattctatatttttatttttttcttttcttttttttatatattttttttattattttattttattattttttttttttctctttacattatattttattttatatttt

SEQ ID NO: 87298 - DNA, 562 bp, Zea mays
  unsure (1)..(562): unsure at all n locations
tagttttgagcttcttcatttcctagccctcnattgcnatgtgtctcggtctcggattcccggctgcgacccacgcgtcctcggcaagcaagcaagcagcgtgtatttacatactaggcagccaggcagccagggcgcccaccttgatggtggcctcgtctgccaccgccgtcgctcctgtccagggtctcaagtccaccttcagccttcccatctcccgccgctccttcagaatcctttgcttcttcttcatctgcatattttatccttttcattcattttttttctttttttctttaatttttatttatttataatttcattttttattatttttttatttttttttatttattttatttattttatttattttatttttgttgtgattttatttatttttttattttattattatattattttattctatttatttattttatttttatattatttatttatattttttattttctattctattttttataattttttttattatcttttttattttatttttttttattaatattttacttcattttattatttcttg

SEQ ID NO: 87299 - DNA, 556 bp, Zea mays
  unsure (1)..(556): unsure at all n locations
aggtgggggcngacgtggtctgtttttccaattggcnnactacnacganccatccgcctcaattcccgggtctggtccgtggccagggcgtggtccatgctctccgctactaccgtgttactccagcaggggggcggcctgtcggacttgtccggtctcaagagctccgcgtcgctgcccatgcgccggaatgccacctccgacgacttcatgtccgccgtctacttcaggacccacgcggtcggcacgagcggctggccgtggcgggcgccgacggacgcgaagctgaaggtggccatcaatgggttcggccgcatcgggcgcaacttgctgcggtgctggcacgggcgctccgacgcctcaccggacgacttcatgggcatcaacgacaccttacgcgtagagccggcttccgaactgcgtacgtactacttcacactaaggatttgtgatggcatcgactatcgtgaaaaggccactttataaatttaagctgtatctttttaaaacgttggaccctatccgaattatgggtaggcactcctggggagaaaag

SEQ ID NO: 87300 - DNA, 525 bp, Zea mays
gatgatggtagagtggattggtctagttaaagatttattgctaacccgttcggaattcccgggtcgacccacgcgtccgctctgcccaaaggacgtaagcttttggcacgctatcttcgacttcttttctctggaagtgagctgacccgaatagtctgcatggctgttttccgacaccttaggagcttgtttggtggcttaccgtcagactatagtgctgcagaaacaaccatcgttcttgccaaggctgtttcctcttgtgtgcgccatatggaactcagtgctctcagtgcctgtctcgcagctgttgtctgttcttcgcagcagccacctcttcggccactcggtagtgcctctggtgatggggcctctctgataattaaatctgtgcttgatagaactgaccgaacttctgggcggatccccatttcgcagccaactacagcagatcaacaccttcgctttggcatgcctaattgaagctttctttggaccgttaccaaatactgtgccagcaaagttttg

SEQ ID NO: 87301 - DNA, 533 bp, Zea mays
  unsure (1)..(533): unsure at all n locations
gataggtgagttataaggcggatctgtgcctcccaccctncgtantctatttcggtctcggaattcccgggtgcgacccacgcgtccgcggacgcgtgggcgtcgccagcacgtgcgtcgacgccgcgaagctcgccggcttcgggctcgccacctcggcgctcctcgtctcgggcgcgagcgcggagggcacgcccaacaggctgacctacgacgagatccagagcaaaacgtacatggaggtgaagggcacgggcacggcgaaccactgcccgaccatcgacggcggcgtggagtcgttcccgagcaaggccggcaagtaccacatgaagaagctgtgcctggagcccacgtccttgaccggcaaggcagatggcatcgtcaagaacgccccgcccgagttccagaagaccaagctcatgacccgcctcacgtacacgctggacgagatcgagggcccgctcgaggtcagatcccacgggacgcttaagttcgaggaaaatgaccgggttgacttccccggcggtgaccgg

SEQ ID NO: 87302 - DNA, 523 bp, Zea mays
gtggagagtggaggggtttgtcatgataagaaatattgcactgctcgtaccggtccggattcccgggtcgacccacgcgtccgcaccactcttggcgaagcgaaatccaccgtacaccgctgcctccctctccctgtctcgtctcgtcgaaccagccgaggaagccaacgcagacccagcgatcctcgtcgcgcgtcctcctcccccacggagggaaggatggcggagcccaaagcggcggcggcggcgaggaagacgcgggtgggcccgtacgaggtcggcaagaccatcggcgagggcagcttcgccaaggtcaagcacgcgcgcgactcccgcaccggcgccgtccgcgccatcaaggtgctagaccgaacccacgttctgcgccacaggatggtcgagcatatcaagcgggagatttcgactatgaagctgatcaaacatcccaatgtggtacagctgcatgagggtattgcgagcaaaaccaaaatttacatggttcctagatttggtggtggaggcc

SEQ ID NO: 87303 - DNA, 552 bp, Zea mays
  unsure (1)..(552): unsure at all n locations
nagtntnttgagatgtttgtccacccagcaaaagtagtagtatgactcactcggtccggaattcccgggtcgacccacgcgtccggcagatcgcgcaccgccgccgcaacagcaaactcaagaaaggtggcttcgccgacgaaggctcggccaccaccgagtccgacatcgaggagacgctcaagcgcctcgtgtccgaggtcggcaagtcccccgaggaggtgttcgaggcgctcaagaaccagaccgtcgacctcgtcttcaccgcgcatcccacgcagtccgcccgccgctcgctcctgcagaaaaacgcgaggatccggaattgtctgacccagctgaatcccaaggacatcactgacgacgacaagcaggagctcgatgaggctctgcagagagagatccaagcagccttcagaactgatgaaatcaggagggcacaacccaccccacaggacgaaatgcgctatgggatgagctacatccatgagactgtatggaagggcgtgcctaagttcttgcgccgtgtggatacagccctgaagaatatcg

SEQ ID NO: 87304 - DNA, 527 bp, Zea mays
  unsure (1)..(527): unsure at all n locations
gaagttgggttttagtgtttgtcctcccacctctggtatngttatatcggttcggaattcccgggtcgacccacgcgtccgcaccgtcactcaacacagcacaggcagctcgagagagagagagagagaaagatgtcggggttcgggcaccaccacgacaaccagccggctcccccggcgtcgggccccaaccaggtgttcaagatcttctgccgcgccaacgagaactactgcctggccgtccgcgacggcgccgtcgtgctggccccggtcaaccccaaggacgaccaccagcactggtacaaggacatgcgcttcagcacccgggtcaaggacgaggaatgcatgccggcgttcgcgctcgtcaacaaggccacggggctcgccatcaagcactccctcggccagtcccacccggtcaagctcgcgccttttaacccgggccatgatgactcgtttgtgctgttgacggagaaccaggaccttggcaaaggcttctctttattctccttgggaaaaaaaccccg

SEQ ID NO: 87305 - DNA, 521 bp, Zea mays
atgtgggggtattgagaggtttgtctagaaaagaaagtaagtatgctctaccggttcggaattcccgggtcgacccacgcgtccggctcgatccgcttcccccgcggcgccggcggtggcagggcggccgtctccctgcgcgcccccgcgcctccagcggcggcggcggcaacatctggtagcattgctccagcgatttcattgaccgaaaaggccttgaaacatctgaacaaaatgagggctgaacggaacgaagatttgtgcttgagaattggagtgaaacagggtggatgctcaggcatgtcttacaccatggagtttgaaaatcgagcagatgccagccctgatgattctgttgtagagtatgatggttttgccatagtctgtgaccccaaaagccttctcttcatgtttggaatggacctggactacagcaacgcactcattggtggaagcttctcttttcagattcaaaccgcacaaaacctgtgggtgcgggaaatttttgggactgggaagga

SEQ ID NO: 87306 - DNA, 551 bp, Zea mays
  unsure (1)..(551): unsure at all n locations
gagggntgagacttctgngttccctcgaccccctgttgcatcactcactcggtcctgaattaccgggtcgagccacgcgtacgcggacgcgtgggcgtcgacagcatgttcgttctctccgcgaagctcgccggcttcgcgctncgacctcaacgcaactgggggggggcgctagcacagatgacacgcccaagaggctgacctacgacgagatccagagcaaaacgaacatggaagtgaacgtcacaatcacgtgtaaccagtgcccgaccatatacaactgagtgcactcagtgcctgtcaaggacctcaagtaccatatgaacaacatgcacctgtaccccaactccttaacgcccaaggcgaagggcatcttctaaaaattaaatccgagctggatatagcaaccctgataaatgcggatacgtacactctagacgacaacaacagaacaatacatgtcctttgccatgcctcatttaatgcttactattaacttcttaacaaatacctgcgacatcaaactataataatattaatcataaatgttt

SEQ ID NO: 87307 - DNA, 527 bp, Zea mays
  unsure (1)..(527): unsure at all n locations
tgattggtgagttaaggcggtatgttcctacgtctanatnatgctataccggttcggaattcccgggtcgacccacgcgtccgaatgtgaggaaaaaagtagaaaccattgtgggcatcataaatgacaaggagaaaatggaggccgtgagagataaagcagccagtaatcgtgataagtacattggactatcatccacaggcataacatataaatcaagctcagcctcatttggtagcaactacagttcaggcgaacgttatgggagtttcagtggtacaaaggaagctgactcatacggtgatagttacagggacaaagaatctgttaaaacttccacaagcaatagcggcagtcggaaatttggcagcaagctgaggaaggatgcgaagcctgataggaggaatgaggattatagttcacccagctctttgagacccccatctaatacaaataacactgaggacgactttgatgacttcgatcctcgtggatcaaatgggaaaacaacttgtaagtaaaaggag

SEQ ID NO: 87308 - DNA, 529 bp, Zea mays
gagggtggggtgggggagggtgtgtgttaccccgaaaaaagtatcgtaatactcgtccggaattcccgggccactccgcgctagctgaggacggtacagcggcacagaggtgcgacgtacgacgacgacgacgcaggcgccagacatggcatcccagctctccgccgccgtgccccggttccacggcctccggggctacgccgcgcccaggtccgcggtggcagcgctgccgtccgtgagggtgggcaggaagaggtcgtcgtcgcagggcatccgctgcgactacatcggctccgccaccaacctgatcatggtgacgacgacgacgctgatgctgttcgcggggcggttcgggctggcgccgtccgcgaaccgcaaggcgacggcggggctgaagctggaggcgcgcgactccggcctgcagacgggtgaccccgccgggttcaccctcgccgacacgctggcctgcggcgccgtcggccacattctcggcgttcgcattgtgcccgggcttcgaaccaaccgggcc

SEQ ID NO: 87309 - DNA, 522 bp, Zea mays
  unsure (1)..(522): unsure at all n locations
gagaggtagggtnagcgtgatctttcctccgacccgcngtangctatactgtccggattccgggtcgacgacgcgtccggcagcgcatgcaggtagcaatggcggtggagacgaagaagggcctggtgctgctggagttgtgggtgagcccgggcgggcagcgctgccgcatcgcgctggcggagaagggcatcgcctacgagtactcggagcaggagctgctgggcggcgccaagagcgacatcctcctccgctccaacccggtgcacaagaagatccccgtgctcctccacgacggccgccccgtctgcgagtccctcgtcatcctcgagtacctcgaggaggccttcccggaggcctcccccaggctgctccccgacgccgcctacgcgcgcgcgcaggcccgcttctgggcggcctactccgacaaggtctacgaggccggcacgcggctgtggaagctcatgggcgacgcgcgggcgcaagcgctccccgagaacgtgccagtggttccggaacctc

SEQ ID NO: 87310 - DNA, 525 bp, Zea mays
gaagatgagaattagatgctcattgcttgatacgcatgtacgtcatgctctaccggttcggaattcccgggtcgacccacgcgtccggcgatcaatgatcttcttatacaggttactgctaattctgttcggttagtcagttgggcctcccgggagttagtgaatcaatggaatgcaccagcaggattctcagtcaatgttgcttcagctaatgccagccaggttctgttggcaaccggtggtggccatcttgtttacctggaaattagggatgctaaacttgttgaagtgaagcatgctcagctagaacatgagatttcttgtcttgatttgaacccaattggggagaatccacaatatagttccctagctgctggtgggatgtggacagatataagtgttagaatattttcacttccagatcttgaattgataaggaaggaaaatttgggtggagaaattgttcctcggtctggtctgctgtgcaccttggaaggggtttcgtatttgctttgagctcttggg

SEQ ID NO: 87311 - DNA, 531 bp, Zea mays
  unsure (1)..(531): unsure at all n locations
taatatggagagttggaagaggctgtgtcgaattcctagccnatcatctcacaccgtactcggatcgcatttccgccgagcgtaccaatgtgaggaagctagttgctaccactgtcgtcatcataaatcacaacgagaaaatgggggcggtaacagatcaagcaggcagtaatcctgataagtacattggactatcatccacaggcataacatataaatcaagctcaacctcattcggtagcaactacagttcatgcgaacgttatgggagtttcactggtacaaaggaagctgactcatacagtgatagttacagggacaaagaatctgttaaaacttccacaagcaatagctgcaatcggaaatttgacagcaagctgaggaaggatgcgaagcctgctacgaggaatgaagattatagtttacccatctctttgagacccccatctaatacaaattacactgaggacgactttgatgacttcaatcctcagagatcagattggtgaacaacttgttaatcaaataaag

SEQ ID NO: 87312 - DNA, 528 bp, Zea mays
gatgggtagagaggaagggcttgtcctcgtatcgctagtaagtcacgctcgtaccggttcggaattcccgggtcgacccacgcgtccggataaatccaggaaatcccactggccaatgccttagtgaagcgaatataaaggaacggctgcaattttgctaccgtgaaaacttagttctgctagcacatgaagtgtatcaacagaacatttatcaagatgaacggccatttataagcgcaagaaaggttatgttcgacatgggtccaccaataagcagtgagcttcaggttgtttctttccacactgtgtcgaaagggtactggggagagtgcggacaacgtggtggatacttcgaaatgacaaatcttcctgccaagacagtagatgagatctacaacgttgcatcgatagcactgagtccaaacgttcctgggcaaatttttatgggagtaatggttaaccctactaaacctggagatatcgtgtacctgaaggtcgctgcttaaagcaagttcattcattaatttt

SEQ ID NO: 87313 - DNA, 557 bp, Zea mays
  unsure (1)..(557): unsure at all n locations
gaggcncngagagtctgagctcactcgtacaactgattgtatgcactcactcggtccggaattcccgggtcgacccacgcgtccggtccacccattccattccactacccacgcgcataattcacgcgaacgcacacgcacccgcacggcacatccagatgatgctgagggtttccccgtccccggccgccgcggtgccaacccagctctccggtgcgcccgcgacccctgctcccgtcgtcagggtggcggcgccgcgcggcgtcgcctcgccggccgctggcgccgcgtgcagggccgcgggcaaggggaaggaggtgctcagcggggtcgtgttccagcccttcgaggagatcaagggggagctcgccctcgtgccccagtccccagacaagtcgctcgcgcgccacaagttcgtcgatgactgcgaggccgccctcaacgagcagatcaacgtggagtacaacgcctcgtatgcataccactccctcttcgcctacttcgaccgcgacaacgtggctctcaaaggatttgccaagttcttcaaagaatccagc

SEQ ID NO: 87314 - DNA, 529 bp, Zea mays
  unsure (1)..(529): unsure at all n locations
gatggtagagttaagaggatttgtgctcaagcctctatcatcgtnatancggttcggaattcccgggcgagagcttcggcgggcccttcctcgtgcccagctaccgcggctcctccttcctcgaccccaagggccgcgggggctgcaccggctacgagaacgccgtcgcgctccccgccgggggcagaggtgacgaggaggagctccagaaggagaacatcaagaacgccgcctcctccaccggcaacatcacgttgagcgtcaccaagagcaacccggagaccggcgaggtcatcggcgtcttcgagagcgtgcagccgtccgacaccgacctcggggccaaggcgcccaaggatgtcaagatccagggggtctggtacgctcagctcgagtgattcgagtgtctaactgctatgtgtccgaccgtcgtcatggatcttgggaaggtgtatagataccatggataacttttgggaggcataggaggaatcgaggatatagggaacatggtaaagcaaaaattngggtt

SEQ ID NO: 87315 - DNA, 285 bp, Zea mays
ggaggtttaggagagtctccggtgtgggggcactcgttcagacacgcagcgcgaggcggagcggagaaggggcggcacttagtgcttcggaacacagaagctgcgagcacttgtaggaggaccagcgcctccacgaacgccccccagtcgttgcgcttgcaccgcctgacacctcagaccaactacgcgcgcaggacggcacttcgagacacagctcagcgaccacgggagacatcgagaaggccgcacaaggctgcaaaaattcgcgctgcttatgacagaggt

SEQ ID NO: 87316 - DNA, 520 bp, Zea mays
gttatggaaggggtggttgtcactaaagaaatatatgcatgctctaccggtccggaattcccgggtcgacccacgcgtccgtatatattaatcatcctattttaattaggttctaatccaattagtagtaagtatttgcttttttatttaatagtctctgactatcattaaataaagggtagagcaattcttttttctagagattctagagaaagtgagacaaagtgaagcgaaagagttttctttgtataagaattaggtctatatcatatctaaatagaagggaaatcaaaaagaagggaagtggggattacattggatgaatccttaaggaagacatatcacaaaagaaataaaggctaaagtaagcgctccttgcctttggtttgagcaaaacagattcttgtttcaccgaggaaaagagagaagttctggataaattgacaatgtcaacttgaattgactaattcagttccgcctattccacattaatgggagtacatttatgtttctgctttac

SEQ ID NO: 87317 - DNA, 553 bp, Zea mays
  unsure (1)..(553): unsure at all n locations
gaggggnngagaagtggtgtcagggaggcaagggagaatagtatgcactcaccggtccggaattcccgggtcgacccacgcgtccggttgtgctgtgctgcgagaagaaggagaagaggaggaagaagagcaggtgctgagaagcctgccggcgcgcgttacgacaagcatatatgggggagatcaccaatgtcatggagtaccaggccatcgcgaagcagaagcttccgaagatggcctacgactactacgcgtccggcgccgaggacgagtggacgctgcaggagaacagggaggccttctccaggatcttgttccgtccgcgcatactgatcgacgtgtccaagatcgacatgaccaccaccgtgctggggttcaagatctccatgcccatcatggtcgcccccactgctatgcagaagatggctcacccagatggggagaacgccactgcgcgcgcggcggctgcggcaggcaccataatgacactgtcgtcctgggcaacttcaagcgtcgaggaggttgcctcgacccggccaaggatccgcttctt

SEQ ID NO: 87318 - DNA, 552 bp, Zea mays
  unsure (1)..(552): unsure at all n locations
ngaggggnnaggatgtgatctatgaagaaggggaaaaagtatgcctcactcgtccggaattcccgggtcgacccacgcgtccggtcaaagaactaggagcacatacgcttgtatgtactgctttatataatgatggtgatggagagcgtaaatatcttccccagttctttaagttctctgtttcaaacccattatctgttaggacaaaggttcgcaccatcaaggacatcacatatctggaagcctgcatagagaaccatacaaaatctaatctttacatggatcaagttgattttgagcctgcccaacaatggagtgctacaagactggaagctgatgaacatccctcaacagtgaagtctgcaataggggatctctgtaaacaaccgatcctcatcagagctgggggaggaatatacaattacctttatcagctaagatcatcatctgatgaagctggtcaaacaaagtctgagggaagcagtatacttggtaaatttcagataacatggcgtacgaacctgggtgaaccaggccgtttgcagactcaat

SEQ ID NO: 87319 - DNA, 571 bp, Zea mays
  unsure (1)..(571): unsure at all n locations
aattgctattctcccgttcttcgcacccnttgctcactactgctctaaattaccggatcaccactcgtacgcttcaaggccctctacctgtgaatttcctttatctccttggttttttgaccttatctgaactgttaatatataaaccttggcatggcaataaaataatcccaacctattttattaccttaccaattcaatctacatttctctcattacatttattcactaccactttttataatctcatcttactctaaaactatatattatttcacattaatatcataaccccatctaaactaatcaattctttcaatactttatttcacattatctttactactattatctaaaactactaatatataatactatattctactaccaatttcttatttttatctaattatatttataaatcctttatctattatctatttaataatataatattaatcaaaatttttatattcatctttcttattttaaatcatcatttctattttattctaatattaacataatattcataatatctattttcatcttatccctattatattcttta

SEQ ID NO: 87320 - DNA, 526 bp, Zea mays
gtgtgggggtggtaagggttgtcctagtaagcatgtactgtactgctctaccggtccggaattcccgggtcgacccacgcgtccgagcgactcagcgagcgagagcagcacacacgcagctagctaggagcagcagcggaggagcggcgatggcggcctgcatgatctcctcgtcagctctggcggtggcgcctcagggcctgccgcccctcggccgccgcgcctcctccttcgccgtcgtctgctccaagaagaagatcaagaccgacaagccctacgggattgggggtggcctgaccgtcgacgtcgacgccaacgggagaaagggcaagggcaagggcgtgtaccagttcgtcgacaagtacggcgcgaacgtcgacggatacagcccaatctacaacgaggatgactggtctaccaccggcgacgtctacgtcggaggaaccactgggcttctgatctgggccggcaccctcgcttggatccctggcgggagcgcccctcctggtttccaaaaccatggccc

SEQ ID NO: 87321 - DNA, 524 bp, Zea mays
gattatggtttagagaggtttgtcatgctacgcaatattgctactgctgtaccgtccggattcccgggtcgacccacgcgtccgcgcctccactacaccacacagagccgcagcagactcgcaagggaaaggagatggatcgtctgcccgagtcgacccggagcatgaggaagtacgcgtcggaggccggcgggcttcgcgcggcgcggcagggcccccacgggcggtcgctgacggcgcgcacggcgcacagcatgtccacgacggcgctgcgcaccaagtccaagtcggccgcgtcgctgctgcgcagggtgcccttcgagccgctccgccccgtcctcgccaacctgcaagaggtgttcctcggcaccaagctcgccgtgctattccccgccgtgccgctcgccatcggcgcccagtgcgcgcactttggccaggtgtgggtgtttacgctcagcctactcggcctcatccaccttggctagcgtgtcagctttcttaacgagccaaacgggaattacacc

SEQ ID NO: 87322 - DNA, 714 bp, Zea mays
  unsure (1)..(714): unsure at all n locations
tatggggnggagagagtctaggcctccacctgcacaactgtattggtaggcactgcactcggtcctggaattcccgggntcgacgccacgccgtctcgcgcctcagtcttggctctcgccttctgggcttctgctgcanntcctccaaggggatcgtngnnatggccagtggcncagcgctaagggcctcctgcgggccactgccgctcactnctggnttggctgctcgctcgcttttctcgcctggggccgcttcgtcggcngaaagccctgtcggcagctttaaagctcaactagctttcgcggccctgccgccnnngtcgtccttcccgcggcgcttcggccctcgcttccgcgccgactcgccntgtgggaggccggttgactcgaaaggaggctgctccaagggggggttcgtgggctcctcgcaagctttggacctcccagcaacggttncgtccccggatcttttcggcgggctagcaacctgggctgggcttgcntctcgcaaagggctgcatnggtggaaggaagttctaaaccgtcattcacgtnngggtgtccccccaaaggaggccagggtgttcgagaatgctccaaccggccggcggctcgccattcattgccggganggtggccccaaacctccctggaagcttggcnccgccaagggagcaagtggctctggcggcttcgggaacccaggcctgcgcc

SEQ ID NO: 87323 - DNA, 524 bp, Zea mays
  unsure (1)..(524): unsure at all n locations
gtggatggttnnaagggttttttatagaaagatagtattctataccggtccggaattcccgggtcgacccacgcgtccgcccacgcgtccgcagaatgtttcatcctgttgttgctgtggtattgtcagtgacatgtgttcgtgcctttggagaggttataccgcaagcaatctgtaccagatatggcctagcagtgggtgctaactttgtatggctcgtacgcattctcatggtcatttgctatccaatttcttaccctattgggaaggtcctggactgtgctcttgggcacaatgagtctgcactttttaggcgagctcagttgaaagctctagtttcaatccatggcaaagaggctggcaagggcggagagcttacccatgatgagactacaatcataagtggagccttggacctgaccgaaaagactgctgcagaagctatgacacctattgagtcaactttctcactagatggggattctaagttggattggggaagcgaatgggaaaaattcttgccc

SEQ ID NO: 87324 - DNA, 532 bp, Zea mays
  unsure (1)..(532): unsure at all n locations
aataggaggttttaggagagatctgtttcacctagaacatgtatatgtacgctctaccggtccggaattcccgggtcgacccacgcgtccggtggccatggcgtcgtccatgctctccgctaccaccgtgccactccagcaggggggcggcctgtccgagttctccgggctcaggagctccgcgtcgctgcccatgcgccggaatgccacctccgacgacttcatgtccgccgtctccttcaggacccacgcggtcggcacgagcggcgggtcgcggcgggcgccgacggaggcgaagctgaaggtggccatcaacgggttcggccgcatcgggcgcaacttcctgcggtgctggcacgggcgcggcgacgcctcgcccctcgacgtcatcgccatcaacgacaccggcggtgtcaagcaggcgtcccacctgctcaagtacgactccacgctcggcatcttcgacgccgacgtcaagcccgtcggcgacaacgccatctncggcgacggcaaggtcatcaaggtccgggcc

SEQ ID NO: 87325 - DNA, 529 bp, Zea mays
taagatggttatagaaggtttgtccatgcacagaaatatagtatgctcgtaccggtctcggattcccggtcgacccacgcgtccgagtgcacgtacgcacgcactgggacactagcaacccataacagcgccactggccagggcgcgcgtcaagcttgcttagctagccgccatggccttcctctacgtcgtctgcgtgaagcccgtggtcatcaagggtctcgcctgctgctccatcttcggaaggaagctcgacgtcgccaggccgtagggccgcttcatgctcaagccacacacatccgtagtattggacaagtactgcgacaagagcgtctactttgacctcgaccacatcggcaacaccaacggacagtgcgacctctacggctttgacgcgctctagccctacgatccactacagagcaagttcttcgagacgctacaggctccgtacagcaagagaggtctgttgcttaaggtacctgctgttaggactgcgttaaacttgtggccctaccttaatcacgtc

SEQ ID NO: 87326 - DNA, 553 bp, Zea mays
  unsure (1)..(553): unsure at all n locations
tagtnnntaaggagtgtgtctatgccacgaggagtgatgtatgactcactcggtcctgaattcccgggtcgacccacgcgtccgtttagtgaattttccattcacagatccacagcatttgcagctacgtgcacagatattggtttagtggagctcttattcaaggaacaccaccaggagaggcttacatggtggcggcttttggagaacctgtaggtggtggcaaacctacatgggaggctgcttggcgagctgcttttgaaagatttcagtataaaaaatcacctcatatcagtttagagactcccacaagttcacttataggtagttctgtgcctgagaaagctagcaaaggtacagcaattacaactgtgccagctagcaaaaaagttggtaaaactgtggcgccagcacatcctgctgtaaccctacactctccaacttctgattttccttttggtagttctacatttaatctgcaacgaggcactcatctggattttagccaggcagtatcaccatttgcgtataattcacacatgagacatccgtt

SEQ ID NO: 87327 - DNA, 531 bp, Zea mays
  unsure (1)..(531): unsure at all n locations
gaaggttagtttaggagatgctgtgttgctgctcacgctncggatgcncatncggtctcgaattcccgggtcgacccacgcgtccgcagaaggtgagaagagagagagagagtgtgtgtgatcggtacaaggatcaccgctgggcctgcgcgtgctgctggaccgaatcgagtcagatcctgtccgaatccgagctaaaggatggcaaccggtagtgaagcctcgaaggcagctgaggctgtggttgactggcataaacacgacagcaagaggatgctccatgcggtttaccgtgttggggatctggaccgcacaatcaagtactacacggaatgctttgggatgaaactgctgtagaaaagggatgttcctgattagaagtacaccaatgcccttctaggctattggccagaaaactccaactttgcagttgaattgacatacagctattgtgttaacatggatgacattggaactggcgttgtgcatttctcaattgattattgttatttggttcaaagtaattggaac

SEQ ID NO: 87328 - DNA, 520 bp, Zea mays
  unsure (1)..(520): unsure at all n locations
gtgggggggaagntggggttngttaacgataagaatgtatgtatgctctccggttcgattcccgggtcgacccacgcgtccgcggagctgcgaggcaagcgcccgctgctgcccccggaccttccccagaccgacgagggcgccgacgtcatcggcgcgttccacgtcctcgcggagctcccgcccgacagcttcggcccctacatcatctccatggcgacggccccctcggacgtgctcgccgtggagctcctgcagcgcgagtgcggcgtgcgccagccgctgcccgtggtgccgctgttcgagaggctggccgacctgcagtcggcgcccgcgtccgtggagcgcctcttctcggtggactggtacatggaccggatcaagggcaagcagcaagtcatggtcggctactccgactccggcaaggacgccggccgnctgtccgcggcgtggcagctgtacagggcccaggaggagatggcgcaagtggccaaacgctacggcggtcagcttacctggt

SEQ ID NO: 87329 - DNA, 720 bp, Zea mays
  unsure (1)..(720): unsure at all n locations
gtttgtgagttaatgggcggtttcnnttgtactataagacgcgtganatgctactgcttcgtaccggttctcggaattcccgggntcgactccacgtccgtccggcttttcctcttcctggtggtctctnnctcgtcttctccaaccgaccgcccgattggcngnnattccagtttcgtacnncccgagtaccngntccagctcgttctcgtcccctgggaactcctcagcccccttctctcgtcccgcccttcggcacctttcgtacggccgcnncggcaccacaaaccgcgccagnntctcgagaaaataggaacctcggagggaaccgatgtgatggaggggatgactcnnngccgctgacccgaagacccgatgaagggggtgcccggtgaccaggntnactcgccnnngcggggacccaatctngnngggcatnccgtnncgtcgcncaaccttgggtaccgactgtngnctcccgtgggtggaagcngnctcacgtcngcgggctttccctgggcnctntaatcnncgngaccgccctcanagnnatgtngccgnngcacnnctacgnnngggcncacnctnntcgcncacnnncatcggggngcnnctcttacccatcggcngnntcgagcaagcnttcgtngccagaagcccccagcggcaaaggaaagcggccggacttttcggttaaaacccgggggcgccgctgtcggg

SEQ ID NO: 87330 - DNA, 557 bp, Zea mays
  unsure (1)..(557): unsure at all n locations
aggacntnaatggaggagttatatgctagtttcgacaaggatagtagtgctcaccggtctggaattcccgggtctggtccgtggccatggcgtcgtccatgctctccgctaccaccgtgccactccagcaggggggcggcctgtccgagttgtccgggctcaggagctccgcgtcgctgcccatgcgccggaatgccacctccgacgacttcatgtccgccgtctccttcaggacccacgcggtcggcacgagcggcgggccgcggcgggcgccgacggaggcgaagctgaaggtggccatcaatgggttcggccgcatcgggcgcaacttcctgcggtgcttgcacgggcgccgggaccccttggcccttgaagtcattggcattaaccacccccgaagccttaagcaagccgtccaactggttaagttccaattcaagcttggcatttttgaagccgaccgtaagcccggtggggaccacgccaatttcggcgaacgcaaaggcattaaaggcgtgttcgaaccggaacccaagcacctggcctggggggaagta

SEQ ID NO: 87331 - DNA, 535 bp, Zea mays
gataagatgagttgtagagtcttctttgcctccacgcctagcttagctatgacgtactcggttcggaattcccgggccgaacgcaagacctgcccttgaatttacaggataccccttcctcctctccatgggtataacattccgaggtatggtgaacaaaatccatgcataaagacgcactcgaagccaatatccccgcatttattgctacaccattgctcattctatatcctactcactttttacttattatccatgtataaacagcccagtctaaaccattcattacccatccaattactgactcatgaactgtaccacacacttaaaactataacgcatccattccatcaatgctactatctgcttgaaaacgttactattaccatcaaacactacatataatagttccaaccatacttgatatactgatcatcataataccttctatctacgtaaaatactaaattgcctaacatcgttgtctaattcttcttgcctttacaatgcattttaacaatttaaaggaaaacct

SEQ ID NO: 87332 - DNA, 554 bp, Zea mays
  unsure (1)..(554): unsure at all n locations
tgggggnnnnngagaggtctgtgttagtgtccgtcatatatagtatgactcaccggtccggaattcccgggtcgacccacgcgtccgcgtcgagacccaaccataccagcggcgccgcatgctgacgaggaggcggagtagagtggccggactacctcgacacctccactgcaaccatgggtatctcacgtgattcgatgcacaagcgccgggccaccggtggaaagcagaagacgtggcgcaagaagcgaaagtatgagcttggccgccagcctgctaacaccaaactgtctagcaataagacagtgaggagggtccgtgtccgtggaggcaacgtgaagtggagggctctccgattggatacaggtaactactcgtggngaagtgaggctcttacccgcaggacccgcatcctggatgtggtctataatgcatcanacaatgagcttgtgaggactcagactcttgtgaagagcgccattgtacaagttgatgctgctccattcaagcagtggtacctnactcactatggagtggacatcggtaggaagaaa

SEQ ID NO: 87333 - DNA, 340 bp, Zea mays
atttagagtgtcgtcctacgtagagtgcatagtaaggatcccttgtcttgaattcccgggtcgacccacgcgtccgcacgacttccgtccgagtctgagctcatctccacgcgccgccgccgccgctcgacgccggaccgggcagccatggcggaacagactgagaaggctttcctcaagcagcctaaggtgttcctcagctcaaagaaatctggcaagggtaagaagccaggcaagggtggcaatcgattttggaagagcattggccttggtttcaagactcccagggaagcaattgaagggacctacattgacaagaaatgtccattcactggaaccg

SEQ ID NO: 87334 - DNA, 489 bp, Zea mays
  unsure (1)..(489): unsure at all n locations
ggagcggatctgggccccgacctgncgcnangncgtaccggttcggaattcccgggctccggcgcgtgcccgctgttcctctctccctcccggctctcttcttcttctacacgctaccgtctcacaggggtaggcgcccctcccggatgccgctagttcgccaccgccgcccgcccgcccgccgttcgcctcatcatggccgcctcgtcgaccgccacctccgtccacgacttcatcgtcaaggatgcgagcggcaaagacgttgacctcagcacctacaaggggaaggttcttctcattgttaacgtcgcatcccagtgtggcttaactaactccaactacactgagctggcccagctctacgagaagtacaatgaccaaagctttgaaatcctggctttcccatgcaaccagtttggtgggcaggagcctggtaccaatgaggagattgtccagttgcctgcacacgcttcaaggctcaataccccc

SEQ ID NO: 87335 - DNA, 458 bp, Zea mays
  unsure (1)..(458): unsure at all n locations
atagtagagctcggtccggtattcccgggtcgacccacgcgtccgctctggtccgtggccatggcgtcgtccatgctctccgctaccaccgtgccactccagcaggggggcggcctgtcgcgagttctccgggctcaggagctccgcgtcgctgcccatgcgccggaatgccacctccgacgacttcatgtccgccgtctccttcaggacccacgcggtcggcacgagcggcgggtcgcggcgggcgccgacggaggcgaagctgaaggtggccatcaacgggttcggccgcatcgggcgcaacttcctgcggtgctggcacgggcgcggcgacgcctcgcccctcgacgtcatcgccatcaacgacaccggcggtgtcaagcaggcgtcccacctgctcaagtacgactncacgctcggcatctccgacgccgacgtcaagcccgtcggcgacaact

SEQ ID NO: 87336 - DNA, 307 bp, Zea mays
ttcgaaatggtttggaattcccgggtcgacccacgcgtccgtcgaccgttaagtctcgctacgtagcagtgctataaaaaaagcagccgcaatggcgagcagcaccatggccctctcctccacggccttcgccggcaaggccgtgaacgtgccgtcgtcgtccgccttcggcgaggcccgcgtgacgatgcgcaagacggcggcgaaggccaagccagcggcggcgtccgggagcccgtggtacggccccgaccgcgtgctgtacctgggcccactgtccggcgagccaccgagctacctgacgggc

SEQ ID NO: 87337 - DNA, 341 bp, Zea mays
gaggggagattgatctagagggggaaaaggaagagaggatcgctccggaattcccgggtcgagccacgcgtccgcccgtctcgcacgttccttcccaactccgcagcgtagcctctccgcggcgcgatccagatccaggttgttcagcatgggcctggtgaaggaaggcatcgacatggaggagggaacccttgagatcggcatggagtacaggactgtatctggtgttgctgggcctctggtcatattggataaagtaaagggcccaaagtaccaagaaattgtaaacatccgacttggagatggcaccaatcgccgtggtcaagtcctggaagttgatg

SEQ ID NO: 87338 - DNA, 488 bp, Zea mays
  unsure (1)..(488): unsure at all n locations
ngggaagatcgttataggaggggaaggaggggagtatgctctactcggtattcccggctcgacgcacgcgtccgatgataaactgcggattctatctatctttttcttcctaacgttccatttttaagggagggtttttacttaagttgggtgatattaatctaatatgcccattggtgttccaaaagtaccttaccggattcccggagatgaagaagcgacttgggttgacttatacaatgttatgtatcgagaaaggacactttttttaggtcaagagattcgttgcgagatcacaaatcatattacaggtctgatggtatatctcagtatagaagatggaaatagcgatatttttttgtttataaactcccctggcgggtggctaatctcaggaatggcgatttttgatacgatgcaaacggtgacacctgatatatatacaatatgcctcggaatagccgcgtccatggcctncttcattctgg

SEQ ID NO: 87339 - DNA, 344 bp, Zea mays
  unsure (1)..(344): unsure at all n locations
nttgggagatgtcctgaatggtgggaggcggaaggagagatgcatcggtcctgaattcccgggtcgacccacgcgtccgcccacgcgtccggcaaaagccaaaaggcatcaccgccgcgacgacgatggcagcctcgctgcagagccgcggccaccctgatgcagccggccaagatcggcggccgggcgccctttgcctcgctgccgtcccgcccgtcgtcgcaactcgcctgcagggcgttcggcgtcgacgccggcgccgccaggatcacgtgctccctgcaggacgtcgccagcaggtgcgtcgacgccgcgaagctcgccggcttcgcgctcgccacctc

SEQ ID NO: 87340 - DNA, 335 bp, Zea mays
atggaggagtgtttcttatgcgggaggaagtaggaatgactttcctgaattcccgggtcgacccacgcgtccgacgctgcagccgcagttgccgcacgcgggaacttggacgtgctactcgcgactgctctggtcggttcccgcgtaggattcgttcacaatggcccgtgtgtatgtcggcaacttggatgcacgcgtgacttccggggaactcgaagatgagttccgtgtgtttggagttctgcgaagtgttcgggtcgcacgcaaaccacctggttttgcatttattgattttgactacaggatggatgcagaggatgctattcgtgatctag

SEQ ID NO: 87341 - DNA, 340 bp, Zea mays
gtggggtgagatgtcattcaggggaaaaaggatgagaaaaagtacctaattcccgggtcgacccacgcgtccgccggctacgacaacgccgtcgcgctccccgccgggtgcagaggtgacgaggaggagctccagggggagggcatcaagaacgccgcctcctccaccggcaacatcacgttgagcgtcaccaagagcaacccggagaccggcgaggtcatcggcgtcttccagagcgtgcagccgtccgacaccgacctcggggccaaggcgcccaaggatgtcaagatccagggggtctggtacgctcagctcgagtgattcgagtgtctaactgctg

SEQ ID NO: 87342 - DNA, 486 bp, Zea mays
  unsure (1)..(486): unsure at all n locations
aggttngaagatgttaatgggggggtgacggggtgagttgtctcggtccggaattcccgggtgctcccagtcctccaggagcctcgcagcctgccgccgcggcagccactaccgcgccccttcgcacgtcccgcgccactcccgccgtctccgacgcgccgtcgtcagcctgcgtccgatggcctcgtcgacggctcaggcccccgcgacggcgccgccgggtctgaaggagggcatcgcggggctgtacgacgagtcgtcggggctgtgggagaacatctggggcgaccacatgcaccacggcttctacgactcgagcgaggccgnctccatggccgatcaccgncgcgcccagatccgcatgatcgaggaggcgctcgccttcgncggtgtcccagcctcagatgatccagagaagaccccaaaaccatagtcgatgtcggatgtggcattggtggtagctcagggtacttggcgaagaaatac

SEQ ID NO: 87343 - DNA, 342 bp, Zea mays
gagggaaaaagttcttcctatctgtacatagtacgtattccttcaccggtcctgaattcccgggtcgagccacgcgtccggaattgttaattcatgagtcgaaaggagggacttatgtcaccacagacagaaactaaagcgagggttcaatttaaagctggtgttaacgattataaatagacttactacaccctggactacgaaaccaaggatactgatatctcggcagcattccgagtaactcctaatctcggagttccgactgaagaagcaggagctgcagtaactgcggaatcttatactggtacatggacaactgcttggactgatggacttaccagt

SEQ ID NO: 87344 - DNA, 342 bp, Zea mays
  unsure (1)..(342): unsure at all n locations
nagggggttatgtgtctttagatggaatgggaagtagtcatcatcggtcctgaattcccgggtcgacccacgcgtccgtctaagtcttcccatactttcctataatgactgcaacgattttctccattttgcgaattggtaggttatttgaagtatattactatcatatacattatctaaatcgatccactttaaataaaatagaaaaaatcgaaagaaaaaaaaaaagaaagagtaaataataaaacaggatattctgtttcataattctgaaatagagttcttttttttagtattactcctcattaggatgtatatattaatcatcctattttaatatat

SEQ ID NO: 87345 - DNA, 346 bp, Zea mays
ggttaggggatatgtgatctagagaggcaagagggaagagtacatttgctcctaattcccgggtcgacccacgcgtccgggacgaaagcgttgatgacacagctgtgaaggtggttgatattgttgacacattccgtctacaggagcaacctccttttgacaagaaatcatttgtgtcttacatcaaaaaatacatcaagaatctcactgctgtgttggagccagagaaagcggatgagttcaaaaagggtgtcgagggtgcaaccaagtttctccttagcaagctgaaggacctacaattttttgttggtgagtccatgaaggatgatgcgtctgtggtattcgc

SEQ ID NO: 87346 - DNA, 340 bp, Zea mays
  unsure (1)..(340): unsure at all n locations
atggnaaaatttgttttaacggccagagggaagagataatgctcctggaattcccgggtcgacccacgcgtcccgtacgaaagcgttcatgacacagctgtgaaggtggtttatattgatgacacattccgtctacaggagcggcctccttatgacaagaaatcatttgtgtcttacatcaaaatatacatcaagaatctcactgctgtgttctagccagacaaagctgttgagttcaaaaccggtgttgagggtgcaaccaagattatccttagctagctgaacgacctgcaattttaatgcggccagtacatcaactatgattcattagacgactaca

SEQ ID NO: 87347 - DNA, 488 bp, Zea mays
  unsure (1)..(488): unsure at all n locations
agttgtaggaggatggtgcagtagtgtcttgaagacagttttctctcggttcggaattaccgggctcccccactttctccttgtcaccgagtcacaaagccaaaccttaattcacggccgccggagatgggacaaggttcgcccggcgggatgggcaagcagcccggcctcccgggcgaccgcaagcagggagacggcaagaaagagaagaaatatgaaccacccgctgccccttcccgtgtcggccggaagcagaagcggcagaagggctccgaggcggcggcgcggctccccgccgtggcgccgctctcaaagtgccgccttcgcctactcaagctcgaacgcgtcaaggactaccttctcatggaaaaagagttcgttgccagccaagagcgcctgcgccccagcgaggattagacggangaggaccgatccaaggtcgacgacctncgcggcactcccatgaacgtcngatcgctggaggagat

SEQ ID NO: 87348 - DNA, 344 bp, Zea mays
ggggggggagtgtgttctagaagggaagagggaggggaggtatgcatcggtccggaattcccgggtcgacccacgcgtccgcctgatctggtcttaagaaccccggtggcggtttgacatatgcaagggttaagtgctagatatggcgtgtgattggagatcctcagctgagtataatcgattcggatcgccgtacctccgcggttatggagacttggccactgacttacacgtagcattccactaaagatgatgggtttttgctaagaaattggctagtgcaggaccagtgattgaactagggtagaaagaactctagttgcaggtaattgtacgtaacttga

SEQ ID NO: 87349 - DNA, 342 bp, Zea mays
  unsure (1)..(342): unsure at all n locations
tagggggaaagatcgtccctaccgaacatagatagtagtcctcaccggtcctgaattcccgggtcgacccacgcgtccggcgatcctccacaccagcacccgccgtcgccttctattcccttgcgcacctgctgctgggcgggtcggtgaggcggaggagtaggatggcgagcgcagccggaggcggagcgtcagtggaaggggagtggcttaaggtatcccacttcacgcccatggtggaagcgcaggaccccaactccaaggcagtgtacaacctgacgctgcgtcggatactgcgcgcgcgcgaccacgacgtggacaaggcctgcgacatgttcttcn

SEQ ID NO: 87350 - DNA, 345 bp, Zea mays
  unsure (1)..(345): unsure at all n locations
tgggngngagagtcatctaagaggggggagggacgggaaggatgcatcggtccggaattcccgggtcgacccacgcgtccgatggccgccagcgtcaccgtggaaaacctcaaccccaaggtcttaaaatgtgagtatgcggtccgtggggagattgtcatccatgctcagcgcctgcagcaacaactacaaacacaaccagggtctcttccttttgatgagatcctctattgcaatattgggaatccccaatctcttggtcagcaacctgtgacattcttcagggaggttcttgctctttgtgattatccgtgcctcttggaaaaagaggaaaccaaatcattg

SEQ ID NO: 87351 - DNA, 341 bp, Zea mays
  unsure (1)..(341): unsure at all n locations
gatgagnaaaagttcgtctagcggggagagggacgggaaggatgctcggacttgccgggtcgacccacgcgtcccgcgaggcaagcgcccgctgctgcccccggaccttccccagaccgacgagatcgccgacgtcatgggcgcgttccacgtcctcgcggagctcccgcccgacagcttcggcccctacatcatctccatggcgactgccccctcggacgtgctcgccgtggagctcctgcagcgcgagtgcggcgtgcgccagccgctgcccgtggtgccgctgttcgagaggctggccgacctgcagtcggcgcccgcgtccgtggagcgcctcttct

SEQ ID NO: 87352 - DNA, 341 bp, Zea mays
  unsure (1)..(341): unsure at all n locations
ataagaaattatatcnnttttgaacctcgttcgtagcctacatcctcctttaattatccggtcgggccacacatccgagggccgccagcttcaccgttgaaatttctttccccaaggtcttaaaatgtgactatgcgatgggtttttaaattgtggtggatgctcagcgcctgcagcaacaactacaaacacaaccagagtctcttccttttgatgaaatcctctattgcaatattgggaatccccaatctcttggtcagcaacctgttacattcttcaaggaagttcttgctctttgtgattatccgtgcctcttggaaaaagaagaaaccaaatcattt

SEQ ID NO: 87353 - DNA, 490 bp, Zea mays
  unsure (1)..(490): unsure at all n locations
agggtggagatcttaaaggggggggggagggaggctatgtctcggttcggaattcccgggtcgacccacgcgtccgggcatcttcgtctgccagatctggcatgtgggcagggtctccaccaacgagctccagccggacggcgacgcgcgtatctcgagcacggacaagcagatctcccccgacgccaagtccggaacggcgtactcgaagccgcgccggctgcggaccgacgaggtccccgggatcgtcgacgacttcaggcgggccgcacggaacgcgatccaggctggtttcgacgccgtcgagatccacggcgcgcacgggtacctcctggagcagttcatgaaggacagctgcaacgaccgcacggaccagtacggcggcagcctggagaaccggtgccgtctcgccgtggaggtcgtggacgccgtcgtccgcgaggtgggcgcgcgccgcgtcggcatcaggctgtcngccttcgtcgactcc

SEQ ID NO: 87354 - DNA, 483 bp, Zea mays
  unsure (1)..(483): unsure at all n locations
agggtaaaagatgcttatgttataggggagagagtattctcggttcggaattcccgggtcgacccacgcgtccggtgctgcgagaagaaggagaagaggatgaagaagagcaggtgctgagaagcctgccggcgcgcgttacgacaagcatatatgggggagatcaccaatgtcatggagtaccaggccatcgcgaagcagaagcttccgaagatggcctacgactactacgcgtccggcgccgaggacgagtggacgctgcaggagaacagggaggccttctccaggatcttgttccgtccgcgcatactgatcgacgtgtccaagatcgacatgaccaccaccgtgctggggttcaagatctccatgcccatcatggtcgcccccactgctatgcagaagatggctcacccagatggggagaacgccactgcgcgcgcggcggctgcngcaggcaccataatgacactgtcgtnctgggcn

SEQ ID NO: 87355 - DNA, 346 bp, Zea mays
  unsure (1)..(346): unsure at all n locations
naggggnaggagatgtcgtcttatgatggacacggaaagtaggcgtgcccggtcctgaattcccgggtcgacccacgcgtccggggcaggagtaggtaaaacagtactcatcatggaattaatcaataacattgctaaagctgatggaggcgtatccgtatttggcggagtaggggaacggactcgtgaaggaaatgatctttatatggaaatgaaggaatccggagtaattaatgaaaaaaatattgaggaatcaaaggtagctctagtctatggccaaatgaatgaaccgccgggagctcgtatgagagttggtttaactgccctaactatggcagaatatttc

SEQ ID NO: 87356 - DNA, 341 bp, Zea mays
  unsure (1)..(341): unsure at all n locations
aggggnaaaggttcctgtttacgggagagggacggacgcaagtcccgccttgccttatcgagtcaagcgtgccaaaaaaagcaggcgcaatggcgagcagcaccatggctttctcctccacggccttcgccggcaaggccagtaacgtgccgtcgtcgtgcgagttcggcgaggcccgcgtgacgatgcgcaagacggcggccaaggccaagccagcggcggcgtccgggagcccgtggtacggacccgaccgcgtgctgtacctgggcccactgtccggcgagccaccgagctacctgacgggcgagttcccgggcgactacggctgggacaccgcggtg

SEQ ID NO: 87357 - DNA, 346 bp, Zea mays
  unsure (1)..(346): unsure at all n locations
ggggggnaaagaggtcgttcatagcaaaggacggaacgtagtctcgctcctgaattcccgggtcgacccacgcgtccgaaaaaaagcagccgcaatggcgagcagcaccatggccctctcctccacggccttcgccggcaaggccgggaacgtgccgtcgtcgtccgccttcggcgaggcccgcgtgacgatgcgcaagacggcggcgaaggccaagccagcggcggcgtccgggagcccgtggtacggccccgaccgcgtgctgtacctgggcccactgtccggcgagccaccgagctacctgacgggcgagttcccgggcgactacggctgggacaccgcgggg

SEQ ID NO: 87358 - DNA, 454 bp, Zea mays
cgagtttgtctcggtctcggaattcccgggtcgacccacgcgtccgggaagatcagaatttcccagcaccggatgaactgtttcttctttatcttcagcttgtaacgaacagtctccatcaggtcagccggtggaaccattctcaaactttgggccctttttgacaggttggtctccttcagagacgagacaatagcaccaagtgcaggtttgatcggatcaaacatgagcaaacggaggcagtcaacggatgatctcacatactgcaggtcaagaagcggaaggcgcgggtgcctctcgacgtcgccgacgccgtgatggagccagtacggcggtccggccggctcgccaacctcccggataagcccgtgtaccgcgagaaggttcccgattttgggatgaagattaggaggacgtacggatcggtgagaagagatctgaccaaccgggtgta

SEQ ID NO: 87359 - DNA, 492 bp, Zea mays
  unsure (1)..(492): unsure at all n locations
gattaaaatactctgttcccgcncagtccgcncgnacgtacntgttcggtatatcccagctcgacgcacgcatccgatgagatcacaatcttccagcaccgcttgatttgcctcctctctatcttcagctcctgacgttcattctccatggtggccggcccttgaaccattttcaaactttgggccctttttcacacgttggtcttcttcatagacgagacaatatcaccaactccatatttgatcggatcaaacatgatcacacggatgctgtcaacgtatcatctcacatacttcacgtcaagaagcttaaggcgcgattgcctctcgacttcatcgacaccgttatctaaccactactgcagtccggcccgctcgccaacctacctgattaacccctgtaccgatagaatgttcccgattttcggatgaatattaagacgacatactgatcgcttacaatatatctgacccaatctgttttacgcatct

SEQ ID NO: 87360 - DNA, 349 bp, Zea mays
aggaggggggagagtgtgtgtcaggaggggcagagggatagggaggcatgcatcggtccggaattcccgggtcgacccacgcgtccgagcacgccgactccccatgaataggatcaaaccttattccatgctatttccataagattgcgtggtcttattcttaagcaagcccccgagagggcttagttgatcatgatttctgtcttctcttttttttcctttttatttgtttgcaaaaagatttcgttcgatgctacttctattgattctttatcgatcgatatgtatggatccatgtgtgtacatacctagataccgatcatggatttaccaaaatgctcaagagctc

SEQ ID NO: 87361 - DNA, 341 bp, Zea mays
ataaggaaggatcttttacgaggcagaagggtagtagttttgctcttgaattcccgggtcgacccacgcgtccgaacacaactcgtaggcagcgagcgtctctcctcttcctctcccacgcaccgcgccaaggaaggcagagagagatcgccgctcctcttctctccgtcggtggtgcggttgaccgccctcctcgagcgagatctcgctgcagtccctcgagatctggtcacagatctatccgacaagatggtgaagatctgctgcatcggtgctggctatgtcggtggcccaaccatggcggtcattgccctcaagtgcccagacattgaggttgtcgt

SEQ ID NO: 87362 - DNA, 347 bp, Zea mays
  unsure (1)..(347): unsure at all n locations
nagagagggagagtgnatgagagggggagagaggggagagagaggaatcncttgacttgacggatcgacccacgcgtccgagccaaaaggcatcaccgccgcgacgacgatggcagcctcgctccaagccgcggccaccctgatgcagccggccaagatcggcggccgggcgccctttgcctcgctgccgtcccgcccgtcgtcgcaactcgcctgcagggcgttcggcgtcgacgccggcgccgccaggatcacgtgctccctgcaggacgtcgccagcaggtgcgtcgacgccgcgaagctcgccggcttcgcgctcgccacctcggcgctcctcgtctcgggcg

SEQ ID NO: 87363 - DNA, 458 bp, Zea mays
  unsure (1)..(458): unsure at all n locations
aggagtatgctcggtctggaattcccgggtcgacccacgcgtccgagcagcttctgcttgctctggggggaatgagagagagagagcgagagagatctagtagagaggctagctaggtggtcctcgaacgaagatgttggcggtgttcagcgggcaagtggtggaagtgccggcggagcttgtggcggcgggcaaccggacgccgtcgcccaagacgaaagcgtcgcaacttgtggggcgctttctggccgncttcgagccggccgtgttcgtgcaacttggcgaacacgggcacctcgcctacttccacaccaaccaggcgcttcttcggcccaaggtcgttcgcggccaaagaacgaggtgttctgcctggttcaaggggttgctgacaaccctggtcgtcttgaccaacagcaccggcttgcaaggcaaggcccccaacgagtgcttctcgtcat

SEQ ID NO: 87364 - DNA, 486 bp, Zea mays
  unsure (1)..(486): unsure at all n locations
nggtttaaatgttngttaatgtagttgggtaggtgagtatgcttcttccggtattcccgggtcgacccacgcgtccgcatcttacaagtcactcttgttggtgggtccatagctgaacgttcgggaaacaacttatacaatacatgctgcatctttggttcagatggcaaacttaagggtaaacatagaaagatccatctttttgacattgacattccaggaaagatcactttcaaggaatcgaagactcttactgctgggcagaatcctactgttgtagacacagatgttgggcgaattggtattggtatatgttatgacatccgtttccaggaattagcaatgttgtatgctgcaagaggtgctcatttgttatgctatcctggtgcattcaatatgactactggaccactgcattgggagttgctgcaaagggcaagggctacagacaaccagctgtttgttgcaacatgcggcccagctcgn

SEQ ID NO: 87365 - DNA, 345 bp, Zea mays
  unsure (1)..(345): unsure at all n locations
ngttaggggtggttcatcttatgtggagagaaggagaaggatgatcgtgtcctgaattcccgggtcgacccacgcgtccggcgacctccgcggcgctctacaccgccgccaatcccacccagctctaccggtcccgcgcttcgcgtgggcaagccggtgaaggggcttggcctgagcatgggccgcgagcgcgcccagcggagcattgtgtgccaggcggcgagcagcatgtccgtcgaccgcgtccccgacatggagaagcggaagctgatgaacctcctcctcctcggcgccatctcgttgcccaccgtcggcatggtcgtcccctacggcgccttcttcgtc

SEQ ID NO: 87366 - DNA, 347 bp, Zea mays
  unsure (1)..(347): unsure at all n locations
gattagagagagtctgttcctagttcgagggaggaggcagtgaagtccccggacctgaattaccgggtcgagccacgcgtccgggcgtgctggcaaggagcttgagaaatagcttaagttcttgaagaacggtgatgctggtgtggggaagatgattcccaccaagcccatggtggtggagacattctcgcagtatcctcccctgggtaggtttgctgtccgtgacatgagacagacggttgctgttggagtcatcaagagtgtggagaagaaggacccgaccggtgccaaggtgaccaaggctgctgccaagaagaaatgatgcgacctgtcgttgatgcagcgtn

SEQ ID NO: 87367 - DNA, 342 bp, Zea mays
tgtgggaaatgtcttcccacccgaacacagtacgtagcctgcacttgtcctgaattcccgggtcgacccacgcgtccgggagcagtgggaaaataactactacatcagtgccatagctggtgcaatgaatgggagttccttggtggtcatgtcaaaaggaactccttacactcagcagtcttacaaagttagtgaatcattcccctacaagtggatcaacaagaaatggaaagaaggttttcatgttacatcaatgacaactgcaggaagccgctggggtgtagttatgtcaaggaactctggatactctgaacaggtagtggagttggattttctttatcc

SEQ ID NO: 87368 - DNA, 343 bp, Zea mays
  unsure (1)..(343): unsure at all n locations
natgggagtatgtgtttctacctgaacacagaaagtaaggatgccctctcctgaattcccgggtcgacccacgcgtccgggagcagtgggaaaataactactacatcagttccatagctggtgcaatgaatgggagttgctgggtggtcatgtcaaaaggaactccttacactcagcagtcttacaaagttagtgaatcattcccctacaagtggatcaacaagaaatggaaagaaggttttcatgttacatcaatgacaactgcaggaagccgctggggtgtagttatgtcaaggaactctggatactctgaacaggtagtggagttggattttctttatcc

SEQ ID NO: 87369 - DNA, 340 bp, Zea mays
gattagagatgtttttagggggggggggggaaggagagatgcttcggtcctgaaggatcggcccacgcgtccggcgatcagcgctacagcggcgggtactacggcggcggtggcatcgcgacgccggggtacgctccggcggtcccgtacgggatgtcgcaggtgaacatcgagggcaacgggtgcgggcgggcgctgccgccgcagccgaccgtgaaggtgtactgccgcgccaaccccaactacgccatgagcgtccgcgacgggaaggtggtgctggcgccggcgaaccccaaggacgagtaccagcactggatcaaggacatgcggtggagcacga

SEQ ID NO: 87370 - DNA, 343 bp, Zea mays
  unsure (1)..(343): unsure at all n locations
natanggagagatcttttaggagaaagtaggaagagtagtctttctcctgaattcctgggtcgacccacgcgtccgctgacgcgtgggggcttgcggtggatacctatgcacccagagacgaggaagggcgtagcaagcgacggaatgctacggggagttgaaaataagcatatatccggagattcccaaataggtcaaccttttgaactgcctgctgaatccatgaacaggcaagagacaacctgtcgaactgaaacatattagtagccagaggaaaagaaaaggcatatcgagagactgagcgtgatgagaacgagaagaagaaagagatagagaatgaaa

SEQ ID NO: 87371 - DNA, 490 bp, Zea mays
gggttgaagctatttatgtggcttgagggagggtatcctcggtttcggaattcccgggtcgacccacgcgtccgcccgcacgacacgacaccaagtcgaggtagctcgagggcaccaatcatggccggcgtgaactccagcgtcgtcgggctcaagcccgccgcggcagtgccgcaggccgccgccgcctcatcgccggcgaagcgggtgcagctggccgcgcccgagggccgccgcgccgctctgctcggcctggcggccgtcttcgccgtcacggccaccaccgggtcggccaaggccacgatcttcgatgagtacctcgagaagagcaaggccaacaaggagctgaacgacaagaagaggctggccaccagtggcgccaactttgcgcgcgcctacaccgtggagttcggcagctgccagttcccctacaacttcactgggtgccaggacctcggcaagcagaagaaagtccccttcatcagcgacc

SEQ ID NO: 87372 - DNA, 449 bp, Zea mays
  unsure (1)..(449): unsure at all n locations
catgacttccatcggatttcccgggtcgacccacgcgtccgatgtgatggagaaaaggaagctgcgctcactgagtttcaggctctggactttccctgttcttgtagacggcccctttggagttgtctctgcagttgagttcatcggaattgtcttgtttatagtttttgttgtctactcaatgacctattatgccgtggaagctgtgagccttgtctcgaaatttgacatcccatcaatgactgagagtgaattgatactggatgtcattggcctccgtttaggggcggttgggttgttctgcatgctcttcctcttcctgccagtcgcccgaggctcggttctcttacggcttatcgatattccatttgagcatgctacaagataccacgtctggttggggcatctcacgatggctctctntacattgcatggcttggtctatgtga

SEQ ID NO: 87373 - DNA, 522 bp, Zea mays
  unsure (1)..(522): unsure at all n locations
ctggagctgtcgtcctattagaaatatcgtcgcactcancggtccggaattcccgggtcgacccgggcgtccgcgaggaactcatcatgaatccactaattgctgctgcttccgttattgctgctggattggccgtggggcttgcttctattgggcccggagttggtcaaggtactgctgcaggacaagctgtagaaggtattgcgagacagccagaagcagaaggtaaaataagaggtactttattgcttagtctagcttttatggaagctttaacaatttatggactggttgtggcactagcgcttttatttgcgaacccttttgtttaatcctaaaaaagaaaatgagtcctttagattagatacttttttctttttttagtacattggcatttgcttatgtaattctaagtatatcaatactttactttactcctatttattatattatttcttttttatattattccggaaattttgtatttatcgggacagacaataccctaggaaccccaagagg

SEQ ID NO: 87374 - DNA, 526 bp, Zea mays
  unsure (1)..(526): unsure at all n locations
tggaggngtgcgtgtacgtatagcanctgantgcatgactcaccggtccggaattcccgggtcgagccgcgcgtccgctcaacagcaacagctaagcctctgccacatgacagcaacatggctgaggaggaggccaagagggtggaggtggaggtcaccaaggagcccgaggcggcggcgaaggaggacgtagccgatgacaaggccgtcatccccgcgaccgacccgacgccgccgccgccgccggccgacgactccaaggccctggccatcgtcgagaaagttgcagatgaacctgctcccgagaagcctgcccctgcgaagcaagggggctccaatgacagggatctcgctcttgcaagggtggaaacagagaagaggaactctttgatcaaagcttgtgaagagaatgagaagacaaaagctgagaacaaggctgctaagaaagtatccgctattctttcatgggaaaacacatagaaagcaaacatagaagctgaactgaagaagattgatgaacaactgn

SEQ ID NO: 87375 - DNA, 521 bp, Zea mays
agtgtcgtctacgctgcagatagaaagcatcactcaccggtccggaattcccgggtcgagccaggcgtccgggacggcgtctacccggagaaggtcaacccctgcagggagggcgtcggccagaacttccgggggagtcggcaagaacgtcaaccccatcgacgtcaagttcaccggcaaggccaccttcgactaatcacacttcacgtacgccgcacgccccagccgggatccaaattaaagaacttcttcttctattaattacagtatattgtaatttggctgctggtacggcggtggcatgatttgagatgcgcatgatgatccttgtgtaattgtattaccaagtctcttcttatattcacatgttcatttgcttgctacttgcataagctaaatgaataaaaagggcggccgctctagaggatccaagcttacgtacgcgtgcatgcgacgtcatagctcttctatagtgtcacctaaattcaatccactggccgtcgatgtacaacgtcgtgact

SEQ ID NO: 87376 - DNA, 522 bp, Zea mays
  unsure (1)..(522): unsure at all n locations
ngataagagtgcagtccaccggaaaaaggacgacgtacaactctcctaattcccgatcgacccggcttgcaagccggccaagatcggcggccgggcgccctttgcctctctgccgtcccgcccgtcgtcgcaacgcgccggcanaacgttcggggtcgacgccggcgccgccaggatcacgtgctccctgcaggacgtcgccagcaggtgcgtcgacgccgcgaagctcgccggcttcgcgctcgccacctcggcgctcctcgtctcgggcgcgagcgcggaaggcacgcccaagaggctgacctacgacgagatccagagcaaaacgtacatggaggtgaagggcacgggcacggcgaaccagtgcccgaccatcgacggcggcgtggagtcgttcccgttcaaggccggcaagtaccagatgaagaagctgtgcctggagccgacgtccttcaccgtcaaggcggagggcatcgccaagaacgccccgnccgagttccagaagaccaagctcatgacccc

SEQ ID NO: 87377 - DNA, 488 bp, Zea mays
  unsure (1)..(488): unsure at all n locations
aggatgtgaccactgcttagtagctaggctctactccntcggntntgaattcccgggtcgagccacgcgtccgcgtctgtccgctacccctccccgaccagatcgctacgagacgccgcgcgatcggacgcaggccgacgccgacgaccgctctcgccgccggcggccatggcgtacggcgaccgcgtcaccaccttcgaggactccgagaaggagagcgagtacggctatgtccgcaaggtctctggacctgtggttgtggctgatggaatgggtggtgctgccatgtatgaacttgttcgtgtcggacatgataacctcattggggaaattatccgtcttgagggcgattcagctacaatccaagtttatgaggaaacagctggactgatggttaatgaccctgtattgagaacaagaaagcctctttcagttgaattgggacctggaattcttggaaacatttttgacggtatccagcgggcttt

SEQ ID NO: 87378 - DNA, 497 bp, Zea mays
  unsure (1)..(497): unsure at all n locations
nggagttntnaagatgttcctcgttgtgggttgggaggagtgatagcttctcaccggtccggaattcccgggcccctagccgccgccgccgctcgtctccctgagaggtgccgggaccgaggaactggccgagttctaggtagagaatcggttttgcttgtctcagcacggggtctgctgcgtctggtggtggtgaaggggagaaattcgtgagatctgttccggatcaggcgtgcgagctcgggaatcaggggtttcacacatagcttcgtcgatttgaatttgatgtactaatggagtctaagggtggcaaaaagtctagccagtagtcgttccatgatgtatgaagctccccttggctacagcattgaggacgttcgaccttgccgangcgtgaagaattccagtctgctgcttacttcaactgcgccaagaaacccatcctgatatcccctttgggctttctcattctagtagtctaggatttcctttctgcc

SEQ ID NO: 87379 - DNA, 486 bp, Zea mays
cccccaacacctctccggaattcccgggtcgacccaggcgtgcgcgggaccgaggaactggccgagttctaggtagagaatcggttttgcttgtctcagcacggggtgtgctgcgtctggtggtggtgagggggagaaattcgtgagatctgttccggatcaggcgtgcgagctcgggaatcaggggtttcacacatagcttcgtcgatttgaatttgatgtactaatggagtctaagggtggcaaaaagtctagcagtagtcgttccatgatgtatgaagctccccttggctacagcattgaggacgttcgacctgccggaggcgtgaagaagttccagtctgctgcttactccaactgcgcgaagaaaccatcctgatatcccttttggcttctcattctaggaatttaggatttcttttctggcactttgattctgaccaattttttggcctgctgctttctgataatggacaattccccagt

SEQ ID NO: 87380 - DNA, 519 bp, Zea mays
gaaatgtgtcatctaggagaggagagagaatcatcactcgtccgtaaattccgggttcagccaggccttccaccaaggcttccgccaagccttcccttgctttttcttccccttttaacaaattcttcttcggttgggggttccttaaggtttgggggagggccaatggcggcggttgatgtggagtaccgttgcttcgtcggcgggcttgcctgggccaccagcaacgagtcgctggagaatgccttcgcctcctacggcgagatcctcgactccaaggtcatcaccgaccgggagacggggaggtctcgcggcttcggcttcgttaccttctcctccgagaactccatgctcgacgctatcgagaacatgaacggcaaggagctcgaccgcccgtacattacccgtaaccaagcccaatccccttgccgttgccgttgccgccgttgctacggccgccgtccccgccgccgccgctattgttgccggccccgttaccgccgttattgccgccgttgc

SEQ ID NO: 87381 - DNA, 493 bp, Zea mays
  unsure (1)..(493): unsure at all n locations
gtggaaggtcgtctaggtgttgagggagaagttatgctctactcggtccggaattcccgggccaggacgtacgtacgtacgtagatcgatccatcgatcgctagctagctgacgaccatggcgtccctcggctgtgccgccagcgtgctgcttgccggcggcggcgccatggcccaggaggtgctgctgggcgcaggcgacggcgggctcgtcttcgagcccagccagttcaccgtcaaggccggcgacaccatcaccttcaagaacaacgccggcttcccgcacaacgtcgtgttcgacgaagacgaggtgccgagcggcgtcgacgcctccaagatctcgcaggaggagtacctcaacgcgccaggcgagacctactccgtcaccctcaccgtgccgggcacctacggcttctactgcgagccgcaccaaggagcaggaatggtcggcaagatcacagtcaactaaagctagctatccattccatgcattn

SEQ ID NO: 87382 - DNA, 494 bp, Zea mays
  unsure (1)..(494): unsure at all n locations
nggaaaaatgtcttcaagtgaggaagagggaggagatggcttctaccggtccggaattcccggctcgagccacgcgtccgcggacgcgtgggttctagagaaagtgtgacaaagtgaagcgaaagagttttcggtggataagaattaggtctatatcatatctaaatagaagggaaatcaaaaagaagggaagtggggattacattggatgaatccttaaggaagacatatcacaaaagaaataaaggctaaagtaagcgctccttgcctttggtttgagcaaaacagattcttgtttcaccgaggaaaagagagaagttctggataaattgacaatgtcaacttgaattgactaattcagttccgcctattccacattaatgggagtacatttatgtttctgctttacgaatatgatattttttggacatttctaataatagcaagccttattcctattttggtattttggatttcaggacttttagccccgn

SEQ ID NO: 87383 - DNA, 462 bp, Zea mays
ggaggagagttgtaccggtccggaattcccgggtcgacccacgcgtccggtccgtggccatggcgtcgtccatgctctccgctaccaccgtgccactccagcaggggggcggcctgtccgagttctccgggctcaggagctccgcgtcgctgcccatgcgccggaatgccacctccgacgacttcatgtccgccgtctccttcaggacccacgcggtcggcacgagcggcgggtcgcggcgggcgccgacggaggcgaagctgaaggtggccatcaacgggttcggccgcatcgggcgcaacttcctgcggtgctggcacgggcgcggcgacgcctcgcccctcgacgtcatcgccatcaacgacaccggcggtgtcaagcaggcgtcccacctgctcaagtacgactccacgctcggcatcttcgacgccgacgtcaagcccgtcggcgacaacgccattc

SEQ ID NO: 87384 - DNA, 527 bp, Zea mays
  unsure (1)..(527): unsure at all n locations
tagagcggtgtcattccgttccagtctccangtacgaaacaaccgaccggtcctgaattcccgggtcgggccgggcgtccgccgccgccaaccgatccggcgccctccagcatggcgggggcgggggcgaaggcggcgggggcggtggctctggcgcgcgtgctcgcgctcgctggggccaactcggagggcgacgcgctctcggcgctgcgccggagcctcagggaccccggcggcgttctgcagagctggtaccccacgctcgtcaacccctgcacctggttccacgtcacctgcgaccgcgacaaccgcgtcacccgcctagatcttggtaatttgaacttatctggtcatctggtgcctgagcttgggaaactggagcatcttcagtatctggaactttataagaataacattcaaagaacaatcccttctgagcttggcaatttgaagaatctaataagcttcgacttgtacaagaacaacatttcggggacaatacctnctgcccttggaaagttgaaacn

SEQ ID NO: 87385 - DNA, 524 bp, Zea mays
tgaagctgtctttcctaggcggaggaagtgacgcatcgactcaccggtccggaattcccgggtcgggccacgcgtccgcaggaaacttgtggtagactgggttccttcctgtgatcttgaagattctgcagcagaagagaagcttgatgcctacgagaaagcatgggaattgttaaagggtgcagatggtgtgttggtgccagggggttttggagacagaggagttcaagggaaaattctggctgcaaaatatgcgcgagaaaacaacattccatatcttggcatttgcttgggcatgcaaattgcagtgattgagtttgcacgttctatcatgaagttgcacggtgcaaacagcacagagttcgatccaaccacaaaaaccccatgtgttattttcatgccagaggggtcaaaaacccatatgggggcaacaatgcgccttggatcaaggaggacctttttccaggtcactaacttgaaatctgctaaactgtatgggaatgctagctacgttgatgaacggc

SEQ ID NO: 87386 - DNA, 524 bp, Zea mays
ataactggtttattcggggagccggctgagtcgacctcactaaccttcctgaattccccgggcgggccacgaatccaccggcaccaaccgatccactgccctgcatcatttcatcggcaagatccaacaccacaagagccgtttttcaaacgctggtgctcacgctcactgttaccaactccaaatgctacgctctctccacgctgctccggagactcaggaacccaagcgacaatcttcacagctgataccccacgctcatacaccactgcacctctttccacgtgacctgccaccccaacaaccgcgtcaccctcctaacatctttataattagaactcatctggtcatctggtccctgaactttgcaaactcgagcatcttcagtatctggaactttataagaataacattcaacgaacaatcccttctgagcttctcaatatcaagaatctaataagctacgacttgtacaagaacaacatttcactgacaatacctgctgcccttggaaaggttaaatc

SEQ ID NO: 87387 - DNA, 524 bp, Zea mays
  unsure (1)..(524): unsure at all n locations
agagtcttcgttcgctgcaacgccnagtancgnacgtacgaccggacttgaattcccgggtcgagccgcgcgtccgcagattgttctggagaggttgagcgtcttcttaacatggtggaaggagttcttctagtgggtggttctgtagaggggcctatgccacagacaatgcttgttcttaataaagctctagaatttgcacatgctgttgttgcagttgtaaacaagatcgactgacctactgctcgtcctgagtttgtggtgaattcaacatttgaactatttattgaattaaatgcaactgatgaacattgtgatttccaaacagtctattcaagtggaattaatagaaaagccagtctatctcctgacaatttagctgatgacctaggacccctttttgaagcaattcttagatgcataccaaatccacgcgtttaaaaaagatgtgcccttgcaatgctttgatctaatacttgattatgatgagcacaaaagaagaatttcaatttggacggctgcat

SEQ ID NO: 87388 - DNA, 526 bp, Zea mays
  unsure (1)..(526): unsure at all n locations
tgatattgtatcatcngnttcagtctccactancgcacgattaactcggtcctgaattccctggtcgagccgcgcgtccacagatttttgtggagaggttgagcgtgttcttaacatggtggaaggagttcttctagtggttgattctttataggggcctgtgccacatacaatgtttgttcttaataaagctctacaatttgcacatgctgttattgtatttttaaacatgatcgacatacctactgctcgttctgagtttgtggtgaattcaacatttgaactatttattgaattaaatgcaactgattaacagtgtgatttccaaacagtctattcaagttgaattaaaagaaaagccagtctatcttctgacaatttaactgattaccttataccccttttttaagcaattcttatatgcattaccataccacacctttaaaaaaaatgttcccttcaaatgctttgatctaatacttattattattaacacaaatgattaatttcaatttgacggtttctt

SEQ ID NO: 87389 - DNA, 522 bp, Zea mays
  unsure (1)..(522): unsure at all n locations
agagaattcttgtctagaggcgaagggagagaatcctcgtccggaattcccggcggacaagcgtgtgggacgacgtggtggccgggcctcgcccggagacggtcctcgagaagctccgcaaggccaccaccgcgcgcgcgctcgtcatcaacgaagacgcggacggcggcagctacaagcgggcgcagtcgacgccgtcgaccccgacgacgccggtgacgccgtcgtcgtcgacgacgccgcgcggcgccggcaacgtgtggcgcagcgtcttccacccggggagcaacctggccaccaagggcatgggcgccaacctcttcgaccggccgcagcccaactcccccaccgtctacgactggctctacagcgacgagaccaggagcaaccaccgctagatcgggcgagatggatggacagtgaaaaggccatggtttgctgtcctttggggtaatctaaacgcacgcatgctctattatagctagtcatcactatatatatacttgggtttgggtattgtgn

SEQ ID NO: 87390 - DNA, 491 bp, Zea mays
  unsure (1)..(491): unsure at all n locations
agaaaaacggtctagnttcgggaacggtgttcgctagcntcatcctcgttttcccgactcgactgcacgcgtaccaccatctgcgtctgccagatctggcatttgttcagggtctcgaccaacgagctccaggccggcggctacgcacgtatgtcgagcacggacaagcagatctcccccgacgccaagtccggaacggcgtactcgaagccgcgccggctgcggaccgacgaggtccccgggatcgtcgacgacttcaggcgggccgcacggaacgcgatccaggctggtttcgacgccgtcgaaatccacggcgcgcacgggtaccttctggagcagttcatgaaggacagctgcaacgaccgcacggaccagtacggcagcagcctggagaaccggtgccgtctcgccgtggaagtcgtggacgccatcatccgccaagtggtcgcccgccccttctgcatcaagctgtctaccttcctcgacctact

SEQ ID NO: 87391 - DNA, 525 bp, Zea mays
  unsure (1)..(525): unsure at all n locations
gggatgctgtcttgctctagggaggtagtgatgcatgcctcaccggtccggaattcccgggtcgacccacgcgtccgcggagatcgaccgggcggcggcggcgcgggtgcggcgggagctgtggtgcgggctgacgtacggggtgatccagacggccgggttcatgcggctcaccttctgggagctgtcgtgggacgtgatggagcccatctgcttctacgtcacgtccatgtacttcatggccggctacgccttcttcctccgcaccaagaaggagccgtcgttcgaaggcttcttcgagagccggttcgcggccaagcagaagcgcgtgatgcgcgcccggggcttcgacctccgcaggtacgaggagctccggagagcctgcggcgtggcggcgtcgccgccgctccaggcccggaccccctgcgcgagcgcgggcgcggcgcgggagagcggccattgccactcctactgccattgccattgatcttggcctcgctcggttcattcctttctttttttttn

SEQ ID NO: 87392 - DNA, 528 bp, Zea mays
  unsure (1)..(528): unsure at all n locations
tagagagtgggtcntcttatagccggggacgtatgactcacccgtccggaattcccgggtcgagccagcgcgtccgctctggtccgtggccatggcgtcgtccatgctctccgctaccaccgtgccactccagcaggggggcggcctgtccgagttcgccgggctcaggagctccgcgtcgctgcccatgcgccggaatgccacctccgacgacttcatgtccgccgtctccttcaggacccacgcggtcggcacgagcggcgggccgcggcgggcgccgacggaggcgaagctgaaggtggccatcaatgggttcggccgcatcgggcgcaacttcctgcggtgctggcacgggcgcggcgacgcctcgcccctcgacgtcatcgccatcaacgacaccggaggcgtcaagcaggcgtnccacctgctcaagtacgactncacgctcggcatcttcgatgccgacgtcaaacccgtcggcgacaacgccatctncgtcgacggcaaagtcatcaaggtcgtgtccca

SEQ ID NO: 87393 - DNA, 519 bp, Zea mays
  unsure (1)..(519): unsure at all n locations
tgttaatgcctttcgnttttgtccaccgtaggacaaccgtcctaattcccggtcgacccgggcgtgcgtcaggatcactcatgctcccactcttaccaattgcttctcgggttagggttccttaggcttttgggggggtgctatggcggggggtgatgtggagtaccgttgcttcgtcggcgggcttgcctgggccaccagcaacgagtcgctggagaatgccttcgccttctacggcgagatcctccactccaaggtcatcaccgaccggaaaacgggaagtctcccggtttcggtttctttaccttctcctccgaaaactccatgctcaacgctatcgaaaacatgaacggtaaggagctcgacggccgtaacatcaccgttaacaaggcccaatcccttggcggtgtccttttcagccgtggctactgcgctgttctcgttggctgcggcttaatttgctgtcgccttgaccgcgtttattgcttctatggcagtttctgctatttaccctaagtt

SEQ ID NO: 87394 - DNA, 484 bp, Zea mays
  unsure (1)..(484): unsure at all n locations
nggtgaagttatcatggggggggggggggtgagtgtaccggtccggaattcccgggtcgacgccacgcgtccgcccgttcctgcatcgcggcggagatgggcgcctccaccacgccgacgcgggcgtccgctccttccgcctcgggctcaaccgcttcgccgacctcaccaacgacgagtaccgcgccacctacctcggcgtcaggagcaggccgcagagggagaggaggctcggtgacaggtacctggccggcgacaacgaggacctgccggagtccgtcgactggcgggccaagggcgccgtcgcggaggtcaaggaccagggcagctgcgggagttgctgggctttctcaacaatagcggctgtggaaggcatcaaccagattgttactggcgacatgatctccttgtctgagcaggagcttgttgactgtgacacttcatacaaccagnggtgcaatggaggtttgatggactatgcgtt

SEQ ID NO: 87395 - DNA, 454 bp, Zea mays
ggaaataagatcgcaccggtccggaattcccgggctcgctggtcgttgcctgctgcggattgcccccaggcgggccccactcattccgctgctgatatttcgtttggttctcctttccgtcttgtccgtcgccgaggccttccgctcgctccccagctccagcaggcagatcagatccatccaaccacgaacaggaaggaaggtaggaggaggggctgaagttgaaccatgagtgccgtcgcggtttcgtcgtcgctgaacccgaacgcgccgctcttcatcccggcggcgctgctgcaggtggaggacttctcgccgcagtggtgggacctcatcaccaccaccgcctggttccgcgaccactggtcccgcgagcacgcccacctggacgagatagccgagcagctcgagttggtcgccctccttgcctacgatgaggatgaggacctcttct

SEQ ID NO: 87396 - DNA, 535 bp, Zea mays
  unsure (1)..(535): unsure at all n locations
ngaggggataattngtggtcaaagaggggccagaagtgatatgatgactcaccggtcctgaattcccgggtcgagccacgcgtccgcgaggaagagctcggtgatgccgcggtctacgccggagcaaagttcagggcaccagtggagccgtactaagaaaggaagaggatgaggatgttttcttgtggagctatactagctcgctgctgccttttgttacaatgtttgtacggtcgcaataaatgtatggtcgtgtttgctcgagagctactcaggtgattttgtcgtgggagcaccaaaagcagaaaagaacccttttttttcaatctctctagattctgacgagtggtggtctgcactcgtcgtaatgtcgtttgcctaaactgattttgatggaacaggaaatcttgctggtcttgccaaaaaaaaaaaaaaaaaaaaaaaaaaaaaaaaaaaagggcggccgctctagaggatccaagcttacgtacgcgtgcatgcgacgtcatagctcttctatagtgtcacctaaatt

SEQ ID NO: 87397 - DNA, 527 bp, Zea mays
  unsure (1)..(527): unsure at all n locations
gatgaagtctctggtgntttttagccctcgctagnactatcggtcttgaattcacggatcgagccacgcgtcaaccccaggctagtccgattcaaacccgcccgtttcccttgtccgagccacgcaagccgagctcaagcctgatatgccagagcgggctgctcggcgctccacgcgatggcgcagaaggagaccaatggcagcaacggcgagcacatctccacccgcccgccgccgaccccgtcgcccctccgcttctccaagttcttccaggctaacctgcggatcctggtcactggtggggcgggcttcatcggctcgcacctcgtggacaggctcatggagaacgagaagcacgaggtcattgatgctgataactttttcaccggttcaaaagataacctgaagaagtggatcggacacccaagatttgagctcatccgccatgatgtcactgagccacttcttgtggaggttgaccagatctatcaccttgcttgccctgctcaaccaatcttctacaagcc

SEQ ID NO: 87398 - DNA, 529 bp, Zea mays
ggggtggggtgttcgtctactacgaaatatgattgaatcgactcaccggtcctgaattcccgggtcgagccacgcgtccgctcgatcgctcatcaatcgccagaggagttgttgatcgaggtgagtgaggttgaaaagcacacgatcgtcatggacggcggatactacggctgtcgcgatcagcgctacaggagagggtactacggcggcggtggcatatcaacgccggggtacgctccggcggtcccgtacgggatgtctcaagtgaacatcgagggcaacgggtgcggtcgggcgctgccgccgcagccgaccgtgaaggtgtactgccgagccaaccccaactacgccatgagcgtacgcgacgggaaggtggtgctggcgccggcgaaccccaaggacgagtaccagcactggatcaaggacatgcagtggagcacgagcatcaaggacgaggaaggttacccggcgttcgcgctggtgaacaaggcgaccgtggaggccatcaagcactcgctggggcagtccc

SEQ ID NO: 87399 - DNA, 491 bp, Zea mays
  unsure (1)..(491): unsure at all n locations
gagtagaggtgatcnaaggaggtgagcggaggagagaagtagtatcggtccggaattcccgggtctggtttcgctgccccgattcgccacgaagccgcactgtgagagagggacgcggcccgttgtcctcggcttgtacgcaatccttccgtcgctgcgaagctgatccctcgtgttcgccatggcccccagcgtcgccgtggaaaacctcaaccccaaggtcttgaaatgtgagtatgcagtccgtggcgagattgtcatccatgctcagcgcttgcagcaacaactacaaacacaaccagggtctcttccttttgatgagatcctgttctgcaacattgggaatcctcaatcccttggtcagcaacctgtgacgttcttcaaggaggttcttgctctttgtgatcatccatgcctcttggaaaaagaggaaaccaaatcattgttcagtgctgatgctatttctcgagcanagcagattcttgcaacta

SEQ ID NO: 87400 - DNA, 496 bp, Zea mays
  unsure (1)..(496): unsure at all n locations
nggttagaagattttntcgaagagtaggaggggggagggagagattgtattggtccggacttcccgggtcgacccacgcgtccgcactcgctggtcgttgcctgctgcggattgcccccaggcggccccactcactccgctgttgatatttcgtttggttctcctttccgtcttgtccgtcgccgaggccttcttcccctcgctccccagctccagcaggcagatcagatccatccaaccacgaacaggaaggaaggtaggaggcctgaggggctgaagttgaaccatgagtgccgtcgcggtttcgtcgtcgctgaacccgaacgcgccgctcttcatcccggcggcgctgctgcaggtggaggacttctcgccgcagtggtgggacctcatcaccaccaccgnctggttccgcgaccactggtcccgcgagcacgcccacctggacgagatagccgagcagctcgagttggtcgcccttcttgcctacgatgag

SEQ ID NO: 87401 - DNA, 529 bp, Zea mays
  unsure (1)..(529): unsure at all n locations
gagggaggnntnntngatgtatcgtgatggacgggaggcttcaccggacttgaaggatcgacccaggcgtccggctggactacctcggcaaccccagcctgatccacgcccagagcatcctcgccatctgggcctgcgaggtcgtgctcatgggtggccgtcgagggctaccgcattgccggcgggccgctcggcgaggtcgtcgacccgctgtaccctggcggcaggcttgaaccccctcggcctgccgacgaccccgaagccttcgccgagctcaaagtgaaagagctcaagaacggccggctcgccatgttttcccatgtcggcttcttcgtccaggccatcgtcacccgcaaaggcccgttcgagaacctggttaccacatcgctgacccagtcaacaacaacccatgggcctaccccaacaacttcgtgcccggcaactaagctcaacgggtattctttgcaacttcattggcttttggatcggaaagggtttaccttacttggattgattgatgcttccaaat

SEQ ID NO: 87402 - DNA, 495 bp, Zea mays
  unsure (1)..(495): unsure at all n locations
ggagggtaggaggggnnnnnnaattgaattgtagtaacttcgtcataactccncngnntnggaattcccggctcgacccacgcgtccgggctactccctcctccggctcccgcgtagcgactccaagaagcagcaggagcgtcgagctcgagcagcagccatggatggcgaggaggttggcaggaggggtattcctactctgctgaagccgtcttcctcctccagcgacggcagtgccggggaacaagagcacatcgcttctgacgtcactcagctcataggatggacgccgctggtcgaattgaagcgaatcgccagcgaggctgggatcgatgcgcggatcgtcggcaagatggaggcttaccagccactttgctccatcaaggaccgctctgctttgagaatgatagaggatgctgaggagaggggattgatttcgcctggagtcacaacactggtggagccgacgagtggtaacatggggttagggttggt

SEQ ID NO: 87403 - DNA, 518 bp, Zea mays
  unsure (1)..(518): unsure at all n locations
ngaaggtntcttcngcaacagaagcctacgctatgctcgtaccggtccggaattcccgggtcgacccacgcgtccgagaagacgagtgtcaagtgaacctgaaacttgcggtgtcactggctggtatagcctgagtgtgagtgagtgatcgagctagctgaagctccgatcctcgctagctagctaggataccgccataccacaagtcttcttcacaagtttaggagtgacagcaacaagagatctcgatggcctctgccaccgtgctcaagtcctccttccttcccaagaagtccgaatggggcgccaccaggcaggccgccgcgcccaggccgnccaccgtctccatggtcgtccgcgcctccgcctacgccgatgagctcgtgaagaccgcgaaaacgatcgcgtcgccggggcggggcatcctggcgatggacgagtcgaacgcgacgtgcgggaagcggctggcgtccatcgggcttgagaacacggangccaaacggnangcgtaccggacc

SEQ ID NO: 87404 - DNA, 517 bp, Zea mays
  unsure (1)..(517): unsure at all n locations
aggttngtgtactgaaggagatttatggactgctcgtaccggtccggaattcccgggtcgacccacgcgtccgcccgctccttgctcgcctccacccgcggccaccaccgccctgcggcccccgccgctggctagcctccaccgcgccgcgagtcacgccgttcatgcaccggctggtcctggagcacgggaggacgagcatgtcctggttcggccccagccccaaggtgaccatcgtcgacccggacctggccaaggacgtgctgtccaacaagttcggccacttcgagaagctcaaggtcccggcgctgtccaagatgctgggctccggcgtggccagccacgagggcgagaagtgggtcaagcaccggaggatcctcaaccatgcgttccatcttgagaagctcaagcgcatgctgccggcgttttctacgtgctgcgaggaactggtgagcaggtgggcggcggagtcccttggctccgacggctcgtgcgagctggacgtctggccgggctt

SEQ ID NO: 87405 - DNA, 521 bp, Zea mays
  unsure (1)..(521): unsure at all n locations
tggaaggggaggagtgctctgagctagcgcgcatcgccangccgtaccggtccggaattcccggggggacccacgcgtccgcccggcgaaatccttcttcggcgcgccgctggccgccaccgcggcctccgtcgcgtggccgctcccgcgcaagccggccacctccaccacctcgctcgaggtcgtcgcggcggggaagaagggctacaagatgaagacgcacaaggcgtcggcgaagcggttccgggtgacggggaggggcaagatcgtgcggcggtgcgccgggaagcagcacttgctcgccaagaagaacaccaagcgcaagaagaggctctcgaagatggtgcaagtcaacaagagtgactacgacaatgttacgggtgcactgccctacctcaaagtgaataggaaagcaaactgagagctacggggtcttcaaaaaatcattaagtttcgttccaccaaattggaattttgtgtatcttccactgtattttcttctcaaaaatactgaaggctta

SEQ ID NO: 87406 - DNA, 517 bp, Zea mays
  unsure (1)..(517): unsure at all n locations
tggacagggaggaagtggtctgtgctcactgtaaccgtacgncgtaccggtccggaattcccgggtggaccgacgcgtccggaagaagacgagtgtcaagtgaacctgaaacttgcggtgtcactggctggtagcctgggtgtgagtgagtgatcgagctagctgagctccgatcctcgctagctaggataccgccataccacaagtcttcttcacaagtttaggagtgacagcaacaagagatcgatggcctctgccaccgtgctcaagtcctccttccttcccaagaagtccgaatggggcgccaccaggcaggccgccgcgcccaggccgnccaccgtctccatggtcgtccgcgcctccgcctacgccgatgagctcgtgaagaccgcgaaaacgatcgcgtcgccggggcggggcatcctggcgatggacgagtcgaacgcgacgtgcgggaagcggctggcgttcattcggctggagaacacggagcccaaccggangcgtaccgaacctt

SEQ ID NO: 87407 - DNA, 524 bp, Zea mays
  unsure (1)..(524): unsure at all n locations
gggagatggatcntaattgaagtactatcgtaggctcgtcccggtccggaattcccgggtcgacccacgcgtccgcttctctagttctctgatcctcagcacttagcatcaagcttagcacaccggcgagagggggtccacctncaccttcctgtccaccctcgccagcaggtccgcggcagccgatagcctgcgcagcgccgtgccgtccttcgccaagatcgtcaggttcttgcccgcgcaggcgcagatcagccgcaggcggcgcgcggcggtgctgcccacgccgagggcggcggtgtcgggcaccgagaaggcgccgtcgagcaagcacgagcgcgtggtcagggtgcacagcacccaggagttcgacgacgcgctcaaggccgncaagaaccggctggtggtggtggagttcgcggcgagcgacagcgaggacagcagccagatctacccgaccatggtgcagctcagccgcacctgcggcgacgtggacttcctgctggtcctgcgcgacgacgagn

SEQ ID NO: 87408 - DNA, 517 bp, Zea mays
  unsure (1)..(517): unsure at all n locations
aggttagtcaactgaaggagcatgatggactctcgtaccggtccggaattcccgggtcgacccacgcgtccgctcggggtctcccgacgtcgactcgtcctcggtttccctccatgccctcaatggatgctcgggctgtccgctgtccccttcccgcgtcgaaaccctagctcgtcacctcgccgccgtgctgtccgctgtcctagtccgcggctccgcgccccatctctcttgccgtcgcatctgatgttcttctcccgcaacgcattccgcgacctggaccccatcgactcgccggcctccatggcgtcctcgaagaaggttgcgacccgtgacgagtgggagcggaagcttcgcgacgtcaagatacgcaaggaggacatgaaccgcctcgtcatgaacttcctcgtcactgagggcttcgtcgacgccgncgacaagttccgcatcgagtccggcacccagccggagattgacctagcgatcatcgcggatcgaatggagggtaagagagcan

SEQ ID NO: 87409 - DNA, 518 bp, Zea mays
  unsure (1)..(518): unsure at all n locations
ggaaaggttcntaaatggagggaagatgtaggctcgcccggtccggaattcccgggtcgacccacgcgtccgcaaacactgcccgagacatagacagcgggacgtcgagatggccgacggngaggacggcggcgncgcgcgccgncgggccgncatcacagactaccgcaagaagctgctcaactgcagggagctagagtcgcgcgtcggcaccgtgagagaaagccttaaaactgcaaagaaggattttaccaagactgaggacgacttaaagtctctgcagagtgtggggcaaataattggagaagtactccgacctcttgataatgaacgctntatcgtgaaggccagcagtggtccccgatacgtggtcggttgccgaagtaaagtggacaaggagaagttgacatctggtactcgtgttgtacttgacatgacgacctttgacataatgcgcactcttncacgggaggtggatcctgtggtatataacatggctcatgaagatcccagaaagn

SEQ ID NO: 87410 - DNA, 517 bp, Zea mays
agcttgttcgcatgccaccgcatacgcactgcagtaccggtccggaattcccgggtcgacccacgcgtccggcttcaggttcgtacttttgaggcgcaatgtgggtcgttggcgcagtatgggggggagcacatgcggtccttcgcaaacatctgcaacgctggcatccttcctgaagcagtgtcgaaggtcgctgctcaggcttgcaccagcattccttccaacccctggagttctatccacaagggttttagcgcctaagaatcgtaaggtgaggcgaaatatttcagccgctccaccgcaacgaactggtttacattaccagtcctcaggggggtcctagttcttgaaccactattatagctgttccaccgttccagattacatagctatgcccaatttccggtgtacatattatagtcggaaagttatttggcaattgtattggtcgttgctgtatatattccctatagtttgttagcagatgtgtagtttgtgattccattaaaatgaagga

SEQ ID NO: 87411 - DNA, 522 bp, Zea mays
  unsure (1)..(522): unsure at all n locations
gtgatatgaggagaagtggtgtgtgcctacgcnctatcgtcatgctctatcggtccggaattcccgggtggacccacgcgtccgctgcgcggtggcactgccgtcctcgtgccgggcccggccggcggggggcagccggagggcgcggatggtggtgacgcgcgcggcggcgtcgagcccgaagctgccgaacgggcggcggctgcgggtggctgtggtgggaggcggccccgccggtggcgccgcggcggaggcgctggccaagggcggcgtggagacggtgctaatcgagcggaagatggacaactgcaagccctgcggcggcgccatcccgctgtgcatggtgtcggagttcgacctgccgctcgaccttgtggaccgcaaggtgaggaagatgaagatgatttcgccgtccaacgtcgccgtcgacatcggccgcacgctcgcgccccacgagtacatcgggatggtcaggcgcgaggtgctcgacgcctaccttcgttcacgggcacagtccgtcgg

SEQ ID NO: 87412 - DNA, 521 bp, Zea mays
  unsure (1)..(521): unsure at all n locations
gggataggttngtcaatgaagaggattatggactgctcgtaccggtccggaattcccgggtcgacccacgcgtccggacgagtgtcaagtgaacctgaaacttgcggtgtcactggctggtagcctgagtgggagtgagtgatcgagctagctgagctccgatcctcgctagctaggataccgccataccacaagtcttcttcacaagtttaggagtgacagcaacaagagatcgatggcctctgccaccgtgctcaagtcctccttccttcccaagaagtccgaatggggcgccaccaggcaggccgccgcgcccaggccgcccaccgtctccatggtcgtccgcgcctccgcctacgccgatgagctcgtgaagaccgcgaaaacgatcgcgtcgccggggcggggcatcctggcgatggacgagtcgaacgcgacgtgcgggaagcggctggcgtccatcgggctggagaacacggaggccaaccggcaggcgtaccgnacgctgctggtcacggcgc

SEQ ID NO: 87413 - DNA, 518 bp, Zea mays
  unsure (1)..(518): unsure at all n locations
nggtgaggctttctcgattgaatgagaatgatggattgctcgtaccggtccggaattcccgggtcgacccacgcgtccgcctgtcgttgtgagaattcttaattcatgagttgtagggagggacttatgtcgccggaaacagaaactaaagcaagtgttggatttaaagctggtgttaaggattataaattgacttactacaccccggagtacgaaaccaaggatactgatatcttggcagcattccgagtaactcctcagctcggggttccgcctgaagaagcaggagctgcagtagctgcggaatcttctactggtacatggacaactgtttggactgatggacttaccagtcttgatcgttacaaaggacgatgctatcacatcgagcccgttcctggggacccagatcaatatatctgttatgtagcttatccattagacctatttgaagagggttctgttactaacatgtttacttccattgtgggtaacgtatttggtttcaaagccttacc

SEQ ID NO: 87414 - DNA, 509 bp, Zea mays
  unsure (1)..(509): unsure at all n locations
tggtagagggaggggtcntactcactgtagcgtacgccataccggtccggattcccggtggcgcccgcgtccgcctccgcgttcctcaacgctctcgtcctccgatcgccatcaccgtcgctctcgtccgcgtcgaaccgccgcagcaccggcgccttcgcgttcccgaacccaccgcgcttcccatgcctgcgttctgcgcgtcgactcgtccttgcgagggcggcggcagcgccggcgccgggcgatggccccgaggacgagtgggggccggagcccgagggcgggtccgctgtcacgggggccgcggtggcggaggcgccggaggcgagagaggtcgcggagctcaaggcgcagctaaaggacgcgctgtacggcacggagcggggcctgcgggcgttcagcgagtcgcgggccaaagtgctggagctcatcacgcagcttgagacgcgcaaccccacgccggctcctacggaggcgcttacgctccttcacggcaagtggatccn

SEQ ID NO: 87415 - DNA, 514 bp, Zea mays
  unsure (1)..(514): unsure at all n locations
ggagatgggggaggggttgtgctcacgngtantgctcgctcgtccggccggaattcccggtggagcacgcgtccggtgtctggcggcgcatagatagatagccatggcgaagaagccagtggaggaagcgcgcctggcagcggcggacgagcacgaggaggagagcctgagcgtgcgcgaggagctgaagaagcagctatggctggctgggcccatgatcgccggcgcgctcctgcagaacgtgatccagatgatctccgtcatgtacgtgggacaccttggagagctgcccctcgctggcgcatccatggccaactccttcgccaccgtcaccggcctcagcctgctgctaggcatggcaagcgctctagacacactgtgcggccaagcgttcggcgcgaggcagtactatctcctgggcatctacaagcagcgcgccatgttcctgctgaccctggtgagcgtccctctgtcagtggtgtggttctacacccgcgaagacctncttccggtt

SEQ ID NO: 87416 - DNA, 519 bp, Zea mays
  unsure (1)..(519): unsure at all n locations
tttagtgattagggatgttttttgaactgccatcgncagtacgncgttncgcttccggtattcccttctggacgcacgcatccactgactagtatatagataatctaagtctaaaagaactgtcttttctgtatactttcgcctgtctattgctaccgcgggtcttatgcaatcgatcggatcatatagatatcccttcaacacaacatatgtcatcgaaaggatctcggactactcaccaaatcacgaaagccatttataaaatggattcctatttgaagagtgcctaaccgcatggataatctcacattaacccgtcaatttttgatccaattctttatttttcttggtaattttctggaagaaattttaataatatcgattcatacagaagaaaaagttctctattgattcaaacatcttacctactagatatttatatatgtataagtaattattcaaattgaataatatataaaatatgcccaaaaatttattctatattttaataccccattt

SEQ ID NO: 87417 - DNA, 518 bp, Zea mays
  unsure (1)..(518): unsure at all n locations
tggagagagagacgggtcttactcatcgcgtanagtatgctcgtccggtccggaattcccgggtcgacccacgcgtccgcaggacctgtcactccgtctgtccatcgacggtgagaagagctcgctgaacactaaggatgcactgtggttcgacccccaggatcaagtgcagaagatcatgaacaacatcaagcagtcgtcagcgcttcctccgtccatgtcctcagtcgcagccgagggcacaggcagcaccatgaacaaatacccactcctgcgccggcgccggcgcttgttcgtcatagctgtggactgctaccaggacgatggccgtgctagcaagaagatgctgcaggtgatccaagaagttttcagagcagtccgatcggacttccagatgttcaagatctcaggggtcacgctgtcgactgccatgccgttgtccgagacacttcagcttctgcagctcggcaagatcccaacgaccgactttcaacgccctcatctggggcaccgcaacc

SEQ ID NO: 87418 - DNA, 523 bp, Zea mays
  unsure (1)..(523): unsure at all n locations
tatgtgtctttaaataagatggaggaaagtacgncatcgctcggtccggaattcccgggtcgacccacgcgtccggcaagatccatgggatacggcgaggatgatctccctctagtatcatttcagtctgtgtccgaaggatactatggagagtgtggtaaaagaggaggttacatggagattactggcttcagtgctccggtaagagagcagatctacaaggtagcttcagtgaacctgtgctccaatatcactggtcaaatccttgcgagcctcgtcatgaatccaccaaaggttggggacgaatcatatgcttcctacaaggcagagaaagatggaatccttcagtctttagctcgccgtgcaaaggcactggaagatgcattcaacacgcttgagggattttcatggtaacaggctgaaagagcaatgtaccttttccctcagatccatctgccacataaggcaattgaggctgctaaagctgccaagaaagcacctgatgcattctatgcgctccgct

SEQ ID NO: 87419 - DNA, 517 bp, Zea mays
  unsure (1)..(517): unsure at all n locations
ggagagttctcntaattgaagataatgtaggctcgtcccgtccggattcccgggtcgacccacgcgtccggggagacccattaccaatgccaagaacaagaaaccagagaggacagccgcgaatacgagtcggaatcccctccaaaaacccaccataccgtctcccccatctgcaagaacaagatcaggagagcatcctagggggaagaaacaggagggggaaaaagaagcccagaaagaccaactgaccaaacaaaaaggtggcatctttgtgtcaccgaggcaccgccgatcacagaccaaagcccgctcctctggtccatcccaagcgtacagcagccgagatttcttcgatctgcgcctgcgtttttttttcttgtaaagattttagttttccccccttcaactgttgctagccttgagtcgctgagaagtttcgaaaaggggtggtgtgagtgtcggatagctcaggatggatccggcgttgctggacgacgtcatacgccggctttctgan

SEQ ID NO: 87420 - DNA, 524 bp, Zea mays
atgttcatcaatagaagacgacgtaaaggcacgtctcggtccggaattcccgggtcgacgccacgcgtccgctaatatatagataatcgaaatcgaaaagaactgtcttttctgtatactttccccgtgctgttgctaccgcgggtcttatgcaatcgatcggatcatatagatatcccttcaacacaacataggtcatcgaaaggatctcggacgactcaccaaagcacgaaagccagttagaaaatggattcctatttgaagagtgcctaaccgcatggataagctcacattaacccgtcaattttggatccaattcgggatttttcttgggaagtttcgggaagaaattggaataatatcgattcatacagaggaaaaagttctctattgatgcaaacgctgtacctagaggatagggatagaagaagagggaaaaatcgaaatgaaataaattaagaataaagcccaaaaaataagtcgaagatagaagagcccagattcaaaatgaggaaatggaaccc

SEQ ID NO: 87421 - DNA, 510 bp, Zea mays
  unsure (1)..(510): unsure at all n locations
agttagccttcatannaacgttcanncnagnactncctgtcgtaatcccactccagccacgcatccgctatatatanataatctaaatcgataagaactgtcttttctatatactttcccccgtctgtttctaccacaggtcttatgcaatcaatctgatcatatacatatcccttcaacacaacataactcatccaaagtatctcagacgactcaccaaatcacgaaacccaattataaaatgcattcctatatgaacagtgcctaaccgcatagataatctcacattaacccgtcaattttggatccaattcagcatttttcttcccaagtttctgcaagaaattgcaataatatcgattcatacatatgaaaaaattctctatttatacaaacgctttacctacacgataatcatacacgaatactgaaaaatcaaaatgaaataaataaaaaataataccaacaaaataagtccaacatacaaaaacccatattcaaaatgaataa

SEQ ID NO: 87422 - DNA, 527 bp, Zea mays
  unsure (1)..(527): unsure at all n locations
gggggagtgtcntcttttgggggagatgtaaggatctgctcgtaccggtccggaattcccgggtcgacccacgcgtccggttcaactcgtgggagagccccagggccaagaagtacaggagcatcaaccagggcggtggcctcaggggcaccgccgtgaacgtgcagtgcatggtgttcggcaacatggggaacacttctggcaccggcgtgctcttcactaggaaccccaacaccggagagaagaagctgtatggcgagttcctggtgaacgctcagggtgaggatgtggttgccggaataagaaccccagaggaccttgacgccatgaagaacctcatgccacaggcctacgacgagcttgttgagaactgcaacatcctggagagccactataaggaaatgcaggatatcgagttcactgtccagganaacaggctgtggatgttgcagtgcaggacaggggaacgtacgggcaaaagtgccgtgaagatcgccgtggacatggttaaacgaggcctngttgac

SEQ ID NO: 87423 - DNA, 521 bp, Zea mays
  unsure (1)..(521): unsure at all n locations
ggaaagggttnttcaacgaaggaggattgatggactgctcgtaccggtccggaattcccgggtcgacccacgcgtccgcccaaggatctcgtcggacgctagaggaagggacgggggacgggcgatggcggggggcgccggcagcggggtggactgggagagcctggcggaggccacctccggggcaatcggctcgctcgtcagcaccaccgtgctctacccgctagacatctgcaagaccaagttccaggccgagcttcagacgcaccagggcgcgcagaagaaatataggaacctttcagatgtgttctgggaagcgatttgtaaaaggcaatttttgtccctatatcagggccttaacacgaagaacatccagtcttttggttcctcgtttttttatttttatgggtatagctattttaaaagactctacctggagaagagtggagcanagtctattggaacaacagcccaatttgttagttgcagctgctgctggtgcttgcaatgcaatcgtgacc

SEQ ID NO: 87424 - DNA, 521 bp, Zea mays
  unsure (1)..(521): unsure at all n locations
agtgtcttagatggagggtgatgtatgcatctgctgtaccggtccggaattcccgggtcgacccacgcgtccgggttcctcttgttggaacaccacaggaactggggcatcaagtgactcttatgcgcggggttgctgagaaagtgttcgccaatgtgggcaagactatcgggtacaaagttggaacaatgattgagatccccagggcagctctggtggctgatgagatagcggagcaggctgaattcttctccttcggaacgaacgacctgacgcagatgacctttgggtacagcagggatgatgtggagaagttcattcccgtctatcttgctcagggcatcctccaacatgaccccttcgaggtcctggaccagaggggagtgggcgagctggtgaagtttgctacagagaggggccgcaaagctaggcctaacttgaaggtgggcatttgtggagaacacggtggagagccttcctctgtggccttcttcgcgaaggctgngctggattacgtttct

SEQ ID NO: 87425 - DNA, 521 bp, Zea mays
  unsure (1)..(521): unsure at all n locations
tggaaggtgggggaggtgtgtgtttacgaagagtagcgtgatgctcgtccggtccggaattcccgggtgcgacccacgcgtccgcgcgtttggattttgctcctttgctcccttctgaaagggtcaccatgtctgccttggtggggaagtacacagatgagctgatcaagaccgccaagtgcctcgcaacgccgggcaagggcatcctggcctccgacgagtcgacgggcaccatcggcaagcgcctgtccagcatcaacctcgagaacgtggagtcgaaccggcaggcgctccgcgagctgctcttcacggcgcccggcgtgttcgactacctctccggggtcatcctcttcgaggagacgctgtaccagaagacctncgacgggaagccgttcgtggacgtgctcatcgcgggcggagtggtccctgggatcaaggtcgacaagggcaccgtggagatcgcgggcacccgacgcgaaaccaccacgcagggccttngacttcctggcgcacgcttggcc

SEQ ID NO: 87426 - DNA, 524 bp, Zea mays
  unsure (1)..(524): unsure at all n locations
agagatggggatggagagagtgtggtgtatgaaagacatagtatgctctaccggtccggaattcccgggtgcgacgcacgcgtccgcgccgcaccagcgccagcccgcgccgtggtcagaaggaggtccttcaccgtgcgcgcgtcgctccgcaaggccaccggcaccgccgccgtggcaatggctgccagcgccctgcttgccggcggtgccatggcccaggaggtgctgctgggcgcaggcgacggcgggctcgtcttcgagcccagccagttcaccgtcaaggccggcgacaccatcacattcaagaacaacgccggcttcccgcacaacgtcgtcttcgacgaagacgaggtgccgagcggcgtcgacgccaccaagatctcgcaggaggagtacctcaacgcgccaggcgagacctactccgtcaccctaaccgtgccgggaacctacggcttctactgcgagccgaatcaaggagcccggatggtcggcangatcaccggtaaactattaaacttgct

SEQ ID NO: 87427 - DNA, 526 bp, Zea mays
  unsure (1)..(526): unsure at all n locations
taggctcngtcaatagaagagagatagtatggcacgtctcnggnccggaattcccgggtcgacccacgcgtccgaaccattttcgctaatctccctccaccgagccggccgaatcaaatcgaaccgcgggcggcgcgcacgcgcagcgactgccggcgatggcgagcctcaccctgccgccggcgccccccaacccacgccaggacgccatcgacctccacaaggccttcaaagggtttggatgtgacagtacaacagtgataaacatacttactcatcgcgattcggtgcagcgtggactcattcaacaggaatacagggctatgtatcatgaggaactctcccaccgtatttcatctgaactcagtggaaaccacaagaaagctatgtcgctgtggattcttgatcctgctggacgtgatgcaactgttttgagagaagctctaaatggtgacactatggatctgagagcagccactgagattatatgttccaggacaccatcacagttgcanataatgaaaca

SEQ ID NO: 87428 - DNA, 522 bp, Zea mays
  unsure (1)..(522): unsure at all n locations
nggaaagttctctgttataagatatactgctaggctcgtcccggtccggaattcccgggtcgacccacgcgtccgggttccctttcctcgagtttcctattttcgtctcctccccacagcagcccggcgaagacggtagtaagcaaaccaccggagcagcggcgcttgcgcgggcggagccatggcggacgacgattacaacaaaaattgacatggggtatgaggatgagcccccagaaccggagattgaggaaggagctgaagaagagcctgagaacaacgaagatgcccctgatgacgtcataggtggtgagggtgaagataaggaacaggaaaagaccaagcgtgaacgcaaaacaacaaaatacatgacgaagtacgaacgtgcgcgcatcctgngtacacgagccttgcagataagcatgaatgctccagtcatggttgagcttgagggtgaaactgaccctcttgagattgcaatgaaggagctgagagcgcgcaagatacccttcacgatcagac

SEQ ID NO: 87429 - DNA, 527 bp, Zea mays
  unsure (1)..(527): unsure at all n locations
tagctctgagtcaatagatagatagcaggttagccatctctcgtacccggaattcccgggtcgacccacgcgtccgcgcgaggcggccgacatgatcaagaagggcaagatgtgcgtgctgttcatcaacgagctggacgccggcgcggtgcggatgggcggcacgacgcagtacacggtgaacaaccagatggtgaacgcgacgctgatgaacatcgccgacaaccccaccaacgtgcagctcccggggatgtacaacaaggaggagaacccccgcgtgcccatcatcgtgacgggcaacgacttctcgacgctgtacgcgccgctgatccgcgacgggcgcatggacaagttctactgtgctcccacccgcgaggaccgcgtgggcgtgtgcaagggcatcttccgcagcgacggcgtccccgacgaggacgtggtgaggctggtggacgccttcccgggccagtccatcgacttcttcggcgcccttcgcgccagggtgtacgacgacgaggtgcggccgttgn

SEQ ID NO: 87430 - DNA, 531 bp, Zea mays
  unsure (1)..(531): unsure at all n locations
ngggagtaggctcgcgttcaatcgaaggacgaatgatgcgactgctcgtaccggtccggaattcccgggtcgacccacgcgtccgcaagtttaggagtgacagcaacaagagatctcgatggcctctgccaccgtgctgaaggcctccttccttcccaagaagtccgaatggggcgccaccaggcaggccgccgcgcccaggccgcccaccgtctccatggtcgtccgcgcctccgcctacgccgatgagctcgtgaagaccgcgaaaacgatcgcgtcgccggggcggggcatcctggcgatggacgagtcgaacgcgacgtgcgggaagcggctggcgtccatcgggctggagaacacggaggccaaccggcaggcgtaccgcacgctgctggtcacggcgccgggcctgggccagtacatctccggcgccatccttttcgaggagacgctgtaccagtccgncgtcgacggccgcaagatcgtggacatcctggtggagcagggcatcgtgccggggatcaaggtggn

SEQ ID NO: 87431 - DNA, 531 bp, Zea mays
  unsure (1)..(531): unsure at all n locations
ggaagaggnnnnnnnnnnntttgatttgcattccnatggnaancnccnnnnnnnnnnnnnnnnnnngggnggnnnncgggcgcgaaaacctggtattacatttggccaagaaagaaagaatgagcaaaatgttgcagagggagaattttgaaaaagaaaaaaaaaagaaaaaagcttgactggatataccagaacacaaggtagtatgttccagctgggaataaaaaaagcagccgcaatggcgaacagcaccatgggcctcttcttcaaaggcttcttcggcaaaggcgtgaacatgccgccgtcgtccgccttcttcgaggaacccctgatgaatatccacaagaacggcgaaaacgccaaaccaagcggcgttttccggaacccggtggtacgggcccgaacggcttgttgaactgggacaaattgtcggagaacccacgatattacttgagggactatttccggaaaactacggttagaacacggggtttctgtgggcccaccaaaatacgttagaaacgacggtga

SEQ ID NO: 87432 - DNA, 515 bp, Zea mays
  unsure (1)..(515): unsure at all n locations
ttagagtgaggagtggttgtccatgatgaatccgctngacataccggtccggaattcccgggtcgacgcacgcgtccgaaatccacggtttaataacgaaccgtgttaacttaccataacaacaactcaattcctgtcgaattccttcctatcgaattcctatagtaaaattcctataggatagaacgtacacagggtgtacacattatatatgaatgaaacatattcattaacttaagcatactcctttttttatttaatgagttgatattaattaaatatctttttttttagatttttgcaaaggtttcatttacgcctaatccatatcgagtagaccctgtcgttgtgagaattcttaattcatgagttgtagggagggacttatgtcaccacaaacagaaactaaagcaagtgttggatttaaagctggtgttaaggattataaattgacttactacaccccggagtacgaaaccaaagatactgatatcttggcagcattccgaggaacn

SEQ ID NO: 87433 - DNA, 526 bp, Zea mays
  unsure (1)..(526): unsure at all n locations
atgtatggaggtntggagtgggtctgtctacgtatcgtaatgcatagccgtaccggtccggaattcccgggtggacccacgcgtccggctacccggcaccaccaagagccatgtacggcgaccaacaccacaatcacctcgctgctgctggtggctacacttcctattccaccaatgctgctgcaggtaaccatctcttgtaatggccggccgatcgatcgatcgagagctcaacaattcaagtgtcctgctatagctagctactacgacgtcgtgctacgatcgtatcgggttcggttcgttcctacaaatatagcctagagatagagtgtctctgtctgtgtgatcgatggtattgttatgatcatatagaaaagaccagtgtagcatgcatatgcacttgttgcaatggttgctttcaagaagaaactggaaggaggagaggctcggtttggatgctgatcatgcacaaatattactaggggctaacagtggtacttcattattaccgctagcatgggcactt

SEQ ID NO: 87434 - DNA, 505 bp, Zea mays
  unsure (1)..(505): unsure at all n locations
aggaggntgtgtgattacggcgacggagggtactgtcatgctcgtaccggtctcggagattccggggtaggcgtacgcgcaccatcgaccttcaagtctcgctacgtagcagtgcaataaaaaaagcagccgcagtggcgagcagcaccatggccctctcctccacggccttcgccggcaaggccgtgaacgtgccgtcgtcgtccgccttcggcgaggcccgcgtgacgatgcgcaagacggcggcgaaggccaagccagcggcggcgtccgggagcccgtggtacggccccgaccgcgtgctgtacctgggcccactgtccggcgagccaccgagctacctgacgggcgagttcccgggcgactacggctgggacaccgcggggctgtcggcggacccggagacgttcgccaagaaccgggagctggaggtgatccactcccgctgggccatgctgggcgcgctcggctgcgtcttncccgagcttgttgnccgcaaccgggt

SEQ ID NO: 87435 - DNA, 528 bp, Zea mays
  unsure (1)..(528): unsure at all n locations
ggggngnggagttagggagctgnctcaacgaacgggggtttgatggaatgctgtaccggtccggaattcccgggtcgacccacgcgtccgcacccccttccggcacacgggctcgaccacctgactccatcaccgtgcctgtctgtgttctagggacaagaagagcagagatatacaggagcgagcagaggcggggagaagaggatgagcaccacaacggcgtcgtcgctgaaccccaacgcgccgctcttcatcccggcggcgtaccggcaggtggaggacttctcgcccgagtggtgggagctcgtcaacaccaccgcctggttccgggaccactgcttccggcagcgccagctccacgaggccgnctgcgacgacgtcgccgcgctccttcccgacgacctcctcgacaccaacgacctcttctacgcgcccgacgtcgtccaacaccaaacaacgactgcgctgttgccccggtacgatgtccttaacgtgcttgggggcgctgagcctaaacacacccagggc

SEQ ID NO: 87436 - DNA, 503 bp, Zea mays
  unsure (1)..(503): unsure at all n locations
agagtgggtcncctactgagttcatgctcatttgcannccccnnnnnnnnnnnnannnnccgggtcgagccacgcgtccgctttctcttctcccattccttccttccactcccccgcccagcgccaccatggcctcctccgtcgcggtgtccctccgcgccctcgctgccgccccgctccccaagtccagccccgccacttcctgccccttcttcgtgctccttgcgccggcgctgccccgacgcctgctccgcctccgctccgctcgccgcctgccgctcgccccgctcgccgcctccgactccgccttcgagtcctccgtcggagttaactacgcggagcccgacgactcggagaaggataaggaggtggagttgttcggatcgggtgacgacgagggggcgggtgagttggtggatgaccattccgtagaggtctcagccgctgtcgaggacgaggtggaggaagaggtcggggagtacgttgagccggcccgagagggc

SEQ ID NO: 87437 - DNA, 484 bp, Zea mays
  unsure (1)..(484): unsure at all n locations
gggggagaggctanatatgaaggaggggagtaactgtcaaccgctccggaattcccgggtcgacccacgcgttcgctcgaagagtttttcaagagcttaattatgttcaggaaggccaaaatgcacgaaggtgtaagaaactatatgccgataagcaagatgtattagtgcctgatatattttgggattacacaagtgcaaaggttctaacaatggagtggattgagggtgtaaaattaaaccatcaagcagttattgaaagtcaaggattgaaggttctggatttggtcaacattggtatccactgtagcttgagacagcttctggagtatggttactatcatgcagaccctgatcctggtaatatattagcaacacctgaggggaagctggcttttcttgattttggcatgatgagtgaaacaccagaggatgcaagggtagccattataggacatgtngtccacttagtcaacagggactt

SEQ ID NO: 87438 - DNA, 516 bp, Zea mays
  unsure (1)..(516): unsure at all n locations
agtagggtatgngagtttacntcgatgctatgctatctcgtctcggaattcccgggtcgagccacgcgtccgcttcgtgttcgtgccgaagagctccacagttcgtctggttccaaagttaccaagtaggacatagaattctggaagcaaattcctccaaacgagccctaccgggtgatactaggccatgtaagggacaagctgtacaacacacgcgagcgtgctcgccatctgctggcttctggagtttctgaaatttcagcggaatcgtcatttaccagtatcgaagagttccttgagccacttgagctgtgctacaaatcactgtgtgactgcngcgacaaggccatcgcggacgggagcctnctggacctnctgcgccaggttgttcacgttcggggctcttccctggtgaagcttggacatccggcaaggagttcggatcggcacaaccgacgtggatcgacgcccatcacctacgcaacctcggccattggggtcggaacctgggagtgg

SEQ ID NO: 87439 - DNA, 521 bp, Zea mays
  unsure (1)..(521): unsure at all n locations
nagttagggggctgnctctactgacagacgatatattgcgactgctcgtaccggtccggaattcccgggccttgagccacttgagctgtgctacaaatcactgtgtgactgcggcgacaaggccatcgcggacgggagccggctggacctcctgcgccaggtgttcacgttcgggctctccctggtgaagctggacatccggcaggagtcggagcggcacaccgacgtgatcgacgccatcaccacgcacctcggcatcgggtcgtaccgcgagtggcccgaggacaagaggcaggagtggctgctgtcggagctgcgaggcaagcgcccgctgctgcccccggaccttccccagaccgacgagatcgccgacgtcatcggcgcgttccacgtcctcgcggagctcccgcccgacagcttcggcccctacatcatctccatggcgacggcccccttggacgtgctcggcgtggaactcttgaacgcgagtgcggcgtgcgccagccgctgcccgtgtgccc

SEQ ID NO: 87440 - DNA, 493 bp, Zea mays
aggagggggttgggttatcagaacaggtatgctcatccggtccggattccggtcgcgccagcgtccgctcctcaagactcgttgcttctcccccagctcggaggagctcctcgcatcggagcagccgccgatcaacctgcgctcgggctcagcgctggaaggtgttggaagagaatagcctgaaggttcacagtaaccttcatctgttggaagatgtatcgggctaagagggctgcattgtcaccgaaggtgaagcgccgcgtcggcaagtacgagctcgggcgcaccattggggaagggacctttgccaaggtccggtttgctaagaacaccgaaaacggggaacctgttgctatcaaaatccttgacaaggagaaggttaagaggcacagattggttgagcagattaagcgtgaaatttgcatcatgaaattagtaaggcaccctattgtagatcgactgtttgaggtgatgggaaagtaaaccagaattt

SEQ ID NO: 87441 - DNA, 508 bp, Zea mays
  unsure (1)..(508): unsure at all n locations
agaagctgggtctgctacatgatactacagtcantgctagaccnttccaattcgcaattggaggggcgggccacgcgtccgggtagccgccggtctcttgctctgatagcttgctccaggacgtacgtacgtgcgtagatcgatccatcgggcgctagctagctgacgaccatggcgtccctctactctgccgccatcaccgccccttccttcacggccgagcccgctcgcgcagtggtcaccaggaggtccttcaccgtgcgtgcctctctccgcaaggccactgccaccgccgacgtggccgttgccgccagcgtcctgcttgccagcggcggcgccatggcccaggacgtgctgctgggcgcatgcgacggcgggctcgtcttcgagcccaaccagttcaccgtcaaggccggcgacaccatcaccttcaagaacaacgccggcttcccgcacaacgtcatgttcgacgaaaactaggtgcctaacctgcgttaaccccttcaac

SEQ ID NO: 87442 - DNA, 501 bp, Zea mays
  unsure (1)..(501): unsure at all n locations
agggaatggtcgattcganaacggaggagggaggggtaactgtcanntnccttnccnntccggaattcccgggtcgacccacgcgtccgcgttgctgtcatagtctgctggatcaaggagggagattcaaagttgtttttccttgcaacaatctatgctttgcttggaattcctctgtcatatttgatatggtacaggccactctaccgtgcaatgaggactaacagtgctttcagttttggatggtttttcctgtgttacctgatccacattggtttttgcataattgctgccattgctccaccaattgtatttcatgggaaatcattaactggtattctggctgcgattgacactttctctgaacatgtgataattgggatcttttactttgtggggtttgcactgttttgtctggagacactgctgagcattggggttcttcagaaagtgtacatgtacttcagagggaacaagtgaagccagtcatgatggaaagtt

SEQ ID NO: 87443 - DNA, 489 bp, Zea mays
  unsure (1)..(489): unsure at all n locations
aggttagtgggttnattagggggggggagagtaagctatacccgtccggaattcccgggtcgacccacgcgtacggtgctcagtgctcataggctttctccgagggtccgcggaccgggccctttgtcgctggctctggttaacgccgacgtcgacgacggcaaggtcctcttcgtcccgtgggtggagaccgacttcaggaccggccaggacccgtggtggagtgcatgatgaggatcatccgacacaagcggtgctcagtgctcataggctttctccgagggcgttgttgctacaaattcacttgcctcttgcctccaaattatatatattacacacactgcatgaaacatgaacacagctgtttgtcatctcttcactataaccttttgaacactctgaaatctaatggaatcaaatatagactntctctgccatctgctgatcaagtgaccagctaggagagcaatttagacctttttttttttg

SEQ ID NO: 87444 - DNA, 496 bp, Zea mays
ggggagagagtcgattacggagaagatagttactgccatgctcgtaccggtccggaattcccgggtcgacccacgcgtccgggttccctttcctcgagtttcctattttcgtctcctccccacagcagcccggcgaagaccctagtaagcaaaccaccggagcagcggcgcttgcgcgggcggagccatggcggacgacgattacaacaaaaattgacatggggtatgaggatgagcccccagaaccggagattgaggaaggagctgaagaagagcctgagaacaacgaagatgcccctgatgacgtcataggtggtgagggtgaagataaggaacaggaaaagaccaagcgtgaacgcaaaacaacaaaatacatgacgaagtacgaacgtgcgcgcatcctgggtacacgagccttgcagataagcatgaatgctccagtcatggttgagcttgagggtgaaactgaccctactgagattgcaatgaaggagcc

SEQ ID NO: 87445 - DNA, 457 bp, Zea mays
aggaggttatcctcgtccggaattcccgggtcgacccacgcgtccggctagccgccggtctcttgctctgatagcttgctccaggacgtacgtacgtacgtagatcgagccatcgatcgctagctagctgacgaccatggcgtccctctcctctgccgccatcaccgccccttccttcacggccgcgcccgctcgcgcagtggtcagcaggaggtccttcaccgtgcgtgcctctctccgcaaggccactgccaccgccgccgtggccgttgccgccagcgtcctgcttgccggcggcggcgccatggcccaggaggtgctgctgggcgcaggcgacggcgggctcgtcttcgagcccagccagttcaccgtcaaggccggcgacaccatcaccttcaagaacaacgccggcttcccgcacaacgtcgtgttcgacgaagacgacgtgccgagcgga

SEQ ID NO: 87446 - DNA, 505 bp, Zea mays
  unsure (1)..(505): unsure at all n locations
aggaggaggctgngtaccgagacgtatgctatgctgtacccgtccggaattcccgggtcgacccacgcgtccggagcagcgagccatcgacacgatcgcgagcgcaagcacgtacgttgtcggaagctcaggttagaagaagcaccagtgcctgatcgatggcggcccaggctctcctctccggccggcagctgctgggccgccccgtgcagtcggccgtctctaggtcgtcggcgaggaaggcgcccttcgtcgtcagggccagctccagccctccagccaagcaaggtgccgacaggcagctgtggttcgcgtccaagcagtccctctcctacctcgatggcacgctgcccggcgactatggcttcgacccgctgggcctctcggacccggagggcaccgggggcttcatcgagcccaagtggctggcctatggcgaggtgatcaacggccgctacgccatgctgggcgcggtggggcccatcggcccgggagattttgggac

SEQ ID NO: 87447 - DNA, 532 bp, Zea mays
ggggggggggagttagagggtgttttaacgacgggggggataacaggaatgctcgtaccggtccggaattcccgggtcgacccacgcgtccgcatatcctcactcgccgccgccgccgctcgtccctcgccccatcgcgatggcccgggtcaaggtgcacgagctgcgggggaagagcaaggcggatctgcaagcgcagcttaaggagtttaagtcggagctctccctgctacgcgtagccaaggtcaccggcggggctcccaacaagctctccaagatcaaggttgtgcgcacctccatcgcgcgcgtgctgaccgtcatctcgcagaagcagaagtcggcgctgcgtgaggcgtacaagaagaagaagctgctcccgctcgacctccgccccaagaagacccgcgccatccgcaggcgcctcaccaagcaccagctctccttgaagaccgagagggaaaagaagcgtgagaagtatttccccatgaggaagtacgctatcaaggcctagatcagtgaaagaacatttatc

SEQ ID NO: 87448 - DNA, 507 bp, Zea mays
  unsure (1)..(507): unsure at all n locations
agtagtgtggtctggggttggttcagtngacttgctactgtgtaccggtccggaattcccgggtcgacccacgcgtccgcgaccttcaagtctcgctacgtagcagtgcaataaaaaaagcagccgcaatggcgagcagcaccatggccctctcctccacggccttcgccggcaaggccgtgaacgtgccgtcgtcgtccgccttcggcgaggcctgcgtgacgattcgcaagacttcggctaaggccatgccggccgcagcattcttcactatttaccgtgttttccttgtttattgtataagatcggagcttgtcgtcatcgctttcccgaacgcacttgatgctgttactgtctgttatctaactcaggctggtcctctcttatgttgtttaaaaacctttcgggctttggctcgtccttaacgtgctatttaaactcgatcttttaggggaaattttcccgtactttcttgcttttatttatctttggttattggttgatatn

SEQ ID NO: 87449 - DNA, 523 bp, Zea mays
  unsure (1)..(523): unsure at all n locations
ggtgggaggagtagggggttngtacccgaaagaaagtatgctctaccggtccggaattcccgggtcgacccacgcgtccgggcgtcgtggtcgtcgccctcagccgccgcctcgggcgcccgattcggccccttccggagcggagggcagcggctcgcgccgtgtccgtcgctcgtccgcggaactcccgccccgacgctcgtcctcaggccccacccggacggccgtggccatggcctcctcgcgcacaccggcccctctccctcctcgcggtgccgcgccgtcgccgccgaggtcgggggcctcaacatcgccaacgacgtcacccagctcatcggcaacacaccaatggtgtatctcaacaacgtcgtcaagggatctgtcgccaatgtcgctgctaagctcgagattatggagccctgctgtagcgtgaaggacaggatagggtacagtatgataaatgatgctgaacagaagggctngattactcctggaaagaagtgtttggtggaagcaacaagtg

SEQ ID NO: 87450 - DNA, 508 bp, Zea mays
tagagaggggtgtgttactgacgcggagttactgcaactgctgtaccggtccggaattcccgggtcgacccacgcgtccggcggcggcggtttccagggccatctgcgtccagaaaccgggctccaaatgcagcagggacagggaagcgacctccttcgcccgccgaacggtcgcggcgccgaggcccccgcgcgccaaagccgccggcgtcatccgctccgactccggcgcgggacggggccagcagtgctcgccgctgagggccgtcgttgacgccgcgtcgatacagacgaccaaaaagagcaaatggcgcctcagtctcccgcgcgcaagctacaacggttcaaggtccggtgctgcggcggctgagccgtctaccgtgggagacaccttggaacgggaggagggcggcggcacagaggcaggcgcttcggctgatgagtcatccaaccggaagcagccggcccctggtgacccccaagatgagaaggagctcaaagaagtagt

SEQ ID NO: 87451 - DNA, 507 bp, Zea mays
  unsure (1)..(507): unsure at all n locations
ggagaggggttgattacgtagtcgtatgtcatgccgtaccggtccggaattcccgggtcgacccacgcgtccggcggcggcggccagcggaggagggcacaggcagcagctaacatccctcactctcggtgcctgacctgaccacgagagcaacatgggcggaggacacgacatgcacgggcagcactacggccacaacggcggcgtgaagggcttcgtgtccaacctcgtccacggcggcggcggccatggccatggaagcggctacggccatggccatggaaacggctacggccatgggaatggcggctacggcggcggccacgggtaccctnctcccgccggcgccggcgcgtaccctcatccgcacggggcgtaccctcacccgcacggcggccacgggtacccttcttccggcacctaccccgcgcactcggcgcactacgggcacacggtgtcgtaccacaccaagcccaacaacttacgcnggcgcngccggcaacaagg

SEQ ID NO: 87452 - DNA, 529 bp, Zea mays
gtgtggttggaggtagggtgtgttacgaccggggggagtagtgcactgctcgtaccggtccggaattcccgggtcgacccacgcgtccgcggacgcgtgggcggacgcgtgggcggacgcgtgggcggacgcgtgggcagcgactgagcgagcgagagcagcacacacgcagctagctaggagcagcagcagagcagcggcgatggcggcctccatgatctcctcgtcagctctggcggtggcgcctcagggcctgccgcccctcggccgccgcgcctcctccttcgccgtcgtctgctccaagaagaagatcaagaccgacaagccctacgggattgggggtggcctgaccgtcgacgtcgacaccaacgggagaaagggcaagggcaagggcgtgtaccaagttcgcgacaagtacagcgcgaacgtctaccgatacaggccaatctacaacgaggatgactggtctaggacgggcgacgtctaagttggtagaaccacggggcttctgattttggcccgcaactcc

SEQ ID NO: 87453 - DNA, 532 bp, Zea mays
  unsure (1)..(532): unsure at all n locations
gttgtgtttgtagtttaggtggtgtgtctaaacaagaaaatgtatgcagtactcggtccggaattcccgggtcgacgccacgcgtccgtcaatatataattgctccagtgaataactaaaaaaaaaaaatagaaggacggtagagagtagagaaaaggactaatcataatatctatctttaaaagattcaataaaaagacagttggcgggtctctttgtatgtcttgtccggaaagaggaggacttaatgattattcgttcgtcggaaccagaagttaaaattgctgtggatagggatcctataaaaacatcttttgaggaatgggccagacccgggcatttctcaagaacaatagctaagggccccgatactaccacttggatctggaacctacatgctgatgctcacgatttcgatagtcataccggtgatttggaggagatctcccgaaaagtctttagtgctcatttcggccaactcttcaatatctntctttggttgaatggcatgtacctttcccggtcccgcgtt

SEQ ID NO: 87454 - DNA, 509 bp, Zea mays
  unsure (1)..(509): unsure at all n locations
ggagaggggtctgtgcaagttcganagcatggcataccggtctcggattcccgggtcgacgccacgcgtccgaaacactggacgcgcccgcgcgtgcgagaggcccaagaaacccacagcagccgctaggcgtgaggatggcggacaccggtgacgtcgccgccgccgccgaggcctcggcgcgaccggcgggcagcagcagcacccagccgctggcggggcgcgtggcgatcgtgacgggcgcgtcgcggggcatcggccgcgccatcgccacgcacctgtcctccctcggcgcgagcctggtgctgggctacgcggcgcgcgccgacgaggcgggcgcgctggcggcgtcgctcccgcgcgcggtggccgtgcgggcggacgtctcggacgaggccggcgcgcggtcgctcttcgacccggcgacgaggccttcggcggctcgcacattctggtgggcaacggccgggttcttggacgacacgttccctcgccttggccggaaaccc

SEQ ID NO: 87455 - DNA, 507 bp, Zea mays
  unsure (1)..(507): unsure at all n locations
gggagagggtttngttaacgaacgagtgtatgctgtaccggtccggaattcccgggtcgacccacgcgtccgcgccgatacccctgatgatgcattgactgcgcgaaacaatggggcacaaggaattggattatgccggacagagcacatgttctttgcttcagacgagaggattaaggctgtcaggcagatgattatggctcccacgcttgagctgaggcagcaggcgctcgaccgtctcttgccgtatcagaggtctgacttcgaaggcattttccgtgctatggatggactcccggtgaccatccgactcctggaccctcccctccacgagttccttccagaagggaacatcgaggacattgtaagtgaattatgtgctgagacgggagccaaccaggaggatgccctcgcgcgaattgaaaagctttcagaagtaaacccgatgcttggcttccgtgggtgcaggcttggtatatcgtaccctgaattgacagagatgcaagc

SEQ ID NO: 87456 - DNA, 519 bp, Zea mays
  unsure (1)..(519): unsure at all n locations
taggtaaggtttgtcacgatagcgnatgatgccactgctgtaccggtccggaattcccgggtcgacccacgcgtccggcggagcagggcatcgtgccggggatcaaggtggacaagggccttgtcccgctcgccggctccaacaacgagtcgtggtgccagggcctggacggcctggcgtcccgcgaggccgcctactaccagcagggcgcgcggttcgccaagtggcgcaccgtcgtcagcatccctaacggcccctccgagctcgccgtcaaggaggccgcgtgggggctcgcacgctacgccgccatctcacaggacaacgggcttgtgccgatcgtggagccggagatcctgctggacggcgagcacggcatcgagcgcacgttcgaggtggcgcataaggtgtgggccgaaaccttctacgccatggcggagaacaacgtcatgttcgagggcatnctgctgaagccgttcatggtgacgccccgctccgaagcccaggacagggcccaccccg

SEQ ID NO: 87457 - DNA, 518 bp, Zea mays
  unsure (1)..(518): unsure at all n locations
nggtagagagggtcnngttactgaacagacgatatattgcgactgctcgtaccggtccggaattcccgggtcgacccacgcgtccgaggttcttgaggttcatgttgagaaggggatgcaacacaaccagaagatcaccttcggtggtgaagctgatgaagcgcctgatactgtcactggagacattgtattcgtcctccagcagaaggatcactccaaattcaaaagaaagggtgaagatctcttctatgagcacaccttgtctctgaccgaagcactatgtgggttccaatttgttcttacacatctggacaacaggcagcttctcatcaaatcagaccctggtgaagttgttaaacctgaccaattcaaggcgattaatgatgaggggatgccaatttaccagaggcctttcatgaaggggaagctgtacatccatttcacggtggagttccctgactcgttggcaccagagcagtgcaaggctctcgagacagtacttncaccaaagcccttat

SEQ ID NO: 87458 - DNA, 492 bp, Zea mays
  unsure (1)..(492): unsure at all n locations
aggagaggggtgngttagggggggggggagtaagcttataccggtccggaattcccgggtcgacccacgcgtccggcctgggttttagggcccttccttaaccgcccggcggccttgaacctgaaggtattgcccaagcccaaacagcggttgctgaaggcccatcagagggaggaggccatggagatgagcgacctggacctgtggaagcacgagaagccgccaaggatctgccccttgcccccgtcgctcccgccgncgncgtcagcgttcgacgaagcggcgctcgtgccgtcgctcaacttcgccgtggtcgacgacggcatcttccgctccggattcccagggaccgtcaacttccggttcctcaagtccctcaaccttcgctccatcgtgtacctgtgcccggagccgtacccggngacgaacacggagttcctagaaaagaatgggatcaggctcccaccagttcggaatcgaggtccgcaagga

SEQ ID NO: 87459 - DNA, 518 bp, Zea mays
  unsure (1)..(518): unsure at all n locations
agtgagagatgggtgnagttcaagcagggggatgttatgctctaccggtccggaattcccggttcggaccaacccttccgattttaacctttcggttgtactaactggcaaaaaaaaccccttttccagttccgtgggagctccggccagcagcaggccccggccggtcacgtataaacatttttgggttccttttaacccttggttgcataatgatcggggcaacccatcgaagctaccccccggtggactgggctttccctggggtcgggcgcatggacggggatcggaaaggatggcaaggttcgggatttccagggcgcattctgcggttcagaaagcccgggctcaaaatgcaccagggacagcgaagcgacctcctttcgaccggcgatcggtcgcagcgccgatgcccccgcacgccaaagccgccggcgtcatacgctccgactccggcgcgggacggcgccagcattgctcgccgctgaaggccgtcgatgacgcccttccgatacaaa

SEQ ID NO: 87460 - DNA, 518 bp, Zea mays
gggtagatctgtaaggagcgaggggtattgctacgctgtaccggtccggaattcccgggtcgacccacgcgtccgactcaacacagcacaggcagctcgagagagagagagagagaaagatgtcgtggttcgggcaccaccaccacaaccagccggctcccccggcgtcgggccccaaccaggtgttcaagatcttctgccgcgccaacgagaactactgcctggccgtccgcgacggcgccgtcgtgctggccccggtcaaccccaaggacgaccaccagcactggtacaaggacatgcgcttcagcacccgggtcaaggacgaggaaggcatgccggcgttcgcgctcgtcaacaaggccacggggctcgccatcaagcactccctcggccagtcccacccggtcaagctcgcgcctttcaacccggaccaggaggacgcgtcggtgctgtggacggaaagcaaggacgtgggcaagggcttccgctgcatccgcatggtcaacaacacccgcctc

SEQ ID NO: 87461 - DNA, 511 bp, Zea mays
ggtagagggctgtgaatcgacggagactgatggcactgctgtaccggtccggaattcccgggtcgacccacgcgtccggcagaggcagcgacacgatcgcgagcgcacgcacgtaagcacgttgtcggaagctcaggttagaagaagcaccagtgcctgatcgatggcggcccaggctctcctctccggccggcagctgctgggccgccccgtgcagtcggccgtctctaggtcgtcggcgaggaaggcgcccttcgtcgtcagggccagctccagccctccagccaagcaaggtgccgacaggcagctgtggttcgcgtccaagcagtccctctcctacctcgatggcacgctgcccggcgactatggcttcgacccgctgggcctctcggacccggagggcaccgggggcttcatcgagcccaagtggctggcctacggcgaggtgatcaacggccgctacgccattgctggcgcggggggcgccatcgccccggagatcttcggcaga

SEQ ID NO: 87462 - DNA, 534 bp, Zea mays
  unsure (1)..(534): unsure at all n locations
gagttgtagtgagggaggatgtttgtgtacgaccccagaactaatcttagtaccggtccggaattcccgggtcgagccacgcgtccgctcgcctcggcctcttttaaatatcgcgcatcccggcgccgcaaatggctcacgcggcgctgctccattgctcccagtcctccaggagcctcgcagcctgccgccgcggcagccactaccgcgccccttcgcacgtcccgcgccactcccgccgtctccgacgcgccgtcgtcagcctgcgtccgatggcctcgtcgacggctcaggcccccgcgacggcgccgccgggtctgaaggaaggcatcgcggggctgtacgacgagtcgtcggggctgtgggagaacatctggggcgaccacatgcaccacggcttctacgactcgagcgaggccgnctncatggccgatcaccgtcgcgcccagatccgcatgatcgaggaggcgctcgccttcgccggtgtcccagcctcagatgatccagagaagacaccanaaacaatagtcgatg

SEQ ID NO: 87463 - DNA, 491 bp, Zea mays
  unsure (1)..(491): unsure at all n locations
gggggagaggctnngttacgaacagaactttatgcaatgccgtaccggtccggaattcccgggtcgacccacgcgtccgcgctcatcttgctccgccttccgcgcatcctccaaggatcgtgatggccatggccacgcaagcctccgcggccacgcgccacctggtggccgccgccgcttccgcctgggcgccgtcggcgaagccgcggcagctaagctcacagctcgcgctgccgccgtcgtcctcccgcgcgccggccccgctccgcgcgaccgccggggaggcggtgaccgaggaggcgcccaaggggttcgtggccccgcagctggaccccagcacgccgtccccgatcttcggcggcagcacgggcgggctgctccgcaaggcgcatgttgaggaagtctacctcatcacgttggtggtccccaaagaaccagggtccgagatgccaaccggcgctgccgccataatgccgaaggggcccaacctc

SEQ ID NO: 87464 - DNA, 493 bp, Zea mays
gggagagaggctgagttactgacggagattattgcaatgctctaccggtccggaattcccgggtcgacccacgcgtccggaaggacacaaaaacacaggtagggttaggcgacgcggcggcgagagcgcgagagtaggaggaggcgtcggccatgacggggaaggcgaagccgaagaagcacacggcgaaggagatcgccgcgaagatcgacgcggcgacgacgaaccggggcggcggcaaggtcgggcaggcggatcggctagggcaggacaagggcgggcacgcgaagctggcgtgcccgctctgccgcaccccggcgcccgacatcaagtccatgcagatccaccacgaggcgcgccatcccaagcttcctttcgagccggaaaagctcgtcaacctgcacttcttcacccccgtcggcgccgatgccaccaccttcaagcccaaagcccggggttcggggcagccctcaagaagtagcttgcttgcttg

SEQ ID NO: 87465 - DNA, 496 bp, Zea mays
  unsure (1)..(496): unsure at all n locations
agggaagagcgtgtagtccacccagccaaaagctactgctactacctgtccggatttcccggttgaagcaacccttccgcggcaaccgtccccgcccgcggcggttccagcgcttgctgccccgccgttccttggggaaggtaaccaggaagggccccgtcccgtgcccgctgcaacccgcgctgctggcgcccccgctcgtgcccggcttcctcgggccgncggccgagcccacggttgagccggcatcgactccgacgtccgtgcccgactccggcctgggggtcctcggtctcgaacctgaaaggattgctgaaggttccatcgataacacagtagttgtggcaagtgagcaagattctgacattgtggttggaaaggaacaagctcgagctaaagtaacacaaaacattgtctttgtaactggcgaagcttctccttatgcaaagtctgggggtctaggagaatgttgtggttcattgccatttgctattcg

SEQ ID NO: 87466 - DNA, 507 bp, Zea mays
agtagagttgtgggtaaggagaggggggtattgtgatgctgtaccggtccggaattcccgggtcgacccacgcgtccgcaatatgcttcaaggttgcagaagtgttgatgagtttgagaggctcaacaggattaatgagggaacatatggtgttgtatacagagcaagggataagaagacaagtgagattgttgcattgaagaaggtaaagatggagagggagcgagaaggtttcccattaacctctcttagggaaataaatatcctcttgtctttccaccatccttcaatcgtggatgttaaggaagtagtagttggaagtagtttagatagcatttttatggttatggagtacatggaacatgatcttaaaggtgtcatggagaccatgaaacaaccatatacacaaagcgaggtcaaatgtttgatgcttcagctgctagaggggtgtaaatatctacatgacaatttggtacttcatagggatctgaagacctaaaatctttg

SEQ ID NO: 87467 - DNA, 524 bp, Zea mays
  unsure (1)..(524): unsure at all n locations
tggattgagagtaggatgtgngtttagaaggcgggggatagtatactcgtccggattcccggtcggcccaagccgtccggcataacccagtttaataacccgatccggtggaaaaggcacctttttttgaacatggcgggggagggagccccggtgctggtgaggcatgctggcggcgtggaggagctgcggcagctcccgccggggttccggttccgccccacggacgaggagctcgtggtgcagtacctccggcgcaaggccttgggcgcgccgctccccgccgccgtcatccccgtcgtccgcgacctctacagcctcgacccctgggacgccgtcgacgtggccggccgccctgatgcgagcagccaaagcgagagatacttcttcgcggtgcggccggcgggcggcgtcggaagtgctaggagggcgaccgcnagcgggcggtggatgccggcggggaaggagaagccggtggccctggcccgcccgtgcggcggcgggagcctcctgtgggcgtgaat

SEQ ID NO: 87468 - DNA, 527 bp, Zea mays
  unsure (1)..(527): unsure at all n locations
gtgtgtggagtaggggtgngttacgagcacagattattgctcatcccggtccggaattcccgggtcgacccacgcgtccggatggcacaagccatggcgtccatgaccggcctctcgcagggcgttctgcccagcaggcgcgccgccaacagggccaggacggccgccgtcgtcagggcgtccgccgaggcgcaggcgcaggcgggccgtcgcgccgtgctcgggctggtgggcactggcatcgtcggcggcgccttgtcgcaggcggtgcacgccgagaccgtcaagaccatcaagatcggagccccgccgncgccctccggtggactccccgggactctgaactctgaccaggcgagggacttcgaccttcccttgaaagagcggttctacctgcagccgctgccgncggcggaggccgtggcgagggtgaagacgtcggcgcaggacatcatcaacctcaagccgctcatcgancagaaggcgttgccgtacgtccagaacgaccttcgnctccggccctccta

SEQ ID NO: 87469 - DNA, 497 bp, Zea mays
agtaaagtggtttgtaagggggggggagtactgtcatccgcgtccggaattcccgggtcgacccacgcgttcggagcgcacaccacacacaatcagatctcccccaaaaccaacccgtgggaacctccgcttgaagaggcaaaccttggggaaaaccctgacctggcaaggactatcaccctcgaggggggagtcgtctgacaccattgacaacgtttaggccaagatccatgacaaggagggcattcgcccagaccagcagcggctcatctttgctggcaaacagcttgaggacgggcgcacgcttgctgactacaacatccagaatgagagcaccctacaccttgtgctccgtctcaagggaggcatgcagatctttgtgaaaaccctgaccggcaagactatcaccctcgaggtggaatactctgacaccattgacaacgtcaaggccaagatccaggacaaggaaggcattcctacagaccagcagcggctca

SEQ ID NO: 87470 - DNA, 488 bp, Zea mays
  unsure (1)..(488): unsure at all n locations
nagtttaaatgttcctatattcctggacccttcgctcngctattccttttcggaattcccgtctcgagccactcttccgatccgctcactaccccaaccagatgtttccataatcaacccgtgacacctcccttgagaggccaactgttgaaaccctgactgcaatactatcaccctccaagttcagtcatctgacaccattgactacgtttatgccaatatccattactaggactgcatccatacagactagtagcagctcatattacctttcaaacagcttaacgacagtctcacgcttgctcactacatcatccacaatcagagcaccctccaccttgtgctccgtctcattttaggcatgcagatctttgtgaaaaccctgacctgctagactatcaccctcgaggtgcagtactctttacacatctacaacatcaatgccaatatccagtacaaggatttcattcattcataccatcttcatc

SEQ ID NO: 87471 - DNA, 517 bp, Zea mays
  unsure (1)..(517): unsure at all n locations
nagtaggagaggctgnctctatgataggcgacttactggactgctgtaccggtccggaattcccgggtcgacccacgcgtccggtacaaccctgataagattgccttcgttcccatttctggttttgagggcgacaacatgattgagaggtccaccaaccttgactggtacaaaggcccaaccctgcttgaggctcttgaccagatcaccgagcccaagaggccttcggacaagcccctgcgtctgcccctccaggatgtgtacaagattggtggtattggaactgtaccggttggtcgtgtggagactggtgtcatcaagcctggtatggtagtcacctttggtccaactggcctgactactgaggtgaagtctgttgagatgcaccatgaggcgcttcaggaggctcttccgggcgacaatgttggcttcaacgtgaagaacgtngctgtcaaggatctcaagcgtgggttcgtggcctccaactcccaggatgaccctgccaaggaggctgtca

SEQ ID NO: 87472 - DNA, 513 bp, Zea mays
  unsure (1)..(513): unsure at all n locations
tgggaggagtgtgtctgtgaaagcgactgatgcatgctcgtaccgtccggaattcccggtcgacccacgcgtccggatgagattggcatagagagctagatgggtgttgacacctttttggaggggccaatgcatttcaaaagaaccagcggcggtgctctctggtcaggcgcggacggtccgcggcacagagccggacggtccgcgacctggcgcgaggcggcggtgctccctggtcagacgcggacggtccgcggcacagggccggacggtccgcgacctggtgcaggagctaggatcccctgcctgacggccggacggttcgcgcgtgcgtaggggcggcggaagatcaccggcggctcctgaatctcgctcccgggagggaccccgtttgggaggagagatcctaggagttgtctaggctcgggcagaccgacctagactnctctaatcgacgtagagtccaggagaggcanagaatttggggattggaatactaaactagggcttaaa

SEQ ID NO: 87473 - DNA, 488 bp, Zea mays
  unsure (1)..(488): unsure at all n locations
nagggaaagggggtgagtaagaagggggggaatgcaaacctcgtccggaattcccgggtcgacccacgcgtccgcggacgcgtgggcgccgnctnccttcccctccgctactgcgacctccccaccccactgccccgcatgagcggcggcggcggcggcggcgaggtcgtaccccacatcggcgagcggcggcggcaccgtcggaggcaaaggcaagatgttcgggcgcgcgccgaagaagagcgacaacaccaagtactacgagatcctcggngtgcccaagtcggcgtcccaggacgacctcaagaaggcctaccgcaaggctgctatcaagaaccaccccgacaagggcggtgaccccgagaagttcaaggagctcgcacaagcctatgaggttttgagtgatccagagaaacgtgagatttatgatcagtatggtgaagatccccttaaggaaggaatgggcggtggaggatcccatngtgatc

SEQ ID NO: 87474 - DNA, 494 bp, Zea mays
  unsure (1)..(494): unsure at all n locations
aggtaaagtgactannattaccgaacggggggtgtattgctgtactcgtccggaattcccgggtcgacccacgcgtccggcagctcaggtgcttgtctgaaccctgaaaggggagcaggaaacgtattccagcccggcctgggcgaagaaggccacagaggaaggctctccaccgtgttctccacaaatgcccaccttcaagttaggcctagctttgcggcccctttctgtagcaaacttaaccagctcgcccactcccctctgttcaggacctcgaaggggtcatgttgagatgccctgcgcgaattgaaaagcttcaaaggtaaacccgatgcttggcttacgtgggtgcangcttggtatatcgtaccctgaattgacaganatgcaagccctggccatttttgaagctgctatagcaatgaccaaccagggtgttcaagtgttcccagagataatggctcctcttgttggaacaccacaaggacctgggc

SEQ ID NO: 87475 - DNA, 502 bp, Zea mays
  unsure (1)..(502): unsure at all n locations
aggggtgagtgnttnnnnttaaggtgatgagaggtaatggtcatgctgcgtaccggtccggaattcccgggctagcgtccggtaaacgggggcgacgacgcgcgcgaacccggagccgacgctggtgacgaagcgcgccgccgtgagcgcggcgaagctggtgccgagcgacatggcgagcgcgccggccatgaggaaggcgttggcgagcacgagggtgcggcggcggcccaggtggtcggccacccagccggcggcgaggatggacgcgagcatgaacacgttcatggatcccgccagcacctcgacctcgccgtcggtgagccccacgtcctcccgcatgaacagctccgcgccgctcatcagcgtcaggtctgcagggcacgtatatgggtcggtcgtaagcccatgtagcatggtggtgacggaggcgagcgtggcgcaaacgaaggcgaaccttgtccggcgcggtgcttaaccctggcggcgaacgggttgaacc

SEQ ID NO: 87476 - DNA, 535 bp, Zea mays
  unsure (1)..(535): unsure at all n locations
gagggactcgtngttcagggctatgtcctaagctngactctctggtaccggcttcccgggtcgacccacgcgtccgagcaacttattgaactagacatttcctcaaataaacttgaaggggaaataccttacgagtttgagtgaatgtcgtcagttgaatgtactccaaatggactccaattttatcacagggaacatttcgcctctacgtagtctaacaagcttgaacatgatcaacctctcacacaatatgttgtcagggatcatccctgcagaactgggtggtatgtcctctcttacccagctggatctatcttataatgatctacaaggcaaaattccaatggatggagtatttagaaatgcttcagctatctcacttgttggcaactcgagactctgtggtggtctgtcagatttgcacatgcccccctgccctgttgccttaaaggaaaaggcagcacaatactacatcattagagtgttgatcccaatatttggcttcatgtcactggtgaaaggttggatggttccc

SEQ ID NO: 87477 - DNA, 540 bp, Zea mays
  unsure (1)..(540): unsure at all n locations
gagggcgtgnncttcgnattttagctcttatgtaagagcctacgncatgctgtaccggtccggaattcccgggtcgacgccacgcgtccgatggtgtcaagattagaatcattgatacacctggccttcgacctagcgtgatggacgagggatcaaacagaaagattcttgctgctgtcaagaactataccaagaaatgtccgccagatattgttctatatgtggatcgtctggatagtctgagccgtgatctcaatgatttgcctcttctgaagactattactgctgttcttggctcatccatatggttcaatgccattgttgcactgacacatgctgcctcagctcctcctgaaggcctcaatggtgctcccatgacatatgaggtcttgatggctcagagatcccacatcatccagcagtccatcaggcaggctgctggagatatgcggttgatgaacccagtagcacttgttgagaaccatccttcgtgcaggaaaaaccgggagggccagaaagtgctttcgaatgggccaaact

SEQ ID NO: 87478 - DNA, 520 bp, Zea mays
  unsure (1)..(520): unsure at all n locations
tgtaagtaggagagggtgtgtncacgtcacgtaaaggttagccatgccgtaccggtccggaattcgcggggggagccacgcgtgcgcaaaatgagctcgtagaatcagctgcagagatgctttatggtctgatacatggactgtacattctgaccagtaaaggactggctgcaatgctggagaagtataagaactatgactttgggcggtgcccgcgtgtttactgctgtggtcaaccatgcctgccagttggacaatcagacatccatcgatctagtaccgtgaagatatactgccccaagtgtgaagacatctactacccacggtccaagtaccaaggcaacatcgacggcgcatactttgggacaacgttccctcatctgttcctgatgacatacgagcacctcaagccacagaagctctcgcagcgctatggtcctcgtgtctttggcttcaagctccacaagccatgaacctcatgtatttgtcttttaaactcctcaagacgtggcactggggg

SEQ ID NO: 87479 - DNA, 543 bp, Zea mays
  unsure (1)..(543): unsure at all n locations
cgcgggancgtcgantngatccgagaggctcatgctcttgatgtacgatcctcactcggacggcattcccgggtcgacccacgcgtccgggagtgtctctcctttgccatcctcctctctttcagctaagtccctgccccctctcgtgttcttacaggcaggtcctcgcagctcctctcttttttcttgtttctttcgatctgcgagccgtccaagtccagtactcttctttccctcaaggaactcttgcagccggcccctctggtttcctcgaattcttgttccccggtccctcctcctgtccccgcgtagatccgtccgtccgaggagcacaccgtccccacccccatgtttacccaccagttcctctgacggccgccgtgctccgatgaagctgagcgtgctccgtatccgccgctcccactccttctccgtcgccttcctctactggttctacgtcttctcatgaacgcatcgcccctctccaactgctgatccttcgccgtctctccctctctctttctctctgagataggctttcca

SEQ ID NO: 87480 - DNA, 533 bp, Zea mays
  unsure (1)..(533): unsure at all n locations
agggntcttnnttttcagggatgatctctgttagctattatgccacgctgtaccggtccggaattcccgggtcgacccacgcgtccgcaacggcaagatcaccgcgaggatctccaactggggcgccaccatgacctccctccgcgtccccgacgcccaggggagtgtcgctgatgtggtgctcggattcgatggcttggatccgtacgtgaaaggcatgtcaccttattttggctgcatagttggccgtgtcgcgaataggatcaaggatgggaagtttacactaaacggacttgagtattcattacctgtcaacaatggacctaacagccttcatggtgggttgaagggatttgataaggtcgtgtgggatgtcgtggagcacaaagatggcgaatgcccttcaataacttttcagtatcacagcaaggacgggggngaaagctatccaggcgatgtaaccattcgagcaacatactctcttcctgaagctactactctaaagcttgacatggaagctacaccagagaaca

SEQ ID NO: 87481 - DNA, 513 bp, Zea mays
  unsure (1)..(513): unsure at all n locations
tttagtaggagaggtgntttagtatagagagtacgccacgctcgtaccggtccggaattcccggggggagccacgcgtccggcagaaaaatgcatgttgggtctttgaaacagttcgaatcatttcgataatgatctgtttgatctgttttaccgagaaggtctacggttcgaatccgtatagccctaatatatacgtcttttttccattttaggatggatatcttatgtttcctttagtatagttttcttttccttatttagtacttgtttatagactcgacggtcgattgcgccatagaatagagataaaagcattaccataggctcattcatcgaaacgcaaatcagagagacaggaaaagaaaaaagaattttgatcaaatcaatagaaggaaggatcccttacctgatttgaatttcatcctcctttaaataggatatgctctaagtcttcccatactttcctataatgactgcaacgattntctccattttgcgaattcctatttta

SEQ ID NO: 87482 - DNA, 517 bp, Zea mays
  unsure (1)..(517): unsure at all n locations
tggaatagggaaggttggtctagtctagcacgtactgcacgctcgtaccggtccggaattcccgggtcgacccacgcgtccgaacttcccttcatactctccatcttcccctccccagctctaatcaagcctacgacagaatcaacatgggtgtcattgagaagctcagccgcaaggccggtgtcatcgtcggtgacgatgtcctccgcctcttcgagtacgctcaggagaagcagttcgccattcccgccattaacgtcacctcttcctccaccgtcgtggctgccctcgaggccgctcgcgaccaaaagtcccccattgccctccaggtctcccagggtggtgccgctttcttcgccggtaaaggtgtcagcaacgatggccaagcccgcttcatcggttgtgccatcgccgctgctcactacatccgcgccatttgccccacctacggcgtttccgtcgtccttcacaacgatcactgcgccaagaagcttctcccctggctcgacngcatgat

SEQ ID NO: 87483 - DNA, 542 bp, Zea mays
  unsure (1)..(542): unsure at all n locations
agaggnnctcnntcatttagggttccaccgcttactgtacgnactctcatcggtacggcattcccgggtcgacccacgcgtgcgcgacacgatcgcgagcgcacgcacgtaagcacgttgtcggaagctcaagttagaagaggcaccagtgggtgatcgatggcggcccaagctctcctctccggccggcagctgctgggccgccccgtgcagtcggccgtctctaggtcgtcggcgaaggaaggcgccccttcgtcgtaagggccagctccagccctccagccaagcaaggtgccgacaggcagctgtggttcgcgtccaagcagtccctctcctacctcgatggcaccctgcccggcgactatggcttcgacccgctgggcctttcggacccgaagggcaccgggggcttaatcaaccccaattgcttggcctacggcaaggtgatcaacggccgttacgccatgctggccccgttgggcgccatcgccccggagatcttcggcaagatgggcatcattccgccggaaaacccgccttcc

SEQ ID NO: 87484 - DNA, 539 bp, Zea mays
  unsure (1)..(539): unsure at all n locations
agagggncgtcgnntcgtttgaggactctagttatgatgtatgtactctatcggaacggcattcccgggtcgacccacgcgtccgaaaaacaaaaggatttgttttacaaaagatgtttggcaaagtgggagggatattttcgaaaataaaacgtgatggtgaatccatcatggccatgatggattcaacatcggaaaagatgtacctctgccaggtaccaagtttttgggttaaaaagattaagctgagaccgggcgggtgacttgcacgagaagaaagtctcggtgtagtgtctccgtctgagtcgattaaggaccgtctcgatgtaagcttgatgatcgaagaccctttaactggtcacatgcctcgtcatgggtaagccttgcctcgggcagactaaggccggaataagataacacgaaatgggcgttgagcggtggcgagagtaacgtgtacccttcgtggcaagaggcttgacggtggtgtatctgtgctctcggtttgcgtgaacctgatccggcttaaaaaaccccgtggg

SEQ ID NO: 87485 - DNA, 537 bp, Zea mays
  unsure (1)..(537): unsure at all n locations
agaggtctcantcgatcatgtcccctgcnatttacgctagttctatcgnattgctttaccggttggacctacgcatgtcgagacacaacaagattgcgtttacaaattatgcatgccaatagtgctatggatatattcgaaaataaaacggtgatcgtaaatccatcatggtcatgattgattcaacatcataatagatctacctctgccatctaccaagtttttgtcttaaaaagattaatctcacactcctcccatgacttacaccagaacataaactaagcatagtgtctacatcttagtcgattaacgaccctctcaatgtatgctttatcatcaatgaccctttaactgctcacatgccttgtaatcgctaagcctttcctacttcaaactaaagtcggaataaaataacaccaaatgggctctcaacggttactagaataacgtgtactcttccattcttagatctttactttcttttatcttatctatttttttccattaacccttatctcttttaaaaacccttttctn

SEQ ID NO: 87486 - DNA, 534 bp, Zea mays
  unsure (1)..(534): unsure at all n locations
gaggtctcgnntgtccaggatatgaaatattgtatgacctcctcggacggcattcccgggtcgacccacgcgtncgcagctcccatatccggtccccttaccttctcagcatctcccgtctccgtcgtctcgtcgctgctcctcagctcgccgccagccatgggcaagatcaagatcggaatcaacggtttcggaaggatcggcaggctcgtggccagggtcgccctgcagagcgaggatgtcgagctcgtcgccgtcaacgaccccttcatcaccacggattacatgacctacatgttcaagtacgacaccgtgcacggccaatggaagcacagcgacatcaccctcaaggactccaagacgcttctcttcggcgagaagccggtcaccgtctttggcatcaggaaccccgaggagatcccgtggggtgaggctggtgctgagtatgtcgtggagtccaccggtgtcttcactgacaaggacaaggctgctgcacatcttgaaggtggtgccccagaaaggtggtatcttctc

SEQ ID NO: 87487 - DNA, 536 bp, Zea mays
  unsure (1)..(536): unsure at all n locations
aggggctcgnngttcaggatcctgcccctacgcagcgactacgccatgctgtaccgtccggattcccgggtcgagccacgcgtccgggattcttgaacctctttcacgctcatgtcacgtcgaggtactgcggaaaaaaagaggcgcaaaatccgatccaatttttcgtaatcgattagttaacatggtggttaaccgtattatgaaagacggaaaaaaatcattggcttatcaaattctctatcgagccgtgaaaaagattcaacaaaagacagaaacaaatccactattggttttacgtcaagcaatacgtagagtaactcccaatataggagtaaaaacaagacgtaataaaaaaggatcgacgcggaaagttccgattgaaataggatctaaacaaggaagagcacttgccattcgttggttattagaagcatcccaaaagcgtccgggtcgaaatatggctttcaaattaagttccgaattagtagatgctgccaaagggaattggggttccatacgccaaaaggaaagca

SEQ ID NO: 87488 - DNA, 537 bp, Zea mays
  unsure (1)..(537): unsure at all n locations
gaggnctccnnnattcaaaggaatgatctctttccagttcactacgtcacgctgtaccggtccggaattcccgggtcgacccacgcgtccgcacaatgattgattttctccaacatatggcattcacggttagcagagggcatttaaggcaacgatcgatatattctccccatccacaagttagctctggatactagtttgtttgctgtaagactttttcagcattatctgaaacgttaaatgtctttctatattcttgtgctgtcttgctatcatactgtttgtggatttcctacaaaaaatatctggctgaggttgataatgagtactacatccgttctcgaatatttgtcgcccggtagttcatttttgaactaaaacacggtagttcatttttgaactaaaacgcgacaaataaaaaaagaacggaaggagtgtattacagccattagtgattacggattggtcttccgcacatgagttcatgatgatgtgctcttgttgctattctatagcttgtgcaagtatctcacaatt

SEQ ID NO: 87489 - DNA, 536 bp, Zea mays
  unsure (1)..(536): unsure at all n locations
gaggctcgntgttcaggactagtgctctgtcagttcactacgtcactgctgtaccggtccggaattcccgggtcgacccacgcgtccgctccatccagggcctcgtgctgaatgacaggccatacttcaatgagccaggatccaggaactcggctgaaacgacaggtggtgagaggtgttccctggcttacaatcagacggccttcgtcagatcatgcaagacgatgctgtattcactccggaagcctccaatgcattttgagacccttgtgttgtggcacttccacgagcatgagcgtgccatcctcgacgcttgcagggcttacatgtctgggacagtcgttgggtcgtctgctgggactgggagcaaccgcagatacgtccatgacaagtgctttgcagaattccacaagtcgctgacgctctacactgaacatctcagggctgagtttgctgcaaacacacgacgagtgatggagctggaaacagaagactagatcgtgcctagcatagcagctagcgtgaaaatcggtttg

SEQ ID NO: 87490 - DNA, 516 bp, Zea mays
tggaagagagaaggttggtctacgctagcccatactgcacgctctaccggtccggaattcccgggatccgcttgcggcaaaaccttgcgcgcaacaatggccgcctccctcccgaccaccgccgcgcgcctcggggcggcggccttcgcctaccggtcgcccaaggctccctccgccaccgccctcccgcgtgccgccgccttccctgcaatcgccgtcgcggcggcgcccctgcgcccgcgccgcgcgccgaggccggtggcggcccgggccgggggcgaggagcgggagacgatactgctccccgggtgcgactacaaccactggctgatcgtcatggagttccccaaagaccccgcgcccacccgcgagcagatgatcgacacctacctcaacacactcgccaccgtcctcggcagcatggaagaagccaagaagaacatgtacgcattcagcacgaccacctacaccgggttccagtgcaccgtggacgaggagacgtccgagaattcaagg

SEQ ID NO: 87491 - DNA, 515 bp, Zea mays
  unsure (1)..(515): unsure at all n locations
tgaagggagggagaaggtggtctacgaaggcgattgactgcacgctctaccggtccggaattcccgggtcgacccacgcgtccgcgcgcgtggtcgccatcgtggacgccgccgccttcaccgcgctcttcgaccgggacgtcgtggacaagagcgacatcctcatcgggccctacaacccgggcgccggcttcaccggcgggacgcgcgtcggcgtgtacctcgacacgcaggaggaggagcacgcgcgcgtcaagaccttcgccatggacctnctccaccgctccgcccgcacctggtccgccgacttccgcgcgagcgtcggcgccatgctggacgccgtggacgcggagttcggcaaggacgacggcagcgacaagaagccctccgncagctacctcgtccccctgcagcagtgcatcttccggttcctctgcaaggcgttcgtgggcgccgacccgtccgncgactggctggtggacaacttcggcttcaccattcttgacatctggctg

SEQ ID NO: 87492 - DNA, 539 bp, Zea mays
  unsure (1)..(539): unsure at all n locations
agaggncttcntnnatacagggtttatgcatatactgtaggaacctcattcggacggcattcccgggtcgacccacgcgtccgaagggcctnctggatcctctcacttcccttaatccttgtccggctggtcccttctttgtttacctaacggtaactagccttcctgtaacccggcaaaaatggctggccctgccttcaccacggccgcggcggccgcagcgctgctgctgctgctcctcctgtcgctcgccgcggcggcggacatgtcgatcgtgtcctacggggagcgcagcgacgaggaagcgcggcggatgtacgcggagtggatggcggcgcacggccggacctacaacgccgtcggcgaggaagagcggcggtaccaggtgttccgggacaacctccgctacatcgacgcgcacaacgccgncgncgacgcgggcgtccacttccttcgnctcggcctcaaccgcttcgccgaccttaccaacgacgagtaccgggccaactaacttgcgcccagaacaagccgcaaaaggg

SEQ ID NO: 87493 - DNA, 536 bp, Zea mays
  unsure (1)..(536): unsure at all n locations
gaggctcgntgttgagggtagatctctntacgagtatgatgcaactgctgtaccggtccggaattcccgggtcgacccacgcgtccgcgaggataaaacaggcggcaaagtcgtatcccgcagcataaacatgattatactgtgccgcgtcggaactatgacccccagaaaaggcctggcgtaccattgatgctgtggaaaccgttagctcctatctatcctaagctcgtgcaaaacgttgctgaagggttgactttcgaggaaacaaaagagttgaggaacagaggattgaattctccaccgcttacaaaactgactaggaacggtgtctatgttaatgttgttgataaagtgagagaagcgtttaagactgtggaagttgtccggctagattgcactcatgttgggactactgactgcaagaaaattggtgtgaagttgagggatttggttccatgcattcctatattatttaaagatgaacagattatactatgganagggaaggttcgccaagagcgttctggttcagcaat

SEQ ID NO: 87494 - DNA, 533 bp, Zea mays
  unsure (1)..(533): unsure at all n locations
gggatttcnangttcaaagctatgattatntccagtcactacgtactgctgtaccggtccggaattcccgggtcgacccacgcgtccggaagaaacctacaaacacctacctctctacgaactacctgccgccggaaaaccctggagcgctcgaccatggatccgcagcagccggagcctgtcagttacctctgcggagattgcggagctgagaacaccctgaagcccggagatgtcatccagtgccgtgaatgtggctaccgcatcctctacaagaagcggacccgccggattgtccaatatgaagcgcgctgaatagtgaagacaagggaaaacactgaagatggttgatctattactcgccacattacctatgtaaacagtcttctgggggaaatgaaaatgtcagacttaacgtttgtatgtcgtgtgcctcctttgaacctgagctgtataatttgtaacgcttgaactggggactgatttgagaactgagacactgcagcaatatgttgatgggtcctaagtggcga

SEQ ID NO: 87495 - DNA, 508 bp, Zea mays
  unsure (1)..(508): unsure at all n locations
aggggctcgntgtcgaggcctagtcctcgtcacgcctacgtacgctttccgggccagacagacgtgcgacgacaacgctgcgctctgtgtgaacgcaactagcgctgactgtgggcctccgggggatcctgctggaggactacacctgatcgagaaggtggcgcacttcgcgcgggagcgcatcccggagcgcgtggtgcacgcgcgcggggcctncgccaagggcttcttcgagtgcacccacgacgtgacgtcgctgacgtgcgccgacttcctgcgcgcgcccggcgtgcggacgcccgtgatcgtgcgcttctcgacggtgatccacgagcgggggtccccggagacgatccgcgacccgcgcgggttcgccgtgaagttctacacccgcgagggcaactgggacctgctgggcaacaacttccccgtcttcttcatccgcgacggcatcaagttccccgacgtgatccacgcgttcaagcccaaaccgcggtccgcactgcaa

SEQ ID NO: 87496 - DNA, 518 bp, Zea mays
  unsure (1)..(518): unsure at all n locations
tagagggatataagttggtgttatgtaagacgattactgcacgctctaccggtccggaattcccgggtgcgacccacgcgtccggaaagaactagtgtggccagaattagatcaattgctccgcgacgaggatgacgcaggtggtgcatcgactccatatactgctgctattcctgaatacagagttgttttcattgacaaatctgacctgtcattccaagatagatcatggacactagccaacggtactggtgtgattgatattcaacacccttgcaagtctaatgttgctgttcggaaggagctgcacaaaccagcttcagatcgctcttgtatccatctcgagtttgacatttctggcactggtcttgtgtatgaaaccggagaccatgttggtgtatatgcagaaaattctgttcaaactgtggaagaagttgaaaggctacttgacctttcttcagacacaatcttcttcattcatgcagatgcanaaaaatgaatcttctcgtaaaggagga

SEQ ID NO: 87497 - DNA, 534 bp, Zea mays
  unsure (1)..(534): unsure at all n locations
gaggnctcgnnggtccaaagaaagaatatactgaagtagttcatcgctacggctttcccgggtcgacccacgcgtccgcattaccataggctcattcatcgaaacccaaatcaaagagaccggaaaagaaaaaagggttttgatccgatcaattaaaagaaaggacccttacctgatttgaatttcatcctcctttaaataggatatgctctaagtcttcccatactttcctataatgactgcaacgattttctccattttgcgaattcctattttatttgaagtatattactatcatatacattatctaaatcgatccactttaaataaaatagaaaaaatcgaaagaaaaaaaaaaagaaagagtaaataataaaacaggatattctgtttcataattctgaaatagagttcttttttttagtattactcctcattaggatgtatatattaatcatcctattttaatatatattaatcatcctattttaattaagttctaatccaattagtagtaaatattttcttttttaa

SEQ ID NO: 87498 - DNA, 501 bp, Zea mays
  unsure (1)..(501): unsure at all n locations
agaggactcaacatcatgtgaagnnacatgcagtacttcgtatncaatccattgacgcaccatgccttacataactcatctctaactcaaatacataacacaaaaaaaaacgatattttcagactatatacctacatcccttacctaatttaatttcatcctcctttaaatacatatctctaatcttcccatactttcctatattactcaactattttcccattttcctaattcctattttatttcaactatattactatcatatacattatctaaatctatccactttaaataaaatataaaaaatctaatcacaaaaaaaaacaaatactcaataataaaacaacatattctctttcataattcttaaataaaactctttcttttattattactcctcattatcatgtatatattaatcatcctattttaatatatattaatcattctattttaattatcttctaatccaattatatattaatcactttcttttttttt

SEQ ID NO: 87499 - DNA, 532 bp, Zea mays
  unsure (1)..(532): unsure at all n locations
gaggnctcgnngtttaaagaagaggttatgagagagcgtaccgntacggctttcccgggtcgacccacgcgtccgaaaagacaccgncctgcccttcgctagcggaaaccgccttccctcgccggggtaggggtnttcnnnncggagacgcccgccatggacgcgttccggaaacagctggacgtgctcatgggcgccaaccgcaacggcgacgtcgaggaggtgagccgcaactactacgaccgcgacgtctgccgcctcttcctcgccggtctctgcccacacgacctctttcagctcacgaaaatggatctcggtccttgttctaagattcattctcttcaactgcggaaagattatgaagaagcgaaagcaaagggaacagaaaattttgatagagaactcgaggatatgatagaaaggctcattgtggagtgtgacaggaaaattcagagggccctaaaacggcttgcagatgatgatgccaatgctgctattgcgatatcggtctctgagggtactctgtcaggga

SEQ ID NO: 87500 - DNA, 533 bp, Zea mays
  unsure (1)..(533): unsure at all n locations
agaggactcgntattgtggggcagctcctcgttcagtcgctccgtaccggcattcccgggtcgacccacgcgtgcgcatacttgcacttagctgcaaagatgccaattattcacagagatgtcaagtcgtccagcatactcctagatgacaacttcactgccaaggtgtccgatttcggtgcctcaaggccaataccgcacaaccagacccatgtgacaacattggtgcaagggacactagggtacatggaccctgagtacttccagacaagccaactgactgagaagagtgatgtgtacagctttggcgtcgtactcatcgagctactgacaagaaagaagcctatcatggatgatatcgcggaagacattagaagcctagcgcttcaatttagtatgctattccatggaaataagctgttggaaatcgttgatcctgtagtaacctaagaagccggagtcagacatggtgaaactgtttttaaagttgcagttctaatcttaacgtatttatgttttacaaacttccaatg

SEQ ID NO: 87501 - DNA, 531 bp, Zea mays
  unsure (1)..(531): unsure at all n locations
gaggnctcgnngttcaaggttagtagttatgaagaggagttatcgtacggctttcccgggtcgacccacgcgtccggtcttcacactcctcgccatcacataaaaccagtgcaagcagaagcagcgcaatggcgagcagcaccagggccctctcctncacagccttcggcggcaaggcagtgaacgtgccgtcgtctctcttcggcgaggcccgcgtgacgatgcgcaagacggcggcgaaggcaaagccggcggcgagctccggcagcccgtggtacggccccgaccgcgtgctctacctgggcccgctgtccggcgcgcccccgagctacctgacgggcgagttcccgggcgactacggctgggataccgcggggctgtcggcggacccggagacgttcgccaagaaccgggagctggaggtcatccactcccgctgggccatgctgggcgcgttgggctgcgtgttcccggagcttgctcgccgcaacggcgtcaagttccggcagggcgcgtgggttcaagcccggt

SEQ ID NO: 87502 - DNA, 528 bp, Zea mays
  unsure (1)..(528): unsure at all n locations
gaggtctcgntgttaggattagctttatgatgacttcatcggaccggcattcccgggtcgacccacgcgtccgctgtttttttttttgttttttttttttttttttggcataaaataaacaggcattatggcaacgtccaggtgtacggaaaacaaatatcattgcatgacatcccgtgtctaagtataatcagagttttaaacagatgactgatgagactgatattgcacaacccagaaccaacccaacaggacacctagctgtatagatcgtcatcgtcagccgcagcaccagccgaagcaaacggatcggctgcagcagcaccagctgtcgccgactgctctgagaagcggaactcgctgccgaacccacgggactgctgcaacgtctgggcgaacgcctggtacttgcggatatcagcatcactgacactgcgccgagcatacttcatagactcctcgaagtgagctgctttgatctcggcaatctcgtccacttcatcttcctccattgcctcaagggtgggc

SEQ ID NO: 87503 - DNA, 547 bp, Zea mays
  unsure (1)..(547): unsure at all n locations
ggagggnnctcgnntgtttagaaggttactgatctcacaaaagaagctttaatgcgactgctcgtaccggtccggaattcccgggtcgacccacgcgtccgctgctccaagtgcaagggcaagggctcgaagtctggtgcttcaatgaggtgccctgggtgccagggctcaggtatgaaagtcaccattcgtcagctggggccttccatgatacagcagatgcagcagccttgcaacgagtgcaaggggactggggagagcatcaacgagaaggaccgctgcccagggtgtaagggtgagaaggtcgttcaggagaagaaggttcttgaggttcatgttgagaagggaatgcaacacagccagaagatcaccttccctggtgaagctgatgaagcgcctgataccgttactggagacattgtattcgtcctccagcagaaagaccactccaagttcaaaagaaagggtgaagatctcttttatgagcacaccctgtctctgaccgaagctctatgtgggttccaattnggtcttacacatctgggcc

SEQ ID NO: 87504 - DNA, 532 bp, Zea mays
  unsure (1)..(532): unsure at all n locations
gaganctcnnctaagggatgatctcttaagaagttatggactgctcgtaccggtccggattcccggtcgacccacgcgtccgggtggacaagggccttgtcccgctcgccggctccaacaacgagtcgtggtgccaggggctggacggcctggcgtcccgcgaggccgnctactaccaacaaggcgcgccggtccgccaagtgccccaccgtggcaagaatccttaacggcccttccaagttcgccgtcaaggaggccccttggggcttggaacgttaggccgccttttaccaggacaccggcctgtggccaatcgtgaacccgagaatcctgttggcacggaagcacggtatagagcgcacgtccaagggggcacaaagtgtgtggcccaaacctttataccctatgggcggagaacaacgtcatgttcgagggcatcctgcttaaaccgtccatggtgacgcccggccgcgaggccaaagacaggggccaccccgaaccaggtggccgggtacaccctaaagttcctccc

SEQ ID NO: 87505 - DNA, 517 bp, Zea mays
  unsure (1)..(517): unsure at all n locations
tgggggaaaaggcttgtccatgctcaccgcatgantgcactgctcgtaccggtccggaattcccgggggtcatcctcggcggtggcgccgggaccaggctcttgccgcttaccagacgcagggccaagcccgcggggccgattggcggcacgtacaggctcatcgacgtgccgatgagcaactgcataaacagcgggatcaacaaggtctacatcctcacgcagttcaactcgcaatccctcaatcgccacctctccagagcctacgatttcagcaatggcgtggccatcggagacggattcgtcgaggttctagcagcaacccagaggcctggaacggaagggaaaaagtggtttcagagtactgctgatgcaattcggcagttcgactggcttttcgatgatgcaaaatctaaagacattgaagatgtgctgattctttctggtgaccatctttaccgtatggactacatggactttgttcagagtcatcggcaaagaagtgcaggccataacan

SEQ ID NO: 87506 - DNA, 521 bp, Zea mays
  unsure (1)..(521): unsure at all n locations
atgtaggaggtagaaagggtcntttacgaaggagattattgcacgctcgtaccggtccggaattcccgggtcgacccacgcgtccgcggagacacacattgccactgcgatggccgcccaccaggactcggcggcagcggggggcaggcctcctcgtcgtcctcgcgtcctcctggcagcctccggcagcgtggccgccatcaagttcgaggtcctctgccgcagcgtcgccgagtgggcggatgtccaggcggtggcgaccgcgtccgcgctggaattcatcgatgtggcctccttccccggcggcgtccctctctacaccgacgaccaggagtggtctagctggaagcgggtcggcgacaaggtcctgcacatcgagctgcgccggtgggccgacgtcctggtcatcgcgccgctatcggccaacaccctcgcaaaggtcggcggcgggctgtgcgacaacctnnctaactgcgtcgtgcccgcctgggacttccgcaagcccggttacgtngggccgg

SEQ ID NO: 87507 - DNA, 540 bp, Zea mays
  unsure (1)..(540): unsure at all n locations
cgagggaactcgnntgatccgggagtcagcgtcctangatcagaactaatgcggaccggcattcccgggtcgacccacgcgtccgcccagcttccctttcgttcctcctcgccccagcgacgcggcctcccgtagaccgagcggggcaacccggcactgagaggcacgcagaggagcaggaagccggagaccaagatgtcgtcggtgttcagcggcgatgagacggcccccttcttcggtttcctcggcgccgccgccgccctcgtcttctcatgcatgggcgcagcgtacgggaccgcgaagagcggcgtcggcgtggcgtcgatgggtgtgatgcggccggagctcgtcatgaagtccatcgtgcccgtggtcatggctggtgtgctcggtatctacgggctcatcatcgccgtcatcatcagcactgggatcaaccccaaggccaagccctactacctttttgatggctacgctcacctttcgtccgggcttgcctgtggccttgctgggcttgcaacttgcattggcatttggatt

SEQ ID NO: 87508 - DNA, 532 bp, Zea mays
  unsure (1)..(532): unsure at all n locations
cgagggactcggtgttcgggaccagtcctaagtagattctatcggaccggcattcccgggtcgacccacgcgtccgcggacgcgtgggcttctcctccccctccggttcgggttcgggttcgtgaggttctccgcggttcggtggcgtgggtgggcggatcgagatggcggcgtcggatgttgagtaccgctgcttcgtcggcggcctcgcctgggccacggacgaccactccctccacaacgccttcagcacctacggcgaggtcctcgagtccaagatcatcctcgatcgggagacgcagaggtcccgcggcttcggcttcgtcaccttctccacggaggaggcgatgcggaacgccatcgagggcatgaacggcaaggagctggacggccgcaacatcaccgtcaacgaggcccagtcccgcggcggccgtggaggcggcggcggcggctacggtggtggccgtggaggcggccgctacggcggttgccggcgccctgattgccggngggggtatacggcgggggcggc

SEQ ID NO: 87509 - DNA, 525 bp, Zea mays
  unsure (1)..(525): unsure at all n locations
tggagagaggggaggctttatcaatgccagcgcgtaacgcacgctgtaccgtccggattcccgggtcgacccacgcgtccgggatattctgtttcataattctgaaatagagttcttttttttagtattactcgtcagtaggatgtatatattaatcatcctattttaatatatattaatcatcctattttaattaggttctaatccaattagtagtaagtattttcttttttatttaatagtctctgactatcattaaataaagggtagagcaattcttttttctagagattctagagaaagtgagacaaagtgaaacgaaagagttttctttgtataagaattaggtctatatcatatctaaatagaaagggaaatcaaaaagaaaggaaattgggaatacattggatgaattccttaaggaggacatatcacaaaaagaaattaaagcttaaagtaagcgcttctttgccttgggttngagccaaaacagatatcttggtttcaaccgaagaaaaagaaaan

SEQ ID NO: 87510 - DNA, 509 bp, Zea mays
  unsure (1)..(509): unsure at all n locations
ttagtagaaagtgcttncttcnccgtcagagnactagtacgccgtccgtttcgaattccgcgcacccagcatccgatacttcacttactgcaaagatgccattattcacagagagtcaaggggccgacatactcctagatgacaacttcactgccaaggtgtccgatttcagtgcctcaaggccaataccgcacaaccagacccatgtgacaacattggtgcaagggacactaaggtacatggaccctgagtactttcatacaagccaactgactgacaagaatgatgtctacagctttggcgtcgtactcatcgagctactgacaagaaagaatcctatcatggatgatatcgcggaagacattataagcctaacgctgcaatttactatgctattccatggaaataagctgcttgaaatcgttgatcctgtagtatcttaaaaaactgnaaatcagacatttttaaacgggttttaaagttgacgtctccaaacctaaaggttaaag

SEQ ID NO: 87511 - DNA, 510 bp, Zea mays
agtttttaggtgatttgattccagctcgtatgtatgctattcgttccgaatttccgggtcgaaccaagccttcggtcaaattcctttcgggccttttctttttggccccttttcttccaaaactgcgattggggcaggaacccttgaccacaatcgcaaccgcaggcacttccttttccggaagctcaagttagaaaaaccaccagtgctgatcgatggcggccaaggctctcctttccggccggcagctgctgggccgccccgtgcagtcggccgtctctaggtcgtcggcgaggaaggcgcccttcgtcgtcagggccagctccagccctccagccaagcaaggtgcctacaggcagctgtggttcgcgtccaagcagtccctctcctacctcgatggcacgctgcccggcgactatggcttcgacccgctgggcctctcggacccggagggcaccgtgggcttcatcgagcccaatggctggcctatggcgaggtgatcaacggccc

SEQ ID NO: 87512 - DNA, 626 bp, Zea mays
  unsure (1)..(626): unsure at all n locations
aggttttntaggagcctgtgtgtgaatngtccaggttnacctanagcnatngtnctgtactcggtctcggaaatttcccgtggtcgacgccacgccgttcccgtttgtttttttcttcaaaacagtgcnctnncttgttgcaatttgactacatctatgtaccatatatcatatctgancatggatagttnacgttttaaattcgacatagtcagccctcttgcattgccaanntaatagtaccaactctcccgaatttaaattaaaattggactttaatgctnatgctgaaggaaatggatcagaatggagaattgctgctggggaatgtccccttcccgtgtgactttcccggctttggaagaagagtgcttgtagtcagcttcgtaccggcaccgatctccggcgtccgcagctggttctttgaaggtccaagagttgttgttgcaccttcgtcgatgaaacaccctcgatcttccttcattcctgccgtccgaactttctcgaaacgccgtccttcaccaatgggctctcgtcagctcacgaacggctccgcgaacttcccccatgtaactcctcgtcgggcgaagtgcgacgagaggatgtccagcgtcgtcatgaccttt

SEQ ID NO: 87513 - DNA, 521 bp, Zea mays
  unsure (1)..(521): unsure at all n locations
agattaaatgtgtactgtgaaatcagctaactangncactagcttanttcntttttnntaggaatagtggccggaggcacgcgtgcgcaggcccttactgcacactgtctcgatcacctgactccatcaccgtgcctaggtgtcgtctatgtacaagaagagcagagatatacatgatcgagcagaggcggatagaagaggatgagcaccacaactgcgtcgttactgaaccccaacgcgccgctcttcatcccggctgcgtaccgtcaggtggagtacttctcgcccgagtggtgggagctcgtcaacaccaccgcctggttacgtgaccactgcttccggcagcgccagctccactaggccgtctgcgacgacgtcgccgagctcctactcgacgacctccttgacaccaacgacctcttctacgcgcccgacgtcgtacatcatcaaccagcgactgcactgctgaccgggtacgatgtactcttagtgctcatatcgctgaaccttaacacaaccat

SEQ ID NO: 87514 - DNA, 517 bp, Zea mays
ggtttgagagagctgagtgctggccagcccctcatgtcactgccgtaccggtccggaattcccgggtcgacccacgcgtccgcgctgatatgcccttgggccacgccttccttcttatcccctgcgcctgccctcccctgctgcagcgcccgtcgcctccctttccccttccctccctccctctccccgcgggccgccagaggcaatttcgccctcgattcgaccccgattcgtccgcccgcgaccgggattccctccgccaagcgcggatctgaacgctgcgctccgtgtcgccgctcgaatccgccatgaagggggccaaatccaagggcgccgccaaggccgatgccaagctggcggtgaagagcaagggggcggagaagcccgccaagggcaggaaagggaaggccggcaaggaccccaacaagcctaagagggctcccagcgctttcttcgtgttcatggaggaatttcgcaaggagttcaaggagaagaaccctaagaacaagtctgtcgc

SEQ ID NO: 87515 - DNA, 523 bp, Zea mays
  unsure (1)..(523): unsure at all n locations
tagtcaatgagtggattctgaagtccgttcaaaccgttnactnngcnacttctttaccggttccgaattgccggctggacccactcgtccgcgctgatatgcccttgagccacgccttccttcttatcccctgcgcctgcccgcgccggctgcatcgcccgtcgcctccctttccccttccctccctccctctccccgcgggccgccagaggcaatttcgccctcgattcgacccctattcgtccgcccgcgaccgggattccctccgccaagcgcggatctgaacgctgcgctccgtgtcgccgctcgaatccgccatgaagggggccaaatccaagggcgccgccaaggccgatgccaagctggcggtgaagagcaagggggcggagaagcccgccaagggcaggaaagggaaggccggcaaggaccccaacaagcctaagagggctaccagcgctttcttcgtgttcatggaggaatttcgcaaggagttcaaggagaagaaccctacaacacgtctgct

SEQ ID NO: 87516 - DNA, 505 bp, Zea mays
tgttgatgtgatttgattccatcgaaaagaatttattgtcatgactgtaccggtccggaattcccgggtcgacccacgcgtccgctcatcgatctacacacatacatagtttcttctactacacgacgacaaacatggggaggcctgcgaagatcggagagtggggtggatacgccggcgatcgtcgggatctgagggctactccggaccgtctgatcgaggtgaatgtcacggcggacaacagcagctgcatccgctccatctgcttcatctacatcggagccgatgggcaaccgtacgaggaagggccatggggtttcggccatgctggcactgagtacatgattgatctgtgcaagttcgactagagcttgaccgagatatctcggaccaacggccccagcctacaacatttgacaatcttggtcaagtcttttaaaaatcggcaaccaacaaacggcgcttacggtgccggtacggcaagggactaaggcaaccccggttc

SEQ ID NO: 87517 - DNA, 501 bp, Zea mays
  unsure (1)..(501): unsure at all n locations
ggagttggagaggctagnagtcacgtaccagacgagtgattgcactgactgtaccggtccggaattcccgggtcgacccacgcgtccggctcttccagcacattataggttccacctagttgtggatcaacgaagctctgtgctagagccatcaactcaattgtatactgaactatgtcacgaggcagggatcctttggcatcgagccagctaatcggtgatgcgttggatcctttcatagaggcagctacgatgaggaccaattatagtgacaaggagatcacaaatggcactgtactactagcatctgatgtgctcaatgcaccacatgtagagatagaacgccacgtgcaagcaaatctatacacactggttatggtggatcctgactcaccaagtgcacgcttaccagagtacagggaacatctgcatagttgagctgatagcatctgatatacaagccaattttgagttgaatattacctaaactctggatagcgc

SEQ ID NO: 87518 - DNA, 508 bp, Zea mays
  unsure (1)..(508): unsure at all n locations
agttttaggtgctttattctactcgatgcatggctatctcgttcggaattcccggngcttcgcggacatgagctgggacgagttccgtgcgacccggctcggcgcagcccagaactgctccgtcacgcggaccggcaaccaccggatgcgcgccgccgtcgttgcgctgccggagacgaaagactggagggaggatgggattgtgagcccagtgaaaaaccagggccactgtggatcatgctggaccttcagatatgcctcacaaacaaagaggcaaaagggtaaacctgcaggagagctttcatggaatgttgaggtgcagaaacttactccctccggtttcctattagttgtcgttttggataagcactactggtgcacttgaggctgcatatacccatgcaactggcaagcccatctctctctctgagcaacagcttgttgactgtggttatgcattcaacaatttcggatgcaacggaggccttccattccaggcctttgaatc

SEQ ID NO: 87519 - DNA, 515 bp, Zea mays
ggttttaggagctgtgtactgacagaggttattgcactgctcgtaccggtccggaattcccgggtcgacccacgcgtccgcgcctcagcgcgtcgcccgccgccacatcctacagcgacctcatcgatcaccttcaggtttcaatcatggcggacgtcgatgtcgaaccggaggttgccgccggcgctcccaagaagaggacgttccgcaagtacagctaccgcggcgtcgacctagatgcgcttctcgacatgtccacggacgacctcgtccagctcttccccgcgcgcgccaggagaaggttccagaggggtctgaagaggaagcccatggcactcatcaagaagctgcgcaaggcgaaaaaggatgctcctgctggtgagaagccagagccagtcaagacacatctccgtaacatgatcattgtccctgagatgattggaagcattgttggggtctacaacggcaagacgttcaaccaggttgagatcaagcctgagatgatcggccactac

SEQ ID NO: 87520 - DNA, 512 bp, Zea mays
gggttagagggtttattacgtatcgaagattattgcaacgctcgtaccggtccggaattcccgggtcgacccacgcgtccgaaggagagtacgtggaggagcagccatggcttcatcggtggccgccgcggcgagcacgattcctgggcacccgcctggcggacccggcgccacagaacgggcgcatcgtggcccggttcgggttcgggttgggcggcaaggcgaagcctgctccgaagaaggtggcgaagacatcgacctcctctgaccggccgctgtggttccccggcgccgtggcgcccgactacctggacggctcgctggtcggcgactacgggttcgacccgttcggtctcgggaagcccgtggagtacctgcagttcgagttggactcgctggaccagaacctggccaagaatgaggccggcggcatcatcggcacccggttcgagtcctccgaagtcaagtccaccccgttgcagccctacagcgaggtgttcggcctccagcgg

SEQ ID NO: 87521 - DNA, 490 bp, Zea mays
gaggggagagcttttattacagaatgggggttattgcaatgctcgtaccggtccggaattcccgggtcgacccacgcgtccggcagcggctcatctttgctggaaagcagcttgaggacgggcgcacgcttgccgactgcaacatccagaaggagagcaccctccacttggtgctgcgcctcatgggaggcatgcagatcttcgtgaagaccctgaccggcaagactatcaccctcgaggtggagtcttcagacaccatcgacaatgtcaagggcaagatccaagacaaggagggcatcccaccggaccagcagcgtttgatcttcgctggcaagcagctggaggatggccgcacccttgcggattacaacatccagaaggagagcaccctccacctggtgctccgtctcacgggtggtatgcagatctttgcgaagacactcactggcaagacaatcacccttgaggtggagtcttccgataccattga

SEQ ID NO: 87522 - DNA, 496 bp, Zea mays
  unsure (1)..(496): unsure at all n locations
gaggagagagggtcgngttaccgaagaggggggtaactgtatacccgtccggaattcccgggtcgacccacgcgtccgcgtgcgggtgccctacccgcggcggacgagaagaagacggggctgctccgggcgctggccggggcggcggagcggctgcggctgttcgaggcggacatgtacgacgccgacaccttcgagcccgccatcgccggctgccacttcgtcttcctcgtcgccacgcccctgacgcacgaccccaccagcaccaagtacaaaaacacgacggaggcggcggtggacgcggcgcgcatcatcctccggcagtgcgcgctgtccggcacggtgaagcgcgtcatccacacggcctcggtcacggccgcgtcgccgctcaaggaggacggtagcgggtacaaggacttcgccgacgagtccaattggacgccgctcaacctctcctacgaattcaccaacgcttacctggacgactacgtgcggg

SEQ ID NO: 87523 - DNA, 512 bp, Zea mays
  unsure (1)..(512): unsure at all n locations
aggttttaagaggctggatcccagcgcagagggctangccatctcctttccgaatttccgggtcgaaccaagccttccgatctcctcaacggcgatggccggtacccccatcaaggtgggctccttcggcaaggggggcgtgaccatgcgcaagaccgtgggcaagcccaaggtggcggcgtacgtcagcccctgatacggtcactaccgaatcaggttcctataaaacgttctcggcgagcccccgagctacctcaccggcgagttccccggcgactacggctgggacaccgncgggctgtccgccgaccccgagaccttcgccaagaaccgcgagctggaggtgatccactcccgctgggccatgctcggcgcgctcggctgcgtcttccccgagctgctctcccgcaacggcgtcaagttcggcgaagccgtctggttcaaggccggctcccagatcttcagcgaaggcgggctggactaccttggcaaccccaagctgatccacgcgc

SEQ ID NO: 87524 - DNA, 514 bp, Zea mays
agttttttaagtgctttgatccacgcacagagcgtcactgctataccggtccggaattcccggttggaccaagccttccgagaaattaggggaagtagtcacccatgccgtactgccaccattgctcaaaccacttggaggaagagtctccaacaggcaatgattacatcaatgccagccatatagagattgctggcacaaatctaacgaagttcatttctactcaaggaccacttgccaatacaattgaggatttttggcagatggtatatgagaaccactgtcctgtgattgttatgctcaccaaatttgatggtcttaagtgtgatgagtatctaccattgagcaagggacaggctgtttttggaaaatttaccattaagatcacaaagttcaggaaagatggtcagttattgttgcgtggtgtggagattcgacaggatgagtcagatgaagtgcgatctcttctccacattgagtatccggagtggcctgaccatggtgtgccaaacag

SEQ ID NO: 87525 - DNA, 511 bp, Zea mays
  unsure (1)..(511): unsure at all n locations
agttttaagagtctggaagttccgatgccncgcccgctatatccgtctcgaattcccgtgttcaaccaacccttccgaactatttctaaatcaccagcgtccccctttttttttcatttgattcaaacatttagcactgatagtcttcaacattcaatgattacatcaatgccatccatatatagattgcttgcacaaatctaactaagttcatttctactcaacgaccacttgccaatacaattgatgatttttgtcaaatagtatattagaaccactatcctgtaattgttattctcaccaaatttgatagtcttaactgtcattagtatctaccattgagcaatgtacatactatttttacaaaatttaccattaagatcacaaagttcacaaaagatgatccattatagattcatttgtgaatacattctacactatgagtcacattaaatgcgatctcttcttcacatttattatacaaaatatcccttaacatttttttccaaac

SEQ ID NO: 87526 - DNA, 512 bp, Zea mays
  unsure (1)..(512): unsure at all n locations
agttttaaaagtgcttgaggtttcatgtccgcttgctattcgttccgatcccattccaaccacacgtacccacttcttatcaaagacgcacactctattcaatccaagcttacattcccttccattcaaattgggatctcttctatagtaccacctaaattcaattcactcaacctcgtcttaccatgacactgatcccgtacaacacttcccttaccaacctcaatttcatcgcattacatccgactcttaccacgaagcctaccatcaacatatactatcacaccaaccccatctactccattatccttctcaacttgaaaatgacactgccaccgacgaaccccaattactactaccatcactggatcaaggacattcactaaatcactatcatcaatgaccagcaaggtcacccagcgttctcactgatgaacaagacaaccatcaatgccatcaatcactcgctactgcaattccaccacttgccccatggttccctacaacaccan

SEQ ID NO: 87527 - DNA, 514 bp, Zea mays
  unsure (1)..(514): unsure at all n locations
agtnttttgaggttntgttacgtaaacgatatattgccactgctcgtaccggtccggaattcccgggtcgacccacgcgtccgagaccgcagccgctaccggaaccttattgatgttcaacacgctgacatcatagagcgggggccagtcttccttctcagctaacaaacaggcagcctactttaggtctcgtagagcagggatgtcatcgaacatgcaagggaacaccatctctccagtaaagtacacagctcggccttcttctgtagctctaatagggtcaaacaaactcccatattcgccatgaatcttttcagcagaccattttgatgaagagccctcacagtagatagactcgtgcaagagggcataaagaggattttgatcaaatctagccacatttcgaactcttttaagaagtaatagcttatcctctgtttagcttcaacgacgagtacaagattatccacaccgttgactccatcatatctttcgcaaattaaatctactgcat

SEQ ID NO: 87528 - DNA, 517 bp, Zea mays
aggttttttagagctgtattactgaaggggagttattgtcactgctcgtaccggtccggaattcccggggttgatcgaggtgagtgaggttgaaaagcacaccatcgtcatggacggcggatactacggcggtcgcgatcagggctacagcggcgggtactacggcggcggtggcatcgcaacgccggggtacgctccggcggtcccgtacgggatgtcgcaggtgaacatcgagggcaacgggtgcgggcgggcgctgccgccgcagccgaccgtgaaggtgtactgccgcgccaaccccaactacgccatgagcgtccgcgacgggaaggtggtgctggcgccggcgaaccccaaggacgagtaccagcactggatcaaggacatgcggtggagcacgagcatcaaggacgaggaaggttacccggcgttcgcgctggtgaacaaggcgaccggtgaggccatcaagcactcgctggggcagtcccacccggtgcgcctggtgccctacaacccg

SEQ ID NO: 87529 - DNA, 491 bp, Zea mays
  unsure (1)..(491): unsure at all n locations
gggaagtgggtttatatgcagggggggggtaaaggtcatccgcgtccggaattcccgggtcgacccacgcgtccgtggcgtcgtccatgctctccgctaccaccgtgccactccagcaggggggcggcctgtgcgagttctccgggctcaggagctccgcgtcgctgcccatgcgccggaatgccaccttcgacgacttcatgtccgccgtctccttcaggacccacgcggtcggcacgagcggcgggccgcggcgggcgccgacggaggcgaagctgaaggtggccatcaatgggttcggccgcatcgggcgcaacttcctgcggtgctggcacgggcgcggcgacgcctcgcccctcgacgtcatcgccatcaacgacaccggaggcgtcaagcaggcgtcccacctgctcaagtacgactccacgctcggcatcttcgatgccgacgtcaagcccgtcggcgacaacgccatctncgtcgacggcaag

SEQ ID NO: 87530 - DNA, 491 bp, Zea mays
  unsure (1)..(491): unsure at all n locations
aggtgagtggctgnattaaggaggggggagttattgctcatcccgtccggaattcccgggtcgacccacgcgtncgcgcggttcggttccagtttcactcccactgccgtctcggcaacctcccctgttccacgcttcgtcctcgcctgccaggctgccatggccgcgacgtcccccttcgactgcgtcctcctagacctcgacgacaccctgtacccgggcgacaccggcatcggcgcggccctgaggcgcaacatcgacgagttcctncaggccaagctcggcgtgtcggccgacgaggccgtcgtcacgcgcgccgagctcttccgcgcgcacggcagctccctcgccgggctcatcgcgctcggctacgacgtgcacccggacgagtaccacagctacgtgcacggcaggctaccgtacgacaggatcgcgcgcgacccgcagctggcgcggctgctgcagagcatcccgcagcgcatagtgcctgt

SEQ ID NO: 87531 - DNA, 515 bp, Zea mays
  unsure (1)..(515): unsure at all n locations
agttttatagaggttnngttacgtaaggcagctgatgccatgctgtaccggtccggaattcccgggtcgacccacgcgtccgaaaggcatcaccgccgcgactacgatggcagcctcgctccaagccgcggccacgcctggtgcagccggccaagatcggcggccgggcgccctttgcctcgctgccgtcccgcccgtcgtcgcaactcgcctgcagggcgttcggcgtcgacgccggcgccgccaggatcacgtgctccctgcaggacgtcgccagcaggtgcgtcgacgccgcgaagctcgccggcttcgcgctcgccacctcggcgctcctcgtctcgggcgcgagcgcggagggcacgcccaagaggctgacctacgacgagatccagagcaaaacgtacatggaggtgaagggcacgggcacggcgaaccagtgcccgaccatcgacggcggcgtggagtcgttcccgttcaaggccggcaagtaccagatgaagaagctgtgcctggag

SEQ ID NO: 87532 - DNA, 517 bp, Zea mays
  unsure (1)..(517): unsure at all n locations
tagtntttaggaggctgnagtaagatacagaagattattgtaacgctcgtaccggtccggaattcccgggtcgacccacgcgtccgtccgttcgcacaagccagacctcttcgcgccggcaatggacaggctcggcgcgaatggggcgaactcgtgcccgctgacgccgcttggcttcctggagcgctcggccaccgtcttcggcgattgccactccgtcgtgtaccacgacacggtcttcacctggtcccagacacaccggcgatgcctccgcctcgcctccgcgctcgtctctctcggcatcaaccgcggcgacatcgtgtccgtgctgttgcccaacgtgccggccatgtacgagatgcagttcggagtgcccatgagcggcgccgtgctcaacaacatcaacatgcgcctggacgcgcgcacggtcgccgtcctgctccgccactccggctccaagctcgtcttcgtggacccggcgtctctaacgcttatcagagacgtcgctgagcagctn

SEQ ID NO: 87533 - DNA, 494 bp, Zea mays
  unsure (1)..(494): unsure at all n locations
agggagagctgnagtacagataggggggttaattgcattgctcgtaccggtccggaattcccgggtcgacccacgcgtccgcaaaacgacttagctatcaagctcgaccgacgaccgaagctaagctaccaagctactagtagtcttcttggtcacgttgttgattgcagcggtcgagcacacacaagctagctagctagccgctagagctagggtcgtcggatagatcgacatggccggcagggacagggagccgctggtggttggtagggtggtcggcgacgtgctggaccccttcgtacggaccaccaacctcagggtcagctacggtgccaggaccgtgtccaacggctgcgagctcaagccgttcatggtggtgcaccatccaagggtcgaggtcggaggacctgacatgaggaccttctacaccgtcgagatggtggacccagatgctccgagcccaagcgacccgaaccttaaggagtacctacact

SEQ ID NO: 87534 - DNA, 513 bp, Zea mays
  unsure (1)..(513): unsure at all n locations
tggtntttaggtgatttggttaaagccaagattgttatgctcatcccgtccggatttccgggtcgaaccaagccttccaacacgtccaacaaggtccttcctggtcaacaatctcgtaccggcggcgcacatggcgggcgacggcccggcggctacgccagcgaaggttaccccaaagaaggccaatctcctcgacccgcactccatcaagcaccttctcgacgagaccatctccgaggtcgtgaagagtaagggctacaccgaggacacgcggctgggcaactggaagctggggatcggagccgccgtgattgctgtcgccctcctcgctcagttttaccccaagaagttcccgcagaaccgcgatttcctccttggctgcatcgccctgtatgtggtgctgaatgtggtgctgctgatccttagctacaccaaggagaaggatgccatcctattcacgcaccctnctatgggttctttcagcagcactggcctcactatttcttctaaata

SEQ ID NO: 87535 - DNA, 518 bp, Zea mays
  unsure (1)..(518): unsure at all n locations
agtntttaagagaggctatagaatcggttcacgcccatctctgctattccgtaccggttcggaattcccgggtcgacccactcgtccggcaatgtgtaaaatgtactctgttacccccaactgtattggttgtccaatttgtcaggatccagaattggatagaggacttgttatggaaacaacttgatctcgactaccctggcatgcctgaagcaatggttcaccgagggttttattctgcatatcacatcacgacactacgtgatggagtagtcagtggtattcagagaactaggaaagcttactgagacattccaatcatgatcacgggtcattcaatgggtggagctatggcttcattctgtgcgctcgatcttgttgttaactacggactggatggcgtaaacctgatgacgtttgggcagcctcgtattggcaatgctgcatttgcttcttatttcaagacatacttgcctcaagcgatccgagttactcatgcccactatatcgtgcctcac

SEQ ID NO: 87536 - DNA, 513 bp, Zea mays
agttttagagtgctgtggtacagagaggagatgtactggtcatccggtccggaattcccggggtggcctattcttccccctccggttcgggttcgggttcgagaggttctccggggttcggtttcgtggatgaggggagggagatggcggcgtcggatgctgagtacacgatgctttgtcggcggactaaactgggccacggactaccacttcttacactacgccttgatcacctacgtgcaggtactcgagtacaagatcatactgaatcgggagacgcataggttcacgagcttgtgctgtcgtaacttctacacagatgaggcaatgcggaacgccatctagggcatgaactgctaggagctggactgccgcaacattaccgtctacgaggccacatccctgtgcagacgtggatgcgcaagcagcagcagatacggtggtggccgtggacgctgcagctacagctgtggctggcgccgtgatagtggctgcagatactgctgaggcagc

SEQ ID NO: 87537 - DNA, 521 bp, Zea mays
  unsure (1)..(521): unsure at all n locations
agttaaattaaggtgagtctgatttctagctcgtactcgtcactggctatcccgtctcgaatttccgggtcgacccaagccttccggtggcttcttcttccccttccggttcggtttcgggttcttgaggttctccggggttgggttgcgtgggtgaacggatcgagatggcggcgtcggatgttgagtaccgctgcttcgtcggcggcctcgcctgggccacggacgaccactcccttcacaacgccttcagcacctacggcgaggtcctcgagtccaagatcatcctcgatcgggagacgcagaggtcccgcggcttcggcttcgtcaccttctccacggaggaggcgatgcggaacgccatcgagggcatgaacggcaaggagctggacggccgcaacatcaccgtcaacgaggcccagtcccgcggcggccgtggaggcggcggcggcggcgggtacggtggtggccgtggaggctgcggctacggccgtggcggggcgccgtgatggcngctgccg

SEQ ID NO: 87538 - DNA, 513 bp, Zea mays
  unsure (1)..(513): unsure at all n locations
agttttagagaggtcngagcaccgcacagaagctactgcatctcgtccggaattcccgggtcgacccacgcgtccgctcctcctcagaactctcccttccctcttgtaggggccaaaagggtcagagatctaggaagaggagaactagtccccaagcctaacaagaaagcaagctcttctgcaactgttggcattcgccttaatttgtatccatatcccaatggcaggcctatctctgcaacacccctgggcattcactttcggcctcctaggcaacgtcatctccttcatgaccttcctggccccgataccgacgttctaccgcatctacaagagcaagtcgacggagggcttccagtcggttccgtacgtggtggccctgttcagcgccatgctgtggatcttctacgcgctgatcaagtccaacgagacgttcctcatcaccatcaacgcggccggctgcgtgatcgagaccgtctacgtggtcatgtacttcgtctacgcgaccaaaaa

SEQ ID NO: 87539 - DNA, 517 bp, Zea mays
  unsure (1)..(517): unsure at all n locations
ggtttttgagagcgtgnattacgaacggggagttactgcactgctcgtaccggtccggaattcccgggtcgacccacgcgtccgccgggaacaagggccccgacgtgcccatcttctcggtgcagcagccgtcgttgctgcacgacttcgccgtcacggagcggtacgccatcttcccggagatacagatcgtcatgcagcccatgggcatggtgacgggcggcgcgcccgtggggtctgactccggcaaggtgccccggctcggcgtgctcccgaagtacgccacggacgagtcggagatgcggtggttcgaggtgccgggcttcaacatgatgcactcgctgaacgcgtgggaggaggccgacggcgaagagctggtgctggtggcccctaacgtcctgtccgtggagcacgcgctggagcgcatggagctcgtgcactcctgcgtcgagaaggtgcgcatgaacctgcgcacgggcgccgtgtcgcgcaccccgctctcggcggggaacctcgn

SEQ ID NO: 87540 - DNA, 504 bp, Zea mays
agggaagagaggtcttgttacggggggagggagggagaaatggtattgctcgtaccggtccggaattcccgggtcgacccacgcgtccggacgcctgatcggaaagcaacgtcgttgccccgcccccccacctcgtcacgagtcagagagctacacaacaaccatcctgttcccgcccgcatacaggactctagctagctagctagcgttgttccgttgtggttgctctcgctcgctctcgttcggtcgatcatggagtggagggacagcttcttggacctggcgctcatcccgctcagcctgctcctgcccatggcgtaccacgcctggctgtggcgcgaggtccgtctccgaccgctgcgcacggccgtcggcatcaacgccgccacgcgccgactatgggccatcggcatgatgaaggacaacgccaagaacgcggtgacggtggtgcaatcggtgcggaacgtcatcatggggtcgacgctgatggccacgacggcgatc

SEQ ID NO: 87541 - DNA, 518 bp, Zea mays
  unsure (1)..(518): unsure at all n locations
agtnttagagcgtgtcnacgtacggagccgacagctgattgcactgctcgtaccgattcgcaggttcgacccacgcgtccgataaaaccagtgcaagcagaagcagcgcaatggcgagcagcaccatggccctctcctggacagccttcgccggcaaggcagtgaacgtgccgtcgtctctcttcggcgaggcccgcgtgacgatgcgcaagacggcggcgaaggcaaagccggcggcgagctccggcagcccgtggtacggccccgaccgcgtgctctacctgggcccgctgtccggcgcgcccccgagctacctgacgggcgagttcccgggcgactacggctgggataccgcggggctgtcggcggacccggagacgttcgccaagaaccgggagctggaggtcatccactcccgctgggccatgctgggcgcgttgggctgcgtgttcccggagctgctcgcccgcaacggcgtcaagttcggcgaggccgtgttggtcaaggcccggtcgcaa

SEQ ID NO: 87542 - DNA, 513 bp, Zea mays
  unsure (1)..(513): unsure at all n locations
aggtntttagtgatctattaaagacaggactgcatgctcatccggtccggatttcccggattctccgggcctgccgtccaaaaggacgcttcctacctggttaaaaaccgttgcttccaacttgaagaaaatggtcccaaaggcaccgaaaaggggccaaatgccgtcgaaaatcggggtcctgttccgtgaccagcacggtttcccccttgtcaaaagcgtaaccggcagcaagatcctccgaatcctcaaggcccatgggctggcaccagaaatccccgaggacctgtacttcctcatcaagaaggcggtggcgataaggaagcaccttgagaggaacaggaaggacaaagactctaaattcaggctcattcttgtggagagcaggatccaccgncttgcccgctactacaagcgcacaaagaagcttncacccacctggaagtatgagtcaaccacagcgagcactctggtggcctaagtgtggtatcctncgacagcttgttctagata

SEQ ID NO: 87543 - DNA, 513 bp, Zea mays
  unsure (1)..(513): unsure at all n locations
agtatagagtggttnnattacgaagtgaaggaaccatgcgactcggtcgcgattccggattcgccgctcgcgtccgggcctccgcgttcctcaacgctctcgtcctccgatcgccatcaccgtcgctctcgtgctcgtgtaaccgccgcagcaccggcgccttcgcgttcccgaacccaccgcgcttcccatgcctgcgttctgcgcgtcgactcgtccttgcgagggcggcggcagcgccggcgccgggcgatggccccgaggacgagtgggggccggagcccgagggcgggtccgctgtcacgggggccgcggtggcggaggcgccggaggcgagagaggtcgcggagctcaaggcgcagctaaaggacgcgctgtacggcacggagcggtgcctgcgggcgtccagcgagtcgcgggccaaagtgctggagctcatcacgcagctcgagacgcgcaaccncacgcccgcttctacggaggcgctttacgctctcaacggcagtggatcct

SEQ ID NO: 87544 - DNA, 513 bp, Zea mays
ggaggggagagctgagtacggccacgccctgatgccatgccgtaccggtccggaattcccgggtcgacccacgcgtccggcccgtttcagattcgtgacgtactccctccctccaaccacgcccggccagccaaacgtgccatggcgctgccgtcgtcctcgacccccaccgcgtcggctccggcctccctcggcgagcggtggccgccgctggagtctacccccgcagttttcaaccagttcgtgtggtcgctaggtgtcccagaggacgacgtggagttccacgacgtgtacgggctcgacgccgacgcgttggatatggttccccagcctgtgctcgccgttgttctctgcttccccgatccaccacaggatgcaagttacccttcagaacaactcttaatttctggagaaaaggaaacacaggaccaggtttactttataaaacagatcgaatcattgggaaatgcttgtggaactattgctctactccatgctgttggaaatgcatct

SEQ ID NO: 87545 - DNA, 521 bp, Zea mays
  unsure (1)..(521): unsure at all n locations
agtnttagagtgagtgngactaccgacgacagacgctttatgctangtccgtaccggtccggaattcccgggcaagttagaagaagcaccagtgcctgatcgatggcggcccaggctctcctctccggccggcagctgctgggccgccccgtgcagtcggccgtctctaggtcgtcggcgaggaaggcgcccttcgtcgtcagggccagctccagccctccagccaagcaaggtgccgacaggcagctgtggttcgcgtccaagcagtccctctcctacctcgatggcacgctgcccggcgactatggcttcgacccgctgggcctctcggacccggagggcaccgggggcttcatcgagcccaagtggctggcctacggcgaggtgatcaacggccgctacgccatgctgggcgcggtgggcgccatcgccccggagatcttcggcaagatgggcatcatcccgccggagaccgcgctgncgtggttcaagacgggcgtcatcccgcccgcggcacctac

SEQ ID NO: 87546 - DNA, 487 bp, Zea mays
  unsure (1)..(487): unsure at all n locations
agtaattaggaggctannatgccggtaccgtagccctcagccatgccgtaccggtccggaattcccgggtttgtatgtgctgcccgtgcctgcaatgtcagctctaccggtcccgcgcttcgctgggcaagccggtgaaggggcttggcctgagcatgggccgcgagcgcgcccagcggagcattgtgtgccaggcggcgagcagcatctccgncgaccgcgttctcgacatggagaagcggaagctgatgaacctcctgctgctcgcgccatctcgttgccaaccgtcgcatggtcggtccctacgggccttctttcgtcctgccggttccggaacccccgccgccggaacttacccaatgaccagcttggccaccgcactcccggggaaaccttggttaaacacgcaggtgtccagaacccgaacgtttcgcacagggtctaaggggtgaccacatgtccctggtgggggcccggcaaaaaactc

SEQ ID NO: 87547 - DNA, 535 bp, Zea mays
  unsure (1)..(535): unsure at all n locations
aggtcnatttgaaaatgaaggcttgattagcatgctcttccggctaagagagttagagaaccttcgcccggtctcggaattcccggctcgacccacgcgttcgatgatattggtctaacacgtgccaattaatggggcattgttcttgggaaactaagcggatggcatgctgtgagatctaagctagtagagctaggatatgaaatccgtgacaaggaatttgaggacttctttcagctctacacagaggttgcagagacgaaaaagcgcgtgacctgtgaagacttagaagcgatattgtctgatgagatattccagcctaaggttatgtggtgcccttgctgatgtacaggcgacatgtgatacacttgctgtatgtacggcaacagtgaaattgatagcaccagacggagaggcgaaaatagcatgttcagacggaacatgtccagtcgatgcatcttacaaagctgttgacaaaatcatccagattccaaccgctctgcgagaatacaggatgacatcagtcacagaaggc

SEQ ID NO: 87548 - DNA, 499 bp, Zea mays
  unsure (1)..(499): unsure at all n locations
agtttagtagggtgtatatgaattaagctatctcaacactntcggaattcccggctcgagccacgcgcccgcgtgcgggacgtcaggaacttccaggtcctcatagagatgtacaacgagtggccattgttcagggtcaccctggacctgctggagatggttttcgccaagggagaccccggcattgccggcttgtatgacgagctgcttgtggcggaagaactcaagccctttgggaagcagctcagggacaaatacgtggagacacagcagcttctcctccagatcgctgggcacaaggatattcttgaaggcgatccattcctgaagcangggctggtgctgcgcaacccctacatcaccaccctgaacgtgttccaggcctacacgctgaagcggataaggaaccccaacttcaaggtgacgccccagccgacgctgtccaaggagttcgccgacgagaacaagcccgncggactggtcaagctgaacccgcgaa

SEQ ID NO: 87549 - DNA, 510 bp, Zea mays
  unsure (1)..(510): unsure at all n locations
ggggggggggaagggtttgatagagggaggggggagggagaggtgactttctaccggtccggaattcccgggtcgacccacgcgtccggatccatcgatcgctagctagctgacgaccatggcgtccctctcctctgccgccatcaccgccccttccttcacggccgcgcccgctcgcgcagtggtcagcaggaggtccttcaccgtgcgtgcctctctccgcaaggccactgccaccgccgccgtggccgttgccgccagcgtcctgcttgccggcggcggcgccatggcccaggaggtgctgctgggcgcaggcgacggcgggctcgtcttcgagcccagccagttcaccgtcaaggccggcgacaccatcaccttcaagaacaacgccggcttcccgcacaacgtcgtgttcgacgaagacgaggtgccgagcggcgtcgacgccttcaagatctcgcaggaggagtacctcaacgcgccaggcgagacctactncgtcacccttac

SEQ ID NO: 87550 - DNA, 504 bp, Zea mays
  unsure (1)..(504): unsure at all n locations
nagttnnnaggaaggtttggtatcgaaggggggtatcgtcaacctctccggaattcccgggtcgacccacgcgtccgtgctcgttgccctcgctctcctggctctcgctgcgagcgccacctccacgcatacaagcggcggctgcggctgccagccaccgccgccggttcatctaccgccgccggtgcatctgccacctccggttcacctgccacctccggtgcatctcccaccgccggtccacctgccgccgccggtccacctgccaccgccggtccatgtgccgccgccggttcatctgccgccgacaccatgccactaccctactcaaccgccccggcctcagcctcatccccagccacacccatgcccgtgccaacagccgcatccaagcccgtgccagctgcagggaacctgctgcgttggcagcaccccgatcctgggccagtgcgtcgagtttctgaggcatcagtgcagcccgaccgcgacgccctactgctcgcc

SEQ ID NO: 87551 - DNA, 537 bp, Zea mays
  unsure (1)..(537): unsure at all n locations
aagtcntatctgctaagggggggtatgaaaggggaaagctcatccggtctaggggggtatgagagatagctcgcgtcgcttcgaggggccactttggccacacctgctccgccgtcgtcaagaagggcgagcacaagggccataccgtcgccgtcaagatcatgctccaaagctaagatgacaacggccatttccattgaagatgttcgtagggaggtcaagattttgaaagccctatcagggcacgatgatctcgtcagattctatgatgcatgtgaggacgccctcaatgtctacattgtcatggaattatgtgaaggtggagagttgctagacagaatcttagcacgaggtgggagatatacagaagaagatgccaaagcgatcattgtacagattatgagcgtagtggccttctgtcatcttcagggagtagcgcatcgtgacttgaagccagagaattttctgttcacaacacgagatgaaagcgctcctatgaagttgactgacttgtggctgtcagagtttattataacc

SEQ ID NO: 87552 - DNA, 509 bp, Zea mays
  unsure (1)..(509): unsure at all n locations
agtgttttacgaatgaaaaactagagtatactcttgagacagaaagaagtatantctncttcgtggaaaacaaacagaagttactgttcattggataaattatacaaagagcggtatttaaaggctggaacctctttcacttgcaggctattcttaatcagaagggggatgttcaatacttcattggggttcaattggatggaactgagcgtgttcgataggctgctgcaaaagatggtgccatactggttaagaaaactgcacacaatattgatgaggctgcaaaggagcttcctgatgctaatttgagacctgaggatctatgggctaatcactcaaaaccagtcttgccaaatccacatatgaacgatactgcatcctggagagccatccaaaaggttcttgaaaacggttaaagcatttatttgaaacatttcataaccattaagcctttatgaactggtgatactggccatgttccccttgttgcatttgcttggcacaagttc

SEQ ID NO: 87553 - DNA, 505 bp, Zea mays
  unsure (1)..(505): unsure at all n locations
agggtnaggaaagggtgtatacgtataggggggagggggtgagttgtaccggtccggaattcccgggtcgacccacgcgtccggccacagcttgcgcccgcaatggcactcgtctccgcctcctcgtcctccaccaccggcgtcacggcgctccccaggaatgggcagcgggcgtcgtcctccttcctcggcggcaagacgctgctgagacaggccgaggcggcccggccgtcgttcgccgtgcgcgccgcggcggaccccaacaggccgatctggttccccggcagcacccctccgccgtggctcgacggcagccttcccggcgacttcggctttgatccctggggcctcggatctgacccggagagcctgcggtggaacgtgcaggcggagctggtgcactgccggtgggcgatgctcggcgcggcgggcatcttcatcccggagttcctgaccaagatcggcgtcctcaacacgcncttctggtacaccgncggcgagcagc

SEQ ID NO: 87554 - DNA, 518 bp, Zea mays
tagtgtatctgagttgcggggagaacgaaagaggacgctgttccggtaagggcgattaagtgaacctacgcgtccgtagataaccaaacagaagttactgttcagctgataaattatacaaagagcggtaagaaattctggaacctctttcacttgcagcctatgcgtgatcagaagggtgatgttcaatacttcattggggttcaattggatggaactgagcgtgttcgagaggctgctgcaaaagatggtgccatactggttaagaaaactgcagacaatattgatgaggctgcaaaagagcttgcggatgctaatttgagacctgaggatctatgggctaatcactcaaaaccagtcttgccaaagccacatatgaaggatactgcatcgtggagagccatccaaaaggttcttgagaacggtgaaagcattggtttgaaacatttcagaccagtaaagcctttaagaaccggggatactggcaatgtccaactggtggaagtgcttggcacaag

SEQ ID NO: 87555 - DNA, 511 bp, Zea mays
  unsure (1)..(511): unsure at all n locations
agtgttttgcatgaggggattgtaagggaagctgtccggnatgatgactctatgcaaccctacgcgtccggcgccactgtccagtgcgcgcgtcaagcttgcttagctagccgccatggcctccctcgccgccgtctccgtgaagcccgtggccatcaagggtctcgccggcagctccatctccggaaggaagctcgccgtcgccaggccgtcggcccgctccatccgcaggccccgcgcagccgccgtggtggccaagtacggcgacaagagcgtctactttgacctcgacgacatcggcaacaccaccggacagtgggacctctacggctctgacgcgccctcgccctacaacccgctacagagcaagttcttcgagacgttcgcggctccgttcaccaagagaggtctgctgctcaagttcctgctgctgggcggcggctcacttctggcctacgtcagcgcgtcggcgtcaccggaccctctgccgatcaagaagggacctangagc

SEQ ID NO: 87556 - DNA, 531 bp, Zea mays
  unsure (1)..(531): unsure at all n locations
aatgtgtatctgaaaagaggggagtgtgatctggggatgcttcatccggtcaagaggggagagagataaaccatgcgtccgttcaggttgacgctgcgcctgaagaagcaggagctgaagaggatgaggaatgttttagtgatacatggacaactgattggactgatggacttaccagtcttgatcgttacaaaggacgatgctatcacatcgagcccgttcctggggacccagatcaatatatctgttatgtagcttatacattagacctatttgaagagggttctgttactaacatgtttacttccattgtgggtaacgtatttggtttcaaagccttacgcgctctacgttaggaggatctacgaattccccctgcttaatcaaaaactttccaaggtccgcctcacggtatccaagttgaaagggataagttgaacaagtacggtcgtnccttattgggaatgactattaaaccaaaattgggaatattccgaaaaaaataccggagaacgtggtatgagtgtctac

SEQ ID NO: 87557 - DNA, 472 bp, Zea mays
  unsure (1)..(472): unsure at all n locations
cgcccgcccatcctcntcggaattaccggctcgacccacgcgtccgcagttcttgaaccctacaggatccaactggcattcgcagcaggcatcttacctttatgacccgtgttcctgcaacaaccgtcagccctattacagcagttacctttggtgcatttgttggcacaaaacatcaaggcacaacaactacaacaacttgtgctaggaaaccttgctgcctactctcagcaacagcagtttcttccattcaaccaactggctgcattgaactctgctgcttatttgcaacaacaactaccattcagtcagctagctgctgcctacccccagcaatttcttccattcaaccaactggcagcattgaactctgctgcttatttacaacagcaacagctaccaccattcagccagctagctgatgtgagcccttgtgccttcttgacacatcaacagttgttgccgttctact

SEQ ID NO: 87558 - DNA, 522 bp, Zea mays
  unsure (1)..(522): unsure at all n locations
taggtgtattcngcttatgaggcggatactaaatgtgatagctcaccggntaagatactttatggcaacctccgcgtccgaagaagacgagtgtcaagtgaacctgaaacttgcggtgtcactggctggtagcctgagtgtgagtgagtgatcgagctagctgagctccgatcctcgctagctaggataccgccataccacaagtcttcttcacaagtttaggagtgacagcaacaagagatcgatggcctctgccaccgtgctcaagtcctncttccttcccaagaagtccgaatggggcgccaccaggcaggccgncgcgcccaaggccgccaccgtctccatggtcgtccgcgccttcgnctacgccgatgagctcgtgaagaaccgcgaaacgatcgcgtcggccgggccgggcattctggcgatggacgagtccgacgcgacgttgcgggaagcggctggcgtncatcgggctggagaacacngagggccaaccggcaggcgtaccgnacgctgctg

SEQ ID NO: 87559 - DNA, 493 bp, Zea mays
  unsure (1)..(493): unsure at all n locations
gagttaagaaggtttggctacgagggggagtatgtaanactcttcggaattcccggcgttcgaagcccattgaagtaactggtgggaggaactgtggaataatggcactaggagcaagtgagcattgtggaataatgaacgcatttgttgcgctcacaaaaagggcaagaagcgcaaggagggctaatatcttggtagccattgttgttaggtcgttgctagtgcgcttcgcttggtgtgtttctgaatgctcagctctagaggatccaagcttacgtacgcgtgcatgcgacgtcatagctcttctatagtgtcacctaaattcaattcactggccgtcgttttacaacgtcgtgactgggaaaaccctggcgttacccaacttaatcgctttgcagcacatccccttttcgcaagctgcgtaatagcgaagaggcccgcaccgatcgccctttccaacagttgcgcagcctgaatggcgaatgggacgncn

SEQ ID NO: 87560 - DNA, 515 bp, Zea mays
aattgttttgttaaggacgattactgagatgactctccggttttgagattatgcatcctcgcgtgcggtaagacctctgagggtgaactgcgggccaccgtcacctagagatggatccgcaccaagagcaccaaggggtggtggtggtgggggtggttgtggcagatgtgtcgattcatggaacaaggtatacgtgtgtaaccttgcttggtgcagtgacaacttgactctggagaacctattcagtgagcaatgactggtgctggatgctaaggtcatctacgacagggatagcggctggtcaagggggtttggtttcgtcacctatggctctgccgaggaggtctacaatgccatatcaaaccttgatggcatcgacttggatggtagacagatccgagtcacggttgcagaatcaaagcccaggcgtgaattttgagattttgttaacgtggttttagaggtcaatagcgtgtgttcacaagttctaatttggaaccgattttctttttttc

SEQ ID NO: 87561 - DNA, 530 bp, Zea mays
  unsure (1)..(530): unsure at all n locations
aagtgtctctgcgatgggagacctgaatgggaagagctctccggntaggggggaagaggtaaatgttgtaccggtccggaattcccgggtcgacccacgcgtccggctcattgcaactgctagcaccaagggtaacacttgttagaatctacaatgcagctgagggcaatctcttgcaggaagtaaggagaggtgctgatagagcagaaatatatagcttggctttctcgaatttgcagtatttggctgtgtccagtgataaaggaacaatacatgtcttcaatctaaagataaatgtgggatcgactgcaaatgataaacctatacctgctccagatcctgaagtttcgcatataagcccccctctttcgttcattaagggtgtgttgccgaaatatttccactctgagtggtcagtagctcagttcaggctccatgagggggagcagtacattgttgcatttggacatgagaagaataccgtgtcagttgttggtatggatggaagcttctacagatgtcaatttgac

SEQ ID NO: 87562 - DNA, 530 bp, Zea mays
aagtgctttgctataggcgacttgaatgggaatgctatccggttagaaaagaatgagataaatgctgtactcggttcggaattcccgggtcgacccacgcgtccggactaggttcaatgatgaatcgatcgaattcgcttgggttagctttattattgttgcggctattattaattcgactcgctatagtgtgtaaaaaatgatacagaaccaactaaaaaataacacaaaaaaaaaaacaaacaaaaaaagggcggccgctctagaggatccaagcttacgtactcgtgcatgcgacgtcatagctcttctatagggtcacctaaattcaattcactggccgtcgttttacaacgtcttgactgggaaaaccctggcgttacccaacttaatcgccttgcagcacatccccctttcgccagctggcgtaatagcgaagaggcccgaaccgatcgcccttcccaacagttgcgcagcctgaatggcgaatgggacgcgccctgtatcggcgcattaagcgcggcgggtgt

SEQ ID NO: 87563 - DNA, 469 bp, Zea mays
  unsure (1)..(469): unsure at all n locations
cgcgcagcatgcctctctcggaattcccgggtcgacccacgcgtccgagaccaacgggcaacatagaaagtggtatccattatcaacaatagagcaacaatggggaccgggatattttccctccttatgctccttgctctttctacatgtgttgctaacgcgacaattttccctcaatgctcacaagctcctatagcttcccttcttcccccataccttccatcaattatagcttcaatatgtgaaaacccagctcttcaaccatataggcttcaacaagcaatcgcagcaagcaacatacctttatcgcccttgttgtttcaacaatcgccagtcctaactttggtgcagtcattggtacaaccatcagggcacaacagctgcagcaactcgtgctacctctgatcaaccaagtagctctggcanacctttctccttactttcatcaaccaacattttctttcattca

SEQ ID NO: 87564 - DNA, 513 bp, Zea mays
  unsure (1)..(513): unsure at all n locations
gagtgttttgcttaggaggaagtacgggaagctgaccggcacgatctctggcgacccacgcgtccggcttcggtccacgcacccacccagccccaccagcggcagctccgacgccgcggcgatggtcgggggcggcgcggcggcgggcagcggcggcgcaccgagcggcgccaagctgctgcagatcctcaacgtgcgggtcgtgggcagcggcgaccgcgtggtggtgctgtcccacgggttcggcacggaccagtcggcgtggagccgcgtgctcccctacctcacccgcgaccaccgcgtggtgctctacgacctcgtctgcgccggcagcgtcaacccggagcacttcgacttccgccgctacgacacgctcgactcgtacgtcgacgacctnctcgccatcctcgacgcgctccgcatcgcgcgctgcgccttcgtcggccactccgtctncgccatgatcggcatcctcgnctncatccgnncgcccgagctcttcgncaagctcgt

SEQ ID NO: 87565 - DNA, 519 bp, Zea mays
agggtgtatctgagtatcagaaattttgatcagcactgctctaccggtcctgaattccctggtcgacccacgcgtccgaaaaggcatcaccgccgcgacgacgatggcagcctcgctccaagccgcggccaccctgatgcagccggccaagatcggcggccgggcgccctttgcctcgctgccgtcccgcccgtcgtcgcaactcgcctgcagggcgttcggcgtcgacgccggcgccgccaggatcacgtgctccctgcaggacgtcgccagcaggtgcgtcgacgccgcgaagctcgccggcttcgcgctcgccacctcggcgctcctcgtctcgggcgcgagcgcggagggcacgcccaagaggctgacctacgacgagatccagagcaaaacgtacatggaggtgaagggcacgggcacggcgaaccagtgcccgaccatcgacggcggcgtggagtcgttcccgttcaaagccggcaagtaccagatgaagaagctgtgcctggagccgacgtt

SEQ ID NO: 87566 - DNA, 530 bp, Zea mays
  unsure (1)..(530): unsure at all n locations
aggtctattcnacttatcggatnnctctttctggtgatactctctgnttaggaggggagaaggaagagttctaccggtccggaattcccgggtcgacccacgcgtccggccttctggcagttgctgttgtattttgcatcaaggataacattgcacaagactctgacttgtacaacatcttaagaatggtgtccttggttggtgtcgtggcttatgtcactgccttctccttcggtatgggttccattccttggatcataatgtctgagatccttccggttagcatcaagtgtgtggcaggaagcttcgcgacccttgccaactggttgacgtcctttggaataacaatgacagcaaatttgcttctgaactggagcgctgcaggtacatttgcctcctacatgacggtgagtgctttgactctcgtcttcgtcatcctttgggtaccagagacgaagggaagaacccttgaagagatacagtggtccttccagtgagctccggcattcatatgtacatgcaaatagcgt

SEQ ID NO: 87567 - DNA, 507 bp, Zea mays
  unsure (1)..(507): unsure at all n locations
gagggtnnaagcggtttgtggtaagtggggggggaagagagagtatgctcgtaccggtccggaattcccgggtcgacccacgcgtccgcgcgacgacgatggcagcctcgctccaagccgcggccaccctgatgcagccggccaagatcggcggccgggcgccctttgcctcgctgccgtcccgcccgtcgtcgcaactcgcctgcagggcgttcggcgtcgacgccggcgccgccaggatcacgtgctccctgcaggacgtcgccagcaggtgcgtcgacgccgcgaagctcgccggcttcgcgctcgccacctcggcgctcctcgtctcgggcgcgagcgcggagggcacgcccaagaggctgacctacgacgagatccagagcaaaacgtacatggaggtgaagggcacgggcacggcgaaccagtgcccgaccatcgacggcggcgtggagtcgttcccgttcaaggcccgcaagtaccagatgaagaagctgtgcctggaac

SEQ ID NO: 87568 - DNA, 525 bp, Zea mays
ttgtgttttcctatagttaagaattgaagataccgttttgaatttaatcattctcgcgtccggcaaaggattcagcacgccgcccgttgggaagggagcttcgaggccggccggtttggggggtccgcccggccggcttaaccggttgccccggcccttggggccccaaacccctaaccttggtcggggccggccggtagccaaagcccccggtggctacttggatatctgacttagaggccttccagtcctaaatccggctcacggtagctttcgcgccactggctttttaaccaatccccaataccaaattgtgtgaatcaactggttccttttgtacttaggttgaattactatcgcggctccggccattaataggggtaaaactaaacctgtcttactaacggtctaattcccaatttatcggtcccttatggtgggttgaaccattccacactttggtgaatttcggcttaaaattggttaggcatagccctcctttatagggtcaaaaaagctaccttt

SEQ ID NO: 87569 - DNA, 511 bp, Zea mays
  unsure (1)..(511): unsure at all n locations
cagtnttcgccattgaagatataagagaagctgtccggtagaaggattagggaagctcgcgtccggaaattgtcagggacatcaaggaaaaacttgcctacgttgcccttgattatgaacaggagctggagactgccaggaccagctctagtgttgagaagagctacgagctgcccgatggccaggttatcacaatcggtgcagaaaggtttaggtgccctgaggttctattccagccatccttcattggcatggaatctgctggcatccatgaagccacgtacaactccatcatgaagtgcgacgtcgatatcagaaaggatctgtacggtaatgttgtcctcagtggtggctccactatgttccctggtattggtgaccgcatgagcaaggagattactgcacttgcccccagcagcatgaaggtgaaggtggttgctccgcccgagaggaagtacagtgttttggattggtggtttcattcttgccttccntcaagaccttttaacaa

SEQ ID NO: 87570 - DNA, 505 bp, Zea mays
aggtttatcgaatttgtaggtctaaaggaagctgtccggctatgatctctggcgacccacgcgtccgccgcagtgcccctacccggacgcgtcgctggggccggcgctgcagacgggccagttcgacaacgtgtggatacagttctacaacaaccccgggtgcgcgtacgccaacggggacgacaccaacctggtgaacgcatggaacacgtggaccagcagcatcaccgcggggagcttctacctcggcgtcccagcgtctccccaggccgcgggcagcgggtacatcgaccccggcaccctgacgggacggtgatccccggcatccgaggcattggcaactacggcggcatcatggtgtgggaccgctttaacgacgtgcagaacaactacagcagccaggtgaagggcagcgtctgatgggcataccgcatacgaagctcaagctacagcacctagccatgcatatatatatagtggctattcgtcaagtattcgactgcta

SEQ ID NO: 87571 - DNA, 530 bp, Zea mays
  unsure (1)..(530): unsure at all n locations
aagctgtgtctgattagcggcgactttactggggatnctcatctgnnaagaggagaaagagagaaagcttctaccggtccggaattcccgggtcgacccacgcgtccgcatacaatcaccttactggaacaataccatcctggattaacaggctggaactcctctgctttctggacatatcaagcaacaggcttacaggggatatcccacctgaattgatggagatgccaatgctacaatctgagaagaattctgccaagttggacccgaagttccttgagttacctgtattttggacacaatcacgtcaataccgtttgctcaatgctttccccaatgtattgaatctatgcaacaacagcttgacaggcataattccccaagggattggtcagttgaaagtgctcaatgtcctcaactttagcaccaacagcttatctggagaaataccacaacaaatttgcaaccttacaaacctgcaaactctagacgtatcaaataaccagctcacaggtgaactcccatctgcc

SEQ ID NO: 87572 - DNA, 530 bp, Zea mays
  unsure (1)..(530): unsure at all n locations
aaggctcgattttnnctatcagatagacttttagtgtagtctcnctccccaaacttagnctctatgcaatgctcgtaccggttcggaattcccgggtcgacccacgcgtccgagacggctagccggcgcacggaagcggtcagcggagcggaggtgagcctctcctgcggcggattgtccccgcccccgcccccgctaggcgccatgaagctgacggtgaagaccctcaagggaacgcacttcgagatccgggtgcagcccaacgacacgattatggctgtgaagaagaatattgaagagatacaagggaaagacagctatccatggggccaacaactgctgattttcaatggaaaggtcttgaaagatgaaagtacattggaagagaataaagtcaatgaagatgggtttctagttggcatggcttagtaggggtaaacatctggttcaactgggactttattctnccaggactcaaacaattcctgcaacaaggcaggcaacttctctagaggccccaacacaagctc

SEQ ID NO: 87573 - DNA, 532 bp, Zea mays
  unsure (1)..(532): unsure at all n locations
aagtgtatctggaatgggaggggatctaactggtgaatctctctcnntaagagggggtataagagatagcttgtaccggtccggaattcccgggtcgacccacgcgtccgcttaactcatttacttatgaccaaaggggaagaaattacttagagggctctaatgattccgtttttggcgattcatgccaaaaagggggagaaatgagcccaaagcaaaaggaccgcaccaccaccaatttcaaaaacttagtgctttccaaaagtatttatcaatgggtatcctattgtgttcaaaagggggagaaagtagtatttcaaaaatggtatatcaaaaccctcttgaacactaagaggtggatctcttttagggggagtcttgtttagtcaaaggaagagcatttgaaacagggggagaaaatttcaaatcttgaaaatgcttttgcaaactcttattcatttacctttgactatttgcaaaagatctttgaaatggatttacaaaaggatttgcaaaaacaaaacatgtggtg

SEQ ID NO: 87574 - DNA, 518 bp, Zea mays
  unsure (1)..(518): unsure at all n locations
ggttgttnnaagtttagaggggacggntnnnnnnatgaaaatcgtagtcttacgcacttcctnnnnnntttnggnnagaggcccgagggaggngtgnggaggatttttccaaggggaagcttgtattagatccttcaccgccctaattgcctaatggatgaaaagcggaggatcaagatggcccttgatgtggccaaaggtatgaattgcctgcacactagcatgcctacaattgttcatcgagatctgaaatctccaaacttgctggttgacaataattggaatgttaaggtttgtgactttggactttcgcggttgaagcacagtacatttttgtcatccaaatctacagctggaacacctgagtggatggcacctgaggttctgcggaatgaacaatcgaatgaaaagtgtgatgtttatagctttggtgtcatcttatgggaactggcaacacttagaatgccatggaatgggatgaattccatggcaattgtgggggcaagtgggtttccaga

SEQ ID NO: 87575 - DNA, 529 bp, Zea mays
  unsure (1)..(529): unsure at all n locations
ngttgaaatgagagggcgtgntnttctggactggatgcctacgnatcgatcccctgggtcggaactcccgggtcgacgcacgcgtccgctcgttcaattgtctttattgatgagattgatgctgttgggacaaagaggtacgatggggattctggtggcgagcgtgagattcagagaaccatgttggagttgttaaatcagctggatggttttgattcaagaggagatgttaaagttattctagcaacaaatcgtattgagagtcttgatccagccttgcttcgcccaggtcgaattgacagaaagattgaattccctttacctgatgtcaagactaggcggcgcatcttccagatacacacatcgaaaatgacactggctgatgatgtaaacctagaagagtttattatgtcaaaagatgagttttcaggtgctgacttaaagcccattgtactgaaggctgcttgcttgctttganagagcggcggatgaaagttacccttgcagactttaagaatgccaaagaaaa

SEQ ID NO: 87576 - DNA, 518 bp, Zea mays
  unsure (1)..(518): unsure at all n locations
agaggcntnnntgtgtnagatgaggctcatgatgaagggataatgcatgacttcccgggcgagtaataagcagctttggcatgccaatgggaccttttcaactccaagatgtggctgggtatggagtggctttggcagtaaaagatatctacgctgatgcctttggagaaagaaatttgggctctaaccttgtgggcctgatggtaaaggatggacgacaaggaaaggtgaatgccaaaggttactacatttatgagaagggtgcgaagccaaagccagaccctagtgttaagcatgtgatcgaggagtaccgaaagcaggcaaacacaatgcctggtggaaagcctgttactttaatggatcaagatattttggagatgattttcttcccagttgtgaatgaagcatgcnaggttatggatgaaaatgttgtaattcgagcttncgatcttgatattgcttctgttcttggaatggggctntcccaaaacaagggtggtcctgtcttcttggctgaa

SEQ ID NO: 87577 - DNA, 525 bp, Zea mays
  unsure (1)..(525): unsure at all n locations
gagctgtnctctggnttaaagaagataaagtatgtatgatcctcttggaaatcccggctcgacgcacgcgtccggttgccatgctgatttttttaggcggctgctggcctgcctgtctccactggaagctcgggattacgtaggaaaggggcgggcggcatgaggatccagtgcgacgcgtgcgaggccgcggcggccacggtggtgtgctgcgccgacgaggcggcgctgtgcgcgcgctgcgacgtggagatccacgccgccaacaagctcgccagcaagcaccagcggctcccgctcggcgacgccgcggcgctccccgccagcctcccgcgctgcgacgtgtgccaggagaggccggccttcatcttctgcgtcgaggacagggcgctcctctgccgcgactgcgacgagcccatccacgtccccggcacgctctccggcaaccaccagcgctacctcgccaccggcatccgcgtcggcttcagctccgtctgcggcgccagcgccgagggccttccgccg

SEQ ID NO: 87578 - DNA, 541 bp, Zea mays
  unsure (1)..(541): unsure at all n locations
agagctngtngttcctgataataggggggttaacgtaannatagaagctatattgtaangcttctaccggtccggaattcccgggtcgacgccacgcgtccggtacgtgcgtgactacagttgcatgctatggccatggccacgacttcgccggcaactgggcagccatcatcatacaagcacacgagccgcggcgcggcgcggtgctgccctcctcctctgctgtcctggaagacacgaagctttgggcagcaggtgacgacaagggccacggcggcgagctcccgtgggcagcccgccggcgtggcactggcagggggagaagagggcgacagtatcaggcggctgcagaacgggtcggacgtgcggggcgtcgcgctggagggcgagaaaggccgggccgtggacctcacgccgctggcggtcgaggccatcgccgagagcttcggggagtggctgcgagaggaggagctccggctccggggccaggagcccgagcagctgcgtgtgtccggtcggcgngaccccaggctgtcggggc

SEQ ID NO: 87579 - DNA, 528 bp, Zea mays
  unsure (1)..(528): unsure at all n locations
gannntagaaggaggcgtcgntggttcaggatttgggggtaaaatgaaagcatgctcctggtcggaactcccgggtcgacgcacgcgtccgcgctgccacatctctcctcgtccaaagactccaagctcctgtgcggcctgtgttctgcggccgcctctggtgcacatctccccgccgccgccccgtcgtctgccgacacctttagcgctgggaaggatcacaggggatcggcgcgaggcgggggacctgcggtttttgtcgcccggatggcggcggagcgatgacactggcgtcgggagcggcgcggcgttgggatgcggacgatctgcgatgtgtgcgagagcgcaccggcggtgctcttctgtgcggccgacgaggcagcgctttgccggccctgcgacgagaaggtacacatgtgtaacaagcttgctagtcggcatgtgagagttggacttgcagaccctaataaacttgtccggtgtgatatatgtgaaaattcacccgctttcttctactgtgagatagac

SEQ ID NO: 87580 - DNA, 526 bp, Zea mays
  unsure (1)..(526): unsure at all n locations
agaggtgntgttcnnnnnaattgaggtaagagagaagaggagttatggatncctcggtcgacccacgcgtccggctgctcctcctcctcccccccagtccctcccaggctcccaccccgccttgctcgcaggctccccaaaaccctagccctagccctagccctagctctcccacacccgcactgggagatggacggcggcggcacgcaccgcacgccggaagacgtgttccgggatttccgcgcgcggcgggctggtatgatcaaagcgctcaccaccgacgtggagaagttctaccagcagtgtgacccagagaaagagaatctgtgtttggatggtcttccccaatgaacaatggaaagtgaactggcctgcaaaggaggttcctccggaacttccgaagccagctctgggaataaattttgctcgtgaccggatggatgaaaaagatggcctgcactaatcgcggtgcacagtgatgctnggntgctggctgtgggcctttacttcggtgcaagatttgntt

SEQ ID NO: 87581 - DNA, 531 bp, Zea mays
  unsure (1)..(531): unsure at all n locations
agaggtnntgttccnnncctatgaggattaaggaantagggggtataaggaatgctctaccggtccggaattcccgggtcgacccacgcgtccgcttaaaccctagccgctgcgcacaacaacctgctactcaatgggatcaaccgccatcgattctcctcctccgttgcagctgcggcatccatccagtagtccgaccaatccatggcttcagcgttcgggaccgcctccacttgcggcattaaacatgcacctgccggcgttgcgcttgctgcgcccatgaagcacctttccctcgtctcgccctcgctggtttcgcttccgcgcaagatgaggccgcgaaggaagtacaacttcagggtaaacgctgcaaaggagctgcatttcaacaaggatggctcggctatcaggaaaatgcaaaatggggtcaacaagcttgcagatctcgtcggggttactcttggaccaaaggggcgaaatgtagtcctcgaaagcaagtatggctcacctaaaattgtcaatgatggtgtc

SEQ ID NO: 87582 - DNA, 527 bp, Zea mays
  unsure (1)..(527): unsure at all n locations
agagctnntgttctgnattaaagaggataaagtatgctatgatgctcatggaaccccggtcgacccacgcgtccggggggttcctctcgagtctcggcaacgacgaaaacgaaaataccgagtcgagtcagcggtgaatcccttcgccaaaaaaccaactccgcgagaggtgatgcggagcagcaagcgggacctgacgaatgctacgcgagggatcgagagggacattgcgtcattacagcaggaggagaagaaactcgttgctgaaattaaaaggacagcaaaaactggcaatgaggcagcaacgaaaattctagcccgtcagctgatcaggttaaggcagcagatttctaatttgcaaggtagccgagctcagattcgggggattgcgacacatactcaggcaatgcatgccaacacttcagtggctactggtttacaaagtgcgagcaaagcaatgggagctttgaataagcaaatggaacctaccaagcagatgaaaataatgcaagaattccaaaagcagn

SEQ ID NO: 87583 - DNA, 533 bp, Zea mays
  unsure (1)..(533): unsure at all n locations
gggggnnggggaggaggcgtgnntgttagggatttgtaggtatacggatagtagtctcatgggtaggacctcccgggtcgacgcacgcgtccgttatgggccactctccataaattcgttgaaccagttatgatgcattggcctggcagcagattgagggagaaagctctggaaacagtcatgcaacatgttcattatgaagatgagaacactcgttatatttgcattggtcctgtaaacaaggtattgaatatgcttgcttgctggattgaagatccaaactcggaggccttcaaacttcatatcccacgagtctatgattacttgtggcttgctgaagatggcatgaagatgcanggttataatggcagccaactttgggatacagctttcacagttcaagccattgtggctaccaaccttattgaagagtttggtcctacccttaaactagcacacaactatatcaagaattcacaggttcttgatgactgccctggtgatctgaatgactggtaccgncacacatctaa

SEQ ID NO: 87584 - DNA, 521 bp, Zea mays
  unsure (1)..(521): unsure at all n locations
ggtgggggagaggctcgntgttgaggatatggagttattgtaagtatctcttggtcagaactcccgggtcgacgcacgcgtccgcccttccccaccaaaccggagcacttcggaggccggacccggcgagaagcgaccgaccgcagccagctcacgtctccctcttcatccaccatgctgagggtcgcgggcaggcgcctctcgtccgctctcgcctggcgccccgccgccgccgcctcaggctcccggggccctctcgccggtacactacccggccgcgacgacgacgacacacgcgactgcagggcgcgtttcgccatcgaatctcccttcttcgccgctgccagagggttttcagcagagactcttgctccaagaaaccaggatgtgggcttatctgagctcccagcaactgtggcagctgtgaagaatccaagtggaaaaatcgtgtatgatgagtataaccatgagcgctacccacctggagaccccagcaagcgtgcatttgcctactntgtgct

SEQ ID NO: 87585 - DNA, 528 bp, Zea mays
  unsure (1)..(528): unsure at all n locations
ggaggnggggagaggcgtgnntgtagtgaaaagaagttattgatcgaagtctcatggcaggacctcccgggtcgacgcacgcgtccggagctgagctgagctcaccaccaccacacacgggagatagctatagctagcatagcaggccagccagtcagcgacttagcagcagctagctagccatgctgccgtccttcgtgtcgccgacggcgagcgccgcggcctcggtgacgcctccgccgcggccgataccaggcagctacgggccaccggtgctgggcccgctacgggaccggctcgactacttctggttccagagccaggacgagttcttccggaagcgcgcggcggcacaccgcagcaccgtgttccgcaccaacatcccgcccaccttccccttcttcgtgggcgtggacccgcgcgtggtcgccatcgtggacgccgncgacttcaccgcgctcttcgacccggacctcgtggacaagcgcgacatcctcatcgggccctattaccccgggcgcccgcttt

SEQ ID NO: 87586 - DNA, 529 bp, Zea mays
  unsure (1)..(529): unsure at all n locations
agaggtatgttctgacctaaaagactaccgtatnacggaggtatatagcaagctctaccggtccggaattcccgggtcgagccacgcgtccggcctcgggtcaaaccctaagcagggagttgatttatccgctggagccatgagtaagtggcagtctgagtctgtcaaggatgccatctcccagattgttggggatgccaaggagaagaataggaagttcactgagactgtggaacttcagattggtctgaagaattatgatccacagaaggacaagcgtttcagtggctctgttaagttgccccatatccctcgtcccaagatgaaggtgtgcatgcttggtgatgcccagcatgttgaggaggccgagaagatgggacttgactacatggatgttgaggctctcaagaaaatgaacaagaacaagaagcttgttaagaggcttgccaagaagtaccatgctttcttggcatcagaggccatcatcaagcagattccccgtctccttggtcctggtctcaacaaggcn

SEQ ID NO: 87587 - DNA, 537 bp, Zea mays
  unsure (1)..(537): unsure at all n locations
aggaggctantagttcctgnatcctatcgcatttacagtatgatcgacacttcatgaatcactcggtcgactcacgcgtccgcaacgaggtgcccaagaccgcggagaacttccgcgcgctgtgcactggcgagaagggcgggggcaagtccggggagccgctccactacaagggctgcaccttccaccgcgtcatccccgagttcatgtgccagggcggcgacttcacccgcggcaacggcaccggcggcgagtccatctaccgcgagaagttccccgacgagaagttcgtgcccaagcaacaacggcccccgtgtgctctccatggccaacgccgggccaaacaccaacggctcccagtccttcatctgcaaccgtcgcaaccccttgcttcgacggcaagcacgtcgtcttcggccaggtcgtcgagggcatggacgtcgtcaaggccatcgagaaggtgggcacccgcaacggctccacctncaaggtggtcaaggtcgctgactgcngacagctctnctagatctctctgaa

SEQ ID NO: 87588 - DNA, 537 bp, Zea mays
  unsure (1)..(537): unsure at all n locations
agaggtcntngttcctnnnnttatagatgctttntgtanntaggggggtataagagaatgctctaccggtccggaattcccgggtcgacccacgcgtccgcgccgttgcgaggggtcgcctcgccgtatggaagtcagccaccgagactacatgggtggctctacaattctgggacgatcttgctattgtggcctctgagcatgttaagaagggtgaccggatatttgtttctggacggcttgtgtcagatactgttgatgaggggcctgagaagcggcatgtttactacaagcttgcagttcaacagttgaatttcatcgagtcccagccagttcgattatatgaaccagaggcaagccaggatgccctaggtggaaggcgtgctgattattttaactctatctctaattcaactgaggataagaatagggataatatgagctcatctcgatcaaccgaagagctgtggcaagtgttctttgccaatcctcttgactggtgggataacaggacaaattagaagaacccaaagtatt

SEQ ID NO: 87589 - DNA, 537 bp, Zea mays
  unsure (1)..(537): unsure at all n locations
agatggtgntngtttctggnntttaaggggaggatgatgagatatgctatgaacgctatggaattcccgggtcgacccacgcgtccggaaaaatcagcacatgcaaagaaatgggctgaaccacatattgagactgctaagatgagatggattcctgttaaggagaaattggttgtcctcaagaaaaatgcagaaccttatgtacagaaggtatcgacaagatcagtggagttttatgagtcatcaagggatgctgtgacacctcacgttgtcaaagttaaagagtttgctcatccctactaccaggaagccaagaagttttctaagccttacattgatcaaattgctgagatcactaagccacatgttgagaaagttagaactactctgaagccatacactaagagagcagttcatgcgtatgggtcatttcttgggtctgcaaccacataccatcgacaggctcaggcgaccatcatggactacctncatcagcatggngtacccaagtcatttgcaacgaaggagttagtttgg

SEQ ID NO: 87590 - DNA, 524 bp, Zea mays
  unsure (1)..(524): unsure at all n locations
ggagggggagaggaggctcgntgtagtgaatgtaggttgaggagcgatctctgggccggacttcccgggtcgacgcacgcgtccgggtgggttggcttctcctccccctccggttcgggttcgggttcgtgaggttctccggggttcggtttcgtgggtgagcggatcgagatggcggcgtcggatgttgagtaccgctgcttcgtcggcggcctcgcctgggccacggacgaccactccctccacaacgccttcagcacctacggcgaggtcctcgagtccaagatcatcctcgatcgggagacgcagaggtcccgcggcttcggcttcgtcaccttctccacggaggaggcgatgcggaacgccatcgagggcatgaacggcaaggagctggacggccgcaacatcaccgtcaacgaggcccagtcccgcggcggccgtggaggcggcggcggcggcgggtacggtggtggccgtggaggcggcggctacggcggtggcgggcgccgtgatggcggcggcgg

SEQ ID NO: 87591 - DNA, 528 bp, Zea mays
  unsure (1)..(528): unsure at all n locations
gggtgnnngggaggatgggtgntgttagggaatggtgggggagagaaggaatctctggtcaggacttcccgggtcgacgcacgcgtccgctttgtgctcccattgtttatccatgaaggagaagaagatgctcctatcggagctatggcagggtgctataggcttgggtggaggcacgggctgcttgacgaggtttacaaggcccgcgatgttggtgttaatagtttcgttctctttcctaaagttcccgatgcattgaagtctccaacaggagatgaagcgtacaacgataatggtctggttccacgtacaatccgcttgctcaaggacaagttccctgatattgttatctacacagacgtcgcgttagacccttattcatctgatggtcatgatggtattgtgagggaagatggtgtaattatgaatgatgaaacagtttatcagttgtgcaaacaggctgtttcacaggctcgtgccggtgctgatgttgtcagccctagtgacatgatggatggccggattgaa

SEQ ID NO: 87592 - DNA, 519 bp, Zea mays
  unsure (1)..(519): unsure at all n locations
aggagggctcgntagatggatgggcctggccactacgncatgcacacactcgtcagaactcccgggtcgacgcacgcgtccggctcctcctcctcctcccccccagtccctcccaggctcccaccccgccttgctcgcaggctccccaaaacgcggagccctagccctagccctagctctcccacacccgcactgggagatggacggcggcggcacgcaccgcacgccggaagacgtgttccgggatttccgcgcgcggcgggctggtatgatcaaagcgctcaccaccgacgtggagaagttctaccagcagtgtgacccagagaaagagaatctgtgtttgtatggtcttcccaatgaaacatgggaagtgaacttgcctgcagaggaggttcctgctgaacttccaaagcccagctctggaattaattctgctcgtgacgggatggatgaaaaagattggctgtcactagtcgcggtgcacagtgatgctnggttgctggctgtggccttttactt

SEQ ID NO: 87593 - DNA, 539 bp, Zea mays
  unsure (1)..(539): unsure at all n locations
agagctcgntgttcntgntttattagaacttattgtatgtcggggggtataaaagtatngcttctaccggtccggaattcccgggtcgacccacgcgtccggacaacccaacccgaccccaagttcccaacgcagaggatcgggctgaatcctccgcaggtcgccgccgccgggaccgaccgacccgatcctatcgatcgaggatgtcgtacgcctacctcttcaagtacatcatcatcggcgacacaggcgtggggaagtcgtgcctgctgctgcagttcacggacaagcgcttccagcccgtgcacgacctcaccatcggcgtcgaattcggcgcccgcatgatcaccattgaaaataagcccatcaagctccagatttgggacacggctggccaagaatcattcagatctattactagatcatactacagaggcgctgctggtgcccttttggtttatgatattactaggagggagaccttcaaccatctcgcaagttggttagaagatgcaaggcagcatgcaaatgctaacatt

SEQ ID NO: 87594 - DNA, 538 bp, Zea mays
  unsure (1)..(538): unsure at all n locations
agaggctgngtgtttctgnnntttaaagaggggtgatgagacagtaagggtagctctatggataccctcggtcgacccacgcgtccggcgcgccgctgctgagcgacgagcagatcgccgacaacgtcatcggcgtgctgttcgcggcgcangacacgacggccagcgcgctcacctggatcgtcaagtacctccacgaccaccccaagctcctcgaggccgtccgggcggagcaggcggcggtccgcgaggccaccggcggcgggaggcagccgctggcgtgggcgcacacgaagagcatggcgctaacgcatagggtgattttggagagcttaaggatggcgagcatcatctcgttcacgttcagggaggccgtggccgacgtggagtacaaagggttccttatccccaaaggggtggaaggtgatgcctctcttcaggaacatccaccacagccctgactacttcccagatccacacaagttcgacccttttagattccaggtgccgccgcgtccgagcacgttcctggcgggtg

SEQ ID NO: 87595 - DNA, 534 bp, Zea mays
  unsure (1)..(534): unsure at all n locations
ggannnatgagaggatggctcgntngtagtgagttgttgaggaggagagatggaatctctggtccggacttcccgggtcgacgcacgcgtccgtctctcgctccgtccatccccgtcgccagcatcgcttccacttcggtctcagcgacgggcgccaccaccgctcccctccgtctccccctcctcgcccagcggcaattaccacagcctccccagcaagccgggatggctgcactcaaggcatcgttccggggtgagctcagcgccgcttccttcctcgactccagcaggggacctctcgtccagcacaaagtggattttacgtttcaaaggaagggcaaacgagctatttcactgagaaggacatgctgttctatgcaacaggctccaccaccagcatggcctgngcgagctgttgctgagcctggccggaggtcatgggatggcccaaagcctatctcgattgttggttcaactggttccataggaacacagacattggacattgttgcggagaatcctgataagttcagt

SEQ ID NO: 87596 - DNA, 528 bp, Zea mays
  unsure (1)..(528): unsure at all n locations
ngagggtggaaggagggcntcnnnnnttagaggcggtatgaatttattgtaaagtagctcatggtcagaactcccgggtcgacgcacgcgtccgcccacgcgtccgccatcagcagctatcgtattgcatcacacagtttgttgagaaggactgcaaacttgctgacacagttattaggggtttacttaaatattggcctgtgacgaacagttcaaaggaggtgatgttcttgggtgagttagaggaggttttagaggcaacacagcttgcagagttccaaagatgcatggttccactcttccgtcagattagccgtagcatgaacagctttcatttccaggtggcagagcgggctctgtttctctggaacaatgaccatattgaaaccctaattaagcaaaactacaaggtgctgttaccgatcatctatccagcactcgagagaaactccagagatcactggaaccaagctgtccgtagcctgacactgaacgtacgcaagatcttctcagaccatgattccacat

SEQ ID NO: 87597 - DNA, 531 bp, Zea mays
  unsure (1)..(531): unsure at all n locations
agagctcgntgttctgnattatacgaagttacagcatgcaaagaacttatgaatcactcggtcgacccacgcgtccggctggtcgggacctcacagactccctcatgaaaattctcactgataggggttattcctgcacaacctctgccgagcgagaaattgtgagggacatcaaggagaagcttgcatatatagctcttgactatgagcaagagttggagactgccaagaacagctcctcagttgaaaagagctatgagctgcctgatggccaagtaatcaccatcggcgcagagagattcaagtgccccgaggtcctcttccagccatccatgattggtatggaggctgctggaatccatgagacaacatacaattcaatcattaaatgggaaggggattttaaggaaggacctttacggcaccattgggctcaatggagggntcgactattgtcccccggtattcgtgatcggatgagcaaagagatcacttnncttgcaccaagcagcatgaagatcaaggtcgtcn

SEQ ID NO: 87598 - DNA, 535 bp, Zea mays
  unsure (1)..(535): unsure at all n locations
ggtgaagaggtnntgttccnncctaaagagctactgtatnttggggatatatgagatgctctaccggttcggaattcccgggccttggtttttttttttatatggtttcaatgtgtgtctgtatgtactgaactgtacaggcttatcgagaaagagcactgcgagtctacaacaatgcacacccaacacaggcggtggacacaacccatccaataatctttcatgagtacagtgtcggagtcatcggccaatttcttcaaaattatcattaatttatgatgttcatgtaactatagtcgtaggataaggcagggccggtttggtttcatcacgcggatgggagcaccttcttgacgatctcatcactgagcgaggcgatctgggcgtcgagcgccttaacagcctactccttctgcgcctcgaggttggcgagcgcctctacgagctcggcctccacacggctgcgcccctcgtccagcttggccttcagctccgcggtggtctccttcttcatcttgttaagcgccgccgcgat

SEQ ID NO: 87599 - DNA, 523 bp, Zea mays
  unsure (1)..(523): unsure at all n locations
gaggtctttttccnnccttaggatcctangtannatggagattatggatgctcgtccgtccggattcccgggtcgcccacgcgtccggccatcgacacgatcgcgagcgcagcacgtacgttgtcggaagctcaagttagaagaggcaccagtgcctgatcgatggcggcccaggctctcctctccggccggcagctgctgggccgccccgtgcagtcggccgtctctaggtcgtcggccaggaaggcgcccttcgtcgtcagggccagcttcaggccttcagcccagccaggtgcccacaggcacatgtgggtctcgtgccaagcagtcctcctctatacctaatggcactctgcccggacactatggcttagaccctgtgcctctctgacacccagaggacaccgggctctatatcgagcccaagtgtctgccctatgacgaggtgatcaacggcctatacgccatgctggccgcggtgggcgccatcgccccggagatcttcggcaagatgggcatcatc

SEQ ID NO: 87600 - DNA, 519 bp, Zea mays
agagggctcggtggtagttagcctagttatgactgtacgtatcctcatgggcaggacttcccgggtcgacgcacgcgtccgatcgtactggaccaatctgccaccacactttgatcacacacaggaagttgagatcagagaaatgcaggctgccgctactgccgccgggttctcggccgtgctgcccgccaagggcaggccggcggcgaggagcagggtggtggcccgtgtccccgccacaaggaggagcgtccgtgtagctgccgtcgtcgcgaccgaggccgcgcagatcgactacagctcaagcgtctcggtgttcccgatggaggcctgcgacctgcttggtggcgacgcgtgcaacgggcccatgttcccggaggccaagcccgcctcggcggcggcggcggcgagcaggagtgtggtcggggtggacagggactacctgtcctacgacgagccaaagacggtgttcccgggcgaggcgtgcgatgaccttggcggcgagttctgcgaggcgcc

SEQ ID NO: 87601 - DNA, 557 bp, Zea mays
  unsure (1)..(557): unsure at all n locations
agagcntnntagtttctgnattaatagcattttatgnaanncatagagagtatattggcatagctcgtaccggttccggaattcccgggtgcgagccacgccgtccggcgtnngtgtttcgtagtttctgcccttgatagtctgcgtttacgttgcgtctctctcatctttgagtttattactgttatgacaaggngacatgcatacccaattcattcccgaagatgggtgacccagttggattcctgaagatgtatttagtatggagcctttcgttcgcaacttttttgagaacacatctacagtacagctcaatcatcgaattcttgccgcaacaacattactctctgtgggtggattatggttggctgcaaggaaaatagacatgcacccagcagtcaagtcactgatcggaagcacgcttgggatggctgctctccaggtacattgggcatatctacgctatngacgtacgttcaaccttgttggcttaacgcacccagcctgaaccgtgactctactggcacttaccaaccttcctggttacaactttgaga

SEQ ID NO: 87602 - DNA, 547 bp, Zea mays
  unsure (1)..(547): unsure at all n locations
aggatggttggtngttcnnnnnnnttaaggggggtatatgaggagagtatgaggggctgtaatgcaatnactcgtaccggttcggaattcccgggtcgacgccacgcgtccgctccagccaacaggagatctctcaccggttaggaggtccatacaatttttcttggatgatctgttgagccagacaccggatcagcaacagactctggctgcaattggagaggacttatttgctatagcacaagatcaaccttttcggtttccatccacatttacatttgttataagggcattctctactcttgaaggaattggatacatattagatccagaattttcgtttgtcaaagttgcagcaccatatgctcaagaactgttagacttgaaacagagacgacaaactggacctcaattggtccaggaaataaggaagcaagcaaatgatgctcgtgattctacaatatcaatgccgtacagaatacagagaattgaagattttgtaggacaacttgagacaggagatctgaaacttagggtcagagtacta

SEQ ID NO: 87603 - DNA, 539 bp, Zea mays
  unsure (1)..(539): unsure at all n locations
agatgcgtcggtgtttctggnataaaaggaggggaggcgagacagaagggaantgtaatgaaatcctcggtcgacccacgcgtccgcgcttctctcgctagcgggttcggcagtagaaaccctaaaaaaaaagacaccgccctcgccttcgctagcggaaccgccctcccctcgccggggtaggggtttcgggggtagacgcccgccatggacgcgttccggaaacagctggacgtgctcatgggcgccaaccgcaacggcgacgtcgaggaagtgagccgcaactactacgaccgcgacgtctgccgcctcttcctcgccggtctctgcccacacgacctctttcagctcacgaaaatggatctcggtccttgttctaagattcattctcttcaactgcggaaagattatgaagaagcgaaagcaaagggaacagannattttgatagagaactcgaggatatgatagaaaggctcattggtgagtgtgacagggaaaattcagagggcccctaaacggcttgcagatgatgatgccc

SEQ ID NO: 87604 - DNA, 524 bp, Zea mays
  unsure (1)..(524): unsure at all n locations
agagctnntgttctgnnttaggggggggagaagactgaggggaaagagaagctcgtcgacccacgcgtccgagggcctcctgtatcctctcacttccctcagtcctcgtccgtctgctccctcctctctgtacctagctctagctaggccttctgtagcgcggcagagatggctgcccctgccttcaccacggcggcggcggcggcagcgctgctgctgctgctcctnctgtcgctcgccgcggcggcggacatgtcgatcgtgtcctacggggagcgcagcgacgaggaggcgcggcggatgtacgcggaatggatggcggcgcacggnccgacctacaacgccgtcggcgaggaagaacggcggtacccagtgttccgggacaacctncgntacatcgacgcgcacaacgccgccggcgacgccggcgtccactcccttccgctcggccctaaccgcttcgccgaccttaccaacgacgagtaccgngccacctacctcgcgccaggaccaagcccgaaaag

SEQ ID NO: 87605 - DNA, 523 bp, Zea mays
  unsure (1)..(523): unsure at all n locations
ggagtttggagagggctcgntgttaggagatatgcattattgatagtatctctgggcaggacttcccgggtcgacccacgcgtccggacggacatgatcacctacgccgacaccgacgtcgtcatcgtgggcgccggctccgcggggctgtcctgcgcgtacgagctctccaaggaccccgccgtgagcatcgccatcgtggagcagtcggtgtcgccgggcggcggcgcgtggctgggcgggcagctgttctcggccatggtggtgcgcaagccggcgcacctgttcctggacgagctgggcgtggcgtacgacgaggccgaggactacgtggtcatcaagcacgccgcgctcttcacgtccacggtcatgagcctgctcctggcgcgccccaacgtgaagctgttcaacgccgtggccgtggaggacctcatcgtcaggggagggcgcgtcggcggcgtcgtcaccaactgggcgctcgtgtccatgaaccacgacacgcagtcctgcatggaccccaacg

SEQ ID NO: 87606 - DNA, 532 bp, Zea mays
  unsure (1)..(532): unsure at all n locations
tgagctcgtgttctnncctatagaattacagcatgtcagacgactcatgntanaccaccggnngtnnnnnnnnnnnngcggaggcacgcgtncgcgacggcgtgcccgtctccccgagctcattcgccatgcctggctcagcctccgcgagaggaggacgagggctcctcttgccggcggctgctgaggcggttgtggtgctaatattgggtgcagtggcgccagcggcgggttgttatccgcgcgtgttcagcttcggggactcgctggccgacacggggaactacccgttcgtctacggcaacgactctgggtctggcggngccgcgctccggccaccctacggcgagaccttcttccaccgcgccaccgggcgcgcctccaatgggcgcctcgtggtcgacttcatcgcggacaccctgggcctcccgttcgtgcgaccgtatctgagcggacggagcgcgcaggactttgcgagcggggccaaattttcggcggccggagccccagggctcaaaccggaattttttcc

SEQ ID NO: 87607 - DNA, 537 bp, Zea mays
  unsure (1)..(537): unsure at all n locations
agaggctcggtgttttnnaaaatagaagattattgaatnatagaaactcattgnnannnctnnngnnggtcngaattcccgggtcgacgcacgcgtccggggagaaggatcctactccaatacttgacacaattgatgcggccattcatttgaaaaagctatctagtaaggagctcaagcagttagccgatgaagttcgttcagaaatagctttcataatgtccagaaaatgccaaccgtgtggtgctgatcgctcagttgtggagctgacaattgctatacattatgtgttcaatgccccaatggataagatactatgggatgctggtcaacatgcatatgcgcacaagattctcacaggaaggcgctctctcttccatactattacacagaaaaatggcctttctgggttcacgtcgcgttttgagagcgagtatgatccctttggtgctggacatggatgcaatagtctatccgctggccttgggatggcggttgcaagggatataaatgggagaaaaaatcgaatagtgacag

SEQ ID NO: 87608 - DNA, 524 bp, Zea mays
  unsure (1)..(524): unsure at all n locations
agtggagactctacttgtaangcttcagcccatgattgtattgctcgtaccggtccggaattcccggctcgacgccacgcgtccgcgccggctttaaaaacgcacacaagcgctaaaaccctctccagcgtccacctcagctggcatatccgctccgctacctctccagcatcctcccgtctccgtcgtctcgtctccgctcctcacctcgccagccatgggcaagatcaagatcggaatcaacggtttcggaaggatcggcaggctcgtggccagggtcgccctgcagagcgaggatgtcgagctcgtcgccgtcaacgaccccttcatcaccacggattacatgacgtacatgttcaagtacgacaccgtgcacggccaatggaagcacagcgacatcgccctcaaggactccaagacgcttctcttcggcgagaagccggtcaccgtctttggcatcaggaaccccgaggagatcccgtggggtgaggctggtgctgagtatgtcgtggagtccaccggtg

SEQ ID NO: 87609 - DNA, 545 bp, Zea mays
  unsure (1)..(545): unsure at all n locations
cggnnnnnannattactgtaagcctaactgacactngnnannnctcgannacactagnaannaccntncggntgcggaattcccggggcgacccacgcgtccgggaacaagggcctcctgtctgctctcacttcctcagtcctccgccgtctctgctccgggccctcctctctctacctagctagctagccagccttcctgtagcgcggcagatatggctgcctccaccacggcggcggcggcggcgtcgctgctgctgctgctgctcgtgtcgctcgccgcggcggcggacatgtcgatcgtgtcctactgggagcgcagcgacgaggaggcgcggcggatgtacgcggagtggatggcggcgcacggccggacctacaacgcctacggcgaggaggagcggcggtaccaggtgttccgggacaacctccgatacatcgacgcgcacaacgccgtcgccgacgcgggcgtccactccttccgcctcggcctcaaccgcttcgccgacctaaccaacgacgagtaccgcgccacctaccttcgct

SEQ ID NO: 87610 - DNA, 517 bp, Zea mays
  unsure (1)..(517): unsure at all n locations
ggagggcgtgnnnttaggaagatgcgggtcgactggatagggacttagtggtaagactccccgggtcgacgcacgcgtccgcggacgcgtgggcgacgtgcggcgtgcggtgcatcctgacggacgaggaggcggcgctggtcgggggacggaaccacagccacgcgacgcaggacctgtacgactccatcgcggcggggagcttcccggagtggacgctgtacgtgcaggtgatggacccggacacggaggagcagtacgacttcgacccgctggacgacaccaagacgtggccggaggacctgctgccgctccgccccgtggggaggctggtgctggacaggaacgtggacaacttcttcaacgagaacgagcagctggcgttcgggccggggctggtggtgccagggatctactactcggacgacaagatgctgcagtgccgggtgttcgcctacgccgacacgcagcgctacaggctgggaccaaactacctgatgnctgccgtcaacgcgcc

SEQ ID NO: 87611 - DNA, 523 bp, Zea mays
  unsure (1)..(523): unsure at all n locations
cggaggctctgtgttctgacgcaagcnagcatagntattacatattgcntcggaattaccggccggacccacgcctcctatcgcatgccaatggaacctttcgagcttcaagatgtggctgggtatggagtggctggggcagtaaaagggatctacgctgatgcctttggagaaagaaatttgggctctaaccttgtgggcctgatggtaaaggatggactacaaggaaaggtgaatgccaaaggttactacatttatgagaagggtgcgaagccaaagccagaccctagtgttaagcatgtgatcgaggagtaccgaaagcaggcaaacacaatgcctggtggaaagcctgttactttaatggatcaagatattttggagatgattttcttcccagttgtgaatgaggcatgcagggttatggatgaaaatgttgaaattcgagctttccaacttgatattcttcctgtctttgaatgggcttttccaaaaaccagggtggtccttgctttttggcttacac

SEQ ID NO: 87612 - DNA, 548 bp, Zea mays
  unsure (1)..(548): unsure at all n locations
aggaatctcntnataatgaggcagctcctacgtccagccagtacgccacgactgtaccggctcggaattcccgactcgacgccacgcgtccgcagttgagcagctatttaatggagggataagagggaggatttcaaggaaagttcaagcacattttgcaacattcacaggaaatgcaaagaacaaaatggattactgcacaagttaaccacaccatataattataatacacatttctatttttctaatactttaatcttacaaataattcttcatatttattatcactctatatattattacctatataaattcatattcattatacattcatatttcattcttattttaatttatactttttttactttaattaattctattttttatattcatataactatataataattctctattatacttttcaatataattatttaatttaatcatataactctttatatattattttcaataattcatctaatatatctttatatctattatatatatataatcattcttaaatcataataaattttatt

SEQ ID NO: 87613 - DNA, 520 bp, Zea mays
  unsure (1)..(520): unsure at all n locations
aggaggtcatcattatttcctacncctcgtccagcccacgtcgnataaccgtaccggttcggaattcccggctcgacccacgcgtccgcgtctgtgttcttgttcgtacgcgtacttagcccctatcctaattgtcctcctttcagtcctttccgatccctcactcgccttccctcgcttcaagatgcatatctttgtgaagaccctcaccggcaagactatcaccctcgaggtggagtcttctgacaccattgacaatgtcaaggctaagatccaggacaaggagggcatccttcctgaccagcatcgccttatcttctccttctagcatcttgaggacagtcgtacacttgctttactactacatcctgatcgattcatcccttcattttttgcttttccttatagtttgcattcatatctttttttttgttcttttcattttttataatttctctttatttttattctcttatatttttttttattttttttattattttattttcaattttgtatg

SEQ ID NO: 87614 - DNA, 533 bp, Zea mays
  unsure (1)..(533): unsure at all n locations
agattgcttcgnntagttctgagngcaatgcnnactanagnncttgnnnacgttagttannatcttccctnctgacgcaaaccnaccgtcgnncaaaaaacnatgtngatgagatttatgctgttggtttaaacacggacgangcgtattcttaaaacgtactttagaatcatagaacccttttccagttgttaaatcacctctatggccttgattcaagaggacatcttaaagttattctatcaacaaatcttatttacagtcttgatccatccttgcttctcccatctctaattgacagaaagattgaattccctttacctcatgtcaatactattccactcatcttccatatacacacatccaaaattacactttctcattatgtaaacctacattactttattatctcaatatataaattctcaagttctgacatcatatccatttttaccttaaactttctttctttcttttaataaaccacatattaatctcacaccttccatacttcatcaatcccaaaataaccg

SEQ ID NO: 87615 - DNA, 542 bp, Zea mays
  unsure (1)..(542): unsure at all n locations
aggaatggtcnntcttgagggagctagctnacttagttnacgcncacgttcgnatcgctgtaccggtttcggaattcccggctggacgccacgcgtccggaagacactattctgtcactcagatgctacctattcaggttacacgtgctacactgggattttttattttgtgccgcctgatatcgatacggttgggtaccgggtatttctgggccacaaacagtacttcgtctcttcggatgtcggtgccggtaaaatgcaatggtattctttttacaaggaagaggctggtggcactgaccttgagaacggcttatagaaaatgtttgcttgagttatttgatgggtggtgtgttaatttcattttatttttttatgtcatcttatttttttcttttttttttttttattttttttctttttttcttttattaatttatttttttttatgtttttttttttatttcttttatttatcttttttttttatttattattattttttatttgtaatatatttttttattactatttttttattt

SEQ ID NO: 87616 - DNA, 533 bp, Zea mays
  unsure (1)..(533): unsure at all n locations
aggaatgctcggtcattgtgtagccctgcncactacgtaagttcactacgtcatgccgtaccggttcggaattcccggctcgacccacgcgtccggtgtcacctctttttcagctgttgtttttggaaaattgaatatccgtgccgataaagggcttggcctggcaaaattcttccttggtattgggctcccaggtagcgcaaaggattgctttaatcagattgagtctttgtcattcttggagaacaatagggtcttcgttccgttgatactatcactttcttccaaagtattttcattgacttctaaagatcagctcaaggtttaagttacttcagtttttggatcttcttttcttttacttatatttattttttttcattttttggtatctttctttatattcttttatttatatttttctttatatttttttttattttttattacttttattttttacttttttttttttcttattttttatttttttttttttttttattttttttatttttttttattaatttttt

SEQ ID NO: 87617 - DNA, 605 bp, Zea mays
  unsure (1)..(605): unsure at all n locations
tgattnntgtgagggaggnctcnnnntttagaggaccatcgaaccctcagtatatgatatatactgtcangctcgtactcggttctcggaattcccgggtgctacccacgcgttccgcgacaacaagcctcctgggtcgtcatcctgctgcggtgggcgtcgccaaggacgctcttcatcgcgggtggccgacgttcctgtctggaccgcgccgggtcgtcggctctctgcttgctgaccagctacgggttggaatgatntgtctcgctcgtcgtgtctcgtgttcgtgtcctcactcgtcttgggtgcaccatcccttgactccaagtttcccgtttggctctttcatcttgttcatctctgtttgactctttttctactgttttcttatttaatcctgtttatcttggttcatgtttctttatattttcttgactttgttgtgtgtttttaatctttttatgtgttttggtataattctttatttttttattttaggttctaattttttttttttttattaattcatattcatttgacatttttttgttcttttatttaattttttactattattttatttttttttttaatatatattattg

SEQ ID NO: 87618 - DNA, 536 bp, Zea mays
  unsure (1)..(536): unsure at all n locations
aggtatggtcantttttagaaagtagttactaagtccagtttggatgncaagntgtaccggttcggaattcccggctcgacccacgcgtccgagatgctgttaacattcatgttgattttttgaaggagtacaagcaggattttgaactggatctttacccagatagcgcgactacttttcctgcaacccttgctgaacttacggagagattgaaacactggaagaacattcttcagagtaatgtataggatcgtttcccagcaatatttatactgtttgatgattgtttatctctttttgacttataatttttcttattttttattatttatttattttttaatatttaattttttttttttattatttttttttattttttatttttatttttatttatttttatttatttttttatttttttatttattatttttttttttttttttttttattttatttttttttttttttttattatattttatcattttttttttatatattatttattttattatttttatcatattta

SEQ ID NO: 87619 - DNA, 522 bp, Zea mays
  unsure (1)..(522): unsure at all n locations
ggaaggtcnntgtttaggagctagtcctacgtcagttaggtcgtattgctgtaccggttcggaattcccgggctctggagtttatgaatgagcaaaaccgtggtgccacgtgctacaaaaccaaagatacaagaggcagagaactcgtgagatgagaaaagcgagaaaactgttcttctaattgatagtgaactgtacaatcgctctgattttatcactgagtacaaggatgccaaattctttgtaataaagtcctacaccgaggaccatgtacataggagcattaagtataatgtttgggctagcacagccagcggaaacaggaagctggattctgcttaccgtgcggccagagagaaagaagagcattgccctattttcttgtttttttcggttaatgtaagtggccaattttgttgcttttttttatatttattgtttttgtttatttttttttgatttttttatatttttgttatttatgttttttttgtttttttatttctttttttttattttttt

SEQ ID NO: 87620 - DNA, 600 bp, Zea mays
  unsure (1)..(600): unsure at all n locations
acggaggctcnttgattatgaggcctagtnactanagttcagttcaggttagtaatgactgtaccggtttcngaattcccgactcgacccacgcgtccgcagaatgcaccaatttacanngggaagcgatttccttcgcccgccgatgcggtcgcatcgcggtaggcttttaaaactctaaaggcgctctctattatccttacctacatttttatctttatactttatatctataattaatatattatatattttactatatattattattattttataaatattaattaaatatatataattatttctattaataaaaaattttcttatatttaattttaatctatttttattatattttaatttatattcaattaattaaaatctttttttatatattttatatttttttattaataattttatactatatttaataatataactaaataatttatttatttttaatatataattttattaataatattttattttatttattaatttaataaatatattttattactatctttattatatatttaatttataatttaattttattttttatatatatatataatattataatatatt

SEQ ID NO: 87621 - DNA, 561 bp, Zea mays
  unsure (1)..(561): unsure at all n locations
aggatgctgngtgttagtaagcctgcccactacgttaagcctcactcngctattactgtactcgttcggaattcccggctcgacccacgcgtccggagagatccttagtttagcgcgtccggtaggagctaaagcatgaggttaagcagggtgacagatacaaacttgtggatattcgggaagagatattgcggaagctaatagctgtgtatctttttatcaacacttattctacctgtaaagcatggtgttcttttttattcttatttttccattattattatatttattttttttttttattaatttttttatttttttctttttttataatttttattattttttttttttttattttttatttaattttttttttttaaatattattttgattattgtatttttctatatttctatttttttattctattttttattctattattatattatattatatttttttttttttatttttattttatctttattatttattattcttatttatttttatttatattttattctttattttatattttttatttttttttt

SEQ ID NO: 87622 - DNA, 646 bp, Zea mays
  unsure (1)..(646): unsure at all n locations
agatatgtgttactaatgtngttccatccctgtgagacccgttcactacagntaggactgtcccggcttcgacccacgcgtctcgacagaaacccccctgctgtattcatacaacttctccacggtaccttctcacggtatcacaagttggaaaggttataaggttgaacaagtgactgtctgtcctttattggcgatgtactattacaaccaataattgtagatttatccctcaataaaattacttgtatgagctgtagttatcgagtagtctcactcttgtctaactgtgatctttaccatatatattaattatattctgttattatctcattcttattttatttcttctttattttactctnttttgtatcttatttatttttatatttattatttatttatgttttatattctttttattttttttttattattatttttttcattttttcttatttatatttttatttctattgtatatttttctatcttattttttttaattttattttcttttatttttttattatctattttatttttatctattttattttattatattatttatttaattttttttattttttttattattttttatatttatttattttttttaattatttatttttttttatta

SEQ ID NO: 87623 - DNA, 542 bp, Zea mays
  unsure (1)..(542): unsure at all n locations
ggagcnattgaggatggctcggtggtaaatgaggctgctcactcacgttattgtacacgtcagtcatagttgtaccggtttggaattcccgggtcgacccacgcgtccgctctcctcctccagagctcgtcgccactttccaccgccaccctcggtcacgccgtccgtggaggttaggtcagcatggtgagggtcagtgtgctcaacgatgcgctcaagtccatgtacaacgctgagaagattggcaagaggcaggtcatgatcaggccgtcatccaaggtcatcatcaagttcctgacggtcatgcatcgccatggctacattggagagttcgagtacttttatttccatcgtttcttcaatattgttgttttactcatttttatgttgtatattttcttttgttttaagttctatctttttttattttttttattattttatatatttttttttgtctttatcttttttctttttcttttattttttatttcttttttttttttttttattttttttttttttttttttttttatttttt

SEQ ID NO: 87624 - DNA, 532 bp, Zea mays
  unsure (1)..(532): unsure at all n locations
aggatctcgtgttcttagnttaaattgatgtaagcngatancgttaggacttcccgggtcgacccacgcgtccgctcgcgactgctctcatctgttcccgcttaggattcgtttacaatggcccgtgtgtatgtcggcaacttggatgcacgcgtgacttccggggaactcgaagatgagttccgtgtgtttggagttctgctaagtgttttgggttgctcttataccatctggttttgcatttattgtttttgactactttttttattctttttttttctttttttatttttttttttttgttatttttctttttgtttattatttttctatttttttctattttttttattttttttttttttttttttttttatatttttatgtttttttttttttttttttttttttttttatttatttttatattttttttatttttttttttttttatttatttatttctttttttttttttatattttttttttcataatttttttatttatttttataatatatttttttattg

SEQ ID NO: 87625 - DNA, 517 bp, Zea mays
aggatgctcggtgttagttagcctactttattgtccagttcactacgtatgactcccgggttgacccacgcgtccgctcgagctccgccgcttgcccgcttttgttctctccctccctgctctcggcttcttctacacgctaccgtcgcacagccgtaaacgcccctgccggatcccgctagttcgccaccgccgcccgcccgcccgccgttcgcctcatcatggccgcctcgtcgaccgccacctccgtccacgacttcatcgtcaaggatgcgagcggcaaagacgttgacctcagcacctacaaggggaaggttcttctcattgttaacgtctcatcctcattgtggcttaactaacttcaactacactgatctggcctatctctactagtagtacatggaccaatgctttgatatactttcttttacatgctttaatgattttattctacttctcttgttccatatccagtttttttatatttttatttttatctttttttatataatttttt

SEQ ID NO: 87626 - DNA, 540 bp, Zea mays
  unsure (1)..(540): unsure at all n locations
cttgttgaagaggcttnnntgttatggggactgaaaacanagtattgataacatagcatgntgtaccggtttcgattcccggtcgacccagcgtccgaaaaccctaaccctttcaccgccgccttttccgccacccagcgctggagctcctcgcgggctgctatcgcgcgccgcaacgccaccatgaagttcaacatcgcgaacccttccaccgggtgccaaaagaagctggaaatcgatgacgaccagaatctgcgtgccttttatgaccgaaagatatcccaggaggtcagtggtgatgctctgggtgagtgagttcatggtttattttttaattttattgatttattttttttttttttttttatatttatttttataattatttttttttgtttattttgttatttattatattattttttaattttttttttgtatttttatttatatatattattttttttttctttattttttattttcttttttttgtgttttttcttttttttttattacttattttcttttgttttcttt

SEQ ID NO: 87627 - DNA, 512 bp, Zea mays
  unsure (1)..(512): unsure at all n locations
aggatgctcggtgtagtgagnttgggactatgtccagttactacgtatactgctcggcttgacgccacgcgtccgctacctagcaacgcgcagtaagcagcgtgtgcaaagctactagcgcccggctagcttggccatgtacatcggtggattgtccctctcaacagtcctctgtccgactccatctcacgcatgagcttgccgtagtggactctgtacgtgcaggtgatggaccctgacacttatgatcagttctacttctaccctctgtactacaccaatacgtgttcgtaggacctgctgtcgctttgacctttgttgaggctggtgctgtacaggatctttgacatcttcttcaacgagaactagcatttggtgttctgtccttttcttttgtttgcctatgatctactactcttacgactattattctgttttgcctgttgttcttcttctccttcactttattcttctttctgttatctatctacctgatgctttcttttaatttt

SEQ ID NO: 87628 - DNA, 499 bp, Zea mays
  unsure (1)..(499): unsure at all n locations
nggagaggngtctcctacgaggcatagtacgctctaccggttcggaattcccgggtcgacccacgcgtccgccatccgcacctctctccatctccctgctcctccgcctccttcttgatccagccaagccagggatcgccatgtcggactcggaggagcaccacttcgaatcgaaggccgacgccggagcgtccaagacctacccgcagcaggctggcaccgtccgtaagaacggcttcatcgtcatcaagaaccgcccctgcaaggttgtggaggtttctacctcaaagactggtaagcatggccatgccaaatgccactttgttgccatagacatattcaacgggaaaaagcttgaagatattgttccttcatcacacaactgtgatattccgcatgtgaaccgtactgagtaccagctgattgatatatcagaggatggatttgtgagccttcttacttcagatggcaacactaaggatgatcttagactcccacg

SEQ ID NO: 87629 - DNA, 495 bp, Zea mays
  unsure (1)..(495): unsure at all n locations
aggtctcagtttgtatcttntgtaggatgcttatcgatcggtataactagctggacccacgcatgcgtcggccgcacctctcttcatctccctgtgccttcgcctacttcttgatccagccaatgcagggatcttcatgtcatagggggatgaacaccacttctaatcgaaggccgactccggagcgtccaagacctacccacatcatgctgccaccgctcgtaagaacggtttcatcgccatcaataaccgaccctgcatggttgtgaaggtttctacctcaaagactgctaatcatgctcataccaaatgccactttgtggccatatacatatccatcggtaataatcttgaagataatgattctttatcacacatctgtgatattccgcatgtgaacctttctgcataccatcttattgatatatcttaagattgatttatgagccttcttacttcaaatggcaacactaatgatgatcctatacttccact

SEQ ID NO: 87630 - DNA, 506 bp, Zea mays
gagaaggagggtttttcacagcagggaggcggacggtaacgcttgtaccggtccggaattcccgggtcgacccacgcgtccgagcaaccggtccagcactttcacgctcagctccagcaatggctgcctccaccatggcgatctcctccacggcgatggccggcacccccatcaaggtgggctccttcggcgagggccgcatcaccatgcgcaagaccgtgggcaagcccaaggtggcggcgtccggcagcccctggtacggccccgaccgcgtcaagtacctcggccccttctccggcgagcccccgagctacctcaccggcgagttccccggcgactacggctgggacaccgccgggctgtccgccgaccccgagaccttcgccaagaaccgcgagctggaggtgatccactcccgctgggccatgctcggcgcgctcggctgcgtcttccccgagctgctctcccgcaacggcgtcaagttcggcgaggccgtctggttcagt

SEQ ID NO: 87631 - DNA, 493 bp, Zea mays
cggtgtgaaaaagcggggtgggaggaaaggttgtaccggtccggaattcccgggtcgacccacgcgtccgatcaaatccacggtttaataacgaaccgtgttaacttaccataacaacaactcaattgctatcgaattccttcctatcgaattcctatagtaaaattcctataggatagaacgtacacagggtgtacacattatatatgaatgaaacatattcattaacttaagcatactcctttttttatttaatgagttgatattaattaaatatctttttttttagatttttgcaaaggtttcatttacgcctaatccatatcgagtagaccctgtcgttgtgagaattcttaattcatgagttgtagggagggacttatgtcaccacaaacagaaactaaagcaagtgttggatttaaagctggtgttaaggattataaattgacttactacaccccggagtacgaaaccaaggatactgatatcttgg

SEQ ID NO: 87632 - DNA, 496 bp, Zea mays
cagtctcttacacgccgggacgaaggaaagtattaccggttcggaattcccgggtcgacccacgcgtccgcacgacgcacgcagagccgcagagatccgtcacactgcaagttttgaaaactgaactgtaagatggcatcagcagagctttcccgtgaggaaaatgtgtacatggcgaagctcgccgagcaggcagagaggtacgaggaaatggttgagttcatggagaaggtagcgaaaactgttgactcggaggagctcactgtggaggagcgcaacctcctgtctgttgcatacaagaacgtcattggagcccgccgtgcctcatggcgcatcatctcctccatcgagcagaaggaggagggtcgaggcaatgaggaccgtgtaacactcatcaaggactaccgtggcaagattgaaactgagctcaccaagatctgtgatggcatcctcaagcttctcgaatctcaccttgtgccgtcttccaccgctcccg

SEQ ID NO: 87633 - DNA, 496 bp, Zea mays
gagaggacggtctctgattaagcgggaagaggggacgggagagcttgtctcggtccggaattcctggctacgccagacggtcggaacctcagcttagaggaccggatgatcggacgacggcgagatggcaagcggggaagaaggcaagggcgagacggtgctggtcaccggggccagcggcttcatcggttcgaccctcgtccgcggcctcctcggccgcggctacaacgtccgcgccggcgtcctcgaccccgacgacagggcggagacggaccacctcctcgcgctcgccgccggcgccggccgcctcagcttcttccgctgcgacctcctggacagcgccgcgctgctcgacgcggcaagggggtgctcgggcgtcttccacctcgcgtcaccctgcaccgtcgaccccgtcaaggacccccagaatcagctgatggtgcctgcggtggaagggacgctgaacgtggtgcgcgcggtcaaggacgccggcggt

SEQ ID NO: 87634 - DNA, 490 bp, Zea mays
  unsure (1)..(490): unsure at all n locations
nggggatgtttaaaagacggcgaaggatggcttctaccggtccggaattcccgggtcgacccacgcgtccggtaaggttgaacacttattcgtggtacctggctctgcaaggcagttcaaaattgttcttgacttcctaggtttggtggagaaattttactacctttctggaagatatgaccttgagcttaccgttggtgatgctgtaatggaaaattcatttctacgacctcttggccatttggagttggacctgccagatgccccagaaaaagccccacgtcctcctgcacaagctgttgacccattctcaaaatttgggccaaaggcagagatatcacatatattccgcgcaccagagaagaggccacccaaggagctctcgctagcgttcacgggtctcacgcttctgccgtttattggattcttgatagggctcgttcgtcttggagtgaacttgaagaacttcccgtccttgccaggaccggcc

SEQ ID NO: 87635 - DNA, 496 bp, Zea mays
cacagttgataaccgacagagaggacggtagttatggttcggaattcccgggtcgacccacgcgtccgggtccggctctgaaaaaaactcttgaaaacaattacttcatcatctttcgtcgttggggtggtggtggcggctacggcggcggcggcggcggctggagggactgatgtgtggccccatcctggcttctgccgagttatcttatctatctatagtatcgtgttaccgttcgcttctgtcaccgtgttagtgtccgttctacctttggattaggtgttggtaccccttttgttcgctttgggtgctcccgctatgaaacgagacgagagaagaatgagcaaggtttttgttcgcatcaaaaaaaaaaaaaaaagggcggccgctctagaggatccaagcttacgtacgcgtgcatgcgacgtcatagctcttctatagtgtcacctaaattcaattcactggccgtcgttttacaacgtcgtgactggga

SEQ ID NO: 87636 - DNA, 494 bp, Zea mays
  unsure (1)..(494): unsure at all n locations
ngagttgaacacgacaggcggacagtagtctccggttcggaattcccgggtcgacccacgcgtccgtactggagctctttttctattatttctttctacgctatccttaatagggggttggttacatctacaacccaaatggaagccaagcctttcgtggttcaaaaacgccgaatctcgtctgaatcatcatttgtcaggacttttcggagtaagttctttggcttggacaggacatttagttcatgttgctattcccggatccaggggggagtacgttcgatggaataatttcttagatgtattaccctatccccaggggttgggtccccttctgacgggtcagtggaatctttatgcccaaaatcctgattcgagtaatcatttatttggtaccactcaaggagcgggaactgccattctgacccttcttgggggattccatccacaaacacaaagtttgtggctgaccgatattgctcatcatcatttag

SEQ ID NO: 87637 - DNA, 494 bp, Zea mays
gaagttctacccgccagacgtggtaggctgctaccggtccggaattcccgggtcgacccacgcgttcgatctggtttcgttgacccgattcgccacgaagccgcactgcgagagagggacgcggtccgttgtcctgggattgtacgcaatccttccgtcgctgcgaagctgatccctcgtgtgcgccatggccgccagcgtcgacgtggaaaacctcgaccccaaggtcttgaaatgcgagtatgcagtccgcggcgagattgtcatccatgctcagcgctagcagctacaactacagacacaaccagggtctcttccttttgatgagatcctgttctgcaacattgggaatcctcaatcccttggtcagcaacctgtgacgctcttcaaggaggctcttgctctttgtgatcatccatgcctgttggaaaaagaggaaaccaattcattgctcagtgctgatgctatgcctcgagcaaagcagattcttgcaa

SEQ ID NO: 87638 - DNA, 496 bp, Zea mays
  unsure (1)..(496): unsure at all n locations
ngggagaggtcgtcacaagccggggagaaggtagtctcggttcggaattcccgggtcgacccacgcgtccgcctctcaccttttcgctgtactcactcgccacacacaccccctctccagctccgttggagctccggacagcagcaggcgcggggcggtcacgtagtaagcagctctcggctccctctccccttgctccatatgatcgtgcaacccatcgagctacgcgcgtggactgccttccctgggtcggcgcaggaggggatcggaaggatggcggcgtcggtttccagggccatctgcgttcagaagccgggctcaaaatgcaccagggacagggaagcgacctccttcgcccgccgatcggtcgcagcgccgaggcccccgcacgccaaagccgccggcgtcatccgctccgactccggcgcgggacggggccagcattgctcgccgctgagggccgtcgttgacgccgcgccgatacagacgaccaaaa

SEQ ID NO: 87639 - DNA, 496 bp, Zea mays
gaagtctggtaaagacgggacggatgatagtatcggttcggaattcccgggtcgacccacgcgtccggaagcaaaaagggagacatctttagggtcaatatcatccaatgtttctgatgccagaagtaatatgattggagagattgagaacagatcaacattcctcttagctgtaaaagctgatgtggagacacaaggagaatttgttgaatctctagcaaatgaggtccgagcagcaagcttcataaatattgacgacgttgctgcatttgtaaattggttggatgaggagttgtctttcttggttgatgagagagcagtgctaaaacattttgattggccagagagcaaaacagatgcaataagagaagcagcttttgagtaccaggatctgataaagttacagaacagggtttcatcctttactgatgatccacaacttgcatgtgaagaggctctcaagaagatgtattctttgcttgaaaaagtggagcag

SEQ ID NO: 87640 - DNA, 500 bp, Zea mays
gaggagacggtttcttacaccgcccatagatagttattctcggtctcggaattcccgggtcgacccacgcgtccgcacgcgctcaccgtgctgcctccaccatcgatggctctccctcccggcgcaggggcggtggcgccggcgacgcccttcgccgcgaatccgtgccgtctccggcgggcgtctggtcctcctgccgccgcccttcggctcgggccgctcttctggccatgggaaaaggtgaaaatcggtcccctttctgtttcccccatgggttttggaacatgggcatggggaaaccagctactttggggctatcaagaaagcatggacaacgaacttcaggattgcttcaatctggctctaaggaatggcataaacctttttgacactgctgactcttacggaactggaaggctgaacggacagagcgaacggctactcggtaaattcatccttgagtttgaagggaggattaaatctccagatgatgtggtcat

SEQ ID NO: 87641 - DNA, 498 bp, Zea mays
cgtagagtcaccgcaacatagatagataggccactgcgccgtaattcccgggtcgacccacgcgtccgcgcgagtgagtgaacaccagccgtatattcctgaccccgaccgatcctcgcctgctggaggcatggcgacctccgcggcgctctccaccgccgccaatcccacccagctctaccggtcccgcgctttgctgggcaagccggtgaaggggcttggcctgagcatgggccgcgagcgcgcccagcggagcattgtgtgccaggctgcgagcagcatctccgccgaccgcgtccccgacatggagaagcggaagctgatgaacctcctgctcctcggcgccatctcggtgcctaccgtcggcatggtacgaccctacggctccttcttcgttcctgcctgctacgggaacgccggcggtgggacccacgcgaaggacaagctgggctacgacatcactggagatgcttggctcaacattcacggtaccaacgg

SEQ ID NO: 87642 - DNA, 503 bp, Zea mays
agaaggctgatacagcggggggcgcgagggtaggctggtaccggttcggaattcccgggtcgacccacgcgtccggccaaaaggcatcaccgccgcgacgactatggcagcctcgctccaagccgcggccacggtgatgcagccggccaagatcggcggccgggcgccctttgcctcgctgccgtcccgcccgtcgtcgcaactcgcctgcagggcgttcggcgtcgacgccggcgccgccaggatcacgtgctccctgcaagacgtcgccagcaggtgcgtcgacgccgggaagctcgccggcttcgcgctcggcacctcggcgctcctcgtctcgggcgcgagcgcggaaggcacgcccaagaggctgacctacgacgagatccagagcaaaacgtacatggaagtgaagggcacgggcacggcgaaccagtgcccgaccatcgacggcggcgtggaatcgttcccggtcaaagccggcaaggaccaaatgaagaagctgc

SEQ ID NO: 87643 - DNA, 586 bp, Zea mays
  unsure (1)..(586): unsure at all n locations
gttggaagctcatcttaacagcccagggcagataggtaggtcttcggtctcggtaattcccgggctcgactccacgccgtctcgctgctcacgctctctctaatattcgttcaacgttggctccacnnttccaattattagtcagatgacaaaatgtggataggagggtgaaaagtagcgtattagaaaatgggatattttnnatggttgtanngtggggtatttaggggaagggggatttagggggtaaaccgcctgtnnacagagtggcagatatttaggggggaagaagaacccgctgacgtgtgcacgtnngagtgggatattagggagaagaaatcttaggggtaaccccgcttaagaccagtctaaaaggctcatnnctgtgtgtatatctgtcanntgtcatgtcnnatgtcatgtgtgtctggtattatgnaatggcttgcgtcgtcgtaaatgtaatggtcgtggaccaatataatattgcgggtgttgcacctttcaacgtaaccttactaagtaccttgctatttgcgatataatatgtacctttagttataataattaaaaaaaaaaaaaaaag

SEQ ID NO: 87644 - DNA, 494 bp, Zea mays
cagtgattatggaacatcgtagctagctcaggttcggaattcccggctcgacccacgcgtccgctctcaccctctctaatattgttcacgtgggcccacttccaattattagtagatgaagaatggataggaggtgaaaagtaggtatagaaaatgatattttatggttgtagtggggtataggggaaggatttagggggaaacgctgtacagagtggagatataggggggaagagaacgctgacgtggcacgtgagtgggatatagggagagaaatttaggggtaaccgctgaagacagtctaaaggctcatctgtgtgtattctgtcatgtcatgtcatgtcatgtgtgttggtatatgatggcttggtcgtcgtaatgtaatgtgtggacaataaatatgcggggttgcacctcaacgtaacttactagtacttgctattgcgatatatatgtactttattataataataaaaaaaaaaaaaaaaaagggg

SEQ ID NO: 87645 - DNA, 494 bp, Zea mays
  unsure (1)..(494): unsure at all n locations
cagtgtaaagcggggagggaggaagttatggttcggaattcccgggtcgacccacgcgtccggcggatagagcagcagaggcagcgacacgatcgcgagcgcacgcacgtaagcacgtggtcggaagctcaagttagaagaagcaccagtgcctgatcgatggcggcccaggctctcctctccggccggcagctgctgggccgccccgtgcagtcggccgtctctaggtcgtcggcgaggaaggcgcccttcgtcgtcagggccagctgcagccctccagccaagcaaggtgccgacaggcagctgtggttcgcgtgcaagcagtccctctcctacctcgatggcacgctgcccggcgactatggcttcgacccgctgggcctctcggacccggagggcaccgggggcttcatcgagcccaagtggctggcctacggcgaggtgatcaacggccgatacgccatgctgggcgcggtgggcgccatcggcccggn

SEQ ID NO: 87646 - DNA, 500 bp, Zea mays
  unsure (1)..(500): unsure at all n locations
gagaagaagatatcttaacgcgggcgtggaaggtaggtattaccggtccggaattcccgggtcgacccacgcgtccgcctgaactgatccttgggttcaacgccttcttgcctaagggctatgcgatcaagctagaagaagagaagaaacctgtcgattttgtggaagctatcaatttcgtgaacaagataaagaatcggtttcagcatgatgaacaagtttacaaggcattcttggacatcctcaacatgtaccgcaaggataataagtctatccaagatgtttaccatgaggttgctatgctgttcaaagaccataaagatttgcttgaagagttccagcacttcctgcctgatacttcagtggctccacaagcagtggcctcaaagggtggtttggttaagcgggaggacaggagctctttagtgcctcctgcaaataagatccttcacaatgataagagggacagagtttacctgtcacatgctgaccgtgattnt

SEQ ID NO: 87647 - DNA, 501 bp, Zea mays
tgagtatgttccacagcccacgatagtagcgaggtcccggtccggaattcccggctcgacccacgcgtccgcctgaactgatccttgggttcaacgctttattgcctaagggctatgcgatcaggctgggagaagagaataaacgtggcgattttgcgcaagctatcaatttcctgaacatgatatccaatcggcttcagcatgatgaacaagttcacaaggcattcttggacattctgaacatgtaccgcacggataataagtgtatccaagacgtttaccatgacgatgctatgctgttcaaagaccataaagatctgcttgaacagttccagcacttactgcctgatactccagtgggtccacaagcagttgtctcaatgggtggtttggttcaacaggaggacacgagcgttatagagcctcctgcagctaagctccttcacagtgataacaaggacatagtttacctgtcacatgctgaccgcgattttagcgttc

SEQ ID NO: 87648 - DNA, 498 bp, Zea mays
  unsure (1)..(498): unsure at all n locations
ggtgtagaaggtattataaggaggggcgaaggaacagcaantctcggtccggaattcccgggtcgacccacgcgtccgggcacaggcagcagctaacatccctcactctcggtacctgacctgaccacgagagcaacatgggcggaggacacgacatgcacgggcagcactacggccacaacggcggcgtgaagggcttcgtgtccaacctcgtccacggcggcggcggccatggccatggaagcggctacggccatggccatggaaacggctacggccatgggaatggcggctacggcggcggccacgggtaccctcctcccgccgccgccggcgcgtaccctcatccgcacggcgcgtaccctcacccgcacggcggccacgggtaccctcctcccgccacctaccccgcgcactcggcgcactacgggcacacggggtcgtaccacaccagccacaacagctacggcggcggctgcggccaccacggcatctacc

SEQ ID NO: 87649 - DNA, 490 bp, Zea mays
  unsure (1)..(490): unsure at all n locations
agtctttaacagaggggggatgggttggctattctcggtctcggaattccgggtcggcccaaggcttccggcaaacattttgggttccttgggtaagggaaccggccaagatggggttccaccggcacaagccttggccggggttattcctattggctttgggccggaaccaagcagaaggcctgtggtgatgatggccttgggacataacttccagggcaggaagaaggcccagaagacgaactcaaaggttcaagaattcaccttgcaatgtgggactttggtcagtgtgatgttaaaagatgcactggtcgtaaactttcaagatttgggcttttgaaggagttgagagtgaccatnggttctgcgtggtgttgttctcagccctgttggaacacagtgtgtatccaaggaagatcatcctattgtgcaaagaaaaggattggctgtggttgattgttcctgggcacgtttaagtgatgtccctttt

SEQ ID NO: 87650 - DNA, 505 bp, Zea mays
  unsure (1)..(505): unsure at all n locations
ngagcgttatacacgaccgggacggacgagtagtttcggtctcggaattcccgggtcgacccacgcgtccgtcacactcgtagagagaaggaaaaatatccccaaaccctagctcccgatctcgatggcgaaccctcgcgtcttcttcgacatgaccgtcggcggcgccccggcgggccggatcgtgatggagctgtacgccaacgaggtgcccaagaccgcggagaacttccgcgcgctgtgcacgggcgagaagggcgtgggcaagtccgggaagccgctccactacaagggctccaccttccaccgcgtcatccccgagttcatgtgccagggcggcgacttcacccgcggcaacggcaccggcggcgagtccatctacggcgagaagttccccgacgagaagttcgtgcgcaaagcacaccgccccggtgtgctcttcatgggcaacgccgggcccaacaaccacgggttccaagtctttatctggaccggcgcgaccccc

SEQ ID NO: 87651 - DNA, 502 bp, Zea mays
  unsure (1)..(502): unsure at all n locations
gtggggaagatgctcgtaaaaagcaacacaganaggtaggtctcggttcggaattcccgggtcgacccacgcgtccggtcaaagatataatttcagatctaaaagatggccaggcttccttagtttgtgatggtgtggggtttcatgtaagatgtgcatgtcatatactaaatttagttgctagagatgggctggctgtaattttctaaacaattgacacgatcaaagttctcgtactagctgagaatgtatcaccattgcagtggaaggaacttatgaagggtgctaacgagtcagaactagatacatggaggggcatctcactagatggttaccctgatggagttcaactgatttaatgctggacgatgccttgtactacaaggatgcttttgcagagcttaagtattcacatcgtgatatgtatgtcgaaactgatcgatcttcagattagtgggacatggcacttgaaatctggtaatgctagtatccagggtattgg

SEQ ID NO: 87652 - DNA, 501 bp, Zea mays
  unsure (1)..(501): unsure at all n locations
gggggggaaggtatctacggggggggtggaaggaaaggttgtaccggtccggaattcccgggtcgacccacgcgtccgcggattagttgtactgtacattgttcctgcgaagacactgggtcgtccgggtcaatcggcagcttgaaccagccatggcggcgcaccggccgaacgccgcggcgccgctgctcgccaagctcgacgccaccgccacgccgccggcgaagcgcaacaagtaccccttcttctgcgccgtgctcgcatccatgacctccgtgctcatgggctacaacgtcgcggtgacgagcggcgcgcagatcttcatggcggaggacctcgggatgagcgacgcgcagatcgaggtgctctcgggggtcatcaacatatactcgctcgtcggcgcgctgctggcaggctggacctccgaccgtctcggccggcgcctcaccatcgtcctcgccaacgccttcttnctcgtcggcccgctcgccatggcgctgg

SEQ ID NO: 87653 - DNA, 499 bp, Zea mays
agtatgattcttcgaccatcgagggaaggagtaccggtccggaatcccgggtcgacccacgcgtccggcgccttcctgcccctatctagctagctttcccgatcctgcatcgcggcggagaggggcgcctacaccacgccgctcgcgtcggcggcggcgctgcttctgctgctgctcgcgccgctcgccgcggcggcggacagcatgtcgatcgtctcctacggcgagcggagcgaggaggaggcgcggcggatgtacgccgagtggatggcggcgcacggccggacctacaacgccgtcggcgaggaggagcgcaggttcgaggtgttcagggacaacctccgctacgtcgacgcccacaacgccgtcgtcgacgcgggcgtacactccttacggctcgggctcaaccgcttcgccgacctcaccaacgacgagtaccgcgccacctacctcggcgtcaggagcaggccgcagagggagaggaggctcggtgacaggt

SEQ ID NO: 87654 - DNA, 491 bp, Zea mays
gagaagaaggtttaaaaagacagtagtatgctctaccggtctcggaattcccgggtcgacccacgcgtccgctcccggtgaccatccgactcctggaccctcccctccacgagttccttccagaagggaacatcgaggacattgtaagtgaattatgtgctgagacgggagccaaccaggaggatgccctcgcgcgaattgaaaagctttcagaagtaaacccgatgcttggcttccgtgggtgcaggcttggtatatcgtaccctgaattgacagagatgcaagcccgggccatttttgaagctgctatagcaatgaccaaccagggtgttcaagtgttcccagagataatggttcctcttgttggaacaccacaggaactggggcatcaagtgactcttatccgccaagttgctgagaaagtgttcgccaatgtgggcaagactatcgggtacaaagttggaacaatgattgagatccccagggcagct

SEQ ID NO: 87655 - DNA, 486 bp, Zea mays
  unsure (1)..(486): unsure at all n locations
aggtattgacggcggggacggatggcatctctcggtccggaattcccgggtcgacccacgcgtccgggaaaagatcggctacagacaggagaggctctgtctccgccaggcggcggccaccaggtcacccctggcagctaccctccgcggcaagacttctacgagcaccctcgccccccatggccggctcagcttcagccacaccacgtcgctgcagacggcgcccgggcaccgcgggctccgagcagggtgggcggtgcgcgtgctcccgctgacggaggagaacgtggagaaggtgctggacgaggtgcggccgagcctgatggcggacggcggcaacgtggcgctgcacgagatcgacggcctcgtcgtcgtgctcaagctgcagggcgcgtgcggctcctgccccagctccaccatgacgctcaagatgggcatcgagacgcgcctncgcgacaagatccccgacatcctcgaggtcgagcc

SEQ ID NO: 87656 - DNA, 505 bp, Zea mays
agagaggaagatgttagtacaccgcaccatgggaaagtaggtctcggttcggaattcccgggtcgacccacgcgtgcgctcgacaatggcactccaggcagcctactagtacctgcagcaggccgtcggccatggcgcgtggtcgtccacgcagacgctgacgctgctgctcatcgacgtacccaccgtactactgctgctagcgtccctcgccaagagcacgtcgtcgtccggtaggggcaagccgtcgctccctccctcgccgccgggcaccctccccatcgtggggcacctacaccacatcgggccccagacccacatctcgctccaggagctggtggccaagtacgggcacaacgggttacgtttcctccgcgccggcgccgtgcccaccctgatcgtgtcgtcgcccagcgccgtcgaagccgtgatgcgcacccacgaccacatcttcgcgtgccggccgtggtccatggcctatcacattctccgctacaacacctgc

SEQ ID NO: 87657 - DNA, 502 bp, Zea mays
  unsure (1)..(502): unsure at all n locations
gaggaggaaggtatcttacaagtaaggtggaaggtaggcatgcaccggttcggaattcccgggtcgacccacgcgtccgagctcgtcccgaactcgaacaagacagtcaaggcgtcgatgctggacgaggtgatcgactacctgaagcagctgcaggcgcaggtgcagctgatgagccggatgggaagcatgatgatgcccatggcgatgccgcagctccagatgtcgatgatggcccagatggcacagatggcgcagatggcgcagatggcccagatgaacatgggctccctcggccagccgggctacgcaggcctcacgccgcccatgatgcacccgccccccttcgtccccgtgtcctgggacaccaccgncaccgtcaccaccttcctcgccccgcaggccggcagcggcacggtgccagcggacgccttctacgccttcctagcttgccaagcgcagcagaacgggcagcagcaaccgggtagcatggaggcgtaca

SEQ ID NO: 87658 - DNA, 495 bp, Zea mays
  unsure (1)..(495): unsure at all n locations
ngtagaagctcttaaaagggggagagaagtaaagctttaccggtccggaattcccgggtcgacccacgcgtccgcgccgatcacacattggacttgcactggtgcttgctcataattactagttcatcagcaaacaacaaacaatggcaccgaggctagcgtgcctcctagctctggccatggcagccatcgtcgtggcgccgtgcacggcccagaactcgccgcaggactacgtggacccgcacaacgcggcgcgcgccgacgtgggcgtcgggccggtgtcctgggacgacaccgtggccgcgtacgcgcagagctacgcggcgcagcgccagggcgactgcaagctgatccactccggcgggccctacggcgagaacctcttctggggctccgccggcgccgactggtcggcgtccgacgccgtgggctcctgggtgtccgagaagcagtactacgaccacgacaccaacagctgcgcggaggggcaggtgt

SEQ ID NO: 87659 - DNA, 488 bp, Zea mays
  unsure (1)..(488): unsure at all n locations
ngggaagtatatagggggggggggatgagaagtctcggtccggaattcccgggtcgacccacgcgtccggtctcaccctccctccctcacacaaataataaggaaaggtcccgcccttttcctccgacatccacaaggggggaggggaaaacacgtacattcacccggcggcaataatggcctcggttccggctccggcgacgacgaccgccgccgtcatcctatgcctatgcgtcgtcctctcctgtgccgcggctgacgacccgaacctccccgactacgtcatccagggccgcgtgtactgcgacacctgccgcgccgggttcgtgaccaacgtcaccgagtacatcgcgggcgccaaggtgaggctggagtgcaagcacttcggcaccggcaagctcgagcgcgccatcgacggggtcaccgacgcgaccggcacctacacgatcgagctcaaggacagccacgaggaggacatctgncatgtg

SEQ ID NO: 87660 - DNA, 495 bp, Zea mays
gatggtcttcgtcctggtcatagcttggaacgtaccggttcggaattcccgggtcgacccacgcgtccgcaccagccgagttcgcagcggcactccatgtccagcagtctcttcggctcttcgttgggggtgcgtggacaccggaaattacctcggggattgcgttcctgatctaaacccggcatgaagtgctgctcacagcgtttgctgctactgctcctgctgctgctggcatcgtcgtcggtactgtccgtcgaggttgccgcgcagcagacttgccctgccgacctcgacagccaatgcgacggtggtgcgcctgatgactgggagggggaatagttccccggcgttccgaaaatcacgtctgaaggtgcaacaagcaagaaccctgttgcttataagtggtataacactgaggaaggcattctcggaaagaagatgaaggactggatgcgcttcagtgctgcgttctggcacacgttccgtgggactggc

SEQ ID NO: 87661 - DNA, 513 bp, Zea mays
  unsure (1)..(513): unsure at all n locations
gaggaggagtgtnnttttacgacgacgaacgacagtaagtatcgtccggtacggcccgggtcgacccacgcgtccggtgaacgttctcgtcatctattgacatctggaatttctgagattccagaggaggcaacttttactaacgttgaacagtttctggaacctcttgagctatgttatagatcattatgtgcttgtggtgacaaacctatagctgacggaagtcttcttgatttcttgcgtcaagtatcaacttttggtcttgcacttgtgaagcttgacatcaggcaggaatctgatcgacacacagatgtccttgattcgataacgacacatcttggaattggctcctatgctgaatggtctgaagagaaacgccaggattggttggtgtctgaacttgagggcaaacgtccaattgttggttctgatcttcctcaaactgaaaagactggtgatgttttaagcacatttcatgtccttgcagagctttcagcagattgctttggggcc

SEQ ID NO: 87662 - DNA, 516 bp, Zea mays
  unsure (1)..(516): unsure at all n locations
gagaagaagggtnntnaatcgacaagcatcgacggtaggatcggtctcggtattgccggctcggctcgacccacgcgtccgctgcactccagcactgaacacttgattgattcagtaggtagctagctagctgaagcacaatggatcctaccaagttccgtccgtccagtagccacgacacgacggtgacgacgacgaacgctggcgctcctgtgtggaacgacaacgaggcgctgactgtggggcctcgcggtcgcatcctgctggaggactaccacctgatcgagaaggtggcgcacttcgcgcgggagcgcatcccggagcgcgtggtgcacgcgcgcggggacttcgccaagggcttcttcgagtgcgcccacgacgtgacgtcgctgacgtgcgccgacttgctgcgcgcgctcggcgtgcggacgcccgtgatcgtgcgcttcttgacggggatccacgagcggaggtccacggagacgatccgcgacccgcgcggattcgccgtgaagg

SEQ ID NO: 87663 - DNA, 485 bp, Zea mays
cggtttaaaagaggaggaaggtaagctctaccggtccggaattcccgggtcgacccacgcgtccggttctcatgatccatattgttatggatatatttgagatcatgatttctatgattaattatcttttatatgtcatcatcataatgttaatttatggaattaaaatgatatggaaaatgcctataattttaacacaccaaaaacctaatgttaggcatttttctgtcagtggttttgctgctgtgctaaagcctgatccatttgatggtaaaaacttcttgatttggaaagctaaaatggtattgtggcttactgtaatgtcttgttttcatgccgctgagggcaagcctgtcaacttacctcctgaggatgaggctaagtttaaggctgaagacaacctctttcgaggagcagtaattagcgcacttgatacaaaattccagaaaagctatatcatccttcctacagggaaagagctgtgg

SEQ ID NO: 87664 - DNA, 518 bp, Zea mays
tgggcgtctgattatcgcagtgactgccatgctctaccggttcggaattcccgggtcgacccacgcgtccgctcgtctccctcccaaaaaaaaactgctcggttgctgctcctgctccgccgcgccggcatcatgtgtggcatcttagccgtgctcggttgctccgactggtctcaggcaaagagggctcgcatcctcgcctgctccagaaggttgaagcacaggggccccgactggtcgggcctctaccagcacgagggcaacttcctggcgcagcagcggctcgccgtcgtctccccgctgtccggcgaccagccgctgttcaacgaggaccgcaccgtcgtggtggtggccaatggagagatctacaaccacaagaacgttcggaagcagttcaccggcacacacaacttcagcacgggcagtgactgccaggtcatcattcccctgtacgagaagtacggcgagaacttcgtgggacatgctgacgggtggtcgcgttcgggctctacaacacc

SEQ ID NO: 87665 - DNA, 523 bp, Zea mays
  unsure (1)..(523): unsure at all n locations
nggaggggtctgaaaaccgcatatactgcactgctctanccgcntngggtcggaattcccgggtcgacccacgcgtgcggagagatctcgatccgcacaccttacgcctctcttcctctcgccccaaggacaacgaaaacatcaaacaagagaaccaaaggaaacagagcaagagcatcgctctcgaagcaaaacgcgcaccacgccgtcgccggccggccacttcgcacgtacgtaggacgcgcacgcaccggtgcatatatggggctcctgaaccagctgtgggacgacacggtggccgggccgcgcccggactccggcctcggcaagctccgcaagtacgcctncttctccccctcgtcgtcgtcgtcggcggcggtggcggcggcggcggcggcgggctccgcgccgnctncgggcgccgtgacgcggagctggaccatgctgcggcggcccgcggcgctgtccgtcgtcacgtcgncccgcagcgagtccagcttcgcgccgtcgtcccccgtcgccg

SEQ ID NO: 87666 - DNA, 518 bp, Zea mays
gggatacgtttgttaccgaggcggggaaaggtagtgttgtaccggtccggaattcccgggtcgacccacgcgtccgcaaacatagaagcaggatcaactgcgtgtgagcctcagccaaaaaaagtaaaaaataataataatgtttgtgcttcaatttctgaattctgataaaaaatatatcgactagtgcatatagaagtactcactcagtcctaaaataaaattagttttatcttttagttgatttatacataattaatgtatttgttttacgtacatgtctagatttattatcgtctatttgaacatagaaataaaaatcgaaagctaaaacgactaatattttgggataatattttgggacgggtgaagtatcaaatatttactgcaagatttgagtttgggaggaggcgtcgatgagaaaccgtccaaagtggaatagattttactataatctgacagtcaacttaattcatttcttcgagggcatctgcacgttagaaattgatgttacctgg

SEQ ID NO: 87667 - DNA, 514 bp, Zea mays
  unsure (1)..(514): unsure at all n locations
aggttttgttaagagggggtgtatagtatgctctaccggtccggaattcccgggccgagtgcgaaccaagcagaccacagcaagaagcgtagtcttttccggaaggaaaggcgcggagcaagatgtcgtggcaggcgtacgtcgatgagcacctgatgtgcgagatcgaaagacaacatctcaacgccgtcgccatcggtcgtcacgaaggcagcgcttgggcgcaatccgagagctttcccgagttaaagcctggagaggttgctggtatcataaaagactttgatgaacctggtacttttgcaccaactggtcttttcgttggaggtgcaaagtacatggtgatccaaggtgaacctggagttgtcattcgaggaaagaagggcactgggggcattactattaagaaaaccggcatgtncttgaatattggtgtctacgacnagccaatgacttcagggcaatgcgacatggtggtggaataggctctgcgaatacctgatctagcagggcc

SEQ ID NO: 87668 - DNA, 516 bp, Zea mays
  unsure (1)..(516): unsure at all n locations
ggggcagcttgtacccgcggggagggaaagtaagtctggtccggaattcccgggtcgacccacgcgtccgtggcttctgtggttctgcacaccagcacacgcacttgtccccaaacaacggcggcggcgatgagtatctcagaagagcttcccggcgaaggatctgacggtgaggaggaggtcttcatcaacgaggaggacatcatccacgagataaccatcgacgaagaagatctccccgaccgcgacgacgaagatgacgacgtcgtcaacgggatggttgattccgaagacatcgatgattctacatacgcatttcaaggccaccaagatgaagtcttcattgtcgcctgcagtcctacagattcatcacttgtggcttctggaggcaaagatgataggggattcctgtggaggattggatcagaagagggtgccctggagctgactggacataaggatactgtcggcacagtggctttcagttcagatggannatttgtggcttgtgaaagt

SEQ ID NO: 87669 - DNA, 517 bp, Zea mays
  unsure (1)..(517): unsure at all n locations
nggaaggctctgtacagaggggggggggaaagtaagtctcgtccggaattcccgggtcgacccacgcgtccgaagacaccgccctctccttcgctagcggaaccgccctcccctcgccggggtaggggtttcggaggtagacgcccgccatggacgcgttccggaaacagctggacgtgctcatgggcgccaaccgcaacggcgacgtcgaggaggtgagccgcaactactacgaccgcgacgtctgccgcctcttcctcgccggtctctgcccacacgacctctttcagctcacgaaaatggatctcggtccttgttctaagattcattctcttcaactgcggaaagattatgaagaagcgaaagcaaaaggaacagaaaattttgatagagaactcgaggatatgatagaaaggctcattgtggagtgtgacagggaaaatcagagggccctaaacggcttgcagatgatgatgccaatgctgctattgcgatatccgtcctcttgaggtactct

SEQ ID NO: 87670 - DNA, 520 bp, Zea mays
  unsure (1)..(520): unsure at all n locations
ggaaggcttttgtttacgagacgacactgtaatgcaagtactcgttccggttcggaattcccgggtcgacccacgcgtccggtaactcctcagctcggggtttcgcctgaagaagcaggagctgcagtagctgcggaatcttctactggtacatggacaactgtttggactgatggacttaccagtcttgatcgttacaaaggacgatgctatcacatcgagcccgttcctggggacccagatcaatatatctgttatgtagcttatccattagacctatttgaagagggttctgatactaacatgtttacttccattgtgggtaacgtatttggtttcaaagccttacgcgctctacgtttggaggatctacgaattcccgctgcttattcaaaaactttccaaggtccgnctcacggtatccaagttgaaagggataagttgaacaagtacggtcgtcctttattgggatgtactattaaaccaaaattgggattatccgcaaaaaattacggtagag

SEQ ID NO: 87671 - DNA, 517 bp, Zea mays
  unsure (1)..(517): unsure at all n locations
agttttgtctacggaggggggagggagagaaatgttgtaccggtccggaattcccgggtcgacccacgcgtccggctgtcggagctgcgaggcaagcgcccgctgctgcccccggaccttccccagaccgacgagatcgccgacgtcatcggcgcgttccacgtcctcgcggagctcccgcccgacagcttcggcccctacatcatctccatggcgacggccccctcggacgtgctcgccgtagagctcctgcagcgcgagtgcggcgtgcgccagccgctgcccgtggtgccgctgttcgagaggctggccgacctgcagtcggcgcccgcgtccgtggagcgcctcttctcggtggactggtacatggaccggatcaagggcaagcagcaggtcatggtcggctactccgactccggcaaggacgccggccgnctgtccgcggcgtggcagctgtacagggcgcangaggagatggcgcangtggccaagcgctacngcgtcaagctcaccttgg

SEQ ID NO: 87672 - DNA, 523 bp, Zea mays
agggaagagagtctctgtctacagcaaggggggggaatgggtattcctctccggaattcccgggctatagcaaccggtccaacactttcacgctcaggcgctcagctctagcaatggctgcctccaccatggcgatctcctccacggcgatggccggtacccccatcaaggtgggctccttcggcgagggccgcatcaccatgcgcaagaccgtgggcaagcccaaggtggcggcgtccggcagcccctggtacggccccgaccgcgtcaagtacctcggccccttctccggcgagcccccgagctacctcaccggcgagttccccggcgactacggctgggacaccgtcgggctgtccgccgaccccgagaccttcgccaagaaccgcgagctggaggtgatccactcccgctgggccatgctcggcgcgctcggctgcgtcttccccgagctgctctcccgcaacggcgtcaagttcggcgaggccgtctggttcaaggccggctcccagatcttcagcga

SEQ ID NO: 87673 - DNA, 518 bp, Zea mays
gaggtcgtgggtatttccggcacacgtatcgcatcacgcatcggtttaccggctcgacccacgcgtccgctgtggatcagaaactccatccgggacatcgtttaccaggtccggcggcgaagcgagagggtggcatccaagaaagtgtgcgtggtcggcgctggcgtgtcggggctggcgtgtgcccgcgagctgctccgcgagggccacgacgtgacggtcatggagcagagcggcggcgtcggcgggcaatgactgtactacccgagggcggacggcggcgacccaactcgcgctgccggcgcgcacagcagcatgtacacgtgcgtgcggctcatcagccctagggagctcacgggcttctccgacttccccttcttacccagagactacggtaccggccactgccggcggtacccagggcacgctgagtttctgtcgtacattacggacttctgtgacgcgctccgactcatggacgttgacaggctcaacaggcagggtctgcggcggccccc

SEQ ID NO: 87674 - DNA, 518 bp, Zea mays
ggtagggtttgttacagagagggagtatgctatactcgttcggaattcccgggtcgacccacgcgtccggcgctactttgttcaaaatggtgttgttacggatgagtgtgatccatacttcgacccggtcggttgcaagcatcctggatgcgaacctgcttatcctacaccaaagtgtgaaaggaattgcaggggccaaaaccaagttggccagaaaagaaagcttttaaccttggtgcctaccgaataaattcagatccacacgtgattatggcggaggtgttccaaaatgggcctctggaagatgcttttacactttacgaggatttcgcacactacaaatctggagtgtacaagcacattaccgggggcattatgggtggccatgccgtcaagttgattggatggggaaccaccgatgctggagaagattactggcttctggcaaaacagtggaatagaagctggggcgatgatggatacttcaagatcattaggggcaaaatgaatgtggcttc

SEQ ID NO: 87675 - DNA, 512 bp, Zea mays
aggtagagggtttgttaacgtacgacgtatggtgctccctctcggattcccgggtcgacccacgcgtccgggcacggcacggacggcacgaccgagctccagtctgcccccgcccccatccgcacgtccgccttgatccggcaaatggcgtcgccggcgcggcggctcctgcagaccaactccgtgcagtacccgacgctccccgcggccgacccgccgagcccgctggccgtcgactccgacgtggtggtcatcctcgccgcgctcctatgcgcgctcatctgcgtcgtggggctggcctccgtggcccggtgcgcgcgctcccgcgccgcgcccgccgtcgccaggagggggctcaggaagaaggcgctcagggcgctgccgagcctcgcgtacgaggacgccgtggcggcccgggccgcggacggggcggcggaggtcctggcggagtgcgccatctgcctctcggagttcgcgccacgggaggagggtcccgtgctgtcgcagtgcgg

SEQ ID NO: 87676 - DNA, 515 bp, Zea mays
  unsure (1)..(515): unsure at all n locations
aggtagagcgtgttttacgagagggggggggggaggggaaaatttcgtccgaattcccgggtcgacccacgcgtccgcttgctctgatagcttgctccaggacgtacgtacgtacgtagatcgatccatcgatcgctagctagctgacgaccatggcgtccctctcctctgccgccatcaccgccccttccttcacggccgcgcccgctcgcgcagtggtcagcaggaggtccttcaccgtgcgtgcctctctccgcaaggccactgccaccgtcgtcgtggccgttgccgccagcgtcctgcttgccggcggcggcgccatggcccaggaggtgctgctgggcgcaggcgacggcgggctcgtcttcgagcccagccagttcaccgtcaaggccggcgacaccatcaccttcaagaacaacgccggcttnccgcacaacgtcgtgttcgacgaagacgangtggcgagcgccgtcgacgccctcaagatctcgcaggaggagtccttaacgcgc

SEQ ID NO: 87677 - DNA, 512 bp, Zea mays
  unsure (1)..(512): unsure at all n locations
ngggggagagggtttataccgagaggggggaaagtatactcctcgattcccggtcgacccacgcgtccgcccgttcctgcatcgcggcggagatgggcgccttcaccacgccgctcgcgtcggcggcggcgctgcttctgctgctgctcgcgccgctcgccgcggcggcggacagcatgtcgatcgtctcctacggcgagcggagcgaggaggaggcgcggcggatgtacgccgagtggatggcggcgcacggccggacctacaacgccgtcggcgaggaggagcgcaggttcgaggtgttcagggacaacctccgctacgtcgacgcccacaacgccgtcgtcgacgcgggcgttcactccttccgcctcgggctcaaccgcttcgccgacctcaccaacgacgagtaccgcgccacctacctcggcgtcaggagcaggccgcagagggagaggaggctcggtgacaggtacctggccggcgacaacgaggaccttgccgagtccgtcgac

SEQ ID NO: 87678 - DNA, 516 bp, Zea mays
  unsure (1)..(516): unsure at all n locations
nggggggagcgctctattacgggaggaggggggaaagtaatactcgtccggaattcccgggtcgacccacgcgtccgcgttcccgttcaaggccggcaagtaccatatgaagaagctgtgcctggagccgacgtccttcaccgtcaaggcggagggcatcgccaagaacgccccgcccgagttccagaagaccaagctcatgacccgtctcacgtacacgctggacgagatcgagggcccgctcgaggtcggctccgacggcacgctcaagttcgaggagaaggacggcatcgactacgccgccgtcaccgtgcagctcccggcgggcgagcgcgtgccgttcctcttcaccgtcaagcagctcgtcgccaccggcaagcccgagagcttcggcgggcccttactcgtgcccagctaccgcggctcctcctttctcgaccccaagggccgctgcggcttcaccggctacgacaacgccgtctcgctccccggcggggcagaagtgaccaggaagaa

SEQ ID NO: 87679 - DNA, 512 bp, Zea mays
  unsure (1)..(512): unsure at all n locations
ggaaagggtttttcacgacgtatagtactcagtacggtccggattcccgggtcgacccacgcgtccgccgaccccctccgtttgccaacgactcccggctccactgtcgctcccgctcccttccctcccacgcaagacaatggtggccgatcgcctccgcctcgcgctgctgctctccgcgtgcctctgctccgcgtgggcgcgcccacgcctcgagccgaccatccgcctgccgtccgagcgcgcggcggccgacgacgccgtcgggacccggtgggccgtgctcatcgtcggctccaacggctactacaactaccgncaccaggcggacatctgccatgcataccacatcatgaagaagggcggacttaaggacgagaacatcggtgtcttcatgtacgatgacatcgcgcatagcccggaaaatccgaggcctggtgtcatcataaatcatccccagggtggcgacgtctatgctggcgtgccaaaggattacactgggcgagaggtca

SEQ ID NO: 87680 - DNA, 517 bp, Zea mays
ggacgtttaacacgaaaggcagaaagagttaagtatcggtccggaattcccgggtcgacccacgcgtccgtctggggttcactaatcagtcaatcccattgtacctgtccgaaatggcgccaccccaataccgcggggcaatcaacaacggcttcgagctctgcatcagccttggcatcctcttcgcgaacgtgctcaactatttcgtcataaaaatcacagcaggatggggatggaggatatccctgtccatggccgcactgcccgccgcattcctaaccatcggcgcgatcttcctccccgagacgccaagcttcataatccaacgtgacggcaacaacacggacaaggcaagggtgctgctccagaagctgcgcggaacggcctcggtccagaaagagctcgacgacctggtccgtgctagcgacctctcacgagcaacccggtacccattcaggaacatactcgagaggaagtacaggccgcagcttgtggtggcgctgctggtccctttctt

SEQ ID NO: 87681 - DNA, 524 bp, Zea mays
gggttgagtggtgtcttttacgtacccgccatgtattgttatgctcgtaccggtccggaattcccgggtcgacccacgcgtccgcatgacttcccacgctgctgtggtcgctcgtgggtgggggaaatgctgcgtctcgggatgctcaggcattcgcgtaaacgatgcggagaagctcgtgacgatcggaggccatgtgctgcgcgaaggtgagtggctgtcgctgaatgggtcgactggtgaggtgatccttgggaagcagccgctttccccaccagcccttagtggtgatctgggaactttcatggcctgggtggatgatgttagaaagctcaaggtcctggctaacgccgatacccctgatgatgcattgactgcgcgaaacaatggggcacaaggaattggattatgccggacagagcacatgttctttgcttcagacgagaggattaaggctgtcaggcagatgattatggctcccacgcttgagctgaggcagcaggcgctcgaccgtctcttgccct

SEQ ID NO: 87682 - DNA, 520 bp, Zea mays
  unsure (1)..(520): unsure at all n locations
nggtggaggatcntgtaagcggggagggaggggtaagttatattcctcgtccggaattcccgggtcgacccacgcgtccgccgatccgcatctccgatccgcatctccgcttagtatatacatggggattggtagcgagcgattgattacactgggtgaccatcatcatcagtaactaataattactttagattagaagcaaagggaagcgaagcaagaatcgatcgagtcgagaagatggtgcagttcggcaagtggctgaggaggcagatcgagcggagcctcccggagtggcaggaccagttcctgcgctacaaggagctgaagcggtgcgtcaaggcccgctccggcggctgcccgccgttgcccgcggaggaggccgagttcgtggccgagatcgacgcggagaccgagaagatcaacgccttcttcctcgaccaggaggaggagttcatcatccgncaccgtgagctgcagtaccacatcgagcgcgcgctgggccgcngcaggccggcgcccc

SEQ ID NO: 87683 - DNA, 517 bp, Zea mays
aggagagggtttataccgcagaggggggtatgggtatccctctccggaattcccgggtcgacccacgcgtccggaccgcgagagtgtacgtgccaccaggagcagcagcagcaatggccgccgccgccaccacctcctcatcctcccacttgctcctactctcccgccagcaggcggcctccctacgatgccgcctctccttcctcggccagcccagaaggcccggcagggtcacggcccatgcgccggccgctaaggacgtgcggtgcatggcggccgtggacactactgcggcgtccacggcggcggcggagacgagccccaagtcgagcagctacgagatcgtgacgctcacgacgtggctgctgcaacaggagcggaccggcgcgatcgacaacgagatgaccatcgtgctggccagcatatccacggcgtgcaagcagatcgcggcgctggtgcagcgcgcgcccatctacaacctgacgggcgttcagggcgccgtcaacgggcacggcga

SEQ ID NO: 87684 - DNA, 523 bp, Zea mays
  unsure (1)..(523): unsure at all n locations
gggggaggagttgtttntcttggcaccagtatcgtactactgttccggttcagcatcccgacctcacacgtacgcgtgcgtgctaatgttatacgttacttttctactcacgctctgaactttgcatttaagggctagttcaatacgttcttcagctccaagaaggacttggatggctatagcaagcggtctgctggcaacctggcctatggtcggagctgctcggtgctctctctctgcttgttgcatactccctggactacccaagagcacagttggctaatgacgcaaaggctgctcatggatgaacgtgaaaggcaagccaatggacttgtcgatgtctaccgcacgacactcaagtctgatagtcttgctgggctctaccacggatttaacatcttctgcgttggcatcattggctatcgtggtctgtactttgggctatatgatctcataaagccacttgtccttactgacaacctgcaggacatatctttcccaggttaacttttgcgggggctcg

SEQ ID NO: 87685 - DNA, 522 bp, Zea mays
  unsure (1)..(522): unsure at all n locations
aggttgatgctgnctctaagacacgccaataacggtactgctcgtaccggtccggaattcccgggtcgacccacgcgtccgggacgcgagtgagtgaacaccagccgtattgtcccgaccccgaccgatcctcgcctgctgcagccatggcgacctccgcggcgctctccaccgccgccaatcccacccagctctaccggtcccgcgctttgctgggcaagccggtgaaggggcttggcctgagcatgggccgcgagcgcgcccagcggagcattgtgtgccaggcggcgagcagcatctccgccgaccgcgtccccgacatggagaagcggaagctgatgaacctcctcctcctcggcgccatctcgttgcccaccgtcggcatggtcgtcccctacggcgccttcttcgtccctgccggctccgggaacgccggcggcgggacctacgcgaaggacaagctgggcaacgacatcacggtggaggcgtggctcaacacgcacggtcccaacgaccggacgc

SEQ ID NO: 87686 - DNA, 501 bp, Zea mays
  unsure (1)..(501): unsure at all n locations
gggtcgtggtgtaactgaccacgacgtagctcgactcggtcggaattcccggctcgacccacgcgtccgggacgcgagtgagtgaacacctttcgttgtcccgacccgaccgatcctcgctgctgcaccatggcgacctccgcggcgctctccaccgcgcaatcccacccagctctnaccggtccctgcgctttgctgggcaagccggtgaaggggcttgcctgagcatgggccgcgagcgcgcccagcggacattgtgtgccaggcggcgagcagcatctccgccgaccgcgtccccgacatggagaagcggagctgatgaacctctctcctcggcgccatctcgttgcccaccgcggcatggtacgcccctcggcgccttcttcgccctgccggctccggaacgccggcggcgggacctacgcgaaggacaagctgggcaacgacatcacggtggaagcgtggctcaacacgcacggtcccaacgaccgtacgctcgcg

SEQ ID NO: 87687 - DNA, 519 bp, Zea mays
  unsure (1)..(519): unsure at all n locations
gggatgagcctgtgtttacgacggggggaagaacggtagtgctctaccggtccggaattcccgggtcgacccacgcgtccgtgctaatgttattcgttacttccctactcaggctttgaactttgcatttaaggactacttcaagaggttgttcaacttcaagaaggatagggatggctattggaagtggtttgctggcaacctggcctctggtggtgctgctggtgcttcctctttgttttttgtgtactccctggactacgcgagaacaaggttggctaatgacgcgaaggctgccaagggaggaggtgaaaggcagttcaatgggcttgtcgatgtctaccgcaagacactcaagtctgatggtattgctgggctttaccgtggatttaacatctcctgtgttggaatcatntgttatcgtggtctgtactttgggctctatgattccatcaagccagttgtccttactggcaacctncaggacaatttctttgccagtttcgctctggggtgctg

SEQ ID NO: 87688 - DNA, 516 bp, Zea mays
ggaggttgttacgacgcgggcgaaagtagtgttgtaccggtccggaattcccgggtcgacccacgcgtccgcccacgcgtccggtgttcgccaatgtgggcaagactatcgggtacaaagttggaacaatgattgagatccccagggcagctctggtggctgatgagatagcggagcaggctgaattcttctccttcggaacgaacgacctgacgcagatgacctttgggtacagcagggatgatgtgggaaagttcattcccgtctatcttgctcagggcattctccaacatgaccccttcgaggtcctggaccagaggggagtgggcgagctggtgaagcttgctacagagaggggccgcaaagctaggcctaacttgaaggtgggcatttgtggagaacacggtggagagccttcctctgtggccttcttcgcgaaggctgggctggattacgtttcttgctcccctttcagggttccgattgctaggctagctgcagctcaggtgcttgtct

SEQ ID NO: 87689 - DNA, 515 bp, Zea mays
ggtagaagggtttgttaaagcagggaggtatgtgtaacctctctcggaattcccgggtcgacccacgcgtccgcccacgcgtccgctacttcccatacccatactttgtgtccttgatccatctagtagtgggtgtcgtatactgcctcatcagctggagtgtcggtctccccaagcgagcgcctatcaatggcacgctcctcaagcttctctttccagtcgccctgtgccatggtattggtcacatcactagcaatgtgtccttcgctgctgttgcagtctcatttgctcacactatcaaagctctggagcccttcttcagcgcagcggctactcagtttatccttggacagcaagttcccttctctctgtggctttctcttgcccctgtggtcattggtgtttcaatggcatcccttactgagctttcattcaactggactggcttcatcaatgccatgatatcaaacatctcattcacttacaggagcatttatttccaagaagctatgact

SEQ ID NO: 87690 - DNA, 521 bp, Zea mays
gggggaggtttgtttacgcaagccaagtatagttactgctcgtaccggtccggaattcccgggtcgacccacgcgtccgagggcaaaagccaaaaggcatcaccgccgcgacgacgatggcagcctcgctccaagccgcggccaccctgatgcagccggccaagatcggcggccgggcgccctttgcctcgctgccgtcccgcccgtcgtcgcaactcgcctgcagggcgttcggcgtcgacgccggcgccgccaggatcacgtgctccctgcaggacgtcgccagcaggtgcgtcgacgccgcgaagctcgccggcttcgcgctcgccaccttggcgcttctcgtcttgggcgccagcgccgaaggcacgcccaagaagctgacctacgacgagatccagagcaaaacgtacatggaggtgaaaggcacgggcacggggaaccagtgcccgaccatcgacggccgcgtggagtcgttcccgttcaaaggcggcaagtaccagatgaagaagctgtgcctg

SEQ ID NO: 87691 - DNA, 523 bp, Zea mays
ggaggcggtgtgttttcttgaccacgtacgtagctccgatcggatcgaattcccggctcgacccacgcgtgcggggcaaaagccaaaaggcattttcgtcgcgacgacgatggcagcctcgctcgaagcggcggccaccctgatgcagccggccaagatcggcggccgggcgccctttgcctcgctgccgtcccgcccgtcgtcgcaactcgcctgcagggcgttcggcgtcgacgccggcgccgccaggatcacgtgctccctgcaggacgtcgccagcaggtgcgtcgacgccgcgaagctcgccggcttcgcgctcgccacctcggcgctcctcgtctcgggcgcgagcgcggagggcacgcccaagaggctgacctacgacgagatccatagcaaaacgtacatggaggtgaagggcacgggcacggctgaccaatgcccgaccatcgacgggagtgtggagtcctgtccgttcaaggccggtcagtaccagatgaaaaaacttggccctggagccccg

SEQ ID NO: 87692 - DNA, 505 bp, Zea mays
ggtagaggctttatacagaatgcggggagatgggaatgctgtaccggtttcgggttcgacccacgcgtccgaagaagacgagtgtcaagtgaacctgaaacttgcggtgtcactggctggtagcctgagtgtgagtgagtgatcgagctagctgagctccgatcctcgctagctaggataccgccataccacaagtcttcttcacaagtttaggagtgacagcaacaagagatcgatggcctctgccaccgtgctcaagtcctccttccttcccaagaagtccgaatggggcgccaccaggcaggccgtcgcgcccaggccgtccaccgtctccatggtcgtccgcgcctccgcctacgccgatgagctcgtgaagaccgcgaaaacgatcgcgtcgccggggcggggcatcctggcgatggacgagtcgaacgcgacgtgcgggaagcggctggcgtccatcgggctggagaacacggaagccaaccggcaagcgtaccggacc

SEQ ID NO: 87693 - DNA, 519 bp, Zea mays
  unsure (1)..(519): unsure at all n locations
ggtgggaggngttgataaagcagtatagtatgctctaccggtctcggaattcccgggtcgacccacgcgtccgcccgcagcaggggagactgggagatacagagaggagagggagggtttcctcaaagagacccaaacccaagcagagaacactagcgttccctcaccagggcgtccatcccagcagccatggcgatggcgtacaagatggcgacggaggggatgaacgtgaaggaggagtgccagcgctggttcatggagatgaagtggaagaaggtgcaccgcttcgtggtgtacaagatcgacgagcggtcgcgcgccgtgctggtggacaaggtgggcggccccggggaagggtacgaggagctcgtggccgcgctgcccggcgacgactgccgctacgccgtcttcgacttcgacttcgtcaccgtcgacaactgccagaagagcaagatcttcttcatcgnctggtcaccggcggcgtcgaggatcanggccaagatcctgtacgcgacatca

SEQ ID NO: 87694 - DNA, 518 bp, Zea mays
ggttgagcttgtacagagggggggggatagtagtattcgtccggaattcccgggtcgacccacgcgtccgcctccccagagattaatggggaaaaggagaaagaaactgaagttgcagagaagagatggaaagtacttgtgtggaagactgctgtttatcttatcactctcggtatgctcattgcacttctaatgggactgaacatgtcctggactgcaatcactgcagctcttgttcttctggcactcgattttacggacgcacaagcttgtcttgagaaggtgtcatattcactgctgatctttttctgcgggatgtttatcactgttgatggcttcaacaaaacgggcataccgaacacactatgggagttagtggaaccatattcacgaatcgatagtgcgaaaggtgttgcacttcttgccgtggtgattcttatcctttcaaacgtggcctctaatgttcctacagtcctattgctcggtacaagagtggctgcatcagcggcttcgatttc

SEQ ID NO: 87695 - DNA, 525 bp, Zea mays
  unsure (1)..(525): unsure at all n locations
aggggttaggggtctgtaacagagggggagagtatagctagtactcggnccggaattcccgggtcgacccacgcgtccgcttgggcgtacgcggacacagccccgatccgaatcgtcctcctcgcgagcctcgtcgatcccccactcccctcccctcgcttcaagatgcagatctttgtgaagaccctcaccggcaagactatcaccctcgaggtggagtcttctgacaccattgacaatgtcaaggctaagatccaggacaaggagggcatncctcctgaccagcagcggcttatcttcgccggcaagcagcttgaggacggccgcacacttgctgactacaacatccagaaggagtcaacccttcatttggtgctgcgccttaagggaggcatgcagatctttgtcaagaccttgactggcaagacaatcacccttgaggtggagtcttcagacaccattgataatgtcaaggctaagatccaggaccagggaggccattcctctgaccagcagcggcttatt

SEQ ID NO: 87696 - DNA, 521 bp, Zea mays
ggtattatggttctctacgacaagcatgtattgctatgctctaccggtccggaattcccgggtcgacccacgcgtccgagaaaatgggattgctgtatatactattttggaggtatatagagtttcagatatggagcttgtgagagtgcttgctagtgccgaagatgaagtcaatgttgcatgctttcatcctttaccaggacgtggacttgtttatgggactaaggaagggaagctcaggatccttcaacacaatggcgcagacatgataaacatggggtcgggttgcttcattgacgaaaatatggctgagatccagaggtatgcattggaatgctgaataagcttgaccacatcatgtgaattttaggcttacttccatgaaagacttctgtgcaggcttcatctgtgtgatccgttcaagggaaaacattagatgcatctgcaactacattagaacagataattctcaatgggctctgtcaagtgcctttgcggactggtatgggactctttgcaca

SEQ ID NO: 87697 - DNA, 527 bp, Zea mays
  unsure (1)..(527): unsure at all n locations
aggttgaggtctgttaccgaaggagggggaacagtagtgttgtaccggtccggaattcccgggtcgacccacgcgtccggtcacacacctcacagagctgcagcagcatcagctgccacctcctgcctctcctccttccttcctgcctgcataggttgttgctacacgtatatattctgaagaagagatcgagatgaccagcgtgtggaagaccaaggttctgcctggcctcaacaagatctttgacaaggatggcaagaaggctgcagctgcaggcttcttgaagtccttcaacaaggaggagattgacaaggagattgaggacaagaagacagagctggagcccaaggtcgtggaggcctacgaagcatctcctcctgaggtcaaggctctgttcaaggataagaagccagtcaaggtcagcaagaagaactcggctgcagtcaccaagttcctcgatgagctggctaagattgacttccctggagccaangtggtgagcgaagcngtggccaagtcccgcacct

SEQ ID NO: 87698 - DNA, 515 bp, Zea mays
  unsure (1)..(515): unsure at all n locations
gaggaagtaggggttatacagcgcggggagtattgtgaaccgctccggaattcccgggtcgacccacgcgtccggagctgcgcttgtccggagacggagccgactgaacatggccggagatccgggggacgcgccggaggtgggaggcggcggcatacgctccgtgctcaccacggcctcgctcgtcgctccctccggggacgaggttcagtttcgggagatcgacggcaagatcatcggcctctacttcgcggcaaactggtatccgaaatgcgaggctttcaccccggtgctggccgcggcctacgagcagctcaaggagcgcggcgccggcttcgaggtcgtgctggtgtcgtgcgacgaggaccggccgtcgttcgagcggttccacggaaccatgccgtggccagcggtgcctttcggcgacctcagctgcaagaagcgcctcatcgagaggttccaggtggagggcatnccgcgcctggtggtgctcgcttcggaccgcngnccggtgg

SEQ ID NO: 87699 - DNA, 512 bp, Zea mays
  unsure (1)..(512): unsure at all n locations
gggggaagaggggttnattacgacacagaacgatatagtaattctcttcggaattcccgggtcgacccacgcgtacggctcgcctcgggtcaaaccctaagcaggtagttgatttatccgctgcagccatgagtaagttgcagtctgagtctgtcaaggatgccatctcccagattgttggggatgccaaggagaagaataggaagttcactgagactgtggaacttcagattggtctgaagaattatgatccacagaaggacaagcgtttcagtggctctgttaagttgccccatatccctcgtcccaagatgaaggtgtgcatgcttggtgatgcccagcatgttgaggaggccgagaagatgggacttgactacatggatgttgaggctctcaagaaaatgaacaagaacaagaagcttgttaagaggcttgccaagaagtaccatgctttcttggcatcagaggccatcatcaagcagattccccgtcttcttggtcctggtcttaac

SEQ ID NO: 87700 - DNA, 527 bp, Zea mays
aggtaagtaaagtggctataattaccgaagaggggagggtaaaggtatacctctccggaattcccgggtcgacccacgcgtccgcgcagatcgcgcagcacgtccagaagatgaccggcgccaagaacgtccgcctcaagacgcagctcgacccggcgctcatcggcggcttcaccgtgcagtacggccgcgacggctgcaacttgatcgacatgagcgtccggaagcagatcgaggagatcgcgtccgagttcgagttgcccgccgtcccgctcgaagtctgaggccggcttgaggcgtccattctcgccctcgaagctatagctgcggctactgtctcaaggaaccaagcgggaatgttggcactgtacccttcagtcagacctgcggatcaacggcggtggctccaaatctccaatactactacatatgaacggacactatttttgtgcgtatctgttgacgggaacctgtgtagttctttctcctatttttccctgtggttgacagacacagacccttgtata

SEQ ID NO: 87701 - DNA, 522 bp, Zea mays
ggtctgaggatgtgtgacaccgaaacgacggtaggtatgtaccggtctcggaattcccgggtcgacccacgcgtccgacgccgtcgagcttagctccgtggcgtacggcgcgacgtggcagttcgacacggaggcgctgcccaacgacctcgtcaagcgcgggctggccgtgcgcggcgaggacggggagctggagctcaccatcaaggactacccctacgcccacgacgggctcctggtctgggactccatcaagcagtgggcgtccgagtacgtcaacgtctactacaagtacgacgaggccgtggccgccgaccccgagctgagggcgttctgggacgaggtgcgcaacgtggggcacggcgactagaaggacgagccgtggtggcccgtgctggacacccgcgacagcctgttggagacgctgaccaccatcatgtgggtcacctgcgggcaccactcggccgtcaacttctggcagtaccacttcgcccgctacttacccaaccggtcgacaacatc

SEQ ID NO: 87702 - DNA, 526 bp, Zea mays
  unsure (1)..(526): unsure at all n locations
aggttaaactggtttctcaatcgacacgcatgtatcgctacgccgtaccggtccggaattcccgggttttgaccaaagatggtacggtcgaacaaacaattaaccatatccaattttgtacaccactacacaaatctaggacttccagttcaagaatacttcggatgatactttgcctgcaacatatgtgtgtacgtgcaggttttccatctagagatcaagtgttctagctatatgtacaagaccatgttcatctccgacctcgaccaagctactacttctttcgttttgttttagttgtcgctggatagtgcaaaattgaactatccagcaacaactaaaaagaaacgaagaaacggagggagtacttccgatccaaagacgaagagcttgtagaagtggagctgaacgagctaagctaagctaccaattaaagaataggcagcgcgggccgggcatgcagatgcaggtgttgtggtgttggcgccacactactgcacgcgcgcggttgcagctacgtacccan

SEQ ID NO: 87703 - DNA, 525 bp, Zea mays
  unsure (1)..(525): unsure at all n locations
ngggttgaggctntgtttacgtcggggggaaggatgggtaggctggtaccggtctcggaattcccgggtcgacccacgcgtccgatcggaggccatgtgctgcgcgaaggtgagtggctgtcgctgaatgggtcgactggtgaggtgatccttgggaagcagccgctttccccaccagcccttagtggtgatctgggaactttcatggcctgggtggatgatgttagaaagctcaaggtcctggctaacgccgatacccctgatgatgcattgactgcgcgaaacaatggggcacaaggaattggattatgccggacagagcacatgttctttgcttcagacgagaggattaaggctgtcaggcagatgattatggctcccacgcttgagctgaggcagcaggcgctcgaccgtctcttgccgtatcagaggtctgacttcgaaggcattttccgtgctatggatggacttccggtgaccatncgactcctggacccttcccttcacgagttccttccagaaggg

SEQ ID NO: 87704 - DNA, 536 bp, Zea mays
  unsure (1)..(536): unsure at all n locations
nggggagggnttttnccgactgaggatcgacgccatcgcacancggctccgctttggaattcccgggtagacctacgcgtccgatctgaggccatgtgctgcgctaaggtgagtggctgtcactcgaatgggttgactggtgaggtgatccttgggaagcaggcgttttccccaccgatcattagtggtgatctgggaactttcatggcctgcatggatgatgttcgaatgctcaaggtcctggctaacgccgataccacgtgatgatgcattgactcgtcgaaacactggggcacaaggaattggattatgccggacagagcacatgttcaccgcttcatacgagaggatttaggctgctaggcctatgattatggctcccacgctcgagctgtggtagtaggcgctagaacgtctatcgacgtgatagacgaccagactttaaagcatttgtcctgctttggattgactgacggtgaccattcgacttctgggagcgtaccttcacgagttccgtatcataattgaacaactat

SEQ ID NO: 87705 - DNA, 516 bp, Zea mays
  unsure (1)..(516): unsure at all n locations
ggaaagaggattantgtacccgcacggacggtatgctgctcccgtccggaattcccgggtcgacccacgcgtccgcggacgcgtgggatgatgatgggtgtttgaacctctgagacttgtatatttgagaaccttatgtcttgaaccaatcctacaccaccctgcgagaaatgagagttcactttgtttagacactaggaattgttttgggtgacatcatttttcttctttgaacttttcaaggttattgcttgtatagatagcaaacgatgacatgtacgttttctttcctttttcagattttcttttgtgacattattaactattatgtactaatgccggatgttgaattagaattagaattttatttgtacttatgttctcaagcttacctgccaggtcttgattctgacaccattcatggttctgaacatgttgacatctcttactgtaacatttgatacgcatgcttttgtgttgtctcggcctagtccacctatgctgattccatggncc

SEQ ID NO: 87706 - DNA, 501 bp, Zea mays
  unsure (1)..(501): unsure at all n locations
gggggggggatcnatctacgaacgacgcgtatagtaagtttcgtaccggtccggaattcctgggccctctcgctccagccgcttcacagcgccgccgctcgcctctccgaccgccgcgagaatgccgttcaagaggttcgtggagatcgggcgcgtggccctggtgaactacggcaaagactatggccgcctcgtcgtcatcgtcgatgtggtcgaccagaacagggcacttgtggacgcccctgatatggtcaggtgccagattaacttcaaacggctctcacttactgacatcaagattgacatcaaacgcgttcccaagaagtcaaccctgatcaaggctatggaggaagctgatgtgaagacgaagtgggaaaacagctcatggggcatgaagctgattgtccagaagaggagggctgcgctcagtgactttgacaggttcaaggtcatgctggcaaggatcaagaagggtggtgctatcacgcaagagctcgccaa

SEQ ID NO: 87707 - DNA, 494 bp, Zea mays
  unsure (1)..(494): unsure at all n locations
gtggaggtttaaacagagagaaggtaggcttgtcccggtctcggaattcccgggtcgacccacgcgtccgatttgtttgtggaaatttaaatgtgcatgaatctggctactgtaggcttacacaacagtgcagtctgtttctgttaaggaacgcaggaaggaactatcagagaccaacgatcgttgggtggtgttgtggctgtgcctcttcagtgctgtgccccatcctcgtcggcggccgatgccgtgtgagccgggtaccttcacatgatgtcagcccaggtgctctgcccgtccgtcacttccttcaccaccgaggccacctcgtccacatgcacgcggatctggtccttgctgtcacgatcgcgcaccgtcacgctcgtggtgtgatcaaccgtgatcgccagggggacaccaatctcgtccgtccttgcgtaccgttttcctattgtattacctgttatgtcgatgatatgtgaaatcccagctgctgn

SEQ ID NO: 87708 - DNA, 503 bp, Zea mays
  unsure (1)..(503): unsure at all n locations
nggagaggtgatagaataagtaagtactgtantgtactcttcttccggttcggaattcccgggtcgacccacgcgtccgagtattattattattattattattcggctcctgctcatcagctgcagcagtcgtgctccggaccggagaagtcgaaatggaggagaggctgttcgccacggagaagcacggtggccgggcgctctacaggctccacgccgtcacggtgttcctggggatatgcctggtgctctgctacagggcgacgcacgtcccggctgccggctccggcggcagggcggcgtggctggggatgctcgcggcggagctctggttcggcttctactgggtcatcacgcagtccgtgcgctggtgccccatccgtcgtcgcaccttccacgacaggctcgccgtcaggttcggagagcggctcccatgcgtggacatcttcgtgtgcacagcggacccgcggtcggagccggcgagccttgtcgtgggccacgcc

SEQ ID NO: 87709 - DNA, 504 bp, Zea mays
  unsure (1)..(504): unsure at all n locations
nggtaggaagggttatgtttaagacgggggaaaacagtaatgttctaccggtccggaattcccgggtcgacccacgcgtccggaaatacccaattcctcagggtgaaatacatcatgtcatgaaccctgatccttatcgggggactttcgggtctgatgctgcagcttatgctaaggaagtcgaagaacacataacttatggaagttcaggaagggttgcaggcttcattgcagaaacattccaaggtgtgggaggtgctgttgaactagctcctggatacctaaagttagcttatgacattgtgcgcaaggctggtggcgtttgtattgctgatgaagtccatagtggttttggccgtactggcagtcattactggngattccagacacaaggtgtcattcctgacatagtcaccatggcaaaggtatttgggcatgcnctaccatttggggcaagtgggaccacctctgaaaatggaaggggggtaagctcaaaaaatccac

SEQ ID NO: 87710 - DNA, 489 bp, Zea mays
gggacgtcttctacagaaaaggaagtagtgctcgtaccgtccgaattcccggtcgacccacgcgtccggccctaatcatcgccgccaaccggcatctgagccggctgcacccggtgtaccgcctgctgcacccgcacttccgctacaccatggagatcaacgcgctggccagggaggcgctcatcaacgccgacggcatcatcgaggagtccttctggccgggcaagtacgccgtcgagctcagctccgtggcgtacggcgcgacgtggcagttcgacacggaggcgctgcccaacgacctcatcaagcgcgggctggccgtgcgcggggaggacggggagctggagctcaccatcaaggactacccctacgcccacgactgtctcctggtctgggactccatcaggcagtgggcgttcgagtacgtcaacgtctactacaagtacgacgaggccgtggccgtcgaccccgagctgagggcgttctggg

SEQ ID NO: 87711 - DNA, 497 bp, Zea mays
  unsure (1)..(497): unsure at all n locations
nggaggaggatatgataaggggattaacggtaaaggtactactcgcttcggttcggaattcccgggtcgacccacgcgtccgtgacggttgctctagatccgttcatcctggtggttttgtgaggtcgaaagcggcgagcgaattagaagatgctggacaagctgtgggacgacgtggtggccgggcctcgcccggagacgggcctcgagaagctccgcaaggccaccacctgccgtccggtcgtcatcaacaaagacgcggacggcggcagctacaagcgggcgcagtcgatgccgtcgaccccgacgacgccggtgacgccgtcgtcgtcgtcctcgtcgacgacgccgcgcggcgccggcaacgtgtggcgcaacgtcttccaaccggggagcaacctggccaacaagggcatgggccccaaccttttcgaccggccgcatcccaacctccggaccggctacgactggctctacatcgacgagcccagaagcac

SEQ ID NO: 87712 - DNA, 496 bp, Zea mays
  unsure (1)..(496): unsure at all n locations
ggggtgaggtatanacgggggggaggcggaagggcacgcttgtaccggtccggaattcccgggtcgacccacgcgtccgtgacggttgctctagatccgttcatcctggtggttctgtgaggccgaaagcggcgagcgaattataagatgctggacaagctgtgggacgacgtggtggccgggcctcgcccggagacgggcctcgagaagctccgcaaggccaccaccgcccgtgcgctcgtcatcaacaaagacgcggacggcggcagctacaagcgggcgcagtcgatgccgtagaccccgacgacgccggtgacgccgtcgtcgtcctcgtcgtcgacgacgccgcgcggggccgtgaacgtgtggcgcaacgtcctacagccggggagcaacctggccaacgagggcctgggcccccaccgtttcctacggaccgaattcgagctcccncagcgtttacaactgggtctacgtgacaagagccaggatcacc

SEQ ID NO: 87713 - DNA, 455 bp, Zea mays
gtgagtcttgattcatccgacaaatagtatactgtactcgttcggattcccgctcgaccacgcgtccggacggtgctctaatccgtcatacttggtggttgtgaggtcgaaagcggggagggaatataagatgctggtacaagctgtgggacgacgtggggccatacctcgcccggagacgggcctgagaagcttcgcagtgccaccaccgcccgtccactcgcatcaacaaagactcggacggggcagctacatgcggcgcagtccatgcctctaccccgctacgccagtgacgccgtaattgtcgcctagtcgacgctccacactgtatccggaacatatggaacacgtcttccaggcgctctcaatgcggtcaccaggtcatgcctctgacgttattgaatctcgatgcgatctgtgaccgttacgacttgtctacttacgacctcgcacac

SEQ ID NO: 87714 - DNA, 491 bp, Zea mays
  unsure (1)..(491): unsure at all n locations
gtaagtgactgtttacgtnanacgtacgtcantacatactcggtttcgaattaccgactcgacccactcgtccgtcggaggttgcacgctttactctgttgatttcgtgactggcaagaccataaccggggagtatgatagctaccacgccaggcacaacgacaacgcgaagatccaggacaaagagggcatccccccagaccaacatcgtctgatcttcgctggcaagcagctggaggatggccgcaccctagcagactacaacatccagaaggagagcactctccacctggtgctccgcctccgcggtggtcagtaagccatgggtcatttaaactgctgctgtacctgggtatctgcgtcgtctgatgccctctggtgtacctctatatggatgtcctcgtctaataaacatctgcggtttgtgtgtcatgaatccgagctgtggcttcgttgggacaatggacccgtttgcgactctgtgaggagcg

SEQ ID NO: 87715 - DNA, 506 bp, Zea mays
tgggggtaaagagtaagtgtacgaccagccaagataagtaagtgttctaccggtccggaattcccgggtcgacccacgcgtccgaaaatcgaaatcgatccgatctccgcttgcgctgaagcctgatctccaccgggttcgcagcaggggcgcaggacctcgatcacgaggaggcaggggagcagcatccacaaccacaagccatggcggggagggccaacatccccactaacaactccgacctcatcgcaatcatcgtcgacgaggacaccgtcactggcttcttgatggccggcgttggcaatgttgatctgcgcaagaaaaccaactacctcctcgacgacaacaagacgacagttaaacaaatcgaggatgcgctcaaagaatttactacgaaggaagatattgctattgtgctcatcaggcaatatattgtcaacatgataaggtttctggtggatagctacgacaagcccgtacctgctattctggaagatccatccaag

SEQ ID NO: 87716 - DNA, 495 bp, Zea mays
  unsure (1)..(495): unsure at all n locations
gatagaagtcgtcttaccgtagcgacactgtangggcacgcctctaccggttcggaattcccgggtcgacccacgcgtccgggaattgccgagcgagcgagcttgcgccgtgcgcgatggagggtgacgagaagtcggcgggcggggcccctgcttactggggcctgggcgcgcggtcctgcgacgcgtgcggcgccgaggcggcgcgcctctactgccgcgcggacgcggcgttcctgtgcgccgggtgcgatgcgcgggcgcacggcgccgggtcgcgccacgcgcgggtctggctctgcgaggtctgcgagcacgcgccggcggcggtcacgtgccgcgcggacgctgccgcgctctgcgcctactgcgacgccgacatccactcggcgaacccgatcgcgcgccgncacgagcgcctncacgtggcacccttcttcggcgcgctggccgacgcgcccaagcccttcggctcggcggcgccggccaaagcaa

SEQ ID NO: 87717 - DNA, 496 bp, Zea mays
gagttaggtagtttaagagggggaaggaagtaatgctgtaccggtccggaattcccgggtcgacccacgcgtccggcgcacctgttcaagaacagctcgggctccaaggtcttgagctggagccagaggtttggcatcgcagttggcgtggccagggggctgtcttacttgcacgagaagtgccgggagtgcatcatacactgcgacatcaagccagagaacatcctccttgatgaggagatgggcgccaaggtcgcggacttcggcatggccaagcttgtcggccacgacttcagccgcgttctgaccaccatgcggggaacgatgggctatctggcgccagagtggctcgcgggcgcgccggtcaccgtcaaggccgacgtgtacagcttcggcctgctcctgttcgagctcatctcgggacgccggaacaacggctcctcggaggcagggtccaactccgctgtgtacttaccggtgcacgccgccgtcaggc

SEQ ID NO: 87718 - DNA, 503 bp, Zea mays
  unsure (1)..(503): unsure at all n locations
nggaggggaggtttttataacagcaaggaaggataggtaagtctcggtccggaattcccgggtcgacccacgcgtccgcgagaaatttactccttcggctgaagacctgccaggtgccttcgagcatatcgaaggtgaaattgatgactgaaagggaattaggcttacacctagttcctaattaattttggtggttgaattgcccaacacaaacaattggactaactaagtttgcccaagtttatagattacacaggtgtaaaaggttcacactcagccaataaaaagaccaagttttggattcaacaaaggagcatagtgggaaccgaaggccctctagtctgagagcaccggactgtccggtgtacaccggacagtgtccggtgcaccagaggactccagctccaactcgccaccttcgggaatttccagaggcgactccgctataattcaccggactgtccggtgtacaccggacagtgtccggtgcgccaagggaggtc

SEQ ID NO: 87719 - DNA, 499 bp, Zea mays
  unsure (1)..(499): unsure at all n locations
gaataggtcttagtaaagaaggggaaggacgagtattctcggtccggaattcccgggtcgacccacgcgtccgcaacaagagatcgatggcctctgccaccgtgctcaagtcctccttccttcccaagaagtccgaatggggcgccaccaggcaggccgtcgcgcccaggccgcccaccgtctccatggtcgtccgcgcctccgcctacgccgatgagctcgtgaagaccgcgaaaacgatcgcgtcgccggggcggggcatcctggcgatggacgagtcgaacgcgacgtgcgggaagcggctggcgtccatcgggctggagaacacggaggccaaccggcaggcgtaccgcacgctgctggtcacggcgccgggcctgggccagtacatctccggcgccatcctcttcgaggagacgctgtaccagtccgncgtcgacggccgcaagatcgtggacatcctggcggagcagggcatcgtgccggggatcaaggtgga

SEQ ID NO: 87720 - DNA, 496 bp, Zea mays
  unsure (1)..(496): unsure at all n locations
gagtgaggtttngaagacgaggacgacagtagtctctaccggtccggaattcccgggtcgacccacgcgtccggttccttgagccacttgagctgtgctacaaatcactgtgtgactgcggcgacaaggccatcgcggacgggagcctcctggacctactgcgccaggtgttcacgttcgggctctccctggtgaagctggacatccggcaggagtcggagcggcacaccgacgtgatcgacgccatcaccacgcacctcggcatcgggtcgtaccgcgagtggtccgaagacaagaggcaggagtggctgctgtcggagctgcgaggcaagcgcccgctgctgcccccggaccttacccagaccgacgagatcggcgacgtcatcagcgcgttccacgtcctcgcggagctcccgcccgacagcttcgggccctacatgatctgcatggcgacggccccctcggacgtgctcggcgtagagctcctgcagcgcga

SEQ ID NO: 87721 - DNA, 487 bp, Zea mays
gaagtctgatcgggggggagggagggtatgctgtaccggtccggaattcccggggaagctttcgcaagctggccagctagctccctaccgactagataccgaggagtgacggatcaggatgggaggggtgacctcgagtgtggcggcgaagatggccttcttcccgccgacgccgccgtcgtacgcgctggtggaggacgccggtgcgggggtcaccacgctcagcggccagccgcaccgggagaacgtcgagttgctgcgcttccgcacccgcaaagggaacacgctggcggcgatgtacgtgcgccacccggacgccgcgtccacggtgctctattcccacggcaacgccgcggacctgggccacctctaccagctcttcctgcatctgtccttcaacctccgcgttaacatcctcgggtatgactattcaggatatgggcaatcatcaggaaaggtatgatcaaatcttgaagttgaacaatgt

SEQ ID NO: 87722 - DNA, 492 bp, Zea mays
  unsure (1)..(492): unsure at all n locations
gggaagagttagtgcactgcacaagatagtatanctgtactcggtcggaattcccggcgaagctttcgcaagctggccagctagctccctaccgactttattctcgaggagtgacggatcaggatgggaggggggacctcgagtgtggcggcgaagatggccttcttcccgccgacgccgccgtcgtactcgctggtggaggacgccggtgctggggtcaccactctcagcgtccagccgcaccgggagaacgtcgagttgctgcgctttcgcacccacacagggaacacgctggcggcgatgtacgttcgccacccggacgcctcgttcacagtgctctattcccacggcaacgtcctggacctgggccacctctaccagctcttcctgcatctagtcttcaacctccaggttaacatcctcgggtatgactattcaggaaatgggcaatcatcaagaaaggtatgatcaaatcttgaagttgatcaattn

SEQ ID NO: 87723 - DNA, 494 bp, Zea mays
  unsure (1)..(494): unsure at all n locations
agttctgtctattcacccgaaacagtagcatcacagtctcgtattcccgggtcgacccacgtctctcgggaatgtaccttgggtcagttacaggtctngcattttcccccttgctgatacataagtgcggttggccatcagtcttcttttcatttggatccctagggcttgtttggttcacgacatgggcaaccaaggcatatagttccccacttgaagatcctggaatcagcgctgcagaaaagaatcttattgctagtcagagcacagcaggcgaacctgttaaaacaattccatggagattaatactatcaaaaccacctgtctgggcacttatagtttctcatttctgccataactggggaactttcattttgctcacatggatgcccacatactacaatcagggtctgaaattcaacctcatggaatctggccttatctgtgttcctccctggttcaccatggcggtttctgcaaatgttggttgttgg

SEQ ID NO: 87724 - DNA, 495 bp, Zea mays
  unsure (1)..(495): unsure at all n locations
nggaggaaaggtttatacagcagcgaagatagttattctcggtccggaattcccgggtcgacccacgcgtccgtcatcctctccctcctctactgcacctgcaccacagtagctagctagctatctttgctacggcggctctgtaatctggtccactagcgctccattcgaccccacccacagccatggctgccgtgaccgcggcggccgtctctctgccctcctcctcctcctcccctgccgccgccaaggccaaggcgtccgcgtccgcgtccccgtcgtctccatgcggccacctccagttcccgcggcggcacggcggcccgcgcgcggtgcggctgcgggtgcaggtgtccaccaccgagaccgcggaggcggagccggtcaagaagctggagaaggtgtccaagaagcangaggaggggctcgtcaccaacaagtacaagcccaaggagccgtacgtcgggaggtgcctgctcaacaccaggatcaccg

SEQ ID NO: 87725 - DNA, 502 bp, Zea mays
  unsure (1)..(502): unsure at all n locations
ggggggagtctattaaacacgcacgggaagtaaggnatgtctcggtccggaattcccgggtcgacccacgcgtccgccgaatattgtcaagttcattggtgcgtgcaggaagccattggtttggtgtattgtgacggagtatgcgaagggtggatctctcaagaatttcttgagcaagaggcagaacaggtctgtcccgctgaagttggcagtcaagcaggcattggatgttgcacgtggcatggcctatgtccatggccttgggttcattcatagagatcttaagtcggacaacctcctgatttctggtgataagtccattaagattgctgactttggagtggctaggattgaagtcaagactgaggggatgacacctgaaactggaacataccgctggatggctccttgagaagtggcagttaagaagaggtggagcaatatgggacgaaggaagctttggtctcatttggttccatgaactagacccaacaatggtcgg

SEQ ID NO: 87726 - DNA, 498 bp, Zea mays
tgttaggtagtttacgagagggtggaaagtattgtcgtactcggtccggaattcccgggtcgacccactcgtccgctgagaaatggagactagtgaaggctcatggaacagctgtgggtctcccatctgatgatgacatgggcaacagtgaagttggtcacaatgcacttggtgctggtcggattttcgcccaaggtgctaagcttgttgatcaagctcttgcctcaggaaagatttatgatggagatgggttcaactacatcaaagaatcttttgaaaatggtactcttcaccttattgggttgttgagtgatggtggtgtccactcccgccttgaccaactacagttacttctgaaaggtgtcagtgagagaggagcaaaaaaaattcgtgtgcacatccttaccgatgggcgtgacgttttggatggaagcagcgttggtttcgtggagaccctagagaatgatcttttggagctttgaggcaagggtattgatg

SEQ ID NO: 87727 - DNA, 503 bp, Zea mays
gggtagattagtataaaagaaggcgaaggacagcatcgctcgtaccggtccggaattcccgggtcgacccacgcgtccggtggctgactactgcgccatctactactccgacgacggcgcggtggcgagggacagcgagctgcaggggtggtggagcgaggtcaggaacgtggggcacggcgacctggcggacgctccgtggtggccggcgatggactgcgtctccgacctcgtggagacctgcgccaccgtcgtctggctgagctcggcgtaccacgcgtccatcagcttcgggcagtacgactacctgggcttcgtcccgaacgggccctccatcaccacgcggccggtgccgggcccggacgccggggcggaggtcacggagtcggacttcctggcgagcgtcacgccggtcaccgaggcgctcggcttcatgtccatcgcctcggggccgatggggctcaagggcacggaggtgtacctggggcagcgcccggacacgg

SEQ ID NO: 87728 - DNA, 505 bp, Zea mays
  unsure (1)..(505): unsure at all n locations
gcgttggaagaagctactagttcatgccagatagtaggctacgttgtactcggttcggaattcccgggtcgacccacgcgtgcgctgttctatgtactagctttctttttgttcctactatttctactacgatacagactggatttcattaagataatgctgcaactggagccaacaagcagacatagaaagaagagcaagaataccggatcccagccgatacaaggtaggagtgagcagcgttagatcaactctcatcacaggatcgatatggtgacagtgagagaggagactcgcaaggggccatggacagagcangaggacctgcaactgggctcaaccggacaggcaagagctgacggctgcgctgggtcaactaccttcagcctggactgaagcgtgggcgcatgtcttcccatgaagagcgactcatgctagagctgcacgcttcgtggggaaacaagtggtacaggatagcacgccgcttgccagggcgcactgacaa

SEQ ID NO: 87729 - DNA, 512 bp, Zea mays
  unsure (1)..(512): unsure at all n locations
nggtgagagtgtatctatacagacgagcagagggacaagtaatctctcggtccggaattcccgggtcgacccacgcgtccgagctctcctgagaagcatatagcaccagcggaacacgggaacggcggaagcaaacaactagaaattccccagcccggttctttgcgtgcggttgatctcgtcggaagcccgggcgggggtccccaatccggcatcgaattccatggggggcaacggccggaattagatccggaacggccaactgggtcttcttggaaaagttggcccctgccaatctagcctgggtcttcgggttggtaaaggaccggttggtgaatttcacgaatcaaccattggagcacactcttttttccagaacttatcggtcaatgatgagaccgtgaaaatcgaaatctgggatactgtccggcacgagaggggtcatagcttgggtcccatgtactataagggtgcaaatgctgtccattgtgtctattacatcacaaaatccg

SEQ ID NO: 87730 - DNA, 504 bp, Zea mays
  unsure (1)..(504): unsure at all n locations
nggggagaaggtnctctacagaggggaggtggaagggaaaggtgtgtaccggtccggaattcccgggtcgacccacgcgtccgctcttctctgtactagctttcttcttcttcctcctcttcctcctcccaaacagactggatttcatcaagataatcctgaaactggagccaacaagcagacagagaaagaagagcaagaagaccggctcccagccgatacaaggtaggagtgagcagcgttagatcagttttcatcacaggatcgatatggtgacagtgagagaggagactcgcaaggggccatggacagagcaagaggacctgcaactgggctcaaccggacaggcaagagctgccggctgcgctgggtcaactacctncaccctggcctcaagcgtgggcgcatgtctccccatgaagagcgactcatcctagagcttcacgctcggtggggaaacaagtgggccaggaatagacgccgctttgcagggcgcacttacaa

SEQ ID NO: 87731 - DNA, 500 bp, Zea mays
  unsure (1)..(500): unsure at all n locations
ngagtnaggaggttttaattgagggggcgacggtgggaaagcttgtaccggtccggaattcccgggtcgacccacgcgtccggattcgctcgctcgatcctagcttcccttccaagaagcgcagcgcccatggccatgtccacgcaagcctccgccgccacgcgccacctgctggccgccgcctgggcgccggcggcgaagccgcggcagctgagctcgcagctcgcgctgccgtcgtcgtcctcccgcgggccggccccgctccgcgcgttcaccgaggaggcggtggaggcgcccaaggggttcgtggccccgcagctggaccccagcacgccgtccccgatcttcggcggcagcacgggcgggctgctccgcaaggcgcatgtggaggagttctacgtcataacgtggacgtnccccaaggagcaggtgttcgagatgcccaccggcggcgccgncatcatgcgggagggccccaaccctttgaagctggcgcgcaa

SEQ ID NO: 87732 - DNA, 502 bp, Zea mays
  unsure (1)..(502): unsure at all n locations
nggggggagatgtnnntntacgtgtattgtgggcggaagggaaatgcttgtaccggtccggaattcccgggtcgacccacgcgtccgggcgagcgcgtgccgttcctcttcaccgtcaagcagctcgtcgccaccggcaagcccgagagcttcggcgggcccttcctcgtgcccagctaccgggggttctccttacttgaccccaagggccgcggcggcttcaccggctacgacaacgccgttgcgctccccgccgggggcagaagtgacgaggaggagctccagaaggagaacatcaagaacgccgtcttctncaccgggaacatcacgttgagcgtcaccaagagcaacccggagaccggcgaggtcatcggcgtcttcgaaagcgtgcagncgtccgacaccgacctcgggccaatgcgccaaagatgtcaagatccagggggtctggtacgctcaactcgagtgattcgagtgtctaactgctaggtgtccgaccgcc

SEQ ID NO: 87733 - DNA, 504 bp, Zea mays
  unsure (1)..(504): unsure at all n locations
nggggaggggttnnnttacgagcgggacggatagttactctcggtccggaattcccgggtcgacccacgcgtccgaagcaaccatggcggcaaccggaatgtccccctccccctcggccgcaataactcgccacatccatgctcgtcgttcctgtgctgctgcttccttgtccctccgtcgctcgggcttcctggggcgcgtcgtgctggccgcggtgccagtggccgtggacgccacccggcgccgccgcgtctccgtgtcggtgcggatggcctgggacggtccgctctcgtcggtgcgcctgatcatgcatagcaggaacgcgaagctgagcgagaagctcaaggagcacatcgaggacaaggtgggtcgggcggtgtccaagcactggcacctggtccgggaggtagacgtgcgcctctccgcgcgcggcggcgagctcggtcggagccccaagacgtcgcgctgcgagatcaccctgttcaccaagcgccatggcgtcc

SEQ ID NO: 87734 - DNA, 511 bp, Zea mays
  unsure (1)..(511): unsure at all n locations
nggggaagtttttnttnaacagcagggaagggagaacagttatgctcgtaccggtccggaattcccgggtcgacccacgcgtccgagctcccatatccgctcccctacctctccagcatcctcccgtctccgtcgtctcgtctccgctcctcacctcgccagccatgggcaagatcaagatcggaatcaacggtttcggaaggatcggcaggctcgtggccagggtcgccctgcagagcgaggatgtcgagctcgtcgccgtcaacgaccccttcatcaccacggattacatgacgtacatgttcaagtacgacaccgtgcacggccaatggaagcacagcgacatcgccctcaaggactccaagacgcttctcttcggcgagaagccggtcaccgtctttggcatcaggaaccccgaggagatcccgtggggtgaggctggtgctgagtatgtcgtggagtccaccggtgtcttcactgacaaggacaaggctgctgcacatctgagggg

SEQ ID NO: 87735 - DNA, 502 bp, Zea mays
  unsure (1)..(502): unsure at all n locations
ngtgggggagacgttcctatacgagggaaagagggaagggtaggctggtaccggtccggaattcccgggtcgacccacgcgtccggcaagatttgctcagatgatgtggagggtaaatttctttgccatgtcctgttgcatggtccttgacaatgactacatgttgtactatatcgctccgatgcataccctgttcactcttatggtgtatggatcactgtttgttctcaacaagtacaatgagatcccatcagtcatggccattaagatcgcaagctgcctcttgactgtcattctgatatgggaaattcctggtgtgtttggaattttctgggcaccatttacggttctggtagggtaccaaaacccaaaagcttctaagaagaacctaaccctggtacaccaatggcgctttcggttttgccctgatcggtacatatggatcattggaatgaattatgcttactttcaccccaacgtaagtgttctaaagagaaccgac

SEQ ID NO: 87736 - DNA, 492 bp, Zea mays
ggggagggtttttacgaagtggagggagggaaagtggcaccggttcggaattcccgggtcgacccacgcgtccggcgacgctggcggaccgcccggcgctcgcgtcggtcaagttcctcgacgagagcgacaacaccatcacccgcgccagctacgggcccgtgtggcgcctgctgcgccgcaacctcgtcgccgagacgctgcacccgtcgcgggtgaagctcttcgcgccggcccgtgcatgggtgcgccgcgtgctcgtcgagaagctcggggaggccgggcccgacgccgtcccgccccgcgtagtggagacgttccagtacgcgatgttctgcctcctcgtgctcatgtgcttcggcgagcgccttgacgagcccgccgtgcgcgcgatcgcttctgcgcagcgggaggcactcatctaccgctccaagaacatgcaggtcttcgccttactccctgtcgtcaccaagcacctattccgagcctggg

SEQ ID NO: 87737 - DNA, 535 bp, Zea mays
  unsure (1)..(535): unsure at all n locations
ggggttaggttttgacgcggggcaggggaagagtatgctgtaccggtctcggaattcccgggtcgacccacgcgtccgagctcaagtggtaccttgtcctcctgtgctacttcttcgctcccgtggttgcgttctgcaactcctacggaatgggcctcaccaacctgaaccttgccccgacctacggcaagatcgccctcttcgcgttggcctcgctcgtcggcagtgatggcggtggagtcatcgccggccttgcagcctgtggcatcgtaatgtccgttgcctgttccacagccgatctaatgcaggacttgaagagcgggtacctgaccctctcgtcgccgcggtcgatgttcactgcccagctgatcggcatcgcgctcgggtgcgtcatagctccgctcacgctgtggctcttctggacagccttcgacatcggcgaccctgacggggagtacaaggccccctttgccatcatgttccgggagatggccatcctcgggatggagggcttctncgngctgncactgcactg

SEQ ID NO: 87738 - DNA, 528 bp, Zea mays
  unsure (1)..(528): unsure at all n locations
ggtagagctgttgaaaagaaagaagtatgctatactggtctcggaattcccgggcacggctaaacatccaaccgtgctaacttaccataacaacaactcaattcctatcgaattacttcctatcgaattgctatagctaaactcctataggatagaacgtacacaaggtgtacacatcatatatgaatgaaacatattcattaacttaagcatactccttccttgatctaatgagctgatattaattaaatatctcctgttatagatttttgcacaggtctcatttacgcctaatccatatggagtagacgctgacgttgtgagaattcttaattcatgagttgtagggagggacttatgtcagcactgacagaagctaaagcacgtgttggatttaaagctggtgacacggattataaattgccttactacacccaggagtaccaaaccaaggatactgatatcttggcagcattgcgagtaaatgctcatttcgagttgcgcctgaagaacangacctgtagtagt

SEQ ID NO: 87739 - DNA, 535 bp, Zea mays
ggggaagatctgagacagaagggaggaggggaagggtatgcttctaccggtctcggaattcccgggtcgacccacgcgtccgacgagatcctcggggtgcccaagtcggcgtcccaggacgatctcaagaaggcctaccgcaaggctgctatcaagaaccaccccgacaagggcggtgaccccgagaagttcaaggagctcgcacaagcctatgaggttttgagtgatccagagaaacgtgagatttatgatcagtatggtgaagatgcccttaaggaaggaatgggcggtggaggatcccatgttgatccatttgacatcttctcatcattttttggaccctcttttggaggaggtggtggaagcagcaggggaagaaggcaaaggaggggagaagatgtagttcacccacttaaagtttctctggaagatctttacaatggcacctcaaagaagctctctctttcgcgcaatgtcatctgctccaagtgcaagggcaaaggctcgaagtctggtgcctcaatgaggtgccctg

SEQ ID NO: 87740 - DNA, 530 bp, Zea mays
gagtgtagcgttgttcacccgaaaaagtactgctatactgtctcggaattcccgggtcgacccacgcgtccgataaactgcggattctttctttctcttccattcttacgtttccatattaaagtgtagttgctttactgaaatttaatactattaatctaatatgcccattggcgttccaaaagtaccttaccggattcccggagatgaagaagcgacttgggttgacttatacaatgtcatgtatcgagaaaggacactcttttttaggtcaagagattcgttgcgagatcactaatcatattacaggtctgatggtatatctcagtatagaagatggaaatagcgatatcgcgctgtctataaactcccctggcgggtggctaatctcatgaatggccatttttgatacgatgcatacggtgacacctgatatatatacaatatgcctcggaatagccgtgtccatggcctccttgattctgcttggaggagacccatcaagcgtatagcaattcctaagctaggtt

SEQ ID NO: 87741 - DNA, 518 bp, Zea mays
gggaaaagtcttttttacgcggagggggggggaggagagagctttaccggtccggaattcccgggccgctttacttagacctgggcgttttgatagacaggtgtctgtctacgttcctgatgtacgtggaaggacagagattctaaaagtgcatggtagcaacaagaaatttgattctgatgtttctcttgatgtcatagcaatgagaacacctgggttcagcggagcagacttggcaaaccttctgaatgaagcagccattctggctggaagacggggaaggacagcaatttcttcaaaagagattgatgattctattgacagaattgtagctggtatggaagggaccgtgatgacagacgggaagagcaaaagtcttgttgcttaccatgaagttgggcatgcaatttgcggaactttgacgcctggccatgatcctgtccaaaaggttaccttagttccaaggggtcaagctcgtggtcttacatggtttattcccgatggatgacccaacactc

SEQ ID NO: 87742 - DNA, 526 bp, Zea mays
aggtaagttatttcagaggaaggagtatgctatactcgttcggaattcccgggtcgacccacgcgtccggcggagccgaaaatgtagtacagggaacctggtgttcttctatggcgtggcttcactctgcaggaatttgcaaaccagtgctttgggaacaagctggactatggtaaagggaggcagatgcccattcactatgggtcgaaccgtctgaactatttcacagtctcgtcacctatcgcaacacagctcccgcatgctgttggagctgcctactctctgaagatggacaagaaggacgcgtgtgccatcacatactttggggacggtgggacaagtgagggagacttccatgcagcgctcaacttcgcggctgttatggatgcaccggtgatcttcttctgccgcaacaatggctgggccatcagcactccgactactgaacaattcagaagtgatggagttgtcatccgtggccaggcttatgggatccgtggcatccgagtagatggcaatgatgctt

SEQ ID NO: 87743 - DNA, 533 bp, Zea mays
  unsure (1)..(533): unsure at all n locations
tgagtatagagtagtattctggaaccctcgttcngnctattctgtctcggaattaccgggccgacccactcgtacggcggagccgaaaatgtagtacagggaatttggttttcttctatggctaggcttaactgggcaggtattagcaaaccagtgctttgggatcaagctggactatggtaaagggaggcagatgcccattcactatgggtcgaaccgtctgaactatgtcacagactcgtcacctatcgcaacacagtttcggcatgctgatggagctgcctactctctcaagatggactacaaggacgcgtgtgccataacatactttggtgactgtcagacaagtgagggagacttccatgcaatgctcaacttcgtggctgttatggatgcaccggtgatcttcttctgccgtaacaatggctgggccatcaacactccgactactgaacaattcagaatcatggaattgtcatacatggccaatcttatgagatcggtggcatccgagtgaatgcaattatgctgtg

SEQ ID NO: 87744 - DNA, 534 bp, Zea mays
  unsure (1)..(534): unsure at all n locations
nggtagctctgtgtcatccagacaaaagtatagctatgctcgtactcggttcggaattcccgggtcgacccacgcgtgcggtttagccaagctgtggccaacctctgttaggaatggagatggagtcgactcctgtctggacaccatacaagatgggcgatttcaacctggcacacagggttgtgctggcgccgctgactaggtgccgggcgttcgggaacgtgccgcatccggagcacatggctctctactaccgccagcgggcgacgcccggcggcttcctcatcgtcgaggcctgctccgtgtcggagagcgcgcgcgggtacccggacgttccggggctgtggacccaccatcaggtcgaggcctggaagccgatcgtcgacgccgtccacgccagcggtgccgtcttcttcgtccagctctggcacaccggacgggcctcccgctgagaattccaaccaaatgggcaggcaccgatctctagcacggacaagcaaatcccagcacaggtgaaccattccggtgacgtan

SEQ ID NO: 87745 - DNA, 531 bp, Zea mays
  unsure (1)..(531): unsure at all n locations
gggttatgttatcacgaaagaggtagtacagcatgctctaccggtctcggaattcccgggtcgacccacgcgtccgggaactcatcatgaatccactaattgctgctgcttccgttattgctgctggattggccgtagggcttgcttctattgggcccggagttggtcaaggtactgctgcaggacaagctgtagaaggtattgcgagacagccagaagcagaaggtaaaataagaggtactttattgcttagtctagcttttatggaagctttaacaatttatggactggttgtggcactagcgcttttatttgcgaacccttttgtttaatcctaaaaaagaaaatgagtcctttagattagatacttttttctttttttagtacattggcatttgcttatgtaattctaagtatatcaatactttactttactcctatttattatattatttcttttttatattattccggaaattntgtatttatcgggacagacaataccctaggaaccccaagaagggctgattn

SEQ ID NO: 87746 - DNA, 529 bp, Zea mays
tgttagtctgtgtcaccgaacagtagtattgctctaccggttcggaattcccgggtcgacccactcgtccgaaggagggccacatcatggtctgcaagatcgccgagaagtacctgtcggagaaggcggcggcggcggtgcaggcgctgctgccggagtcggcggtcggcgagctgtcgacggtgtgcccgtgggcggaccatgtgcgctggcactaccactgggccagcccgctccactacgccaacaccccccaagtctgcaacttcaagtattctcgggactgccacaattctcgtggccagcaagggatgtgcgtcgtcggggctatcaacaactacacggaccagctctacagctacggccagaagacttcgtataacctgactgagagcctgatgttcctggcacacttcgtcggcgacgtccaccagccgctgcacgtaggcttcgaagatgacgagggcggtaacaccatcaccgttcactggtaccggaggaaagcaaacctccatcacgtgtgggatgc

SEQ ID NO: 87747 - DNA, 532 bp, Zea mays
  unsure (1)..(532): unsure at all n locations
nggtagctgtgtgtacccgaaacacagtatgctatacccgtctcggaattcccgggtcgacccacgcgtccgcccacgcgtccggtccaaacgatacaggtatacgatacgccgctcgcctgaatcgagaccaccaccgctcccgctctgcctcacctcgccgactagagtttttgccgccgcggatctcgccgtccccgccatggatacgtcgggctcctccgcagccgccggcgacgccccgaccaccggggagcaccggatggggaccaccattgtcggggtctgctacgagggtggcgtcgtcctcggcgctgattccagaaccagcactggaatgtatgtagccaaccgtgcttcagacaagattacccaattgacagacaatgtgtacgtttgtcgctctggatctgctgctgatacacatgtcatttcggactatatacgttatttcctncaccaacacacaatccagcttggacaaccagctactgctaaagttgcagctaacctgattagggtgctagcctaa

SEQ ID NO: 87748 - DNA, 530 bp, Zea mays
  unsure (1)..(530): unsure at all n locations
tgggtaggtgttatcttcagcccctgtatgtcgtgactgtactcggttcggaattcccgggtcgacccacgcgttcgcgcactcgtgctacgtgcttatgtctatctacaccgccgtcaccgttaagcgcggtgcgataacatggcgtccgtgaccgtccgcgctgcttgcgcgggcctgcacccgtcggcgtgtatgaagtggtcctcgccatctgcggcggccttcacttgtccactctagccgcctcggtcgcactgctaccgcgttggcgacgaggcgcatcctaacacgctaggcacaaggcgagtggctgacgggccttccatcagccgcctacctcagactgcagactgccgagagacaatggcttagacccgttgtgcctggcggaggacccgtagaacctgacgtggtacgtgcatgcggagctggtgaacggtcggtcggcgatgctgcacgaggcccggatgctgattctggangtgctgaccaatgctcgggctgatcaacgtcgcgcagtggtaccn

SEQ ID NO: 87749 - DNA, 536 bp, Zea mays
  unsure (1)..(536): unsure at all n locations
gggttagttttgtttccgtaccgccntgtattgctactgctcgtaccggttcggaattcccgggtcgacccacgcgtccgttcagtctgagaacccgtcggcgtacattgatcaagtgattgccactggtctgccagcctgacctgtggctgctgtgggccaggttgtgttcactgctgaggatgctgaaccatggcattcccaagggaaagctgctattctggtaagggcggataccagccctgatgacgtaggtggcatgcacgctgctgtggagattcttacagagaggcgtgagcatgacttaccacgctgctgcggtcgcacgtggctggtggaaatgctgcgtctagacatgctcaggcattcgcgtaaacgatgcggagaagctcgtgacgatcggaggccatgtgctgcgcgaatgtgagtggctgtcactgaatgaatagactggtgaggtgatccctgtgaagcatccactgtagccaccgacccttaatggcgatccgggaacttccatggactgggtggatgaa

SEQ ID NO: 87750 - DNA, 518 bp, Zea mays
  unsure (1)..(518): unsure at all n locations
nggggaagcctgtgttacagaagaggggggaaaggtagtgctctaccggtctcggaattcccgggtcgacccacgcgtccgcggtccaacactttcacgctcaggcgctcagctctagcaatggctgcctccaccatggcgatctcctccacggcgatggccggtacccccatcaaggtgggctccttcggcgagggccgcatcaccatgcgcaagaccgtgggcaagcccaaggtggcggcgtccggcagcccctggtacggccccgaccgcgtcaagtacctcggccccttctccggcgagcccccgagctacctcaccggcgagttccccggcgactacggctgggacaccgccgggctgtccgccgaccccgagaccttcgccaagaaccgcgagctggaggtgatccactcccgctgggccatgctcggcgcgctcggctgcgtcttccccgagctgctctcccgcaacggcgtcaagttcggcgaggccgtctggttcaaggccggctccca

SEQ ID NO: 87751 - DNA, 523 bp, Zea mays
agaaaggagctgtgtagttcaaccagcccacctatagctatactcttccggttcggaattaccggcccgacccacgcgtccgcggggcaacactttcacgctctatcgcttagctctagcaacggctgcctccaccatggggatctcatgcactgcatatcggcggtaccgaccatcaaggtgggctccttcagtgagggccgtatcaccatgcgcaagaccgtgggcaagcccaaggtggcggcgtgcggcagtccctgttacagtcccgaccgcgtgaagtacctcgaaccattgtgcggcgagcccccgagctacctaaccagcgagttccccggcgactacagatgggacacctccggactgtcctcctaccccgagaccttagccaagaaccgcgagctggaagtgacccactgccgctgagccattctccgggcgctcagctgattcttcccctagctgatctcacgcaactgtgcaaacttaggcgaggccatgtggttcaaggccggctaccaga

SEQ ID NO: 87752 - DNA, 532 bp, Zea mays
  unsure (1)..(532): unsure at all n locations
gggttaggtgtgtaacagacggggcgnagtattgctactgctctaccggtccggaattcccgggtcgacccacgcgtccgctcagtttgagaacccgtcggcgtacaaggatcaagtcattgccactggtctgccagcctcacctggggctgctgtgggccaggttgtgttcactgctgaggatgctgaagcatggcattcccaagggaaagctgctattctggtaagggcggagaccagccctgaggacgttggtggcatgcacgctgctgtggggattcttacagagaggggtggcatgacttcccacgctgctgtggtcgcacgtgggtgggggaaatgctgcgtctcgggatgctcaggcattcgcgtaaacgatgcggagaagctcgtgacgatcggaggccatgtgctgcgcgaaggtgagtggctgtcgctgaatgggtcgactggtgaggtgatccttggaaagcagccgctttccccaccagcccttagtggcgatctgggaactttcatggcctggtgggta

SEQ ID NO: 87753 - DNA, 535 bp, Zea mays
  unsure (1)..(535): unsure at all n locations
nggaatagtctgtttaaagaggcggagagtatagctagtactcgtactcggaattcccgggtcgacccacgcgtacgccattcttcagggtcaccctggacctgctggagatggttttcgccaagggagaccccggcattgccggcttgtatgacgagctgcttgtggcggaagaactcaagccctttgggaagcagctcagggacaaatacgtggagacacagcagcttctcctccagatcgctgggcacaaggatattcttgaaggcgatccattcctgaagcaggggctggtgctgcgcaacccctacattaccaccctgaacgtgttccaggcctacacgctgaagcggataagggaccccaacttcaaggtgacgccccagccgccgatgtccaaggagttcgccgacgagaacaagcccgccggactggtcaagctgaacccggctagcgagtacccgcccggcctggaagacacgctcatcctcaccatgaagggcatcgccgccggcatgcagaacactggctaggc

SEQ ID NO: 87754 - DNA, 522 bp, Zea mays
ggagggagaagggttttattacgagagggggggggagagtaagcttgtaccggtccggaattcccgggtcgacccacgcgtccgggcagacgatcagcgcggcgtggcgctcctgagcgagaccatgtccacacccgtgctggtggccacagcagaccagaccctggaggacgtcgagtgccacttcgaggccgtgtcggggcttccggtcgtcgacagcggcctcagatgcgtcggggtgatcgtcaagaacgaccgggcaagagcctctcatgggtccaagacgaagatatcggaagtgatgacatctccagctatcacactatcgtctgacaaaaccgtgatggatgctgctgttctcatgctcaagaagaagatccacagattaccagttgtaaaccaggacgaaaaagtaataggtatagttacccgcgctgatgttcttcgcgtgttggaaggcatgttgaagatttaggagcgcagatacccatgctcggaagccacagcctcttgtaaatatgt

SEQ ID NO: 87755 - DNA, 531 bp, Zea mays
  unsure (1)..(531): unsure at all n locations
nggttagttatttagagggaaggggataagtatgctgtactcggtctcggaattcccgggtcgacccacgcgtccgccccgcccgcctccgcgccccgctcggctccgccgtgcagcagagggagggtgacacggactccgtgcaacggatccgcggaacggtggcgcttggcaggtcctcagagactgagactgcgacggtggcggtggggatggccgacctggtgaacctctggaggctggtggagggcgcggacggcggcccggcctggaccaagatgatggagaagtcgctgcccaccatgacctaccgggcgtggaggagggacgcccagaccgggccttcgcagtaccagagcagcagcatcttcgagaacgccagtccagaggaggtgagggacttcttcggggacgacgagttccggatgtccaacaggtgggacgacatgctcatctaccacatgaccctggaggagtgccggaccactgggacgatgaaagtgcattgggtnctgaagttccnctttttct

SEQ ID NO: 87756 - DNA, 532 bp, Zea mays
gggttagtgttttacgaacagcatgtattgctatgctgtaccggtctcggaattcccgggtcgacccacgcgtccgcccacgcgtccggcaaacgcgccattgtctcgcactcgtagtcttgactcttgcgtgcttccctcgtcttctcggacgttccgttccatcgccatggcggaccagcttagcgaggagcagattgccgagttcaaggaagctttcagcctcttcgacaaggacggcgacggttgcatcacaaccaatgagctcggaaccgtgatgcggtctctcgggcataaccccaccgaggcggagctgcaggacatgatcgccgaggtggacagcaacggcagcggcaccatcgacgagcacgagttcctgggcctgatggctcgcaagatgagggacgcggagtctgatgaggagctcagggaggcgttccgcgtgttcgacaaggaccagaacggggtgatctacgtggacgagctccggcacgtgatgaccaacctcggtgagaagctgagcgagcaagag

SEQ ID NO: 87757 - DNA, 522 bp, Zea mays
  unsure (1)..(522): unsure at all n locations
agtttatatacgccgggagtagtatgtataccgtctcggaattcccgggtcgacccacgcgtccgatctcacagacccaattcgcgagttctctctactctgccgacatggcgctctctgtggagaagacctgctctggacgggagtacaaggtcatggatctctagcaggctgactaaggccgactagagattgagctggccgaggtcgaaatgcccggcctcatggcgtgccgcgccgagttcggcccgtccaagcccttcgccggcgctaggatctcggggtctctccacatgaccatccagaccgtcgtcctcatcgagaccctcaccgcgctcggcgccgaggtccgctggtgctcctgcaacatctttttcacgcaggaccacgccgtcgtcgtcatcgcgcgcgactcggccgncgtgttcgcctgggaggtggagaccctcgaggagtactggtggtgcaccgagcgctgnctagactggtgcnaagccggcngtnccggacctattgtcgacg

SEQ ID NO: 87758 - DNA, 531 bp, Zea mays
  unsure (1)..(531): unsure at all n locations
nggatatgtttaacagagggggatagtatgctatacccgtctcggaattcccgggtgaagcgatacgcacacattacaagctattttccgctgatattcgtgacataccaaaactggattcagttattcgcatggctgaaatggatcctagagtgtgtgcttatttacctggacccaactgccactggtgctattgtgagttgggcatctcaaaagttctccactgctgtctttttcttatatgagcagattcatcctgatgatgcatttggggagcaaatgattagaaatcttgagagtagaggatgcccccttctcggtataaatgctacaccaaccttgagtcacaaggagaaactttttcttggcaatggatggcagagagccgttgcatgggatatgctgaaaatctataatgacttcattgacagtcaagaaagacgcaggatcgaacggttagacctgtttgatgagtttgaagagtggtatatgatgcatgaacactactgtgtggcctatggaatcaacgan

SEQ ID NO: 87759 - DNA, 515 bp, Zea mays
tgtatgaggctaactacggagggggggaatgagtatgctgtaccggtccggaattcccgggtcgacccacgcgtccgattgcgactagtggcttacacgagtgggcactgacaaaagccgaggtcatagctgttctgtatgctggaattgtcgcatcttgcctgagctactcaatcatgacatgggcgaacaaagttcttggaccttctctggtcgccctctacaatccactgcaaccagccttttccaccgccctctcaactgttttccttggcgacccagtttacctcggaagcgttattgggggagtctccataattgctggtctctatctggtcatctgggctcgctacaatcaagggcagcgggcgcctacggatgcttgtttggaccctcttattattgtggataatccaagaatccccaagacacaagaaagtcccttcgtgtagatcctcaaaaaatgtgtcgattatccacacatttgtataggtggtctacagtatacttctatt

SEQ ID NO: 87760 - DNA, 535 bp, Zea mays
gggtttagctgtgttacgtggggaggtagtatgagatgctgtactcggtctcggaattcccgggtcgacccacgcgtccgaccttgtgaaagggcggggtggtgctcttcttcgtgagaagatggttgaggcagcatcggacaagtttattgttattgttgacgagacaaaactagttgatgggttaggaggtagtggtctagccatgccagtggaagttgtgcagttctgctggaagtacaaccttgtaagattgcaggaactgtttaaggaggaaggagtcgaggcaaagctaaggtttgaaggcgacaagccctatgttactgacaactcaaactacatcgtcgatttatacttcaagacgccaatcaaggatgcgttggcagcaggacaggaaattgcagctctggaaggagttgttgaccatgggttgttcttgaacatggcgagttcagtgatcattgctggaacggacggtgtcagtgtcaaaacgaagtgagtttttgagttgctttgtagttgtgatgaattttac

SEQ ID NO: 87761 - DNA, 528 bp, Zea mays
ggtagccttgttaccgcagagaagtattgtatgctcgtaccggtctcggaattcccgggtcgacccacgcgtccgaaagagcttacttacggtggctggggataaagctatttatcgtctcaagaccaggtttacaccaatctcaaaggcaaccgagctcatgcagcgaacactggttgggccatgctggcgctgattgatgcaggacaggcccagagagatcccgcgcctctacaccgagcagcaagggttttgataaacttgcagtcagaggacggagaatttccccagcaagagatcataggagtgttcaacaagaactgcatgatcagttactgccagtacaggaacaccttcccgatctgggctctgggagagtaccggtgccgagtcctgggagctggcaagctgtaatgacccggcctggccccgtcaactcgactgaaaaggcgtcttgtgtctcggtgttcttggtgttctatcttggcacgccgaaggctgtcttgacggccgtctaactgtctcatt

SEQ ID NO: 87762 - DNA, 529 bp, Zea mays
  unsure (1)..(529): unsure at all n locations
nggaaagcttgttacgaagagtagtacgctctactcgtctcggaattcccgggtcgacccacgcgtccgcatttatgcttatggttttgagaagccatctgcaattcagcagagaggaattgttcccttctgcaagggtcttgatgtcattcagcaagcacaatctggtacaggaaagacagcaaccttctgttctgggatcttgcagcagctggactatggcctggttgaatgccaggccctggtccttgctcccacccgtgagcttgcacagcaaatcgagaaagtcatgctcgcgcttggtgattaccttggtgttaaggtccatgcatgtgtgggaggaacatccgtccgtgaggaccaaaggattcttggcagtggtgtgcatgttgttgttggtacacctggtcgtgtgtccgatatgctgcgcagacagtgcctccgccctgataacatcaagatgtttgctctagatgaagctgatgaaatgctttctcgtggtttcaaggatcagatttacgacatcttc

SEQ ID NO: 87763 - DNA, 532 bp, Zea mays
  unsure (1)..(532): unsure at all n locations
gagataggtgntgaaagccgggaagtacgctataccggtctcggaattcccgggtcgacccacgcgtccgccatccgcacctctctccatctccctgctcctccgcctccttcttgatccagccaagccagggatcgccatgtcggactcggaggagcaccacttcgaatcgaaggccgacgccggagcgtccaagacctacccgcagcaggctggcaccgtccgtaagaacggcttcatcgtcatcaagaaccgaccctgcaaggttgtggaggtttctacctcaaagactggtaagcatggccatgccaaatgccactttgttgccatagacatattcaacgggaaaaagcttgaagatattgctgcttcatcacacaactgtgatattccgcatgtgaaccgtactgagtaccagctgatcgatatatcagaggatggatttgtgagccttcttacttcagatggcaacactaaggatgatcttagactcccaactgatgagactcttgtggcccagatcaaggaaggg

SEQ ID NO: 87764 - DNA, 531 bp, Zea mays
gggataggtgtgttacaagaacaagtatgcactactgtctcggaattcccgggtcgacctacgcgtccggaagaagacgagtgtcaagtgaacctgaaacttgcggtgtcactggctggtagcctgagtgtgagtgagtgatcgagctagctgagctccgatcctcgctagctaggataccgccataccacaagtcttcttcacaagtttaggagtgacagcaacaagagatcgatggcctctgccaccgtgctcaagtcctccttccttcccaagaagtccgaatggggcgccaccaggcaggccgtcgcgcccaggccgtccaccgtctccatggtcgtccgcgccttcgcctacgccgatgagctcgtgaagaccgctaaaacgatcgcgtcgccggcgcggggcatcctggcgatggacgagtcgaacgcgacgtgcgggaagcggctggcgtccatcgtgctggagaacacggaggccataccgcaagcgtaccgcacgctgctggtcacggcgccgggccctggg

SEQ ID NO: 87765 - DNA, 536 bp, Zea mays
  unsure (1)..(536): unsure at all n locations
tggtgagtgntnnnatgctggatcatagaatgacgctatgacctaccggatccgcggtctcgacccacgcgtacgcgagaagacgagtgttaagtgaacctgttactttcggtgccactggctgcgtacctgagtgtgagcgagtgatcgagctagctgagctccgatcctggctagctaggatacgcggcatacctcaagtacctttcacaagtttacgagtgacagcaacaagagatcgatggcctctgccaccgtgctcaagtcctccttccttcccaagaagtccgaatggggcgccaccagtgcatgccgccgctcccaggccgaccaccgtctccatggtcgcacgcgcctgcgtctacgccgatgagctcgagaagaccgctaaaacgatcgcgtcgtcatcgcggggcattctggccatggacgagtcgaacgcgacgtgcgggaagcggctggcattcctcaggctggaaaacacggaggacatgcggcatgcctaccgcacgcttctggtcacggaaaccagcctt

SEQ ID NO: 87766 - DNA, 520 bp, Zea mays
  unsure (1)..(520): unsure at all n locations
agataggaggtcctgatatacgtacagcaaatatagtatgctctaccggtctcggaattcccgggtcgacccacgcgtccgtttcatgtttggaatggagctggactacagcgacgccctcattggtggcggcttcttgttccagaatccaaacgcaacaaaaacctgtgggtgcggcaaatctttcgcgactggaaaggagaccgaggccgcggcaaccacttgcaacaactagagtagagaaatattgttagctaaacgtgatgtggcatgttgtatagcttgctcatgttgaagccctgtggctacaccacagatacataaagaggcatagttcaaaggaattacaccattaccaatggcctaattcagattttcttgtttggtgatcattccgaagtccttaaacttgtggtatggtctctcaaaatgcattgtattttcaggtatccaaacttgtcttgacgtgtcgtccaggcctacaagtactaaaattttatttntacatttttaaacttgg

SEQ ID NO: 87767 - DNA, 520 bp, Zea mays
  unsure (1)..(520): unsure at all n locations
gggaaagggctanatttaagacggcgggggggaaagtagtgctctaccggtctcggaattcccgggtcgacccacgcgtccgcaagggccttgtcccgctcgccggctccaacaacgagtcgtggtgccagggcctggacggcctggcgtcccgcgaggccgactactaccagcagggcgcgcggttcgccaagtggcgcaccgtcgtcagcatccctaacggcccctccgagctcgccgtcaaggaggccgcgtgggggctcgcacgctacgccgccatctcacaggacaacgggcttgtgccgatcgtggagccggagatcctgctggacggcgagcacggcatcgagcgcacgttcgaggtggcgcagaaggtgtggtccgaaaccttctacgccatggcggagaacaacgtcatgttcgagggcatcctgctgaagccgtccatggtgacgcccggcgcggaagccaaggacagggccaccccggagcatgtggccgcgtacactctcaagctccg

SEQ ID NO: 87768 - DNA, 516 bp, Zea mays
  unsure (1)..(516): unsure at all n locations
ggtagagtgatatantgtgaaccccagctatnagctatgccgtaccggttcggaattaccggcccgacccacgcgtccgctagggccttgtaccgctcgccggctcctacaacgagtcgaggtgccagggcctggacggactgacgtcacgcgaggccgactactaccagcagggctcgcggttcgccaagtggctcaccgccgtcagcatgcctaacggtccctacgagctcaccgtcaaggaagccgcgtggaggctcgaacgctactccggcatatcacaggacaacgggcttgttccgatcgtggagccggagatcctgctggactgcgagcacggcatcgaacgcacattcgaggtgtcgcacaaagtgtggtccgaaaccttctacgccatggccgtgaacaacgtgatgttccagggcatactgctgaagccgtccatggtgacaaccggcgcggaagccaaagacagggccaacccggatcatgtggcccggtacacccttaagcctc

SEQ ID NO: 87769 - DNA, 390 bp, Zea mays
ctagcagccgcccttagctccctcgactcagatctcccttcgcagccgccgaggggcggcttctcagagcggaagatggctgaacaggatgccccagtcgcggttgaggcaccaaccccagttcttggggagcctatggacttgatgactgctctgcagctcgtgatgaagaagtcaagtgctcatgacggtcttgtgaagggtctccgggaggctgccaaggccatcgagaagcacgccgctcagctttgcgtgcttgctgaggactgtgaccagccagattacgtcaagtttggtgaaggcactctgcgctgagcacaatgttcacctggtcactgtacctgccgctcagactcttggctagtgggccgggctttgcaagattgactt

SEQ ID NO: 87770 - DNA, 202 bp, Zea mays
cgaagcggcagtgtttagagaggagcgtcgaacagaacagcatgaagatggtcatcggtctcttcaagtgcctggctctgtcagctgccagcgcctctgcaatgcagatgccctgcccctgcgcggggctgcagggcttgtacggcgctggcgccggcctgacgacgatgatgggcgccggcgggctgtacccctacgcgga

SEQ ID NO: 87771 - DNA, 214 bp, Zea mays
  unsure (1)..(214): unsure at all n locations
ggagcacagaaagcacaagagtggacctacaaacgcagacaaaagagagagccnccagacgctccaaggacanccagcaacngctgatacggcgaccatgatcccgcaaagcgcgcaagcaccaatagcgaccctgcagcccccgaacctcacaccagcgagggctacagcaagcgaaaacccaatacgacaaccctacaggaaccaacaggca

SEQ ID NO: 87772 - DNA, 146 bp, Zea mays
  unsure (1)..(146): unsure at all n locations
ggcggctgcggacttgctcagcatgcgtaccagcgcgcgcgcggcgcccaggcaccggcatcttttagcaccgcgggggcacgntattttcgctcgtcgtgtgcgccagcgccagcatgaacgttgtcttcatcggcgccgagatg

SEQ ID NO: 87773 - DNA, 215 bp, Zea mays
gcgacatagaaagctcattactggaaatacaacgccagccaaaatatttagcttcctgatgcttctaaaactttctacaagtgctactaccgcaaccattttcccacaatgctcacaagctcctatagcttcctttcttcccccatacctcttaccagcggtgtcttcagtatgttaaaacccaattctacaaccctactagatccaacaagcaa

SEQ ID NO: 87774 - DNA, 140 bp, Zea mays
taaacgcgaccaaaagtcctcaatactcacaagctcctataactgccctaataaccccatacctaccatcaaagaccactaaaataagtaaaaaccccacccttaaaccctacaagctccaacaagcaaatcacaacaaa

SEQ ID NO: 87775 - DNA, 413 bp, Zea mays
agcaacatagaaagcacaatagtgaactaacaatggcagccaaaatattttgcctggtgatgctccatggtctttctgcaagtgctgctacggcgaccattttcccgcaatgctcgcaagctcctatagcttcccttcttcccccgtacctctcaccagcggtgtcttcggtatgtgaaaacccaattcttcaaccctacaggatccaacaggcaatcacagctggcatcttacctttatcacccttgttcctccaacaatcatcagccctattacatcagttacctttggtgcatttattggcacaaaacatcagggcacaacaactacaacaacttgtgctagcaaaccttgctgcctactctcagcaacagcagtttcttccattcaaccaactagctgcattgaactct

SEQ ID NO: 87776 - DNA, 337 bp, Zea mays
  unsure (1)..(337): unsure at all n locations
gcaacatagaaagcacaatagtgtaccaacaatggcagccaaaatattttgcttcctgatgctccttggtctttctgcaagtgttgctaccgcaaccattttcccacaatgctcacaagctcctatagcttcccttcttcccccatacctctcaccagcggtgtcttcaatgtgtgaaaccccaattgttcaaccctacaggatccaacaggcaatcgcaacaggcatcttaccattatcacccttgttccttcaacaaccgtcagccctattacagcagttacctttggtccatttggtggcacaaaacatcanggcacaacaactaccacaactt

SEQ ID NO: 87777 - DNA, 370 bp, Zea mays
  unsure (1)..(370): unsure at all n locations
ggaattcccgggattttgagcattcagaaacacaccaagcgaagcacattagcaacaacctaacaacaatggctaccaagatattggccctccttgcgcttcttgcgctttttgcgagcgcaacaaatgcgttcattattccacaatgctcacttgctccaagttccattattacacagttcctnccaccagttacttcaatgggcttcgaacacccagctgtgcaagcctataggctacaacaagcaattgcggcgagcgtcttacaacaaccaatttgccagttgcaacaacaatccttggcacatctaacaatacaaaccatcgcaacgcaacagcaacaacaattnctaccagcactgagccacct

SEQ ID NO: 87778 - DNA, 443 bp, Zea mays
caacatagaaagcacaatagtgtaccaacaatggcagctaaaatattttgcctccttatgctccttggtctttctgcaagtgctgctacggcgaccattttcccacaatgctcacaagctcctatagcttcccttcttcccccgtacctctcaccaacggtgtcttcggtatgtgaaaacccaattcttcaaccctacaggatccaacaggcaatcgcagctggcatcttacctttatcacccttgttcctccaacaatcatcagccctattacagcagttacctttggtgcatttattggcacaaaacatcagggcacaacaactacaacaacttgtgctagcaaaccttgctgcctactctcagcaacagcagtttcttccattcaaccaactagctgcattgaactctgcttcttatttgcaacaacaacaactaccatt

SEQ ID NO: 87779 - DNA, 436 bp, Zea mays
ctagcaacatagaaagcacaatagtgtaccaacaatggcagctaaaatattttgcctgcttatgctccttggtctttctgcaagtgctgctacggcgaccattttcccacaatgctcacaagctcctatagcttcccttcttcccccgtacctctcaccaacggtgtcttcggtatgtgaaaacccaattcttcaaccctacaggatccaacaggcaatcgcagctggcatcttacctttatcacccttgttcctccaacaatcatcagccctattacagcagttacctttggtgcatttattggcacaaaacatcagggcacaacaactacaacaacttgtgctagcaaaccttgctgcctactctcagcaacagcagtttcttccattcaaccaactagctgcattgaactctgcttcttatttgcaacaacaa

SEQ ID NO: 87780 - DNA, 328 bp, Zea mays
cagccagctagctgatgtgagccctgttgccttcttgacacaacaacagttgttgccgttctacctgcacgctgcgcctaacgctggcaccctcttacaactgcaacaattgctgccattcaaccaacttgctttgacaaacccaacagcgttctaccaacaacccatcattggtggtgccctcttttagattgcttatgagttatacttcaataatgaagttttttggatgatgtttgtggcttcccagaaataagaaagtacatttctagattcttaaaaaaaaaaaaaaaagcaaaaaaagaaacaaaacaaaaaaacacaacaa

SEQ ID NO: 87781 - DNA, 433 bp, Zea mays
atagaaagcacaatagtgtaccaacaatggcagccaaaatattttgcttccttatgctccttggtctttctgcaagtgctgctaccgcaaccattttcccacaatgctcacaagctcctatagcttcctttcttcccccatacctctcaccagcggtgtcttcagtatgtgaaaacccaattcttcaaccctacaggatccaacaggcaatcgcagcaggcatcttacctttatcacccttgttcctccaacaaccgtcagccctattacagcagttacctttggtgcatttgttggcacaaaacatcaaggcacaacaactacaacaacttgtgctaggaaaccttgctgcctactctcagcaacagcagtttcttccattcaaccaactggctgcattgaactctgctgcttatttgcaacaacaactacc

SEQ ID NO: 87782 - DNA, 211 bp, Zea mays
gtggttgggtgaattgaactgttgctgcttgataaattgtagggtgaaaacttgcctcgaatctattacacatgtatatgactcatcaaggcacatgtgcacacaagaaacatgtgtattttgttgtgtgcaagttgatgtggttacttccctccaaatatgtaaattccatatataactatccaaacaggatattgaatttgattcatgg

SEQ ID NO: 87783 - DNA, 259 bp, Zea mays
  unsure (1)..(259): unsure at all n locations
cttcaagcagctatagctagcataattaactcatgggtgcatagagatatgccgncgacgacccatatctatgggtccctccccttgcactgcatcttcttcttcctcctcctcgacctccttcaattattcctagtgtttgcttctcccttccttgacctttgcttggaaccattgatagttacttattgngcatggagcacgtcatctcaatggaggagatccctcggcccttctggagctgctgcagcgcagcgca

SEQ ID NO: 87784 - DNA, 426 bp, Zea mays
tgcagtcattggtacaaaccatcagggcacagcagctgcagcaactcgtgctacctgtgatcaaccaagtagctctggcaaacctttctccctactctcagcaacaacaatttcttccattcaaccaactgtctacactgaaccctgctgcttatttgcagcaacaactattaccattcagccagctagctactgcctactctcagcaacaacaacttcttccatttaaccaattggccgcactgaaccccgctgcttatttgcagcagcaaatactactaccatttagccagctagctgcagcaaaccgtgcttccttcttgacacagcaacagttgctgcctttctaccagcagtttgcggctaaccccgcaaccctcttacaactacaacaattgttgccctttgtccaacttgctttgacag

SEQ ID NO: 87785 - DNA, 428 bp, Zea mays
gcgaagcgcactagcaacgacctaacaccaatggctaccaagatattagccctccttgcgcttcttgcccttttagtgagcgcaacaaatgcgttcattattccacagtgctcacttgctcctagtgccagtattccacagttcctcccaccagttacttcaatgggcttcgaacatccagccgtgcaagcctacaggctacaactagcgcttgcggcgagcgccttacaacaaccaattgcccaattgcaacaacaatccttggcacatctaaccctacaaaccattgcaacgcaacaacaacaacaacagtttctgccatcactgagccacctagccgtggtgaaccctgtcacctacttgcaacagcagctgcttgcatccaaaccacttgctctggcgaacgtagctgcataccaacaacaaca

SEQ ID NO: 87786 - DNA, 436 bp, Zea mays
tagaaagcacaatagtgtaccaacaatggcagccaaaatattttgcttccttatgctccttggtctttctgcaagtgctgctaccgcaaccattttcccacaatgctcacaagctcctatagcttcctttcttcccccatacctctcaccagcggtgtcttcagtatgtgaaaacccaattcttcaaccctacaggatccaacaggcaatcgcagcaggcatcttacctttatcacccttgttcctccaacaaccgtcagccctattacagcagttacctttggtgcatttgttggcacaaaacatcaaggcacaacaactacaacaacttgtgctaggaaaccttgctgcctactctcagcaacagcagtttcttccattcaaccaactggctgcattgaactctgctgcttatttgcaacaacaactaccattc

SEQ ID NO: 87787 - DNA, 439 bp, Zea mays
  unsure (1)..(439): unsure at all n locations
aatattttgagcattcagaaacacacctagcgaagcgcactagcaacgacctaacaacaatggcttccaagacattatccctccttgcgcttcttgccctttttgtgagtgcaacaaatgcgttcattattccacaatgctcacttgctccgagtgccattattccacagttcctccctccagttacttcaatgggcttcgaacacccagctgtgcaagcctataggctacaacaagcgcttgcggcgagcgtcttagaacaaccaattgcccaattacaacaacaatccttggcacatctaaccatacaaaccatcgcaacgcagcagcaacaagcactgagccacctagccgtggtgaaccctatcgcctacttgcaacaacagctgcttgcattcaacncacttgctttggcaaacgtagctgcataccaacaaca

SEQ ID NO: 87788 - DNA, 390 bp, Zea mays
  unsure (1)..(390): unsure at all n locations
cccacgcgtccgccgcagtccgcaggaccggtcactcggcacgcaggctagcagcacagcagcagccagagccatcccctctcctcgctacgcttcgcttcctcggcgccgattcctcctcctcctcctccaccctcgtccgtccccttccggcgcacgagctcgcccgagatggcgaacgcgagatcgggtgtcgctgtgaacgatgagtgcatgctgaagtttggcgagctgcagtcgaagaggctgcaccgcttcataactttcaagatggacgacaagttcaaggagatagttgtggaccaggtcggngatcgcgctaccagctacgatgacttcacaaacagcctncctgagaatgactgccgatacgcgatctatgatttcgac

SEQ ID NO: 87789 - DNA, 209 bp, Zea mays
  unsure (1)..(209): unsure at all n locations
caaagcggcagtgcgtagagaggatcgtcgaacagaacagcatgaagatggtcatcgttctcgtcgtgtgcctggctctgtcagctgccagcgcctctgcaatgcagatgccctgcccctgcgcggngctgcagggcttgtacggcgctggcgccggcctgacgacgatgatggngcgccgcgggctgtacccctacgcggagtacctg

SEQ ID NO: 87790 - DNA, 444 bp, Zea mays
agcaacatagaaagcacaatagtgtaccaacaatggcagccaaaatattttgcttccgtatgctccttggtctttctgcaagtgctgctaccgcaaccattttcccacaatgctcacaagctcctatagcttcctttcttcccccatacctctcaccagcggtgtcttcagtatgtgaaaacccaattcttcaaccctacaggatccaacaggcaatcgcagcaggcatcttacctttatcacccttgttcctccaacaaccgtcagccctattacagcagttacctttggtgcatttgttggcacaaaacatcaaggcacaacaactacaacaacttgtgctaggaaaccttgctgcctactctcagcaacagcagtttcttccattcaaccaactggctgcattgaactctgctgcttatttgcaacaacaactaccattca

SEQ ID NO: 87791 - DNA, 440 bp, Zea mays
  unsure (1)..(440): unsure at all n locations
ccaactagcaacatagaaagcacaatagtgtaccaacaatggcagccaaaatattttgcctgcttatgctccttggtctttctgcaagtgctgctacggcgaccattttcccacaatgctcacaagctcctatagcttcccttcttcccccgtacctctcaccagcggtgtcttcggtatgtgaaaacccaattcttcaaccctataggatccaacaggcaatcgcagctggcatcttacctttatcacccttgttcctccaacaatcatcagccctattacagcagttacctttggtgcatttattggcacanaacatcagggcacaacaactacaacaacttgtgctagcaaaccttgctgcctactctcagcaacaacagtttcttncattcaaccaactagctgcattgaactctgcttcttatttgcaacaacaa

SEQ ID NO: 87792 - DNA, 416 bp, Zea mays
accggtccggaattcccgggatttgcaacaacaattaccattcagccagctagttgctgcctacccccagcaatttcttccattcaaccaactagcagcattgaactctgctgcttatttacagcagcaacaactactaccattcagccagctagctgatgtgagccctgctgccttcttgacacaacaacagttgttgccgttctacctgcacgctatgcctaacgctggcaccctcttacaactgcaacaattgctgccattcaaccaacttgctttgacaaacccaacagtgttctaccaacaacccatcattggtggtgccctcttttagattgcttatgagttatagttcaataatgaagttttttggatgatgtttgtggcgtcccagaaataagaaagtacatttctag

SEQ ID NO: 87793 - DNA, 393 bp, Zea mays
cccacgcgtccgagaccattagctttatctactccagagcgcagaagaacccgatcgacaccatgagggtgttgctcgttgccctcgctctcctggctctcgctgcgagcgccacctccacgcatacaagcggcggctgcggctgccagccaccgccgccggttcatctaccgccgccggtgcatctgccacctccggttcacctgccacctccggtgcatctcccaccgccggtccacctgccgccgccggtccacctgccaccgccggtccatgtgccgccgccggttcatctgccgccgccaccatgccactaccctactcaaccgccccggcctcagcctcatccccagccacacccatgcccgtgccaacagccgcatccaagcccgt

SEQ ID NO: 87794 - DNA, 433 bp, Zea mays
  unsure (1)..(433): unsure at all n locations
agcggatccagtctgtaccgctcgtcattggccagtttatggagatggtcgacggcaacaacggcatcgtgggctctaccactggcagcaactactacgtgcggatcctcagcaccatcaaccgcgagttgctcaagccgtcagcgtccgtcgcgttgcatcgtcactccaacgctctagtcgacgtgctgccgccggaggccgactccagcatctccttgttgggatcgtcggagaagcccaacgtcacttacaacgatattggaggatgtgacatccaaaagcaagaaatacgggaggcggttgaattacccttgactcatcatgagttgtacaagcagactggtattgatcctncaagaggggtgcttctgtatggtcctccgggtactggcaagaccatgcttgccaaagcagttgcacatcataccac

SEQ ID NO: 87795 - DNA, 316 bp, Zea mays
ctccagtccatcctgcagcagcagccgcaaagcggccaggtcgcggggctgttggcggcgcagatagcgcagcaactgacggcgatgtgcggcctgcagcagccgactccatgcccctacgctgctgccggcggtgtcccccactgaagaaactatgtgctgtagtatagccgctggctagctagctagttgagtcatttagcggcgatgattgagtaataatgtgtcacgcatcaccatgggtggcagtgtcagtgtgagcaatgacctgaatgaacaattgaaatgaaaagaaaaaaagtactccatctgttcc

SEQ ID NO: 87796 - DNA, 381 bp, Zea mays
gcaacatagaaagcacaatagtgtaccaacaatggcagccaaaatattttgcctccttatgctccttggtctttctgcaagtgctgctacggcgaccattttcccgcaatgctcgcaagctcctatagcttcccttcttcccccgtacctctcaccagcggtgtcttcggtatgtgaaaacccaattcttcaaccctacaggatccaacaggcaatcgcagctggcatcttacctttatcacccttgttcctccaacaatcatcagccctattacaacagttacctttggtgcatttattggcacaaaacatcaaggcacaacaactacaacaacttgtgctagcaaaccttgctggctactctcagcaacagcagtttct

SEQ ID NO: 87797 - DNA, 427 bp, Zea mays
  unsure (1)..(427): unsure at all n locations
aagcaacatagaaagtggaatccagtagcaacaatagagcaacaatggcgaccaagatactttccctccttatgctccttgctctttctgcatgtgttgctaacgcgacaattttccctcaatgctcacaagctcctatagcttcccttcttcccccataccttccatcaatgatagcttcagtatgtgaaaacccagctcttcaaccctataggctccaacaagcaatcgcagcaagcaacatacctttatcacccttgtttcaacaatcgccagccctatctttggtgcagtcattggtacaaaccatcaaggcacagcagctgcagcaactcgtgctacctgtgatcaaccaagtagctctggcaaacctttcntcctactatcagcaacaacaatttcttccattcaaccaactatctacact

SEQ ID NO: 87798 - DNA, 401 bp, Zea mays
gttcccctctcctgatcgtcctgttcctcacagcagcagccatggcggccgagccggagaagcaggcggcccccgcggcacaggagacggccgtgcacatcgtgtacgttgaccgccccgaggacgccgaccctgaggagttccacatccgcaccctcacccccgtcctcggcagcgaacagaaggccagggacgcagtgctctaccactacaagaacgccgccagcggcttctccgcgaagctcaccccccagcaggtcaaggatctcaaggagcaaccaggtgttctccaggttgtgccgagccagacttaccagctacatggtcctgggtctggcactcaccagggcacgacacacaccttgggccttatgtgaaggcgtatgagaatcaagaagact

SEQ ID NO: 87799 - DNA, 393 bp, Zea mays
  unsure (1)..(393): unsure at all n locations
gaagggcggtgcatgggatggtgctccggcgtgattccgaatacgatgtcttcgttggaacatccatcgttaacatgtatgtgaaatgtggtcagatgggcgctgccatgaatgagttctggaggatgccaatccggaatgtggtttcttggacaactgcgattgctggttttgtgcaacaggaggacccagtaaatgcaatgctgctgcttacagaaatgttgcggagtggtgtggcaattaacaagtacacggctacgagcatattgctcgcctgctctcaaacgtccatgatacgggaggctaatcangtgcacggcatgattataaagagcgagctgtacttggatcatgtngtcaaggangctttgatttncacatatgccaatgctg

SEQ ID NO: 87800 - DNA, 374 bp, Zea mays
attttgagcattcagaaacacacctagcgaagcgcactagcaacgacctaacaacaatggctaccaagatattatccctctttgcgcttcttgccctttttgtgagcgcaacaaatgcgttcattattccacaatgctcacttgctcctagtgccattattccacagttcctccctccagttacttcaatgggcttcgaacacccagctgtgcaagcctacaggctacaacaagcgcttgcggcgagcgtcttacaacaaccaattgcccaattacaacaacaatccttggcacatctaaccatacaaaccatcgcaacgcaacagcaacaacaatttctaccagcactgagccaactagctgtggtgaaccct

SEQ ID NO: 87801 - DNA, 414 bp, Zea mays
  unsure (1)..(414): unsure at all n locations
ccaactagcaacatagaaagcacaatagtgtaccaacaatggcagccaaaatattttgcctccttatgctccttggtctttctgcaagtgctgctacggcgaccattttcccgcaatgctcgcaagctcctatagcttcccttcttcccccgtacctctcaccagcggtgtcttcggtatgtgaaaacccaattcttcaaccctacaggatccaacaggcaatcacagctggcatcttacctttatcacccttgttcctccaacaatcatcagccctattacatcagttacctttggtgcatttattggcacaaaacatcagggcacaacaactacaacaacttgtgctagcanaccttgctgcctactctcagcaacagcagtttcttccattcaaccaactagctgcattga

SEQ ID NO: 87802 - DNA, 407 bp, Zea mays
attttgagcattcagaaacacaccaagcgaagctacctagcaacgacttaacaacaatggctaccaagatattagccctccttgcgcttcttgccctttttgtgagcgcaacaaatgcgttcattattccacaatgctcacttgctcctagtgccattataccacagttcctccgaccagttacttcaatgggcttcgaacacctagctgtgcaagcctacaagctacaacaagcgcttgcggcgagcgtcttacaacaaccaattaaccaattgcaacaacaatccttggcacatctaaccatacaaaccatcgcaacacaacagcaacaacagttcctaccagcactgagccaactagatgtggtgaaccctgtcgcctacttgcaacagcaggtgcttgcattc

SEQ ID NO: 87803 - DNA, 446 bp, Zea mays
  unsure (1)..(446): unsure at all n locations
accggtccggaattcccgggctttctgcatgtgttgctaacgcgacaattttccctcaatgctcacaagctcctatagcttcccttcttcccccataccttccatcaatgatagcttcagtatgtgaaaacccagctcttcaaccctataggctccaacaagcaatcgcagcaagcaacatacctttatcacccttgtttcaacaatcgccagccctatctttggtgcagtcattggtacaaaccatcaaggcacagcagctgcagcaactcgtgctacctgtgatcaaccaagtagctctggcaaacctttctccctactatcagcaacaacaatttcttccattcaaccaactatctacactgaaccctgctgcttatttgcagcaacaactattaccattcagncagctagctactggctactctcatcaacaacaacttttt

SEQ ID NO: 87804 - DNA, 416 bp, Zea mays
  unsure (1)..(416): unsure at all n locations
tgtacttgtaacacttgggtttgaccttaatattaaccatgcctataagcccttggttgaagcaataaggagattcaatattgataaaagaagtccacttcctcaggttgcctggaattttgtaaatgatgggctgcgtacttcgctttgcctgcagtttgagcctcatcatattgcagctggtgctatctatttggctgctaaatttctcaaagtgaatctcccatctgatggtgataagatttggtggcaggattttgatgtcacgccacgacaacttgaagaggttagcagtcaattgctggagttgtatgagcaaaaccgtacaacgcaggcacaatcatcacagggaagtgaaagcgangggagctctgctggtgtgtgtaatcaacgttcaactgtaaagtctgaaacga

SEQ ID NO: 87805 - DNA, 414 bp, Zea mays
gatcgccacagccaacaccacccgccgaggcgacgcgacagccgccaggaggaaggaataaactcactgccagccagtgaagggggagaagtgtactgctccgtcgaccagtgcgcgcaccgcccggcagggctgctcatctcgtcgacgaccagtggattaatcggcatggcggctctggccacgtcgcagctcgtcgcaacgcgcgccggcctgggcgtcccggacgcgtccacgttccgccgcggcgccgcgcagggcctgaggggggcccgggcgtcggcggcggcggacacgctcagcatgcggaccagcgcgcgcgcggcgcccaggcaccagcagcaggcgcgccgcggtggcaggttcccgtcgctcgtcgtgtgcgccagcgccggcatgaacgtcgtcttcgtc

SEQ ID NO: 87806 - DNA, 406 bp, Zea mays
ccaacaagcaacatagaaagtggaatccagtagcaacaatagagcaacaatggcgaccaagatattttccctccttatgctccttgctctttctacatgtgttgctaacgcgacaattttccctcaatgctcacaagctcctatagcttcccttcttcccccataccttccatcaattatagcttcaatatgtgaaaacccagctcttcaaccatataggcttcaacaagcaatcgcagcaagcaacatacctttatcgcccttgttgtttcaacaatcgccagccctatctttggtgcagtcattggtacaaaccatcagggcacaacagctgcagcaactcgtgctacctctgatcaaccaagtagctctggcaaacctttctccctactctcagcaacaacca

SEQ ID NO: 87807 - DNA, 379 bp, Zea mays
caactagcaacatagaaagcacaatagtgtaccaacaatggcagccaaaatattttgcctccttatgtccttggtctttctgcaagtgctgctacggcgaccattttcccgcaatgctcgcaagctcctatagcttcccttcttcccccgtacctctcaccagcggtgtcttcggtatgtgaaaacccaattcttcaaccctacaggatccaacaggcaatcacagctggcatcttacctttatcacccttgttcctccaacaatcatcagccctattacatcagttacctttggtgcatttattggcacaaaacatcagggcacaacaactacaacaacttgtgctagcaaaccttgctgcctactctcagcaacagc

SEQ ID NO: 87808 - DNA, 260 bp, Zea mays
gtttatggtttcaaagggacttctaagtaccagctctctgtagctatcaaggatgttagtggccaaaggattggtgaatatgctagtgcctcgggaagtgttgattttgattctgtgctgtgtagaaactgtaagcgccatatagccagccagtctgctcatcttcatgaggcatactgcatgagacacaatgtagcctgctcacatgatgggtgtggagttgtccttcggaagggaagaagcaacagatcatgtgcact

SEQ ID NO: 87809 - DNA, 408 bp, Zea mays
cccggctcgacccacgcgtacggcaacatagaaagcacaatagtgtaccaacaatggcagccaaaatattctgcctacttgtgctggttggtcttactgcaagctgctgctacgcgcgactcattgttcccgcaatgctcgcaagctcctatagcttcccttattgcccagtacctcttaccagcggtgtctcaggtatgtgaaaacccaatacttcaaccctacaggatccaacaggcaatcacagctggcatcttacctttatcacccttgttactgcaacaatcatcagccctattacatcacttacctttggtgcatttattggcacaaaacatcacggcacaacaactacaacaacttgtgctagcaaaccttgctgcctacttttagcaacaacagtttctt

SEQ ID NO: 87810 - DNA, 382 bp, Zea mays
  unsure (1)..(382): unsure at all n locations
cccacgcgtccgcctaccccacacagaagcggcggcggcggagcaaacgcaggcgaaggcgagggtgtgagggaaggagcaccagccatggtgcacgtcaacttctaccgcaactatggtaagacgttcaagaaaccaaggcgtccttatgagaaggagcgtcttgatgctgaactgaagctggttggtgagtatgggctgaggtgcaagcgtgagctttggagggtccagtatgcactgagcaggatccgtaatgctgcaaggcacttgctcacccttgacgagaagaacccccgtcgtatcttttgaggtgaggcacttcttcgncgcatgaaccgctatgggctgcttgctgaaggtcagaacaagcttgattatgttc

SEQ ID NO: 87811 - DNA, 399 bp, Zea mays
  unsure (1)..(399): unsure at all n locations
ggtggctggagttcctggtgtcacagaggctctgtttctggctaggcaagctgctttggcggaggggagcaagcctgctagcaccccaatgctttacagctgtgctctttgtggaaaggagtacagaagctcgaaagctcacgagcagcatcttaactcgcgatcacatcttttgaaagcctctcaggagcccaatgcctctattgctggtatcacgatagtcaagccacttcctgaacgagtctcacgaagagctccatctgcagtagaggaggatcaagacgacgatgaggaagaagagtgggttgaagttgacccaagtgagatggagttggctgatgagtctacttcaaacatgcangaagatgagcactcctcaaaatcagatgatgacatgga

SEQ ID NO: 87812 - DNA, 436 bp, Zea mays
atcaccctcattccgacagttccgctagaaggaaaagaagaaaaaaaaactctctttctctctctttcccagccctctctctccctctccacccggccgccaccatgtcaggcctctacagccagggcttctcccctgcaagaaccctctccccccagattaggagcaaccccgacgctgacagccagtacttggccgagcttctcgcggagcatcagaagctggggcccttcatgcaggtgctgccgatatgcagccggctgctcaatcaagaaatcatgcgggtatcaagcatggttcatgaccatggatttagtgatcttgacaggcgccggtttagaagtcctagccctatgtcctcaccaattgtccggcctaatctacatggcaatggatttggtccttggaatgggatgcaccaagagagattgggctt

SEQ ID NO: 87813 - DNA, 436 bp, Zea mays
cttcctttcttcccccatacctctcaccagcggtgtcttcagtatgtgaaaacccaattcttcaaccctacaggatccaacaggcaatcgcagcaggcatcttacctttatcacccttgttcctccaacaaccgtcagccctattacagcagttacctttggtgcatttgttggcacaaaacatcaaggcacaacaactacaacaacttgtgctaggaaaccttgctgcctactctcagcaacagcagtttcttccattcaaccaactggctgcattgaactctgctgcttatttgcaacaacaactaccattcagtcagctagctgctgcctacccccagcaatttcttccattcaaccaactggcagcattgaactctgctgcttatttacaacagcaacagctaccaccattcaaccagctagctgatgtgag

SEQ ID NO: 87814 - DNA, 458 bp, Zea mays
taccggtccggaattcccggggaccaactagcaacatagaaagcacaatagtgtaccaacaatggcagccaaaatattttgcctccttatgctccttggtctttctgcaagtgctgctacggcgaccattttcccgcaatgctcgcaagctcctatagcttcccttcttcccccgtacctctcaccagcggtgtcttcggtatgtgaaaacccaattcttcaaccctacaggatccaacaggcaatcacagctggcatcttacctttatcacccttgttcctccaacaatcatcagccctattacatcagttacctttggtgcatttattggcacaaaacatcagggcacaacaactacaacaacttgtgctagcaaaccttgctgcctactctcagcaacagcagtttctttcattcaaccaactagctgcattgaactctgcttcttatttgcaac

SEQ ID NO: 87815 - DNA, 218 bp, Zea mays
ccggctagacgtacgcgtccggtccttacttcagtgtagtataaggttaaaactatgtatgaccgaattaggtgggatccttgactcaatgctgctgtatccaaacgaacgtcaccatgacaggcctatacagaacaagggcgtgccgttctagaagatccatgtttacgtacacatgcatccaacgttatacttactgtatagactcacccaaactc

SEQ ID NO: 87816 - DNA, 472 bp, Zea mays
taccggtccggaattcccgggattgagaccaacaagcaacatagaaagtggaatccagtagcaacaatagagcaacaatggcgaccaagatactttccctccttatgctccttgctctttctgcatgtgttgctaacgcgacaattttccctcaatgctcacaagctcctatagcttcccttcttcccccataccttccatcaatgatagcttcagtatgtgaaaacccagctcttcaaccctataggctccaacaagcaatcgcagcaagcaacatacctttatcacccttgtttcaacaatcgccagccctatctttggtgcagtcattggtacaaaccatcaaggcacagcagctgcagcaactcgtgctacctgtgatcaaccaagtagctctggcaaacctttctccctactatcagcaacaacaatttctttcattcaaccaactatctacactgaaccctgctgt

SEQ ID NO: 87817 - DNA, 368 bp, Zea mays
caacaatggcagctaaaatattttgcctacttatgctccttggtctttctgcaagtgctgctacggcgaccattttcccacaatgctcacaagctcctatagcttcccttcttcccccgtacctctcaccaacggtgtcttcggtatgtgaaaacccaattcttcaaccctacatgatccaacaggcaatcgcagctggcatcttacctttatcaccctagttgctccaacaatcatcagccctattacagcagttacctttggtgcatttattggcacataacatcagggcacaacaactacaacaacttgtgctagccaaccttggtggctactctaagaacagcagtttcttccattcaaccaac

SEQ ID NO: 87818 - DNA, 84 bp, Zea mays
gtcctttttctttttgatagtattacgtttaaaactatgtatgaccgaattatttgtcatcctggactcaattctgctgcaacc

SEQ ID NO: 87819 - DNA, 299 bp, Zea mays
gcggcagtgcgtagagaggatcgtcgaacagaacagcatgaagatggtcatcgttctcgtcgtgtgcctggctctgtcagctgccagcgcctctgcaatgcagatgccctgcccctgcgcggcgctgcatggcttgtacggcgctggcgccggcctgacgacgatgatgggcgccggcggtctgtacccctacgcggagtacctgaggcagccgcagtgcagcccgctggcggcagcgccctactacgccgggtgtgggcagactagcgccatgtaccagtcgctccggcaacagtgct

SEQ ID NO: 87820 - DNA, 301 bp, Zea mays
cgacccagcgtacccggcagtgcgtatagaggatcgtcgatcagaacagcatgaagatggtcatcgttctcggcgggtgcctggctctgtcagctgccagcacctctgcaatgcagatgccctgcccctgcgcggggctgcatggcttgtaccgcgctggcgccggcctgacgacgatgatgggcgcctgcggtctgtacccctacgcggagtacctgaggcagccgcagagcaccccgctggcggcagcgccctactacgcctgatgttggcagacgagcgccatgtaccattcgttccg

SEQ ID NO: 87821 - DNA, 353 bp, Zea mays
gcgggctagatgaaagcagttgttgctgttgtaggtaggcggcagggttcaccatggctagttgactgagcgctggcagaaactgttgcagctgttgttgtggccaatgcacctacatacctgcaacaacaattgttgcaacagattgtaccagctctgactcagctagttgtggcaaaccctgctgcctacttgcaacagctgcttccattcaaccaactgactatgtcgaactctgctgcgtacctacaacagcgacaacagttacttaatccactagcagtggctaacccattggtcgctgccttcctacagcagcaacaattgctgccatacaaccagttctctttgat

SEQ ID NO: 87822 - DNA, 362 bp, Zea mays
gcgggctagatgaaagcagttgttgctgttgtaggtaggcggcagggttcaccatgggtaggtgactgagcgctggcagaaactgttgcagctgttgttgtggccaatgcacctacatacctgcaacaacaattgtagcaacagattgtaccagctctgactcagctagttgaggcaaaccctgctgcctacttgcaacagctgcttccattcaaccaactgactatgtcgaactctgctgcgtacctacaacagcgactacagctacttaatccactagcagtggctaacccattggtcgctgccttcctacagcagcaacaattgctgccatacaaccagttctctttgataaaccctgt

SEQ ID NO: 87823 - DNA, 428 bp, Zea mays
tgcagctaaagtcgatgccatcaaggatacactggagaacgatgagcagaaggttggagctgaaatagtaaggagggccctgagctacccacttaaattgattgctaaaaatgccggtgtcaatggcagcgtcgtcactgagaaggtcctttctaacgataacttcaagtatggttacaatgctgctactggacagtacgaggacttgatggctgctggtatcattgatcctactaaggtggtgagatgctgtttggagcatgccgcgtcggtggccaagaccttcctgacatctgatgttgtggtcgtcgatattaaggagccagagtctgcgccccttgctaacccgatggacaactctggctatggatactaatggagatgagatggccaaccccatgggaggaaggtgatcacaattttttttt

SEQ ID NO: 87824 - DNA, 329 bp, Zea mays
cgtccggaattcccgggcaacaatggcttccaagacattatccctccttgcgcttcttgccctttttgcgagtgcaacacatgcgtgcatgattccacaatgctcacttgctccgagtgccattattccacagttcctacctcgagcaacttcactgggctctgaacacctagctgtgcaagcctatatgctacatccttcgctcgctgaagcgtcctgattgcgccatctcggcacttacaccatccatgcttgacccagctatctttacaagccatttacctgcatcacccgcgtgctctgatcaactctatgcctttgatccgttg

SEQ ID NO: 87825 - DNA, 411 bp, Zea mays
cttcccttcttcccccgtacctctcaccaacggtgtcttcggtatgtgaaaacccaattcttcaaccctacaggatccaacaggcaatcgcagctggcatcttacctttatcacccttgttcctccaacaatcatcagccctattacagcagttacctttggtgcatttattggcacaaaacatcagggcacaacaactacaacaacttgtgctagcaaaccttgctgcctactctcagcaacagcagtttcttccattcaaccaactagctgcattgaactctgcttcttatttgcaacaacaacaactaccattcagccagctatctgctgcctacccccagcaatttcttccattcaaccaactgacagcattgaactctcctgctttttacagcagcaacaactact

SEQ ID NO: 87826 - DNA, 441 bp, Zea mays
tcagcctcatccccagccacacccatgcccgtgccaacagccgcatccaagcccgtgcgcagctgcagggaacctgcggcgttggcagcaccccgatcctgggccagtgcgtcgagttcctgaggcatcagtgcagcccgacggcgacgccctactgctcgcctcagtgccagtcgttgcggcagcagtgttgccagcagctcaggcaggtggagccgcagcaccggtaccaggcgatcttcggcttggtcctccagtccatcctgcagcagcagccgcaaagcggccaggtcgcggggctgttggcggcgcagatagcgcagcaactgacggcgatgtgcggcctgcagcagccgactccatgcccctacgctgctgacggcggtgtcccacactgaagaaactatgtgctgtagtataggccgtggctagctagctagt

SEQ ID NO: 87827 - DNA, 432 bp, Zea mays
agccaatcgccaagccaagccaagccagaagcggcagcctcgcgcagcggtctggtctctcttgtgggtggtgcccttcttcgccggtggccggaaagggcagtggagtgggaccgctcaaggagaggccggcgtccccaagtctcacttccgccgtccactttccccctgtagggatcgagggaggaaggaaaggaggtgcttcacaatgaaggccctcattcttgtcgggggtttcggaacccgccttcggcctttgactctgagcttcccgaaacccctcgtggattttgcaaacaagcccatgattctgcaccagatcgaagctttgaaagaagttggggtcacagaggtggttttggctatcaactatcgcccagaggtaatgattaatttcttgaaggactttgaggataagcttggcatcacaat

SEQ ID NO: 87828 - DNA, 434 bp, Zea mays
tagaaagtggaatccagtagcaacaatagagcaacaatggcgaccaagatactttccctgcttatgctccttgctctttctgcatgtgttgctaacgcgacaattttccctcaatgctcacaagctcctatagcttcccttctttcaccataccttccatcaatgatagcttcagtatgtgaaaacccagctcttcaaccctataggctccaacaagcaatcgcagcaagcaacatacctttatcacccttgtttcaacaatcgccagccctatctttggtgcaatcattggtacaaaccatcaaggcacatcaactgcaacaactcgtgctacctgtgatcaaccaagtaacttttggcaacctttcttcctactatcagcaacaacaatttctttcattcaaccaactatctacactgaacccttctgctta

SEQ ID NO: 87829 - DNA, 326 bp, Zea mays
gcaacatagaaagcacaatagtgtaccaacaatggcagccaaaatattttgcctccttatgctccttggtctttctgcaagtgctgctacggcgaccattttcccacaatgctcacaagctcctatagcttcccttcttcccccgtacctctcaccagcggtgtcttcggtatgtgaaaacccaattcttcaaccctataggatccaacaggcaatcgcagctggcatcttacctttatcacccttgttccttcaacaatcatcagccctattacagcagttacctttggtgcatttattggcacaaaacatcagggcacaacaac

SEQ ID NO: 87830 - DNA, 439 bp, Zea mays
  unsure (1)..(439): unsure at all n locations
gcaacatagaaagcacaatagtgtaccaacaatggcagccaaaatattttgcttccttatgctccttggtctttctgcaagtgctgctaccgcaaccattttcccacaatgctcacaagctcctatagcttcctttcttcccccatacctctcaccagcggtgtcttcagtatgtgaaaacccaattcttcaaccctacaggatccaacaggcaatcgcagcaggcatcttacctttatcacccttgttcctncaacaaccgtcagccctattacagcagttacctttggtgcatttagtggcacaaaacatcaaggcacaacaactacaacaacttgtgctaggaaaccttgctgcctactctcagcaacaacagtttcttccattcaaccaactggctgcattgaactctgctgcttatttgcaacaacaactacca

SEQ ID NO: 87831 - DNA, 357 bp, Zea mays
caacaagcaacatagaaagtggaatacagtagcaacaatagagcaacaatggcggccgggatattttccatccttatgctccttgctctttctgcatgtgttgctaacgcgaccatttttcctcaatactcacaagctcctatagctgcccttcttcccccataccttccatcaatgaccgcttcagtttgtgaaaacccagcccttcaaccctacaggctccaacaagcaatcgcaacaagcaacttacctttatcacccctgttctttcaacaatcgccagccctatctttggtgcagtcattggtacaaaccatcagggcacaacagctgcaacaactcgtgctaccagtgatc

SEQ ID NO: 87832 - DNA, 374 bp, Zea mays
ccggttcggattcccggtcgacctacgcgtccggtctctgctactcacctagccgccagtcatgggcatgatcaagatcggaatcaacgggttcggaaggatcggctggctcgtggtcagggtcgtcctgcagagcgaggatgtcgagctcgtctgcgtcaacgaccgcttcatcaccacggattacatgacctacatgttcaagtacgacaccgtgcacggtcaatggaagcacatgcgacattaccctcaaggactccaagacgcttcttgttggcgagaagccggtcaccgtctttggcatcaagaacctccgagagattccgtgatgtgaggctggtgctgtatatgtcgtgcagtccatcggtgtcttc

SEQ ID NO: 87833 - DNA, 375 bp, Zea mays
attcagaaacacacctagcgaaacgcactagccacgacctaactgcagtggctaccaagatattagcatcttcttgcgctacttgccctttttgtgagcgcaacaaatgcgtacattattccacaatgctcacttgctactagtgccattattccacagttcctccgaccagatacttcaatgggcttcgaacacctagctgtgcaagccaacatgcaacaacgagcacttgcggcgagcgtcttacaacaaccaattgcccaattgcaacaacaatccttgccacatctaacattacaagccatcacaactcaacagcaacaacagttcctaccagcactgagccacctagacatggtgaaccatgtcgactac

SEQ ID NO: 87834 - DNA, 415 bp, Zea mays
  unsure (1)..(415): unsure at all n locations
gtcgaacagaacagcatgaagatggtcatcgttctcgtcgtgtgcctggctctgtcagctgccagcgcctctgcaatgcagatgccctgcccctgcgcggggctgcagggcttgtacggcgctggcgccggcctgacgacgatgatgggcgccggcgggctgtacccctacgcggagtacctgaggcagccgcagtgcagcccgctggcggcggcgccctactacgccgggtgtgggcagccgagcgccatgttccagccgctccggcaacagtgctgccagcagcagatgaggatgatggacgtgcagtccgtcgcgcagcagctgcagatgatgatgcagcttgagcgtgccgctgccgncagcagcagcctgtacgagccagctctgatgcagcagcagcagcagctgctgg

SEQ ID NO: 87835 - DNA, 392 bp, Zea mays
cctcactggaaagactatcaccctcgaggtggagtcttctgacaccattgacaacgtgaaggccaagatccaggacaaggagggcatccccccggaccagcagcggctcatctttgctggcaagcagctcgaggacgggcgcacacttgccgactacaacatccagaaggagagcaccctccaccttgttctccgcctcaggggaggcatgcagatcttcgtcaagaccctcactggaaagactatcaccctcgaggtggagtcttctgacaccatcgacaacgtcaaggccaagatccaggacaaggagggcatccctccagaccagcagcggctcatttttgccggcaagcagctcgaagacgggcgcacgctggccgactacaacattc

SEQ ID NO: 87836 - DNA, 196 bp, Zea mays
gacccactcgtacctagcaacatacatagataagcacactatcaacatcttagcaccactgtatacctacatggctaaggctccttgccctccttgctatttcatcaagcgctactaccttgactcttattccacaatgctcacaacaatacctctttccagcgtcactctcatcatttcaatactcaactataca

SEQ ID NO: 87837 - DNA, 331 bp, Zea mays
gtcctcattattattctcactggtcgatctgctaacacaaacagcagcagctcctcctcactagctagccttctctatttttgctactgcaagtgtccaagtctgcgacgacgtccgagatgtcgacggtgagccgtgcatcccttgaccagaagcttgccctcgccaagcgctgctcccgagaggcgactcttgccggagctaaggcggcagcagtggcgactatcgcctccgcgattcccaccctcgcgagcgtgcggatgctgccgtgggccaaggccaacatcaaccccaccggccaggcgctcatcgtcttcacggtggccgggat

SEQ ID NO: 87838 - DNA, 438 bp, Zea mays
agcaacatagaaagcacaatagtgtaccaacaatggcagccaaaatattttgcctccttatgctccttggtctttctgcaagtgctgctacggcgaccattttcccgcaatgctcgcaagctcctatagcttcccttcttcccccgtacctctcaccagcggtgtcttcggtatgtgaaaacccaattcttcaaccctacaggatccaacaggcaatcacagctggcatcttacctttatcacccttgttccttcaacaatcatcagccctattacatcagttacctttggtgcatttattggcacaaaacatcagggcacaacaactacaacaacttgtgctagcaaaccttgctggctactctcagcaacagcagtttcttccattcaaccaactagctgcattgaactctgcttcttatttgcaacaacaacaac

SEQ ID NO: 87839 - DNA, 284 bp, Zea mays
  unsure (1)..(284): unsure at all n locations
gaccaactagcaactatagaaagcataaagtgtaccaacaatggcagccaaaagtntttcctacaatgctcattggcctttcttcaagtgctgctactgcgaccattttcccgcaatgctcgcaagctcctataacttcccttcttccaccgaacctctcaccagcaatgtcttcagtatgttaaaacccaattcttcaaccctacaggatccaactagcaattacaacttgaatataacctttatcaccctagatcctactacatatatcatccctataacaa

SEQ ID NO: 87840 - DNA, 362 bp, Zea mays
agtcagaaacacatcaagcgaacgtactagcaacaacctaacaacaatggctacgaagatattataactccttgcagcttcttgcgctttttgcgagcgcaacaaatgcgtccattattccacaatgctcacttgctcctagttccattattccacagttcctcccaccagttacttcaatggccttcgaacacccagctgtgcaagcctataggctacaacaagcgattgcagcgagcgacttacaacaaccaattgcccaattgcaacaacaatccttggcacatctaacaatacaaaccatcgcaacgcaacagcaacaacatgtcctaccatcactgagccacctagccatggtgaac

SEQ ID NO: 87841 - DNA, 209 bp, Zea mays
gcggaacaagcaacatagaaagcggataacaccacccacaatagagcaacaatggcgaccattttaaaggccctggttaccctccttactctggctgcatgtgttgctaacgcgacaatattccctcaatgctcacaagctcctatagcttcccttcttcccccataccttccatcaatgatagcttaagtatgttaaaacccagctct

SEQ ID NO: 87842 - DNA, 279 bp, Zea mays
  unsure (1)..(279): unsure at all n locations
aatacccgcgtcgacccacgcgtgcgagccacacccatgtccgtgccaactgccgcatccaagcccgtgccagctgcanggaacctgttgcagaaggcagcaccccgatcctgggccagtgcgtcgagtttctgaggcatcagtgcagcccgacggcgacgccctactgctcgcctcagtgccagtcgttgcggcagcagtgttgccagcagctcatgcaggtggagccgcagcaccggtaccaggcgatcttcggctaggacctccagtccatcctgc

SEQ ID NO: 87843 - DNA, 349 bp, Zea mays
cgactagcaacatatgaaagcacaataagtaccaacaatggcagccaaaatagtggcttccttaaactccttggtctttctgcaagtgctgctaccgcaaccattttcccacaatgctcacaagctcctatagcttcctttcttcccccatacctctcaccagcggtgtcttcagtatgtgaaaacccaattcttcaaccctacaggatccaacaggcaatcgcagcaggcatcttacctttatcacccttgttcctccaacaaccgtcagccctattacagcagttacctatggtgcatttgataggcacaaaacattaaagcacaacaactacaacaacttgagcta

SEQ ID NO: 87844 - DNA, 229 bp, Zea mays
  unsure (1)..(229): unsure at all n locations
tcagcattcaaaaacacgccaagcgaatctcactagcaacgtactaacaccaatggctaccaagatatnagcccttcttacaaaagcttgccctcctagttatcgcagcagatgcgttcattataccacagtgctcacttgctcctaatgccattattccacacttcctcccaccagtcactacaatgggctacaaacatcctaccatgcaaacctacaagctacaact

SEQ ID NO: 87845 - DNA, 282 bp, Zea mays
ttgagaccaactatcaacatagaataaacaataccgtaccaacaatggcaggcagaatattttgcaaacttatgctccttggtctttctgcaagtgttgctaccgcaaccattttcccacaatgctcacaagctcctatagcttcccttcttcccccatacctctcaccagcggtgtctgcaatgtgtgaaaccccaatagttcaaccctacaagatccatacatgcaatcgcaacaagcattttaccattatcacccttgaacctataacaactcattgcc

SEQ ID NO: 87846 - DNA, 362 bp, Zea mays
gctaggcctaacttgaaggtgggctaaagtggacaacatggtggagagccttgagcggttgttatattcgccaagactgggctggattacgtttcttgctcccctttcagggtcccgatcgctaggctagctgcagctcaggtgcttgtctgagggtgcctctgctcgttggcagccggatcgcctgctgttggtgcatctggtgattaataatactactatgacagagccatgctctgtgaagagtattagtagcagcgctcataaaagctacagttccgtctctattctcagctatgtaaaacttccaaactgttcatgcttaaaactgaaggttttcttggtgtgaggtgtgcatgtcg

SEQ ID NO: 87847 - DNA, 372 bp, Zea mays
agaaacacacctatcgaagcgcactaacaacgacctaacaacaatggctaccagggtattattccatatttgcgcttcttgccctttttgtgagcgcaacaaatgcgttcattattccacaatgctcacttgctcctagtgccattattccacagttcctccctccagttacttcaatgggcttcgaacacccagctgtgcaagcctacaggctacaacaagcgcttgcggcgagcgtattacaacaaccaattgcccaattacaacaacaatccttggcacatctaaccatacaaaccatcgcaacgcaacagcaacaacaatttctaccagcactgaaccaactagctgtggtgaaccctgtcgccttac

SEQ ID NO: 87848 - DNA, 283 bp, Zea mays
cgactagcaacatattaaagcacaatgagtaccaacaatggcagccaaaatagtgggcctctttatactccttggtctttctgcaagtgctgctacggcgaccattttcccgcaatgctcgcaagctcctatagcttcccttcttcccccgtacctctcaccagcggtgtcttctgtatgtgaaaacccaattcttcaaccctacaggatccaacaggcaatcgcagctggcatcttacctttatcacccttgattctacaacaatcttcagtcctattacaa

SEQ ID NO: 87849 - DNA, 287 bp, Zea mays
cgactatcaacattataaagccacaataagtacccacaatggcagccaaaataggggctttcttatactccttggtaactctgcaattgttgctaccgcaaccattttcccacaatgctcacaagctcctatagcttcccttcttcccccatacctctcaccaacagtgtcttcaatgagtgaaaacccaactgtccaaccctacaggatccaataagcaattactaccagcttattaccattattacacttaatacttcatacaaccaacatacctattacaacaa

SEQ ID NO: 87850 - DNA, 233 bp, Zea mays
  unsure (1)..(233): unsure at all n locations
cgacaagcaacatataaagcggaaataagtacncccaatagagcaacaatggcnagccattatataaaaccctccttatgccccatactctggctacatgtgttgctaacgcgacaattatccctcaatgctcacaagctcctatagcttccctacttaccccataccttccatcaattatagcttcaatatgagaaaacccatcacttcaaccatataggccacaacaagca

SEQ ID NO: 87851 - DNA, 197 bp, Zea mays
gacaaaaacaagttcaacacactcatgaacagacttgttgtgcgatttaccaggcagggacatcacaacacaaatcatatctgctattatagcgggtgatatggttcttgcttctgcctactctcatgagttgccacgatatggtcttgaagttggtctgaccaactattcagctgcctactgcactggacttctgt

SEQ ID NO: 87852 - DNA, 213 bp, Zea mays
cggcaagaagattttgttggtggataaaaagggcttgattgttgactctcgggaagactcttttcaagcattcaaagccccttctagcacatgagcatgagcccttgacaaccttgtacgatgctgttcagtccatcaaacctacagttctgattgggacgtctggaattggaagaacattcacaaaagaagttgttgaagccatggcttcct

SEQ ID NO: 87853 - DNA, 205 bp, Zea mays
  unsure (1)..(205): unsure at all n locations
ggagcaccccgattctgggccagagtancgagtccctgaggcatcagtgcaggccgactgctacgaactactgctggcctcagtgccagtcggtgcggcagcagtgttgccagcagctcatgcaggtggagccgcagcaccggtaccaggcgatcttcggcttggtcctacagtccatccagcagcaatagccgcaaagcggtca

SEQ ID NO: 87854 - DNA, 525 bp, Zea mays
agtagggtttggatccacgccctcagcatgcccgtccggtccggaattcccgggtcgacccacgcgttcggacaaagcgcggagggtccgcgccggcgccggagcgctggcggcgccgctcgccgtggggctcctggcgggggctaacgtgctggcctgcggcgcgctggagggcgccgtgatgaatccggcgcgcgcgttcgggcccgccgtcgtgggctcccgtcgctggagacaccaatgggtgtactgggtggggcccatggtcggcgccggcctctccggcgtcgtctacgagcacctcgtcgccggcccggccgccgaggaggaggaagagcccgcgccgagctgcggcgaccgccgtcgtgcgtagaggactacatgcatgcaggagcagcaggacgtcgtcgtcgttcccgcttctcgggatcttcttgattaaaaaaccgcttggatgcgtgctcaaatggtgtgtgttccgggcgaacccgtgtttagattaagggtcatgggcaaaaaaaaaaa

SEQ ID NO: 87855 - DNA, 336 bp, Zea mays
accaagccttccggaaccttaaaaggtggattccggtaccaaaattagaccaccattggcggccaaaatgttttccatccttatgctcgttgctctttcggaatgagttgctaacgcgaccatttatcctcaatactcacaagctactatagctgcccttcttactccataccttacatcaatgaccgctttagtatgtgaaaacccagcccttcaaccctacaggatccatctagcaatcgcaacaagcatcttacctttatcacacctgttcttttaacaatcgccagccctatctttggtgcacacattggtacaaaccatcacggcataaca

SEQ ID NO: 87856 - DNA, 354 bp, Zea mays
ggaatccagtagcaacaacagagcaacaatggcgaccaagatattttccctccttatgctccttgctctttctgcatgtgttgctaacgcgacaattttccctcaatgctcacaagctcctatagcttcccttcttcccccataccttccatcaatgatagcttcagtatgtgaaaacccagctcttcagccctataggctccaacaagcaatcgcagcaagcaacatacctttatcacccttgttgtttcaacaatcgccagccctatctttggtgcagtcattggtacaaaccatcagggcacagcagctgcagcaactcgtgctacctgtgatcaaccaagtagctctggc

SEQ ID NO: 87857 - DNA, 385 bp, Zea mays
gctagctactgcctactctcagcaacaacaacttcttccatttaaccaattggccgcactgaaccccgctgcttatttgcagcagcaaatactactaccatttagccagctagctgcagcaaaccgtgcttccttcttgacacagcaacagttgctgcctttctaccagcagtttgcggctaaccccgcaaccctcttacaactacaacaattgttgccctttgtccaacttgctttgacagaccgagcggcctcctaccaacaacacatcattggtggtgccctcttttagattgcttattagttgtaattcaataataaagttttttggatgatgtatgtggccaaccagaaataagaagttacattttcagattttaatgtg

SEQ ID NO: 87858 - DNA, 366 bp, Zea mays
gttctcttccatcatctgtctgcgagatgagatcgttgtatctcctggatgcccatttgaatgaactatgcggtctaccatctctcttcgggaaacttagcggccttgaaattctcaaccttagcagcaacttcagtgatttgaaagagcttcctccctcgattggtgactagctaaatctgcgtgagcttgacctaagcaacaaccagattcatgctctccctgacacttttggtcggctggataaactggagaagcttaacctagagcagaaccctctagtcattccaccagaagacattgtgaacaacggcgtggatgcagtaaaagagtacatgtcaaaaacgtggctggacatattgctcg

SEQ ID NO: 87859 - DNA, 187 bp, Zea mays
gaccaactagcaacatagaaagcacaatagtgtaccaacaatggcagccaaaatattttgcctccttatgctccttggtctttctgcaagtgctgctacggcgaccattttcccgcaatgctcgcaagctcctatagcttcccttcttcccccgtacctctcaccagcggtgtcttcggcatgtgaa

SEQ ID NO: 87860 - DNA, 341 bp, Zea mays
attcagaaacacaccaagcgaagcgcactagcaacaacctaacaacaatggctaccaagatattatccctccttgcgcttcttgcgctttttgcgagcgcaacaaatgcgtccattattccacaatgctcacttgctcctagttccattattccacagttcctcccaccagttacttcaatggccttcgaacacccagctgtgcaagcctataggctacaacaagcgattgcggcgagcgtcttacaacaaccaattgcccaattgcaacaacaatccttggcacatctaacaatacaaaccatcgcaacgcaacagcaacaacagttcctaccagcactg

SEQ ID NO: 87861 - DNA, 337 bp, Zea mays
attttcagcattcaaaaacacaccaagcgaagcgcactagcaacgacctaacaccaatggctaccaagatattagccctccttgcgcttcttgcccttttagtgagcgcaacaaatgcgttcattattccacagtgctcacttgctcctagtgccagtattccacagttcctcccaccagttacttcaatgggcttcgaacatccagccgtgcaagcctacaggctacaactagcgcttgcggcgagcgccttacaacaaccaattgcccaattgcaacaacaatccttggcacatctaaccctacaaaccattgcaacgcaacaacaacaacaaca

SEQ ID NO: 87862 - DNA, 532 bp, Zea mays
  unsure (1)..(532): unsure at all n locations
gaggagaggtttgagttaagtagcgtactgtcatgccagtccggtccggaattcccgggtcgacccacgcgttcgagcattcagaaacacaccaagcgaagctacctagcaacgacttaacaacaatggctaccaagatattagccctccttgcgcttcttgccctttttgtgagcgcaacaaatgcgttcattattccacaatgctcacttgctcctagtgccattataccacagttcctccgaccagttacttcaatgggcttcgaacacctagctgtgcaagcctacaggctacaacaagcgcttgcggcgagcgtcttacaacaaccaattaaccaattgcaacaacaatccttggcacatctaaccatacaaaccatcgcaacacaacagcaacaacagttnctaccagcactgagccaactagatgtggtgaaccctgtcgnctacttgcaacaacaggtgctttgaatcccacccacttgctctgtgaaacgcttatgtgtatcaaaacaacaacaacatgtgca

SEQ ID NO: 87863 - DNA, 408 bp, Zea mays
  unsure (1)..(408): unsure at all n locations
tagcaacatacatagtgaagtacactagcaacatcttagcaccaatggcagccaagatttttgccatccttgccctccttgctctttcagcaagcgttgctaccgcgactattattccacaatgctcacaacaatacctctctccggtgacagccgcgagatttgaatacccaactatacaatcctacaggctacaagaggccatcgcagcaagcatcttacggtcgttagcattgaccgtccaacaaccatatgccctattgcaacaaccatccttaatgaatctatatctccaaagaatcgcagcacaacaactacaacaacagttgcttncaacaatcaatcaagtagttgcagcgaaccttgctgcttacctncagcaacaacaatttcttccattcaatcaac

SEQ ID NO: 87864 - DNA, 357 bp, Zea mays
cagcaagcaacatagaaagtagaatccattagcaacaatagagcaacaatggcgaccaagatattttccctccttatgctccttgctctttctacatgtgttgctaacgcgacaattttccctcaatgctcacaagctcctatagcttcccttcttcccccataccttccatcaattatagcttcagtatgtgaaaacccagctcttcaaccatataggcttcaacaagcaatcgcagcaagcaacatacctttatcgcccttgttgtttcaacaatcaccagccctatctttggtgcagtcattggtacaaaccatcagggcacaacagctgcagcaactcgtgctacctgtgatc

SEQ ID NO: 87865 - DNA, 336 bp, Zea mays
agctcatcgactccagattggagaactcgacaccatgaaggtgctgatcgttgcccttgctctcctggcgctcgctgcgagcgccgcctccagtacaagcggcggctgtggctgccagacaccaccgtttcatctaccgcctccgttctatatgccgcctccgttctatctgccgccgcagcagcagccgcagccatggcaataccccactcaaccaccgcagctaagcccgtgccagcagttcggatcctgcggcgtcggcagcgtcggcagcccgttcctgggccagtgcgtcgagttcctgaggcaccagtgcagcccggcggcgacgcccta

SEQ ID NO: 87866 - DNA, 313 bp, Zea mays
agctgccattgccatctactgacctgtgacctccgcatttccaaacagcccgagcgagctagagctagcagagcggcaggcacctccctcctcaaggaacatggcccgcacgcagcagttggcagtagtggcgaccgccgtggtggccttggtgctgctggcggcggcggcgacctcggaggcggccatcagctgcgggcaggtggcgtcggccatcgcgccctgcatctcctacgcgcgcggccagggctcggggccctccgccggctgctgcagcggcgtcaggagcctcaacaacgccgtccgcaccacc

SEQ ID NO: 87867 - DNA, 207 bp, Zea mays
ccaacagcaacatagaaagtggaatccagtagcaacaatagagcaacaatggcgaccaagatactttccctccttatgctccttgctctttctgcatgtgttgctaacgcgacaattttccctcaatgctcacaagctcctatagcttcccttcttcccccataccttccatcaatgatagcttcagtatgtgaaaacccagctctt

SEQ ID NO: 87868 - DNA, 189 bp, Zea mays
cggaattcccgggtcgacccacgcgttcggctatttagggacaaatttggcgcaggagaaatttctactgttgttggagccagcgcgatttctggattcttcgcctcagcatgcagtttgccctttgactatgtgaagacacagattcagaagatgcaacctgatgctaatggcaaagaccctgtgtat

SEQ ID NO: 87869 - DNA, 350 bp, Zea mays
gaccaactagcatcatacaaagcacaataatgtaccaacaatggcagccaaaatatcgggcctacttatgctccttggtctatctgcaagtgctgctacggcgaccattttaccgcaatgctcgcaagctcctatagcttaccttattgccccgtacctctcaccagcggtgtcttcggtatgtgaaaacccaattcttgaaccctacatgatccaacaggcaatcacagctggcatcttacctttatcacccttgttccttcaacaatcatcagccctattacatcagttacctttggtgcatttattggcacaaaacatcaaggcacaacaactaccacaacttgtgc

SEQ ID NO: 87870 - DNA, 268 bp, Zea mays
atgccactaccctactcaaccgccccggcctcagcctcatccccagccacacgcatgcccgtgccaacagccgcatccaagcccgtgccagctgcagggaacctgcggcgttggcagcaccccgatcctgggccagtgcgtcgagtttctgaggcatcagtgcagcccgacggcgacgccctactgctcgcctcagtgccagtcgttgcggcagcagtgttgccagcagctcaagcaggtggagccgcagcaccggtaccaggcgatc

SEQ ID NO: 87871 - DNA, 395 bp, Zea mays
agaccaactagcaacatagaaagcacaatagtgtaccaacaatggcagccaaaatattttgcctccttatgctccttggtctttctgcaagtgctgctacggcgaccattttcccgcaatgctcgcaagctcctatagcttcccttcttcccccgtacctctcaccagcggtgtcttcggtatgtgaaaacccaattcttcaaccctacaggatccaacaggcaatcacagctggcatcttacctttatcacccttgttcctccaacaatcatcagccctattacatcagttacctttggtgcatttattggcacaaaacatcagggcacaacaactacaacaacttgtgctagcaaaccttgctgcctactctcagcaacagcagtttctttca

SEQ ID NO: 87872 - DNA, 515 bp, Zea mays
  unsure (1)..(515): unsure at all n locations
agtgagtgcgtttttgctgtacgtctcctcnggcatgccgtaccggtccggaattccgggtcgacctacgcgtccgcccacgcgtccgcccacgcgtccgccgcacccttgcggactataacatccaaaaggagtctacgctccacctcgtgcttaggctccgcggtggaatcattgagccctctctgcaggcgctcgctcgcaagtacaaccaggacaagatgatctgccgcanatgctatgcacgactgcaccctagggctgtcaactgccgcaggaagaagtgtggtcacagcaaccagctgaggcccaggaagaagatcaagaactgangtgctggctctagtcagtttcatggacaaatgtgggctggaatgctgtgtgggtggtgaacggtggttggttaaccaacaattgggccctctggtatggtttaacctggtggcgatgacacttctatatgacacattcgactttggtattggagatttgggcactgtgcacctgaaatgtgc

SEQ ID NO: 87873 - DNA, 529 bp, Zea mays
ggttagaggagtggaatactgactgcatgcgattgacgtaccggtccggaattcccgggtcgacccacgcgttcgtgagaggttcccggtctgccccgagagcatgagggagtacataccctgcctcgacaacgaggatgatatcaagcggctgccctcgacggagcgcggtgagcggtttgagcggcactgccctgccaaggacaagggtctcagctgcctcgtgccggcgcccaacgggtacaaggcgcccatcccctggcctcggagcagagacgaggtctggtttagcaacgtgcctcacacaagattgattgatgacaaaggaggacagaattggatcaccaaggtcaaagataaattcagatttcctggaggcggaactcaattcattcatggagcaaatcaatacctagaccagatctcccagatggtaccaaatgttgcatttggatctcataccaaaaggtgcctgatgtttggtctgggagtacaaagtttgggcccatttacactatcacgtgaggcc

SEQ ID NO: 87874 - DNA, 409 bp, Zea mays
  unsure (1)..(409): unsure at all n locations
gcgaggctcaagacgtacgagggcgtcccgccgccgtacgacaagaccaagcgtatggtcatccctgacgctcttaaggttctgaggctacagcctggacacaagtactgcctcctcggcgagctctctaaggaggtcgggtggaactaccatgacaccatcagggaacttgaggagaagaggaaggagaaggccaaggttgcctacgagaggaagaagcaattggccaagctgcgtgtcaaggccgagaaggcagccgaggagaagttggggtctcagttggagattcttgcccctatcaagtactgangagctgtgctttgtcatcagttttggggaacatctagtctttggtttaagtgttcggtaacagtttgtgacagtataatctggtaaaccgtgttatttt

SEQ ID NO: 87875 - DNA, 294 bp, Zea mays
cctcgggttcggattcggtttcgtgaggttctccggggttcggtttcgttggtgagcggatcgagatggcagcgtctgatgttgagctccgctgcttcgtcagcggcctcgactgggccacggacgaccactccctgcacaacgccttcagcacctacggctaggtcctcgagtccaagatcatcctcgatcgggagacgcagaggttccgcggcttcagcttcgtcaccttctgcacggacgaggcgatgcggaacgccatcgatggcatgaacggcaaggagctggacggtc

SEQ ID NO: 87876 - DNA, 426 bp, Zea mays
ccggtccggaattcccgggcgcttcttctgattccgaatctgatagtgaagatgttgatgagctccttggcactgttgcatctgtcaatgttattgaagctactggtgttgctataagtgaacacctctcaaagatgaaacttgatgatgacagccttgcagtgaagactaactcaagttgctcagcagcagaacagcatccagttgattcagtaaaagtacataacaatgcatctgttgtgctgaccaaaaaaatatctgatttatctcttgagtggcgatcagatttatcgaaaactgatgtctggtatgccagttttggatcaaacatgtggagaccaagatttctatgctatattcaaggagggaaggctgagggtatgaatataccatgctgcggatcacgtgacacaagctcaccaaagg

SEQ ID NO: 87877 - DNA, 316 bp, Zea mays
cctatctttggtgcagtcattggtacaaaccatcagggcagaacagttgcagcaactcgtgctaccagtgatcagccaagtagctctggcaaacctttccccctactctcagcaacaacaatttcttccattcaaccaactgtctatactgaaccctgctgcttatttgcagcaacaacaactactaccattcagccagctagctactgcctactctcagcagcaacaatttcttccatttaaccaattggccgcactgaacccctctgcttatttccagcagcaaatactactaccatttggccagctagctaca

SEQ ID NO: 87878 - DNA, 409 bp, Zea mays
taccggtccggaattcccggggcaacatagaaagcacaatagtgtaccaacaatggcagccaaaatattttgcttccttatgctccttggtctttctgcaagtgctgctaccgcaaccattttcccacaatgctcacaagctcctatagcttcctttcttcccccatacctctcaccagcggtgtcttcagtatgtgaaaacccaattcttcaaccctacaggatccaacaggcaatcgcagcaggcatcttacctttatcacccttgttcctccaacaaccgtcagccctattacagcagttacctttggtgcatttgttggcacaaaacatcaaggcacaacaactacaacaacttgtgctaagaaaccttgctgcctactctcagcaacagcagtttcttccattc

SEQ ID NO: 87879 - DNA, 310 bp, Zea mays
agaccattagctttatctactccagagcgcagaagaacccgatcgacaccatgagggtgttgctcgttgccctcgctctcctggctctcgctgcgagcgccacctccacgcatacaagcggcggctgcggctgccagccaccgccgccggttcatctaccgccgccggtgcatctgccacctacggttcacctgccacctccggtgcatctcccaccgccggtccacctgccgccgccggtccacctgccaccgtcggtccatgtgccgccgacggttcatctgccgtcgtcaccatgccactaccctac

SEQ ID NO: 87880 - DNA, 276 bp, Zea mays
taccggtccggaattcccgggtcagcattcaaaaacacaccaagcgaagcgcactagcaacgacctaacaccaatggctaccaagatattagccctccttgcgcttcttgcccttttagtgagcgcaacaaatgcgttcattattccacagtgctcacttgctcctagtgccattattccacagttcctcccaccagttacttcaatgggcttcgaacatccagccgtgcaagcctacaagctacaactagcgcttgcggcgagcgccttacaaca

SEQ ID NO: 87881 - DNA, 336 bp, Zea mays
ctcctctcctctcgccggcgcatcgcccgactgtcagtcagcctcagccatggccgcggaggaggagcagggcttccgcccgctggacgaggcgtccctgctcgcctacatcaaggccacgccggcgctcgcctcccgcctcggcggcggtggcagtctagactccatcgagatcaaggaggtcggcgacggcaacctcaacttcgtctacatcgtgcagtccgaggccggcgccatcgtcgtcaagcaggcgctcccgtacgtgcgctgcgtgggggactcgtggcccatgacgcgggagcgcgcctacttcgaggccttcacgctgcgggagca

SEQ ID NO: 87882 - DNA, 348 bp, Zea mays
ttgagaccaactagcaacatagaaagcacaatagtgtaccaacattggcagccaaaatattttgcttccttatgctccttggtctttctgcaagtgttgctaccgcaaccattttgccacaatgctcacaagctcctatagcttcccttcttccaccatacctctcaccagcggtgtcttcaatgtgtgaaaccccaattgttcaaccctacaagatccaacaggcaatcgcaacatgcatcttaccattatcaccctttgttcttcaacaaccgtcagacctattacagcagctacctttggtccatttggtggcacaaaacatcatggcacaacaactacaacaac

SEQ ID NO: 87883 - DNA, 330 bp, Zea mays
gctaggcctaacttgaacgtgggcatctgaggagaacatggtcgagagccttcatcggttgctctcttcgtcaagtactgtgctggattacgtgtgttgctcccctttcaaggtcccgatcgctatgctagctgcagctcacgtgcttgtctgagggtgcctttgctcgatggcagtcggatctgctgctgacggtgcatgtggtgatttacaatactactatgacagagccatgctctgtgaaaagtattagtagcatggctcataaaagctacagttccgtatattttctcagctatgtaaaactttcaaactgctcatgcttaaaac

SEQ ID NO: 87884 - DNA, 219 bp, Zea mays
tgccgttctaccagcacgctgcgcctaacgctggcaccctcttacaactgcaacaattgctgccattcaaccaacttgctttgacaaacccagcagcattctaccaacaacccatcattggtggtgccctcttttagatttcttatgagttatagttcaataataaagttttttgtctgatgtttgtggcttcccagaaataagaaagtacatttctaa

SEQ ID NO: 87885 - DNA, 397 bp, Zea mays
gcaacatagaaagtggaatccagtagcaacaatagagcaacaatggcgaccaagatactttccctccttatgctccttgctctttctgcatgtgttgctaacgcgacaattttccctcaatgctcacaagctcctatagcttcccttcttcccccataccttccatcaatgatagcttcagtatgtgaaaacccagctcttcaaccctataggctccaacaagcaatcgcagcaagcaacatacctttatcacccttgtttcaacaatcgccagccctatctttggtgcagtcattggtacaaaccatcaaggcacagcagctgcagcaactcgtgctacctgtgatcaaccaagtagctctggcaaacctttctccctactatcagcaacaacaat

SEQ ID NO: 87886 - DNA, 363 bp, Zea mays
tccggaattcccgggtcgacccactcgtccgtgagcattcagaaacacacctagcgaatcgcactagcaacgacctaacaacaatggcttccaagacattatccctccttgcgcttcttgccctttttgtgagtgcaacaaatgcgttcattattccacaatgctcacttgctccgagtgccattattccacagttcctccctccagttacttcaatgggcttcgaacacccagctgtgcaagcctataggctacaacaagcgcttgcggcgagcgtcttagaacaaccaattgcccaattacaacaacaatccttggcacatctaaccatacaaaccatcgcaacgcatcagcaacaagcac

SEQ ID NO: 87887 - DNA, 376 bp, Zea mays
accggtccggaattcccgggatattttgagcattcagaaacacaccaagcgaagcgcactagcaacgacctaacaacaatggctaccaagatattagccctccttgcgcttcttgccctttttgtgagcgcaacaaatgcgttcattattccacaatgctcacttgctcctagtgccattattccacagttcctcccaccagttacttcaatgggcttcgaacacctagctgtgcaagccaacatgcaacaacaagcgcttgcggcgagcgtcttacaacaaccaattgcccaattgcaacaacaatccttgccacatctaacaatacaagccatcacaacgcatcagcaacaacagttcctaccagcactgagcc

SEQ ID NO: 87888 - DNA, 357 bp, Zea mays
aagcgaagcgcactagcaacgacctaacaccaatggctaccaagatattagccctccttgcgcttcttgcccttttagtgagcgcaacaaatgcgttcattattccacagtgctcacttgctcctagtgccattattccacagttcctcccaccagttacttcaatgggcttcgaacatccagccgtgcaagcctacaggctacaactagcgcttgcggcgagcgccttacaacaaccaattgcccaattgcaacaacaatccttggcacatctaaccctacaaaccattgcaacgcatcaacaacaacaacaacagtttctgccatcactgagccacctagccgtggtgaaccctg

SEQ ID NO: 87889 - DNA, 344 bp, Zea mays
gaccaactagcaacatagaaagcacaatagtgtaccaacaatggcagccaaaatattttgcctccttatgctccttggtctttctgcaagtgctgctacggcgaccattttcccacaatgctcacaagctcctatagcttcccttcttcccccgtacctctcaccagcggtgtcttcggtatgtgaaaacccaattcttcaaccctataggatccaacaagcaatcgcagctggcatcttacctttatcacccttgttccttcaacaatcatcaagcctattacaagaattacctttggtgcatttaatggcacaaaacattaaggcacaacaactatcacaac

SEQ ID NO: 87890 - DNA, 339 bp, Zea mays
attttgagcattcagaaacacacctagcgaagcgcactagcaacgacctaacaacaatggctaccaagatattatccctctttgcgcttcttgccctttttgtgagcgcaacaaatgcgttcattattccacaatgctcacttgctcctagtgccattattccacagttcctccctccagttacttcaatgggcttcgaacacccagctgtgcaagcctacaggctacaacaagcgcttgcggcgagcgtcttacaacaaccaattgcccaattacaacaacaatccttggcacatctaaccatacaaaccatcgcaacgcaacagcaacaacaatttc

SEQ ID NO: 87891 - DNA, 326 bp, Zea mays
agaaacacacctagcgaagcgcactagcaacgacctaacaacaatggctaccaagatattatccctctttgcgcttcttgccctttttgtgagcgcaacaaatgcgttcattattccacaatgctcacttgctcctagtgccattattccacagttcctccctccagttacttcaatgggcttcgaacacccagctgtgcaagcctacaggctacaacaagcgcttgcggcgagcgtcttacaacaaccaattgcccaattacaacaacaatccttggcacatctaaccatacaaaccatcgcaacgcaacagcaacaacaatttc

SEQ ID NO: 87892 - DNA, 351 bp, Zea mays
caactagcaacatagaaagcacaatagtgtaccaacaatggcagccaaaatattttgcctccttatgctccttggtctttctgcaagtgctgctacggcgaccattttcccgcaatgctcgcaagctcctatagcttcccttcttcccccgtacctctcaccagcggtgtcttcggtatgtgaaaacccaattcttcaaccctacaggatccaacaggcaatcgcagctggcatcttacctttatcacccttgttcctccaacaatcatcagccctattacaacagttacctttggtgcatttattggcacaaaacatcagggcacaacaactacaacaacttgtgctagc

SEQ ID NO: 87893 - DNA, 537 bp, Zea mays
taggagaggcggagttgaattaagatatcgctagtattgtccgtaccggtccggaattcccgggtcgacccacgcgttcgattgagaccaactagcaacatagaaagcacaatagtgtaccaacaatggcagccaaaatattttgcttccttatgctccttggtctttctgcaagtgctgctaccgcaaccattttcccacaatgctcacaagctcctatagcttcctttcttcccccatacctctcaccagcggtgtcttcagtatgtgaaaacccaattcttcaaccctacaggatccaacaggcaatcgcagcaagcatcttacctttatcacccttgttcctccaacaaccgtcagccctattacagcagttacctttggtgcatttgttggcacaaaacatcaaggcacaacaactacaacaacttgtgctatgaaaccttgctgctactctcagcaacagcagtttctttcatttaaacaactggctgtaattaacaactgggggtttatgggaaaaaacaattcattttg

SEQ ID NO: 87894 - DNA, 365 bp, Zea mays
atgtcgaccagcacattcgctacttcctgcacgctgttgggcaatgttagaacaacgcaggcctcccagacagcggtgaagagcccttcgtctctaagcttcttcagccaagttacgaaggttccaagcctgaagacctccaagaaactggatgtctccgccatggctgtatacaaggtgaagcttgtcgggcctgaaggtgaagagcacgagtttgatgctccagacgacgcctacatccttgacgcagccgagactgccggtgtggagttgccatactcgtgccgtgctggggcttgctccacctgtgccggcaaaatcgagtctggttcggttgaccagtcggatgggtcctttcttgatga

SEQ ID NO: 87895 - DNA, 289 bp, Zea mays
caactagcaacatagaaagcacaatagtgtaccaacaatggcagccaaaacattttgcctccttatgctccttggtatttctgcaagtgctgctacggcgaccattttcccgcaatgctcacaagctcctatagcttcccttcttcccccgtacctctcaccagcggtgtcttcggtatgtgaaaacccaattcttcaaccctacaggatccaacatgcaatcgcagctggcatcttacctttatcacccttgctccttcaacaatcatcagccctattacagcagtta

SEQ ID NO: 87896 - DNA, 326 bp, Zea mays
caatagtgtaccaacaatggcagccaaaatattttgcctccttatgctccttggtctttctgcaagtgctgctacggcgaccattttcccgcaatgctcgcaagctcctatagcttcccttcttcccccgtacctatcaccagcggtgtcttcggtatgtgaaaacccaattcttcaaccctacaggatccaacaggcaatcacagctggcatcttacctttatcacccttgttcctacaacaatcatcagccctattacatcagttacctttggtgcatttattggcacaaaacatcacggcacaacaactacaacaacttgtgc

SEQ ID NO: 87897 - DNA, 370 bp, Zea mays
taccggtccggaattcccgggttttgagcattcagaaacacaccaagcgaagcgcactagcaacaacctaacaacaatggctaccaagatattatccctccttgcgcttcttgcgctttttgcgagcgcaacaaatgcgtccattattccacaatgctcacttgctcctagttccattattccacagttcctcccaccagttacttcaatggccttcgaacacccagctgtgcaagcctataggctacaacaagcgattgcggcgagcgtcttacaacaaccaattgcccaattgcaacaacaatccttggcacatctaacaatacaaaccatcgcaacgcaacagcaacaacagttcctaccagcactg

SEQ ID NO: 87898 - DNA, 365 bp, Zea mays
gttggcttctcctgccccttcggttcgggttcgggttcgtgaggttctccggggttcggtttcgtgggtgggcggatcgagatggcggcgtcagatgttgagtaccgctgcttcgtcggcggcctcgcctgcgccacggacgaccactcgctccacaacgccttcagcacctacagctaggtcctcgagtccaagatcatcctcgatcgtaagacgcataagtcccgcggcttctgctacgtcaccttctacacggaagaggcgatgcggaacgccatcgagggcatgaacggctaggagctggacggtcgcaacatcaccgtgaacgatgcccattcccgcagtggacgtcgaagctgtggcgg

SEQ ID NO: 87899 - DNA, 351 bp, Zea mays
caactagcaacatagaaagcacaatagtgtaccaacaatggcagccaaaatattttgcttccttatgctccttggtctttctgcaagtgttgctaccgcaaccattttcccacaatgctcacaagctcctatagcttcccttcttcccccatacctctcaccagcggtgtcttcaatgtgtgaaaacccaattgttcaaccctacaggatccaacaggcaatcgcaacaggcatcttaccattatcacccttgttccttcaacaaccgtcagccctattacagcagttacctttggtccatttggtggcacaaaacatcaaggcacaacaactaccacaacttgggctaac

SEQ ID NO: 87900 - DNA, 412 bp, Zea mays
cctttcactacaacctctgccagtcttatgccctatggacccattacatgctcaacaagaatgtatgctactctacttactctacaccacatgagccgttgcgccatacccacattccggataagtattcaggtacatcttctgcactctactgctgcaaattctttctctctctctgtctgtctatctatctgtctaaccctacatgattctacatgcaatcgcatcaggcatcacaccattatcacccttgatcctccaacaaccgtcaggcctattacagcagttacctttggctcatttggtggcacaaaacatcagggcacaacaactacaacaacttgtgctagcaaaccttgctgcgaactcttaacaacagcagttaattccattcaaaccactgggtgtgttg

SEQ ID NO: 87901 - DNA, 349 bp, Zea mays
ctggacgtcagcctagcaattagctcatcgactccagattggagaactcgacaccatgaaggtgctgatcgttgcccttgctctcctggcgctcgctgcgagcgccgcctccagtacaagcggcggctgtggctgccagacaccaccgtttcatctaccgcctccgttctatatgccgcctccgttctatctgccgccgcagcagcagccgcagccatggcaataccccactcaaccaccgcagctaagcccgtgccagcagttcggatcctgcggcgtcggcagcgtcggcagcccgttcctgggccagtgcgtcgagttcctgaggcaccagtgcagcccggcggcg

SEQ ID NO: 87902 - DNA, 531 bp, Zea mays
tggtttagacgcgttggtgcacgagcgtagtgcatcggctatccggtccggaattcccgggtcgacccacgcgttcggttcacggaggaagagcaagcagccgcagcatacaacgctcttcaagggcgcttttactctggccgtcctataattgttgagtattctactgtgaccgacttccgtgaagcaacctgtaggcagtttgaggagaacagctgcaaccgtggtggctactgtaatttcatgcatgtgaagcatattggcagggatctcacgaggaagctgtatgggcgttctgcttccaggaggtaccatgggagaagccgaagccgaagcccgtcaccacaaaggaggggccaccgtgaccgtgatgactaccaccaccgtgaccgtgatgactaccgtggtggcggcggtggtggaaggggaagaggtagcaggtatgacaggtacgatgacggatccggcagatgtggcaggcattccaggtattatgattgagcacgcacaagcgggatacattaacggttt

SEQ ID NO: 87903 - DNA, 375 bp, Zea mays
atcgatgttttcgatcccaagttcaacattgtctcccctggagcagacatgagtgtggactacccgtatacggaaaccgacaagagactcactgccttccatcctgaaatcgaggagctcatcaacagcgacgtcgagaactccgagcacaagttcgtgctgaaggacaagaagaagccgatcatcttctcgatggcgcgtctcgaccgcgtgaagaacatgacaggcctggtggagatgtacggcaagaacgcgcgcctgagggagctggcgaacctcgtgatcgtcgccggtgaccacggcaaggagtccaaggacagggaggagcatgcggagttcaagaagatgtacagcctcatcgacgagtacaagttg

SEQ ID NO: 87904 - DNA, 313 bp, Zea mays
ctgcctactctcagcaacaactactaccattcagccagctagctggtgtgagccctgctaccttattgacacaaccacagttgttgccgttctaccagcacgctgcgcctaacgctggcaccctcttacaactgcaacaattgctgccattcaaccaacttgctttgacaaacccagcagcattctaccaacaacccatcattggtggtgccctcttttagatgtcttatgagttatagttcaataataaagttttttgtctgatgtttgtggcttcccagaaataagaaagtacatttctagattcttaaaa

SEQ ID NO: 87905 - DNA, 347 bp, Zea mays
caacaagcaacatagaaagtggaatccagtagcaacaatagagcaacaatggcgaccaagatattttccctccttatgctccttgctctttctacatgtgttgctaacgcgacaattttccctcaatgctcacaagctcctatagcttcccttcttcccccataccttccatcaattatagcttcaatatgtgaaaacccagctcttcaaccatataggcttcaacaagcaatcgcagcaagcaacatacctttatcgcccttgttgtttcaacaatcgccagccctatctttggtgcagtcattggtacaaaccatcaaggcacaacagctgcaacaactcgtgct

SEQ ID NO: 87906 - DNA, 327 bp, Zea mays
acagcagttacctttggtgcatttgttggcacaaagcatcaaggcacaacaactacaacaacttgtgctacgaaaccttgctgcctactctcagcaacagcaggttcttccattcaaccaactggctgcattgaactatgctgcttatttgcaacaacaactaccattcagtcagctagctgctgcctacccccagcaatttcttccattcaaccaactggcagcattgaactctgctgcttatttacaacagcaacagctaccaccattcagccagctagctgatgtgagccctgttgccttcttgacacaacaacagttgttgcc

SEQ ID NO: 87907 - DNA, 327 bp, Zea mays
  unsure (1)..(327): unsure at all n locations
cgagcaggaggcggacaaggtaagcagcaatcgcaggaaccctagcgccgccgcacccgcaggaatgggtatcgacctcgtcgccggtgggaggaataagaagaccaagcgcactgcgcccaagtctgacgatgtctacctcaagctcctcgtcaagctctaccgtttcttggtcaggaggaccaagagcaatttcaacgctgtcattctcaagaggcttttcatgagtaaaaccaaccgaccaccaatctccatgcgccgncttgtcaaagttatggaaggaaaggagaagaacattgctgtcattggtggcacagtcacagatga

SEQ ID NO: 87908 - DNA, 359 bp, Zea mays
gacaaaaacaagtacaacacacccaaatacagatttgttgtgcgatttaccaacgaggacatcactgcacaaatcatatctgctagtatagcgggtgatatggttcttgcttctgcctactctcatgagttgccacgatatggtcttgaagttggtctgaccaactatgcagctgcctactgcactggacttctgttggctcgccgtgtgctaaagatccgtggtttggataaggagtatgagggcaatgttgaggccactggtgaggacttctctgttgagccagctgatgagaagaagccattccgtgctctcttggatgttggccttatcaagactaccacagggaaccgggtctt

SEQ ID NO: 87909 - DNA, 77 bp, Zea mays
cccgtctcgacccactcgttcgcaccaactatcttcatataaagcacattattgtaccaacaatttcatccataata

SEQ ID NO: 87910 - DNA, 386 bp, Zea mays
  unsure (1)..(386): unsure at all n locations
ccggaattcccgggtcgacccacgcgttcgtacactcgttcgtaccaactagcaacatagaaagcacaatactgtaccaacaatggcggccagaatattttgccttcttatgctccttggtctttctgcaagtgctgctactgagaccattttgccgcaatgctcgcaagctcctatagcttgccttcttaccccgtacctctcaccagcggtgtcttcggtatgtgaaaacccaattcttcaaccctacacgatccaacaggcaatcacagctggcatcttacctttatcacccttgttcctccaacaatcatcagccctattacatcagttaccnttggcgcattcattggcacaaaacatcatggcacaacaactacaacaac

SEQ ID NO: 87911 - DNA, 399 bp, Zea mays
  unsure (1)..(399): unsure at all n locations
ggaattcccgggtcgacccactcgtccgtagcaacatacatagtgaagtacactagcaacatcttagcaccaatgggagccaagatttttgcgcctccttgccctccttgctctttcagcaagcgctgctacctcgactttgattccacaatgctcacaacaatacctgtctccggtgacagccgcgggatttcaatacccaactatacaatcctacatggtacaagaggccatccaagcaagcatcttacggtcattagcattaaccctccaacaaccatatgctctattgcaacagccatccttagtgcatctgtatctncaaagaatcgcggcacaacaactacaacaacagttgctaccaacaatcaatcaagtagttgcagcgaaccttgctgc

SEQ ID NO: 87912 - DNA, 376 bp, Zea mays
ccgaattcccaggcaggcaggtcggcgaggagggcaggaagaccgaagaccgagccgtgcgggggctcgggacgggaacgggacaggaccccaaaatctcagatccttcctgcccgcccgcccgtgcccgtcgacgcgtcgttcttgccggccgcgcctcaccttcgtcctctcctcctccagggggatcggatacgccacaggctgcgcgatggtgctgtgggtcttcggctacggctccctcatctggaaccccggcttcgacttcgacgacaaaatcctcggcttcatcaagggctacaagcgcacctttaatctcgctggcattgaccacagaggcacaccggagcattcggcgaggacctgcacgcttgaa

SEQ ID NO: 87913 - DNA, 529 bp, Zea mays
  unsure (1)..(529): unsure at all n locations
aggtagcggtnntnttttgacctgatactctagtanttccttaccggtccggaattcccgggtcgacccaccgtccggcaacatagaaagcacaatagtgtaccaacaatggcagccaaaatattttgcctccttatgctccttggtctttctgcaagtgctgctacggcgaccattttcccgcaatgctcgcaagctcctatagcttcccttcttcccccgtacctctcaccagcggtgtcttcggtatgtgaaaacccaattcttcaaccctacaggatccaacaggcaatcacagctggcatcttacctttatcacccttgttcctccaacaatcatcagccctattacatcagttacccttggtgcatttattggcacataacatcagggcacatcaactacaacaacttgtgctagcaaaccttgctgcctactctcagcaacagcagtttcttccattcaaccaactagctgcattgaactctggttcttatttggaacaacaacaatttcatttaagccggc

SEQ ID NO: 87914 - DNA, 342 bp, Zea mays
gcaacatagaaagcacaatagtgtaccaacaatggcagccaaaatattttgcttccttgggctccttggtctttctgcaagtgctgctaccgcaaccattttcccacaatgctcacaagctcctatagcttcctttcttcccccatacctctcaccagcggtgtcttcagtatgtgaaaacccaattcttcaaccctacaggatccaacaggcaatcgcagcaggcatcttacctttatcacccttgttcctccaacaaccgtcagccctattacagcagttacctttggtgcatttgttggcacaaaacatcaaggcacaacaactacaacaacttgtgct

SEQ ID NO: 87915 - DNA, 368 bp, Zea mays
ccgcaagaagatttggttggtggactcaaagggtttgattgttgactctcgtaaaaacgccgttcagtcattcaaaaaaccttgggcacatgagcatgagcccttgacaaccttgtacgatgctgttcagtccatcaaacctacagttctgattgggacgtctggagttggaagaacattcacaaaagaagttgttgaggccatggcttccttcaatgagaggcctatcatcttttcactgtcaaatccaacctctcattctgaatgtactgctgaagaagcatataactggactcagggtcgtgcaatatttgccagtggcagtccatttgaccctgtggagtaccaagggaaagtttttggacctg

SEQ ID NO: 87916 - DNA, 400 bp, Zea mays
gcagcaccccgatcctgggccagtgcgtcgagttcctgaggcatcagtgcagcccgacggcgacgccctactgctcgcctcagtgccagtcgttgcggcagcagtgttgccagcagctcaggcaggtggagccgcagcaccggtaccaggcgatcttcggcttggtcctccagtccatcctgcagcagcagccgcaaagcggccaggtcgcggggctgttggcggcgcagatagcgcagcaactgacggcgatgtgcggcctgcagcagccgactccatgcccctacgctgctgccggcggtgtcccccactgaagaaactatgtgctgtagtatagccgctggctagctagctagttgagtcatttaacggcgatgattgagtaataatgtgtcacgca

SEQ ID NO: 87917 - DNA, 423 bp, Zea mays
  unsure (1)..(423): unsure at all n locations
tctaccggtccggaattcccgggtagaaagtagaatccattagcaacaatagagcaccaatggcgaccaagatattttccctccttatgctccttgctctttctacatgtgttgctaacgcgacaattttccctcaatgctcacaagctcctatagcttcccttcttcccccataccttccatcaattatagcttcagtatgtgaaaacccagctcttcaaccatataggcttcaacaagcaatcgcagcaagcaacatacctttatcgcccttgttgtttcaacaatcaccagccctatctttggtgcagtcattggtacanaccatcanggcacaacagctgcagcaactcgtgcttactgggaaccaaccaataacttttgccaacccttcttccttattttaagcaccaccaattcttt

SEQ ID NO: 87918 - DNA, 411 bp, Zea mays
  unsure (1)..(411): unsure at all n locations
cccagctncggcattagaacacccagcgaacccctttacacaacctaacagcaatggctaccaagatattatccttccttgcgcttcttgcgctttttgcgagcgcaacanatgcgttcattattccacaatgctcacttgctccaagttccattattacacagttccttccaccagttacttcaatgggcttcgaacacccagctgtgcaagcctataggctacaacaagcaattgcggcgagcgtcttacaacaaccaatttcccagttgcaacaacaatccttggcacatctaacaatacaaaccatcgcaacgcaacagcaacaacaattcctaccagcactgagccacctagccatggtgaaccctgccgnctacttgcaacagcagttgcttgcatcaaacccac

SEQ ID NO: 87919 - DNA, 415 bp, Zea mays
aatattttcagcattcaaaaacacaccaagcgaagcgcactagcaacgacctaacaccgatggctaccaagatattagccctccttgcgcttcttgcccttttagtgagcgcaacaaatgcgttcattattccacagtgctcacttgctcctagtgccattattccacagttcctcccaccagttacttcaatgggcttcgaacatccagccgtgcaagcctacaggctacaactagcgcttgcggcgagcgccttacaacaaccaattgcccaattgcaacaacaatccttggcacatctaaccctacaaaccattgcaacgcaacaacaacaacaacaacagtttctgccatcactgagccacctagccgtggtgaaccctgtcacctacttgcaacagcagctgcttgcatc

SEQ ID NO: 87920 - DNA, 244 bp, Zea mays
gcattcagaaacacaccgagcgaagcggactaacaacgacctaacaacaatgggtaccagagatataacccttcttgcacctgttgcccttgatgcgagcgcaacacatgcgttcattattccacaatgctcacttgctcctagtgccattatcacacagttcctgccaccagttacttcaatgggcatcgaacacctatctgtgcaagccaacatgcaacaactagcgctagccgcgagcgtc

SEQ ID NO: 87921 - DNA, 385 bp, Zea mays
  unsure (1)..(385): unsure at all n locations
ggagttgctctgaattgactgaaccatggcggcgacaatggcagtgacgacgatggtgaccaggagcaaggagagctggtcgtcattgcaggtcccggcggtggcattcccttggaagccacgaggcggtggcaagaccggcggcctcgagttccctcgccgggcgatgttcgccagcgtcggcctcaacgtgtgcccgggcgtcccggcggggcgcgacctcggggagcccgaatccaaagtcgtacgggccggcgacaactgggacatcgcgcgccagcttggcgccggcgtttccgggcagcaagccggctgggaggctgangaagaagcagcgaagaagacgaagccgaagggctgcggcagcaagaagcatcagcagctg

SEQ ID NO: 87922 - DNA, 223 bp, Zea mays
atcaagagtacccagatgtatccgtcgttgctggtctaaacactaatagggtgtttggtctgaggaatgggctagtccattctcttctcgctcttttttttatttggtttattaaatagaatgagttgatctaaaaaaaaaaaaaaaaaaaaaaaaaaaaaacaacaaaaaaaaaacaatacaaaaaacaacaaacaaaaaaaaaaaaacataaaaccataat

SEQ ID NO: 87923 - DNA, 420 bp, Zea mays
  unsure (1)..(420): unsure at all n locations
gggtcttcagaccattagctttatctactccagagcgcagaagaacccgatcgacaccatgagggtgttgctcgttgccctcgctctcctggctctcgctgcgagcgccacctccacgcatacaagcggcggctgcggctgccagccaccgccgccggttcatctaccgccgccggtgcatctgccacctccggttcacctgccacctccggtgcatctcccaccgccggtccacctgccgccgccggtccacctgccaccgccggtccatgtgccgccgccggttcatctgccgncgncaccatgccactaccctactcaaccgncccggnctcagcctcatccccagccacacncatgcccgtgccaacagccgcatncaagcccgtgccagctgcagggaacctgcggcgttggcag

SEQ ID NO: 87924 - DNA, 181 bp, Zea mays
tccggaattcccggggtgcgatttcgatctcgcagccaccttttttttgttctgttgtgtatctagtagttggaggagatatgccgtttggacttgcattggacacgaacctaaggccttaacagattagaacctgggaaggtgaatggaatggccaggtggaaaaattaagtattggggg

SEQ ID NO: 87925 - DNA, 389 bp, Zea mays
ggccaaagattttcttcccttcttgcagcggaacagaaggcattcggccatcgttgaatatgtttttagtggccatcggttcaaactaacaattcccaaggagacttgtagtatcgccttctcattatctggtgtccgttgtcctggtaaaggcgagccatactcagacgaagctattgctttgatgaggagaaggatacttcaacgagatgtggagatagaggttgaagcagttgataggacaggaacgttcataggttctttgtgggagtccaagaccaacatgggctctgtgcttctggaagctggacttgccaagctgagttcatttggcttggataggacctcagatgcttatatcctaacaagagctgaacagtctgcgaagc

SEQ ID NO: 87926 - DNA, 332 bp, Zea mays
caactagcaacatagaaagcacaatagtgtaccaacaatggcagccaaaatattttgccgccttatgctccttggtctttctgcaagtgctgctacggcgaccattttcccgcaatgctcgcaagctcctatagcttcccttcttcccccgtacctctcaccagcggtgtcttcggtatgtgaaaacccaattcttcaaccctacaggatccaacaggcaatcgcagctggcatcttacctttatcacccttgttccttcaacaatcatcagccctattacaacagttacctttggtgcatttattggcacaaaacatcaaggcacaacaac

SEQ ID NO: 87927 - DNA, 432 bp, Zea mays
accggtccggaattcccgggatttaggcgatgccaaagctgtgaacaaaatattttcggagaacgcatttgatgctgttatgcactttgctgctgttgcttatgttggtgagagcacaatggagccactcaggtactaccacaacataacgtcaaacacattgacagttcttgaggcaatggcagcacataatgtaaatactctgatttactcgagtacgtgtgcaacctatggtgaacctgatacaatgccgattgtagaaacaactcctcagaatcctatcaatccatatggtaaggcaaagaagatggcggaggacatcatcttagattttacaaaatcaaagaagaattcaaatatggctgtcatgatcttaagatacttcaacgtgattggatcagacccagagggacggctaggagaagctccaag

SEQ ID NO: 87928 - DNA, 354 bp, Zea mays
attcagaaacacacctagcgaagcgcactagcaacgacctaacaacaatggctaccaagatattatccctctttgcgcttcttgccctttttgtgagcgcaacaaatgcgttcattattccacaatgctcacttgctcctagtgccattattccacagttcctccctccagttacttcaatgggcttcgaacacccagctgtgcaagcctacaggctacaacaagcgcttgcggcgagcgtcttacaacaaccaattgcccaattacaacaacaatccttggcacatctaaccatacaaaccatcgcaacgcaacagcaacaacaatttctaccagcactgagccaactagctg

SEQ ID NO: 87929 - DNA, 231 bp, Zea mays
gccccagacaacactcaccgatagcaagtagcgccgccgacgtttcgagagcagagtaggcaagctagccaagcgcgcacctcggtgacctagctagctacctagctagttcaggcgacgatatggcgtctggtcaggagagcaggaaggagctggaccgcaaggctcgcgagggcgagaccgtcgtccccggcgggaccggcggcaagagcgtcgaggcccaagagcacc

SEQ ID NO: 87930 - DNA, 423 bp, Zea mays
gctataactactatagcagtagctcaaatctaaaaaattgtcatgaattcctaaggcagcagtgcagccctttggtaatgccttttctccaatcacgtttgatacaaccaagtagctgccaggtattgcagcaacaatgttgtcatgatcttaggcagattgagccacaatacattcaccaagcaatctacaacatggttcaatccataatccaggaggagcaacaacaacaaccatgtgagttatgtggatctcaacaagctactcaaagtgcggtggcaatcttgacagcagcacaatacctaccatcaatgtgcggcttgtaccactcatactaccaaaataatccatgcagcagcaatgacattagtggtgtttgcaattgaagaattgtgtctacctagccggtatactcctataacg

SEQ ID NO: 87931 - DNA, 407 bp, Zea mays
ccaactagcaacatagaaagcacaatagtgtaccaacaatggcagctaaaatattttgcctccttatgctccttggtctttctgcaagtgctgctacggcgaccattttcccacaatgctcacaagctcctatagcttcccttcttcccccgtacctctcaccaacggtgtcttcggtatgtgaaaacccaattcttcaaccctacaggatccaacaggcaatcgcagctggcatcttacctttatcacccttgttcctccaacaatcatcagccctattacagcagttacctttggtgcatttattggcacaaaacatcagggcacaacaactacaacaacttgtgctagcaaaccttgctgcctactctcagcaacagcagtttcttccattcaaccaactagct

SEQ ID NO: 87932 - DNA, 152 bp, Zea mays
gcagcatagaaagcacactagcgtaccatcaatggcagtcaaagaatgttgcctccctagcggcttgatcgatctgcaagggctgctacggcgaccattgatccggaatgtctccaagctcatatatccttgctcgatccgatgtacctgtc

SEQ ID NO: 87933 - DNA, 244 bp, Zea mays
attgagaccaactagcaacatagaaagcacaatagtgtaccaacaatggcagccaaagtgattttgcctccttatgctccttggtctttctgcaagtgctgctacggcgaccattttcccacaatgctcacaagctcctatagcttcccttcttcccccgtacctctcaccagcggtgtcttcggtatgtgaaaacccaattcttcaaccctataggatccaacaggcaatcgcagctggcatc

SEQ ID NO: 87934 - DNA, 313 bp, Zea mays
cagcagttacctttggtgcatttattggcacaaaacatcagggcacaacaactacaacaacttgtgctagcaaaccttgctgcctactctcagcaacagcagtttcttccattcaaccaactagctgcattgaactctgcttcttatttgcaacaacaacaactaccattcagccagctacctgttgcctacccccaacaatttcttccattcaaccaactggcagcattgaactctcctgcttatttacagcagcaacaactactaccattcagccagctagctggtgtgagccctgctaccttcttgacac

SEQ ID NO: 87935 - DNA, 467 bp, Zea mays
taccggtccggaattcccgggccaacaagcaacatagaaagtggaatccagtagcaacaacagagcaacaatggcgaccaagatattttcggtccgtatgctccttgctctttctgcatgtgttgctaacgcgacaattttccctcaatgctcacaagctcctatagcttcccttcttcccccataccttccatcaatgatagcttcagtatgtgaaaacccagctcttcagccctataggctccaacaagcaatcgcagcaagcaacatacctttatcacccttgttgtttcaacaatcgccagccctatctttggtgcagtcattggtacaaaccatcagggcacagcagctgcagcaactcgtgctacctgtgatcaaccaagtagctctggcaaacctttctccctactctcagcaacaacaatttcttccattcaaccaactgtctacactgaaccctgctg

SEQ ID NO: 87936 - DNA, 425 bp, Zea mays
  unsure (1)..(425): unsure at all n locations
gagcattcagaaacacaccaagcgaagcacattagcaacaacctaacaacaatggctaccaagatattatccctccttgcgcttcttgcgctttttgcgagcgcaacaaatgcgttcattattccacaatgctcacttgctccaagttccattattacacagttcctcccaccagttacttcaatgggcttcgaacacccagctgtgcaagcctataggctacaacaagcaattgcggcgagcgtcttacaacaaccaatttcccagttgcaacaacaatccttggcacatctaacaatacanaccatcgcaacgcatcagcaacaacaattcctaccagcactgagccacctagccatggtgaaccctgccgcctacttgcaacagcagttgcttgcatcaaacccacttgctctggcaaacgt

SEQ ID NO: 87937 - DNA, 203 bp, Zea mays
cgaacatccagccgtgcaagcctacaggctacaactagcgcttgcggcgagcgccttagaacaaccaattgcccaattgcaacaacaatccttggcacatctaaccctacaaaccattgcaacgcagcaacaacaacaacaacagtttctgccatcactgagccacctagccgtggtgaacccttgcacctacttgcaacagc

SEQ ID NO: 87938 - DNA, 271 bp, Zea mays
gccaccgcccgagagagagagagagggagagtgagagtggggattcaagtttcaaactgactatcgaggggggataggaaggtggtcactcatcggtccacagctagctcgtcgccccccatggctgactggggccccgtggtgatcgcgacggtgctgttcgtgctgctcacgccgggcctgctgttccagctgccggcgcacggccgaatcgtcggcttcggcaccatgcacaccagcggcctcgccatcctcgtccacgccgtcctct

SEQ ID NO: 87939 - DNA, 427 bp, Zea mays
  unsure (1)..(427): unsure at all n locations
caactagcaacatagaaagcacaatagtgtaccaacaatggcaaccaaaatattttgcggccggatgctccttggtctttctgcaagtgctgctaccgcgaccattttcccgcaatgctcacaagctcctatagcttcccttcttcccccatacctctcaccagcggtgtcttcagtatgtgaaaacccaattcttcaaccctacaggatccaacaggcaatcgcagcaggcatcttacctttatcacccttgttcctccaacaaccgtcagccctattacagcagttacctntggtgcatttgttggcacataacatcagggcacaacaactacaacaactngtgctagcaaaccttgctgcctactctcagcaacagcagtttcttacattcaaccaactggctgcattgaactctgctgcttat

SEQ ID NO: 87940 - DNA, 424 bp, Zea mays
cccacgcgtccgcggacgcgtgggtctcaccagcggtgtcttcggtatgtgaaaacccgattgttaaaacttacaggatccaacaggcaatagcaactggcatgttacctttatcacccttgttcctgcaacaatcatgagccctattacaacagttacctttggtgcatttattggcacagaacataaggggcacaacaactacaacaacttgcggtaacgaaccttggtggcctatcttaagcaccggcggttcttacattcaacccactacggtcattggactctgcttcttattcgcaacaacaacaactaccattcagccacctacctgctgcctacccccagcaatttcttccattcaaccaactagcagcattgaactgtcctgcttatttacagcagcaacaactactaccattca

SEQ ID NO: 87941 - DNA, 299 bp, Zea mays
attttcagcattcaaaaacacaccaagcgaagcgcactagcaacgacctaacaccaatggctaccaagatattagccctccttgcgcttcttgcccttttagtgagcgcaacaaatgcgttcattattccacagtgctcacttgctcctagtgccagtattccacagttcctaccaccagttacttcaatgggcttcgaacatccagccgtgcaagcctacaagctacaactagcgcttgcggcgagcgccttacaacaaccaattgcccaattggaacaacaatccttggcacatcta

SEQ ID NO: 87942 - DNA, 422 bp, Zea mays
gctgccgaggcggatgcggatgacccctcctcctccaccccctcgcttccgatggctgtgctcgggggcggtggcggggagggccggagcggggtgccgaacaagctcgtggtggcggccctcgccaccggggaagaggccgcgccggctctctcccccgatacggtggtcgaggtgaatagtgaggaggaggtgccgtacagaatggccgtccacccgcgtggcgatggcgtgttctgtgccttccccaacggctgcaggttgtatcgatgggaatcacaggaaggagagggaccacagaggttggctttggagccggaccaggatgctttagcagagctgaaagatgtcggtttgcagttggccgtatccttcagtggagaaggttcaatacttgctattggtggtgaagatgggtattt

SEQ ID NO: 87943 - DNA, 360 bp, Zea mays
caactagcaacatagaaagcacaatagtgtaccaacaatggcagccaaaatattttgctgccttatgctccttggtctttctgcaagtgttgctaccgcaaccattttcccacaatgctcacaagctcctatagcttcccttcttcccccatacctctcaccagcggtgtcttcaatgtgtgaaaacccaattgttcaaccctacaggatccaacaggcaatcgcaacaagccatttaccattattaaccttggtccttccaccacccgtaagcctaataccagcagtaaccttgggtcaattggttgccccaaaccttaaggccccaccacctccaccacctggggctaccaaaccttg

SEQ ID NO: 87944 - DNA, 429 bp, Zea mays
attagcaacaatagagcaacaatggcgaccaagatattttccctccttatgctccttggtctttctacatgtgttgctaacgcgacaattttccctcaatgctcacaagctcctatagcttcccttcttcccccataccttccatcaattatagcttcagtatgtgaaaacccagctcttcaaccatataggcttcaacaagcaatcgcagcaagcaacatacctttatcgcccttgttgtttcaacaatcaccagccctatctttggtgcagtcattggtacaaaccatcaaggcacaacagctgcagcaactcgtgctacctgtgatcaaccaagtagctctggcaaacctttctccctactctcagcaacaacaatttcttccattcaaccaactatctacactgaaccctgctgcttatttgcag

SEQ ID NO: 87945 - DNA, 412 bp, Zea mays
attgagaccaactagcaacatagaaagcacaatagtgtaccaacaatggcagccaaaagattgtgcctccttatgctccttggtctttctgcaagtgctgctacggcgaccattttcccgcaatgctcgcaagctcctatagcttcccttcttcccccgtacctctcaccagcggtgtcttcggtatgtgaaaacccaattcttcaaccctacaggatccaacaggcaatcacagctggcatcttacctttatcacccttgttccttcaacaatcatcagccctattacatcagttacctttggtgcatttattggcacaaaacatcagggcacaacaactacaacaacttgtgctagcaaaccttgctgcctactctcagcaacagcagtttcttccattcaaccaactag

SEQ ID NO: 87946 - DNA, 293 bp, Zea mays
attgagaccaacatgcaacatagcaagtggaatccagtagcaacattcgagcagcaacggcgaccaagatactttcactacttatgctcctggctctgtcagcatgtcatgctaacgcgacacttctgcttcaatgcttacaagctcctatagctaaccttgttactccataccttccatcaatgatagcttcagtatgtgaaaacctagcttttcaaccatataggctacagcaagctattgcagctagcaacatacctctatcacccttgattcaactatctacagcccta

SEQ ID NO: 87947 - DNA, 373 bp, Zea mays
gagaccagcaagcaacatagaaagtagaatccattagcaacaatagagcaacaatggcgaccaagatattttccctccttatgctccttgctctttctacatgtgttgctaacgcgacaattttccctcaatgctcacaagctcctatagcttcccttcttcccccataccttccatcaattatagcttcagtatgtgaaaacccagctcttcaaccatataggcttcaacaagcaatcgcagcaagcaacatacctttatcgcccttgttgtttcaacaatcaccagccctatctttggtgcagtcattggtacaaaccatcagggcacaacagctgcagcaactcgtgctacctgtgatcaaccaagtagc

SEQ ID NO: 87948 - DNA, 461 bp, Zea mays
accggtccggaattcccgggctagcaacatagaaagcacaatagtgtaccaacaatggcagccaaaatattttgcctccttatgctccggggtcggtctgcaagtgctgctacggcgaccattttcccgcaatgctcgcaagctcctatagcttcccttcttcccccgtacctctcaccagcggtgtcttcggtatgtgaaaacccaattcttcaaccctacaggatccaacaggcaatcacagctggcatcttacctttatcacccttgttcctacaacaatcatcagccctattacatcagttacctttggtgcatttattggcacaaaacatcagggcacaacaactacaacaacttgtgctagcaaaccttgctgcctactctcagcaacagcaggttcttccattcaaccaactagctgcattgaactctgcttcttatttgcaacaacaacaact

SEQ ID NO: 87949 - DNA, 349 bp, Zea mays
attcccggccagcaagcaacatagaaagtagaatccattatcaacaatttatcttcaatggcgaccaagatattttcccgccttgtgctccttgctctttctacatgtgttgctaacgcgacaattttccctcaatgctcacaagctcctatagcttcccttcttcccccataccttccatcaattatagcttcagtatgtcaaaacccagctcttcaaccatataggcttcaacaagcaatcgcaacaagcaacatacctttaatccccttgttgtttcaacaatcaccaaccctatttttggtgccgtccttggtacaaaccaataaggcacaacaacttcaacaac

SEQ ID NO: 87950 - DNA, 390 bp, Zea mays
tccggaattcccgggtgagcattcagaaacacaccaagcgaagcgcactagcaacgacctaacaacaatggctaccaagatattagcccggcttgcgcttctggccctttttgtgaagcgcaacagatgcgttcattattccacaatgctcacttgctcctagtgccattattccacagttcctcccaccagttacttcaatgggcttcgaacacctagctgtgcaagccaacatgcaacaacaagcgcttgcggcgagcgtcttacaacaaccaattgcccaattgcaacaacaatccttgccacatctaacaatacaagccatcacaacgcaacagcaacaacagttcctaccagcactgagccacctagccatggtgaaccctgccg

SEQ ID NO: 87951 - DNA, 464 bp, Zea mays
accggtccggaattcccgggcagcaagcaacatagaaagtagaatccattagcaacaatagagcaacaatggcgaccaagatattttccctccttatgctccttgctctttctacatgtgttgctaacgcgacaattttccctcaatgctcacaagctcctatagcttcccttcttcccccataccttccatcaattatagcttcagtatgtgaaaacccagctcttcaaccatataggcttcaacaagcaatcgcagcaagcaacatacctttatcgcccttgttgtttcaacaatcaccagccctatctttggtgcagtcattggtacaaaccatcagggcacaacagctgcagcaactcgtgctacctgtgatcaaccaagtagctctggcaaacctttctccctactctcagcaacaacaatttcttccattcaaccaactgtctacactgaaccctgct

SEQ ID NO: 87952 - DNA, 472 bp, Zea mays
gctctaccggttcggaattcccgggctagcaacatagaaagcacaatagtgtaccaacaatggcagccaaaatattttgcttccttatgctccttggtctttctgcaagtgctgctaccgcaaccattttcccacaatgctcacaagctcctatagcttcctttcttcccccatacctctcaccagcggtgtcttcagtatgtgaaaacccaattcttcaaccctacaggatccaacatgcaatcgcagcaggcatcttacctttatcacccttgttccttcaacaaccgtcagccctattacagcagttacctttggtgcatatgttggcacacaacatcatagcacaacaactacaacaacttgtgctagggaaaccttgctgcctactctcagcaacagcagtttcttccattcaaccaactggctgcattgaactctgctgcctaattgcaacaacaactaccattca

SEQ ID NO: 87953 - DNA, 426 bp, Zea mays
  unsure (1)..(426): unsure at all n locations
ggagatctacctgcactcgctccccgtcaaggagcaccagatcgtcgagaccctggtgcgcggggctcaaggacgaggtcatgaagatcacgcccgtccagaagcagacccgtgccgggcagcgcacccgcttcaaggccttcgtcgttgtcggcgatggcgacggccacgtcggcctgggagtcaagtgcgccaaggaggtggccaccgccatccgcggcgccatcatcctagccaagctctccgtcgtccccgtcaggagggggtactgggggaacaggatcggacaggcccacaccgtgccctgcagggtcaccggcaagtgtggctccgtcactgtgcgcatggtgcccgggcccaggggttctggcatcgtcgccgngcgcgtgcccaagaaggtgctgcagttcgctggcattgaggatg

SEQ ID NO: 87954 - DNA, 386 bp, Zea mays
gatgaattacatggaacttgtgcagaaacatgtcgaggacgatgctgatatcactatgtcatgtgctcctgttgatgagagccgagcttctaaaaatgggctagtgaagattgatcatactggacgtgtacttcaattctttgaaaaaccaaagggtgctgatttgaattctatgagagttgagaccaacttgctgagctatgctatagatgatgcacagaaatatccataccttgcatcaatgggcatttatgtcttcaagaaagatgcacttttagaccttgtcaagtcaaaatatactcaattacatgactttggatctggaatccttccaagagctgtacttgatcataacgtgcaagcatgcatttttacgggctattggg

SEQ ID NO: 87955 - DNA, 375 bp, Zea mays
caggcacaacaacagctgcaacagcttctgccagcgctcagtcaactagccatggtgaggcctgccgcctacctacaacagcaacaactgctttcatctagcccgctcgctgcggccaatgcacctacatacctgcaacaacaattgctgcaacagattgtaccatctctgactcagctagctgtcgcaaaccctgctgcctacttgcaacagctgcttacattcaaccaactgactatgtcgaactctgctgcgtacctacaacagcgaccacagttacttaatgcactagcagtggctaacccattggtcgctgccttgctacagcagcaacaattgctgccatacaaccagttctctttgataaaccctgtc

SEQ ID NO: 87956 - DNA, 493 bp, Zea mays
gaggaagttttgtctctgaaaagtagctcgctctaccggtccggaattcccgggtcgacccacgctccggttacctttggtgcatttattggcacaaaacatcagggcacaacaactacaacaacttgtgctagcaaaccttgctgcctactctcagcaacagcagtttcttccattcaaccaactaggttcattgaactctgcttcttatttgcaacaacaacaactaccattcagccagctacctgctgcctacccccagcaatttcttccattcaaccaactagcagcattgaactctcctgcttatttacagcagcaacaactactaccattcagccagctagctggtgtgagccctgctaccttcttgacacaaccacagtttgtgccgttctaccagcacggtgcgcctaacgctggaaccctttaccactggaacaatggttgcatttaaaccaatttggtttgaacaacccacaatgttctaccc

SEQ ID NO: 87957 - DNA, 289 bp, Zea mays
ctggacgtcagcctagcaattagctcatcgactccagattggagaactcgacaccatgaaggtgctgatcgttgcccttgctctcctggcgctcgctgcgagcgccgcctccagtacaagcggcggctgtggctgccagacaccaccgtttcatctaccgcctccgttctatatgccgcctccgttctatctgccgccgcagcagcagccgcagccatggcaataccccactcaaccaccgcagctaagcccgtgccagcagttcgggatcctgcggcgtcggcagcgt

SEQ ID NO: 87958 - DNA, 252 bp, Zea mays
gcaacaacccatcattggtggtgccctcttttagatttattattgaactataactcataagaaagctaaaagagggcaccaacaacgcatgattggtgcggacgcgttgttcgactcgaggcttacggactggttcatgcagacgtactagctatctatagtgtgagttatatatgacgacttggttgtatctgtagaagcatcagactgcgaaaacatggcaataccccactttaataccgtagctaaaca

SEQ ID NO: 87959 - DNA, 419 bp, Zea mays
  unsure (1)..(419): unsure at all n locations
ggctggcaagggtggagagcttacccatgatgagactacaatcataagtggagccttggacctgaccgaaaagactgctgcagaagctatgacaccaattgagtcaactttctcactggatgtggattccaagttggattgggaagcaattggaaaaattcttgcccgtggtcatagtcgtgttcctgtatactctggacaccctagaaacatcattgggctcctatagtcgaagagtctatngactgtccgtgctgaaacggaaaacccaagtagtgctggttcaaatagaaagaattcaaaggttcctttaaaccttcctctggatgaaatactggatgaggttcaaaaaggaaataatcatatggctgctgttgtgaaggcttaacccaaaactgaaccaccccttgacaaaactg

SEQ ID NO: 87960 - DNA, 367 bp, Zea mays
  unsure (1)..(367): unsure at all n locations
gggtgatccgcgctgagaagagatggctaagatcgccgcggcggcggcggcggcgctgtgcttcgcggccctggtggccgtggccgtctgccaaggcgaggtcgagcggcagaggctcagggacctgcagtgctggcaggaggtccaggagagcccgctcgacgcgtgccgccaggtcctcgaccggcagctaaccggcggcggcggcggcggcggcgttggcccgttccggtggggcaccgggctccggatgcggtgctgccagcagctccaggacgtgagccgcgagtgccgctgcgccgncatccggagcatggtcaggggatacgaggaggccatgccgncgctggagaaaggctgttggcca

SEQ ID NO: 87961 - DNA, 414 bp, Zea mays
accggtccggaattcccgggccaactagcaacatagaaagcacaatagtgtaccaacaatggcagccaaaatattttgcctccttatgctccttggtctttctgcaagtgctgctacggcgaccattttcccgcaatgctcgcaagctcctatagcttcccttcttcccccgtacctctcaccagcggtgtcttcggtatgtgaaaacccaattcttcaaccctacaggatccaacaggcaatcacagctggcatcttacctttatcacccttgttcctccaacaatcatcagccctattacatcagttacctttggtgcatttattggcacaaaacatcagggcacaacaactacaacaacttgtgctagcaaaccttgctgcctactctcagcaacagcagtttcttccatt

SEQ ID NO: 87962 - DNA, 431 bp, Zea mays
ttccgaggctacgcgccacgcgtgcgctggactatttcaaatattactgctggaaacactgatcatacacaggctgtgagtaagagccactatcatggctactacgttgcaactgatcacaaacagcagagtttgatatcaagaaggaggctgcttgggccatctcaaatgctacctctggtggttctcatgagcaaatcaagtacttggtgtctgatggctgcatcaagccattgtgtgaccttcttgtctgacctgatccgagaattgtaacagtttgactgaaagctcttgagaatattcttaaagtagggcagcatgacaagaccatgggtgcaacaggtgacactaacgtcttagctcagatgatcgatgaagcggaaggcctggaacagatcgagaacctacagagccacgataacaatgaaatc

SEQ ID NO: 87963 - DNA, 319 bp, Zea mays
cagcccttcaaccctacaggatccagcaagcaatcgcaacaagcaacttacctttatcagcacctgttctttcaacaatcgccagccctatctttggtgcagtcattggtacaaaccatcagggcagaacagttgcagcaactcgtgctaccagtgatcagccaagtagctctggcaaacctttccccctactctcagcaacaacaatttcttccattcaaccaactgtctatactgaaccctgctgcttatttgcagcaacaacaactactaccattcagccagctagctactgcctactctcagcagcaacaatttc

SEQ ID NO: 87964 - DNA, 370 bp, Zea mays
aagtgccaggggtgcttcagcataaccactgttttcagccactcccagactgttgatgtgtgccctggctgccaaactgtcctctgccaacccacaggaggaaaggcaaggctcactgagggctgctctttccgcaggaagggagactagagcggatgtggtcttcaagttttgctctatgccagatactagcgtcatgaactgcctttagctaagattttccataagttgttctcgagcagctatgtgttgcatgttggctacttccaaacttatatctggttctggttggattgtgatgaactaatggctctattgaatcatataatgatgttgccgatatttggtgaaaaaaacaagtattaacaac

SEQ ID NO: 87965 - DNA, 385 bp, Zea mays
ctttaccggtccggaattcccgggatagaaagcacaatagtgtaccaacaatggcagccaaaatattttgcttccttatgctccttggtctttctgcaagtgttgctaccgcaaccattttcccacaatgctcacaagctcctatagcttcccttcttcccccatacctctcaccagcggtgtcttcaatgtgtgaaaacccaattgttcaaccctacaggatccaacaggcaatcgcaacaggcatcttaccattatcacccttgttccttcaacaaccgtcaagcctattaccacaagtacctttgggccaattgggggccccaaaccttaaggcaccaccacctccaccaccttggcctaccaaaccttgctgcatacttta

SEQ ID NO: 87966 - DNA, 385 bp, Zea mays
  unsure (1)..(385): unsure at all n locations
gagaccagcaagcaacatagaaagtagaatccattagcaacaatagagcaacaatggcgaccaagatattttccctccttatgctccttgctctttctacatgtgttgctaacgcgacaattttccctcaatgctcacaagctcctatagcttcccttcttcccccataccttccatcaattatagcttcagtatgtgaaaacccagctcttcaaccatataggcttcaacaagcaatcgcagcaagcaacatacctttatcgcccttgttgtttcaacaatcaccagccctatctttggtgcagtcattggtacagaccatcanggcacaacagctgcagcaactcgtgctacctgtgatcacccaagtagctctggcaaacct

SEQ ID NO: 87967 - DNA, 350 bp, Zea mays
cccataccttccatcaatgaccgctttagtatgtgaaaacccagcccttcaaccctacaggatccagcaagcaatcgcaacaagcaacttacctttatcacacctgttctttcaacaatcgccagccctatctttggtgcagtcattggtacaaaccatcagggcagaacagttgcagcaactcgtgctaccagtgatcagccaagtagctctggcaaacctttccccctactctcagcaacaacaatttcttccattcaaccaactgtctatactgaaccctgctgcttatttgcagcaacaacaactactaccattcagccagctagctactgcctactctcagcagc

SEQ ID NO: 87968 - DNA, 408 bp, Zea mays
  unsure (1)..(408): unsure at all n locations
gaactctgctgcttatttgcaacaacaattaccattcagccagctagttgctgcctacgcccagcaatttcttccattcaaccaactagcagcattgaactctgctgcttatttacagcagcaacaactactaccattcagccagctagctgatgtgagccctgctgccttcttgacacaacaacagttgttgccgttctacctgcacgctatgcctaacgctggcaccctcttacaactgcaacaattgctgccattcaaccaacttgctttgacaaacccaacagtgttctaccaacaacccatcattggtggtgccctcttttagattgcttatgagttatagttcaataatgaaagtttttggatgatgnttgtggcgtcccagaaataagaaagtacatttct

SEQ ID NO: 87969 - DNA, 447 bp, Zea mays
  unsure (1)..(447): unsure at all n locations
ccgggtcgacccacgcgtacgcaacaagctgccccgcagcaacgaacactaaccttggcagaacgaagctgaagtagttcgttgggaacccagtatggcaaacgcgccgaggatcctggccctcggcctgctgctagcgctcctgtgcgctgccgncggcccggccgncgcgcagaactgcggctgccagcctaacttctgctgcagcaagttcggctactggcggacgaccgacgactactgcggcgacgggtgccagtcgggcccgtgccgctcgggcggcggcggcggcggcggcggaggcggaggcagtggcggtgcgaacgtggctaacgtggtcagcgacgcgttcttcaacggcatcaagaaccaggccgggagcgggtgcgagggcaagaacttctacacccggagcgcgttcctgagcgccgtcaacaagtacccggg

SEQ ID NO: 87970 - DNA, 302 bp, Zea mays
  unsure (1)..(302): unsure at all n locations
gcaacatagaaagtggaatccagtagcaacaatagagcaacaatggcgaccaagatattgtccctccttatgctccttgctctntctacatgtgttgctaacgcgacaattttccctcaatgctcacaagctcctatagcttcccttcttcccccataccttccatcaattatagcttcaatatgtgaaaacccagctcttcaaccatataggcttcaacaagcaatcgcagcaagcaacatacctttatcgcccttgttgtttcaacaatcgccagccctatctttggtgcagtcattggt

SEQ ID NO: 87971 - DNA, 294 bp, Zea mays
  unsure (1)..(294): unsure at all n locations
attgagaccaactagcaacatagaaagcacaatagtgtaccaacaatggcagccaaaagattttgcttccttatgctccttggtctttctgcaagtgttgctaccgcaaccattttcccacaatgctcacaagctcctatagcttcccttcttcccccatacctctcaccagcggtgtcttcaatgtgtgaaaacccaattgttcaaccctacaggatccaacaggcaatcgcaacaggcatcttaccattatcacccttgatcctncaacaaccgtcagccctaatacagcag

SEQ ID NO: 87972 - DNA, 369 bp, Zea mays
  unsure (1)..(369): unsure at all n locations
gctgtagcaacatagaaagcacaatagtgtaccaacaatggcagccaaaatatggtgcgtccttatgctccttggcctttctgcaagtgctgctaccgcaaccattttcccacaatgctcacaagctcctatagcttcctttcttcccccatacctctcaccagcggtgtcttcagtatgtgaaaacccaattcttcaaccctacaggatccaacaggcaatcgcagcaggcatcttacctttatcacccttgctccttcaacaaccgtcagccctattacagcagttacctttggtgcatttgttggcacanaacatcaaggcacaacaactacaacaacttgtgctaggaaaccttgctgcctactt

SEQ ID NO: 87973 - DNA, 453 bp, Zea mays
gacgccacgacccacgcgtcaggtcgcacatatctactatactatactctaggaagcaaggacaccaccgccatggcagcgaagatgcttgcattgttcgctctcctagctctttgtgcaagcgccactagtgcgacccatattccagggcacttgccaccagtcatgccattgggtaccatgaacccatgcatgcagtactgcatgatgcaacaggggcttgccagcttgatggcgtgtcccgtcctgatgctgcaacaactggtggccctaacggttcaaacgaatgccgtgattaatgcccagatgatgaacgctaacatgatgtcaccattgatgatgccgagcatgatgtcaccaatggtcttgccgagcatgatgtcgcaaatgatgatgccacaatgtcactgcgacgccgtctcgcagattatgctgcaacagcagttaccattc

SEQ ID NO: 87974 - DNA, 280 bp, Zea mays
gtgagagccgtcgccgctgcagtgtccatagccaccgcaggagactgagatggggggttgtgtcaagacccacaagaccaatgcgtacttcaagcgtttccaggtgaagtttcaagaaaaggtcccttggcagaacgacttacaggtcacgattaggctgattaaccaagacaaaaacaagtacaatacacccaaattcagatttggtgggcgatttaccaaccaggaccttacaggacaaattatttttggtaggttagccggggaattgggtcttggt

SEQ ID NO: 87975 - DNA, 221 bp, Zea mays
attgatacgaactagcaacatacatagtgaagtacactagcaacatcttagcaccatgggcagccaaaattttggcattcctggccttcttggtttttcaacaagccgtggttccgggaatattattccacaatggttaacaacaatacctctttccggtgacagccgcgagatttgaatacccaactatacaatcctacaggctacaagaggccatcgca

SEQ ID NO: 87976 - DNA, 412 bp, Zea mays
accggtccggaattcccgggcaacaaatgcgttcattattccacagtgctcacttgctcctagtgccattattccacagttcctcccaccagttgcttcaatgggcttcgaacatccagccgtgcaagcctacaggctacaactagcgcttgcggcgagcgccttacaacaaccaattgcccaattgcaacaacaatccttggcacatctaaccctacaaaccattgcaacgcaacaacaacaacaacaacagtttctgccatcactgagccacctagccgtggtgaaccctgtcacctacttgcaacagcagctgcttgcatccaacccacttgctctggcgaacgtagctgcataccagcaacaacaacagctgcaacagtttatgccagtgctcagtcaactagccatg

SEQ ID NO: 87977 - DNA, 368 bp, Zea mays
  unsure (1)..(368): unsure at all n locations
cggacgcgtgggcgcgtcccgagagcgcaaatcattccgcgcgacgcaaaaaccctaggccagccaccgacccctctcatggcaaccaccaccacccaggcgagcctcctcctccagaagcagctaagagatctcgcgaagcacccggtggatgggttctctgctgggctggtcgacgacagcaatgtcttcgagtggcaggtcaccatcatcggaccgnctgacaccctatatgatggagggtacttcaatgcaataatgagcttcccacaaaattacccaaacagcccggcatcagtcagatttacctctgaaatggggcatccaaatgtctatcctgatgggcgggtttgtatctctattcttca

SEQ ID NO: 87978 - DNA, 419 bp, Zea mays
atagtgtaccaacaatggcagccaaaatattttgcttccttatgctccttggtctttgtgcaagtgttgctaccgcaaccattttcccacaatgctcacaagctcctatagcttcccttcttcccccatacctctcaccagcggtgtcttcaatgtgtgaaaccccaattgttcaaccctacaggatccaacaggcaatcgcaacaggcatcttaccattatcacccttgttcctccaacaaccgtcagccctattacagcagttacctttggtccatttggtggcacaaaacatcagggcacaacaactacaacaacttgtgctagcaaaccttgctgcatactctcagcaacatcagtttcttccattcaaccaactggctgcattgaactctgctgcttatttgcaacaacaatta

SEQ ID NO: 87979 - DNA, 288 bp, Zea mays
agcagagtgcctgtatgcaaaccttctttgttgatttctgattgcctgttcgcgcgctgctgcaaggatggagctccgatgcttaaacagaaaggacctgatcgaggcactggccaaggacatccctgcaggcgcgatccgattcggctgccgcgtcgctgccgtcgctgcggaccccggcggcggtcacggcgccgtcctgacaatggcggacggtactgccatgaaggccaaggtcctgatcgggtgcgagggcacatactccgcggtggccaggtaccttgggct

SEQ ID NO: 87980 - DNA, 372 bp, Zea mays
cgcaaattgcaccaagaaatccatcgagaggccgtcgacaggggaattaatggcgtcgtcgtctagcagcagccaccgccgcctcatcctcgcagccgccgtcctgctctccgtgctcgcggctgccagcgccagcgccgggacctcctgcgtgccggggtgggccatcccgcacaacccgctcccgagctgccgctggtacgtgaccagccggacctgcggcatcgggccgcgcctcccgtggccggagctgaagaggagatgctgccgggagctggcggacatcccggcgtactgccggtgcacggcgctgagcatcctcatggacggcgcgatcccgccgggcccggacgcgcagctggagggccgcct

SEQ ID NO: 87981 - DNA, 406 bp, Zea mays
ccttcttcccccatacctctcaccagcggtgtcttcaatgtgtgaaaacccaattgttgaaccgtacaggatccaacaggcaatcgcaacaggcatcttaccattatcacccttgttcctccaacaaccgtcagccctattacagcagttacctttggtccatttggtggcacaaaacatcagggcacaacaactacaacaacttgtgctagcaaaccttgctgcatactctcagcaacatcagtttcttccattcaaccaactggctgcattgaactctgctgcttatttgcaacaacaattaccattcagccagctagttgctgcctacccccagcaatttcttccattcaaccaactagcagcattgaactctgctgcttatttacagcagcaacaactacta

SEQ ID NO: 87982 - DNA, 452 bp, Zea mays
cggaattcccgggtcgacctagacccacgcgtccgaactagcaacatagaaagcacaatagtgtaccaacaatggcagctaaaatattttgcggccttatgctccttggtctttctgcaagtgctgctacggcgaccattttcccacaatgctcacaagctcctatagcttcccttcttcccccgtacctctcaccaacggtgtcttcggtatgtgaaaacccaattcttcaaccctacaggatccaacaggcaatcgcagctggcatcttacctttatcacccttgttcctccaacaatcatcagccctattacagcagttacctttggtgcatttattggcacaaaacatcagggcacaacaactacaacaacttgtgctagcaaaccttgctgcctactctcagcaacagcagtttcttccattcaaccaactagctgcattgaactct

SEQ ID NO: 87983 - DNA, 374 bp, Zea mays
  unsure (1)..(374): unsure at all n locations
aacacaccaagcgaagcgcactagcaacgacctaacaacaatggctaccaagatattagccctggttgcgcttcttgccctttttgtgagcgcaacaaatgcgttcattattccacaatgctcacttgctcctagtgccattattccacagttcctcccaccagttacttcaatgggcttcgaacacctagctgtgcaagccaacatgcaacaacaagcgcttgcggcgagcgtcttacaacaaccaattgcccaattgcaacaacaatccttgccacatctaacaatacaagccatcacaacgcaacagcaacaacagttcctaccagcactgagccacctagccatggtgaaccctgccgnctacttgcaag

SEQ ID NO: 87984 - DNA, 439 bp, Zea mays
gttgaaggcttgggctgcatcagaaggaatccagtacgaggacttgagacagctctgtgctgatcctagagcaacagctgctgtcctggctgatatggattccattgcgaaggaagcacagctgagaggtttcgagtttgctaaagcggttactcttgttgctgagccgttcacattggataatggccttctcaccccaacattcaaggtcaagaggccgcaagccaaagcatactttgcaaaagagatctcagacatgtatgcacggttgctagagacagagttagctaggtcgaaattgtaacttgtgcggtatcaggaaaaaggcccatcatacaagcgtacaggagattggattctgcattttttatttccactcacgaaataagtagtaaaatcttttactgatacgggaaatacggatcatgccatgctccgg

SEQ ID NO: 87985 - DNA, 328 bp, Zea mays
gcagcattgaactctcctgcttatttacagcagcaacaactactaccattcagccagcgagctggtgtgagccctgctaccttcttgatacaaccacagttgttgccgttctaccagcacgctgcgcctaacgctggcaccctcttacaactgcaacaattgctgccattcaaccaacttgctttgacaaacccagcagcgttctaccaacaacccatcattggtggtgccctcttttagatttcttatgagttatagttcaataataaagttttttgtctgatgtttgtggcttcccagaaataagaaggtacatttctagattctt

SEQ ID NO: 87986 - DNA, 512 bp, Zea mays
  unsure (1)..(512): unsure at all n locations
atgggagtgtttgttacgaaagaagatattgcacgctcgtaccgtccggaattcccgggtcgacctacgcgtccggacgccgtcatggagccggttgttgctggcagcaacacggtagtagctgttgcgcaaggtgagttgcaaacaatgaacgtgcagcagcccgctgatgttgccggacccagcgagggggtggcggcgatctccaaaggggggaaggtagggccgaaccggtgcagcgcctgcacgaagagggttggacttactggattcaactgccggtgtgggaacttgtactgcgcacttgaccgctactacgacaagcacgactgcgagttcgactaccggactgctgtcagtgacgccattgccaaggctaatccngcggtgaaggcagacaagctcgacatgatctatggggggttccctaccgatgggtatcatgaagattgtaaaccgcggtaactcgtcatgcggaactgctgtcatgccagcgcgcctttcttcttcat

SEQ ID NO: 87987 - DNA, 430 bp, Zea mays
attttgagcattcagaaacacaccaagcgaagctacctagcaacgacttaacaacaatggctaccaagatattagccctccttgcgcttcttgccctttttgtgagcgcaacaaatgcgttcattattccacaatgctcacttgctcctagtgccattataccacagttcctccgaccagttacttcaatgggcttcgaacacctagctgtgcaagcctacaggctacaacaagcgcttgcggcgagcgtcttacaacaaccaattaaccaattgcaacaacaatccttggcacatctaaccatacaaaccatcgcaacacaacagcaacaacagttcctaccagcactgagccaactagatgtggtgaaccctgtcgcctacttgcaacagcaggtgcttgcatccaacccacttgctctggcaaacgt

SEQ ID NO: 87988 - DNA, 420 bp, Zea mays
tgaaaatccaattcttctaccctacaggatccaacaggcaatcgcagcaggcaggttagctttatcacccttgttcctccaacaatcatcagccctattacagcagttacctttggtgcatttattggcacaaaacatcagggcacaacaactacaacaactcgtgctagcaaaccttgctgcctactctcagcaacagcagttacctttggtgcatttgttggcacaaaacatcagggcacaacaactacaacaactcgtgctagcaaaccttgctgcctactctcagcaacaacagtttctgccattcaaccaactagctgcattgaactctgctgcttatttgcagcaccaacaactactaccattcagccagctagctgctgcctacccccggcaatttcttccattcaaccaact

SEQ ID NO: 87989 - DNA, 200 bp, Zea mays
cgcatacaagcggcggctgcggctgccagccaccgccgacggttcatctaccgtcgccggtgcatctgccaccttcggttcacctgccacctccggtgcatctgccaccgccggtccacctgccgccgccggtccacctgccaccgtcggtccatgttgccgcgccggctcatctgccggcgtcaccatgccactaccct

SEQ ID NO: 87990 - DNA, 420 bp, Zea mays
cccacgcgtccgtgcgtagagaggatcgtcgaacagaacagcatgaagatgggcatcggtctcgtcgtgtgcctggctctgtcagctgccagcgcctctgcaatgcagatgccctgcccctgcgcggggctgcagggcttgtacggcgctggcgccggcctgacgacgatgatgggcgccggcgggctgtacccctacgcggagtacctgaggcagccgcagtgcagcccgctggcggcggcgccctactacgccgggtgtgggcagccgagcgccatgttccagccgctccggcaacagtgctgccagcagcagatgaggatgatggacgtgcagtccgtcgcgcagcagctgcagatgatgatgcagcttgagcgtgccgctgccgtcagcagcagcctgtacgagccagctctgatg

SEQ ID NO: 87991 - DNA, 423 bp, Zea mays
gcgagcctcgtaccggcgcagccatggcggaggagcccgccgttgtcgtggcctcctgcagctgacgaggttgacctcgggaacctcatggcgtacgatccgtcgcatcacgtcgccaccgcctccagggaggagctgagacaggagtgcctgcggaagggtacagagctggcgcaggcggtggccgacgtcctcttcgcgctgccgcccaacgaggaccgcgacggccccattatccacctcccgccgcccaccttcagactcccgcgggagaagcatctacccaagcccaagccaccgaccaagtgggaagctgttgcaaaggcgaaaggaattaccaagcgcaaaaagaacaagcgtgagtgggatgagcaaactcaatcctggaagcggactcatggctatgaccgtgttaatgatgac

SEQ ID NO: 87992 - DNA, 292 bp, Zea mays
caactagcaacatagaaagcacaatagtgtaccaacaatggcagccaaaatattttgcgtccggatgctccttggtctttctgcaagtgctgctacggcgaccattttcccacaatgctcacaagctcctatagcttcccttcttcccccgtacctctcaccagcggtgtcttcggtatgtgaaaacccaattcttcaaccctataggatccaacaggcaatcgcagctggcatcttacctttatcacccttgttcctccaacaatcatcagccctattacagcagttacct

SEQ ID NO: 87993 - DNA, 422 bp, Zea mays
accggtccggaattcccgggattcgtttggagcaaactgctccggtcagcttggccttggggattcagaagaccggttcaagccatgtgttattaggtctctacaaggcatcagaatcacacaagctgcagttggttcgagatgcacaatgcttgtgagtgacacaggaagcgtctactcatttgggaaggaggatttcagggtcgcagaactagttgacggtgctcattttcagatcacaactcctaggattgaggagtcactgaagggtgtgtttgtagttcaagcagccatagggggttacttctctgcagttctgtccagagagggtcgagtgtacaccttctcatggggcaaagccgagaggcttggccacagttcggatccttcagatgtcgagcctcgtcttctccctggactcg

SEQ ID NO: 87994 - DNA, 295 bp, Zea mays
gcaacatagaaagtggaatccagtagcaacaatagagcaacaatggcgaccaagatactgtccctccttatgctccttgctctttctgcatgtgttgctaacgcgacaattttccctcaatgctcacaagctcctatagcttcccttcttcccccataccttccatcaatgatagcttcagtatgtgaaaacccagctcttcaaccctataggctccaacaagcaatcgcagcaagcaacatacctttatcacccttgtttcaacaatcgccagccctatctttggtgcagtcat

SEQ ID NO: 87995 - DNA, 397 bp, Zea mays
ctcacttgctcctagtgccattattccacagttcctcccaccagttacttcaatgggcgtcgaacatccagccgtgcaagcctacaggctacaactagcgcttgcggcgagcgccttacaacaaccaattgcccaattgcaacaacaatccttggcacatctaaccctacaaaccactgcaacgcaacaacaacaacaacaacagtttctgccatcactgagccacctagccgtggtgaaccctgtcacctacttgcaacagcagctgcttgcatccaacccacttgctctggcgaacgtagctgcataccagcaacaacaacagctgcaacagtttatgccagtgctcagtcaactagccatggtgaaccctgtccggttacctacaactactttc

SEQ ID NO: 87996 - DNA, 384 bp, Zea mays
gcagcatagaaagcacaatagtgtaccaacaatggcagccaaaatattttgcttccttgtgctccttggtctttctgcaagtgctgctaccgcaaccattttcccacaatgctcacaagctcctatagcttcctttcttcccccatacctctcaccagcggtgtcttcagtatgtgaaaacccaattcttcaaccctacaggatccaacaggcaatcgcagcaagcatcttacctttatcacccttgttccttcaacaaccggcaaccctattacagcagttacctttggtgcatttgttggcacaaaacatcaaggcacaacaacttcaacaacttgggctaagaaaccttgctggctactctcagcaacagcagtttctttc

SEQ ID NO: 87997 - DNA, 301 bp, Zea mays
cccagctcttcagccctataggctccaacaagcaatcgcagcaagcaacatacctttatgcacccttgttgtttcaacaatcgccagccctatctttggtgcagtcattggtacaaaccatcagggcacagcagctgcagcaactcgtgctacctgtgatcaaccaagtagctctggcaaacctttctccctactctcagcaacaacaatttcttccattcaaccaactgtctacactgaaccctgctgcttatttgcagcaacaactattaccattcagccagctagctactggctactc

SEQ ID NO: 87998 - DNA, 399 bp, Zea mays
caccaagcgaagcacattagcaacaacctaacaacaatggctaccaagatattatcccgccttgcgcttcttgcgctttttgcgagcgcaacaaatgcgttcattattccacaatgctcacttgctccaagttccattattacacagttcctcccaccagttacttcaatgggcttcgaacacccagctgtgcaagcctataggctacaacaagcaattgcggcgagcgtcttacaacaaccaatttcccagttgcaacaacaatccttggcacatctaacaatacaaaccatcgcaacgcaacagcaccaccatttcctaccagaattgacccacttacccttggggaaccttgccgctaactggcacaagaagtggctggcttaaacccaattggtt

SEQ ID NO: 87999 - DNA, 387 bp, Zea mays
cttagagatgcaaagttgcaattcaaagatattgatgaggttattcttgttggtggctcaactagaataccagctgttcaggagcttgtcaagaaaatgacaggaaaggaccccaatgtgacagtcaaccctgatgaggttgttgcacttggagcagctgtgcaggctggagtactgtctggcgatgttagcgacattgtacttcttgatgtgacccccttgtccctaggtttggagacactgggtggtgtcatgacccaaattatcccaacgaatacaaccttggctaacttaaaatccgaaggtttcttaacagcaacttattgccaaactaatgttgaaatcaatggtcttcaaggagaaagaaaagttggtagaaaccaccag

SEQ ID NO: 88000 - DNA, 437 bp, Zea mays
ctccatgaaggagatcaaatagttgtttgtggcatgcagggacccattgtgacaactgtcagggctttgttaacaccacacccaatgagagagcttcgagttaagggcacctacatacatcataaggagatcagagctgcacaaggagtcaaaatatctgctcagggtctcgaacatgcaattgcagggacagccctttacgtgttaggacctgatgatgatttagacaaactgaatgaagctgttatggaagagatgacacgggttaggagccggattgacaggagtggtgaaggtgtctatgtacaggcatctacccttgggtctttggaagctctcactgagttcttgaagagccctgctgtgaatattcccttctgtgatttcagtatagggccagtgcataagaaggatgttatgaaggctaatgtcatgct

SEQ ID NO: 88001 - DNA, 340 bp, Zea mays
gccggagtacgcgctggcggggggcgtgagcggatggaacgcggcggtgctggaggcggccatggcgttcgggctcatgtacgcctactttgcgacggtgatggacaaagcgcggagggtccgcgccggcgccggagcgctggcggcgccgctcgccgtggggctcctggcgggggctaacgtgctggcctgcggcgcgctggagggcgccgtgatgaatccggcgcgcgcgttcgggcccgccgtcgtgggctcccgtcgctggagacaccaatgggtgtactgggtggggcccatggtcggcgccggcctctccggcgtcgtctacgagcacctcgtc

SEQ ID NO: 88002 - DNA, 293 bp, Zea mays
ctcaccagcggtgtcttcggtatgtgataacccaattcttcaaccctacaggatccaggacgcgatcgcagctggcatcttacctttatcacccttgttcctccaacaatcatcagccctattacaacagttacctttggtgcatttattggcacaaaacatcagggcacaacaactacaacaacttgtgctagcaaaccttgctgcctactctcagcaacagcagattcttccattcaaccaactaggttcattgaactctgcttcttatttgcaacaacgacaactaccat

SEQ ID NO: 88003 - DNA, 370 bp, Zea mays
ccctgcgtttccttacttcctggtaaagaaagaagcgaagccaggtacttggtgttgagcgcggagagaggagaggcgcagagcatcgacgatggcgagcggcagcatgaagagggagatcagcgagacccacgacaccctccgcttcggcctcaatgccggcgtcaaggccgacctcgcgccgccgcacccgctccagtccagcatccaatcggaggccaagttctgggcggacaagaagaagtttgggacagaggccatctacggatccgccttgaacatccgcaaggatctcgatgcccaaatcctctcaaggttccaaaggccccctggtgctttgccatcatctctgcttggatatgaggcactg

SEQ ID NO: 88004 - DNA, 343 bp, Zea mays
aacaacaagaagttcatgttcaacaacatcaacaacaaccgcagcaccaacaacaacagcaacaacaacagcaccaacaacaacatcaatgtgaaggccaacaacaacatcaccaacaatcacaaggccatgtgcaacaacacgaacagagccatgagcaacaccaaggacagagccatgagcaacaacatcaacaacaattccagggtcatgacaagcagcaacaaccacaacagcctcagcaatatcagcagggccaggaaaaatcacaacagcaacaatgtcattgccaggagcagcaacagactacaaggtgcagctataactactatagcagtagctc

SEQ ID NO: 88005 - DNA, 408 bp, Zea mays
  unsure (1)..(408): unsure at all n locations
atttgcagcaacaactattaccattcagccagctagctactgcctactctcatcaacagcaacgtcttccatttaaccaattggccgcactgaacctcgctgcttatttgcagcagcaaatattactaccatttagccagctagctgcagcaagccgtgcttccttcttgacacagcaacagttgctgcctttctaccagcagtttgcggctaaccccgcaaccctcttacaactacaacaattgttgccctttgtccaacttgctttgacanacccagcagncttctaccaacacacatcattggggggggcctcttttaaaatggttaataagtggaaatcaataataaaagtttttggatgatgtatgtggccaaccagaaattagagttacatttccagattct

SEQ ID NO: 88006 - DNA, 199 bp, Zea mays
gtcgccttcttacaacaacagcaattgctgccatttagccaactcgctttgacgaatcgctaccaccttattgcatcagcccaccattggtggtaccatcttctagattttttatgctttatactgtaataataaatttctcatactgatatgtgcaacttctcagtaataaaagattagagatctatattttaagttc

SEQ ID NO: 88007 - DNA, 435 bp, Zea mays
actagccatggtgaaccctgccgcctacctacaacagcaacaactgctttcatctagcccgctcgctgtggccaatgcacctacatacctgcaacaagaattgttgcaacagattgtaccagctctaactcagctagctgtggcaaaccctgttgcctacttgcaacagctgcttccattcaaccaactaactatgtcgaactctgttgcgtacctacaacagcgacaacagttacttaatccattggcagtggctaacccattggtcgctgccttcctacagcaggcacaaatggctgcaatccaaccggttcttttggatgaatccggccttggcaggaacaacccaatggttgaggttgccatcttttagattacatatgagatgtactcgataatggtgccctcataccggcatgtgtttcctagaaataa

SEQ ID NO: 88008 - DNA, 367 bp, Zea mays
  unsure (1)..(367): unsure at all n locations
cagtagtgtaccaacaatggcagccaaaatattttgcctccttatgctccttggtctggctggagtgctgctacggcgaccattttcccgcaatgctcgcaagctcctatagcttcccttcttcccccgtacctctcaccagcggtgtcttcggtatgtgaaaaccccaattcttcaaccctacaggatccaacaggcaatcgcagctggcatcttacctttatcacccttgttcctccaacaatcatcagccctattacaacagttacctttggtgcanttattggcacanaacatcagggcacaacaactacaacaacttgtgctagcaaaccttgctgcctactctcagcaacagcagtttctt

SEQ ID NO: 88009 - DNA, 373 bp, Zea mays
  unsure (1)..(373): unsure at all n locations
cgctcttcacctcgggtttcttgacctcggccttaggcacggtgaccgtgagcacgcggttcgccagcccggcttccacctgctccgtcctggcgttctccgggagccgcaagcgcctcgtgaacgggacgctgctgcgctcgacgcggtgccacctctcgttcttgtcctnctncttgctgtgctgcccgttgatgaccagcaagttgccgtcctncacctcgaccttgacctnctncttctttacgcangggaggtcggccttgaacacgtgcgcctcgggcgtctccttccagtcgatgcccgcgatggcgaaggcggcggtgtcacggtcgcctgacgacgcgacgacggacgggacgagggaccggaa

SEQ ID NO: 88010 - DNA, 359 bp, Zea mays
  unsure (1)..(359): unsure at all n locations
gaccaactagcaacatagaaagcacattagtgtaccaacaatggcagccaaaatatggtgctgccttatgctccttggtctttctgcaagtgttgctaccgcaaccattttcccacaatgctcacaagctcctatagcttcccttcttcccccatacctctcaccagcggtgtcttcaatgtgtgaaaccccaattgttcaaccctacaggatccaacaggcaatcgcaacaggcatcttaccattatcaccctngttcctncaacaaccgtcagccctattacagcagttacctttggtccatttggtggcccaaaccatcagggcccaacacctccaacacctgggcctaccaaacc

SEQ ID NO: 88011 - DNA, 373 bp, Zea mays
caacagttgctgcaacagattgtaccagctctgactcagctagctgtggcaaaccctgctgcctacttgcaacagctgcttccattcaaccaactgactgtgtcgaactctgctgcgtacctacaacagcgacaacagttacttaatccactagcggtggctaacccattggtcgctgccttcctacagcagcaacaattgctgccatacaaccagttctctttgatgaaccctgccttgttgtggcagcaacccatcgttggaggtgccatcttttagattacatatgagatgtactcgataatggtgccctcatagcggcatgtgtttcctagaaataatcaatatattgattgagatttatctcgatata

SEQ ID NO: 88012 - DNA, 122 bp, Zea mays
  unsure (1)..(122): unsure at all n locations
gatgcaaaccatggacatggctttggcgtctaaagcctcccctccgccatggaatgcgaccgncgccgagcagccaattccaaagcgtgacaaagccgctgcaaatgattcaacatacctta

SEQ ID NO: 88013 - DNA, 122 bp, Zea mays
gcgtcctgagaccaactagcaacatagaaagcacaatagtgtaccaacaatggcagccaagatatgttgcttccttaagctgcctgggccttcttcaagttcctgttaccgcaaccattttc

SEQ ID NO: 88014 - DNA, 434 bp, Zea mays
  unsure (1)..(434): unsure at all n locations
caacaatagagcaacaatggcggccaagatattttccatccttatgctccttgctctgtctgcatgtgttgctaacgcgaccatttttcctcaatactcacaagctcctatagctgcccttcttcccccataccttccatcaatgaccgcttcagtttgtgaaaacccagcccttcaaccctacaggctccaacaagcaatcgcaacaagcaacttacctttatcacccctgttctttcaacaatcgccagccctatctttggtgcagtcattggtacaaaccatcagggcacaacagctgcaacaactcgtgctaccagtgatcagccaagtagctctggcaaacctttctccctactctcagcaacaacaattntcttcattcaaccaactgtctacactgaaccctgctgcttatttacaacaacaacaac

SEQ ID NO: 88015 - DNA, 346 bp, Zea mays
  unsure (1)..(346): unsure at all n locations
gagaccaactagcaacatagaaagcacaatagtgtaccaacaatggcagccaagatatgttgcttccttatgctccttggtctttctgcaagtgctgctaccgcaaccattttcccacaatgctcacaagctcctatagcttcctttcttcccccatacctctcaccagcggtgtcttcagtatgtgaaaacccaattcttcaaccctacaggatccaacaggcaatcgcagcaggcatcttacctttatcacccttgttcctncaacaaccgtcagccctattacagcagttacctttggtgcattttgtggcacaaaacatcaaggcacaacaactacaacaac

SEQ ID NO: 88016 - DNA, 357 bp, Zea mays
atgtataccaactaccaacatacatagtgaagtacactagcaacatcttagcaccaatggcagccaagatttttgcgctccttgccctccttgctctttcagcaagtgttgctaccgcgactattattccacaatgctcacaacaatacctctctccagtgatagccgcgagatttgaatacccatctatacaatcctacaggctacaagaggccatcacagcaagcatcttacggtcgttagcattgaccgtccaacaaccatatgccctattgcaacaaccatccttagtgaatctgtatctccaaagaatcacagcacaacaactacaacaacggttgcttccaacaattaatc

SEQ ID NO: 88017 - DNA, 364 bp, Zea mays
  unsure (1)..(364): unsure at all n locations
ggtcttcagaccattagctttatctactccagagcgcagaagaacccgatcgacaccatgagggtgttgctcgttgccctcgctctcctggctctcgctgcgagcgccacctccacgcatacaagcggcggctgcggctgccagccaccgccgccggttcatctaccgccgccggtgcatctgccacctccggttcacctgccacctccggtgcatctcccaccgccggtccacctgccgccgccggtccacctgccaccgncggtccatgtgccgncgccggttcatctgccgncgncaccatgccactaccctactcaaccgncccggcctcagcctcatccccagccacacccatgcccgt

SEQ ID NO: 88018 - DNA, 296 bp, Zea mays
  unsure (1)..(296): unsure at all n locations
tccttgcgcttcttgccctttttgtgagcgcaacanatgcgttcattattccacaatgctcacttgctcctagtgccattataccacagttcctccgaccagttacttcaatgggcttcgaacacctagctgtgcaagcctacaggctacaacaagcgcttgcggcgagcgtcttacaacaaccaattaaccaattgcaacaacaatccttggcacatctaaccatacaaaccatcgcaacacaacagcaacaacagttcctaccagcactgagccaactagatgtggtgaaccct

SEQ ID NO: 88019 - DNA, 400 bp, Zea mays
  unsure (1)..(400): unsure at all n locations
cagctcttcaaccatataggcttcaacaggcaatcgcagcaggcaccatacctttagcgggcttgttgtttcaacaatcgccagccctatctttggtgcagtcattggtacaaaccatcaggtcacaacagctgcagcaactcgtgctacctctgatcaaccaagtagctctggcaaacctttctccctactctcagcaacaacaatttcttccattcaaccaactgtctacactgaaccctgctgcttatttgcagcaacaactattaccatttagccagctagctactgcctactctcagcaacaacaacttcttccatttaaccaattggccgcactgaaccccgctgcttatttgcagcagcanatactactaccatntagccagctagctgcagc

SEQ ID NO: 88020 - DNA, 371 bp, Zea mays
caggcatgttacctttatcacccttgttcctccaacaaccgacagccctattacaggggttacctttggtgcatttgctggcacaaaacatcaaggcacaacaactacaacaacttgtgctaggaaaccttgctgcctactctcagcaacagcagtttcttacattcaaccaactggctgcattgaactctgctgcttatttgcaacaacaactaccattcagtcagctagctgctgcctacccccagcaatgtcttccattcaaccaactggcagcattgaactctgctgcttatttacaacagcaacagctaccaccattcagacagctagctgatgtgagccctgttgccttcttgacacaacaacag

SEQ ID NO: 88021 - DNA, 425 bp, Zea mays
ccaactagcaacatagaaagcacaatagtgtaccaacaatggcagccaaaatgattgggcctccttatgctccttggtctttctgcaagtgctgctacggcgaccattttcccgcaatgctcgcaagctcctatagcttcccttcttcccccgtacctctcaccagcggtgtcttcggtatgtgaaaacccaattcttcaaccctacaggatccaacaggcaatcacagctggcatcttacctttatcacccttgttcctccaacaatcatcagccctattacatcagttacctttggtgcatttattggcacaaaacatcagggcacaacaactacaacaacttgtgctagcaaaccttgctgcctactctcagcaacagcagtttcttccattcaaccaactagctgcattgaactctgcttc

SEQ ID NO: 88022 - DNA, 298 bp, Zea mays
gagaccaacaagcaacatagaaagtggaatccagtagcaacaacagagcaacaatggcgaccaagatattttccctccttatgctccttgctctttctgcatgtgttgctaacgcgacaattttccctcaatgctcacaagctcctatagcttcccttcttcccccataccttccatcaatgatagcttcagtatgtgaaaacccagctcttcagccctataggctccaacaagcaatcgcagcaagcaacatacctttatcacccttgttgtttcaacaatcgccagccctatcttt

SEQ ID NO: 88023 - DNA, 369 bp, Zea mays
tcccgggtcgagccacgcgtcacgcaacacgcagcatagaaagtggaatccagtagcaacaatagagcaacaatggcgaccaagatactttccctccttatgctccttgctctttctgcatgtgttgctaacgcgacaattttccctcaatgctcacaagctcctatagcttcccttcttcccccataccttccatcaatgatagcttcagtatgtgaaaacccagctcttcaaccctataggctccaacaagcaatcgcagcaagcaacatacctttatcacccttgtttcaacaatcgccagccctatctttggtgcagtcattggtacaaaccatcaaagcacagcagctgcagcaactcgtgcta

SEQ ID NO: 88024 - DNA, 431 bp, Zea mays
  unsure (1)..(431): unsure at all n locations
caacaagcatcatacaaagtggaattcagtatcaacaatagagcaacaatggcgaggaagatactttccctacttatgctccttgctctttctgcatgtgttgctaacgcgacaattttccctcaatgctcacaagctcctatagcttcccttcttcccccataccttacatcaatgatagcttcagtatgtgaaaacccagctcttcaaccctataggctccaacaagcaatcgcagcaagcaacatacctttatcacccttggttcaacaatcgccagccctatctttggagcagtcattggtacaaaccatcaatgcacagcagctgcagcaactagtgctacctgtgatcaaccaagtagctctggcaaacctttctccctactatgagcaacaacaatttcttncattcaaccaactatctacact

SEQ ID NO: 88025 - DNA, 433 bp, Zea mays
  unsure (1)..(433): unsure at all n locations
gcaccataaaaggtggattccatagccaaaattggaccaccatgggcggccaaaaagttggcaatcctaaggctcctggtttttctgatggtttgctaacggcaacatttttcctcaatactcacaagctcctatagctgcccttcttcccccataccttccatcaatgaccgctttagtatgtgaaaacccagcccttcaaccctacaggatccagcaagcaatcgcaacaagcaacttacctttatcacacctgttctttcaacaatcgccagccctatctttggtgcagtcattggtacaaaccatcagggcagaacagttgcagcaactcgtgctaccagtgatcagccaagtagctcttgcaaacctttcnccctactctcagcaacaacaatttcttccattcaaccaactgtctatactgaaccct

SEQ ID NO: 88026 - DNA, 371 bp, Zea mays
ctcccagttcgatccccatttgaaaacaacccatccttcgttcctccgtctagcagccgctcaccctcatggccaagatcaagatcgggatcaatgggtttggcaggatcggaaggctggtggccagggtggccctgcagagcgacgacgtcgagctcgtcgccgtgaacgaccccttcatcagcaccgattacatgacctacatgttcaagtatgacactgtgcacggacagtggaagcaccatgaggtcaaggtgaaggactccaagacccttctctttggtgagaaagaggttgctgtgtttggctgcaggaaccctgaggagatcccatggggttcggttggcgctgaatatgttgttgagtctact

SEQ ID NO: 88027 - DNA, 391 bp, Zea mays
tttgagcattcagaaacacacctagcgaagcgcactagcaacgacctaacagcaatggctaccaagatattatccctctttgcgcttcttgccctttttgtgagcgcaacaaatgcgttcattattccacaatgctcacttgctcctagtgccattattccacagttcctccctccagttacttcaatgggcttcgaacacccagctgtgcaagcctacaggctacaacaagcgcttgcggcgagcgtcttacaacaaccaattgcccaattacaacaacaatccttggcacatctaaccatacaaaccatcgcaacgcaacagcaacaacaatttctaccagcactgagccaactagctgtggtgaaccctgtcgcctacttgcaacagc

SEQ ID NO: 88028 - DNA, 359 bp, Zea mays
agaaagtggaatacagtagcaaaaatagagcaacaatggcggccaagatattgtccatccttatgctccttgctctttctgcatgtgttgctaacgcgaccatttttcctcaatactcacaagctcctatagctgcccttcttcccccataccttccatcaatgaccgctttagtatgtgaaaacccagcccttcaaccctacaggatccagcaagcaatcgcaacaagcaacttacctttatcacacctgttctttcaacaatcgccagccctatctttggtgcagtcattggtacaaaccatcagggcagaacagttgcagcaactcgtgctaccagtgatcagccaagtagctctg

SEQ ID NO: 88029 - DNA, 429 bp, Zea mays
  unsure (1)..(429): unsure at all n locations
cgccgagaagctgcagagccggcgtgaccagcgaggcgagatcgtccgcgtggagccggagcacggctttcaccagctgaatccgtcgccgtcgtcgtcgtcgttttcgttcccatcgtcacaagtccagtaccaaacgtgccagcgcgacgtcgacaggcacaacgtctgcgccatggaggtgaggcacagcgtcgaacggctggaccaggccgacgtctacagccctggggctgggaggatcacacgcctcaccagccacaagttccccgtcctcaacctcgtacagatgagcgcggtgcgggtagacctgtaccaggacgccatcatgtcgccgttctggaacttcaacgcccacagcgccatgtacggcatcaggggcagtgcaagggtccaggtcgncagcgacaacgggaccacggtgttcga

SEQ ID NO: 88030 - DNA, 376 bp, Zea mays
aattcccgctggacccacgcatccgcgccaataagctgcagaaccgttttgttcaccgagtcgagatcgtccacatggaccgcttatcaccgctttcaccaggtgaatccgtctccgtcatcgtcgtctttttcgttcccatcgtcacaagtccattaccaaacttgccaccgcgacctctacatgcacaacctctgcaccatgtaagtgaggcacagtttcaaactgctggaccaagccgacgtctacagccctgagcctaccatgatcacacgcctcaccagccacaacttccccgttctcaacctcgtacagatgagcacagtgcatgtagacctgtaccatgacgccatcatgtctccgttctagaacttca

SEQ ID NO: 88031 - DNA, 370 bp, Zea mays
tcgaggcacgcatcacgcgacacacgacgcgaagctacctagcaacgacttaacaacattgggtaccaagatcgtatctggtcttgcgctaagtgccctatgtctacatgcacacagtgccttcatgattccacaatgctcacttgctcgtagtgccattctaccagagcttgtccgactagatacttaaatgggcttctaacacctagctgtgcaagactacaggctacaacaagcgcttgccgcgagcgtgttacaacaaccagttaagcaattgctgcgaccattattggcacatttaaccatagaagccatcgcagcacaacagcaacaacagttcctaccagtactgagccaactagatgtggtg

SEQ ID NO: 88032 - DNA, 398 bp, Zea mays
gcaggaagaattccaattagccttgtttaagaccaacagaaaggatagcatgtttggggaccgggtatttgacttgtttgacacgaaacacaatggaattctcgagtttgaggaatttgctcgagccctttctgtgttccatccgagtgcaccaatcgatttcaaaattgattttgctttcaaattgtatgatctcaagcaacaaggtttcattgaaaagcaggaggtcaagcaaatggtggtcgcaacacttgctgaatcaggaatgaatctttcagatgatattattgaaagcattattgataagacatttgaaggagcagatacaaagcacgatggcaaaattgataaagaggaatggcgcaaccttgtcttgaggcatccatctcctgtaaaaa

SEQ ID NO: 88033 - DNA, 423 bp, Zea mays
  unsure (1)..(423): unsure at all n locations
accggtccggaattcccgggtgaagtgctgctacggcgaccattttcccgcaatgctcgcaagctcctatagcttcccttcttccccggtacctgtcaccagcggtgtcttcggtatgtgaaaacccaattcttcaaccctacaggatccaacaggcaatcgcagctggcatcttacctttatcacccttgttcctccaacaatcatcagccctattacaacagttacctttggtgcatttattggcacaaaacatcagggcacaacaactacaacaacttgtgctagcaaaccttgctgcctactctcagcaacagcagtttcttccattcaaccaactaggttcattgaactctgcttcttatttgcaacaacaacaactaccattcagccagctacctgctgcctacccncagcaatttc

SEQ ID NO: 88034 - DNA, 323 bp, Zea mays
ctagccgtggtgaaccctgtcacctacttgcaacagcagctgcttgcatccaacccacttgctctggcgaacgtagctgcataccagcaacaacaacagctgcaacagtttatgccagtgctcagtcaactagccatggtgaaccctgccgtctacctacaactactttcatctagcccgctcgcggtgggcaatgcacctacgtacctacaacaacagttgctgcaacaaattgtaccagctctgactcagctagctgtggcaaaccctgctgcctacttacaacagttgcttccattcaaccaactggctgtgtcaaactc

SEQ ID NO: 88035 - DNA, 438 bp, Zea mays
  unsure (1)..(438): unsure at all n locations
gtccggaattcccgggctgaagaaactatgtgctgtagtatagccgctggctagctagctagttgagtcatttagcggcgatgattgagtaataatgtgtcacgcatcaccatgggtggcagtgtcagtgtgagcaatgacctgaatgaacaattgaaatgaaaagaaaaaagtattgttccaaaaaaaatttaaaaaaaaaaaaaaaaataaaaaaaaaataaaaaacaaaaaataaaaaaaaaaaaaaaaaaaaaaaaaaaaaaaaaaaaaaaaaaaaaaaaaaaaaaaaaaaaaaaaaaaaaaaaaaaaaaaaaaaaaaaaaaaaaaaaaaataaaaaatataagaaaaaaaaaaaataaaaataaaataaaataaaattttttaaaaaaaaaaaaaaataaaaanttaatataaataaaaaaaaaaaagggggg

SEQ ID NO: 88036 - DNA, 430 bp, Zea mays
atagaaagcacaatagtgtaccaacaatggcagccaaaatattttgcttccttatgcgtccttggtctttctgcaagtgctgctaccgcaaccattttcccacaatgctcacaagctcctatagcttcctttcttcccccatacctctcaccagcggtgtcttcagtatgtgaaaacccaattcttcaaccctacaggatccaacaggcaatcgcagcaggcatcttacctttatcacccttgttcctccaacaaccgtcagccctattacagcagttacctttggtgcatttgttggcacaaaacatcaaggcacaacaactacaacaacttgtgctaggaaaccttgctgcctactctcagcaacagcagtttcttccattcaaccaactggctgcattgaactctgctgcttattgcaacaacaact

SEQ ID NO: 88037 - DNA, 422 bp, Zea mays
gctctaccggtccggaattcccgggtttaaccatgagcaagctttgtttaattattacagtctacgagtacttattcaggcagatcactctgaggttgtgcctactgttgggcgctgccagcttgaccttgttggtagctgccactgccagcaggagtaagcacagccagctcatgcttcctaccgttcttgagctctgcagcttcctccatggagatggcatacgagctggcgatgacggcggccggcaagtcgctcaggacggagttcttcccggcgacgtggctgaccatggtgtcagggttcgtctcgaaggcgatgtactggaagccttctccctgcgccttggtggcgacgaggtagccctggggtacgatgagcagctgccccgcacggagcacgtcgtcgaacaccgtggtccc

SEQ ID NO: 88038 - DNA, 394 bp, Zea mays
gaccaactagcaacatagaaagcacaatagtgtaccaacaatggcagccaaaatatggcgcttgcttatgctccttggtctttctgcaagtgttgctaccgcaaccattttcccacaatgctcacaagctcctatagctgcccttcttcccccatacctctcaccagcggagtcttcaatgtgtgaaaccccaattgttcaaccctacaggatccaacatgcaatcgcaacacgcatattaccattatcactcttggttctccaacaaccgtcagccctattacagcagttacctttggtacatttggtggcacaaaacatccaggcacaacaactactacaacttgtgctagcaaaccttgctgaatactcttagcaacatcacgttcttcca

SEQ ID NO: 88039 - DNA, 354 bp, Zea mays
gcagaacgaagggtggaccggcctgttccgcggcaacgccgtcaacgtcctgcgcgtggctccgagcaaggctatcgagcatttcacctatgacacggccaagaagttcctaacccccaagggcgacgagccgcccaagatcccgatccccactccgctggttgccggagctctagccggattcgcctcaaccttgggcacctaccccatggagctgatcaagaccagggtcaccatcgagaaggacgtatacgacaacgtcgagcacgcgttcgtgaagatcctacgcgacgagggcccgtcggagctgtaccgtgggctgacacccagcctgatcggcgtggtgccgtacgc

SEQ ID NO: 88040 - DNA, 434 bp, Zea mays
aaagcacaatagtgtaccaacaatggcagccaaaatattttgcctccttatgctccggggtctttctgcaagtgctgctacggcgaccattttcccgcaatgctcgcaagctcctatagcttcccttcttcccccgtacctctcaccagcggtgtcttcggtatgtgaaaacccaattcttcaaccctacaggatccaacaggcaatcgcagctggcatcttacctttatcacccttgttcctccaacaatcatcagccctattacaacagttacctttggtgcatttattggcacaaaacatcagggcacaacaactacaacaacttgtgctagcaaaccttgctgcctactctcagcaacagcagtttcttccattcaaccaactaggttcattgaactctgcttcttatttgcaacaacaacaactaccat

SEQ ID NO: 88041 - DNA, 352 bp, Zea mays
gcgcagatgaaccgcgtccgcaacggggagctgtaccgctacatttgcgatacgaagggcgcattcgtgcagcctgcgttctacgaagcgttcggcctgactgtgatcgagtccatgacgtgcggtctgccaacgatcgcgacctgccatggtggccctgctgagatcatcgtggacggggtatctggcctgcacattgacccttaccacagcgacaaggccgcggatatcctggtcaacttctttgacaaatgcaaggcagatccgagctactgggacaagatctcacagggcggcctgcagagaatctatgagaagtacacctggaagctctactccgagaggctgatga

SEQ ID NO: 88042 - DNA, 373 bp, Zea mays
ccaactagcaacatacatagtgaagtacactagcaacatcttagcaccaatgggagccaagatttttgccctccttgccctccttgctctttcagcaagcgctgctacctcgacttttattccacaatgctcacaacaatacctctctccggtgacagccgcgggatttcaatacccaactatacaatcctacatggtacaagaggccatccaagcaagcatcttacggtcattagcattaaccctccaacaaccatatgctctattgcaacagccatccttagtgcatctgtatctccaaagaatcgcggcacaacaactacaacaacagttgctaccaacaatcaatcaagtagttgcagcgaaccttgct

SEQ ID NO: 88043 - DNA, 369 bp, Zea mays
gattttgaagaagctggacacaagcttatgaaaattaagcttgagcctggtcaagagatggagctgtgcattatgcttcttgagtgttgcagtcaggagagaacatatcttcgttattatgggctgctaggacagcgtttttgcatgatcaataaagtgtaccaagagaacttcgaaaaatgctttgtgcaacaatattcgatgattcatcgtcttgaaacaaacaagttgaggaatgttgccaagttctttgcacatttggtggggactgatgctctcccttggcatgttttggcttacatcaagttgacagaagaagacccaacatcatcttctcgtattttcataaaaatattggtcccagaatta

SEQ ID NO: 88044 - DNA, 353 bp, Zea mays
cagaaacacaccaagcgaagcacattagcaacaacctaacaacaatggctaccaagagattatccctccttgcgcttcttgcgctttttgcgagcgcaacaaatgcgttcattattccacaatgctcacttgctccaagttccattattacacagttcctcccaccagttacttcaatgggcttcgaacacccagctgtgcaagcctataggctacaacaagcaattgcggcgagcgtcttacaacaaccaatttcccagttgcaacaacaatccttggcacatctaacaatacaaaccatcgcaacgcaacagcaacaacaattcctaccagcactgagccacctagccatg

SEQ ID NO: 88045 - DNA, 386 bp, Zea mays
cccacgcgtacggaccaactagcaacatagaaagcacaatagtgtaccaacaatggcagccaaaatattttgcttccttatgctccttggtctttctgcaagtgctgctaccgcaaccattttgccacaatgctcacaagctcctatagcttcctttcttcccccatacctctcaccagcggtgtcttcagtatgtgaaaacccaattcttcaaccctacaggatccaacaggcaatcgcagcaggcatcttacctttatcacccttgttcctccaacaaccgtcagccctattacagcagttacctttggtgcatttgttggcacataacatcaatgcacaacatctacaacaacttgtgctaggaaaccttgctgcctactctc

SEQ ID NO: 88046 - DNA, 431 bp, Zea mays
cgcagaagaacccgatcgacaccatgagggtgttgctcgttgccctcgctctgctggctctcgctgcgagcgccacctccacgcatacaagcggcggctgcggctgccagccaccgccgccggttcatctaccgccgccggtgcatctgccacctccggttcacctgccacctccggtgcatctcccaccgccggtccacctgccgccgccggtccacctgccaccgccggtccatgtgccgccgccggttcatctgccgccgccaccatgccactaccctactcaaccgccccggcctcagcctcatccccagccacacccatgcccgtgccaacagccgcatccaagcccgtgccagctgcagggaacctgcggcgttggcagcaccccgatcctgggccagtgcgtcgagtttctgaggcatcagtgc

SEQ ID NO: 88047 - DNA, 381 bp, Zea mays
gcaacatagaaagcacaatagtgtaccaacaatggcagctaaaatattttgcctccgtatgctccttggtctttctgcaagtgctgctacggcgaccattttcccacaatgctcacaagctcctatagcttcccttcttcccccgtacctctcaccaacggtgtcttcggtatgtgaaaacccaattcttcaaccctacaggatccaacaggcaatcgcagctggcatcttacctttatcacccttgttcctccaacaatcatcagccctattacagcagttacctttggtgcatttattggcacaaaacatcagggcacaacaactacaacaacttgtgctagcaaaccttgctgcctactctcagcaacagcagtttct

SEQ ID NO: 88048 - DNA, 376 bp, Zea mays
gcgaagcgcactagcaacgacctaacaccaatggctaccaagatattagccctccttgcgctgcttgcccttttagtgagcgcaacaaatgcgttcattattccacagtgctcacttgctcctagtgccattattccacagttcctcccaccagttacttcaatgggcttcgaacatccagccgtgcaagcctacaggctacaactagcgcttgcggcgagcgccttacaacaaccaattgcccaattgcaacaacaatccttggcacatctaaccctacaaaccattgcaacgcaacaacaacaacaacaacagtttctgccatcactgagccacctagccgtggtgaaccctgtcacctacttgcaacagcagc

SEQ ID NO: 88049 - DNA, 364 bp, Zea mays
  unsure (1)..(364): unsure at all n locations
cggacgcgtgggatattttcagcattcaaaaacacaccaagcgaagcgcactagcagcgacctaacaccaatggctaccaagatattagccctncttgcgcttcttgcccttttagtgagcgcaacaaaatgcgtcattattccacagtgctcacttgctcctaatggcattattccacaattccttccaacaggtacttcaaagggcttcgaacattcaaccgtgcaagcctacaggctacaactagcgcttgcggcgaacgccttacaacaaccaattgcccaattgcaacaacaattcttggcacatataaccctacaaaccattgcaacgcaacaaccaccacaacaacaggttctggca

SEQ ID NO: 88050 - DNA, 376 bp, Zea mays
gtgctagcaaaccttgctgcctactctcagcaacagcagtttcttccattcaaccaggtagctgcattgaactctgcttcttatttgcaacaacaacaactaccattcagccagctatctgctgcctacccccagcaatttcttccattcaaccaactgacagcattgaactctcctgcttatttacagcagcaacaactactaccattcagccagctagctggtgtgagccctgctaccttcttgacacaaccacagttgttgccgttctaccagcacgctgcgcctaacgctggcaccctcttacaactgcaacaattgctgccattcaaccaacttgctttgacaaacccagcagcattctaccaacaaccca

SEQ ID NO: 88051 - DNA, 398 bp, Zea mays
ctggagcaggagagattagaagctgaaaagaagcgggtaaaagaagacgcgcaacagcttgctcgagtttttgaaaccattggcgctttcaaactccctcgcaaaggtggaaaaggaaaacagatctttgggagtgtcacggcacaggatgttgttgacataataaagtcacaacttaatagggatgtcgacaagaagctggtgacggttccagaaatccgtgaaatcggagagtatgttgcagagatcaagcttcacccagacgtgacagcgcgagtaaggctgaatgtctatgcgaaatgagctcagcagttacagaacctcgagtaatggactttggcgaagcctgatgtttgccagagattttgcttgaagtgccaggtgctgccgtagacatg

SEQ ID NO: 88052 - DNA, 406 bp, Zea mays
tattgataccaactagcaaaatacatagtgaagtacactagcaacatcttagcacggatgggagccaagattgtttccctccttgccctccttgctctttcagcaagcgctgctacctctactattattccacaatgctcacaacaatacctctctccggtgacagccgcgggatttcaacacccaactatacaatcctacatgctacatgaggccatcgtagcaagcatcttacggtcattagcattaaccctccaacagccatatgccctattgcaacaaccatccttagtgcatctgtatctccaaagaatcgcgacacaacaactacaacaacagttgctaccaacaatcaatcaagcacaacaactactaccatttaaccaacttgtcgggagccctgatg

SEQ ID NO: 88053 - DNA, 403 bp, Zea mays
gcactttctatgagacaaaagtttgataaatattgggaaataaataatgtagctttggcagtgagagcatttcttgatcctagatacaaacataggatgattgagctatatatatctaagatgtatgacattgataaagctgagttagagaagttggtattcatgaatgttatcaacgaattatttacatattattcatcagtcatcactgcaaaatcaaccacaaaaacctcaaaaggtgctagttcaaaagagagcgagtttgttccacataaaaatactttggtggatgaggatgatgatgaggttgatcttgatgagttgtatgcaacaacaagcaaaatagatttgtacatgagtgaggatctagtgaaggtcaatgacaatgaagcaacatttgatg

SEQ ID NO: 88054 - DNA, 420 bp, Zea mays
ggtgggttggcttctcctccccctccggttcgggttcgggttcgtgaggttctccggggttcggtttcgtgggtgagcggatcgagatggcggcgtcggatgttgagtaccgctgcttcgtcggcggcctcgcctgggccacggacgaccactccctccacaacgccttcagcacctacggcgaggtcctcgagtccaagatcatcctcgatcgggagacgcagaggtcccgcggcttcggcttcgtcaccttctccacggaggaggcgatgcggaacgccatcgagggcatgaacggcaaggagctggacggccgcaacatcaccgtcaacgaggcccagtcccgcggcggccgtggaggcggcggcggcggcgggtacggtggtggccgtggaggcggcggctacggcggtggcgggc

SEQ ID NO: 88055 - DNA, 407 bp, Zea mays
accggtccggaattcccggggtaatagttgttgcctactctcagcaacaacaacttcttccatttaaccaattggccgcactgaaccccgctgcttatttgcagcagcaaatactactaccatttagccagctagctgcagcaaaccgtgcttccttcttgacacagcaacagttgctgcctttctaccagcagtttgcggctaaccccgcaaccctcttacaactacaacaattgttgccctttgtccaacttgctttgacagaccgagcggcctcctaccaacaacacatcattggtggtgccctcttttagattgcttattagttgtaattcaataataaagttttttggatgatgtatgtggccaaccagaaataagaagttacatttccagattttaatgtg

SEQ ID NO: 88056 - DNA, 431 bp, Zea mays
ggaattcccgggtcgacccacgcgtacgtattgagaccaactagcaacatagaaagcacaatagtgtaccaacaatggcagccaagagattgtgcctccttatgctccttggtctttctgcaagtgctgctacggcgaccattttcccgcaatgctcgcaagctcctatagcttcccttcttcccccgtacctctcaccagcggtgtcttcggtatgtgaaaacccaattcttcaaccctacaggatccaacaggcaatcgcagctggcatcttacctttatcacccttggtcctccaacaatcatcagccctattacaacagttacctttggtgcatttattggcacaaaacatcagggcacaacaactacaacaacttgtgctagcaaaccttgctgcctactctcagcaacagcagtttgttccattc

SEQ ID NO: 88057 - DNA, 256 bp, Zea mays
caagctcctatagcttcccttcttcccccataccttccatcaatgatagcttcaataggtgagaacccagctcttcagccctataagctccaacaagcaatcgcagcaagcaacatacctttatcacccttggtgtttcaacaatcgccagccctatctttggtgcaatcattggtacaaaccatcaaggcacaacaactgcagcaactcgtgctacctgggatcaaccaagtagctctggcaaacctttctccct

SEQ ID NO: 88058 - DNA, 397 bp, Zea mays
attttgagcattcagaacacaccaagcgaagctacctagcaacgacttaacaacagtggctaccaagatattagcccttcttgcgcttcttgccctttttgtgagcgcaacaaatgcgttcattattccacaatgctcacttgctcctagtgccattataccacagttcctccgaccagttacttcaatgggcttcgaacacctagctgtgcaagcctacaggctacaacaagcgcttgcggcgagcgtcttacaacaaccaattaaccaattgcaacaacaatccttggcacatctaaccatacaaaccatcgcaacacaacagcaacaacagttcctaccagcactgagccaactagatgtggtgaaccctgtcgcctacttgcaacagcaggtg

SEQ ID NO: 88059 - DNA, 400 bp, Zea mays
gcaacatagaaagcacaatagtgtaccaacaatggcagccaaaatattttgcctccgtatgctccttggtctttctgcaagtgctgctacggcgaccattttcccgcaatgctcgcaagctcctatagcttcccttcttcccccgtacctctcaccagcggtgtcttcggtatgtgaaaacccaattcttcaaccctacaggatccaacaggcaatcacagctggcatcttacctttatcacccttgttcctccaacaatcatcagccctattacatcagttacctttggtgcatttattggcacaaaacatcagggcacaacaactacaacaacttgtgctagcaaaccttgctgcctactctcagcaacagcagtttcttccattcaaccaactagct

SEQ ID NO: 88060 - DNA, 295 bp, Zea mays
ctccaacaagcaatcgcagcaggcatcataccttaatcacccttgttgttggagcagtcgccagccctatctttggggcagtcatgggtccaaaccatcagggcacagcagttgcagcaactcgggctacctgtgatcaaccaagtacttttggcaaacctttttccttactttaagaacacacacaatttcttccattcaaccaactgtatacactgaacccgtgggcatattggcagcaacacctattaccattcagccagctagctactgcatactctgagcaacaacaact

SEQ ID NO: 88061 - DNA, 419 bp, Zea mays
acccgtccggaattcccgggctcagtgccagtcgttgcggcagcagtgttgccagcagctcaggcaggtggagccgcagcaccggtaccaggcgatctgcggcttggtcctccagtccatcctgcagcagcagccgcaaagcggccaggtcgcggggctgttggcggcgcagatagcgcagcaactgacggcgatgtgcggcctgcagcagccgactccatgcccctacgctgctgccggcggtgtcccccactgaagaaactatgtgctgtagtatagccgctggctagctagctagttgagtcatttagcggcgatgattgagtaataatgtgtcacgcatcaccatgggtggcagtgtcagtgtgagcaatggacctgaatgaacaattgaaaatgaaagaaaaaagtattggtcc

SEQ ID NO: 88062 - DNA, 363 bp, Zea mays
agaccaacaagcaacatagaaagtggaatccagtagcaacaacagagcaacaatggcgaccagagatattttccctccttatgctccttgctctttctgcatgtgttgctaacgcgacaattttccctcaatgctcacaagctcctatagcttcccttcttcccccataccttccatcaatgatagcttcagtatgtgaaaacccagctcttcagccctataggctccaacaagcaatcgcagcaagcaacatacctttatcacccttggtgtttcaacaatcgccagccctatctttggtgcagtcattggtacaaaccattagggcacagcagctgcagcaactcgtgctacctgtgatca

SEQ ID NO: 88063 - DNA, 384 bp, Zea mays
ctcctgggcgggccccccgagctgcccgcgggcctgctgcagaaggccatcgacgagcacgacgccgccgcggtcaccaggaggctggaggagtacgaggcggcgcccaagctgttccactacagcgacgccggccccaactgcgtggccgtcggcagctcgccgcgcttcagggtctacgacgtcgacttcggcttcggacggcccgagcgcgtccgcagcggcgggaacaacaagttcgacggcatggtgtacctgtaccccggccgcggcggtgacggcggcatcgatgtcgagctggcgctgcagccggagcccatgcagaggctggagaaggacgacgacttcttcctgcgccaggcggcagcctaagcccgagtcgtc

SEQ ID NO: 88064 - DNA, 380 bp, Zea mays
cggaattcccgggtccttttccccactcccgggtctccagcattcctatcctctccccgcccgcccgtgccgccgccgcggcttccgttggtctcccgagccaagatgaatgttgaaaagctcaagaagatggcaggtgctgtgcgcaccggggggaagggtagcgtgcgcaggaagaagaaggcagtccacaagactacaaccacagatgacaaacggcttcaaagcaccttgaaaagaataggagtgaacagcattcctggtattgaagaggtcaacatctttaaggatgatgttgttattcagtttgtaaatcctaaagtgcaagcgtcaattggtgctaatacatgggtggtcagtggaactccacagacaaagaa

SEQ ID NO: 88065 - DNA, 331 bp, Zea mays
aacacaccaagcgaacccactaacacgaactaccacaaggctaccaaaaatgagccctcttgcgcttcttgcccttttagtgagcgcaacaaatgcgttcattattccacagtgctcacttgctcctagtgccagtattccacagttcctcccaccagttacttcaatgggcttcgaacatccagccgtgcaagcctacaggctacaactagcgcttgcggcgagcgccttacaacaaccaattgcccaattgcaacaacaatccttggcacatctaaccctacaaaccattgcaacgcaacaacaacaacaacagtttctgccatcactg

SEQ ID NO: 88066 - DNA, 421 bp, Zea mays
  unsure (1)..(421): unsure at all n locations
attgatacgaactagcaacatacatagtgaagtacactagcaacatcttagcaccgatggcagccaagatttttgccatccttgccctccttgctctttcagcaagcgttgctaccgcgactattattccacaatgctcacaacaatacctctctccggtgacagccgcgagatttgaatacccaactatacaatcctacaggctacaagaggccatcgcagcaagcatcttacggtcgttagcattgaccgtccaacaaccatatgccctattgcaacaaccatccttaatgaatctatatctccaaagaatcgcagcacaacaactacaacaacagttgcttccaacaatcaatcaagtagttgcagcgaaccttgctgcttacctncagcaacaacaatttcttccattcaatcaact

SEQ ID NO: 88067 - DNA, 442 bp, Zea mays
tgtcagcattcaaaaacacaccaagcgaagcgcactagcaacgacctaacacgcgatggctaccaagatattagccctccttgcgcttcttgcccttttagtgagcgcaacaaatgcgttcattattccacagtgctcacttgctcctagtgccattattccacagttcctcccaccagttacttcaatgggcttcgaacatccagccgtgcaagcctacaggctacaactagcgcttgcggcgagcgccttacaacaaccaattgcccaattgcaacaacaatccttggcacatctaaccctacaaaccattgcaacgcaacaacaacaacaacaacagtttctgccatcactgagccacctagccgtggtgaaccctgtcacctacttgcaacagcagctgcttgcatccaacccacttgctctggcgaacgtagctgca

SEQ ID NO: 88068 - DNA, 359 bp, Zea mays
tattattgagaccaactagcaacatagaaagcacaatagtgtaccaacaatggcagcgaaaatattttgcctccttatgctccttggtctttctgcaagtgctgctacggcgaccattttcccacaatgctcacaagctcctatagcttcccttcttcccccgtacctctcaccagcggtgtcttcggtatgtgaaaacccaattcttcaaccctataggatccaacaggcaatcgcagctggcatcttacctttatcacccttgttcctccaacaatcatcagccctattacagcagttacctttggtgcatttattggcacaaaacatcagggcacaacaactacaacaacttgtgc

SEQ ID NO: 88069 - DNA, 392 bp, Zea mays
caactagcaacatagaaagcacaatagtgtaccaacaatggcagccaaaatattttggttccgtatgctccttggtctttctgcaagtgctgctaccgcaaccattttcccacaatgctcacaagctcctatagcttcctttcttcccccatacctctcaccagcggtgtcttcagtatgtgaaaacccaattcttcaaccctacaggatccaacaggcaatcgcagcaagcatcttacctttatcacccttgttccttcaacaaccgtcagccctattacagcagttacctttggtgcatttgttggcacaaaacatcaaggcacaacaactacaacaacttgtgctaggaaaccttgctgcctactcttagcaacagcagtttctttcat

SEQ ID NO: 88070 - DNA, 376 bp, Zea mays
ccggattcccggtcgaccaacgcgtccgctagcaacatacatagtgaagtacactagcaacatcttagcaccaatggcagccaagatttttgccatccttgccctccttgctctttcagcaagcgttgctaccgcgactattattccacaatgctcacaacaatacctctctccggtgacagccgcgagatttgaatacccaactatacaatcctacaggctacaagaggccatcgcagcaagcatcttacggtcgttagcattgaccgtccaacaaccatatgccctattgcaacaaccatccttaatgaatctatatctccaaagaatcgcagcacaacaactacaacaacaggtgcttccaacaatcaatcaa

SEQ ID NO: 88071 - DNA, 420 bp, Zea mays
actggctgcattgaactctgctgcttatttgcaacaacaactaccattcagtcagctagctgctgcctacccccagcaatttcttccattcaaccaactggcagcattgaactctgctgcttatttacaacagcaacagctaccaccattcagccagctagctgatgtgagccctggtgccttcttgacacaacaacagttgttgccgttctacctgcacgctgcgcctaacgctggcaccctcttacaactgcaacaattgctgccattcaaccaacttgctttgacaaacccaacagcgttctaccaacaacccatcattggtggtgccctcttttagattgcttattagttgtaattcaataatgaagttttttggctgatgtatgtggcctcctagaaataagaaggtatattttc

SEQ ID NO: 88072 - DNA, 380 bp, Zea mays
caactagcaacatagaaagcacaatagtgtaccaacaatggcagccaaaatattttgcttccttatgctccttggtctttctgcaagtgttgctaccgcaaccattttcccacaatgctcacaagctcctatagcttcccttcttcccccatacctctcaccagcggtgtcttcaatgtgtgaaaacccaattgttcaaccctacaggatccaacaggcaatcgcaacaggcatcttaccattatcacccttgttcctccaacaaccgtcagccctattacagcagttacctttggtccatttggtggcacaaaacatcagggcacaacaactacaacaacttgtgctagcaaaccttgctgcatactctcagcaacatc

SEQ ID NO: 88073 - DNA, 327 bp, Zea mays
tttccctccttatgctccttgctctttctacatgtgttgctaacgcgacaaattgttcctcaatgctcacaagctcctatagcttcccttacttctcaataccttccatcaattatagcttcaatatgtgaaaacccagctcttcaaccatataggcttcaacaagcaatcgcagcaagcaacataccttgatcgtccttgatgcttcaacaatcgtcagccctatctttggtgcagtcattggtacaaaccattagggcacaacagctgtagcaactcgtgctacctctgatcaaccaagtagctctggcaaacctttctccctac

SEQ ID NO: 88074 - DNA, 365 bp, Zea mays
acaacgactacaacaacttgtgctagcaaaccttgctgcctactctcagcaacagcagtatcttccattcaaccaagtagctgcattgaactctgcgtgttatttgcaacaacaacaactaccattgagccagctacctgctgcctaccctcagcaatttcttccattcaaccaactggcagcattgaactgtcctgcttatttacagcagctacaactactaccatgcagccagctagctggtgtgagccctgctaccttcgtgatacaaccacaggtgatgccgatctaccagcacgctgcgcctaacgctggcacgctattacaactggcacaattgctggcattcaaccaacttgctttga

SEQ ID NO: 88075 - DNA, 421 bp, Zea mays
ggcagccaaaatatttggcttccttatgctccttggtctttctgcaagtgctgctaccgcaaccattttcccacaatgctcacaagctcctatagcttcctttcttcccccatacctctcaccagcggtgtcttcagtatgtgaaaacccaattcttcaaccctacaggatccaacaggcaatcgcagcaggcatcttacctttatcacccttgttcctccaacaaccgtcagccctattacagcagttacctttggtgcatttgttggcacaaaacatcaaggcacaacaactacaacaacttgtgctaggaaaccttgctgcctactctcagcaacagcagtttcttccattcaaccaactggctgcattgaactctgcttgctaatttgcacatcaactaccattcagtcagctagct

SEQ ID NO: 88076 - DNA, 389 bp, Zea mays
accaagcgaagcgcactagcaacgacctaacaccaatggctaccaagatattagccgtccttgcgcttcttgcccttttagtgagcgcaacaaatgcgttcattattccacagtgctcacttgctcctagtgccattattccacagttcctcccaccagttacttcaatgggcttcgaacatccagccgtgcaagcctacaggctacaactagcgcttgcggcgagcgccttacaacaaccaattgcccaattgcaacaacaatccttggcacatctaaccctacaaaccattgcaacgcaacaacaacaacatcaacagtttctgccatcactgagccacctagccgtggtgaaccctgtcacctacttgcaacagcagctgcttgca

SEQ ID NO: 88077 - DNA, 439 bp, Zea mays
caactagcaacatagaaagcacaatagtgtaccaacaatggcagccaaaatatttggcctccttatgctccttggtctttctgcaagtgctgctacggcgaccattttcccgcaatgctcgcaagctcctatagcttcccttcttcccccgtacctctcaccagcggtgtcttcggtatgtgaaaacccaattcttcaaccctacaggatccaacaggcaatcgcagctggcatcttacctttatcacccttgttcctccaacaatcatcagccctattacaacagttacctttggtgcatttattggcacaaaacatcagggcacaacaactacaacaacttgtgctagcaaaccttgctgcctactctcagcaacagcagtttcttccattcaaccaactaagttcattgaactctgcttcttatttgcaacaacaa

SEQ ID NO: 88078 - DNA, 355 bp, Zea mays
  unsure (1)..(355): unsure at all n locations
gagcagcttacaacttcaatgtcacggccaaatgcggtgagcctggtgcaactgcctgtgctgatccgacaacccattggagctgggacggcattcacctgacggaggctgcctaccgccatatcgccaaaggctggctatacgggcctttcgcggaccaaccgatcatccaatcctcatgatcatgccgttcctgcggtagagtttatcaaagtagcattgagagtgagagaaaaaaaatggagcggggaaagtaggtcttccatacagttccaatgcttgcatacttgtacatctncatttgattggattcatttgccatgggggtacaaaagtgggatagtaagtcgcacaa

SEQ ID NO: 88079 - DNA, 362 bp, Zea mays
aggcaatcgcagctggcatcttacctttatcacccttgttcctccaacaatcatcaggcctagtacaacagttacctttggtgcatttattggcacaaaacatcagggcacaacaactacaacaacttgtgctagcaaaccttgctgcctactctcagcaacagcagtttcttccattcaaccaactaggttcattgaactctgcttcttatttgcaacaacaacaactaccattcaaccagctacctgctggctacccccagcaatttctttcattcaaccaacttgcagcattgaactcttctgcttatttacaggagcaacaactactaccattcagacagctagctggtgtgagccct

SEQ ID NO: 88080 - DNA, 390 bp, Zea mays
taccggtctcggaattcccggctcgacctacgcgtccaccagctagcatcgatgagcatgttaccgctgcagcaaatatcagagcttcctcttttggaataccactgcatagtctttttgaagctaaaggtgttgctggaaatatagttcatgctgtggcaactaccaatgctataattgctggtctaatcgtcatcgaggcaattaaagtgctcaagggtgattatcaagattatagaatgacatattgccttgagcatccaacaaggaagatgctcttgatgcctgtcgagccttttgaacctagtaaatcatgttatgtctgctctgagaccccacttgttctggagggtaatacttagacaaccaagcttcacgaagtcattgaaa

SEQ ID NO: 88081 - DNA, 421 bp, Zea mays
  unsure (1)..(421): unsure at all n locations
cggaaggtttcgaggaactcccgggctcgaggagatcgggacgatgatgggagggcgcgctctgctgctgctcctggtctcggcgctgctcgttcagatccgcgcctctgacccgctgctgtacgagccgtttgatgaggacttcgagggtagatggatcgtctccaagaaggatgaataccaaggtgtatggaagcatgccaagagtgatgggcatgaggactatggcctccttgttagtgacaaggcaaggaaatacgccataatcaaggagcttgatgagccagttaccttaaatgatgggacagtggtcctgcagtttgaagtgagacttcagaatggccttgaatggggaggtgcctacattaagtacantccgcctcaggatgctggatgggatgccaaagaagttgataatgag

SEQ ID NO: 88082 - DNA, 362 bp, Zea mays
ctagcaacatagaaagcacaatagtgtaccaacaatggcagctaaaatattttgcctgcttatgctccttggtctttctgcaagtgctgctacggcgaccattttcccacaatgctcacaagctcctatagcttcccttcttcccccgtacctctcaccaacggtgtcttcggtatgtgaaaacccaattcttcaaccctacaggatccaacaggcaatcgcagctggcatcttacctttatcacccttgttcctccaacaatcatcagccctattacagcagttacctttggtgcatttattggcacaaaacatcagggcacaacaactacaacaacttgggctaacaaaacttggttgct

SEQ ID NO: 88083 - DNA, 443 bp, Zea mays
  unsure (1)..(443): unsure at all n locations
gcaacatagaaagcacaatagtgtaccaacaatggcagccaaaatattttgcctcctgatgctccttggtctttctgcaagtgctgctacggcgaccattttcccgcaatgctcgcaagctcctatagcttcccttcttcccccgtacctctcaccagcggtgtcttcggtatgtgaaaacccaattcttcaaccctacaggatccaacaggcaatcacagctggcatcttacctttatcacccttgttcctccaacaatcatcagccctattacatcagttacctttggtgcatttattggcacaaaacatcagggcacaacaactacaacaacttgtgctagcaaaccttgctgcctactctcagcaacagcaagttcttccattcaaccaactagctgcattgaactctgcttnctattttgcacaacaacaactaccat

SEQ ID NO: 88084 - DNA, 404 bp, Zea mays
cggttcggaattcccgggcaactagcaacatagaaagcacaatagtgtaccaacaatggcagccaaaatattttgcttccttatgctgcttggtctttctgcaagtgctgctaccgcaaccattttcccacaatgctcacaagctcctatagcttcctttcttcccccatacctctcaccagcggtgtcttcagtatgtgaaaacccaattcttcaaccctacaggatccaacaggcaatcgcagcaggcatcttacctttatcacccttgttcctccaacaaccgtcagccctattacagcagttacctttggtgcatttgttggcacaaaacatcaaggcacaacaactacaacaacttgtgctaagaaaccttgctgcctactctcagcaacagcagtttc

SEQ ID NO: 88085 - DNA, 424 bp, Zea mays
ggaaagacgtgatcaaacactgcaccgaccataaagggatcttccagcccgtgctgcgaccggagaagaaggtcccggagctatggttctacacagagctcaaaactaggaccagctccatcacgctcgccatacgcatggacaacctgtacctcgtgggcttcaggaccccgggcggggtgtggtgggagttcggcaaggacggcgacacccacctcctcggcgacaaccccaggtggctcggcttcggcggcaggtaccaggacctcatcggcaacaagggtctggagaccgtcaccatgggccgcgccgaaatgcccaggtcgttgacggccctggtgaagaagaagaagatggcgacactggaggaggaggaggtgcagatgcagatgcagatgccggaggccgttgatctggcggcggc

SEQ ID NO: 88086 - DNA, 399 bp, Zea mays
agaccaactagcaacatagaaagcacaatagtgtaccaacaatggcagccaaagatatggtgcttccttatgctccttggtctttctgcaagtgctgctaccgcaaccattttcccacaatgctcacaagctcctatagcttcctttcttcccccatacctctcaccagcggtgtcttcagtatgtgaaaacccaattcttcaaccctacaggatccaacaggcaatcgcagcaggcatcttacctttatcacccttgttcctccaacaaccgtcagccctattacagcagttacctttggtgcatttgttggcacaaaacatcaaggcacaacaactacaacaacttgtgctaggaaaccttgctgcctactctcagcaacagcagtttcttccattc

SEQ ID NO: 88087 - DNA, 407 bp, Zea mays
tttttactttttttcttttgattgcaattgttcattcaggtcattgctcacactgacactgccacccatggtgatgcgtgacacattattactcaatcatcgccgctaaatgactcaactagctagctagccagcggctatactacagcacatagtttcttcagtgggggacacccagctgtgcaagcctataggctacaacaagcgattgcggcgagcgtcttacaacaaccaattgcccaattgcaacaacaatccttggcacatctaacaatacaaaccatcgcaacgcaacagcaacaacagttcctaccagcactgagccacctagccatggtgaaccctgtcgcctacttgcaacagcagctgcttgcatccaacccacttgctctagcaaacgtagttgc

SEQ ID NO: 88088 - DNA, 372 bp, Zea mays
gtgccaggcgctgcagcagcagtgctgtcaccagatcaggcaggtggagccgctgcaccggtaccaggcgacatacggtgtggtcctgcagtccttcctgcagcagcagccgcaaggcgagctcgcggcgctgatggcggcccaggtagcgcagcagctgacggcgatgtgcggtctgcagctgcagcagccaggtccctgcccttgcaacgcagctgccggcggtgtctactactgaggaaactatgtactgtagtaataatgtaatggagccgctgactagctacctatagggctatagctaggtcactcgtttagcggcgatgagtaacggagtgtcacccatcaccatgggtggcagtgtgagcaatg

SEQ ID NO: 88089 - DNA, 319 bp, Zea mays
gcaccgtcgactgcactaaagccatatgtccacatggcggcaaatttgctctagctctggctttggagtgtgtacggacatttccgaatggtgcagtctatagttcctcttccccgtacctgtaacagcgggtgtctttcgtatgtgaaaacccaattctttaaaccctaccagatcccacaaggcaatacagctgcatctaccttatcacccttgttcctccaacaatcatcagccctattacatcagttacctttgtgcattaattggcacaaaacatcagggcacaacacttacaacaacttgggttagcaaacct

SEQ ID NO: 88090 - DNA, 350 bp, Zea mays
aacaagcaacatagaaagtggaatccagtagcaacaatagagcaacaatggcgaccaagatactttccctccttatgctccttgctctttctgcatgtgttgctaacgcgacaattttccctcaatgctcacaagctcctatagcttcccttcttcccccataccttccatcaatgatagcttcagtatgtgaaaacccagctcttcaaccctataggctccaacaagcaatcgcagcaagcaacatacctttatcacccttggttcaacaatcgccagccctatctttggtgcagtcattggtacaaaccatcaaagcacaacagctgcagcaactcgtgctacctggg

SEQ ID NO: 88091 - DNA, 335 bp, Zea mays
aaccttcagcaacctgtttgtccgtcgggctggcccaggcagcacggagctgaccgtggagggaaggccatccgaccagctgggcaggagaaacctcactgacagccccgtatttgacggccgtggccctgacgccagcctcgtggctcgcgtacagggagtcgctacccagatgggcgacgtgcgccagttgtacaccgtcgtgttccaggagaggccgctcaagggctccacgctcgtcaccgaaggcgcgatgacagaagggtcagacgagtgggcgatctacggtggaactggagtgttcgcgatggcgagaggcgtcataaggagaacgt

SEQ ID NO: 88092 - DNA, 443 bp, Zea mays
caactagcaacatagaaagcacaatagtgtaccaacaatggcagccaaaatattttggctgcttatgctccttggtatttctgcaagtgctgctacggcgaccattttcccgcaatgctcacaagctcctatagcttcccttcttcccccgtacctctcaccagcggtgtcttcggtatgtgaaaacccaattcttcaaccctacaggatccaacaggcaatcgcagctggcatcttacctttatcacccttgttcctccaacaatcatcagccctattacagcagttacctttggtgcatttattggcacaaaacatcagggcacaacaactacaacaacttgtgctagcaaaccttgctgcctactctcagcaacagcagtttcttccattcaaccaactagctgcattgaactctgcttcttatttgcaacaacaacaac

SEQ ID NO: 88093 - DNA, 347 bp, Zea mays
caagctcctatagctgcccttcttcctccataccttccatcaatgaccgcttcagtgtgtgaaaacccagcccttcaaccctacaggctccaacaagcaatcgcaacaagcaacttacctttatcacccctgttctttcaacaatcgccagccctatctttggtgcagtcattggtacaaaccatcagggcacaacagctgcaacaactcgtgctaccagtgatcagccaagtagctgtggcaaacctttctccctactctcagcaacaacaatttcttccattcaaccaactgtctacactgaaccctgctgcttatttacaacaacaacaactactaccattcag

SEQ ID NO: 88094 - DNA, 404 bp, Zea mays
gcatacaagcggcggctgcggctgccatccaccgccgccggttcatctaccgccgccggtgcatctgccacctccggttcacctgccacctccggtgcatctcccaccgccggtccacctgccgccgccggtccacctgccaccgccggtccatgtgccgccgccggttcatctgccgccgccaccatgccactaccctactcaaccgccccggcctcagcctcatccccagccacacccatgcccgtgccaacagccgcatccaagcccgtgccagctgcagggaacctgcggcgttggcagcaccccgatcctgggccagtgcgtcgagttcctgaggcatcagtgcagcccgacggcgacgccctactgctcgcctcagtgccagtcggtgcggcagcagt

SEQ ID NO: 88095 - DNA, 434 bp, Zea mays
cagcaagcaacatagaaagtagaatccattagcaacaatagagcaacaatggcgaccaagatattttccctccttatgctccttgctctttctacatgtgttgctaacgcgacaattttccctcaatgctcacaagctcctatagcttcccttcttcccccataccttccatcaattatagcttcagtatgtgaaaacccagctcttcaaccatataggcttcaacaagcaatcgcagcaagcaacatacctttatcgcccttgttgtttcaacaatcaccagccctatctttggtgcagtcattggtacaaaccatcagggcacaacagctgcagcaactcgtgctacctgtgatcaaccaagtagctctggcaaacctttctccctactctcagcaacaacaatttcttccattcaaccaactgtctacact

SEQ ID NO: 88096 - DNA, 338 bp, Zea mays
gccaaatacaatttagaagcgcccctcctcctctcccccatccgtacccaatcgaatcgacacccggccgagatgggccgcaagttcttcgttggtggcaactggaaatgcaatggaaccgcagatcaggttgagaagattgtcaaaaccctgaatgaaggaaatgttccctcttcagatgttgttgaggtcgttgtcagtcctccttatgtgttcctcccggtggtcaagagccagctgcgccaagagttccaagttgctgctcagaactgctgggtgaagaagggaggtgcattcactggtgaaattagtgctgaaatgctcgtcaaccttggcgt

SEQ ID NO: 88097 - DNA, 427 bp, Zea mays
gcaacatagaaagtggaatccagtagcaacaacagagcaacaatggcgaccaagatattttccctccttatgctccttgctctttctgcatgtgttgctaacgcgacaattttccctcaatgctcacaagctcctatagcttcccttcttcccccataccttccatcaatgatagcttcagtatgtgaaaacccagctcttcagccctataggctccaacaagcaatcgcagcaagcaacatacctttatcacccttgttgtttcaacaatcgccagccctatctttggtgcagtcattggtacaaaccatcagggcacagcagctgcagcaactcgtgctacctgtgatcaaccaagtagctctggcaaacctttctccctactctcagcaacaacaatttcttccattcaaccaactgtctacac

SEQ ID NO: 88098 - DNA, 229 bp, Zea mays
cacacggagcgaagctacctagcatcgacttaacaacaatggctaccaagataggatccggccttgcgctaattgccctttgggtgagcgcaacagaggcgttcatgaatcgacatggctcacgtgttcggagcgccgatccgcccggacgtggtccgcttcacccacaagctgctgtcctgcaacaagcgccagccttacgcagtcttccgacgagctggccaccaga

SEQ ID NO: 88099 - DNA, 320 bp, Zea mays
gcaacagactacaaggtgcagctataactactatagcagtagctcaaatctagaaaattgtcatgaattcctaaggcagcagtgcagccctttggtaatgccttttctccaatcacgtttgatacaaccaagtagctgccaggtattgcagcaacaatgttgtcatgatcttaggcagattgagccacaatacattcaccaagcaatctacaacatggttcaatccataatccaggaggagcaacaacaacaaccatgtgagttatgtggatctcaacaagctactcaaagtgcggtggcaatcttgacagcagcacaat

SEQ ID NO: 88100 - DNA, 360 bp, Zea mays
agaggatcgtcgaacagaacagcatgaagatggtcatcgttctcgtcgtgtgcctgggtctgtcagctgccagcgcctctgcaatgcagatgccctgcccctgcgcggggctgcagggcttgtacggcgctggcgccggcctgacgacgatgatgggcgccggcgggctgtacccctacgcggagtacctgaggcagccgcagtgcagcccgctggcggcggcgccctactacgccgggtgtgggcagccgagcgccatgttccagccgctccggcaacagtgctgccagcagcagatgaggatgatggacgtgcagtccgtcgcgcagcagctgcagatgatgatgcagcttgagcgtg

SEQ ID NO: 88101 - DNA, 403 bp, Zea mays
gcaacatagaaagtggaatacagtagcaaaaatagagcaacaatggcggccaagatatgttccatccttatgctccttgctctttctgcatgtgttgctaacgcgaccatttttcctcaatactcacaagctcctatagctgcccttcttcccccataccttccatcaatgaccgctttagtatgtgaaaacccagcccttcaaccctacaggatccagcaagcaatcgcaacaagcaacttacctttatcacacctgttctttcaacaatcgccagccctatctttggtgcagtcattggtacaaaccatcagggcagaacagttgcagcaactcgtgctaccagtgatcagccaagtagctctggcaaacctttccccctactctcagcaacaacaatttc

SEQ ID NO: 88102 - DNA, 406 bp, Zea mays
caccactccactcgccgcaggccgccgggcgccgccgaggggatcggagcaagatgtgcttccacatcgtgctggagcggaacatgcagctgcacccacgacacttcgggccgcacctccgcgacaagctcgtttccaagctcatcaaggacgtcgagggcacctgcagcgggcggcacgggttcgttgtggcgatcacgggtgtggaggacatcggcaaggggctcatccgggaaggcacgggatacgtcaccttccccgtcaagtaccagtgcgttgtctttagacccttcaagggcgagatcctcgaagctgtcgtcaccatggtgaacaagatgggcttctttgcggaggctgggccggtgcagatcttcgtgtccaaccatttgattccagacgatatgga

SEQ ID NO: 88103 - DNA, 408 bp, Zea mays
caaaaacacctttcttcactgcaccccgatgcttgcctccgacgcaattggacaagtgcaagatgaaagatgcatttatctcagatggttgcttactgagagaatgcaacatcgagcattctgtgattggagtctgctcacgtgtcagctctggatgtgaactcaaggactccgtgatgatgggagcggacacctatgaaactgaagaagaagcttcaaagctactgttagctgggaaggtcccagttggaataggaaggaacacaaagataaggaactgtatcattgacatgaatgctaggattgggaagaacgtggtgatcacaaacagtaagggcatccaagaggctgatcacccggaagaagggtactacataaggtctggaatcgtggtgatcttgaagaatg

SEQ ID NO: 88104 - DNA, 447 bp, Zea mays
cagaaacacaccaagcgaagcacattagcaacaacctaacaacaatggctaccaagagattatccctccttgcgcttcttgcgctttttgcgagcgcaacaaatgcgttcattattccacaatgctcacttgctccaagttccattattacacagttcctcccaccagttacttcaatgggcttcgaacacccagctgtgcaagcctataggctacaacaagcaattgcggcgagcgtcttacaacaaccaatttcccagttgcaacaacaatccttggcacatctaacaatacaaaccatcgcaacgcaacagcaacaacaattcctaccagcactgagccacctagccatggtgaaccctgccgcctacctacaacagcaacaactgctttcatctagcccgctcgctgtggccaatgcacctacataccttgaacaaccattgg

SEQ ID NO: 88105 - DNA, 418 bp, Zea mays
gggaccatgtaatggctgccacaagagccctcaaaaagggtgatcaccaaagggcttgaatggcataaattcgcttgagatttggaagcttttgaggaacagagagcatgttcttgagatgttgaagcttaagatcaaggaggaagctcttagaacctatctttcatcatactcgtcttcctacaagtcgttgagccttaaccagctcaccaccatgtttgatctcagcgagcagcatgcccacagtattgttagcaaaatgatgatgcatgaagagcttcaggctagctggcaccagccaacaaagtgcaccgtgtttcacagactggatcaaaccaggctttatgagctactctttcaggttgcagaaaaaatatcggtcctcgtggagacaaacgacagggcgtactaactaata

SEQ ID NO: 88106 - DNA, 270 bp, Zea mays
cagccagctagctggtgtgagccctgctaccttcttgatacaaccacagttgttgccgttctaccagcacgctgcgcctaacgctggcaccctcttacaactgcaacaattgctgccattcaaccaacttgctttgacaaacccagcagcgttctaccaacaacccatcattggtggtgccctcttttagatttcttatgagttatagttcaataataaagttttttgtctgatgtttgtggcttcccagaaataagaaagtacatttct

SEQ ID NO: 88107 - DNA, 387 bp, Zea mays
gtgattcgtaaggtttaggatgtaaaaggcgatggtttcctactatcgcaacgactcggcggccgattctatgttcacgttgattttggacggttttgactaaagtgattcttatagaaatgggctgaaaagctggacgtttggcagtctgcagcagaagctgaaaaaaaactgaaacagatagggcttatgtgtacgtgtggagaacctgagatggtgattgctgggactgaacgttaatgtcttgtagttgtttggcttgtttactggattgctgatgtctgaaattgtcatcaaatgaaacgtgaacttttctctggttcatttaactcacttatggcaaatgatttaacgcgacgtgtgtatgcatctgtgtgttcatcattt

SEQ ID NO: 88108 - DNA, 386 bp, Zea mays
ggaatccagtagcaacaatagagcaacaatggcgaccaagatactttccctcgttatgctccttgctctttctgcatgtgttgctaacgcgacaattttccctcaatgctcacaagctcctatagcttcccttcttcccccataccttccatcaatgatagcttcagtatgtgaaaacccagctcttcaaccctataggctccaacaagcaatcgcagcaagcaacatacctttatcacccttgtttcaacaatcgccagccctatctttggtgcagtcattggtacaaaccatcaaggcacagcagctgcagcaactcgtgctacctgtgatcaaccaagtagctctggcaaacccttctccctactatcagcaacaacaatttc

SEQ ID NO: 88109 - DNA, 417 bp, Zea mays
accggttcggattcccggctagacccacgcgtacgcaactagcaacatagaaagcacaatattgtaccaacaatggcagccaaaatagggcggcttcttatgctacttggtctttctgcaagtgctgctacggcgaccattttaccgcaatgctcgcacgctactatagcttcccttcttccaccgtacctatcaccagcggagcattcagtatgtgaaaacccaattcttcaaacttacacgatccaacagggcattacagcatccattttacctttatcaccctcgatccttcaaccatcataagctctattacatcagttaccttcggcgcatttattggcacaaaacatcatggcacaacaactacaacaacttgagctatgcaaaccttgctgcctactctcagcaacagca

SEQ ID NO: 88110 - DNA, 374 bp, Zea mays
attttcagcattcaaaaacacaccaagcgaagcgcactagcaacgacctaacaccaagggctaccaagatattagccctccttgcgcttcttgcccttttagtgagcgcaacaaatgcgttcattattccacagtgctcacttgctcctagtgccattattccacagttcctcccaccagttacttcaatgggcttcgaacatccagccgtgcaagcctacaggctacaactagcgcttgcggcgagcgccttacaacaaccaattgcccaattgcaacaacaatccttggcacatctaaccctacaaaccattgcaacgcaacaacaacaacaacaacagtttctgccatcactgagccacctagccgtggtg

SEQ ID NO: 88111 - DNA, 414 bp, Zea mays
gagaccagcaagcaacatagaaagtagaatccattagcaacaatagagcaacaatggcgaccaagatattttccctccttatgctccttgctctttctacatgtgttgctaacgcgacaattttccctcaatgctcacaagctcctatagcttcccttcttcccccataccttccatcaattatagcttcagtatgtgaaaacccagctcttcaaccatataggcttcaacaagcaatcgcagcaagcaacatacctttatcgcccttgttgtttcaacaatcaccagccctatctttggtgcagtcattggtacaaaccatcagggcacaacagctgcagcaactcgtgctacctgtgatcaaccaagtagctctggcaaacctttctccctactctcagcaacaacaatttc

SEQ ID NO: 88112 - DNA, 432 bp, Zea mays
cacaatgctcacaagctcctatagcttcccttcttcccccatacctctcaccagcggggtcttcaatgtgtgaaaccccaattgttcaaccctacaggatccaacaggcaatcgcaacaggcatcttaccattatcacccttgttcctccaacaaccgtcagccctattacagcagttacctttggtccatttggtggcacaaaacatcagggcacaacaactacaacaacttgtgctagcaaaccttgctgcatactctcagcaacatcagtttcttccattcaaccaactggctgcattgaactctggtgcttatttgcaacaacaattaccattcagccagctagttgctgcctacccccagcaatttcttccattcaaccaactagcagcattgaactctgctgcttatttacagcagcaacaactac

SEQ ID NO: 88113 - DNA, 445 bp, Zea mays
ttcagaaacacacctagcgaagcgcactagcaacgacctaacaacaatggctacgaagatattatccctctttgcgcttcttgccctttttgtgagcgcaacaaatgcgttcattattccacaatgctcacttgctcctaatgccattattccacagttcctccctccagttacttcaatgggcttcgaacacccagctgtgcaagcctacaggctacaacaagcgcttgcggcgagcgtcttacaacaaccaattgcccaattacaacaacaatccttggcacatctaaccatacaaaccatcgcaacgcaacagcaacaacaatttctaccagcactgagccaactagctgtggtgaaccctgtcgcctacttgcaacagcagttgcttgcatccaacccacttgctctggcaaacatagttgcataccaaccaccaccacca

SEQ ID NO: 88114 - DNA, 400 bp, Zea mays
acaatgctcacttgctccaagttccattattacacagttcctcccaccagttacttgaatgggcttcgaacacccagctgtgcaagcctataggctacaacaagcaattgcggcgagcgtcttacaacaaccaatttcccagttgcaacaacaatccttggcacatctaacaatacaaaccatcgcaacgcaacagcaacaacaattcctaccagcactgagccacctagccatggtgaaccctgccgcctacttgcaacagcagttgcttgcatcaaacccacttgctctggcaaacgtagttgcaaaccagccacaacaacagctgcaacagtttcttgcagcgctcagtcaactagccatggtgaaccctggcggctaactaccacaggaaccactg

SEQ ID NO: 88115 - DNA, 358 bp, Zea mays
caactagcaacatagaaagcacaatagtgtaccaacaatggcagccaaaatattttgcttccttatgctccttggtctttctgcaagttttgctaccgcaaccattttcccacaatgctcacaagctcctatagcttcccttcttcccccatacctctcaccagcggtgtcttcaatgtgtgaaaccccaattgttcaaccctacaggatccaacaggcaatcgcaacaggcatcttaccattatcacccttgttcctccaacaaccgtcagccctattacagcagttacctttggtccatttggtggcacaaaacatcaaggcacaacaactaccacaacttgggctagcaaacctt

SEQ ID NO: 88116 - DNA, 519 bp, Zea mays
atggaaaggttatttaggggggggggtttgtacgctctaccggtccggaattcccgggtcgacccacgcgtgcggggagaggccacaacatccacagggttctgcgttgcctaaccaaaactcagcggaaaatgctactgctgcagctccaccagctggtggacaacaagcacaaacgctgaatcaacagccaccacagcagcagcagaagccaaatacaaatgaccaggcccaaggtgtttcaaatggccatcaggccactagaatcgtcacaccccttccacaaggaccatctaggtatttcattgataaaagttgcaatccggagaatctggaaatatcagttcaacaaggaatttgggccacacagaggagtaatgaagctaaactcaatgaagcttttgaatccactgagaatgttattttgatattctcaattaatagaactcgcaatttccaagggtgttgcaaaaagaacatttaagaaatggcgcctcaatttggggggggaaaatggaa

SEQ ID NO: 88117 - DNA, 276 bp, Zea mays
gcgcatgcgcgccgtcaaggagacgcgccagcgcttcggccgcttcttcttgcgcttgcccgagggcgagtccgccgccgacgtctttgaacggggtggccggtttcctggagccgttgtgccgggacatcgacatggggcggctggaccaggaccccagctgcgaaacgaacctggtgatcgcttccaacggcctaacttggcggtggttcctgatgaaggggttcaggggaccggtgcccaatttgagcgccttaaccactttgacaactggga

SEQ ID NO: 88118 - DNA, 379 bp, Zea mays
cccacgcgtccgcccacgcgtccgagctcctatagcttcccttcttcccccatacctggcatcaattatagcttcagtatgtgaaaacccagctcttcaaccatataggcttcaacaagcaatcgcagcaagcaacatacctttatcgcccttgttgtttcaacaatcaccagccctatctttggtgcagtcattggtacaaaccatcagggcacaacagctgcagcaactcgtgctacctgtgatcaaccaagtagctctggcaaacctttctccctactctcagcaacaacaatttcttccattcaaccaactgtctacactgaaccctgctgcttatttgcagcaacaactattaccatttagccagctagctact

SEQ ID NO: 88119 - DNA, 530 bp, Zea mays
  unsure (1)..(530): unsure at all n locations
ngggagngggagtaaagttgtcatggggggatggatggctctctcggtccggaattcccgggtcgacccacgcgtccgcgctgctgccggcggtgtcccccactgaagaaactatgtgctgtagtatagccgctggctagctagctagttgagtcatttagcggcgatgattgagtaataatgtgtcacgcatcaccatgggtggcagtgtcagtgtgagcggccgctctagaggatccaagcttacgtacgcgtgcatgcgacgtcatagctcttctatagtgtcacctaaattcaattcactggccgtcgttttacaacgtcgtgactgggaaaaccctggcgttacccaacttaatcgccttgcagcacatccccctttcgccagctggcgtaatagcgaagaggcccgcaccgatcgcccttcccaacagttgcgcagcctgaatggcgaatgggacgcgccctgtagcggcgcattaagcgcggccggtgtggtggttacgcgcagcgtgaccgcttcacttgcc

SEQ ID NO: 88120 - DNA, 396 bp, Zea mays
atgggcgatgaatatggtcacacaaagggagggaacaacaatacgtactggcatgacgcatgtgtcaattatttccgttgggataagaaggaagaacaatcctctgatttgtacagattctgccgtctcatgaccaaattccgcaaagaatgtgaatctcttggccttgaggacttcccgacttcagaacggttgaaatggcacggtcatcagcccgggaagcctgactggtcagaggcaagccgattcgttgccttcaccatgaaggacgaaaccaaaggcgagatctacgtggccttcaacaccagtcaccttccggtggttgttgggcttccagagcgctctgggttccgatgggagccggtggtggacaccggcaaggaggcaccatatgac

SEQ ID NO: 88121 - DNA, 382 bp, Zea mays
acgagcgacatagcacgtggaatccagtagccacgacagagcaacaatggcgaccaagatagttaccctccttatgctcgttgctctatctgcatgtgttgctaacgcgacaattttccctcaatgctcacaagctcctatagcttaccttattaccccataccttacatcaacgatagcttcagtatgtgaaaactcagctcttgagccctataggcttcaacaagctatctcagcaagccacctacctttatcagccttcgctgtttcaccatcggcaggctctatgttgggtgcagtcattggtacataccatcaaggcacatgagctgcatcaactcgggctacctgtgatcaacccagtagctctggcaaacctttc

SEQ ID NO: 88122 - DNA, 411 bp, Zea mays
gtggacgtggacgagcaccgcctggccgtggccaggtcgctgggcgcggacgcggcggtgcgggtgtcgccccgcgcggaggacctggcggacgaggtggagcgcatccgcgcggccatgggctcggacatcgacgtcagcctggactgcgccgggttcagcaagaccatgtcgacggcgctggaggcgacgcggcccggcgggaaggtgtgcctggtcgggatgggccacaacgagatgacgctgcccctgacggcggcggcggcgcgggaggtggacgtggtgggcgtgttccggtacaaggacacctggccactgtgcatcgacttcctgcgcagcggcaaggtggacgtcaagcctctcatcacccaccgcttcggcttctcgcagcgggacgtggaggaggcattc

SEQ ID NO: 88123 - DNA, 436 bp, Zea mays
gcaacatagaaagcacaatagtgtaccaacaatggcagccaaaatattttgctgcctgatgctccttggtctttctgcaagtgctgctaccgcaaccattttcccacaatgctcacaagctcctatagcttcctttcttcccccatacctctcaccagcggtgtcttcagtatgtgaaaacccaattcttcaaccctacaggatccaacaggcaatcgcagcaggcatcttacctttatcacccttgttcctccaacaaccgtcagccctattacagcagttacctttggtgcatttgttggcacaaaacatcaaggcacaacaactacaacaacttgtgctaggaaaccttgctgcctactctcagcaacagcagtttcttccattcaaccaactggctgcattgaactctgctgcttatttgcaacaacaacta

SEQ ID NO: 88124 - DNA, 446 bp, Zea mays
cccacgcatgcagggcaatagaacactcacaaccttactttaaaaacaggcctacatatgctccgcgggctctcttcaaacgctgctacggcgaccatactcccgcaatgctcccaagctcctataactcccctacatcccccttacctctcaccaacatcgcattcgctatgtcaaaacccaattctacaaccctacatgatccatcaagcaatcacaactcacatctatacctttatcacccttgttcctccaacaatcatcaaccctattacatcactaacctttgatgcatctattgtcacaaaacatcaacacacaacaactacaacaactcgacctaacaaaccttgctgcctactctcagcatcagcagattctcacaatcaaccaactatctaccattaactttgattctaatttgcaacaacaacaactaccatcaa

SEQ ID NO: 88125 - DNA, 421 bp, Zea mays
  unsure (1)..(421): unsure at all n locations
gcaaagcggcagtgcgtagagaggatcgtcgaacagaacagcatgaagatggtcatcgttctcgtcgtgtgcctggctctgtcagctgccagcgcctctgcaatgcagatgccctgcccctgcgcggggctgcagggcttgtacggcgctggcgccggcctgacgacgatgatgggcgccggcgggctgtacccctacgcggagtacctgaggcagccgcagtgcagcccgctggcggcggcgccctactacgccgggtgtgggcagacgagcgccatgtaccagccgctccggcaacagtgctgccagcagcagatgaggatgatggacgtgcagtccgtcgcgcagcagctgcagatgatgatgcagcttgagcgtgccgctgccgncagcagcagcctgtacgagccagctctgatgc

SEQ ID NO: 88126 - DNA, 395 bp, Zea mays
attgagaccaactagcaacatagaaagcacaatagtgtaccaacaatggcaggcaaagtattttgcctccttatgctccttggtctttctgcaagtgctgctacggcgaccattttcccgcaatgctcgcaagctcctatagcttcccttcttcccccgtacctctcaccagcggtgtcttcggtatgtgaaaacccaattcttcaaccctacaggatccaacaggcaatcacagctggcatcttacctttatcacccttgttccttcaacaatcatcagccctattacatcagttacctttggtgcatttattggcacaaaacatcagggcacaacaactacaacaacttgtgctagcaaaccttgctgcctactcttagcaacagcagtttct

SEQ ID NO: 88127 - DNA, 346 bp, Zea mays
gcaacatagaaagcacaatagtgtaccaacaatggcagccaaaatattttgcgcgcctgatgctccttggtctttctgcaagtgctgctacggcgaccattttcccgcaatgctcgcaagctcctatagcttcccttcttcccccgtacctctcaccagcggtgtcttcggtatgtgaaaacccaattcttcaaccctacaggatccaacaggcaatcacagctggcatcttacctttatcacccttgttcctccaacaatcatcagccctattacatcagttacctttggtgcatttattggcacaaaacatcagggcacaacaactacaacaacttgtgctagc

SEQ ID NO: 88128 - DNA, 363 bp, Zea mays
  unsure (1)..(363): unsure at all n locations
gcaaaatcctaccctcggtaacagccacgtttatcgagtgtctctagactgacactgggtaaactatgttttgacgagtgtcaaaataagacactccgtaaaacattctttgccgagtgcctgccgtggaacactcgacaacgtatttaaaaaaaataaaacaatctttgtcaagtgcttatcaaagggcactcgacaaagacagctttgccgagtgtcagatcgaggacactcggcaaagtatatttttaaattaaaaaataactttgccgactgctagatcgcgacactcgacaaagtctgtttacatagtcttaactggccttcttcttctcttcattnntctttctcttcttcacgccg

SEQ ID NO: 88129 - DNA, 435 bp, Zea mays
agaaagcacaatagtgtaccaacaatggcagccaaaatattttgcctccttatgctcgttggtctttctgcaagtgctgctacggcgaccattttcccgcaatgctcgcaagctcctatagcttcccttcttcccccgtacctctcaccagcggtgtcttcggtatgtgaaaacccaattcttcaaccctacaggatccaacaggcaatcacagctggcatcttacctttatcacccttgttcctccaacaatcatcagccctattacatcagttacctttggtgcatttattggcacaaaacatcagggcacaacaactacaacaacttgtgctagcaaaccttgctgcctactctcagcaacagcagtttcttccattcaaccaactagctgcattgaactctgcttcttatttgcaacaacaacaactacca

SEQ ID NO: 88130 - DNA, 428 bp, Zea mays
aaagcacaatagtgtaccaacaatggcagccaaaatattttgcttccttatgctcctgggtctttctgcaagtgctgctaccgcaaccattttcccacaatgctcacaagctcctatagcttcctttcttcccccatacctctcaccagcggtgtcttcagtatgtgaaaacccaattcttcaaccctacaggatccaacaggcaatccgcagcaggcatcttacctttatcacccttgttcctccaacaaccgtcagccctattacagcagttacctttggtgcatttgttggcacaaaacatcaaggcacaacaactacaacaacttgtgctaggaaaccttgctgcctactctcagcaacagcagtttcttccattcaaccaactggctgcattgaactctgctgcttatttgcaaacaacacta

SEQ ID NO: 88131 - DNA, 413 bp, Zea mays
attgagaccaactagcaacatagaaagcacaatagtgtaccaacaatggcagccaaaatattttgcttccttatgctccttggtctttctgcaagtgttgctaccgcaaccattttcccacaatgctcacaagctcctatagcttcccttcttcccccatacctctcaccagcggtgtcttcaatgtgtgaaaccccaattgttcaaccctacaggatccaacaggcaatcgcaacaggcatcttaccattatcacccttgttcctccaacaaccgtcagccctattacagcagttacctttggtccatttggtggcacaaaacatcagggcacaacaactacaacaacttgtgctagcaaaccttgctgcatactctcagcaacatcagtttcttccattcaaccaactggc

SEQ ID NO: 88132 - DNA, 415 bp, Zea mays
ttgagaccaactagcaacatagaaagcacaatagtgtaccaacaatggcagccaaaagattttgcctccttatgctccttggtctttctgcaagtgctgctacggcgaccattttcccgcaatgctcgcaagctcctatagcttcccttcttcccccgtacctctcaccagcggtgtcttcggtatgtgaaaacccaattcttcaaccctacaggatccaacaggcaatcgcagctggcatcttacctttatcacccttgttcctccaacaatcatcagccctattacaacagttacctttggtgcatttattggcacaaaacatcagggcacaacaactacaacaacttgtgctagcaaaccttgctgcctactctcagcaacagcagtttcttccattcaaccaactaggttc

SEQ ID NO: 88133 - DNA, 437 bp, Zea mays
gagaccagcaagcaacatagaaagtataatccattagcaacaatagagcaacaatggcgaccaagatattttccctccttatgctccttgctctttctacatgtgttgctaacgcgacaattttccctcaatgctcacaagctcctatagcttcccttcttcccccataccttccatcaattatagcttcagtatgtgaaaacccagctcttcaaccatataggcttcaacaagcaatcgcagcaagcaacatacctttatcgcccttgttgtttcaacaatcaccagccctatctttggtgcagtcattggtacaaaccatcagggcacaacagctgcagcaactcgtgctacctgtgatcaaccaagtagctctggcaaacctttctccctactctcagcaacaacaatttcttccattcaaccaactgtctaca

SEQ ID NO: 88134 - DNA, 340 bp, Zea mays
  unsure (1)..(340): unsure at all n locations
gcacaatagtgtaccaacaatggcagccaaaatattttgcctccttatgctccttgggctttctgcaagtgctgctacggcgaccattttcccgcaatgctcgcaagctcctatagcttcccttcttcccccgtacctctcaccagcggtgtcttcggtatgtgaaaacccaattcttcaaccctacaggatccaacaggcaatcgcagctggcatcttacctttatcacccttgttcctccaacaatcatcagccctattacaacagttacctttggtgcatntattggcacaaaacatcagggcacaacaactacaacaacttgtgctagcaaacctt

SEQ ID NO: 88135 - DNA, 400 bp, Zea mays
cgagcgccatgtaccagccgctccggcaacagtgctgccagcagcagatgaggatgatggacgtgcagtccgtcgcgcagcagctgcagatgatgatgcagcttgagcgtgccgctgccgccagcagcagcctgtacgagccagctctgatgcagcagcagcagcagctgctggcagcccagggtctcaaccccatggccatgatgatggcgcagaacatgccggccatgggtggactctaccagtaccagtaccagctgcccagctaccgcaccaacccctgtggcgtctccgctgccattccgccctactactgattcatgatatttgggaaatctcctctatccatccctctctatctatatatgtaataatgcagtaagacgacacacattatcat

SEQ ID NO: 88136 - DNA, 288 bp, Zea mays
cattattattctcactggtcgatctgctaacacaaacagcagcagctcctccgcactagctagccttctctatttttgctactgcaagtgtccaagtctgcgacgacgtccgagatgtcgacggtgagccgtgcatcccttgaccagaagcttgccctcgccaagcgctgctcccgagaggcgactcttgccggagctaaggcggcagcagtggcgactatcgcctccgcgattcccaccctcgcgagcgtgcggatgctgccgtgggccaaggccaacatcaacccc

SEQ ID NO: 88137 - DNA, 229 bp, Zea mays
cccacgcgtccgcccacgcgtccgcccacgcgtccgctcgtttgttgttgcccatctgggtgtttgattgcaaggtcgctctgtgtcagttgttagtgctgtgttcatcctcggctccagcagacccatgcatcaaccagcatggactgtggatcgatggatgctgttactcctgtcaggatttgttctaagttaatcctaaggaaaaaatggtgcttcttggtgctgc

SEQ ID NO: 88138 - DNA, 418 bp, Zea mays
  unsure (1)..(418): unsure at all n locations
gtgtcccgcacggtggacgcggngttcaacagtccagcacgggtgaccttgaccggtgacgcaaggngaaagcaggtgcaaaaagtgggacaagatcttccaaggcggccttcgagtgggctgaccaccccaccgctgtgatcccccgacatgcagaagcttggcatcaaggataagaacgaagcagcgaggatcgttgcgctcgttaagaatcaaactactgccgctgccgctactgctgccagtgctgacaacgacgacgacgaggcctgatcaatgcaacgacacatcatgatctgctgctgcacttaattactatgttcgtatacaaataaatacacccggcgtacgcggtgttccttatatggtctaaaatgtagccagtgcattctaaactactttatttcttgaggctcct

SEQ ID NO: 88139 - DNA, 432 bp, Zea mays
  unsure (1)..(432): unsure at all n locations
cccacgcgtccgctagtagggactggggttccttttgcccggaagtttaaggaggatgaacccctgttggacatgattgatgataaagtgcttcgacgctggcgtcacaggcctgttcctggcgcatggtgcacaggcaaaaggaggtggttcagtgatccttgctcccagtggagcaacgtcaacattgtaagacccggtcctcaagctgagaagttccgaacatatataaaccagattatggaagaatcaaagtcaagcaacaactcttgcaagcaatagcggtagaatccgagcacgaggcttcacttcccgcagttgaagcgttgagcttgtctcattttgcgccgaggagctctccatgtctcgagcacttcctggcatctgcttcaggagcaagcatttntgcacctgttgtatgaactgaacaca

SEQ ID NO: 88140 - DNA, 410 bp, Zea mays
ccaacaagcaacatagaaagtggaatccagtagcaacaacagagcaacaatggcgacgaagatattttccctccttatgctccttgctctttctgcatgtgttgctaacgcgacaattttcccctcaatgctcacaagctcctatagcttcccttcttcccccataccttccatcaatgatagcttcagtatgtgaaaacccagctcttcagccctataggctccaacaagcaatcgcagcaagcaacatacctttatcacccttgttgtttcaacaatcgccagccctatctttggtgcagtcattggtacaaaccatcagggcacagcagctgcagcaactcgtgctacctgtgatcaaccaagtagctcttgcaaacctttctccctactctcagcaacaacaattt

SEQ ID NO: 88141 - DNA, 448 bp, Zea mays
gaccaactagcaacatagaaagcacaatagtgtaccaacaatggcagccaaaagattgtgcttccttatgctccttggtctttctgcaagtgctgctaccgcaaccattttcccacaatgctcacaagctcctatagcttcctttcttcccccatacctctcaccagcggtgtcttcagtatgtgaaaacccaattcttcaaccctaggatccaacaggcaatcgcagcaggcatcttacctttatcacccttgttcctccaacaaccgtcagccctattacagcagttacctttggtgcatttgttggcacaaaacatcaaggcacaacaactacaacaacttgtgctaggaaaccttgctgcctactctcagcaacagcagtttcttccattcaaccaactggctgcattgaactctgctgcttatttgcaacaacaactaccatt

SEQ ID NO: 88142 - DNA, 420 bp, Zea mays
cagaccattagctttatctactccagagcgcagaagaacccgatcgacaccatgagggtgttgctcgttgccctcgctctcctggctctcgctgcgagcgccacctccacgcatacaagcggcggctgcggctgccagccaccgccgccggttcatctaccgccgccggtgcatctgccacctccggttcacctgccacctccggtgcatctcccaccgccggtccacctgccgccgccggtccacctgccaccgccggtccatgtgccgccgccggttcatctgccgccgccaccatgccactaccctactcaaccgccccggcctcagcctcatccccagccacacccatgcccgtgccaacagccgcatccaagcccgtgccagctgcagggaacctgcggcgttggcagcaccccg

SEQ ID NO: 88143 - DNA, 438 bp, Zea mays
accgtccgaattcccggtcgacgaccggattgcccaattacaacaacaatccttggcacatctaaccatacaaaccatcgcagcgcaggagcaacaagcactgagccagctagccgtggtgaaccctatcgcctacttgcaacaacagatgttcgggtgctacttgcacacagacgggcggctgcagctgtggtcaacaacacagccatgagcagcaacataattcacaacaacatcatacacaaaaacaacagcataaaccacgaccacaacataaccagcagcagcaacacctacaacaacaagttcacatgcaaccacaaaaacatgagcaacaacatgaagttcatgttcaacatcaacatcaacaaccgcagcaccaccaccaacaacaacagcaacagcaccaacaacaacatctatgggaaaggcaacaac

SEQ ID NO: 88144 - DNA, 353 bp, Zea mays
ggtcaactctgtattgccaagggtgagttgcaaatggcgtctgactcgttcaagattgtgttggatgaagatgagaacaattttccagctctacttggtcaggcctctgtttactttttgatgggcgaagcagagcagcaacacaaaaaatcattggagcattacaggaactcattagatctctacaagaaagctcttcgggtctattgcaattgtcctgctgctgtaaggcttggtatagccttttgccgatacaaacttggacaagtggaaaaagctcgtcaagcttttcagcgagttttagagttggacccttaaaatggtgatgctctagtagcactggcaatcatgga

SEQ ID NO: 88145 - DNA, 372 bp, Zea mays
  unsure (1)..(372): unsure at all n locations
gttgcaattggttaattggttgttgtaacaacaatccttggcacatctaaccgtacaggccatcgcaacacaacagcaacaacagttcctaccagcactgagccaactagatgtggtgaaccctgtcgcctacttgcaacagcaggtgcttgcatccaacccacttgctctggcaaacgtagctgcataccaacaacaacaacaattgcaacagtttctgccagcgctcagtcaactagccatggtgaaccctgccgnctacctacaacagcaacaactgctttcatctagccctctcgttgtgggtaatgcacctacatacctgcaacaacaattgctgcaacagattgtaccagctctgactcagctagc

SEQ ID NO: 88146 - DNA, 369 bp, Zea mays
ccagcaagcaacatagaaagtagaatccattagcaacaatagagcaacaatggcgacgaagatattttccctccttatgctccttgctctttctacatgtgttgctaacgcgacaattttccctcaatgctcacaagctcctatagcttcccttcttcccccataccttccatcaattatagcttcagtatgtgaaaacccagctcttcaaccatataggcttcaacaagcaatcgcagcaagcaacatacctttatcgcccttgttgtttcaacaatcaccagccctatctttggtgcagtcattggtacaaaccatcagggcacaacagctgcagcaactcgtgctacctgtgatcaaccaagtagc

SEQ ID NO: 88147 - DNA, 404 bp, Zea mays
  unsure (1)..(404): unsure at all n locations
cgacgacaccatgagggagtgcatttcgatccacatcggccaggccggtatccaggtgggaaacgcgtgctgggagctgtactgccttgagcatggcattcaggctgacggtcagatgcccggtgacaagaccattgggggaggtgatgatgctttcaacaccttcttcagtgagactggtgctgggaagcacgtgccccgtgctgtttttgttgaccttgaacccactgtcatcgatgaggtgaggactggcacctaccgccagctcttccaccctgagcagctcatcagtgggaaggaggatgcagccaacaactttgcccgtggtcactacaccattggcaaggagattgttgacctatgccttgatcgcatcangaagcttgccgacaactgcactggtc

SEQ ID NO: 88148 - DNA, 394 bp, Zea mays
caactagcaacatagaaagcacaatagtgtaccaacaatggcagccaaaatattttgcttccttatgctccttggtctttctgcaagtgttgctaccgcaaccattttcccacaatgctcacaagctcctatagcttcccttcttcccccatacctctcaccagcggtgtcttcaatgtgtgaaaccccaattgttcaaccctacaggatccaacaggcaatcgcaacaggcatcttaccattatcacccttgttcctccaacaaccgtcagccctattacagcagttacctttggtccatttggtggcacaaaacatcagggcacaacaactacaacaacttgtgctagcaaaccttgctgcatactctcagcaacatcagtttcttccattc

SEQ ID NO: 88149 - DNA, 394 bp, Zea mays
gaacgattacaacaacaatccttggcacatctaaccatacaaaccatcgcagcgcaggagcaacaagcactgagccacctagccgtggtgaaccctatcgcctacttgcaacaacagctgcttgcattcaacccacttgctttggcaaacgtagctgcataccaacaacaacaacagttgcaacagtttctaccagcgctcagtcaactagccatggtgaaccctatcgcctacctacaacagcaacaacttctttcatctagcccgctcgctatgggcaatgcacctacatacctgcaacaacagttgatgcaacaacagttgctgcaacaaattgtaccagctcttactcagctagctgtggcaaaccctgctgcctacttgcaacaactac

SEQ ID NO: 88150 - DNA, 419 bp, Zea mays
  unsure (1)..(419): unsure at all n locations
gtttgcggggtatgcgtggggataattggaagcagctgcgcactgtctgatgctcagaactcatcactcttcgtaaagattttggtgattgagatcttcggcagcgctctgggactgttcggtgtcattgtgggcatcattatgtcatctcaagcgacatggccagcaaaagcttgattttcaccatttgtagctctgtaaattattcagatggagtgtatcgaaatgtgcatgtggtctaactgcattttcatgttccttttatgtggcgtcttttttggcagaacacgaaatgcggcgcgcgtaccgncaccgattgtagagttgctattcttactgccggagtactccatgtgtgttggatatctggttggcatattanataaatgcttggacaaaataaaatgaatttttttgcc

SEQ ID NO: 88151 - DNA, 390 bp, Zea mays
gcaaagcggcagtgcgtagagaggatcgtcgaacagaacagcatgaagatggtcatcgttctcgtcgtgtgcctggctctgtcagctgccagcgcctctgcaatgcagatgccctgcccctgcgcggggctgcagggcttgtacggcgctggcgccggcctgacgacgatgatgggcgccggcgggctgtacccctacgcggagtacctgaagcagccgcagtgcagcccgctggcggcggggccctactaccgccgggtgtgggcagacgagcgccatgtcccagccgttccggcaccagtgctgccagcagcaaatgaggatgatggacgtgcagtccgtcgcgcaagcagctgcagatgatgatgcagtttgagcgtgccgttgccg

SEQ ID NO: 88152 - DNA, 429 bp, Zea mays
  unsure (1)..(429): unsure at all n locations
aattcccggntcgacccgcgcgtacgcggccgccgacgcgtccgggcacatctaaccatacaaaccatcgcaacacaacagcgagaacggttcctaccagcactgagccaactagatgtggtgaaccctgtcgcctacttgcaacagcaggtgcttgcatccaacccacttgctctggcaaacgtagctgcataccaacaacaacaacaattgcaacagtttctgccagcgctcagtcaactagccatggtgaaccctgctgcctacttgcaacagctgcttacattcaaccaactgactgtgtcgaactctgctgcgtacctacaacagcgacaacagttacttaatccactagcagtgcctaacccattggtcactgccttactacagcagcaacaattgctaccatacagccagttctctttgatg

SEQ ID NO: 88153 - DNA, 231 bp, Zea mays
cgcaaattgcaccaagaaatccatcgagaggccgtcgacaggggaattaatggcgtcgtcgtctagcagcagccaccgccgcctcatcctcgcagccgccgtcctgctctccgtgctcgcggctgccagcgccagcgccgggacctcctgcgtgccggggtgggccatcccgcacaacccgctcccgagctgccgctggtacgtgaccagccggacctgcggcatcgggcc

SEQ ID NO: 88154 - DNA, 371 bp, Zea mays
  unsure (1)..(371): unsure at all n locations
gcagctagcacatcaaacaagtggcgacagacaaagatttgtgagggtgatccgcgctgagaagagatggctaagatcgccgcggcggcggcggcggcgctgtgcttcgcggccctggtggccgtggccgtctgccaaggcgaggtcgagcggcagaggctcagggacctgcagtgctggcaggaggtccaggagagcccgctcgacgcgtgccgncaggtcctcgaccggcagctaaccggcggcggcggcggcggcggcgttggcccgttccggtggggcaccgggctccggatgcggtgctgccagcagcttcaggacgtgagccgcgagtgccggtgcgccgncattcggagcatggtcaggggata

SEQ ID NO: 88155 - DNA, 422 bp, Zea mays
  unsure (1)..(422): unsure at all n locations
gatgattatggctcccacagttgagcctaggtagcaggcgctggatcgccttctgccgtaccagaggtctgacttcgaaggcatcttccgtgctatggatggactttcagtgactattcgacttctggaccctcccctccacgagttccttccagaagggaacgtcgaggaaatcgtgcgtgaactgtgttctgagacgggagccaaccaggaggatgccctcgcacggatcgaaaagctttcggaagtaaacccgatgcttggcttccgtggctgcaggcttggtatatcgtaccctgagctaacagaaatgcaaggccgtgccatctttgaagctgctataacgatgaccaaccagggcgttcaagtctttccagagataatggttcctcttgttggaacaccgcangaattgggacatc

SEQ ID NO: 88156 - DNA, 431 bp, Zea mays
ctgaggggttccccgtccccggccgtactggtgccaacccagctctccggtgcgcccgcgacccctgctcccgtcgtcagggtggcggcgccgcgcggagtcgcctcgccgtccgctggcgccgcgtgcagggccgcgggcaaggggaaggaggtgctcagcggggtcgtgttccagcccttcgaggagatcaagggggagctcgccctcgtgccccagtccccagacaagtcgctcgcgcgccacaagttcgtcgatgactgcgaggccgccctcaacgagcagatcaacgtggagtacaacgcctcgtatgcataccactccctcttcgcctatttcgaccgcgacaacgtggctctcaaaggatttgccaagttcttcaaggaatccagcgacgaggagagggagcacgctgaaaagctcatggagta

SEQ ID NO: 88157 - DNA, 420 bp, Zea mays
ccgacgcgtccgcaacaagcaacatatctagttgaatccagtagcaacaatagagcagcaatggcgaccaagatattttccctccttatgctccttgctctttctacatgtgttgctaacgcgacaattttccctcaatgctcacaagctcctatagcttcccttcttcccccataccttccatcaattatagcttcaatatgtgaaaacccagctcttcaaccatataggcttcaacaagcaatcgcagcaagcaacatacctttatcgcccttgttggttcaacaatcgccagccctatctttggtgcagtcattggtacaaaccatcagggcacaacagctgcagcaactcgtgctacctctgatcaaccaagtagctttggcaaacctttctccctactctcagcaacaacatttt

SEQ ID NO: 88158 - DNA, 348 bp, Zea mays
ccggttcggaatacccggctcgacccacgcgtgcgcagaccctgctgcctacttgcatcatactcttccattcaaccaactgactgtgtcgaactctgctgcgtacctacaacagcgacaacagttacttaatccactagcagtgcctaacccattggtcactgccttcctacagcagcaacaattgctaccatacagccagttctctttgatgaaccctgccttgtcgtggcagcaacccatcgttggaagtgccatcttttagattacatatgagatgtaatcgataatggtgccctcataccggcatgtgtttcctagaaataatcaatatattgattgacattt

SEQ ID NO: 88159 - DNA, 454 bp, Zea mays
ccggctcgtcccacgcgtgcgatggaaagcacaattgtgtacctactactgcagctaaaatattttgcctccttatgcgccttggtctttctgcaagtgctgctacggcgaccattttcccacaatgctcacaagctcctatagcttcccttcttcccccgtacctctcaccaacggtgtcttcggtatgtgaaaacccaattcttcaaccctacaggatccaacaggcaatcgcagctggcatcttacctttatcacccttgttcctccaacaatcatcagccctattacagcagttacctttggtgcatttattggcacaaaacatcagggcacaacaactacaacaacttgtgctagcaaaccttgctgcctactctcagcaacagcagtttcttccattcaaccaactagctgcattgaactctgcttcttatttgcaacaacaacaact

SEQ ID NO: 88160 - DNA, 458 bp, Zea mays
  unsure (1)..(458): unsure at all n locations
cgttcggaattcccggctcgacccactcgttcgaagagctgcagcaactcgtgctaccttatacttcaaccaagtagctctggcaaacctttctccctactctcagcaacaacaatttcttccattcaaccaactgtctacactgaaccctgctgcttatttgcagcaacaactattaccatttagccagctagctactgcctactctcagcaacaacaacttcttccatttaaccaattggccgcactgaaccccgctgcttatttgcagcagcaaatactactaccatttagccagctagctgcagcaaaccgtgcttncttcttgacacagcaacagttgctgcctttctaccagcagtttgcggctaaccccgcaaccctcttacaactacaacaattgttgccctttgtccaacttgctttgacagacccagcggccttctaccaacaacaca

SEQ ID NO: 88161 - DNA, 390 bp, Zea mays
  unsure (1)..(390): unsure at all n locations
gttcgcaggccattaggtttatctactccagttctcagtcctacccgatcgacaccatgagggtgttgctggnngccctcgctctcctggctctcgctgcgagcgccaccttcacgcatacaagcggcggctgcggctgccagccaccgtcgtcggttcatctaccgtcgncggtgcatctgccacctncggttcacctgccacctncggttgcatctccaccgncggtccacctgccgncgncggtccaacctgcaccgncggtccatgtgccgncgccggttcatctgccgncgncaccatgccactaccctactcaaccgtcccggcctcagcctcatccccagccacacccatgcccgtgccaacagccgcattcaagcccgtgcc

SEQ ID NO: 88162 - DNA, 456 bp, Zea mays
cgcttcggaattaccggctcgacccactcgtccgcgggcgcgtggggaaattcttgctgtatctgggcttcagcaaggggcagccccacttggccgagaacatcttcaaagggatcgacgcccggttcctgagcgaagccctgggcgtcagcatgcacgtcgccgagaagctgcagagccggcgtgaccagcgaggcgagatcgtccgcgtggagccggagcacggctttcaccagctgaatccgtcgccgtcgtcgtcgtcgttttcgttcccatcgtcacaagtccagtaccaaacgtgccagcgcgacgtcgacaggcacaacgtctgcgccatggaggtgaggcacagcgtcgaacggctggaccaggccgacgtctacagccctggggctgggaggatcacacgcctcaccagccacaagttccccgtcctcaacctcgtacagatgagcg

SEQ ID NO: 88163 - DNA, 310 bp, Zea mays
  unsure (1)..(310): unsure at all n locations
aagatacatagtgaagacactagctctcttttagcaccaatgggagccaagattttgtccctccttgccctccttgctctttcagcaagcgctgctacctctactattattccacaatgctcacaacaatacctctctccggtgacagccgcgggatttcaacacccaactatacaatcctacatgctacatgaggccatcgtagcaagcatcttacggtcattagcattaaccctncaacagccatatgccctattgcaacaaccatccttagtgcatctgtatctccaaagaatcgcgacacaacaac

SEQ ID NO: 88164 - DNA, 453 bp, Zea mays
  unsure (1)..(453): unsure at all n locations
ggaatacccggctcgacccacgcgtgcgtgcaccaagaaatctatcgagtgtctactgacaggggaattaatggcgtcgtcgtcgagcagcagccaccgccgcctcatcctcgcagccgccgtcctgctctccgtgctcgcggctgccagcgccagcgccgggacctcctgcgtgccggggtgggccatcccgcacaacccgctcccgagctgccgctggtacgtgaccagccggacctgcggcatcgggccgcgcctcccgtggccggagctgaagaggagatgctgccgggagctggcggacatcccggcgtactgccggtgcacggcgctgagcatcctcatggacggcgcgatcccgccgggcccggacgcgcagctggagggccgcctagaggacctgccgggctgcccgcgggaggtgcagaggggattcgccgncaccctcgtcac

SEQ ID NO: 88165 - DNA, 442 bp, Zea mays
cggttcggaattcccggctcgacccacgcgtgcggggacgccgtcatggagccggttgtttatggcagcaacacggtagtagctgttgcccaagttgagttgcaaacaatgaacgtgcagcagcccgctgatgttgccggacccagcgagggggtggcggcgatctccaaaggggggaaggtagggccgaaccggtgcagcgcctgcaggaagagggttggacttacgggattcaactgccggtgtgggaacttgtactgcgcactccaccgctactccgacaagcacgactgcaagttcgactaccggactgctgccagggacgccattgccaaggctaatccggtggtgaaggcagacaagctcgacaagatctagggggggttccctacggttgggtatcaggaagattgtaaaccgcggtaactcgtcatgcggaact

SEQ ID NO: 88166 - DNA, 381 bp, Zea mays
gacccactcgtccgctggaagcaacgtataagtggaatttctagcattatagagcaacaatggcgaccaagatattgtccctccttatgctccttgctctttctacatgtgttgctaacgcgacaattttccctcaatgctcacaagctcctatagcttcccttcttcccccataccttccatcaattatagcttcaatatgtgaaaacccagctcttcaaccatataggcttcaacaagcaatcgcagcaagcaacatacctttatcgcccttgttggttcaacaatcgccagccctatctttggtgcagtcattggtacaaaccatcagggcacaacagctgcagcaactcgtgctacctctgatcaaccaagtagctc

SEQ ID NO: 88167 - DNA, 436 bp, Zea mays
cggctcgacccactcgtccgctgagtcaacgagccatggtgaacctcatctgactcattacaactactttcatctagcccgctcgcggtgggcaatgcacctacgtacctacaacaacagttgctgcaacaaattgtaccagctctgactcagctagctgtggcaaaccctgctgcctacttacaacagttgcttccattcaaccaactggctgtgtcaaactctgctgcgtacctacaacagcgacaacagttacttaatccattggcagtggctaacccattggtcgctaccttcctgcagcagcaacaacaattgctgccatacaaccagttctctttgatgaaccctgccttgcagcaacccatcgttggaggtgccatcttttagattacatatgagatgtactcgacaatggtgccctcataccgacatg

SEQ ID NO: 88168 - DNA, 434 bp, Zea mays
cggctcgacccacgcgttcgcagcagggtctgtcatcactgagccatttatatgtggtgaaccctgtcacctacttgcaacagcagctgcttgcatccaacccacttgctctggcgaacgtagctgcataccagcaacaacaacagctgcaacagtttatgccagtgctcagtcaactagccatggtgaaccctgccgtctacctacaactactttcatctagcccgctcgcggtgggcaatgcacctacgtacctacaacaacagttgctgcaacaaattgtaccagctctgactcagctagctgtggcaaaccctgctgcctacttacaacagttgcttccattcaaccaactggctgtgtcaaactctgctgcgtacctacaacagcgacaacagttacttaatccattggcagtggctaacccattggtc

SEQ ID NO: 88169 - DNA, 345 bp, Zea mays
ctgctcgtcccccttcggttcgggttacttctgtgaggttctccggggttcggtttcgtgggtgagcggatcgagatggcggcgtcggatgttgagtaccgctgcttcgtcggcggcctcgcctgggccacggacgaccactccctccacaacgccttcagcacctacggcgaggtcctcgagtccaagatcatcctcgatcgggagacgcagaggtcccgcggcttcggcttcgtcaccttctccacggaggaggcgatgcggaacgccatcgagggcatgaacggcaaggagctggacggccgcaacatcaccgtcaacgaggcccagtcccgcggcgggcgt

SEQ ID NO: 88170 - DNA, 352 bp, Zea mays
ccgccttgcgcttcttgcccttttatactttttaacaaatgcgttcattattccacagtgctcacttgctcctagtgccattattccacagttcctcccaccagttacttcaatgggcttcgaacatccagccgtgcaagcctacaggctacaactagcgcttgcggcgagcgccttacaacaaccaattgcccaattgcaacaacaatccttggcacatctaaccctacaaaccattgcaacgcaacaacaacaacaacaacagtttctgccatcactgagccacctagccgtggtgaaccctgtcacctacttgcaacagcagctgcttgcatccaacccacttgctctg

SEQ ID NO: 88171 - DNA, 464 bp, Zea mays
cggttcggaatacccggctcgacccttgcgggcctgccgctttcggttgcacattgggtaccaacactggcagccaaaatattgggctgccttatgctccttggtctttctgcaagcgttgctaccgcaaccattttcccacaatgctcacaagctcctatagcttcccttcttcccccatacctctcaccagcggtgtcttcaatgtgtgaaaccccaattgttcaaccctacaggatccaacaggcaatcgcaacaggcatcttaccattatcacccttgttcctccaacaaccgtcagccctattacagcagttacctttggtccatttggtggcacaaaacatcagggcacaacaactacaacaacttgtgctagcaaaccttgctgcatactctcagcaacatcagtttcttccattcaaccaactggctgcattgaactctgctgcttatttgcaaca

SEQ ID NO: 88172 - DNA, 470 bp, Zea mays
actcggtccggaatacccggctcgacccacgcgtgcgcgcaggttccctgcagcgttggtagtatcccgatcctgggccagtgcgtcgagttcctgaggcatcagtgcagcccgacggcgacgccctactgctcgcctcagtgccagtcgttgcggcagcagtgttgccagcagctcaggcaggtggagccgcagcaccggtaccaggcgatcttcggcttggtcctccagtccatcctgcagcagcagccgcaaagcggccaggtcgcggggctgttggcggcgcagatagcgcagcaactgacggcgatgtgcggcctgcagcagccgactccatgcccctacgctgctgccggcggtgtcccccactgaagaaactatgtgctgtagtatagccgctggctagctagctagttgagtcatttagcggcgatgattgagtaataatgtgtcaacgcatcaccatgggt

SEQ ID NO: 88173 - DNA, 415 bp, Zea mays
acggattattcaatgcaagtccagagttctgggctctgctaccaagtgcagctgggcagaagggacggcatggtgtcgcaggcgtccatggcgagcattctgccgggccccaacgtcgacgtccccaccgtcatcgatctgttcgcgcggaagggcctcaacagcttcgagatggtcagcctcatgggcgcgcacacggtgggggtgacgcactgctcggtgatccacgaccggctgttcaacttcaacggcaccgggtcgccggacccggccatggacccgatgtacgtgtggatcctgacgacgtacgcgtgccccaagggccaggccttcgacaacatcgtctacctcgacgacccctccagcatcctgctcgtcgaccggagctactactcccagatcatgaagcgccacg

SEQ ID NO: 88174 - DNA, 436 bp, Zea mays
gacccactcgtccggtggcctactgtcagtcaacagcagtataatccattttaccaactagctgcattgaacgctgcttgttatttgcaacaacaacaactaccattcagccagctacctgctgcctacccccagcaatttcttccattcaaccaactggcagcattgaactctcctgcttatttacagcagcaacaactactaccattcagccagctagctggtgtgagccctgctaccttcttgatacaaccacagttgttgccgttctaccagcacgctgcgcctaacgctggcaccctcttacaactgcaacaattgctgccattcaaccaacttgctttgacaaacccagcagcgttctaccaacaacccatcattggtggtgccctcttttagatttcttatgagttatagttcaataataaaagttttt

SEQ ID NO: 88175 - DNA, 438 bp, Zea mays
tggatcctgtagggttgaacatgcgatcttaacaggcattactcatgtccacccttgttcctccaacaaccgtcagccctattacagcagttacctttggtccatttggtggcacaaaacatcagggcacaacaactacaacaacttgtgctagcaaaccttgctgcatactctcagcaacatcagtttcttccattcaaccaactggctgcattgaactctgctgcttatttgcaacaacaattaccattcagccagctagttgctgcctacccccagcaatttcttccattcaaccaactagcagcattgaactctgctgcttatttacagcagcaacaactactaccattcagccagctaacttatgtgaacccttgttgctttttgacacaacaaccagtggtggccgtcttacctgcacgctatgcctaacgc

SEQ ID NO: 88176 - DNA, 409 bp, Zea mays
ccgacgcgtccgcatcaagcaacatatttatttgaatccagtagcaacaatagagcaacaatggcgaccaagatactttccctccttatgctccttgctctttctgcatgtgttgctaacgcgacaattttccctcaatgctcacaagctcctatagcttcccttcttcccccataccttccatcaatgatagcttcagtatgtgaaaacccagctcttcaaccctataggctccaacaagcaatcgcagcaagcaacatacctttatcacccttgtttcaacaatcgccagccctatctttggtgcagtcattggtacaaaccatcaaggcacagcagctgcagcaactcgtgctacctgtgatcaaccaagtagctctggcaaacctttctccctactatcagcaac

SEQ ID NO: 88177 - DNA, 352 bp, Zea mays
aggattgaaaaacacaccaagcgaatactactttgcaacgacctaacaccaatggctaccaagatattagccctccttgcgcttcttgcccttttagtgagcgcaacaaatgcgttcattattccacagtgctcacttgctcctagtgccattattccacagttcctcccaccagttacttcaatgggcttcgaacatccagccgtgcaagcctacaggctacaactagcgcttgcggcgagcgccttacaacaaccaattgcccaattgcaacaacaatccttggcacatctaaccctacaaaccattgcaacgcaacaacaacaacaacaacagtttctggcatcactga

SEQ ID NO: 88178 - DNA, 346 bp, Zea mays
gcgttcagaaacactccaagcgaagtatttttcaacaacctaacaacaatggctaccaagatattatccctccttgcgcttcttgcgctttttgcgagcgcaacaaatgcgttcattattccacaatgctcacttgctccaagttccattattacacagttcctcccaccagttacttcaatgggcttcgaacacccagctgtgcaagcctataggctacaacaagcaattgcggcgagcgtcttacaacaaccaatttcccagttgcaacaacaatccttggcacatctaacaatacaaaccatcgcaacgcaacagcaacaacaattcctaccagcacttgacc

SEQ ID NO: 88179 - DNA, 332 bp, Zea mays
gcaacaatggttacgaaggtattttccctacttatgctccttgctccctctacatgtgttgctaacgcgacaattttccctcaatgctcacaagctcctatagcttcccttcttcccccataccttccatcaattatagcttcagtatgtgaaaacccagctcttcaaccatataggcttcaacaagcaatcgcagcaagcaacatacctttatcgcccttgttgtttcaacaatcaccagccctatctttggtgcagtcattggtacaaaccatcagggcacaacagctgccacaactcgtgctacctgtgatcaaccaagtagctctggc

SEQ ID NO: 88180 - DNA, 471 bp, Zea mays
  unsure (1)..(471): unsure at all n locations
ctcggtccggaatacccggctcgacccacgcgtgcggtgtggctaccatgtcgtccaatanactatagaatgcatcccacaggagaagatacagttcatcatttctgctttttacggacatgtggtggagttttctcatgcatccctatggttgccgcgttattcatagggtattggagcattgtgatgatgaaagcacacataatgccatgatggaagagatcatgcagtccgcggctactttaacagaggaccagtatggtaattatgtaatccagcatgtcctgcagcatgggaaaccagaagagcgttctacattaattacacaactcgctggacagatagtgaaaatgagccatcagaaatttgcttctaatgcaatgatgaatgaccagttcgcacactatgtggtgcacaaggttctggagatatgtgatgaccagaaccgtgaattgattctttcccgtatca

SEQ ID NO: 88181 - DNA, 471 bp, Zea mays
tgcatcggtccggaatacccggctcgacccacgcgtgcgctgccgcgtgcttgtaggatccttttcaatctgcggatgcactgagagtaaaagagcttgccatcacgaatctcacaaactacctcacaaaagagaacagagctgaagacctcaggaaccttttgacccagctcaggcccttttttgcattgatccccaaggcgaagactgcgaagattgtgcgtggcatcattgatgccgttgccaaggtgcctggaacatctcagcttcagatctcactgtgcaaggagatggtagaatggacccgtgcagagaagcgaaccttcctcaggcagcgtgtggaagcaaggctggcagcccttctgttggagaatcaggagtatactgaggctcttacactcctttctggactcatcaaggaagttaggaggctggatgacaagttgcttcttgtggacatcgaccttttgg

SEQ ID NO: 88182 - DNA, 440 bp, Zea mays
  unsure (1)..(440): unsure at all n locations
ggctcgacccactcgtccggagcaactagcaactatanaaagcacatctttgnatctacaatggcagctaaaatatggggcctccttatgctccttggtctttctgcaagtgctgctacggcgaccattttcccacaatgctcacaagctcctatagcttcccttcttcccccgtacctctcaccaacggtgtcttcggtatgtgaaaacccaattcttcaaccctacaggatccaacaggcaatcgcagctggcatcttacctttatcacccttgttccttcaacaatcatcagccctattacagcagttacctttggtgcatttattggcacaaaacatcagggcacaacaactacaacaacttgtgctagcaaaccttgctgcctactctcagcaaccgcagtttcttccattcaaccaactagctgcattgaactc

SEQ ID NO: 88183 - DNA, 326 bp, Zea mays
cgcttcggaattaccggctcgacccactcgtccgccgacgcgtccgccctcgcgtccgattactgagtctaacaagcaacatagaaagtggaatccagtagcaacaacagagcaacaatggcgaccaagatattttccctccttatgctccttgctctttctgcatgtgttgctaacgcgacaattttccctcaatgctcacaagctcctatagcttcccttcttcccccataccttccatcaatgatagcttcagtatgtgaaaacccagctcttcagccctataggctccaacaagcaatcgcagcaagcaacatacctttatc

SEQ ID NO: 88184 - DNA, 391 bp, Zea mays
gacccactcgtccgttggaacatcgatccttggcacatcttcactctatttaccattgcaacgcaacaacaacgacaacagcagtttctgccatcactgagccacctagccgtggtgaaccctgtcacctacttgcaacagcagctgcttgcatccaacccacttgctctggcgaacgtagctgcataccagcaacaacaacagctgcaacagtttatgccagtgctcagtcaactagccatggtgaaccctgccgtctacctacaactactttcatctagcccgctcgcggtgggcaatgcacctacgtacctacaacaacagttgctgcaacaaattgtaccagctctgactcagctagctgtggcaaaccctgctgcctacttacaac

SEQ ID NO: 88185 - DNA, 456 bp, Zea mays
ggaatacccggctcgacccactcgtccgaggaagctcagtagtttaccaacaatctctgccttaatattttgcctccttatgctcgttggtctttctgcaagtgctgctacggcgaccattttcccgcaatgctcgcaagctcctatagcttcccttcttcccccgtacctctcaccagcggtgtcttcggtatgtgaaaacccaattcttcaaccctacaggatccaacaggcaatcacagctggcatcttacctttatcacccttgttcctccaacaatcatcagccctattacatcagttacctttggtgcatttattggcacaaaacatcagggcacatcaactacaacaacttgtgctagcaaaccttgctgcctactctcagcaacagcagtttcttccattcaaccaactagctgcattgaactctgcttcttatttgcaacaacaaca

SEQ ID NO: 88186 - DNA, 436 bp, Zea mays
  unsure (1)..(436): unsure at all n locations
ccggctcgacccacgcgttcggagattttccctccttatgctccttgatctttcntcatgtgttgctaacgcgacaatgttcgctcaatgctcacaagctcctatagcttcccttcttcccccataccttccatcaattatagcttcaatatgtgaaaacccagctcttcaaccatataggcttcaacaagcaatcgcagcaagcaacatacctttatcgcccttgttgtttcaacaatcgccagccctatctttggtgcagtcattggtacaaaccatcagggcacaacagctgcagcaactcgtgctacctctgatcaaccaagtagcttttggcaaacctttctccctactctcagcaacaacaatttcttccattcaaccaactgtctacactgaaccctgctgcttatttgcagcaacaactattaccatt

SEQ ID NO: 88187 - DNA, 348 bp, Zea mays
gctcgcccacgcgtcagcaaacacactagcgaacatatactacaacctaacaacaatggctaccaagatattatccctccttgcgcttcttgcgctttttgcgagcgcaacaaatgcgttcattattccacaatgctcacttgctccaagttccattattacacagttcctcccaccagttacttcaatgggcttcgaacacccagctgtgcaagcctataggctacaacaagcaattgcggcgagcgtcttacaacaaccaatttcccagttgcaacaacaatccttggcacatctaacaatacaaaccatcgcaacgcaacagcaacaacaattcctaccagcact

SEQ ID NO: 88188 - DNA, 352 bp, Zea mays
gagccctgcgctgctagcaacaaagtactactttgtccacccgtccatctagctctcaagaaccaacccgtaccagcgctatccggccggccatggcggcggcgcgccggctctccctgcccctcgtcctgctggtcgtcctggccgtcgccgggcgcgcggcggcgcaggactacgacttcttctacctcgtgctgcagtggccgggggcctactgcgacaccaagcagagctgctgctaccccaagtccggcaagccggcggcggacttcgggatccacggcctctggcccaaccgcgacgacggcacgtacccgcagaactgcagccccgacaacgcctttcacccgtc

SEQ ID NO: 88189 - DNA, 397 bp, Zea mays
  unsure (1)..(397): unsure at all n locations
gtgatcaaccaagtttctctggcaatcatttttccctactctcagcaacaacaatttcttccattcaaccaactgtctacactgaaccctgctgcttatttgcagcaacaactattaccattcagccagctagctactgcctactctcagcaacaacaacttcttccatttaaccaattggccgcactgaaccccgctgcttatttgcagcagcaaatactactaccatttagccagctagctgcagcaaaccgtgcttccttcttgacacagcaacagttgctgcctttctaccagcagtttgcggctaaccccgcaaccctcttacaactacaacaattgttgccctttgtccaacttgctttgacagaccgagcgggctnctaccaacaacaca

SEQ ID NO: 88190 - DNA, 468 bp, Zea mays
accggttcggaattcccggcctagcaacatagaaagcagaatagtgtacctacaatgctgcctaaatattttgcctccttatgctccttggtctttctgcaagtgctgctacggcgaccattttcccacaatgctcacaagctcctatagcttcccttcttcccccgtacctctcaccagcggtgtcttcggtatgtgaaaacccaattcttcaaccctataggatccaacaggcaatcgcagctggcatcttacctttatcacccttgttcctccaacaatcatcagccctattacagcagatacctttggtgcatttattggcacaaaacatcatggcacaacaactacaacaacttgtgctagcaaaccttgctgcctactctcagcaacaacagtttcttccattcaaccaactagctgcattgaactctgcttcttatttgcaacaacaacaactaccattca

SEQ ID NO: 88191 - DNA, 470 bp, Zea mays
cggtccggaatacccggctcgacccacgcgtgcgtggcaacatagaatgcacaatattgtatctaacaatggcagccaaaatattttgcctcgttatgctccttggtctttctgcaagtgctgctacggcgaccattttcccacaatgctcacaagctcctatagcttcccttcttcccccgtacctctcaccagcggtgtcttcggtatgtgaaaacccaattcttcaaccctataggatccaacaggcaatcgcagctggcatcttacctttatcacccttgttcctccaacaatcatcagccctattacagcagttacctttggtgcatttattggcacaaaacatcagggcacaacaactacaacaacttgtgctagcaaaccttgctgcctactctcagcaacaacagtttcttccattcaaccaactagctgcattgaactctgcttcttatttgcaacaacaa

SEQ ID NO: 88192 - DNA, 472 bp, Zea mays
ccggttccggaatacccggctcgacccacgcgtgcgaggaagcacaatattgtaccattaatctcagccaaaatatacagcttccttatgctcgttggactatctgcaagtgttgctaccgcaaccattgtcccacaatgctcacaagctcctatagctacccttcttaccccatacctctcaccagcggtgtcttcaatgtgtgaaaccccaattgctcaaccctacaggatccaacaggcaatcgcaacaggcatcttaccattatcacccttgatccttcaacaaccgtaagccctattacagcagttacctttggtccatttggtggcacaaaacatcagggcacaacaactacaacaacttgtgctagcaaaccttgctgcatactctcagcaacatcagttacttccattcaaccaactggctgcattgaactctgctgcttatttgcaacaacaattaccattca

SEQ ID NO: 88193 - DNA, 415 bp, Zea mays
  unsure (1)..(415): unsure at all n locations
aattaccggctcgacccactcgtccgcgggcgcgtgggtgttcattcagaactattcctattcgaacgcactagcaacgacctggcaacaatggcttccaagacattatccctccttgcgcttcttgccctttttgtgagtgcaacaaatgcgttcattattccacaatgctcacttgctccgagtgccattattccacagttcctccctccagttacttcaatgggcttcgaacacccagctgtgcaagcctataggctacaacaagcgcttgcggcgagcgtcttagaacaaccaattgcccaattacaacaacaatccttggcacatctaaccatacaaaccatcgcaacgcagcagcaacaagcactgagccacctagccgtggtgaaccctatcgnctacttgcaacaac

SEQ ID NO: 88194 - DNA, 351 bp, Zea mays
tggcggttaagtagataatctggggtactgatgtctaccgaggaaagagtgaggaaaagaaaggaatccaatagagaatcagccagacgctcgagatacaggaaagccgctcacctgaaagaactggaagaccaggtagcacagctaaaagccgagaattcttgcctgctgaggcgcattgccgctctgaaccagaagtacaacgacgctaacgtcgacaacagggtgctgagagcggacatggagaccctaagagctaaggtgaagatgggagaggactctctgaagcgggtgatagagatgagctcatcagtgccgtcgtccatgcccatctcggcgccgacccccagc

SEQ ID NO: 88195 - DNA, 394 bp, Zea mays
atggagaccaactagcaacatagaatcttcattagtgtaccaacaatggcagccaaaatattttgcctccttatgctccttggtctttctgcaagtgctgctacggcgaccattttcccgcaatgctcgcaagctcctatagcttcccttcttcccccgtacctctcaccagcggtgtcttcggtatgtgaaaacccaattcttcaaccctacaggatccaacaggcaatcacagctggcatcttacctttatcacccttgttcctccaacaatcatcagccctattacatcagttacctttggtgcatttattggcacaaaacatcagggcacaacaactacaacaacttgtgctagcaaaccttgctgcctactcttagcaacagcagtttc

SEQ ID NO: 88196 - DNA, 355 bp, Zea mays
tcggttcggattacccgactcgccccacgcgtccggagaatgcaaactggtttcagggtactatatatgctgtaaggcagtacttgtggttgtttgaggagcataatgtgatggaatttctaattcttgctggcgatcacctgtaccggatggactatgaaaagttcattcaggcacacagagaaacaaatgctgatattaccgttgctgccctaccgatggatgagaaacgtgcaactgcatttggcctcatgaaaattgatgaagaagggaggatcattgagtttgctgagaaaccgaaaggagagcagttgaaagcaatgatggttgacaccaccatacttggccttgatga

SEQ ID NO: 88197 - DNA, 399 bp, Zea mays
cgacctcgctaatggttccctggttcgggcaacatcaattgttgctacttactgtaccagctctgactcagctagtggtggcaaaccctgctgcctacttgcaacagctgcttgcattcaaccaactgactatgtcgaactctgctgcgtacctacaacagcgacaacagttacttaatccactagcagtggctaacccattggtcgctgccttcctacagcagcaacaattgctgccatacaaccagttctctttgataaaccctgtcttgtcgaggcagcaacccatcgttggaggtgccatcttttagattacatatgagatgtactcgataatggtgccctcattccggcatgtgtttcctagaaataatcaatatattgattgagatttatctc

SEQ ID NO: 88198 - DNA, 415 bp, Zea mays
ggttcggaatacccgcctcgacccacgcgtgcgggggatcaaacaagtagcgactgtttgataaagatttgtgagagtgatccggcgctgagaagagatggctaagatcgccgcagccgccgcggcggcggcggcgctgtgcttcgcggccctggtggccgtggccgtctgccaaggcgaggtcgagcggcagaggctcagggacctgcagtgctggcaggaggtccaggagagcccgctcgacgcgtgccgccaggtcctcgaccggcagctaaccggcggcggcgtcggcggcccgttccggtggggcaccgggctccggatgcggtgctgccagcagctccaggacgtgagccgcgagtgccgctgcgccgccatccggagcatggtcaggggctacgaggaggccatgccg

SEQ ID NO: 88199 - DNA, 460 bp, Zea mays
ggaatacccggctcgacccacgcgtgcgccgactatcaacattgaaagctctttactgtaccaacaatggcagccaaaatattttgcctccttatgctccttggtatttctgcaagtgctgctacggcgaccattttcccgcaatgctcacaagctcctatagcttcccttcttcccccgtacctctcaccagcggtgtcttcggtatgtgaaaacccaattcttcaaccctacaggatccaacaggcaatcgcagctggcatcttacctttatcacccttgttcctccaacaatcatcagccctattacagcagttacctttggtgcatttattggcacaaaacatcagggcacaacaactacaacaacttgtgctagcaaaccttgctgcctactctcagcaacagcagtttcttccattcaaccaactagctgcattgaactctgcttcttatttgc

SEQ ID NO: 88200 - DNA, 410 bp, Zea mays
cgacccactctcatgtcacagcattacacaccaatactagcgctctagcaacgacctaacaccaatggctaccaagatattagccctccttgcgcttcttgcccttttagtgagcgcaacaaatgcgttcattattccacagtgctcacttgctcctagtgccattattccacagttcctcccaccagttacttcaatgggcttcgaacatccagccgtgcaagcctacaggctacaactagcgcttgcggcgagcgccttacaacaaccaattgcccaattgcaacaacaatccttggcacatctaaccctacaaaccattgcaacgcaacaacaacaacaacaacagtttctgccatcactgagccacctagccgtggtgaaccctgtcacctacttgcaacagcagc

SEQ ID NO: 88201 - DNA, 440 bp, Zea mays
  unsure (1)..(440): unsure at all n locations
cggctcgacccactcgtccgttgacgcttcgggtcttacaagcaactttgaaagttgaatccaggagcaacaacagaggaacagtggcgaccaagatatgcnccctccttatgctccttgctctttctgcatgtgttgctaacgcgacaattttccctcaatgctcacaagctcctatagcttcccttcttcccccataccttccatcaatgatagcttcagtatgtgaaaacccagctcttcagccctataggctccaacaagcaatcgcagcaagcaacatacctttatcacccttgttgtttcaacaatcgccagccctatctttggtgcagtcattggtacaaaccatcatggcacagcagctgcagcaactcgtgctacctgtgatcaaccaagtagctctggcaaacctttcttcctactctcagcaacaacaa

SEQ ID NO: 88202 - DNA, 445 bp, Zea mays
cggctcgacccactcgtccgatggagaccagctatcaacatagaattctcaaattgtaccaacaatggcagccaaaatattttgcctccttatgctccttggtctttctgcaagtgctgctacggcgaccattttcccgcaatactcgcaagctcctatagcttcccttcttcccccgtacctctcaccagcggtgtcttcggtatgtgaaaacccaattcttcaaccctacaggatccaacaggcaatcacagctggcatcttacctttatcacccttgttcctccaacaatcatcagccctattacatcagttacctttggtgcatttattggcacaaaacatcagggcacaacaactacaacaacttgtgctagcaaaccttgctgcctactctcagcaacagcagtttcttccattcaaccaactagctgcattgaactct

SEQ ID NO: 88203 - DNA, 456 bp, Zea mays
  unsure (1)..(456): unsure at all n locations
ccggctcgacccacgcgttcggagcaggtcccctctccttatcgtccatgncttcacagcagcagccatggcggccgagccggagaagcaggcggcccccgcggcacaagagacggccgtgcacatcgtgtacgttgaccgccccgaggacgccgaccctgaggagttccacatccgcaccctcacccccgtcctcggcagcgaacagaaggccagggacgcagtgctctaccactacaagaacgccgncagcggcttctccgcgaagctcaccccccagcaggtcaaggatctcaaggagcaaccaggtgttctccaggttgtgccgagccagacttaccagctacatggtcctgggtctggcactcaccagggcacgacacacaccttgggcctatgtgaaggcgtatgagaatcaggaggactgggtttagtatggctgtatggcacaggtct

SEQ ID NO: 88204 - DNA, 468 bp, Zea mays
  unsure (1)..(468): unsure at all n locations
cggtttcggaatacccggctcgacccacgcgtgcggtgcattcataaacatcacctagtanatgcactagcaacgacctaacaacaatggctgccaagacattatccctccttgcgcttcttgccctttttgtgagtgcaacaaatgcgttcattattccacaatgctcacttgctccgagtgccattattccacagttcctccctccagttacttcaatgggcttcgaacacccagctgtgcaagcctataggctacaacaagcgcttgcggcgagcgtcttagaacaaccaattgcccaattacaacaacaatccttggcacatctaaccatacaaaccatcgcaacgcagcagcaacaagcactgagccacctagccgtggtgaaccctatcgcctacttgcaacaacagctgcttgcatccaacccacttgctttggcaaacgtagctgcataccaacaacaac

SEQ ID NO: 88205 - DNA, 471 bp, Zea mays
actcggttcggaatacccggctcgacccacgcgtgcgttgagcattcagaatcacaccatgctaatcgcactagcaacgacctaacaacaatggctaccaagatattagccctccttgcgcttcttgccctttttgtgagcgcaacaaatgcgttcattattccacaatgctcacttgctcctagtgccattattccacagttcctcccaccagttacttcaatgggcttcgaacacctagctgtgcaagccaacatgcaacaacaagcgcttgcggcgagcgtcttacaacaaccaattgcccaattgcaacaacaatccttgccacatctaacaatacaagccatcacaacgcaacagcaacaacagttcctaccagcactgagccacctagccatggtgaaccctgccgcctacttgcaagagcagctgcttgcatccaacccacttgctctggcgaacgtagttgca

SEQ ID NO: 88206 - DNA, 437 bp, Zea mays
aggaagcacaatattgtaccattaaatgcagccaaaatattttgcctccttatgctcgttggtctttctgcaagtgctgctacggcgaccattttcccgcaatgctcgcaagctcctatagcttcccttcttcccccgtacctctcaccagcggtgtcttcggtatgtgaaaacccaattcttcaaccctacaggatccaacaggcaatcgcagctggcatcttacctttatcacccttgttcctccaacaatcatcagccctattacaacagttacctttggtgcatttattggcacaaaacatcagggcacaacaactacaacaacttgtgctagcaaaccttgctgcctactctcagcaacagcagtttcttccattcaaccaactaggttcattgaactctgcttcttaattgcaacaacaacaactaccatt

SEQ ID NO: 88207 - DNA, 506 bp, Zea mays
  unsure (1)..(506): unsure at all n locations
agagagtgtnaatgtcctattgacatagggggatgagttgttaacgctttcggattaccggctcgacccactcgtccgtggcattcaaccaacttgctttgacatcatcagctttgttctaccaacaacccatcattggtggtgccctcttttagatttcttatgagttatagttcaataataaagttttttatctgatgtttgtggcttcccagaaataagaaagtacatttctagaaaaaaaaaaaaaaagggcggccgctctagaggatccaagcttacgtacgcgtgcatgcgacgtcatagctcttctatagtgtcacctaaattcaattcactggccgtcgttttacaacgtcgtgactgggaaaaccctggcgttacccaacttaatcgccttgcagcacatccccctttcgccagctggcgtaatagcgaagaggcccgcaccgatcgccctttccaacagttgcgcagcctgaatggcgaatgggacgcgccctgta

SEQ ID NO: 88208 - DNA, 414 bp, Zea mays
cagaccattagctttatctactccatatctgcagtactaacccgatcgacaccatgagggtgttgctcgttgccctcgctctcctggctctcgctgcgagcgccacctccacgcatacaagcggcggctgcggctgccagccaccgccgccggttcatctaccgccgccggtgcatctgccacctccggttcacctgccacctccggtgcatctcccaccgccggtccacctgccgccgccggtccacctgccaccgccggtccatgtgccgccgccggttcatctgccgccgccaccatgccactaccctactcaaccgccccggcctcagcctcatccccagccacacccatgcccgtgccaacagccgcatccaagcccgtgccagctgcagggaacctgcggcgttggca

SEQ ID NO: 88209 - DNA, 356 bp, Zea mays
tcgacccacgcgttcgccgacgcgtccggccaaggtctgggattgctctaaggtcgtcatcatccccgaccactacatcttcaccagcgacgagcgcgccaaccgcaacgtcgatatcctcagggacttctgtctggagcagaacatcaagtacttctatgatatcaaggacctcagcgatttcagggctaatccagactacaagggtgtctgccacattgcacttgctcaggaaggccactgccgaccaggcgaagttctcctgggtactgattctcatacgtgcaatgctggagcctttggtcaatttgcaaccggaattggaaacactgatgcaagttttgtgatgggcactg

SEQ ID NO: 88210 - DNA, 466 bp, Zea mays
cggttcggaatactcgacccacgcgttcgaggattcgaaaacacaccatgcgaatttactttcaacgacctaacaccaatggctaccaagatattagccctccttgcgcttcttgcccttttagtgagcgcaacaaatgcgttcattattccacagtgctcacttgctcctagtgccagtattccacagttcctcccaccagttacttcaatgggcttcgaacatccagccgtgcaagcctacaggctacaactagcgcttgcggcgagcgccttacaacaaccaattgcccaattgcaacaacaatccttggcacatctaaccctacaaaccattgcaacgcaacaacaacaacaacagtttctgccatcactgagccacctagccgtggtgaaccctgtcacctacttgcaacagcagcttgtttgcatccaacccacttgctctggcgaacgtagctgcatac

SEQ ID NO: 88211 - DNA, 467 bp, Zea mays
  unsure (1)..(467): unsure at all n locations
accggtccggaatacccggctcgacccacgcgtgcggcgacatagaaagctcaatagtgtactctcaatggcagccaaaatattttgcctccttatgctccttggtctttctgcaagtgctgctacggcgaccattttcccgcaatgctcgcaagctcctatagcttcccttcttcccccgtacctctcaccagcggtgtcttcggtatgtgaaaacccaattcttcaaccctacaggatccaacaggcaatcacagctggcatcttacctttatcacccttgttcctccaacaatcatcagccctattacatcagttacctttggtgcatttattggcacanaacatcagggcacaacaactacaacaacttgtgctagcaaaccttgctgcctactctcagcaccagcagtttcttccattcaaccaactagctgcattgaactctgcnttctatttgcaacaac

SEQ ID NO: 88212 - DNA, 313 bp, Zea mays
caatagagcaacattggcgacgaagatattagccctccttatgctccttgctctttctacatgtgttgctaacgcgacaattgtccctcaatgctcacaagctcctatagctttcctacttcccccataccttccatcaattatagcttcagtatgtgaaaacccagctcttcaaccatataggcttcaacaagcaatcgcagcacgcaacatacctctatcgcccttgttgctacaacattcaccagccctatctcaggtgcagtcactggtacaaaccatccaggcactacagctgcagcagctagcgcta

SEQ ID NO: 88213 - DNA, 465 bp, Zea mays
  unsure (1)..(465): unsure at all n locations
ccggtccggaatacccggctcgacccacgcgtgcgacgaactagcaacatagaaagctcatcattgtaccaacaatggcagccaaaatatttggcttccttatgctccttggtctttctgcaagtgttgctaccgcaaccattttcccacaatgctcacaagctcctatagcttcccttcttcccccatacctctcaccagcggtgtcttcaatgtgtgaaaccccaattgttcaaccctacaggatccaacaggcaatcgcaacaggcatcttaccattatcacccttgttcctccaacaaccgtcagccctattacagcagttacctttggtccatttggtggcacaaaacatcagggcacaacaactacaacaacttgtgctaggcaaccttgctgcatactctcagcancatcagtttcttccattcaaccaactggctgcattgaactctgctgcttatt

SEQ ID NO: 88214 - DNA, 402 bp, Zea mays
ggaatacccggctcgacccacgcgtgcgagtgagaccaactatcaacatttaatcttcaatagtgtaccaacaatggcagccaagatattttgcttccttatgctccttggtctttctgcaagtgttgctaccgcaaccattttcccacaatgctcacaagctcctatagcttcccttcttcccccatacctctcaccagcggtgtcttcaatgtgtgaaaacccaattgttcaaccctacaggatccaacaggcaatcgcaacaggcatcttaccattatcacccttgttccttcaacaaccgtcagccctattacagcagttacctttggtccatttggtggcacaaaacatcagggcacaacaactacaacaacttgtgctagcaaaccttgctgcata

SEQ ID NO: 88215 - DNA, 454 bp, Zea mays
ccgcctcggaattcccggctcgacccactcgtccggagcaactagcaacatagaagcacactttgtctttacaatggcagccaaaatattgggcttccttatgctccttggtctttctgcaagtgctgctaccgcaaccattttcccacaatgctcacaagctcctatagcttcctttcttcccccatacctctcaccagcggtgtcttcagtatgtgaaaacccaattcttcaaccctacaggatccaacaggcaatcgcagcaggcatcttacctttatcacccttgttcctccaacaaccgtcagccctattacagcagttacctttggtgcatttgttggcacaaaacatcaaggcacaacaactacaacaacttgtgctaggaaaccttgctgcctactctcagcaacagcagtttcttccattcaaccaactggctgcattgaactct

SEQ ID NO: 88216 - DNA, 363 bp, Zea mays
  unsure (1)..(363): unsure at all n locations
gccaaaatattnngcctgcttatggtccttggtctttctgcaagtgctgctacggcgaccattttcccgcaatgctcgcaagctcctatagcttcccttcttcccccgtacctctcaccagcggtgtcttcggtatgtgaaaacccaattcttcaaccctacaggatccaacaggcaatcacagctggcatcttacctttatcacccttgttcctccaacaatcatcagccctattacatcagttacctttggtgcatttattggcacaaaacatcagggcacaacaactacaacaacttgtgctagcaaaccttgctgcctactctcagcaacagcagtttcttccattcaaccaactagct

SEQ ID NO: 88217 - DNA, 440 bp, Zea mays
ggattcccggctcgacccactcgtccgtcgaatccagatcatctaaagcggcagtctcttagagtggatcgtcgaacagaacagcatgaagatggtcatcgttctcgtcgtgtgcctggctctgtcagctgccagcgcctctgcaatgcagatgccctgcccctgcgcggggctgcagggcttgtacggcgctggcgccggcctgacgacgatgatgggcgccggcgggctgtacccctacgcggagtacctgaggcagccgcagtgcagcccgctggcggcggcgccctactacgccgggtgtgggcagacgagcgccatgtaccagccgctccggcaacagtgctgccagcagcagatgaggatgatggacgtgcagtccgtcgcgcagcagctgcagatgatgatgcagcttgagcgtgccgctgccgtcagcagca

SEQ ID NO: 88218 - DNA, 454 bp, Zea mays
accggtctcggacattaccgactcgtccgatggagaccagctattaacatataatcctcaattccttaccaacaatggcagccaagggattttggctacttatgctccttggtctttctgcaagtgctgctacggcgaccattttcccgcaatgctcgcaagctcctatagcttcccttcttcccccgtacctctcaccagcggtgtcttcggtatgtgaaaacccaattcttcaaccctacaggatccaacaggcaatcacagctggcatcttacctttatcacccttgttcctccaacaatcatcagccctattacatcagttacctttggtgcatttattggcacaaaacatcaaggcacaacaactacaacaacttgtgctagcaaaccttgctgcctactctcagcaacagcagtttcttccattcaaccaactagctgcattgaactc

SEQ ID NO: 88219 - DNA, 429 bp, Zea mays
ctcggaattaccggctcgacccactcgtccgtagtattgagaccatctagcaacatagtaagcactttagtgtaccaacaatggcagccaaaatatgttgcctccttatgctccttggtctttctgcaagtgctgctacggcgaccattttcccgcaatgctcgcaagctcctatagcttcccttcttcccccgtacctctcaccagcggtgtcttcggtatgtgaaaacccaattcttcaaccctacaggatccaacaggcaatcacagctggcatcttacctttatcacccttgttcctccaacaatcatcagccctattacatcagttacctttggtgcatttattggcacaaaacatcagggcacaacaactacaacaacttgtgctagcaaaccttgctgcctactctcagcaacagcagtttc

SEQ ID NO: 88220 - DNA, 402 bp, Zea mays
gcgtgggggttgatagactgcataggaggtcaatggcccatgccacacccataaagactgcaagagaatgtacaagcatcctgcaaaatcattaccctgagaggctggccattgcatttctgttgaatcccccaaaagtattcgaagccttttacagggctgtcaaatatttccttgacccaagatcgatcgagaaactgaacttcgtgtacctgaaggatgaggagagcatgaaggtcctgtacaagtgcattgatcccgtggtccttcctgtggagttcgggggaaagaacagtgttgtgtacaaccatgaggactactccaagttgatgctgcaagaagatatcgaaacatcaagcttctgggaggatgatgcgaaaactgttaaccatgctatcaatg

SEQ ID NO: 88221 - DNA, 435 bp, Zea mays
  unsure (1)..(435): unsure at all n locations
ctcggaatacccggctcgacccactcgtccgttgagaatcagcacctgcgaagcacactagcaacttcctaacaacaatggctaccaagatattatccctccttgcgcttcttgcgctttttgcgagcgcaacaaatgcgttcattattccacaatgctcacttgctccaagttccattattacacagttcctcccaccagttacttcaatgggcttcgaacacccagctgtgcaagcctataggctacaacaagcaattgcggcgagcgtcttacaacaaccaatttcccagttgcaacaacaatccttggcacatctaacaatacaaaccatcgcaacgcaacagcaacaacaattcctaccagcactgagccacctagccatggtgaaccctgccgnctacttgcaacagcagttgcttgcatcaaacccac

SEQ ID NO: 88222 - DNA, 423 bp, Zea mays
cagctcttcagccctatagtctccaatctgcaatcgcagcaagcaacatacctttatgacccttgttgtttcaacaatcgccagccctatctttggtgcagtcattggtacaaaccatcagggcacagcagctgcagcaactcgtgctacctgtgatcaaccaagtagctctggcaaacctttctccctactctcagcaacaacaatttcttccattcaaccaactgtctacactgaaccctgctgcttatttgcagcaacaactattaccattcagccagctagctactgcctactctcagcaacaacaacttcttccatttaaccaattggccgcactgaaccccgctgcttatttgcagcagcaaatactactaccatttagccagctagctgcagcaaaccgtgctttcttcttgacac

SEQ ID NO: 88223 - DNA, 416 bp, Zea mays
gagcaactagcaacatagattgcacaatattgtaccaataatggcagccaaaatattgtgcctcattatgctccttggtctttctgcaagtgctgctacggcgagcattttcccgcaatgctcacaagctcctatagcttcccttcttcccccatacctctcaccagcgatgtcttcagtatgtgaaaatccaattcttctaccctacaggatccaacaggcaatcgcagcaggcatcttacctttatcacccttgttcctccaacaatcatcagccctattacagcagttacctttggtgcatttattggcacaaaacatcagggcacaacaactacaacaactcgtgctagcaaaccttgctgcctactctcagcaacagcagttacctttggtgcatttgttggcacaaaaca

SEQ ID NO: 88224 - DNA, 437 bp, Zea mays
ccaactagcagcatataaggcacattagtgtacctctcttggcactcaaaatattttgcctccttatgctccttggtctttctgcaagtgctgctacggcgaccattttcccgcaatgctcgcaagctcctatagcttcccttcttcccccgtacctctcaccagcggtgtcttcggtatgtgaaaacccaattcttcaaccctacaggatccaacaggcaatcgcagctggcatcttacctttatcacccttgttcctccaacaatcatcagccctattacaacagttacctttggtgcatttattggcacaaaacatcagggcacaacaactacaacaacttgtgctagcaaaccttgctgcctactctcagcaacagcagtttcttccattcaaccaactaggttcattgaactctgcttcttatttgcaacaa

SEQ ID NO: 88225 - DNA, 392 bp, Zea mays
cagccctatctttggtgcagtcattggggcaaaccatcagggcacaacagctgcagcaactcgtgctacctctgatcaaccaagtagctctggcaaacctttctccctactctcagcaacaacaatttcttccattcaaccaactgtctacactgaaccctgctgcttatttgcagcaacaactattaccatttagccagctagctactgcctactctcagcatcaacaacttcttccatttaaccaattggccgcactgaaccccgctgcttatttgcagcagcaaatactactaccatttagccagctagctgcagcaaaccgtgcttccttcttgacacagcatcagttgctgcctttctaccagcagtttgcggctaaccccgcaacc

SEQ ID NO: 88226 - DNA, 438 bp, Zea mays
ccggctcgacccactggtcctccgcattgtcagtctctacagctctgacctttggtccatttggtggcacaaaacgatcagggcacaacaactacaacaacttgtgctagcaaaccttgctgcatactctcagcaacatcagtttcttccattcaaccaactggctgcattgaactctgctgcttatttgcaacaacaattaccattcagccagctagttgctgcctacccccagcaatttcttccattcaaccaactagcagcattgaactctgctgcttatttacagcagcaacaactactaccattcagccagctagctgatgtgagccctgctgccttcttgacacaacaacagttgttgccgttctacctgcacgctatgcctaacgctggcaccctcttacaactgcaacaattgctgccattcaaccaact

SEQ ID NO: 88227 - DNA, 438 bp, Zea mays
cagcaactacgacatcttgtgctagcatacctagttgcctactctcagcaacagcagtttcttccattcaaccaactagctgcattgaactctgcttcttatttgcaacaacaacaactaccattcagccagctatctgctgcctacccccagcaatttcttccattcaaccaactgacagcattgaactctcctgcttatttacagcagcaacaactactaccattcagccagctagctggtgtgagccctgctaccttcttgacacaaccacagttgttgccgttctaccagcacgctgcgcctaacgctggcaccctcttacaactgcaacaattgctgccattcaaccaacttgctttgacaaacccagcagcattctaccaacaacccatcattggtggtgccctcttttagaattcttatgagttataggtc

SEQ ID NO: 88228 - DNA, 409 bp, Zea mays
cggcggagaagtgcaaggaagcgggcggccgccattgtgaagggacgtacgggatagcgcgtcaggctctacgtccggggcaccatcctcggatacaagaggtccaagtcgaaccagtacgagaccacgtcgctcgttcagatcgagggggtgaacaccaaggaggacgtcgcgtggtacgctggcaagcgcatggcgtacatctacaaggctaagaccaagagcagcgagacccgctacaggtgcatctggggcaaggtcacccgcccgcacggcaactcgggcgtcgtccgcgccaagttcaagtccaaccttccgcctgagtccatggggcgcaaggtcagagtgttcatgtacccgagcagcatctaaggttaggtttttggtggagtaaaggtggactctaaat

SEQ ID NO: 88229 - DNA, 400 bp, Zea mays
cggctcgacccactcgtccggcgacatatagagctcaatagtgtacctacaatgttagccaaaatattttgcttcctgatgctccttggtctttctgcaagtgttgctaccgcaaccattttcccacaatgctcacaagctcctatagcttcccttcttcccccatacctctcaccagcggtgtcttcaatgtgtgaaaccccaattgttcaaccctacaggatccaacaggcaatcgcaacaggcatcttaccattatcacccttgttcctccaacaaccgtcagccctattacagcagttacctttggtccatttggtggcacaaaacatcagggcacaacaactacaacaacttgtgctagcaaaccttgctgcatactctcagcaacatcagtttc

SEQ ID NO: 88230 - DNA, 279 bp, Zea mays
attgcaccaagaaatccatcgagaggctgccgactggggaattaatggcgtcgtcgtgtagcaggagccaccgccgcctcatcctcgcagccgccgtcctgctctccgtgctcgcggctgccagcgccagcgccgggacctcctgcgtgccggggtgggccatcccgcacaacccgctcccgagctgccgctggtacgtgaccagccggacctgcggcatcgggccgcgccttccgtggccggagctgaagaggagatgccggcgggagctggcggaca

SEQ ID NO: 88231 - DNA, 434 bp, Zea mays
ctggcattttacctttatttttctagctcctccaacaatcatcagccctattacatcagttacctttggtgcatttattggcacaaaacatcagggcacaacaactacaacaacttgtgctagcaaaccttgctgcctactctcagcaacagcagtttcttccattcaaccaactagctgcattgaactctgcttcttatttgcaacaacaacaactaccattcagccagctacctgctgcctacccccagcaatttcttccattcaaccaactggcagcattgaactctcctgcttatttacagcagcaacaactactaccattcagccagctagctggtgtgagccctgctaccttcttgatacaaccacagttgttgccgttctaccagcacgctgcgcctaacgctggcaccctcttacaactgcaacaa

SEQ ID NO: 88232 - DNA, 410 bp, Zea mays
ccgacgcttccgactacatttacaactttttgtgctagcaaaccttgctgcatactctgagcaacatcagtttcttccattcaaccaactggctgcattgaactctgctgcttatttgcaacaacaattaccattcagccagctagttgctgcctacccccagcaatttcttccattcaaccaactagcagcattgaactctgctgcttatttacagcagcaacaactactaccattcagccagctagctgatgtgagccctgctgccttcttgacacaacaacagttgttgccgttctacctgcacgctatgcctaacgctggcaccctcttacaactgcaacaattgctgccattcaaccaacttgctttgacaaacccaacagtgttctaccaacaacccatcattg

SEQ ID NO: 88233 - DNA, 442 bp, Zea mays
atggagaccaacatgcaacttagaaactggaatccagtagcaacaacagagcaacaatggcgaccaagatattttccctccttatgctccttgctctttctgcatgtgttgctaacgcgacaattttccctcaatgctcacaagctcctatagcttcccttcttcccccataccttccatcaatgatagcttcagtatgtgaaaacccagctcttcagccctataggctccaacaagcaatcgcagcaagcaacatacctttatcacccttgttgtttcaacaatcgccagccctatctttggtgcagtcattggtacaaaccatcagggcacagcagctgcagcaactcgtgctacctgtgatcaaccaagtagctctggcaaacctttctccctactctcagcaacaacaatttcttccattcaaccaactgtctacact

SEQ ID NO: 88234 - DNA, 415 bp, Zea mays
tgggacctacaagctcattttaagttttatccagtagcaacaacagagcaacaatggcgaccaagatattttccctccttatgctccttgctctttctgcatgtgttgctaacgcgacaattttccctcaatgctcacaagctcctatagcttcccttcttcccccataccttccatcaatgatagcttcagtatgtgaaaacccagctcttcagccctataggctccaacaagcaatcgcagcaagcaacatacctttatcacccttgttgtttcaacaatcgccagccctatctttggtgcagtcattggtacaaaccatcagggcacagcagctgcagcaactcgtgctacctgtgatcaaccaagtagctctggcaaacctttctccctactctcagcaacaacaatttct

SEQ ID NO: 88235 - DNA, 414 bp, Zea mays
gaatatccggctcgacccactcgtccggagggtgctgatcgttgcccttgcttcattggcgtccgctgcgagcgccgcctccagtgcaagcggcggctgtggctgccagacaccaccgtttcatctaccgcctccgttctatatgccgcctccgttctatctgccgccgcagcagcagccgcagccatggcaataccccactcaaccaccgcagctaagcccgtgccagcagttcggatcctgcggcgtcggcagcgtcggcagcccgttcctgggccagtgcgtcgagttcctgaggcaccagtgcagcccggcggcgacgccctacggctcgccacagtgccaggcgctgcagcagcagtgctgccaccagatcaggcaggtggagccgctgcaccggtaccaggcgacata

SEQ ID NO: 88236 - DNA, 402 bp, Zea mays
aattcccggctcgacccactcgtccgatggagaccaacattcaacatagaaagtaggaactagtagcaacaacagagcaacaatggcgaccaagatattttccctccttatgctccttgctctttctgcatgtgttgctaacgcgacaattttccctcaatgctcacaagctcctatagcttcccttcttcccccataccttccatcaatgatagcttcagtatgtgaaaacccagctcttcagccctataggctccaacaagcaatcgcagcaagcaacatacctttatcacccttgttgtttcaacaatcgccagccctatctttggtgcagtcattggtacaaaccatcagggcacagcagctgcagcaactcgtgctacctgtgatcaaccaagtagc

SEQ ID NO: 88237 - DNA, 355 bp, Zea mays
atggagtccaactatcaactcagaaactacaatagtgtaccaacaatggcagccaaagtattttgcctccttatgctccttggtctttctgcaagtgctgctacggcgaccattttcccacaatgctcacaagctcctatagcttcccttcttcccccgtacctttcaccagcggtgtcttcggtatgtgaaaacccaattcttcaaccctataggatccaacaggcaatcgcagctggcatcttacctttatcacccttgttccttcaacaatcatcagccctattacagcagttacctttggtgcatttattggcacaaaacatcagggcacaacaactacaacaacttgtgc

SEQ ID NO: 88238 - DNA, 424 bp, Zea mays
ggcaactacagcgatggcttcctagttctcactctgctcgcacacaagttgggagtgactcagtgtaccatcgctcatgccttggagaaaaccaaataccccaactcggacatctacttggacaagttcgacagccagtaccacttctcttgccagttcacagctgaccttattgccatgaaccacactgatttcatcatcaccagcacattccaagaaatcgcgggaagcaaggacaccgtggggcagtacgagtcccacatcgcgttcactcttcctgggctctaccgtgtcgtccatggcatcgatgttttcgatcccaagttcaacattgtctcccctggagcagacatgagtgtttactacccgtatacggaaaccgacaagagactcactgcctttcatcctgaaatcgaggagctca

SEQ ID NO: 88239 - DNA, 423 bp, Zea mays
accggttcggaattcccgggcttctcctcctcgcctcgtctccctagccttcacttctcaagctagagtgacggaaagcgactcggcgcgagcgaggagggccaaggggaagaggggaagcaccgcaccaggacccttgttcgccgccgccgcctctgatctccgcgaggttgtcaggattcaatatgtcgaccagcacattcgctacttcctgcacgctgttgggcaatgttagaacaacgcaggcctcccagacagcggtgaagagcccttcgtctctaagcttcttcagccaagttacgaaggttccaagcctgaagacctccaagaaactggatgtctccgccatggctgtatacaaggtgaagcttgtcgggcctgaaggtgaagagcacgagtttgatgctccagacgacgcctaca

SEQ ID NO: 88240 - DNA, 416 bp, Zea mays
tggaactgaacctgaatctttttcatactaatttttgcatgagatgcgcataaaggcgtcagcgaagctaactttgttgcactctatgctaaaaatattacacaaggaaggccaccgtgtccttatattctctcagatgacaaaacttcttgacatccttgaagattatctgactttagaatttggccctaaaacatttgaaagagttgatggctcagtatctgtggcagagcgccaagcggcgattgctcgctttaatcaggataagacacgttttggtttcttgctgtctacacgatcatgtggacttggtattaatttggcaacttgcggatactggtatcatatatgattcagatttcaacccacatgctgatatacaggcgatgaacagggcacacagaattggacaatcg

SEQ ID NO: 88241 - DNA, 413 bp, Zea mays
cagcaactgttgcatcagttacttgactgggtatgcagctacgtttgccaaagcaagtgggttggatgcaagcagctgttgttgcaggtaggcgatagggctcaccgaaggtaggtgggtcattacatgctgttacatcacagagatggttggcatggttagatatgatatggattgagaatgtgacagtaaataatttgaatgagtcgatggctcatgatctacggtatagcgcaagtccgtgatcggtcgcttcaatcatgataagacacgttttgtttcgttgctgtctacacgatcatgcggacttggtattaatttcacaactgcaaatactgtgatcatatatgatatagattataacccacatgctgatatacaggcgatgaacaaggcacacaaaattggacaat

SEQ ID NO: 88242 - DNA, 414 bp, Zea mays
tggaatcacaccagtcgtctgcacttctaatcacctaacaacaatggctaccaagatattatccctccttgcgcttcttgcgctttttgcgagcgcaacaaatgcgtccattattccacaatgctcacttgctcctagttccattattccacagctcctaccaccagatacttcaatggccttcgaacacccagctgtgcaagcctataggctacaacaagcgattgcggcgagcgtcttacaacatccaattgcccaattgcaacaacaatacttggcacatataacaatacaaaccatcgcaacgcaacagctacaacagttactaccagcactgagccacctagccatggtgaaccctgtcgcctacttgcaacagcagctgcttgcatccaacccacttgctctagcaaa

SEQ ID NO: 88243 - DNA, 427 bp, Zea mays
cggctcgacccactcgtccgtcgacgcgtgcgcctactagcaacatataaagcataatagtgtaccaacaatggcagctaaaatattttgcctccttatgctccttggtctttctgcaagtgctgctacggcgaccattttcccacaatgctcacaagctcctatagcttcccttcttcccccgtacctctcaccaacggtgtcttcggtatgtgaaaacccaattcttcaaccctacaggatccaacaggcaatcgcagctggcatcttacctttatcacccttgttcctccaacaatcatcagccctattacagcagttacctttggtgcatttattggcacaaaacatcaaggcacaacaactacaacaacttgtgctagcaaaccttgctgcctactctcagcaacagcagtttcttccattc

SEQ ID NO: 88244 - DNA, 403 bp, Zea mays
agcttcccttcttcccccgtgcctctcggcagcggtgtcttcggtatgtgaaaacccaattcttcaaccctataggatccaacaggcaatcgcagctggcatcttacctttatcacccttgttcctccaacaatcatcagccctattacagcagttacctttggtgcatttattggcacaaaacatcagggcacaacaactacaacaacttgtgctagcaaaccttgctgcctactctcagcaacaacagtttcttccattcaaccaactagctgcattgaactctgcttcttatttgcaacaacaacccatcattggtggtgccctcttttagatttcttatgagttatagttcaataataaagctttttgtctgatgtttgtggcttcccagaaataagaa

SEQ ID NO: 88245 - DNA, 407 bp, Zea mays
cactccaatcgaagggcactagcaacttacctttcacgctttggctaccaagatattagccctccttgcgcgtcttgcccttttagtgagcgcaacaaatgcgttcattattccacagtgctcacttgctcctagtgccagtattccacagttcctcccaccagttacttcaatgggcttcgaacatccagccgtgcaagcctacaggctacaactagcgcttgcggcgagcgccttacaacaaccaattgcccaattgcaacaacaatccttggcacatctaaccctacaaaccattgcaacgcatcaactacaacaacagtttctgccatcactgagccacctagccgtggtgaaccctgtcacctacttgcaacagcagctgcttgcatccaacccacttgctc

SEQ ID NO: 88246 - DNA, 445 bp, Zea mays
atggagtccaactagtcactagaactccaatagtgtaccaacaatggcagccaaaatattttgcctccttatgctccttggtctttctgcaagtgctgctacggcgaccattttcccgcaatgctcgcaagctcctatagcttcccttcttcccccgtacctctcaccagcggtgtcttcggtatgtgaaaacccaattcttcaaccctacaggatccaacaggcaatcacagctggcatcttacctttatcacccttgttcctccaacaatcatcagccctattacatcagttacctttggtgcatttattggcacaaaacatcagggcacaacaactacaacaacttgtgctagcaaaccttgctgcctactctcagcaacagcagtttcttccattcaaccaactagctgcattgaactctgcttcttatttgcaacaacaa

SEQ ID NO: 88247 - DNA, 435 bp, Zea mays
ggccattagctttatctactccagagctcagaagaacccgatcgacaccatgagggtgttgctcgttgccctcgctctcctggctctcgctgcgagcgccacctccacgcatacaagcggcggctgcggctgccagccaccgccgccggttcatctaccgccgccggtgcatctgccacctccggttcacctgccacctccggtgcatctcccaccgccggtccacctgccgccgccggtccacctgccaccgccggtccatgtgccgccgccggttcatctgccgccgtcaccatgccactaccctactcaaccgccccggcctcagcctcatccccagccacacccatgcccgtgccaacagccgcatccaagcccgtgccagctgcagggaacctgcggcgttggcagcaccccgatcctgggccagtgcgt

SEQ ID NO: 88248 - DNA, 387 bp, Zea mays
cggtcggcttccggctcgcccacgcgtccggcgcgattagttcctaacctttaggttctcgagccgcccaagatcccgatccccactgcgctggttgccggagctctagccggattcgcctcaaccttgtgcacctaccccatggagctgatcaagaccagggtcaccatcgagaaggacgtatacgacaacgtcgcgcacgcgttcgtgaagatcctacgcgacgagggcccgtcggagctgtaccgtgggctgacacccagcctgatcggcgtggtgccgtacgcggcctgtaacttctacgcctacgagacgctgaagcggctctaccgtcgcgcgaccgggcggcgtcccggcgcggacgtgggccccgtggcgacgctgctc

SEQ ID NO: 88249 - DNA, 417 bp, Zea mays
aagcatctcaacacatcatcttcaacttctcctaccagcactgagccaactagatgtggtgaaccctgtcgcctacttgcaacagcaggtgcttgcatccaacccacttgctctggcaaacgtagctgcataccaacaacaacaacaattgcaacagtttctgccagcgctcagtcaactagccatggtgaaccctgccgcctacctacaacagcaacaactgctttcatctagccctctcgttgtgggtaatgcacctacatacctgcaacaacaattgctgcaacagattgtaccagctctgactcagctagctgtggcaaaccctgctgcctacttgcaacagctgcttccattcaaccaactgactgtgtcgaactctgctgcgtacctacaacagcgacaacagttacttaa

SEQ ID NO: 88250 - DNA, 398 bp, Zea mays
acggcgtccattttcccgtatgctttctagctcctatagcttcccttcttcccccgtacctctcaccagcggtgtcttcggtatgtgaaaacccaattcttcaaccctacaggatccaacaggcaatcacagctggcatcttacctttatcacccttgttcctccaacaatcatcagccctattacatcagttacctttggtgcatttattggcacaaaacatcagggcacaacaactacaacaacttgtgctagcaaaccttgctgcctactctcagcaacagcagtttcttccattcaaccaactagctgcattgaactctgcttcttatttgcaacaacaacaactaccattcagccagctacctgctgcctacccccagcaatttcttccattc

SEQ ID NO: 88251 - DNA, 386 bp, Zea mays
gtgagcctagcaattagctcatcgacttcagatttgagaactcgacaccatgaaggtgctgatcgttgcccttgctctcctggcgctcgctgcgagcgccgcctccagtacaagcggcggctgtggctgccagacaccaccgtttcatctaccgcctccgttctatatgccgcctccgttctatctgccgccgcagcagcagccgcagccatggcaataccccactcaaccaccgcagctaagcccgtgccagcagttcggatcctgcggcgtcggcagcgtcggcagcccgttcctgggccagtgcgtcgagttcctgaggcaccagtgcagcccggcggcgacgccctacggctcgccacagtgccaggcgctgcagcagcagt

SEQ ID NO: 88252 - DNA, 409 bp, Zea mays
ctgtaggaagcaaggtacaccaccgccatggcagttagatgcttgcattgttcgctctcctagctctttgtgcaagcgccactagtgcgacccatattccagggcacttgccaccagtcatgccattgggtaccatgaacccatgcatgcagtactgcatgatgcaacaggggcttgccagcttgatggcgtgtccgtccctgatgctgcagcaactgttggccttaccgcttcagacgatgccagtgatgatgccacagatgatgacgcctaacatgatgtcaccattgatgatgccgagcatgatgtcaccaatggtcttgccgagcatgatgtcgcaaatgatgatgccacaatgtcactgcgacgccgtctcgcagattatgctgcaacagcagttaccattcat

SEQ ID NO: 88253 - DNA, 360 bp, Zea mays
ccggcgcgacccactcgtccgtcgaaagtcggccattccatctcgactactggggtagtatcgctctcgcccgcgtcggcttcctagggatcgaggaacgtccgtccgttcgtccggggaaggagcacgagggaggcggagatgatcgaggtggtgctcaacgaccgcctggggaagaaggtgcgggtcaagtgcaacgaggacgacaccatcggcgacctcaagaagctggtggcggcgcagacggggacgcgccccgagaagatccgcatccagaagtggtacaacatctacaaggaccacatcaccctcaaggactacgaggtccacgacggcatgggcctcgagctctactacaac

SEQ ID NO: 88254 - DNA, 458 bp, Zea mays
  unsure (1)..(458): unsure at all n locations
gaatacccggctcgaccctcgcgtcctaggaagtttaatccttnagtttcaacctagcaacacatggcgaccaagatactttcccgccttatgctccttgctctttctgcatgtgttgctaacgcgacaattttccctcaatgctcacaagctcctatagcttcccttcttcccccataccttccatcaatgatagcttcagtatgtgaaaacccagctcttcaaccctataggctccaacaagcaatcgcagcaagcaacatacctttatcacccttgtttcaacaatcgccagccctatctttggtgcagtcattggtacaaaccatcaaggcacagcagctgcagcaactcgtgctacctgtgatcaaccaagtagctctggcaaacctttctccctactatcagcaacaacaatttcttccattcaaccaactatctacactgaaccctgctgc

SEQ ID NO: 88255 - DNA, 471 bp, Zea mays
taccggtcggaaaaccggctcgaccctcgcgtccgagacagtcggctgcagctgtggtcaataacaaagccatgagcagcaacatgatccacggcaacatcatccacaaaaacaacaacatcaaccaccaccacaacatcaccagcagcagcaacaccaacaacaacaagttcacatgcaaccacaaaaacatcagcaacaacaagaagttcatgttcaacaacaacaacaacaaccgcagcaccaccaccaacaacaacaacaacagcaccaacaacaacatcaatgtgaaggccaacaacaacatcaccaacaatcacaaggccatgtgcaacaacacgaacagagccatgagcaacaccaaggacagagccatgagcaacaacatcaacaacaattccagggtcatgacaagcagcaacaaccacaacagcctcagcaatatcagcagggccagggaaaatcacaaca

SEQ ID NO: 88256 - DNA, 243 bp, Zea mays
  unsure (1)..(243): unsure at all n locations
tcagacattatagatttaggtttccaatgcaacaacagagcaacaanggcgaccaaggganaatcccaccggaagccccacgctccatcggcacgcgacgccaacgcgacaagagccccncaaggcccacaagcnccaaaagcnacccgncacaccccaaaccngccaacaacgacacgcgcaggacgngaaaacccagcnccncagcccaacaggcgccaacacgcaancgcagcaagcaac

SEQ ID NO: 88257 - DNA, 406 bp, Zea mays
cgggacgtcagcctagcatttagcttattgactccagattggagaactcgacaccatgaaggtgctgatcgttgcccttgctctcctggcgctcgctgcgagcgccgcctccagtacaagcggcggctgtggctgccagacaccaccgtttcatctaccgcctccgttctatatgccgcctccgttctatctgccgccgcagcagcagccgcagccatggcaataccccactcaaccaccgcagctaagcccgtgccagcagttcggatcctgcggcgtcggcagcgtcggcagcccgttcctgggccagtgcgtcgagttcctgaggcaccagtgcagcccggcggcgacgccctacggctcgccacagtgccaggcgctgcagcagcagtgctgccaccagatc

SEQ ID NO: 88258 - DNA, 456 bp, Zea mays
ccggtttcggatacccggctcgacccactcgtccgcggtctctctagccttcgatgatagtcttaccggcgccactcaacgccaggtcttcgtgaaaaccatcgccggcgatgagtttcaaccagtctactgtcaaggggcaggccaggagggagaggcctagggctcgccctcatggcctgacgcagcagaggaggcaggaaataaaggaagcctttgatctgtttgatacagataactctggaaccattgatgcaaaagagctcaatgttgccatgagagccttgggatttgagatgactgaagagcaaattaggcaaatgattgctgatgttgacaaagatggcagtggagcgatcgactacgaggagtttgagcacatgatgactgccaaaatcggagagagggatagtaaagaggagctttcaaaagcattccgcattattgatcaagatg

SEQ ID NO: 88259 - DNA, 421 bp, Zea mays
  unsure (1)..(421): unsure at all n locations
ggcctattacatcagtnatctttggttcttttattggcacaaaacatcagggcacagcaactacaacaacttgtgctagcaaaccttgctgcctactctcagcaacagcagtttcttccattcaaccaactagctgcattgaactctgcttcttatttgcaacaacaacaactaccattcagccagctacctgctgcctacccccagcaatttcttccattcaaccaactggcagcattgaactctcctgcttatttacagcagcaacaactactaccattcagccagctagctggtgtgagccctgctaccttcttgatacaaccacagttgttgccgttctaccagcacgctgcgcctaacgctggcaccctcttacaactgcaacaattgctgccattcaaccaacttgctttgacaa

SEQ ID NO: 88260 - DNA, 448 bp, Zea mays
accggtttcggattacggctcgacccactcgtccggcgcactttagctcacttctcttatggagaactcgacaccatgaaggtgctgatcgttgcccttgctctcctggcgctcgctgcgagcgccgcctccagtacaagcggcggctgtggctgccagacaccaccgtttcatctaccgcctccgttctatatgccgcctccgttctatctgccgccgcagcagcagccgcagccatggcaataccccactcaaccaccgcagctaagcccgtgccagcagttcggatcctgcggcgtcggcagcgtcggcagcccgttcctgggccagtgcgtcgagttcctgaggcaccagtgcagcccggcggcgacgccctacggctcgccacagtgccaggcgctgcagcagcagtgctgccaccagatcaggcaggtggagccgctgcacc

SEQ ID NO: 88261 - DNA, 420 bp, Zea mays
tgcactttccgcatcacttcagctcttacaacaacatcaatgtgaaggccaacagcaacatcaccaacaatcacaaggccatgtgcaacaacacgaacagagccatgagcaacaccaaggacagagccatgagcaacaacatcaacaacaattccagggtcatgacaagcagcaacaaccacaacagcctcagcaatatcagcagggccaggaaaaatcacaacagcaacaatgtcattgccaggagcagcaacagactacaaggtgcagctataactactatagcaagagctcaaatctaaaaaattgtcatgaattcctaaagcagcagtgcagccctttggtaatgccttttctccaatcacgtttgatacaaccaagtagctgccaggtattgcagcaacaatgttgtcatgatct

SEQ ID NO: 88262 - DNA, 437 bp, Zea mays
  unsure (1)..(437): unsure at all n locations
cggaattaccggccccagctgtgcaagcctagangctacgaacatgcgcttgcgggtgcgtcttagaacaaccaattgcccaattacgaacaacgatccttggcacatctaaccatacaaaccatcgcaacgcagcagcaacaagcactgagccacctagccgtggtgaaccctatcgcctacttgcaacaacagctgcttgcatccaacccacttgctttggcaaacgtagctgcataccaacaacaacaacagttgcaacagtttctaccagcgctcagtcaactagccatggtgaaccctatcgcctacctacaacagcaacaacttctttcatctagcccgctcgctatgggcaatgcacctacatacctgcaacaacagttgttgcaacaacagttgctgcaacaaattgtaccagctcttactcagctagc

SEQ ID NO: 88263 - DNA, 423 bp, Zea mays
tccgttgcaacgcatctacaacatcaatttcagtttctgccatcactgagccacctagccgtggtgaaccctgtcacctacttgcaacagcagctgcttgcatccaacccacttgctctggcgaacgtagctgcataccagcaacaacaacagctgcaacagtttatgccagtgctcagtcaactagccatggtgaaccctgccgtctacctacaactactttcatctagcccgctcgcggtgggcaatgcacctacgtacctacaacaacagttgctgcaacaaattgtaccagctctgactcagctagctgtggcaaaccctgctgcctacttacaacagttgcttccattcaaccaactggctgtgtcaaactctgctgcgtacctacaacagcgacaacagttacttaatccattggca

SEQ ID NO: 88264 - DNA, 400 bp, Zea mays
tcgacgcgtgcgcataccattagctagtgctacctcagagcgcagaagaacccgatcgacaccatgagggtgttgctcgttgccctcgctctcctggctctcgctgcgagcgccaccttcacgcatacaagcggcggctgcggctgccagccaccgccgtcggttcatctaccgtcgccggtgcatctgccacctccggttcacctgccacctccggtgcatcttccaccgccggtccacctgccgccgccggtccacctgccaccgccggtccatgtgccgacgccggttcatctgccgtcgtcaccatgccactaccctactcaaccgccccggcctcagcctcatccccagccacacccatgcccgtgccaacagccgcatccaagcccgtgccagc

SEQ ID NO: 88265 - DNA, 437 bp, Zea mays
cagctagcaacatataaagttacaatactgtaccaacaatggcagccaaaatattttgcttccttatgctccttggtctttctgcaagtgttgctaccgcaaccattttcccacaatgctcacaagctcctatagcttcccttcttcccccatacctctcaccagcggtgtcttcaatgtgtgaaaccccaattgttcaaccctacaggatccaacaggcaatcgcaacaggcatcttaccattatcacccttgttcctccaacaaccgtcagccctattacagcagttacctttggtccatttggtggcacaaaacatcagggcacaacaactacaacaacttgtgctagcaaaccttgctgcatactctcagcaacatcagtttcttccattcaaccaactggctgcattgaactctgctgcttatttgcaacaa

SEQ ID NO: 88266 - DNA, 458 bp, Zea mays
cggctcgaccctcgcgtccgtggcaacttagaaagcacatcagagatcaacaatggcagccaaaatatggggcctcgttatgctccttggtctttctgcaagtgctgctacggcgaccattttcccgcaatgctcgcaagctcctatagcttcccttcttcccccgtacctctcaccagcggtgtcttcggtatgtgaaaacccaattcttcaaccctacaggatccaacaggcaatcacagctggcatcttacctttatcacccttgttcctccaacaatcatcagccctattacatcagttacctttggtgcatttattggcacaaaacatcagggcacaacaactacaacaacttgtgctagcaaaccttgctgcctactctcagcaacagcagtttcttccattcaaccaactagctgcattgaactctgcttcttatttgcaacaacaacaac

SEQ ID NO: 88267 - DNA, 418 bp, Zea mays
cagctatcaacatataatgtcttaattttttaccaacaatggcagccaaaatattttgcttccttatgctccttggtctttctgcaagtgttgctaccgcaaccattttcccacaatgctcacaagctcctatagcttcccttcttcccccatacctctcaccagcggtgtcttcaatgtgtgaaaacccaattgttcaaccctacaggatccaacaggcaatcgcaacaggcatcttaccattatcacccttgttcctccaacaaccgtcagccctattacagcagttacctttggtccatttggtggcacaaaacatcagggcacaacaactacaacaacttgtgctagcaaaccttgcttgatactctcagcaacatcagtttcttacattcaaccaactggctgcattgaactc

SEQ ID NO: 88268 - DNA, 420 bp, Zea mays
gggcgtctgcctagcaattttctcattctctccagattggagaactcgacaccatgaaggtgctgatcgttgcccttgctctcctggcgctcgctgcgagcgccgcctccagtacaagcggcggctgtggctgccagacaccaccgtttcatctaccgcctccgttctatatgccgcctccgttctatctgccgccgcagcagcagccgcagccatggcaataccccactcaaccaccgcagctaagcccgtgccagcagttcggatcctgcggcgtcggcagcgtcggcagcccgttcctgggccagtgcgtcgagttcctgaggcaccagtgcagcccggcggcgacgccctacggctcgccacagtgccaggcgctgcagcagcagtgctgccaccagatcaggcaggtggagccgc

SEQ ID NO: 88269 - DNA, 364 bp, Zea mays
aattgcttcaacagatagtatcagctctctactcagctagctgtggcaaaccctgctgcctacttgcaacagctgcttccattcaaccaactgactgtgtcgaactctgctgcgtacctacaacagcgacaacagttacttaatccactagcagtgcctaacccattggtcactgccttcctacagcagcaacaattgctaccatacagccagttctctttgatgaaccctgccttgtcgtggcagcaacccatcgttggaggtgccatcttttagattacatatgagatgtaatcgataatggtgccctcataccggcatgtgtttcctagaaataatcaatatattgattgacatttatctc

SEQ ID NO: 88270 - DNA, 133 bp, Zea mays
cggctcgacccactcgtccgcagcaacccatcatttgcggtgccctgttttagatcgcttatgagttatagttcaatgatgaagttttttggatgatgtttgtggcttcccagaaataagaaagtacatttct

SEQ ID NO: 88271 - DNA, 406 bp, Zea mays
  unsure (1)..(406): unsure at all n locations
ccggctcgacccactcgtccgctgtatcacccctgttctttcaacaagtcccagctttatctttggtgcagtcattggtgcaaaccatcagggcacaacagctgcaacaactcgtgctaccagtgatcagccaagtagctctggcaaacctttctccctactctcagcaacaacaatttcttccattcaaccaactgtctacactgaaccctgctgcttatttacaacaacaacaactactaccattcagccagctagctactgcctactctcagcagcaacaatttcttccatttaaccaattggccgcactgaacccctctgcttatttccagcagcaaatactactaccatttggccagctagctacaacaagccccacttnctttttgaaacaacaacaatt

SEQ ID NO: 88272 - DNA, 393 bp, Zea mays
atgttgatcagtcataaacacaccaatctaagcttcctagcaacgacttaacaacaatggctaccaagatattagccctccttgcgcttcttgccctttttgtgagcgcaacaaatgcgttcattattccacaatgctcacttgctcctagtgccattataccacagttcctccgaccagttacttcaatgggcttcgaacacctagctgtgcaagcctacaagctacaacaagcgcttgcggcgagcgtcttacaacaaccaattaaccaattgcaacaacaatccttggcacatctaaccatacaaaccatcgcaacacaacagcaacaacagttcctaccagcactgagccaactagatgtggtgaaccctgtcgcctacttgcaacagc

SEQ ID NO: 88273 - DNA, 424 bp, Zea mays
aggccattagctttatctactccagtcttcagaagaacccgatcgacaccatgagggtgttgctcgttgccctcgctctcctggctctcgctgcgagcgccacctccacgcatacaagcggcggctgcggctgccagccaccgccgccggttcatctaccgccgccggtgcatctgccacctccggttcacctgccacctccggtgcatctcccaccgccggtccacctgccgccgccggtccacctgccaccgccggtccatgtgccgccgccggttcatctgccgccgccaccatgccactaccctactcaaccgccccggcctcagcctcatccccagccacacccatgcccgtgccaacagccgcatccaagcccgtgccagctgcagggaacctgcggcgttggcagcaccccgatcct

SEQ ID NO: 88274 - DNA, 392 bp, Zea mays
cgaagatctctgaaaatgtttgagttcctcatctgatcacaccccaggaagcctgcaaccgcatagcagaggtagtccaagaggccgtgagaaagatggagctcgtggcagaagaaaagatgcgactttacaagaaggctcgcctcgccgtggaggcctgcgaccgagagctggaggagaaggttagggaagcccaggagctgaaggcagagcgtcagcgcaagaagcagcaggtggaggagctggagagcatcgtgcggttgaagcaggcggaagcggagatgttccagctgaaggcgaacgatgcccggcaggaggcggagcgtctgcagagcattgcgctcaccaagtccaagacagccgagcaggactatgccagcatgtacctaaag

SEQ ID NO: 88275 - DNA, 419 bp, Zea mays
atggctcgcatcgcgattctcgcggcggcgcatgcgaggccggagtcgtcgcaggaggaggaggaggactggaaggaggccgagggggacgtcgccgaagtcgaccgcgccgccaccaatggcgccggcgaggggggcgtgcccacagacaggccgatccgggtctacgccgacggcatctacgacctcttccacttcggccacgccaagtcgctggagcaggccaagaagtcgtttccaaacacatatcttcttgttggatgctgcaatgatgagttgacacataaattcaaaggaagaactgttatgactgaggatgagcgatatgagtcacttcgtcattgcaagtgggttgatgaagtcattccagatgctccatgggtggtgacagaagagttcttggataagcataacattga

SEQ ID NO: 88276 - DNA, 460 bp, Zea mays
taccggtttcggaattaccggctttttttttttgtttaagaagctataaatgtactttctcattttcctgaagccacaaacatcatccaaaaaacttgattattgaagtataactcataagcaatctaaaagagggcaccaccaatgatgggttgttggtagaacgctgttgggtttgtcaaagcaagttggttgaatggcagcaattgttgcagttgtaagagggtgccagcgttaggcgcagcgtgcaggtagaacggcaacaactgttgttgtgtcaagaaggcaacagggctcacatcagctagctggctgaatggtggtagctgttgctgttgtaaataagcagcagagttcaatgctgccagttggttgaatggaagaaattgctgggggtaggcagcagctagctgactgaatggtagttgttgttgcaaataagcagcagagttcaatgcag

SEQ ID NO: 88277 - DNA, 239 bp, Zea mays
taccattcagccagttagtttgtgttattcctgctaccttcttgacacaaccacagttgttgccgttctaccagcacgctgcgcctaacgctggcaccctcttacaactgcaacaattgctgccattcaaccaacttgctttgacaaacctagcagtgttctaccaacaacccatcattggtggtgccctcttttagatttcttatgagttatagttcaataataaagttttttgtctg

SEQ ID NO: 88278 - DNA, 426 bp, Zea mays
accggtttggaattcccggctcgacccactcgtctcggtggccatataaaatcttcaagtatgaagattcttccctcgtaaggttaagtggacaaaagcatacaggcatttgcatggcaaggacatgacccaggatacaacctttgagtttgagaggaagaggaacaggcccgagcgctacgaccgcaatttgacggagcagaccctgaaggctatcccgcttattacaaagattaggcatgatcgtatggaaaaacacatctcaaacagacataaacctggtaaacgcaaggagatggaaaaggattccaaggagctggagcaggacatcgccatgctcccgaagaagcttattagcaaccatcttgcggctgagaaaacgaaggtcaaggtttgaagtgttcagcagcagacagaagataacgc

SEQ ID NO: 88279 - DNA, 390 bp, Zea mays
aaaacaacccgatcgacaccattaagggggttgttcgttgcccttggttctcttggctctagcttggaacgccaacttcaagcatacaaaccgcggcttccgcttgcaaccaacggcggcggttcatttaccggcggcggtgcattttccaacttcggttcaactggcaacttcggtgcattttccaacggcggtccaacttgcggcggcggttcaacttccaacggcggtccatgttccggcgtcggttcatctgccggcggcaccatgccactaccctatttaaccgccccgggctcagactcatacccagacacacccatgcccgtgccaacagacgcattcaaacccgtgccagatgcagggaacctgcggcgttggcagcacccc

SEQ ID NO: 88280 - DNA, 439 bp, Zea mays
  unsure (1)..(439): unsure at all n locations
gaattaccggctcgacccactcgtccgggggaaccctgtcgtctacttgcaacatcaggtgtttgcatccaacccacttgctctggcaaacgtagctgcataccaacaacaacaacaattgcaacagtttctgccagcgctcagtcaactagccatggtgaaccctgccgcctacctacaacagcaacaactgctttcatctagccctctcgttgtgggtaatgcacctacatacctgcaacaacaattgctgcaacagattgtaccagctctgactcagctagctgtggcaaaccctgctgcctacttgcaacagctgcttccattcaaccaactgactgtgtcgaactctgctgcgtacctacaacagcgacaacagttacttaatccactagcagtgcctaacccattggtcactgccttnctacagcagcaacaa

SEQ ID NO: 88281 - DNA, 392 bp, Zea mays
ggggagctaacggtgccattggccatttcgaccagtacggcaacccagtgggcggcgtcgagcacggcaccggcggcatgaggcacggcacgggaaccaccggcggcatgggccagctgggtgagcacggcggcgctggcatgggtggcgggcagttccagcctgcgagggaggagcacaagaccggcggcatcctgcatcgctccggcagctccagctccagctcgtcggaggacgacggcatgggcggaaggaggaagaagggaatcaaggagaagatcaaagagaagctgcccggaggccacaaggacgaccagcacgccacggcgacgaccggcggcgcctatgggcagcagggacacaccggcagcgcctacgggcagcagggacac

SEQ ID NO: 88282 - DNA, 454 bp, Zea mays
gaattaccggcattgagaccaactagcaagatagaaagcactttagtgtaccaataatggcttctcaaaatattttgcctccttatgctccttggtctttctgcaagtgctgctacggcgaccattttcccgcaatgctcgcaagctcctatagcttcccttcttcccccgtacctctcaccagcggtgtcttcggtatgtgaaaacccaattcttcaaccctacaggatccaacaggcaatcacagctggcatcttacctttatcacccttgttcctccaacaatcatcagccctattacatcagttacctttggtgcatttattggcacaaaacatcagggcacaacaactacaacaacttgtgctagcaaaccttgctgcctactctcagcaacagcagtttcttccattcaaccaactagctgcattgaactctgcttcttatttgcaac

SEQ ID NO: 88283 - DNA, 409 bp, Zea mays
ccgttatcaacaatagagcttcaatggtgaccaagatattttccctccttatgctccttgctctttctacatgtgttgctaacgcgacaattttccctcaatgctcacaagctcctatagcttcccttcttcccccataccttccatcaattatagcttcagtatgtgaaaacccagctcttcaaccatataggcttcaacaagcaatcgcagcaagcaacatacctttatcgcccttgttgtttcaacaatcaccagccctatctttggtgcagtcattggtacaaaccatcagggcacaacagctgcagcaactcgtgctacctgtgatcaaccaagtagctctggcaaacctttctccctactctcagcaacaacaatttcttccattcaaccaactgtctacact

SEQ ID NO: 88284 - DNA, 432 bp, Zea mays
acatataaagtagaatcctttagcaacaatagagcaacaatggcgaccaagatattttccctccttatgctccttgctctttctacatgtgttgctaacgcgacaattttccctcaatgctcacaagctcctatagcttcccttcttcccccataccttccatcaattatagcttcagtatgtgaaaacccagctcttcaaccatataggcttcaacaagcaatcgcagcaagcaacatacctttatcgcccttgttgtttcaacaatcaccagccctatctttggtgcagtcattggtacaaaccatcagggcacaacagctgcagcaactcgtgctacctgtgatcaaccaagtagctctggcaaacctttctccctactctcagcaacaacaatttcttccattcaaccaactgtctacactgaaccct

SEQ ID NO: 88285 - DNA, 458 bp, Zea mays
accggtttcggaattcccggctcgacccactcgtccgatgggaggccagagacagcttaggttcttttgtgaacttcaaagacttgtattactacaatggcaataagctgccattcgctgcagcccaaattggtcaggccttcaggaatgagatatctccccgtcaaggccttttgagagtccgtgagtttactttagcggaaattgagcactttgtggacccagaggacaaatcccatccaaagtttggtgatgtttctgatctagagttctggatgtttccgagagaggatcaaatggcaggaaggtcagccacaagacttaaactcggaaattctatatctgagggaactgtgaacaatgagacccttggctacttcattggaagggtctaccttttcttgacacaacttgggattgacaaggatcgtctccgtttccgtcaacacctgccaaat

SEQ ID NO: 88286 - DNA, 424 bp, Zea mays
  unsure (1)..(424): unsure at all n locations
taggnatttacacacttatcactacgtatctatcaacgacctaacaacaatggcttccaagacattatccctccttgcgcttcttgccctttttgtgagtgcaacaaatgcgttcattattccacaatgctcacttgctccgagtgccattattccacagttcctccctccagttacttcaatgggcttcgaacacccagctgtgcaagcctataggctacaacaagcgcttgcggcgagcgtcttagaacaaccaattgcccaattacaacaacaatccttggcacatctaaccatacaaaccatcgcaacgcagcagcaacaagcactgagccacctagccgtggtgaaccctatcgcctacttgcaacaacagctgctngcatccaacccacttgctttggcaaacgtagctgcataccaa

SEQ ID NO: 88287 - DNA, 409 bp, Zea mays
  unsure (1)..(409): unsure at all n locations
gtgcaacattgtctccctttagcatactgagtgtttactacccgtatacggaaaccgacaagagactcactgccttccatcctgaaatcgaggagctcatctacagcgacgtcgagaactccgagcacaagttcgtgctgaaggacaagaagaagccgatcatcttctcgatggcgcgtctcgaccgcgtgaagaacatgacaggcctggtcgagatgtacggcaagaacgcgcgcctgagggagctggcgaacctcgtgatcgttgccggtgaccacggcaaggagtccaaggacagggaggagcaagcggagttcaagaagatgtacagcctcatcgacgagtacaagttgaaaggccatatccggtggatctcggcgcagatgaaccgcgtncgcaacggggagct

SEQ ID NO: 88288 - DNA, 373 bp, Zea mays
gaaccccgctgcttatttgcagcagcaaatactactgccatttagcgagctagctggggcaagtcgtgcttccttcttgacacagcaacagttgctgcctttgtacaagcagtttgcggctaaccccgcaaccctcttacaactacaacaattggtgccctttgtgcaacttgctttgacaaacccagtagactactaccaacaacacatcattggtggtgccctcttttagattgatgattagtcgtcattcaataataaagttacttggatgatgtatgtggccaaccagaaataagaagttacatttccaacaactacaacaacttgtgctagcaaaccttgctgcatactctcagcaacatcagtttct

SEQ ID NO: 88289 - DNA, 435 bp, Zea mays
  unsure (1)..(435): unsure at all n locations
gtcagcctagcaattagctcatcgactccagattggagaactcgacaccatgaaggtgctgatcgttgcccttgctctcctggcgctcgctgcgagcgccgcctccagtacaagcggcggctgtggctgccagacaccaccgtttcatctaccgcctccgttctatatgccgcctccgttctatctgccgccgcagcagcagccgcagccatggcaataccccactcaaccaccgcagctaagcccgtgccagcagttcggatcctgcggcgtcggcagcgtcggcagcccgttcctgggccaatgcgtcgagttcctgaggcaccagtgcagcccggcggcgacgccctacggctcgccacagtgccaggcgctgcagcagcagtgctgccaccagatcangcaggtggagccgctgcaccggtaccaggcgac

SEQ ID NO: 88290 - DNA, 447 bp, Zea mays
cggattcccggtcgactcacgcgtccgcccctttgcaagtatagtctctctgctaagcgaagcgaagcttcaagctagtctcgggggcgctagaagacgatgggcaaggacgacgtgatcgagagcggcgctggcggcggcgagttcgctgccaaggactacacggaccctcccccggcgccgctgatcgacgcggcggagctggggtcctggtcgctgtaccgcgccgtgatcgccgagttcatcgccacgctgctgttcctgtacatcacggtggccaccgtgatcgggtacaagcaccagacggacgcgtcggcgtcgggcgccgacgcggcgtgcggcggcgtgggcgtgctgggcatcgcctgtgccttcggcggcatgatcttcgtcctcgtctactgcaccgccggcatctcggggggccacatcaaccacgccgtcacc

SEQ ID NO: 88291 - DNA, 438 bp, Zea mays
aacaatggctaccaagatattatccctctttgcgcttcttgccctttttgtgagcgcggcagatgcgttcattattccacaatgctcacttgctcctagtgccattattccacagttcctccctccagttacttcaatgggcttcgaacacccagctgtgcaagcctacaggctacaacaagcgcttgcggcgagcgtcttacaacaaccaattgcccaattacaacaacaatccttggcacatctaaccatacaaaccatcgcaacgcaacagcaacaacaatttctaccagcactgagccaactagctgtggtgaaccctgtcgcctacttgcaacagcagttgcttgcatccaacccacttgctctggcaaacatagttgcataccaacaacaacaacaattgcaacagtttctaccagcgctcagtcaactagc

SEQ ID NO: 88292 - DNA, 432 bp, Zea mays
  unsure (1)..(432): unsure at all n locations
gcacaatagtgtaccaacaatggcagccaaaatattttgcttccttatgctggttgggctttctgcaagtgttgctaccgcaaccattttcccacaatgctcacaagctcctatagcttcccttcttcccccatacctctcaccagcggtgtcttcaatgtgcgaaaccccaattgttcaaccctacaggatccaacaggcaatcgcaacaggcatcttaccattatcacccttgcttctccaacaaccgtcagccctattacagcagttacctttggtccatttggtggcacagaacatcanggcacaacaactacaacaacttgtgctagcaaaccttgctgcatactctcagcaacatcagtttcttccattcaaccaactggctgcattgaactctgctgcttatttgcaacaacaattacccattca

SEQ ID NO: 88293 - DNA, 281 bp, Zea mays
gctttgacaaacccaacagcgttctaccaacaacccatcattggtggtgccctgtttgagattgcttatgagttatacttcaataatgaagtcttttggatgatgtctgtggcttcccagaaataagaaagtacatttctaaaaataccgactacgatctatatgccagctaacgcctatctgaacgacgaaacacaaggccggcccctctaaaggatccacgcttacgtacgcgttcatgccaggccatacctcttgtatcctgcgacctaagttgaatt

SEQ ID NO: 88294 - DNA, 430 bp, Zea mays
  unsure (1)..(430): unsure at all n locations
atttgagcattcagaaacacaccaagcgaagcgcactagcaacgacctaagggcagtggctaccaagatattagccctccttgcgcttcttgccctttttgtgagcgcaacaaatgcgttcattatttcacaatgctcacttgctcctagtgccattattccacagttcctgccaccagttactttaatgggcttcgaacacctagctgtgctagccaacatgcaacaacaagcgcttgcggcgagcgtcttacaacaacccattgcccaattgcaacaacaatccttgccacatctaacaatacaagccatcacaacgcaacatcaacaacagttgctaccagcactgagccacctagccatggtgaaccctgacgnctacttgcaagagcagctgcttgcatccaacccacttgctctggcgaacgta

SEQ ID NO: 88295 - DNA, 276 bp, Zea mays
gccgtccatgaggaaattcttgctggctgggggcttcagcaaggggcagcccgactgcgccgagaacatcttcaaagggatcgacgcccggttcctgagcgaagccctgggcgtcagcatgcacgtcgccgagaagctgcagagccggcgtgaccagcgaggcgagatcgtccgcgtggagccggagcacggctttcaccagctgaatccgtcgccgtcgtcgtcgtcgttttcgttcccatcgtcacaaggccagtaccaaacgtgccagcgcga

SEQ ID NO: 88296 - DNA, 422 bp, Zea mays
ctcgtgctacctctgatcaaccaagtagctctggcaaacctttctccctactctcagcgccctcttacaactgcaacaattgctgccattcaaccaacttgctttgacaaacccaacagtgttctaccaacaacccatcattggtggtgccctcttttagattgcttatgagttatagttcaataatgaagttttttggatgatgtttgtggcgtcccagaaataagaaagtacatttctagattcttaaaaaaaaaaaaaaaaaaaaaaaaaaaaaaaaaaaaaaaaaaaaaaaaaaaaaaataaaaaaaaaaaaaaaaaaaaaaaaacaaaaaaaaaaaaaaaaaaaaaaaaaaaaaaaatattcactaaataaaaaaactaaacaaaaatttttaaaaaaaaaaaaaggggcccccttt

SEQ ID NO: 88297 - DNA, 450 bp, Zea mays
accaactagcaacatagaaagcacaatagtgtaccaacaatggcagccaaaatatttgggctccttatgctccttggtctttctgcaagtgctgctacggcgaccattttcccgcaatgctcgcaagctcctatagcttcccttcttcccccgtacctctcaccagcggtgtcttcggtatgtgaaaacccaattcttcaaccctacaggatccaacaggcaatcgcagctggcatcttacctttatcacccttgttcctccaacaatcatcagccctattacaacagttacctttggtgcatttattggcacaaaacatcaaggcacaacaactacaacaacttgtgctagcaaaccttgctgcctactctcagcaacagcagtttcttccattcaaccaactaggttcattgaactctgcttcttatttgcaacaacaacaactacca

SEQ ID NO: 88298 - DNA, 388 bp, Zea mays
ccaactagcaacatagaaagcacaatagtgtaccaacaatggcagccaaaatattttggctccttatgctccttggtctttctgcaagtgctgctacggcgaccattttcccgcaatgctcgcaagctcctatagcttcccttcttcccccgtacctctcaccagcggtgtcttcggtatgtgaaaacccaattcttcaaccctacaggatccaacaggcaatcgcagctggcatcttacctttatcacccttgttcctccaacaatcatcagccctattacaacagttacctttggtgcatttattggcacaaaacatcagggcacaacaactacaacaacttgtgctagcaaaccttgctgcctactctcagcaacagcagtttct

SEQ ID NO: 88299 - DNA, 385 bp, Zea mays
  unsure (1)..(385): unsure at all n locations
cgcgacggcacggtgtcgctggcgtccaacacgggggcgctgccgtcgcccttcgcgggctgcgcgggcctgctgcagagcttctcggaccgggggctgaacctgacggacctcgtggcgctgtcgggggcgcacaccatcggcgtggcaagctgctccagcgtcaccccgcgcctgtaccaggggaacgccagcagcgtggacccgctgctggactcggcctacgcgcggacgctcatgtcgtcgtgccccaacccgtcgccggcgtcggccaccgtggcgctggacggcggcacgccgttccggttcgacagcgggtactacaccagggtgcagcagaggcagggcacgctggcctncgacgccgcgctggcgcagaacgccg

SEQ ID NO: 88300 - DNA, 342 bp, Zea mays
gcctcagcctcatccccagccacacccatgcccgtgccaacagccgcatccaagccggtgccagctgcagggaacctgcggcgttggcagcaccccgatcctgggccagtgcgtcgagttcctgaggcatcagtgcagcccgacggcgacgccctactgctcgcctcagtgccagtcgttgcggcagcagtgttgccagcagctcaggcaggtggagccgcagcaccggtaccaggcgatcttcggcttggtcctccagtccatcctgcagcagcagccgcaaagcggccaggtcgcggggctgttggcggcgcagatagcgcagcaactgacggcgatgtg

SEQ ID NO: 88301 - DNA, 412 bp, Zea mays
gaaaacccaattcttcaaccctacaggatccaacaggcaatcgcagctggcatcttggcttgatcacccttgttcctccaacaatcatcagccctattacaacagttacctttggtgcatttattggcacacaacatcagggcacaacaactacaacaacttgtgctagcaaaccttgctgcctactctcagcaacagcagtttcttccattcaaccaactaggttcattgaactctgcttcttatttgcaacaacaacaactaccattcagccagctacctgctgcctacccccagcaatttcttgcattcaaccaactagcagcattgaactctgctgcttatttacagcagctgcatactactaccattcagacacttagctcgtgtgagcgctgatagcttcttgaca

SEQ ID NO: 88302 - DNA, 304 bp, Zea mays
cccagctcttcaaccatataggcttcaacaagcaatcgcagcaagcaacatacgttggtcgcccttgttgtttcaacaatcaccagccctatctttggtgcagtcattggtacaaaccatcagggcacaacagctgcagcaactcgtgctacctgtgatcaaccaagtagctctggcaaacctttctccctactctcagcaacaacaatttcttccattcaaccaactgtgtacactgaaccctgctgcttatttgcagcaacaactattaccatttagccagctagctacatgctactctcag

SEQ ID NO: 88303 - DNA, 410 bp, Zea mays
cggacgcgtgggtggcgcccgcaccggcatcgctctccgcgcccaacgccctgtgcgtgcccgcgcctgctagagtcacctccgggaggtggaacaggagcctgtctgtctccgccgctgcgcggtccgtgtcccgggtggtgtctgtcgcgtccgcggcagcggtcacggcgcagaggaggctggtcgccgcggcagcggccacggagatggcgcccgcggcgagcggggaggatgggagcaagcccttcgtggaggagatgcgggcggtcgcgatgaagctgcacaccaaggaccatgcccgcgagggggagaaggagcctcaggcgcccaccgtcgccaagtgggagccctccgtcgagggctacctccgattcctcgtcgacagcaagctcgtcttccagacgctc

SEQ ID NO: 88304 - DNA, 414 bp, Zea mays
ccaacaatcacaaggccatgtgcaacaacacgaacagagccatgagcaacacggagggcagagccatgagcaacaacatcaacaacaattccagggtcatgacaagcagcaacaaccacaacagcctcagcaatatcagcagggccaggaaaaatcacaacagcaacaatgtcattgccaggagcagcaacagactacaaggtgcagctataactactatagcagtagctcaaatctaaaaaattgtcatgaattcctaaggcagcagtgcagccctttggtaatgccttttctccaatcacgtttgatacaaccaagtagctgccaggtattgcatcaacaatgctgtcatgatcttaggcagattgagccacaatacattcaccaagcaatctacaacatggttcaatccat

SEQ ID NO: 88305 - DNA, 355 bp, Zea mays
aaatcctcggcttcatcaagggctacaagcgcacctttaatctcgcttgcatggaccgcagaggcacaccggagcatccggcgaggacctgcacgcttgaaaccgacgacgaggccatatgctggggaattgcatattgtgtcaagggtggtccagaaaaagagctaaaagcaatgcagtacttggagagaagagagtgtgagtacgaccagaagatatccattgatttctacaaggaaggagatcccttgaaaccagctgtgacaagccgtctagtggtcgtttccattcaaaatccaattgggaccaagtcctatcttggccttgttcctttgcaggatatggcaaggcaaat

SEQ ID NO: 88306 - DNA, 409 bp, Zea mays
gcaacatagaaagtggaatacagtagctaaaatagagcaacaatggcggccaagatatgttccatccttatgctccttgctctttctgcatgtgttgctaacgcgaccatttttcctcaatactcacaagctcctatagctgcccttcttcccccataccttccatcaatgaccgctttagtatgtgaaaacccagcccttcaaccctacaggatccagcaagcaatcgcaacaagcaacttacctttatcacacctgttctttcaacaatcgccagccctatctttggtgcagtcattggtacaaaccatcagggcagaacagttgcagcaactcgtgctaccagtgatcagccaagtagctctggcaaacctttccccctactctcagcaacaacaatttctttcat

SEQ ID NO: 88307 - DNA, 290 bp, Zea mays
aaacacaccaagcgaagcgcactagcaacgacctaacaacaatggctaccaagatattggccctcgttgcgcttcttgccctttttgtgagcgcaacaaatgcgttcattattccacaatgctcacttgctcctagtgccattattccacagttcctcccaccagttacttcaatgggcttcgaacacctagctgtgcaagccaacatgcaacaacaagcgcttgcggcgagcgtcttacaacaaccaattgcccaattgcaacaacaatccttgccacatctaacaata

SEQ ID NO: 88308 - DNA, 365 bp, Zea mays
accaactagcaacatacatagtgaagtacactagcaacatcttagcaccaatgggaggcaagatttttgccctccttgccctccttgctctttcagcaagcgctgctacctcgacttttattccacaatgctcacaacaatacctctctccggtgacagccgcgggatttcaatacccaactatacaatcctacatggtacaagaggccatccaagcaagcatcttacggtcattagcattaaccctccaacaaccatatgctctattgcaacagccatccttagtgcatctgtatctccaaagaatcgcggcacaacaactacaacaacagttgctaccaacaatcaatcaagtagttgcagcg

SEQ ID NO: 88309 - DNA, 343 bp, Zea mays
catacatagtgaagtacactagcaacatcttagcaccaatggcagccaagatttttgcgctgcttgccctccttgctctttcagcaagtgttgctaccgcgactattattccacaatgctcacaacaatacctctctccagtgatagccgcgagatttgaatacccatctatacaatcctacaggctacaagaggccatcacagcaagcatcttacggtcgttagcattgaccgtccaacaaccatatgccctattgcaacaaccatccttagtgaatctgtatctccaaagaatcacagcacaacaactacaacaacggttgcttccaacaattaatcaagt

SEQ ID NO: 88310 - DNA, 361 bp, Zea mays
cagctagcaacatagaaagcacaatagtgtaccaacaatggcagccaaaatatgttagttccttatgctccttggtctttctgcaagtgctgctaccgcaaccattttcccacaatgctcacaagctcctatagcttcctttcttcccccatacctctcaccagcggtgtcttcagtatgtgaaaacccaattcttcaaccctacaggatccaacaggcaatcgcagcaggcatcttacctttatcacccttgttcctccaacaaccgtcagccctattacagcagttacctttggtgcatttgttggcacaaaacatcaaagcacaacaactacaacaacttgtgctaagaaaccttgct

SEQ ID NO: 88311 - DNA, 259 bp, Zea mays
gcccgtgccagcagttcggatcctgcggcgtcggcagcgtcggcagcccgtgggtgggccagtgcgtcgagttcctgaggcaccagtgcagcccggcggcgacgccctacggctcgccacagtgccaggcgctgcagcagcagtgctgccaccagatcaggcaggtggagccgctgcaccggtaccaggcgacatacggtgtggtcctgcagtccttcctgcagcagcagtcgcaaggcgagctcgccgagctgatggc

SEQ ID NO: 88312 - DNA, 356 bp, Zea mays
cccacgcgtccgagaaaatgcacttggtggtatctacggtgttctgaaccaggggagaggtcatgtctttgaggagatgcagaggccgggtaccccgctctacaacatcaaggctttcctccctgtcatcgagtcctttggtttctccagccaactgagggccgcaacctctggtcaggcgttcccccagtgtgtctttgaccattgggacatgatgggctcagatcctttggaggccggcttccaggctgctcagctggtgctggatatccgcaagatgaacggtctcaaggaacagaagacctccctttctgagttcgaagacaagctctaaaatttttggctgctggtgatac

SEQ ID NO: 88313 - DNA, 413 bp, Zea mays
tgcttcttatttgcaacaacaacaactaccattcatccagctacctgctgcctaccccgagcaatggcttccattcaaccaactggcagcattgaactctcctgcttatttacagcagcaacaactactaccattcagccagctagctggtgtgagccctgctaccttcttgatacaaccacagttgttgccgttctaccagcacgctgcgcctaacgctggcaccctcttacaactgcaacaattgctgccattcaaccaacttgctttgacaaacccagcagcgttctaccaacaacccatcattggtggtgccctcttttagatttcttatgagttatagttcaataataaagttttttgtctgatgtttgtggcttcccagaaataagaaagtacatttctagattctt

SEQ ID NO: 88314 - DNA, 411 bp, Zea mays
ggaattcccggggcttcagtatgtgaaaacccagctcttcaaccctataggctccaacaagcaatcgcagcaagcaacatacctttgtcacccttgtttcaacaatcgccagccctatctttggtgcagtcattggtacaaaccatcaaggcacagcagctgcagcaactcgtgctacctgtgatcaaccaagtagctctggcaaacctttctccctactatcagcaacaacaatttcttccattcaaccaactatctacactgaaccctgctgcttatttgcagcaacaactattaccattcagccagctagctactgcctactctcatcaacaacaacttcttccatttaaccaattggccgcactgaacctcgctgcttatttgcagcagcaaatattactaccattt

SEQ ID NO: 88315 - DNA, 433 bp, Zea mays
tgcgattttgatcttgcagccacctttttttgttctgttgtgtatctagtagttgggggagatatgcagtttgcacttgcattggacacgaactcaggtcctcaccagataagatcttgtgagggtgatgggattgacaggttggaaaaattaagtattgggggcagaaagcaggagaaagctttgagaaataggtgctttggtggtagagttgctgcaactacacaatgtattcttacctcagatgcttgtcctgaaactcttcattctcaaacacagtcctctaggaaaaattatgctgatgcaaaccgtgtatctgctatcattttgggcggaggcactggatctcagctctttcctctgacaagcacaagagctacgcctgctgtacctgttggaggatgttacaggcttattgatatccctatgagta

SEQ ID NO: 88316 - DNA, 432 bp, Zea mays
ctgccgaaagtgccttttggggttcttgtaatcttgttacattaggattcatttttgatgacttcatcaagaagcaagagcaagagcagaagtaggagccgcagtcgcagcaggagcaggagccgcagtcctcggcgaagagatagattgcgcagtgaacgtgcaccccaccgcagtcgcagccggagccgcagcccataccgtcgcagagaacggcgtggtcacagggattttgcatgcaagaactgccggagacctgggcacttcgctaaggagtgtccatctgcgcctatgtgcaataactgtaaccttccaggccactttgcagcagaatgcaccttacaaactgtttgctggaactgcaaagagtctgggcacattgccagtgagtgcaagaacgaggccctatgccacgcctgcaacaagacaggt

SEQ ID NO: 88317 - DNA, 297 bp, Zea mays
aagcaacatataaagcacaatagtgtaccaacaatggcagtcaaaatattttgcgcgtggtatgctccttggactttctgcaagcgctgatacagcgaccattctcccgcaatgctcgcaagctcctataactgaccttcttccaccgtacctctcaccagcggtgtcttcggtatgtgaaaacccaattcttcaaccctacaggatccaacatgcaatcacagctggcatcttacctttatcacccttgctcctacaacaatcatcagccctattacatcatatacctaaggagca

SEQ ID NO: 88318 - DNA, 372 bp, Zea mays
cggaattcccggctcgacccacgcgtgcggtttccttccaactttcagaactgaaccttgattggaggggggaaactcgcgcgtgtgtcccgctgagtgaacaggaagaccttattgtgtggatgaggacatacgctctccccaaatttcgaaagctctatggtgtgattgaagacgacctgcatgccgatgagaccataaatattttcgtaggaaacaattacaacacctacacttttggtggaaagaagagcatagtcctgacgactgcgtcctggctaggcggctagaacgacttacttggacacgctcatattgtcactggctcgatgagcatcatcatatcgatactcttagctctgatccatgtga

SEQ ID NO: 88319 - DNA, 309 bp, Zea mays
ggaattgccggcccgactcgacccacgcgtgcgcagctagcaacatagaaagcacaatagtgtaccaacaatggcagccaaaatatgttggttccttatgctccttggtctttctgcaagtgttgctaccgcaaccattttcccacaatgctcacaagctcctatagcttcccttcttcccccatacctctcaccagcggtgtcttcaatgtgtgaaaccccaattgttcaaccctacaggatccaacaggcaatcgcaacaggcatcttaccattatcacccttgttccttcaacaaccgtcagccct

SEQ ID NO: 88320 - DNA, 364 bp, Zea mays
gccgcagggcgagctcgcggctgctgctgcaggaaggactgcaggagcagccgcagggcgagctcgcggcgctgatggcggcccaggtagcgcagcagctgacggcgatgtgcggcctgcagctgcagcagccaggtccctgcccttgcaacgcagctgccggcggtgtctactactgaggaaactatgtactgtagtaataatgtaatggagccgctgactagctacctagctcgctagtttactcatttagcggcgatgagtaacgtagtgtcacccatcaccatgggtggcagtgtgagcaatgacctgaatgaaccattgaaatggaaaggaataatatataaggaaaaaagatgattgg

SEQ ID NO: 88321 - DNA, 379 bp, Zea mays
caacatagaaagcacaatagtgtaccaacaatggcagccaaaatattttgcttccttaggctccttggtctttctgcaagtgctgctaccgcaaccattttcccacaatgctcacaagctcctatagcttcctttcttcccccatacctctcaccagcggtgtcttcagtatgtgaaaacccaattcttcaaccctacaggatccaacaggcaatcgcagcaggcatcttacctttatcacccttgttcctccaacaaccgtcagccctattacagcagttacctttggtgcatttgttggcacaaaacatcaaagcacaacaactacaacaacttgtgctaagaaaccttgctgcctactctcagcaacaagcagttc

SEQ ID NO: 88322 - DNA, 432 bp, Zea mays
attgagaccaactagcaacatagaaagcacaatagtgtaccaacaatggcagccaaaagattttgcctccttatgctccttggtctttctgcaagtgctgctacggcgaccattttcccgcaatgctcgcaagctcctatagcttcccttcttcccccgtacctctcaccagcggtgtcttcggtatgtgaaaacccaattcttcaaccctacaggatccaacaggcaatcgcagctggcatcttacctttatcacccttgttcctccaacaatcatcagccctattacaacagttacctttggtgcatttattggcacaaaacatcaaggcacaacaactacaacaacttgtgctagcaaaccttgctgcctactctcagcaacagcagtttcttccattcaaccaactaggttcattgaactctgcttct

SEQ ID NO: 88323 - DNA, 324 bp, Zea mays
gcaagctgtggaaaacattgcttctttcttgcgacaacaacaattgttgccattttacgcacaggttgtgggaaacattaatgccttcttgcaacagcaacaattgctgccattctacccacataatgtggcaaacattgttgccttcttacaacaacaacaattgctgccatttagccaacatgctttgacgaatcctaccaccttattgcaatcgcccaccattggtggtgccatcttctagattttttatgatttatactgtaataataaagttctcatgctgatatgtgcgacctctcagtaataaagtattatagatct

SEQ ID NO: 88324 - DNA, 436 bp, Zea mays
cagcattcaaaaacacaccaagcgaagcgcactagcaacgacctaacaccaatggctgccaggatattagccctccttgcgcttcttgcccttttagtgagcgcaacaaatgcgttcattattccacagtgctcacttgctcctagtgccagtattccacagttcctcccaccagttacttcaatgggcttcgaacatccagccgtgcaagcctacaggctacaactagcgcttgcggcgagcgccttacaacaaccaattgcccaattgcaacaacaatccttggcacatctaaccctacaaaccattgcaacgcaacaacaacaacaacagtttctgccatcactgagccacctagccgtggtgaaccctgtcacctacttgcaacagcagctgcttgcatccaacccacttgctctggcgaacgtagctgcat

SEQ ID NO: 88325 - DNA, 384 bp, Zea mays
tgcatcgaccaactcacatacccctactcctctaccaacgacctaccacccttaactgctaggttctatcctatcttccccttctagctctctaattgagccattcaactgcgatcattatttcataatgcttacttcattactaatgcctggcattccacagtttcaccaaccatctacttcaacaatctatatacattcaacctatctaacctacaagctacaactaacgcttgcatttagcgccttacaacaaccaattgcccaatccctacaacaatacttgtcacatctaaccctacaaaccatttcaactcaacaacaacaacaacagtctctcccatcaatcaaccacctatccacggtcaaccctctcacctactt

SEQ ID NO: 88326 - DNA, 433 bp, Zea mays
aacacacctagcgaagcgcactagcaacgacctaacaacaatggcttccaagacatggtcgcgtccttgcgcttcttgccctttttgtgagtgcaacaaatgcgttcattattccacaatgctcacttgctccgagtgccattattccacagttcctccctccagttacttcaatgggcttcgaacacccagctgtgcaagcctataggctacaacaagcgcttgcggcgagcgtcttataacaaccaattgcccaattacaacaacaatccttggcacatctaaccatacaaaccatctcaacgcagcagcaagcactgagccacctagccgtggtgaaccctatcgcctacttgcaacaacagctgcttgcatccaacccacttgctttggcaaacgtagctgcataccaacaacaacaacagttgcaaca

SEQ ID NO: 88327 - DNA, 426 bp, Zea mays
taccggtctcggattcccgggtcgacgacgcgtccggcagccgactccatgcccctactctgctgccggcggcgtcccccactgaagagactagatgctgtagtatagccgatggctagctagctagttgagtcatttagcggcgatgattgagtaataatgtgtcacgcattaccatgggtggcagtgtcagtgtgagcaatgacctgaatgaacaattgagatgaaatgaacaaaattaatgagaagctgtatcgacagcactgaactgaggctatacatggctgaacttggatgagacctcgcttgaaatgcgaaatgctccgaggtggatacatattaacatccacccataaataaggggcccctatcttgtgatcatgtgactacggatagaggcagtttacctgctgaacaatttttttt

SEQ ID NO: 88328 - DNA, 412 bp, Zea mays
ggttggcttctcctccccctccggttcgggttcgggttcgtgaggttctccggggtgcggtttcgtgggtgagcggatcgagatggcggcgtcggatgttgagtaccgctgcttcgtcggcggcctcgcctgggccacggacgaccactccctccacaacgccttcagcacctacggcgaggtcctcgagtccaagatcatcctcgatcgggagacgcagaggtcccgcggcttcggcttcgtcaccttctccacggaggaggcgatgcggaacgccatcgagggcatgaacggcaaggagctggacggccgcaacatcaccgtcaacgaggcccagtcccgcggcggccgtggaggcggcggcggcggcgggtacggtggtggccgtggaggcggcggctacggcggtggc

SEQ ID NO: 88329 - DNA, 461 bp, Zea mays
  unsure (1)..(461): unsure at all n locations
accggtccggaattcccgggcttcagaccattagctttatctactccagagcgcagaagaacccgatcgacaccatgagggtgttgctcgttgccctcgctctcctggctctcgctgcgagcgccacctccacgcatacaagcggcggctgcggctgccagccaccgccgccggttcatctaccgccgccggtgcatctgccacctccggttcacctgccacctccggtgcatctcccaccgccggtccacctgccgccgccggtccacctgccaccgncggtccatgtgccgacgacggttcatctgccgtcgacaccatgccactaccctaactaaccagcccggcctcagcctcatccccagccacacccatgcccgtgccaacagccgcattcaagcccgtgccagctgcagggaacctgcggcgttggcagcaccccgatccctggccagtgcgtc

SEQ ID NO: 88330 - DNA, 452 bp, Zea mays
attgagaccaactagcaacatagaaagcacaatagtgtaccaacaatggcagccaaaagattttgcgctccttatgctccttggtctttctgcaagtgctgctacggcgaccattttcccgcaatgctcgcaagctcctatagcttcccttcttcccccgtacctctcaccagcggtgtcttcggtatgtgaaaacccaattcttcaaccctacaggatccaacaggcaatcacagctggcatcttacctttatcacccttgttcctccaacaatcatcagccctattacatcagttacctttggtgcatttattggcacaaaacatcagggcacaacaactacaacaacttgtgctagcaaaccttgctgcctactctcagcaacagcagtttcttccattcaaccaactagctgcattgaactctgcttcttatttgcaacaaccaccac

SEQ ID NO: 88331 - DNA, 256 bp, Zea mays
gtgagccctgctaccttcttgatacaaccacagttgttgccgttctaccagcacgctgggcctaaggctggcaccctcttacaactgcaacaattgctgccattcaaccaacttgctttgacaaacccagcagcgttctaccaacaacccatcattggtggtgccctcttttagatttcttatgagttatagttcaataataaagttttttgtctgatgtttgtggcttcccagaaataagaaagtacatttctag

SEQ ID NO: 88332 - DNA, 396 bp, Zea mays
aggatccaacaggcaatcgcagcaggcatcttacctttatcacccttgttcctccaacagccgtcggccctattacagcagttacctttggtgcatttgttggcacaaaacatcaaggcacaacaactacaacaacttgtgctaggaaaccttgctgcctactctcagcaacagcagtttcttccattcaaccaactggctgcattgaactctgctgcttatttgcaacaacaactaccattcagtcagctagctgctgcctacccccagcaatttcttccattcaaccaactggcagcattgaactctgctgcttatttacaacagcaacagctaccaccattcagccagctagctgatgtgagccctgttgccttcttgacacaacaacagttg

SEQ ID NO: 88333 - DNA, 354 bp, Zea mays
gaattaccgggcagcattcagaaacacaccaagcgaagcacattagcaacaacctatcaacaatggctaccaagatattatccctgcttgcggttcttgcgctttttgcgagcgcaacaaatgcgttcattattccacaatgctcacttgctccaagttccattattacacagttcctcccaccagttacttcaatgggcttcgaacacccagctgtgcaagcctataggctacaacaagcaattgcggcgagcgtcttacaacaaccaatttcccagttgcaacaacaatccttggcacatctaacaatacaaaccatcgcaacgcaacagcaacaacaattcctaccagcac

SEQ ID NO: 88334 - DNA, 240 bp, Zea mays
caacaatttctaacataatatggctacgttcttatgctccttatctctatctacaattcttcctaccatatctcattatcccacaattctcacaaccttctatatctccacttactaccacatacttctcaacaccttaatcaacaatatcacaaacctcaatttcacaaccatacattatccaacatacacatcacatcaaacaatcttacctttatcaccctttttactccaacaacc

SEQ ID NO: 88335 - DNA, 431 bp, Zea mays
ctacaggatccaacaggcaatcgcagtatgcatcttacctttatcacccttgttcctgcaagaatcatcagccctattacagcagttacctttggtgcatttattggcacaaaacatcagggcacaacaactacaacaactcgtgctagcaaaccttgctgcctactctcagcaacagcagttacctttggtgcatttgttggcacaaaacatcagggcacaacaactacaacaactcgtgctagcaaaccttgctgcctactctcagcaacaacagtttctgccattcaaccaactagctgcattgaactctgctgcttatttgcagcaacaacaactactaccattcagccagctagctgctgcctacccccggcaatttcttccattcaaccaactggcagcattgaactctcatgcttatgtacaac

SEQ ID NO: 88336 - DNA, 423 bp, Zea mays
aactagcaacatacaaagcacaatactgtaccaacaatggcagccaaaatattgtgcgtacttatgctccttggtctttctgcatgtgttgctaccgcaactcattttcctacaatgctcacaagctcatatagcttcccttcttcccccatacctctcaccagcgccgtcttcaatgtctcaaaccccaattgttcaaccttacaagatccaacaggcaatcgcaacacgcatcttaccattatcacccttgttcctccaacaactcgcacccctattacagcagctacctctggtccatttgatggcacaaaacatcagggcacagcaactacaacaactcgtgctagcaaaccttgttgcatactctcatgaacatcagtgtcttccattcaaccaaatggctgcattgaactctgctgc

SEQ ID NO: 88337 - DNA, 369 bp, Zea mays
gcagcaggtagctggctacccccagcaatttcttccattcaaccaactggcagcatggaactctcctgcttatttacagcagcaacaactactaccattcagccagctagctggtgtgagccctgctaccttcttgatacaaccacagttgttgccgttctaccagcacgctgcgcctaacgctggcaccctcttacaactgcaacaattgctgccattcaaccaacttgctttgacaaacccagcagcgttctaccaacaacccatcattggtggtgccctcttttagatttcttatgagttataggtcaataataaagttttttgtctgatgtttgtggcttcccagaaataagaaagtacatttct

SEQ ID NO: 88338 - DNA, 435 bp, Zea mays
ctcggatcggaattcccggctcgaccacgcgccggcaatcgcactggcatcttacctttattacccttgttcctccaacaatgatgggcggtattacacagttacctttggtgcatttattgcacaaaacataggcacacaactacaacaacttgagctatcaaaccttgctgctacttcacacagcacattcttccattcaaccaatactgtatgaactctgctcttatttgcaacacaacaactaccattagcagctatctgctgcctaccccagcaattattccattaagcactgacacattgaactatctgcttattacagctgcacagctactaccattcaccagctaactggtgtgagcacctgctaccttatgacacaaccacagttgacgacgttctaccaacacgctgtgcttaacgctggcaccc

SEQ ID NO: 88339 - DNA, 469 bp, Zea mays
tcggactcggaattcccgggtcagcattcaaaaacacaccaagcgaagcgcactagcaacgacctaacaccaatggctaccaagatatgagccgtccttgcgcttcttgcccttttagtgagcgcaacaaatgcgttcattattccacagtgctcacttgctcctagtgccagtattccacagttcctcccaccagttacttcaatgggcttcgaacatccagccgtgcaagcctacaggctacaactagcgcttgcggcgagcgccttacaacaaccaattgcccaattgcaacaacaatccttggcacatctaaccctacaaaccattgcaacgcaacaacaacaacaacagtttctgccatcactgagccacctagccgtggtgaaccctgtcacctacttgcaacagcagctgcttgcattcaacccacttgctctggcgaacgtagctgcataccagcaacaac

SEQ ID NO: 88340 - DNA, 445 bp, Zea mays
cagctagcaacatagaaagcacaatagtgtaccaacaatggcagccaaaatattttgcgtccttatgctccttggtctttctgcaagtgctgctacggcgaccattttcccgcaatgctcgcaagctcctatagcttcccttcttcccccgtacctctcaccagcggtgtcttcggtatgtgaaaacccaattcttcaaccctacaggatccaacaggcaatcacagctggcatcttacctttatcacccttgttcctccaacaatcatcagccctattacatcagttacctttggtgcatttattggcacaaaacatcagggcacaacaactacaacaacttgtgctagcaaaccttgctgcctactctcagcaacagcagtttcttccatccaaccaactagctgcattgaactctgcttcttatttgcaacaacaacaacta

SEQ ID NO: 88341 - DNA, 423 bp, Zea mays
cgtcgagtttctgaggcatcagtgcagtccgacggtgacgccctactgctcgcctcagggccagtggttgcggcagcagtgttgccagcagctcaggcaggtggagccgcagcaccggtaccaggcgatcttcggcttggtcctccagtccatcctgcagcagcagccgcaaagcggccaggtcgcggggctgttggcggcgcagatagcgcagcaactgacggcgatgtgcggcctgcagcagccgactccatgcccctacgctgctgccggcggtgtcccccactgaagaaactatgtgctgtagtatagccgctggctagctagctagttgagtcatttagcggcgatgattgagtaataatgtgtcacgcatcaccatgggtggcagtgtcagtgtgagcaatgacctgaatgaacaat

SEQ ID NO: 88342 - DNA, 319 bp, Zea mays
cagacgcggatacccctgaggatgcattggctgcgcggaacaacggggcagaaggaatgcgggttgtgccggacagagcacatgttcttcgcttcggatgagaggattaaggctgtgaggcagatgattatggctcccacagttgagctgaggcagcaagcgctggatcgccttctgccttaccagaggtctgacttcgaaggcatcttccgtgctatggatggactttcagtgactattcgacttctggaccctccactacacgagttcctttcagaagggaacgtcgaggaaatcgtgcgtgaactgtgttctgaga

SEQ ID NO: 88343 - DNA, 433 bp, Zea mays
attgtcagcattcaaaaacacaccaagctaagcgcactagcaacgacctaacaccaatggcggccaagatattagccctccttgcgcttcttgcccttttagtgagcgcaacaaatgcgttcattattccacagtgctcacttgctcctagtgccagtattccacagttcctcccaccagttacttcaatgggcttcgaacatccagccgtgcaagcctacaggctacaactagcgcttgcggcgagcgccttacaacaaccaattgcccaattgcaacaacaatccttggcacatctaaccctacaaaccattgcaacgcaacaacaacaacaacagtttctgccatcactgagccacctagccgtggtgaaccctgtcacctacttgcaacagcagctgcttgcatccaacccacttgctctggcgaacgt

SEQ ID NO: 88344 - DNA, 434 bp, Zea mays
cagctagcaacatagaaagcacaatagtgtaccaacaatggcagccaaaatattttggctgcttatgctccttggtctttctgcaagtgctgctacggcgaccattttcccgcaatgctcgcaagctcctatagcttcccttcttcccccgtacctctcaccagcggtgtcttcggtatgtgaaaacccaattcttcaaccctacaggatccaacaggcaatcacagctggcatcttacctttatcacccttgttcctccaacaatcatcagccctattacatcagttacctttggtgcatttattggcacaaaacatcagggcacaacaactacaacaacttgtgctagcaaaccttgctgcctactctcagcaacagcagtttcttccattcaaccaactagctgcattgaactctgcttcttatttgcaac

SEQ ID NO: 88345 - DNA, 438 bp, Zea mays
  unsure (1)..(438): unsure at all n locations
atgttgagcattcagaaacacaccaagcgaatcgcactagcaacgacctaacaacagtgggtaccaagatattagccctccttgcgcttcttgccctttttgtgagcgcaacaaatgcgttcattattccacaatgctcacttgctcctagtgccattattccacagttcctcccaccagttacttcaatgggcttcgaacacctagctgtgcaagccaacatgcaacaacaagcgcttgcggcgagcgtcttacaacaaccaattgcccaattgcaacaacaatccttgccacatctaacaatacaagccatcacaacgcaacagcaacaacagttcctaccagcactgagccacctagccatggtgaaccctgccgnctacttgcaagagcagctgcttgcatccaacccacttgctctggcgaacgtagttgcaa

SEQ ID NO: 88346 - DNA, 269 bp, Zea mays
aaagcacaatagtgtaccaacaatggcagccaaaatattttgcctccttatgctcctgggtctttctgcaagtgctgctacggcgaccattttcccgcaatgctcgcaagctcctatagcttcccttcttcccccgtacctctcaccagcggtgtcttcggtatgtgaaaacccaattcttcaaccctacaggatccaacaggcaatcacagctggcatcttacctttatcacccttgttcctacaacaatcatcagccctattacatc

SEQ ID NO: 88347 - DNA, 317 bp, Zea mays
cgaggcccagtcccgcggcggccgtggaggcggcggcggcggcgggtacgggggtggccgtggaggcggcggctacggcggtggcgggcgccgtgatggcggcggcggctacggcggtggcggcggctacggtggtggcggcggcggctacggtggtggtggcggcggctacggcggtggcaaccgtggcggcggctacggcaactccgacgggaactggaggaactgagcggtggggcccgcgcggccaagttatcctgttcgctaccgtgtctgttaccctagtccagagtgtttatcttcgttcgtctcgtgtt

SEQ ID NO: 88348 - DNA, 407 bp, Zea mays
ccagtcacccataatattttgagcattcataaacacacctagcgaagcgcactagcaacgacctaacaacaatggcttccaagacattatccctccttgcgcttcttgccctttttgtgagtgcaacaaatgcgttcattattccacaatgctcacttgctccgagtgccattattccacagttcctccctccagttacttcaatgggcttcgaacacccagctgtgcaagcctataggctacaacaagcgcttgcggcgagcgtcttagaacaaccaattgcccaattacaacaacaatccttggcacatctaaccatacaaaccatcgcaacgcagcagcaacaagcactgagccacctagccgtggtgaaccctatcgcctacttgcaacaacagctgcttgca

SEQ ID NO: 88349 - DNA, 446 bp, Zea mays
caactagcaacatagaaagcacaatagtgtaccaacaatggcagccaaaatattttgcgtccttatgctccttggtctttctgcaagtgctgctaccgcaaccattttcccacaatgctcacaagctcctatagcttcctttcttcccccatacctctcaccagcggtgtcttcagtatgtgaaaacccaattcttcaaccctacaggatccaacaggcaatcgcagcaggcatcttacctttatcacccttgttcctccaacaaccgtcagccctattacagcagttacctttggtgcatttgttggcacaaaacatcaaagcacaacaactacaacaacttgtgctaggaaaccttgctgcctactctcagcaacagcagtttcttccattcaaccaactggctgcattgaactctgctgcttatttgcaacaacaactaccat

SEQ ID NO: 88350 - DNA, 429 bp, Zea mays
gcgggaactccgacgagcttgccgtggaggttctctgcccggtgttccgcccggcggggtttggctcatcgtcgtcacagccagcagcaaaggacatcagctccaccgtcgtcgtcaccaaggtcggagtgtggggtggagagggagggtcggcgcaggacatcgcgacgacggagccgccgaggcgtctgcagagcctgaccgtccgcgccggcgttgccgtggactccatcgagttcacctacagtaccgacacaggtggtcagacgcgcaccgatgggcgatggggtggacttggcggcaacgtccggaagctcgatcttggcgacgctgaatacgtcaaggaagtttctggaacgtacggcgcattcgaaggtgcgactacccttacctcggtcaggattgtcaccagcaccgtcagagcttggg

SEQ ID NO: 88351 - DNA, 419 bp, Zea mays
  unsure (1)..(419): unsure at all n locations
gaagagcccgttgttttctcaattcataaaggacttgtcagttccaaaagcgaccagggtgaaggctatagccgaaatatttgctgacgctgggttttcagatgttacaaagaatttcttggctgtcctggcggacaatggcaggctgaaatatattgaacgcattgcggagagatttgttgatttgactatggaacataagggggagatgaaggttgtggtcaggacagttatttcactcaccaaggaggaggagaaagaactcaaggaaaccttgcaggatatccttggggaaaacaaaactattttggttgaacagaagattgactacagcatcatgggaggattagtgattgaattcgggcagaaagtgcttgatatctcaatcaggaacagggcgaagcanatggaggcgttct

SEQ ID NO: 88352 - DNA, 457 bp, Zea mays
tcggattcccgggattttcagcattcaaaaacacaccaagcgaagcgcactagcaacgacctaacaccaatggctaccaagatattggcgcgtccttgcgcttcttgcccttttagtgagcgcaacaaatgcgttcattattccacagtgctcacttgctcctagtgccattattccacagttcctcccaccagctacttcaatgggcttcgaacatccagccgtgcaagcctacaggctacaactagcgcttgcagcgagcgccttacaacaaccaattgcccaattgcaacaacaatccttggcacatctaaccctacaaaccattgcaacgcaacaacgacaacaacaacagtttctgccatcactgagccacctagccgtggtgaaccctgtcacctacttgcaacagcagctgcttgcattcaacccacttgctctggcgaacgtagctgca

SEQ ID NO: 88353 - DNA, 287 bp, Zea mays
cagctagcaacatagaaagcacaatagtgtaccaacaatggcagccaaaatattttgggtccttatgctccttggtctttctgcaagtgctgctaccgcaaccattttcccacaatgctcacaagctcctatagcttcctttcttcccccatacctctcaccagcggtgtcttcagtatgtgaaaacccaattcttcaaccctacaggatccaacaggcaatcgcagcaggcatcttacctttatcacccttgttcctccaacaaccgtcagccctattacagcagt

SEQ ID NO: 88354 - DNA, 298 bp, Zea mays
ctcaattcattaattactcgtcagttccaaaagcgaccaggctgaatctatagccgaaatatttgctgacgctgggttttcagatgttacaaagaatttcttggctgtcctggccgacaatggcaagctgaaatatattgaacgcattgccgagagatttgttgatttgactatggaacataatggggaaatgaaggctgtggtcaggacagctatttcactcaccaaggacgaggagaaagaactcaaggaaaccttgcaggatatcctttgggaaaacaaaactattttgggttaa

SEQ ID NO: 88355 - DNA, 285 bp, Zea mays
accggtctcggattcccgggtcgacgacgcgtccgcaagaacaccctcaagatcatgcccttcaagctcccgcccgtcggcccttatgatgtgcgcgtgcgcatgaaagcagtggggatttgcggcagcgatgtgcactacctcagggagatgcgcatcgcgcacttcgtggtgaaggagccgatggtgatcgggcacgagtgcgcgggcgtggtcgaagaggtgggcgccggcgtgacgcacctgtccgtgggcgaccgcgtggcgctggagccgggcgtcagc

SEQ ID NO: 88356 - DNA, 385 bp, Zea mays
gacccacgcgtccgtgcttatttgcagcaacaacaactactaccattcagccagctagctgctgcctaccgccggcaatttcttccattcaaccaactggcagcattgaactctcatgcttatgtacaacaacaacaactactaccattcagccagctagctgctgtgagccctgctgccttcttgacacagcaacatttgttgccgttctacctgcacactgcgcctaacgttggcaccctcttacaactgcaacaattgctgccattcgaccaacttgctttgacaaacccagcagtgttctaccaacaacccatcattggtggtgccctcttttagattgcttatgagttatagttcaataataaagttttttttgctgatt

SEQ ID NO: 88357 - DNA, 385 bp, Zea mays
atggagaccaactagcaacatacaaagttcaatagtgtaccaacaatggcagccaaaggatttcggctccttatgctccttgctatgactgcaagtgctgctacggcgaccatttttccgcaatgctcacaagctcctatagcttcccttcttgccccgtacctctcaccagcggtgtcttcggtatgtgaaaacccaattcttgaaccctacaggatccaacaagcaatcgcagctggcatcttacctttatcacccttgttcctacaacaatcatcagccctattacagcagttacctttggtgcatttattggcacaaaacatcaaggcgcaacaactacaacaacttgagctagcaaaccttgctgcctactctcagcaac

SEQ ID NO: 88358 - DNA, 443 bp, Zea mays
  unsure (1)..(443): unsure at all n locations
ggtcgacnacgcgtccgattgagaccaactagcaacatagaaagcacaatagtgtaccaacaatggcagccaaaagattttggttccttatgctccttggtctttctgcaagtgctgctaccgcaaccattttcccacaatgctcacaagctcctatagcttcctttcttcccccatacctctcaccagcggtgtcttcagtatgtgaaaacccaattcttcaaccctacaggatccaacaggcaatcgcagcaggcatcttacctttatcacccttgttcctccaacaaccgtcagccctattacagcagttacctttggtgcatttgttggcacaaaacatcaaggcacaacaactacaacaacttgtgctaggaaaccttgctgcctactctcagcaacagcagtttcttccattcaaccaactggctgcattgaactct

SEQ ID NO: 88359 - DNA, 442 bp, Zea mays
ctagcaacatagaaagcacaatagtgtaccaacaatggcagccaaaatattttgcctcgttatgctccttggtctttctgcaagtgctgctacggcgaccattttcccacaatgctcacaagctcctatagcttcccttcttcccccgtacctctcaccagcggtgtcttcggtatgtgaaaacccaattcttcaaccctataggatccaacaggcaatcgcagctggcatcttacctttatcacccttgttcctccaacaatcatcagccctattacagcagttacctttggtgcatttattggcacaaaacatcaaggcacaacaactacaacaacttgtgctagcaaaccttgcttgctactctcagcaacaacagtttcttccattcaaccaactagctgcattgaactctgctttctatttgcaacaacaacaacta

SEQ ID NO: 88360 - DNA, 436 bp, Zea mays
acgcagcaagcaacatagaaagtggaatccagtagcaacaatagagcaacaatggcgaccgagatattttccctccttatgctccttgctctttctacatgtgttgctaacgcgacaattttgcctaaatgctgacaagctcctatagcttaccttcttcccccataccttgcatcaattatagctacaatatgcgaaaacccagctcttcaaccatataggcttcaacaagcaatcgcagcaagcaacatacctttatcgcccttgtagtttcaacaatcgccagccctatctttggtgcagtcattggtacaaaccatcagggcacaacagctgcagcaactcgagctacctctgatcaaccaagtagctctggcaaacctttatccctactctcagcaacaacaaattcttacatttaaccaactgtctacac

SEQ ID NO: 88361 - DNA, 336 bp, Zea mays
agcattcaaaaacacaccaagcgaagcgcactatcaacgacctaacaccaatggctaccaagatattagccctccttgcgcttcttgcccttttagtgagcgcaacaaatgcgttcattattccacagtgctcacttgctcctagtgccagtattccacagttcctcccaccagttacttcaatgggcttcgaacatccagccgtgcaagcctacaggctacaactagcgcttgcggcgagcgccttacaacaaccaattgcccaattgcaacaacaatccttggcacatctaaccctacaaaccattgcaacgcaacaacaacaacaacagtttc

SEQ ID NO: 88362 - DNA, 332 bp, Zea mays
acccacgcgtacggttggcttctcctccccctccggttcgtgttcgggttcgtgaggttctccggggttcggtggcgtgggtgagcggatcgagatggccgcgtccgatgttgagtaccgctgcttcgtcggcggactcgcctgggccacggacgaccactccctccacaacgccttcagcacctactgcgaggtactcgagtccaagatcatcctcgatcgggagacgcatacgtcccgcggcttcggcttcgtcaccttctccacggaggatgcgatgccgaacgccatcgagggcatgaacggcaaggagctggacggccgcaacatta

SEQ ID NO: 88363 - DNA, 289 bp, Zea mays
atgaaattggaagcgacagatgacgccttaaaggctgctgaaaaggcaactgctccaaccactgcaaaatcagaaacaaaatcagcaacatcactgccacctgctcgggctccggctgctgctgctgctgctcccgctagtgcccctgctcctagaattgagagcaaaacagaacttgaaaagaaggataatccacctccagttgcaaaagcaccggaagtaacacccgataatgagtttgaaaagcgtattagaccagaagtgatacctgctaatgaaattggagttt

SEQ ID NO: 88364 - DNA, 333 bp, Zea mays
atccagatcagcaaagcggcagtgcgtagagaggatcgtcgaacagaacagcgtgaagatggtcatcgttctcgtcgtgtgcctggctctgtcagctgccagcgcctctgcaatgcagatgccctgcccctgcgcggggctgcagggcttgtacggcgctggcgccggcctgacgacgatgatgggcgccggcgggctgtacccctacgcggagtacctgaggcagccgcagtgcagcccgctggcggcggcgccctactacgccgggtgtgggcagccgagcgccatgttccagccgctccggcaacagtgctgccagcagcagatgaggat

SEQ ID NO: 88365 - DNA, 311 bp, Zea mays
attattgagaccaactagcaacatagaaagcacaatagagcaccaacaatggcggacggaatattccgcctcctgatgctccttggtctttctgccagtgctgctacggcgaccattttaccgcgatgctcgcaagctcctatcgcttaccttcttcccccgtacctctcaccagcggtgtcttcggtatgtgaaaacccaatactctaaccgtacaggatccaacaggcaatcacaggtggcattttacctctatcacccttgttcctacgacaattatcagccctattacatcagttacctttggtgca

SEQ ID NO: 88366 - DNA, 428 bp, Zea mays
  unsure (1)..(428): unsure at all n locations
cggacgcgtgggcggacgcgtgggcggacgcgtgggtcgctctcctggctctcgctgggagcgccacctccacgcatacaagcggcggctgcggctgccagccaccgccgccggttcatctaccgccgccggtgcatctgccacctccggttcacctgccacctccggtgcatctcccaccgccggtccacctgccgccgccggtccacctgccaccgccggtccatgtgccgccgccggttcatctgccgccgccaccatgccactaccctactcaaccgccccggcctcagcctcatccccagccacacccatgcccgtgccaacagccgcatccaagcccgtgccagctgcagggaacctgcngcgttggcagcaccccgatcctgggcagtgcgtcgagtttctgaggcatcagtgcagcccga

SEQ ID NO: 88367 - DNA, 390 bp, Zea mays
gaccaactagcaacatagaaagcacaatagtgtaccaacaatggcagccaagatattgggcttccttatgctgcttggtctttctgcaagtgttgctaccgcaaccattttcccacaatgctcacaagctcctatagcttcccttcttcccccatacctctcaccagcggtgtcttcaatgtgtgaaaccccaattgttcaaccctacaggatccaacaggcaatcgcaacaggcatcttaccattatcacccttgttcctccaacaaccgtcagccctattacagcagttacctttggtccatttggtggcacaaaacatcagggcacaacaactacaacaacttgtgctagcaaaccttgctgcatactctcagcaacatcagtttct

SEQ ID NO: 88368 - DNA, 413 bp, Zea mays
ctccaggtccaggctccagctagctgcaagctcatccgtctctgtcgatcagcaagaggccggggtcagaggaatggcggcgacgtcgcggctggcgctggccctcctgctggccgccttggtggcggcgtggcagctgccggcggcggcggtggcggccaactacacggtgggcgacgagaaggggtggaacccggacgtggactacacggcgtgggtgaagaagcacaagccgttctacaagggagactggctcatcttcgagtaccagaacgggcggtcggacgtggtgcaggtggacgaggtcggctacgacaactgcgacaaggccaacgcgctgagcagctacagcaagggccacacctacgccttccagctcaaggacgccaaggactactacttcatctgcagct

SEQ ID NO: 88369 - DNA, 456 bp, Zea mays
tattattgagaccaactagcaacatagaaagcacaatagtgtaccaacaatggcagccgaaatattttgcctccttatgctccttggtctttctgcaagtgctgctacggcgaccattttcccgcaatgctcgcaagctcctatagcttcccttcttcccccgtacctctcaccagcggtgtcttcggtatgtgaaaacccaattcttcaaccctacaggatccaacaggcaatcacagctggcatcttacctttatcacccttgttcctccaacaatcatcagccctattacatcagttacctttggtgcaattattggcacaaaacatcagggcacaacaactacaacaacttgtgctagcaaaccttgctgcctactctcagcaacagcaggttcttccattcaaccaactagctgcattgaactctgcttcttatttgcaacaacaacaact

SEQ ID NO: 88370 - DNA, 383 bp, Zea mays
gcaacatagaaagcacaatagtgtaccaacaatggcagccaaaatattttgcttccttatgcgccttggtctttctgcaagtgttgctaccgcaaccattttcccacaatgctcacaagctcctatagcttcccttcttcccccatacctctcaccagcggtgtcttcaatgtgtgaaaacccaattgttcaaccctacaggatccaacaggcaatcgcaacaggcatcttaccattatcacccttgttcctccaacaaccgtcagccctattacagcagttacctttggtccatttggtggcacaaaacatcaaggcaccaccactaccaccacttgggcttaccaaacttggtggatacttttaacaaccttaagttcttt

SEQ ID NO: 88371 - DNA, 277 bp, Zea mays
ggcaaacattgctgctttcttgcaacaacaacaacaattgctgccattttacccacaggttgtgggaaacattaacgccttcttgcaacagcaacagttgctaccattctacccacaggatgtggcaaacaatgtcgccttcttacaacaacaacaattgctgccatttaaccaacttgctttgacgaatcctaccaccttattgcagcagcccaccattggtggtgccatcttctagatttttttatgctttatactgtaataataaagttctcat

SEQ ID NO: 88372 - DNA, 306 bp, Zea mays
cggtttccgccctcctctcccaccgcctcgcaccgagaagatggggaagcggtggatgccgcgtggaggccaacccggacgtcctgaaccagttcatatgggggctgggagtccacgaggaggatgtgcagttctgcgacgtctacggccttgacgatgagctgctcgctatggtgccccagcccgttctcgccgtcctcttcctctacccgctcacctccctggacgaggagaaagaagaatcaagtgtttctgctgccacatcgacctcagcgggcaaggaattgagcaagaaagtttacttta

SEQ ID NO: 88373 - DNA, 384 bp, Zea mays
atcgactccagattggagaactcgacaccatgaaggtgctgatcgttgcccttgctgtgctggcgctcgctgcgagcgccgtctccagtacaagcggccgctgtggctgccagacaccacctgttcatctaccgcctccgttctatatgccgcctgcgttctatctgccgccgcagcagcagccgcagccatggcaataccccactcaaccaccgcagctaagcccgtgccagcagatctgatcctgcggcggtcgcagcgtccgcagcccgttcctgggccagtgcgtctaggtcctgaagcaccaatgcagcccggcaggcacgccctacggcttggcaaaatgtcaggcgctgcatcagcaatgctggcaccatatcatgc

SEQ ID NO: 88374 - DNA, 351 bp, Zea mays
gaccaactagcaacatagaaagcacaatagtgtaccaacaatggcagccaaaatatggggcttccttatgctccttggtctttctgcaagtgttgctaccgcaaccattttcccacaatgctcacaagctcctatagcttcccttcttcccccatacctctcaccagcggtgtcttcaatgtgtgaaaccccaattgttcaaccctacaggatccaacaggcaatcgcaacaggcatcttaccattatcacccttgttcctacaacaactcgtagccctattacagcagttacctttggttcatttggtggcacaaaacatcacggcaccacaactacaacaacctgtgct

SEQ ID NO: 88375 - DNA, 389 bp, Zea mays
gcgcattcaaccaactggctgcattgaactctgctgcttatttgcaacaacaattgccaggcagccagctagttgctgcctacccccagcaatttcttccattcaaccaactagcagcattgaactctgctgcttatttacagcagcaacaactactaccattcagccagctagctgatgtgagccctgctgccttcttgacacaacaacagttgttgccgttctacctgcacgctatgcctaacgctggcactctcttacaactgcacaaattgctgccattcaaccaacttgctttgacaacccaaccagggttctcccaccacccaataatggtgggggccttttttaaaatggttaatgagtaatagttcattattgaagttttt

SEQ ID NO: 88376 - DNA, 444 bp, Zea mays
  unsure (1)..(444): unsure at all n locations
cccacgcgtccgagaaagcacaatagtgtaccaacaatggcagccaaaatattttgcggccttatgctccttggtctttctgcaagtgctgctacggcgaccattttcccgcaatgctcgcaagctcctatagcttcccttcttcccccgtacctctcaccagcggtgtcttcggtatgtgaaaacccaattcttcaaccctacaggatccaacaggcaatcacagctggcatcttacctttatcacccttgttccncaacaatcatcagccctataacatcagttacctttggtgcatttatgggcccaaaccatcagggcacaacaactacaccaacttgtgctagcaaaccttgctgnctactctcagcaacagcagtttcttccattcaaccaactagctgcattgaactctgcttcttatttgcaaacacaacaactac

SEQ ID NO: 88377 - DNA, 433 bp, Zea mays
  unsure (1)..(433): unsure at all n locations
taccagagatcgaacaacttggtcctgcagctcaagaagagagttttgtgcgtttgggggccgggggcaagagagagagagagagccatggcggcggaccagcagccgcagctgcaggaggagatgaacgacgctgccggcggcggcctcaggctgcctccagggttccgcttccacccgagcgacttcgagattgtcagcttctacctcaccaacaaggtgctcaacacgcgcttcacctgcaccgncatcacggaagccgacctaaacaagattgagccatgggaccctccgagcaaagcaaaaatggcgagaaaggagtggtacttcttctaccagaaggaccgcaagtacccgacggggctgagggcgaaccgggccaccgaggccggttactggaaggcgacgggcaaggacaaggaggtctacaacg

SEQ ID NO: 88378 - DNA, 412 bp, Zea mays
gaaccctgctgcttatttgcaacaacaacaactaccattcagccagctacctgctgcgcgacccccagcaatttcttccattcaaccaactagcagcattgaactctcctgcttatttacagcagcaacaactactaccattcagccagctagctggtgtgagccctgctaccttcttgacacaaccacagttgttgccgttctaccagcacgttgcgcctaacgctggcaccctcttacaactgcaacaattgctgccattcaaccaacttgctttgacaaacccagcagtgttctaccaacaacccatcattggtggtgccctcttttagatttcttatgagttatagttcaataataaagttttttatctgatgtttgtggcttcccagaaataagaaagtacatttct

SEQ ID NO: 88379 - DNA, 337 bp, Zea mays
agaagttcgagcgcatgctcatgagcgccgaggagaagttcccaggcaaggtgcgcgccgtggtcaagttcaacgcggcgctggcgcaccacatcatggccggcgccgacgtgctcgccgtcaccagccgcttcgagccctgcggcctcatccagctgcaggggatgcgatacggaacgccctgcgcctgcgcgtccaccggtggactcgtcgacaccatcatcgaaggcaagaccgggttccacatgggccgcctcagcgtcgactgtaacgtcgtggagccggcggacgtcaagaaagtggccaccacattgcagcgcgcccttcaaggtggtcg

SEQ ID NO: 88380 - DNA, 306 bp, Zea mays
gctaaaattcctgatccagatgcagttaagcctgatgactgggatgaagattccccggtgggaattgtggattattaagccaccaagcctgagggatggttggatgatgaacctgaggagattgatgatcctgaggcagccaagcctgaggactgggaccatgaggaggatggtgaatgggaggcgccaaagattgacaaccccaagtgtgaagaggcacctggatgtggcgagtggaagaggccaatgaagcagaatcctgcttacaagggcaagtggcatgcacctatgattgacaaccccaac

SEQ ID NO: 88381 - DNA, 372 bp, Zea mays
aaagcacaatagtgtaccaacaatggcagccaaaatattttgcctccttatgctcctgggtatttctgcaagtgctgctacggcgaccattttcccgcaatgctcacaagctcctatagcttcccttcttcccccgtacctctcaccagcggtgtcttcggtatgtgaaaacccaattcttcaaccctacaggatccaacaggcaatcgcagctggcatcttacctttatcacccttgttcctccaacaatcatcagccctattacagcagttacctttggtgcatttattggcacaaaacatcaaggcacaacaactacaacaacttgtgctagcaaaccttgctgcctactctcagcaacaagcagttct

SEQ ID NO: 88382 - DNA, 235 bp, Zea mays
gcggcagcccgacggcgacgccctactgctcgcctcagtgccagtcgttgctgcagcagggttgccagcagctcaggcaggtggagccgcagcaccggtgccaggcgatttttagctcggtccttcagtccatgctgcatgagcaggcggaaagtggccagtgcgcgaagctgatggctgagcagatcgcgcagcaactgacggcgatgtgcggcctgcaacagtcgtctccatg

SEQ ID NO: 88383 - DNA, 323 bp, Zea mays
cggacgcgtgggattttgagcattcataaacacacctagcgaagcgcactagcaacgacctaacaacaatggctaccaagatattatccctctttgcgcttcttgcccttattgtgagcgcaacaaatgcgttcattattccacaatgctcacttgctcctagtgccattattccacagttcctccctacagatacttcaatgggcttcgaacacccagctgtgcaagcctacaggctacaacaagcgcttgcggctagcgtcttacaacaaccaattggccaattacaacaaccattcttggcacatctaaccataccaacc

SEQ ID NO: 88384 - DNA, 428 bp, Zea mays
gccaggagaagcagccgccgttgctgctgccgcgtccacagaatggggggggtcgtgagagacccataagaccaatgcgtatttcaaacgtttccaagtgaaattcaagagaaggcgggctggcaagacagactacagggccaggataaggctgattaaccaagacaaaaacaagtacaacacacccaaatacagatttgttgtgcgatttaccaacaaggacatcactgcacaaatcatatctgctagtatagcgggtgatatggttcttgcttctgcctactctcatgagttgccacgatatggtcttgaagttggtctgaccaactatgcagctgcctactgcactggacttctgttggctcgccgtgtgctaaagatccgtggtttggataaggagtatgaaggcaatgttgaggccactggtg

SEQ ID NO: 88385 - DNA, 468 bp, Zea mays
  unsure (1)..(468): unsure at all n locations
accggttcggaattcccgggaacacaccaagcgaagcgcactagcaacgacctaacaacaatggctaccaagatattagccctccttgcgcttcgggccctttttgtgagcgcaacaaatgcgttcattattccacaatgctcacttgctcctagtgccattattccacagttcctcccaccagttacttcaatgggcttcgaacacctagctgtgcaagccaacatgcaacaacaagcgcttgcggcgagcgtcttacaacaaccaattgcccaattgcaacaacaatccttgccacatctaacaatacaagccatcacaacgcaacagcaacaacagttcctaccagcactgagccacctagccatggtgaaccctgccgnctacttgcaagagcagctgcttgcatccaacccacttgctctggcgaacgtagttgcaaaccagcaacaacaacagctacaacag

SEQ ID NO: 88386 - DNA, 436 bp, Zea mays
gcaacatagaaagcacaatagtgtaccaacaatggcagccaaaatattttgcctccttgaggctccttggtctttctgcaagtgctgctacggcgaccattttcccgcaatgctcgcaagctcctatagcttcccttcttcccccgtacctctcaccagcggtgtcttcggtatgtgaaaacccaattcttcaaccctacaggatccaacaggcaatcacagctggcatcttacctttatcacccttgttcctccaacaatcatcagccctattacatcagttacctttggtgcatttattggcacaaaacatcatggcacaacaactacaacaacttgtgctagcaaaccttgctgcctactctcagcaacagcagtttcttccattcaaccaactagctgcattgaactctgcttcttatttgcaacaacaaca

SEQ ID NO: 88387 - DNA, 275 bp, Zea mays
gccgccggttcatctgccgccgccaccatgccactaccctactcaaccgcggcggcctgggcctcatccccagccacacccatgcccgtgccaacagccgcatccaagcccgtgccagctgcagggaacctgcggcgttggcagcaccccgatcctgggccagtgcgtcgagttcctgaggcatcagtgcagcccgacggcgacgccctactgctcgcctcagtgccagtcgttgcggcagcagtgttgccagcagctcaggcaggtggagccgc

SEQ ID NO: 88388 - DNA, 341 bp, Zea mays
caactagcaacatagaaagcacaatagtgtaccaacaatggcagccaaaatattttggctccgtatgctccttggtctttctgcaagtgctgctacggcgaccattttcccgcaatgctcgcaagctcctatagcttcccttcttcccccgtacctctcaccagcggtgtcttcggtatgtgaaaacccaattcttcaaccctacaggatccaacaggcaatcacagctggcatcttacctttatcacccttgttcctccaacaatcatcagccctattacatcaagtacctttggtgcatttattggcacaaaacatcaaggcaccacaactacaacaac

SEQ ID NO: 88389 - DNA, 403 bp, Zea mays
tgtatttggtttcacaaatgaaaatccccacagaataaaaaagtgtgctgttggtaggacgacgatttacaataacttgcctgaagacatttgcatcacgaattgctgttggtgattgtcgtgatggtgttctcttctattcttataatgagagtcataggaagttggaattggtctattctgatcctgctcatagattggtgggtgatattgctcttttaaattgtgaaactgctgtggtatcagatcgacgtgggagcatatctgtattatcatgcaccagattggaagtttcagaaagtccacagaagaacttagccgtgaattgttcattttatatgggtgaaacaaccatgagcattcagaaggctgcattcaggtatcggcttccaattgatgatga

SEQ ID NO: 88390 - DNA, 337 bp, Zea mays
cgaagcgcactagcaacgacctaacaccaatggctaccaagatattagccctccttgcgcttcttgccctttgagtgagcgcaacaaatgcgttcattattccacagtgctcacttgctcctagtgccattattccacagttcctcccaccagttacttcaatgggcttcgaacatccagccgtgcaagcctacaggctacaactagcgcttgcggcgagcgccttacaacaaccaattgcccaattgcaacaacaatccttggcacatctaaccctacaaaccattgcaacgcaacaacaacaacaacaacagtttctgccatcactgagccacct

SEQ ID NO: 88391 - DNA, 395 bp, Zea mays
attctcagcattcacaaacacaccaatctaagcgcactatcaacgacctaacaccaaggggtgccaagatattagccctccttgcgcttcttgcccttttagtgagcgcagcacatgcgatcattattccacagatgctcactagctcctagtgccattattccacagttcctcacaccagttacttcaatgggcttccaacatacagccgtgcaagcctacacgctacaactagcgcttgcgactagcgccttacaacaaccaattgcccaattgcaacaacaatccttggcacatgtaaccctacaaaccattgcgacgcaacaacatcgacaacaacaggttatgccatcactgaaccaactaaccgttgtgaaccctgacacctacttgca

SEQ ID NO: 88392 - DNA, 387 bp, Zea mays
  unsure (1)..(387): unsure at all n locations
caacaagcaacatagaaagtggaatccagtagcaacaatagagcaacaatggcgaccaagatattttccctccttatgctccttgctctttctacatgtgttgctaacgcgacaattttccctcaatgctcacaagctcctatagcttcccttcttcccccataccttccatcaattatagcttcaatatgtgaaaacccagctcttcaaccatataggcttcaacaagcaatcgcagcaagcaacatacctttatcgcccttgatgtttcaacaatcgccagccctatctctggtgcagtcattggtacanaccatcanggcacaacagctgcagcaactcgtgctacctctgatcacccaagtagctcttgcaaacctttctcct

SEQ ID NO: 88393 - DNA, 150 bp, Zea mays
cgcaaattgcaccaagaaatccatcgataggccgtcgacaggggaattaatggcgtggtcatctagcatcagccaccggcgcctcatcctctcagccgtcgttctgctctccgggctcgcagctgccagcgcctgctcctgtacctactg

SEQ ID NO: 88394 - DNA, 334 bp, Zea mays
gttgccctcgctctcctggctctcgctgcgagcgccacctccacgcatacaagcgggggctgcggctgccagccaccgccgccggttcatctaccgccgccggtgcatctgccacctccggttcacctgccacctccggtgcatctcccaccgccggtccacctgccgccgccggtccacctgccaccgccggtccatgtgccgtcgccggttcatctgccgccgtcaccatgccactaccctactcaactcgccctgcctcaggctcatccccagccacaaccatgcccgtgccaacagccgtattcaagcccgtgccaactgcagggaacct

SEQ ID NO: 88395 - DNA, 412 bp, Zea mays
accggttcggaattcccgggtcaatgcagctagttggttgaactctgcttcttatttgcaacatcaacaactaccattcagccagctgtctgctgcctacccccagcaatttcttccattcaaccaactgacagctttgaactctcctgcttatttacagcagcaacaactactaccattcagccagctagctggtgtgagccctgctaccttcttgacacaaccacaattgttgccgttctaccagcacgctgcgcctaacgctggcaccctcttacaactgcaacaattgctgccattcaaccaacttgctttgacaaacccaacagcattctaccaacaacccatcattggtggtgccctcttttagatttcttatgagttatagttcaataataaagttttttgtctg

SEQ ID NO: 88396 - DNA, 459 bp, Zea mays
gcacaatagtgtaccaacaatggcagctaaaatattttgcctccttatgctgcttggtgtttctgcaagtgctgctacggcgaccattttcccacaatgctcacaagctcctatagcttcccttcttcccccgtacctctcaccaacggtgtcttcggtatgtgaaaacccaattcttcaaccctacaggatccaacaggcaatcgcagctggcatcttacctttatcacccttgttcctccaacaatcatcagccctattacagcagttacctttggtgcatttattggcacaaaacatcagggcacaacaactacaacaacttgtgctagcaaaccttgctgcctactctcagcaacagcagtttcttccattcaaccaactagctgcattgaactctgcttcttatttgcaacaacaacaactaccattcagccagctatctgctgcctaccccca

SEQ ID NO: 88397 - DNA, 414 bp, Zea mays
gcagctcccatcctctcgctcgccaggagaagcagccgccgttgctgctggggcgtccgcagaatggggggtttcgtgaagactcataagaccaatgcgtatttcaaacgtttccaagtgaaattcaagagaaggcgggctggcaagacagactacagggccaggataaggctgattaaccaagacaaaaacaagtacaacacacccaaatacagatttgttgtgcgatttaccaacaaggacatcactgcccaaatcatatctgctagtatagcgggtgatatggttcttgcttctgcctactcgcatgagttgccacgatatggtcttgaagttggtctgaccaactatgcagctgcctactgcactggccttctgttggctcgccgtgtgctcaagatccgtggtttggat

SEQ ID NO: 88398 - DNA, 425 bp, Zea mays
gcaacatagaaagcacaatagtgtaccaacaatggcagccaaaatattttgcctccttatgctccttggtatttctgcaagtgctgctacggcgaccattttcccgcaatgctcacaagctcctatagcttcccttcttcccccgtacctctcaccagcggtgtcttcggtatgtgaaaacccaattcttcaaccctacaggatccaacaggcaatcgcagctggcatcttacctttatcacccttgttcctccaacaatcatcagccctattacagcagttacctttggtgcatttattggcacaaaacatcagggcacaacaactacaacaacttgtgctagcaaaccttgctgcctactctcagcaacagcagtttcttccattcaaccaactagctgcattgaactctgcttcttatttgc

SEQ ID NO: 88399 - DNA, 372 bp, Zea mays
gaccaacagcacatagaaagggaatacagtagcaacaatagagcacaatggcggccaggatattttccatccttatgctccttgctctttctgcatgtgttgctaacgcgaccatttttcctcaatactcacaagctcctatagctgcccttcttcccccataccttccatcaatgaccgcttcagtttgtgaaaacccagcccttcaaccctacaggctccaacaagcaatcgcaacaagcaacttacctttatcacccctgttctttcaacaatcgccagccctatctttggtgcagtcattggtacaaaccatcagggcacaacagctgcaacaactcgtgctaccagtgatcagccaagtagctctgg

SEQ ID NO: 88400 - DNA, 434 bp, Zea mays
gaaacacaccaagcgaagctacctagcaacgacttaacaacaatggctaccaagatagtagcgcctccttgcgcttcttgccctttttgtgagcgcaacaaatgcgttcattattccacaatgctcacttgctcctagtgccattataccacagttcctccgaccagttacttcaatgggcttcgaacacctagctgtgcaagcctacaggctacaacaagcgcttgcggcgagcgtcttacaacaaccaattaaccaattgcaacaacaatccttggcacatctaaccatacaaaccatcgcaacacaacagcaacaacagttcctaccagcactgagccaactagatgtggtgaaccctgtcgcctacttgcaacagcaggtgcttgcatccaacccacttgctctggcaaacgtagctgcataccaacaac

SEQ ID NO: 88401 - DNA, 358 bp, Zea mays
ccaacaagcaacatagaaagtggaatccagtagcaacaacagagcaacaatggcgacgaagagattttccctccttatgctccttgctctttctgcatgtgttgctaacgcgacaattttccctcaatgctcacaagctcctatagcttcccttcttcccccataccttccatcaatgatagcttcagtatgtgaaaacccagctcttcagccctataggctccaacaagcaatcgcagcaagcaacatacctttatcacccttgttgtttcaacaatcgccagccctatctttggtgcagtcattggtacaaaccatcaaggcacagcagctgcagcaactcgtgctacctgtgatc

SEQ ID NO: 88402 - DNA, 355 bp, Zea mays
gcaaaatacatagtgaagtacactagctcatcttagcaccaatgggagccaagattgtttccctccttgccctccttgctctttcagcaagcgctgctacctctactattattccacaatgctcacaacaatacctctctccggtgacagccgcgggatttcaacacccaactatacaatcctacatgctacatgaggccatcgtagcaagcatcttacggtcattagcattaaccctccaacagccatatgccctattgcaacaaccatccttagtgcatctgtatctccaaagaatcgcgacacaacagctacaacaacagttgctaccaacaatcaatcaagtagttgcagt

SEQ ID NO: 88403 - DNA, 373 bp, Zea mays
acgcatcaagctctatgtgcgcagggtgtttatcatggacaactgtgaggaactgatccgtgagtggctgagtattcttaagggtattgctgactctgaggaccttgccctcaatatctcccgtgagactcttgatcataacacgatcctgaaggtgatccgcaagaaccttgtgaagaagtgtgttgagctcttctttgagattgctgaatacaaggaggactacgacaagttttatgacgctatatccaagaacctcaagcttggcatacatgaggactcgcagaacatgggccagactgctgagcttatgagataccactacacgatgagcggtcatgagctgaccaggctcaacgattatgcgacgagg

SEQ ID NO: 88404 - DNA, 445 bp, Zea mays
  unsure (1)..(445): unsure at all n locations
gcaacatagaaagcacaatagtgtaccaacaatggcagccaaaatattttggctccttgtgctccttggtctttctgcaagtgctgctacggcgaccattttcccgcaatgctcgcaagctcctatagcttcccttcttcccccgtacctctcaccagcggtgtcttcggtatgtgaaaacccaattcttcaaccctacaggatccaacaggcaatcacagctggcatcttacctttatcacccttgttcctccaacaatcatcagccctattacatcagttacctttggtgcatntattggcacanaacatcagggcacaacaactacaacaacttgtgctagcaaaccttgctgcctactctcagcaacagcagtttcttccattcaaccaactagctgcattgaactctgcttcttatttgcaacaacaacaactaccattc

SEQ ID NO: 88405 - DNA, 327 bp, Zea mays
ccaactagcaacatagaaagcacaatagtgtaccaacaatggcagccaaaagattttggttccttatgctccttggtctttctgcaagtgctgctaccgcaaccattttcccacaatgctcacaagctcctatagcttcctttcttcccccatacctctcaccagcggtgtcttcagtatgtgaaaacccaattcttcaaccctacaggatccaacaggcaatcgcagcaagcatcttacctttatcacccttgttccttcaacaacccgtcagccctattacagcagttacctttggtgcatttgttggcacaaaacatcaaggca

SEQ ID NO: 88406 - DNA, 323 bp, Zea mays
gtgatattatggatccatccctgaactgccgaagtatcccaacaaacaactgtgaaaggagaactctggtagagaagtcagaacattgtccggatgattataatttggaaatgaagaggaaaagaaacgatggtacaaaaggtacagttgttctaaatagcggttctaaagtagagggattgttatgtcttttggaacaggccattcacagtggcagggcacttgttctgagtgaagatgagcttgctgattcagatctggtctatgaaaagtctgttgcttttacaaagtcaattccgcgaagactggtttttgagaatact

SEQ ID NO: 88407 - DNA, 436 bp, Zea mays
agcaaaccttgctgcctactctcagcatcaacagtttcttccattcaaccagctagctgcattgaactctgcttcttatttgcaacaacaacaactaccattcagccagctatctgctgcctacccccagcaatttcttccattcaaccaactgacagctttgaactctcctgcttatttacagcagcaacaactactaccattcagccagctagctggtgtgagccctgctaccttcttgacacaaccacaattgttgccgttctaccagcacgctgcgcctaacgctggcaccctcttacaactgcaacaattgctgccattcaaccaacttgctttgacaaacccaacagcattctaccaacaacccatcattggtggtgccctcttttagatttcttatgagttatagttcaataataaaagtttttggctg

SEQ ID NO: 88408 - DNA, 389 bp, Zea mays
gcccgtgccagcagttcggatcctgcggcgtcggcagcgtcggcagcccgttcctgggccagtgcgtcgagttcctgaggcaccagtgcagcccggcggcgacgccctacggctcgccacagtgccaggcgctgcagcagcagtgctgccaccagatcaggcaggtggagccgctgcaccggtaccaggcgacatacggtgtggtcctgcagtccttcctgcagcagcagccgcagggcgagctcgcggcgctgatggcggcccacgtagcgcagcagctgacggcgatgtgcggactgcagctgcagcagccaggtccctgcccttgcaacgcagctgccggctgtgtctactactgaggaaactatgtactgtagtaataatgtaat

SEQ ID NO: 88409 - DNA, 340 bp, Zea mays
caactcgtgctagcaaaccttgctgcctactctcagcaacaacagtttctgccattgaaccgactagctgcattgaactctgctgcttatttgcagcaacaacaactactaccattcagccagctagctgctgcctacccccggcaatttcttccattcaaccaactggcagcattgaactctcatgcttatgtacaacaacaacaactactaccattcagccagctagctgctgtgagccctgctgccttcttgacacagcaacatttgttgccgttctacctgcacactgcgcctaacgttggcaccctcttacaactgcaacaattgctgccattcg

SEQ ID NO: 88410 - DNA, 316 bp, Zea mays
cggacgcgtgggcaactagcaacatataaagcacaatagtgtaccaacaatggcaacgaaagtattctgcttccttatgctccttggtctttctgcaagtgctgctaccgcgaccattttcccgcaatgctcacaagctcctatagcttcccttcttcccccatacctctcaccagcggtgtcttcagtatgtgaaaacccaattcttcaaccctacaggatccaacaggcaatcgcagcaggcatcttacctttatcacccttgttcctccaacaaccgtcagccctattacagcagatacctttggtgcatttg

SEQ ID NO: 88411 - DNA, 361 bp, Zea mays
  unsure (1)..(361): unsure at all n locations
ctctgtcagctgccagcgcctctgcaatgcagatgccctgcccctgcgcggggctgcgagggcttgtacggcgctggcgccggcctgacgacgatgatgggcgccggcgggctgtacccctacgcggagtacctgaggcagccgcagtgcagcccgctggcggcggcgccctactacgccgggtgtgggcagacgagcgccatgtaccagccgctccggcaacagtgctgccagcagcagatgaggatgatggacgtgcagtccgtcgcgcagcagctgcagatgatgatgcagcttgagcgtgccgctgccgncagcagcagcctgtacgagccagctctgatgcagcagcagcagcagc

SEQ ID NO: 88412 - DNA, 358 bp, Zea mays
ctcgcattgttaccgaggacttcttgccacttcccagcaaagggaaatctgggaaggatggctggtatcctcctggtcatggtgatgtgtttccttctttgaataacagcggaaaacttgacatcttattggctcagggcaaggagtatgtctttgttgcaaactcagacaacttgggtgctatagtcgacatcaagatcctaaaccatctgatcaataaccagaacgagtactgcatggaggttactccaaagacgctggctgacgttaagggtggcactctcatctcttacgaaggaagagttcagcttttggagattgcccaaagtccccgatgaagcatgtgaatggaattaaa

SEQ ID NO: 88413 - DNA, 295 bp, Zea mays
gcaaattgcaccaagaaatccatcgagaggccgtcgacaggggaattaatggcgtcggcgtctagcagcagccaccgccgcctcatcctcgcagccgccgtcctgctctccgtgctcgcggctgccagcgccagcgccgggacctcctgcgtgccggggtgggccatcccgcacaacccgctcccgagctgccgctggtacgtgaccagccggacctgcggcatcgggccgcgcctcccgtggccggagctgaagaggagatgctgccgagagctggcggacatcccggcgtact

SEQ ID NO: 88414 - DNA, 438 bp, Zea mays
  unsure (1)..(438): unsure at all n locations
tagcaacatagaaagcacaatagtgtaccaacaatggcagccaaaatatttggcttccggatgctccttggtctttctgcaagtgctgctaccgcaaccattttcccacaatgctcacaagctcctatagcttcctttcttcccccatacctctcaccagcggtgtcttcagtatgtgaaaacccaattcttcaaccctacaggatccaacaggcaatcgcagcaggcatcttacctttatcacccttgttcctccaacaaccgtcagccctattacagcagttacctttggtgcatttgttggcacaaaacatcaaagcacaacaactacaacaactngtgctaggaaaccttgctgcctactctcagcaacagcagtttcttccattcaaccaactggctgcattgaactctgctgcttatttgcaacaacaacta

SEQ ID NO: 88415 - DNA, 430 bp, Zea mays
  unsure (1)..(430): unsure at all n locations
gcgaagcgcactagcaacgacctaacaacaatggctaccaagatattagcgctccttgcgcttcttgccctttttgtgagcgcaacaaatgcgttcattattccacaatgctcacttgctcctagtgccattattccacagttcctcccaccagttacttcaatgggcttcgaacacctagctgtgcaagccaacatgcaacaacaagcgcttgcggcgagcgtcttacaacaaccaattgcccaattgcaacaacaatccttgccacatctaacaatacaagccatcacaacgcaacagcaacaacagttcctaccagcactgagccacctagccatggtgaaccctgccgnctacttgcaagagcagctgcttgcatccaacccacttgctctggcgaacgtagtttgcaaccagcaacaacaacagc

SEQ ID NO: 88416 - DNA, 445 bp, Zea mays
gggaagctgcaccttgggatgccctttgcacaaggtgcctttgggaagctgtgacaggggaacatataatgggatggatgttgctattaagcttttggagcgacctgaggctgaccctgagaaagctcaactgttagagcagcagtttgtccaagaagttatgatgcttgcaacactgaggcacccgaatattgtcaagttcattggtgcatgcaggaagccattggtttggtgtattgtgacagagtatgcaaagggtggatctcttaagaatttcttgagcaagaagcagaacaggtctgttccgctgaagtggcagtcaagcaggcattggatgttgcacgcggcatggcctatgtccatggccttgggttcattcacagagatcttaagtcggacaacctcctgatttctggtgataagtccattaagattgccgactttg

SEQ ID NO: 88417 - DNA, 321 bp, Zea mays
  unsure (1)..(321): unsure at all n locations
agaaagcacaatagtgtaccaacaatggcagccaaaatattttgcttccttatgctccgtggtctttctgcaagtgttgctaccgcaaccattttcccacaatgctcacaagctcctatagcttcccttcttcccccatacctctcaccagcggtgtcttcaatgtgtgaaaccccaattgttcaaccctacaggatccaacaggcaatcgcaacaggcatcttaccattatcacccttgttcctccaacaaccgtcagccctattacagcangttacctttgtccatttggtggcacaaaacatcagggcacaacaacta

SEQ ID NO: 88418 - DNA, 417 bp, Zea mays
  unsure (1)..(417): unsure at all n locations
gagggcccaagctgagaatgaaggaaaaactgttgagtcgaagaaaccaattgttgtgaaggatggccttaaccatgtgacttacctcattgagcagaacaaggctcagcttgttgtcatcgctcatgacgtggatccgattgaactggttgtgtggcttccagccctgtgcaggaagatggaggtcccttactgcattgttaaaggaaaggctcgccttggatcgattgttcacaagaagaatgcatcagtcttgtgtctcaccactgtcaagaacgaggataagcttgagttcagcaagatcttggaggctattaaggcaaacttcaacgacaagttcgatgaggtcangaaaaaattggggaggtggcatcatggaatccaagtcgaaggccaagaccaaggcccgggaaaagc

SEQ ID NO: 88419 - DNA, 355 bp, Zea mays
cggacgcgtgggcttagttggcgtatgtaggttgaaaattattcgtgatatatgcagggggtggatgtgcatacaccgcatgaagatagttcacagggatctcaaaagtgcaaactgcctggtgaacaaacattggactgttaagatatgtgactttggtctatctcgagtgatgattgatagtactatgactgataattcctctgctggcaccccggaatggatggcccctgagcttatacggaatgaaccttttacagagaaatgtgatatattcagccttggtgttatcatgtgggagctgtgcacattgagtcgcccatgggaaagcattctcccagttcaagtggtgtac

SEQ ID NO: 88420 - DNA, 407 bp, Zea mays
cggacgcgtgggcggacgcgtgggggccgacgtctacagccctggggctgggaggatcacacgcctcaccagccacaagttccccgtcctcaacctcgtacagatgagcgcggtgcgggtagacctgtaccaggacgccatcatgtcgccgttctggaacttcaacgcccacagcgccatgtacggcatcaggggcagtgcaagggtccaggtcgccagcgacaacgggaccacggtgttcgacgacgtgctccgtgcggggcagctgctcatcgtaccccagggctacctcgtcgccaccaaggcgcagggagaaggcttccagtacatcgccttcgagacgaaccctgacaccatggtcagccacgtcggcggggagaactccgtcctgagcgactggccggccg

SEQ ID NO: 88421 - DNA, 386 bp, Zea mays
caactagcaacatagaaagcacaatagtgtaccaacaatggcagccaaaatattttgcttccttatgctccttggtcggtctgcaagtgctgctaccgcaaccattttcccacaatgctcacaagctcctatagcttcctttcttcccccatacctctcaccagcggtgtcttcagtatgtgaaaacccaattcttcaaccctacaggatccaacaggcaatcgcagcaggcatcttacctttatcacccttgttcctccaacaaccgtcagccctattacagcagttacctttggtgcatttgttggcacaaaacatcaaggcacaacaactacaacaacttgtgctaggaaaccttgctgcctactctcagcaacagcagtttc

SEQ ID NO: 88422 - DNA, 317 bp, Zea mays
ccaactagcaacatagaaagcacaatagtgtaccaacaatggcagctaaaatgtttggcctccttatgctccttggtctttctgcaagtgctgctacggcgaccattttcccacaatgctcacaagctcctatagcttcccttcttcccccgtacctctcaccaacggtgtcttcggtatgtgaaaacccaattcttcaaccctacaggatccaacaggcaatcgcagctggcatcttacctttatcacccttgttcctccaacaatcatcagccctattacagcagttacctttggtgcatttattggcacaaaac

SEQ ID NO: 88423 - DNA, 299 bp, Zea mays
ctactaccattcagccagctagctggtgtgagccctgctaccttcttgacgcgaccacagttgttgccgttctaccagcacgctgcgcctaacgctggcaccctcttacaactgcaacaattgctgccattcaaccaacttgctttgacaaacccagcagcattctaccaacaacccatcattggtggtgccctcttttagatttcttatgagttatagttcaataataaagttttttgtctgacaaaaagacctattacagaagatacctttggtgcatttgttggcacaaaacaaaa

SEQ ID NO: 88424 - DNA, 425 bp, Zea mays
gattcagcaaaaggctataatactcgtggaatggcatatgccatgcttggcgtatgggaggaagctgcttatgatctgcacacagtatctaacatggattacgacgaggagatcaatgctgtgctcaagaaggtggagcctaatgctcacaagatagtggaacatcgcaggaagtatgagaggttgagaaaagagagggaggaaaagagagcgcagcgtgatcggctttgtcaacgtgcagaggcgcaggctgcttacgacaaggccaagaggaaggagcaatcgtcaagtcgctcatcaggaggtgcatctcccagaggctttcctggagggatgcctggtggtggtttccctagagggatgcccgggggatgtttcctcgggggcggcatgcctgggggtttacctgggggttgcatgccttg

SEQ ID NO: 88425 - DNA, 367 bp, Zea mays
  unsure (1)..(367): unsure at all n locations
agaccaactagcaacatagaaagcacaatagtgtaccaacaatggcagccagaatattgtgcctccttatgctccttggtctttctgcaagtgctgctacggcgaccattttcccgcaatgctcgcaagctcctatagcttcccttcttcccccgtacctctcaccagcggtgtcttcggtatgtgaaaacccaattcttcaaccctacaggatccaacaggcaatcacagctggcatcttacctttatcacccttgttcctccaacaatcatcagccctattacatcagttacctttggtgcatttattggcacaaaacatcanggcacaacaactaccaccacctggtgctagcaaaccttgctg

SEQ ID NO: 88426 - DNA, 459 bp, Zea mays
  unsure (1)..(459): unsure at all n locations
gaccaactagcaacatagaaagcacaatagtgtaccaacaatggcagccaagatatttggcctccttatgctccttggtctttctgcaagtgctgctacggcgaccattttcccgcaatgctcgcaagctcctatagcttcccttcttcccccgtacctctcaccagcggtgtcttcggtatgtgaaaacccaattcttcaaccctacaggatccaacaggcaatcacagctggcatcttacctttatcacccttgttcctncaacaatcatcagccctattacatcaggtacccttgggtgcatnaattggcacaaaaacatcagggcccaccacctccaccaacttgtgctagcaaaccttgctgcctactttcagcaacagcagttctttccattcaaccaactagctgcattgaactctgcttcttatttgcaacaacaacaactaccattcagc

SEQ ID NO: 88427 - DNA, 394 bp, Zea mays
cggacgcgtgggttcagaaacacaccattcgaagcacattatcaacaaccgaacaacgatggctaccaagatattatccctccttgcgcttcttgcgctttttgcgagcgcaacaaatgcgttcattattccacaatgctcacttgctccaagttccattattacacagttccttccaccagttacttcaatgggctttgaacacccagctgtgcaagcctataggctacaacaagcaattgctgctagcgtcttacaacaaccaatttatcagttgcaacaactatccttggcacatctaacaatacaaaccatctgaacgcagcatcaacaacaatacttaccactactgaaccacctatccatggtgaaccttgacgccttgcaacagtag

SEQ ID NO: 88428 - DNA, 394 bp, Zea mays
cagctagacccacgcgtccgaacatagaaagcacaatagtgtaccaacaatggcagccaaaatatttagctggcttatgctccttggtctttctgcaagtgctgctaccgcaaccattttcccacaatgctcacaagctcctatagcttcctttcttcccccatacctctcaccagcggtgtcttcagtatgtgaaaacccaattcttcaaccctacaggatccaacaggcaatcgcagcaggcatcttacctttatcacccttgttcctgcaacaaccgtcagccctattacagcagttacctttggtgcatttgttggcacaaaacatcaaggcacaacaactacaacaacttgtgctaggaaaccttgctgcctactctcagcaacagcag

SEQ ID NO: 88429 - DNA, 314 bp, Zea mays
gcgacagctcgacaaagatttgtgagagtgatccggcgctgagaagagatggctaagatcgccgcagccgccgcggcggcggcggcgctgtgcttcgcggccctggtggccgtggccgtctgccaaggcgaggtcgagcggcagaggctcagggacctgcagtgctggcaggaggtccaggagagcccgctcgacgcgtgccgccaggtcctcgaccggcagctaaccggcggcggcgtcggcggcccgttccgggggggcaccggggctccgatgcagtgctgccagcagctccaggacgtgagccgcgagtg

SEQ ID NO: 88430 - DNA, 455 bp, Zea mays
attgatacgaactagcaacatacatagttaagtacactagcaacatcttaggaccaatggcagccaagatttttgccatgcttgccctccttgctctttcagcaagcgttgctaccgcgactattattccacaatgctcacaacaatacctctctccggtgacagccgcgagatttgaatacccaactatacaatcctacaggctacaagaggccatcgcagcaagcatcttacggtcgttagcattgaccgtccaacaaccatatgccctattgcaacaaccatccttaatgaatctatatctccaaagaatcgcagcacaacaactacaacaacagttgcttccaacaatcaatcaagtagttgcagcgaaccttgctgcttaccttcagcaacaacaatttcttccattcaatcaactagctggggtgaaccctgctgcttacttgcaggca

SEQ ID NO: 88431 - DNA, 294 bp, Zea mays
gcaaaaagctgctacctcaaccattcttcccacaatgctacacaagcctactatagctatcctttcttcccccatacctctcaccagcgacgtcttcagtatgttaaaacccaattcttcaaccctacaggatccaacaagcaatcgcaacacgcatcttacctttatcacccttgttcctccaacaaccgtcagccctattacagcaattacctttgatgcatttgttgccacaaaacatcaaagcacaacaactacaacaacttgtgctaagaaaccttgctgcctactctc

SEQ ID NO: 88432 - DNA, 444 bp, Zea mays
aaaaacacaccaagcgaagcgcactagcaacgacctaacaccaatggctacgaagatattagccctccttgcgcttcttgcccttttagtgagcgcaacaaatgcgttcattattccacagtgctcacttgctcctagtgccagtattccacagttcctcccaccagttacttcaatgggcttcgaacatccagccgtgcaagcctacaggctacaactagcgcttgcggcgagcgccttacaacaaccaattgcccaattgcaacaacaatccttggcacatctaaccctacaaaccattgcaacgcaacaacaacaacaacagtttctgccatcactgagccacctagccgtggtgaaccctgtcacctacttgcaacagcagctgcttgcatccaacccacttgctctggcgaacgtagctgcataccagcaacaacaaca

SEQ ID NO: 88433 - DNA, 299 bp, Zea mays
  unsure (1)..(299): unsure at all n locations
atgagctttatctactccagagcgcagtagaacccgatcgacaccatgagggtgttgcgcgttgccctcgctctcctggctctcgctgcgagcgccacctccacgcatacaagcggcggctgcggctgccagccaccgccgccggttcatctaccgccgccggtgcatctgccacctccggttcacctgccacctccggtgcatctcccaccgccggtccacctgccgccgccggtccacctgccaccgncggtccatgtgccgncgncggttcatctgccgncgncaccatgccacta

SEQ ID NO: 88434 - DNA, 403 bp, Zea mays
cggacgcgtgggtggacgtcagcctagcaattagctcatcgactccagattggagaactcgacaccatgaaggtgctgatcgttgcccttgctctcctggcgctcgctgcgagcgccgcctccagtacaagcggcggctgtggctgccagacaccaccgtttcatctaccgcctccgttctatatgccgcctccgttctatctgccgccgcagcagcagccgcagccatggcaataccccactcaaccaccgcagctaagcccgtgccagcagttcggatcctgcggcgtcggcagcgtcggcagcccgttcctgggccagtgcgtcgagttcctgaggcaccagtgcagcccggcggcgacgccctacggctcgccacagtgccaggcgctgcagcagcagt

SEQ ID NO: 88435 - DNA, 425 bp, Zea mays
cgcacatatctactatactatactctaggaagcaaggacaccaccgccatggcagccgaagatgcttgcattgttcgctctcctagctctttgtgcaagcgccactagtgcgacccatattccagggcacttgccaccagtcatgccattgggtaccatgaacccatgcatgcagtactgcatgatgcaacaggggcttgccagcttgatggcgtgtccgtccctgatgctgcagcaactgttggccttaccgcttcagacgatgccagtgatgatgccacagatgatgacgcctaacatgatgtcaccattgatgatgccgagcatgatgtcaccaatggtcttgccgagcatgatgtcgcaaatgatgatgccacaatgtcactgcgacgccgtctcgcagattatgctgcaacagcagttac

SEQ ID NO: 88436 - DNA, 419 bp, Zea mays
ccaactagcaacatagaaagcacaatagtgtaccaacaatggcagccaaaatattttgcctccttatgctccttggtctttctgcaagtgctgctacggcgaccattttcccgcaatgctcgcaagctcctatagcttcccttcttcccccgtacctctcaccagcggtgtcttcggtatgtgaaaacccaattcttcaaccctacaggatccaacaggcaatcacagctggcatcttacctttatcacccttgttcctccaacaatcatcagccctattacatcagttacctttggtgcatttattggcacaaaacatcagggcacaacaactacaacaacttgtgctagcaaaccttgctgcctactctcagcaacagcagtttcttccattcaaccaactagctgcattgaactct

SEQ ID NO: 88437 - DNA, 402 bp, Zea mays
ggaattcccgggtcgacccacgcatcaggcgtccggaactagcaacatagaaagcacaatcgtgtaccaacaatggcagccaaaatatttagcctacttatgctccttggtctttctgcaagtgctgctacggagaccattttcccacaatgctgacaagctcctatagctgtccttcttacaccgtacctctaaccagcggtgtcttcggtatgtgaaaacccaatacttcaaccctatgcgatccaacaggcaatcgcagctggcatcttacctttatcacccttgttcctccaacaatcatcagacctcttacagcagctaccttgggtgcatttattggcacaatacatgagggcacaacatctacaacaactggagctagcaaaccttgctgcctac

SEQ ID NO: 88438 - DNA, 425 bp, Zea mays
cccacgcgtccggcacaatagtgtaccaacaatggcagccaaaatattttgcctccttatgctccttggtatttctgcaagtgctgctacggcgaccattttcccgcaatgctcacaagctcctatagcttcccttcttcccccgtacctctcaccagcggtgtcttcggtatgtgaaaacccaattcttcaaccctacaggatccaacaggcaatcgcagctggcatcttacctttatcacccttgttcctccaacaatcatcagccctattacagcagttacctttggtgcatttattggcacaaaacatcagggcacaacaactacaacaacttgtgctagcaaaccttgctgcctactctcagcaacagcagtttcttccattcaaccaactagctgcattgaactctgcttcttatttgc

SEQ ID NO: 88439 - DNA, 415 bp, Zea mays
gagaccaacaagcaacatagaaagtggaatacagtagcaacaatagagcaacaatggctgccaagatattttccatccttatgctccttgctctttctgcatgtgttgctaacgcgaccatttttcctcaatactcacaagctcctatagctgcccttcttaccccataccttccatcaatgaccgcttcagtttgggaaaacccagcccttcaaccctacaggctccaacaagcaatcgcaacaagcaacttacctttatcacccctgttctttcaacaatcgacagccctatctttggtgcagtcattggtacaaaccatcaaggcacaacagctgcaacaactcgtgctaccagtgatcaaccaagtagctctggcaaacctttctccctactctcagcaacaacaatttct

SEQ ID NO: 88440 - DNA, 427 bp, Zea mays
atcgatagcatgggtctgcgaattattgatagctaagaacacaacactggcagccaaggtattctgcttccttatgctccttggtctttctgcaagtgttgctaccgcaaccattttcccacaatgctcacaagctcctatagcttaccttctttccccatacctctcaccagcggagtcttcaatgtgtgaaaacccaattgttcaaccctacaggatccaacaggcaatcgcaacaggcatcttaccattatcacccttgatcctccaacaaccgtcagccctattacagcagttacctttggtccatttggtggcacaaaacatcagggcacaacaactacaacaacttgtgctagcaaaccttgctgcatactctcagcaacatcagtttcttccattcaaccaactggctgcattgaactct

SEQ ID NO: 88441 - DNA, 439 bp, Zea mays
ggaattcccgggcaacagtgctgccagcagcagatgaggatgatggacgtgcagtccgtcgcgcagcagctgcagatgatgatgcagcttgagcgtgccgctgccgccagcagcagcctgtacgagccagctctgatgcagcagcagcagcagctgctggcagcccagggtctcaaccccatggccatgatgatggcgcagaacatgccggccatgggtggactctaccagtaccagctgcccagctaccgcaccaacccctgtggcgtctccgctgccattccgccctactactgattcatgatatttgggaaatctcctctatccatctctctctatctatatatgtaataatgcagtcagacgacacacattatcatgtgtggtatgaccaataatatatgcatggtcataataaagttctggttctaatgaaaaa

SEQ ID NO: 88442 - DNA, 421 bp, Zea mays
ctctcaccagcggtgagagcggtctgtgaaaacccaattcttcaaccctacaggatcgaacaggcaatcgcagctggcatcttacctttatcacccttgttcctccaacaatcatcagccctattacagcagttacctttggtgcatttattggcacaaaacatcagggcacaacaactacaacaacttgtgctagcaaaccttgctgcctactctcagcaacagcagtttcttccattcaaccaactagctgcattgaactctgcttcttatttgcaacaacaacaactaccattcagccagctacctgttgcctacccccaacaatttcttccattcaaccaactggcaacattgaactctcctgcttatttacagcagcaacaactactaccattcagccagctagctggtgtgagcc

SEQ ID NO: 88443 - DNA, 418 bp, Zea mays
ctagcaacatagaaagcacaatagtgtaccaacaatggcagccaaaatattttgctggcttatgctccttggtctttctgcaagtgttgctaccgcaaccattttcccacaatgctcacaagctcctatagcttcccttcttcccccatacctctcaccagcggtgtcttcaatgtgtgaaaccccaattgttcaaccctacaggatccaacaggcaatcgcaacaggcatcttaccattatcacccttgttcctccaacaaccgtcagccctattacagcagttacctttggtccatttggtggcacaaaacatcagggcacaacaactacaacaacttgtgctagcaaaccttgctgcatactctcagcaacatcagtttcttccattcaaccaactggctgcattgaactctgct

SEQ ID NO: 88444 - DNA, 383 bp, Zea mays
attttgagcattcagaaacacaccaagcgaagcgcactagcaacaacctaacaacaggggctaccaagatattatacgtgcttgcgcttcttgcgctttttgcgagcgcatcaaatgcgttcattattccacaatgctcacttgctcctagttacattattccacagtttctcccaccagatacttcaatggccttcgaacacccagctgagcaagcctatacgctacaacatgcgattgctgcgagcgtcttacaacaaccaattgatcaattgcagcaacaatgcttggcacatctaacactacacaccatcgcaacgcagcagccacatcagttcctaccagcactgaggcacctagccatggtgaaccctgacgactac

SEQ ID NO: 88445 - DNA, 262 bp, Zea mays
ccaactccatccacgcctcacgcgtcccgagccatataaagcacaattttctactttacaatcgcagtcaaaatattatccttcctgatgctccttgctctttctgtaaatgctgctaccctaaccattcttccacaatgctcacaaactcctatagcatcctttcttcctccatacctctcaacaacggtgactccactatgttcaaaaccaattctttaaccctacagcatccaacactcaataccagcaagcattttaa

SEQ ID NO: 88446 - DNA, 412 bp, Zea mays
gcgacatagaaagcacaatagtgtaccaacaatggcagccaaaatatttggcttccggatgctggttggtctttctgcaagtgctgctaccgcaaccattttcccacaatgctcacaagctcctatagcttcctttcttcccccatacctctcaccagcggtgtcttcagtatgtgaaaacccaattcttcaaccctacaggatccaacaggcaatcgcagcaggcatcttacctttatcacccttgttcctccaacaaccgtcagccctattacagcagttacctttggtgcatttgttggcacaaaacatcaaggcacaacaactacaacaacttgtgctaggaaaccttgctgcctactctcagcaacagcagtttcttccattcaaccaactggctgcattgaactct

SEQ ID NO: 88447 - DNA, 404 bp, Zea mays
  unsure (1)..(404): unsure at all n locations
gcaaagcggcagtgcgtagagaggatcgtcgaacagaacagcatgaagatggtcatcgttctcgtcgtgtgcctggctctgtcagctgccagcgcctctgcaatgcagatgccctgcccctgcgcggggctgcagggcttgtacggcgctggcgccggcctgacgacgatgatgggcgccggcgggctgtacccctacgcggagtacctgaggcagccgcagtgcagcccgctggcggcggcgccctactacgccgggtgtgggcagacgagcgccatgtaccagccgctccggcaacagtgctgccagcagcagatgaggatgatggacgtgcagtccgtcgcgcagcagctgcagatgatgatgcagcttgagcgtgccgctgccgncagcagcagcctgta

SEQ ID NO: 88448 - DNA, 441 bp, Zea mays
ggaattcccggggacaatttactggtagctggtgggtttcaaggagagctgatctgtaaacaccttgatcaggaaggtattagtgtttgctgtcgaacaacttatgatgataatgctattacaaatgcggttgagatatttaatacctctagtggcgccgttcacttcatggcatcaaataacgactctggtgtgagatactatgacatggagagattccagctattcaagcattttcagtttgaatggccagtgaatcatgcttcgttgagtcctgacagaaaggtggttgttattgtgggtgatgatcctgatggtctacttattgatgcaaactctggaaagacagttcattccataaaaggacatcgggactactcatttgcatcggcttggagccctgatgggcgaacatttgctaccggcaaccaagacaagaca

SEQ ID NO: 88449 - DNA, 409 bp, Zea mays
cggacgcgtgggcttcatcgatcgaccctatgtcatgtaaaaaaggaccaaagtggtggttccttgaagatcatcagttcatcatcctatagtaagctgaatgatgaaagaaaacccctgtacattacatggaaggcagaccggctattggctccattgctccaatgtctgctttggctgccttgcctcgatggaccggatgcagtgaggaatccagccgaacgacagttttgaaggataggaaggggagctggaagcagtcacgcaggcagcctcgccgtgattcatatggaacaagctggagtcagtttctgctgtgccactcactgtttaccttaagattattacctgtgttgttgtcctttgctcgttagggctgataacataatgactcattagaaaatcatgc

SEQ ID NO: 88450 - DNA, 425 bp, Zea mays
  unsure (1)..(425): unsure at all n locations
cgtccccttctgctccatcgaaggtccctcgcgatctcgcctcgagtagctagtgcctcgcgcgccgggggcgactgcgcgcgcggtcagtcagtcttcggcgtgcggggcgcgcgcgagatctcctcagaggtaggggagaaaatcggtgagggtcggcgggcctgatgggcggtgcggtctccggtggcgcggcggttggggatgcggcgggggcggcaacttacccggtggttctcaacgtgtacgacctgacgccggtcaacaactacctncactggggcgggcttggcatcttccactctgccgtcgaagttcatggatcggagtacagttttggagcacatgatcacccatcgagtggagtttttgaggtggaaccaaagagctgcccagggttcatatacagatgtacggttttcata

SEQ ID NO: 88451 - DNA, 306 bp, Zea mays
  unsure (1)..(306): unsure at all n locations
gcaacatagaaagcacaatagtgtaccaacaatggcagccaaaatattttgcttcctgatgctccttggtctttctgcaagtgctgctaccgcaaccattttcccacaatgctcacaagctcctatagcttcctttcttcccccataccttgttaccagcggtgtcttcagtatgtgaaaacccaattcttcaaccctacaggatccaacaggcaatcgcagcaggcatcttacctttatcacccttgttcctacaacaaccgtcagccctattacagcagntaccttnggtgcatttgttggcac

SEQ ID NO: 88452 - DNA, 427 bp, Zea mays
attttgagcattcagaaacacacctagcgaagcgcactagcaacgacctaacaacaatggcttccaagacattatccctccttgcgcttcttgccctttttgtgagtgcaacaaatgcgttcattattccacaatgctcacttgctccgagtgccattattccacagttcctccctccagttacttcaatgggcttcgaacacccagctgtgcaagcctataggctacaacaagcgcttgcggcgagcgtcttagaacaaccaattgcccaattacaacaacaatccttggcacatctaaccatacaaaccatcgcaacgcagcagcaacaagcactgagccacctagccgtggtgaaccctatcgcctacttgcaacaacagctgcttgcatccaacccacttgctttggcaaacgtagctgcata

SEQ ID NO: 88453 - DNA, 385 bp, Zea mays
tagaaagcacaatagtgtaccaacaatggcagccaaaatattttgcttccttatgctccttggtctttctgcaagtgctgctaccgcaaccattttcccacaatgctcacaagctcctatagcttcctttcttcccccatacctctcaccagcggtgtcttcagtatgtgaaaacccaattcttcaaccctacaggatccaacaggcaatcgcagcaggcatcttacctttatcacccttgttcctccaacaaccgtcagccctattacagcagttacctttggtgcatatgttggcacataacatcaaggcacatcaactacaacaacttgtgctaggaaaccatgatgcctactctgaacaacagcaggtggtaccattcaac

SEQ ID NO: 88454 - DNA, 281 bp, Zea mays
catgcccgcgcacctcatgcacgacggccgcgacatggacctgttcgagcacttcggcgtcgtggcccagcgcctcggcgtgtacaccgcccgggactacgcggacatcgtacagtgccttgtcaagcggaggaagctggagacactggaaagcgtgctactcagggagggccgaaatgtcaaagactaagtctgcagacttacacggaccatacggcaatccgaggagggatcttacgtctatcaccctatggactacaacaaccgggagacctattaca

SEQ ID NO: 88455 - DNA, 424 bp, Zea mays
gcggcctcatccagctgcaggggatgcgatacggaacgccctgcgcctgcgcgtccaccggtggactcgtcgacaccatcatcgaaggcaagaccgggttccacatgggccgcctcagcgtcgactgtaacgtcgtggagccggcggacgtcaagaaggtggccaccacattgcagcgcgccatcaaggtggtcggcacgccggcgtacgaggagatggtgaggaactgcatgatccaggatctctcctggaagggccctgccaagaactgggagaacgtgctgctcagcctcggggtcgccggcggcgagccaggggtcgaaagcgaggagatcgcgccgctcgccaaggagaacgtggccgcgccctgaagagttcggcctgcagggcccctgatctcgcgcgtggtgcaaagatgttggga

SEQ ID NO: 88456 - DNA, 239 bp, Zea mays
ggaacctgcggcgttggcagcaccccgatcctgggccagtgcgtcgagttcctgaggcatcagtgcagcccgacggcgacgccctactgctcgcctcagtgccagtcgttgcggcagcagtgttgccagcagctcaggcaggtggagccgcagcaccggtaccaggcgatcttcggcttggtccttcagtccatcctgcagcagcagccgcaaagcggccaggtcgcggggcttgtggc

SEQ ID NO: 88457 - DNA, 425 bp, Zea mays
aacaagcaacatagaaagtggaatccattagcaacaacagagcaacaatggcgaccaagatatgtgtccctccttatgctccttgctctttctgcatgtgttgctaacgcgacaattttccctcaatgctcacaagctcctatagcttcccttcttcccccataccttccatcaatgatagcttcagtatgtgaaaacccagctcttcagccctataggctccaacaagcaatcgcagcaagcaacatacctttatcacccttgttgtttcaacaatcgccagccctatctttggtgcagtcattggtacaaaccatcagggcacagcagctgcagcaactcgtgctacctgtgatcaaccaagtagctctggcaaacctttctccctactctcagcaacaacaatttcttccattcaaccaact

SEQ ID NO: 88458 - DNA, 418 bp, Zea mays
caactagcaacatagaaagcacaatagtgtaccaacaatggcagccaaaatattttgcctccttatgctccttggtctttctgcaagtgctgctacggcgaccattttcccgcaatgctcgcaagctcctatagcttcccttcttcccccgtacctctcaccagcggtgtcttcggtatgtgaaaacccaattcttcaaccctacaggatccaacaggcaatcgcagctggcatcttacctttatcacccttgttcctccaacaatcatcagccctattacaacagttacctttggtgcatttattggcacaaaacatcagggcacaacaactacaacaacttgtgctagcaaaccttgctgcctactctcagcaacagcagtttcttccattcaaccaactaggttcattgaactct

SEQ ID NO: 88459 - DNA, 414 bp, Zea mays
cattagctttatctactccagagcgcagaagaacccgatcgacaccatgagggtgttgctcgttgccctcgctctcctggctctcgctgcgagcgccacctccacgcatacaagcggcggctgcggctgccagccaccgccgccggttcatctaccgccgccggtgcatctgccacctccggttcacctgccaactccggtgcatcttccaccggcggtccacctgccgccgccggccaactggcaacggcgggccatgggccggcgccgggtcatctggcggcggcaacatgccaataccctactcaacccgcccggcctcagcctcatccccaggcacacccatgcccgtgccaacagccgcatccaagcccgtgccagctgcaaggaacctgcagcgttggcagcaccccg

SEQ ID NO: 88460 - DNA, 424 bp, Zea mays
gtgaaaacccagcccttcaaccctacaggatccagcaagcaatcgcaacaagcaactgacctttatcacacctgttctttcaacaatcgccagccctatctttggtgcagtcattggtacaaaccatcagggcagaacagttgcagcaactcgtgctaccagtgatcagccaagtagctctggcaaacctttccccctactctcagcaacaacaatttcttccattcaaccaactgtctatactgaaccctgctgcttatttgcagcaacaacaactactaccattcagccagctagctactgcctactctcagcagcaacaatttcttccatttaaccaattggccgcactgaacccctctgcttatttccagcagcaaatactactaccatttggccagctagctacaacaagcccggtttc

SEQ ID NO: 88461 - DNA, 361 bp, Zea mays
gaccaactagcaacatagaaagcacaatagtgtaccaacaatggcagccaaaatatggtgcctccttatgctccttggtctttctgcaagtgctgctacggcgaccattttcccacaatgctcacaagctcctatagctttccttcttcccccgtacctctcaccagcggtgtcttcggtatgtgaaaacccaattctttaaccctataggatccaacaggcaatcgcagctggcatcttacctttatcacccttggtccttcaacaatcatcagccctattacagcagttacctttggtgcatttattggcacaaaacatcagggcacaacaactacaacaacttgtgctagcaaacctt

SEQ ID NO: 88462 - DNA, 420 bp, Zea mays
tcggaatcaacggcttcggaaggatcggcaggctcgtggccagggtcgccctccagagcgaggatgtcgagctcgtcgccgtcaacgaccccttcatcaccacggactacatgacctacatgttcaagtacgacaccgtccacggccactggaagcacagcgacatcacactcaaggactccaagacccttctcttcggtgacaagccggtcaccgtctttggcatcaggaaccctgaggaaatcccgtggggtgaggctggcgctgagtatgtcgtggagtccaccggcgtcttcactgacaaggacaaggctgctgcacatctcaagggtggtgccaagcaagctgatatctctgccccaagcaaagacgcacccatgtttgcagttggtgtcaatgaggacaagtacacctcggatg

SEQ ID NO: 88463 - DNA, 415 bp, Zea mays
cccaattcttcaaccctacaggatccaacaggcaatcgcagctggcatcttaccttgatcaccgttgttcctccaacaatcatcagccctattacaacagttacctttggtgcatttattggcacaaaacatcagggcacaacaactacaacaacttgtgctagcaaaccttgctgcctactctcagcaacagcagtttcttccattcaaccaactaggttcattgaactctgcttcttatttgcaacaacaacaactaccattcagccagctacctgctgcctacccccagcaatttcttccattcaaccaactagcagcattgaactctcctgcttatttacagcagcaacaactactaccattcagccagctagctggtgtgagccctgctaccttcttgacacaaccacag

SEQ ID NO: 88464 - DNA, 421 bp, Zea mays
  unsure (1)..(421): unsure at all n locations
agaccattagctttatctactccagagcgcagaagaacccgatcgacaccatgagggtgttgctcgttgccctcgctctcctggctctcgctgcgagcgccacctccacgcatacaagcggcggctgcggctgccagccaccgccgccggttcatctaccgccgccggtgcatctgccacctccggttcacctgccacctccggtgcatctcccaccgccggtccacctgccgccgccggtccacctgccaccgtcggtccatgtgccgccgtcggttcatctgccgccgccaccatgccactaccctactcaaccgncccggcctcagcctcatccccagccacacccatgcccgtgccaacagccgcatccaagcccgtgccagctgcagggaacctgcggcgttggcagcaccccgat

SEQ ID NO: 88465 - DNA, 419 bp, Zea mays
cactgccttccatcctgaaatcgaggagctcatctacagcgacgtcgagaactccgagcacaagttcgtgctgaaggacaagaagaagccgatcatcttctcgatggcgcgtctcgaccgcgtgaagaacatgacaggcctggtcgagatgtacggcaagaacgcgcgcctgagggagctggcgaacctcgtgatcgttgccggtgaccacggcaaggagtccaaggacagggaggagcaggcggagttcaagaagatgtacagcctcatcgacgagtacaagttgaagggccatatccggtggatctcggcgcagatgaaccgcgtccgcaacggggagctgtaccgctacatttgcgatacgaagggcgcattcgtgcagcctgcgttctacgaagcgttcggcctgactgtgatcg

SEQ ID NO: 88466 - DNA, 183 bp, Zea mays
ggaattcccgggtgacaacgacgacgacgaggcctgatcaatgcaacgacacatcatgatctgctgctgcacttaattactatgttcgtatacaaataaatacacccggcgtacgcggtgttccttatatggtctaaaatgtagccagtaaattttaaactactttatttcttgaggctctat

SEQ ID NO: 88467 - DNA, 400 bp, Zea mays
cagcattcaaaaacacaccaagcgaagcgcactagcaacgacctaacaccaatggctaccaagatattagccctccttgcgcttcttgcccttttagtgagcgcaacaaatgcgttcattattccacagtgctcacttgctcctagtgccattattccacagttcctcccaccagttacttcaatgggcttcgaacatccagccgtgcaagcctacaggctacaactagcgcttgcggcgagcgccttacaacaaccaattgcccaattgcaacaacaatccttggcacatctaaccctacaaaccattgcaacgcaacaacaacaacaacaacagtttctgccatcactgagccacctagccgtggtgaaccctgtcacctacttgcaacagcagctgc

SEQ ID NO: 88468 - DNA, 421 bp, Zea mays
gaccaactagcaacatagaaagcacaatagtgtaccaacaatggcagccaaaatatggtgcttccttatgctccttggtctttctgcaagtgctgctaccgcaaccattttcccacaatgctcacaagctcctatagcttcctttcttcccccatacctctcaccagcggtgtcttcagtatgtgaaaacccaattcttcaaccctacaggatccaacaggcaatcgcagcaggcatcttacctttatcacccttgttcctccaacaaccgtcagccctattacagcagttacctttggtgcatttgttggcacaaaacatcaaggcacaacaactacaacaacttgtgctaggaaaccttgctgcctactctcagcaacagcagtttcttccattcaaccaactggctgcattgaactct

SEQ ID NO: 88469 - DNA, 312 bp, Zea mays
gaactctcctgcttatttacagcagcaacaactactaccattcagccagctagctggtgtgagccctgctaccttcttgatacaaccacagttgttgccgttctaccagcacgctgcgcctaacgctggcaccctcttacaactgcaacaattgctgccattcaaccaacttgctttgacaaacccagcagcgttctaccaacaacccatcattggtggtgccctcttttagatttcttatgagttatagttcaataataaagttttttgtctgatgtttgtggcttcccagaaataagaaagtacatttct

SEQ ID NO: 88470 - DNA, 420 bp, Zea mays
gccgctgggtccgacccgaggtgtacccgctgttcgcggcgatgggagttgccgttggcatctgcgggtttcagctcttccggaacatcaccggcaacccggaagtcagggtaaacaaggcagggagggcagccggcgtgcttgagaaccatgaggaggggaggcgttacgccatgcatggcctcagaagctttgtgcacgacaagacccccgagatcatgccagctatcaacaagttctttactgaccccaagtgaagcaaagcagctttggttggccgctgatgacgatggttctgctactagttgcccttggggattgtgtaccctttttatggcaattcgatatgtgaatgagttcgacggtccctgtttgttcctcgtactcacctgtcatgtggatttgatgcacttcagtgat

SEQ ID NO: 88471 - DNA, 454 bp, Zea mays
accggtccggaattcccgggcaaaaacacaccaagcgaagcgcactagcaacgacctaacaccaatggctaccaagatattagccctccttgcgcttcttgcccttttagtgagcgcaacaaatgcgttcattattccacagtgctcacttgctcctagtgccattattccacagttcctcccaccagttacttcaatgggcttcgaacatccagccgtgcaagcctacaggctacaactagcgcttgcggcgagcgccttacaacaaccaattgcccaattgcaacaacaatccttggcacatctaaccctacaaaccattgcaacgcaacaacaacaacaacaacagtttctgccatcactgagccacctagccgtggtgaaccctgtcacctacttgcaacagcagctgcttgcatccaacccacttgctctggcgaacgtagctgcatac

SEQ ID NO: 88472 - DNA, 418 bp, Zea mays
ccagcaagcaacatagaaagtagaatccattagcaacaatagagcaacaatggcgacgaagatattttccctccttatgctccttgctctttctacatgtgttgctaacgcgacaattttccctcaatgctcacaagctcctatagcttcccttcttcccccataccttccatcaattatagcttcagtatgtgaaaacccagctcttcaaccatataggcttcaacaagcaatcgcagcaagcaacatacctttatcgcccttgttgtttcaacaatcaccagccctatctttggtgcagtcattggtacaaaccatcagggcacaacagctgcagcaactcgtgctacctgtgatcaaccaagtagctctggcaaacctttctccctactctcagcaacaacaatttcttccattc

SEQ ID NO: 88473 - DNA, 430 bp, Zea mays
acctcgtccggaattcccggttcgacctagacccacgcgtccgcaactagcaacatagaaagcacaatagtgtaccaacaatggcagccaaaatattttgcctccttatgctccttggtctttctgcaagtgctgctacggcgaccattttcccacaatgctcacaagctcctatagcttcccttcttcccccgtacctctcaccagcggtgtcttcggtatgtgaaaacccaattcttcaaccctataggatccaacaagcaatcccaacttgcattctaactttattaaccttggttcctccaccattcataagccttataccagcagtacccttgggtgcattaatggccccaaacattaagggcccaccacctccaccacctgggctaaccaaccttggttgcttattttaagaaccagaagttct

SEQ ID NO: 88474 - DNA, 389 bp, Zea mays
gggccaccatcggcgcctgcgcgccatcgcgccgtcgtcgcgctgctctccgcgggctccacgcgcggcaagaaggacgcgctcaccacgctctaccgcctctgctcgcgcgcagacaaggagcgcgccgcagcgccggcgccgcgtgccgtcgtgcacctcatcggcgagcgcggcacgggacgtgcgagaggccatggtggttctggggagcctcgcgggcatcgccgagggccgtgaagccgtggtggaggctggcgggatccccgccctggttgaggccatcgaggacggccctgccaaggagaaagagttcgccgtggtggcgctgctgcagatgtgctccgattccccgcataaccgtgcgcttcttgtacgcgagggcgcca

SEQ ID NO: 88475 - DNA, 313 bp, Zea mays
aatattttgagcattcagaaacacaccaagcgaagctacctagcaacgacttaacaacaatggctaccaagatattagccctccttgcgcttcttgccctttttgtgagcgcaacaaatgcgttcattattccacaatgctcacttgctcctagtgccattataccacagttcctccgaccagttacttcaatgggcttcgaacacctagctgtgcaagcctacaggctacaacaagcgcttgcggcgagcgtcttacaacaaccaattaaccaattgcaacaacaatccttggcacatctaaccatacaaac

SEQ ID NO: 88476 - DNA, 401 bp, Zea mays
cggacgcgtgggttttgcgagcgcaacaaatgcgttcattattccacaatgctcacttgctccaagttccattattacacagttcctcccaccagttacttcaatgggcttcgaacacccagctgtgcaagcctataggctacaacaagcaattgcggcgagcgtcttacaacaaccaatttcccagttgcaacaacaatccttggcacatctaacaatacaaaccatcgcaacgcaacagcaacaacaattcctaccagcactgagccacctagccatggtgaaccctgccgcctacttgcaacagcagttgcttgcatcaaacccacttgctctggcaaacgtagttgcaaaccagccacaacaacaggtggaacagtttctgccagcgctcaatcaac

SEQ ID NO: 88477 - DNA, 416 bp, Zea mays
tagcaacatagaaagcacaatagtgtaccaacaatggcagccaaaatattttgcctgcttatgctccttggtctttctgcaagtgctgctacggcgaccattttcccacaatgctcacaagctcctatagcttcccttcttcccccgtacctctcaccagcggtgtcttcggtatgtgaaaacccaattcttcaaccctataggatccaacaggcaatcgcagctggcatcttacctttatcacccttgttcctccaacaatcatcagccctattacagcagttacctttggtgcatttattggcacaaaacatcagggcacaacaactacaacaacttgtgctagcaaaccttgctgcctactctcagcaacaacagtttcttccattcaaccaactagctgcattgaactctgc

SEQ ID NO: 88478 - DNA, 456 bp, Zea mays
tccgcattccggattcgagccacgcgtcaggcgtatgaataagcgcattcagaagcacacctatcgaagcgcactagcaacgacctatcaacagtggcttccaagacattatccctccttgcgcttcttgccctttttgtgagtgcaacaaatgcgttcattattccacaatgctcacttgctccgagtgccattattccacagttcctccctccagttacttcaatgggcttcgaacacccagctgtgcaagcctataggctacaacaagcgcttgcggcgagcgtcttagaacaaccaattgcccaattacaacaacaatccttggcacatctaaccatacaaaccatcgcaacgcagcagcaacaagcactgagccacctagccgtggtgaaccctatcgcctacttgcaacaacagctgcttgcatccaacccacttgctttggcaaacgta

SEQ ID NO: 88479 - DNA, 405 bp, Zea mays
cttgccctttttgtgagcgcaacaaatgcgttcattattccacaatgctcacttgcgcctagtgccattattccacagttcctccctccagttacttcaatgggcttcgaacacccagctgtgcaagcctacaggctacaacaagcgcttgcggcgagcgtcttacaacaaccaattgcccaattacaacaacaatccttggcacatctaaccatacaaaccatcgcaacgcaacagcaacaacaatttctaccagcactgagccaactagctgtggtgaaccctgtcgcctacttgcaacagcagttgcttgcatccaacccacttgctctggcaaacatagttgcataccaacaacaacaacaattgcaacagtttctaccagcgctcagtcaactagccatg

SEQ ID NO: 88480 - DNA, 401 bp, Zea mays
gtgcagcattggtacaaaccatcagggcacaacagctgcaacaactcgtgctaccagtgatcggccaagtagctctggcaaacctttctccctactctcacaacaacaatttcttccattcaaccaactgtctacactgaaccctgctgcttatttacaacaacaacaactactaccattcagccagctagctactgcctactctcagcagcaacaatttcttccatttaaccaattggccgcactgaacccctctgcttatttccagcagcaaatactactaccatttggccagctagctacaacaagccccacttcctttttgaaacaacaacaattgcttccgttctaccagcagtttgtggctaacctcgcaaccctcttacaactgcaacagttgc

SEQ ID NO: 88481 - DNA, 428 bp, Zea mays
aaagcacaatagtgtaccaacaatggcagccaaaatattttgcctccttatgctccttggtctgtctgcaagtgctgctacggcgaccattttcccgcaatgctcgcaagctcctatagcttcccttcttcccccgtacctctcaccagcggtgtcttcggtatgtgaaaacccaattcttcaaccctacaggatccaacaggcaatcacagctggcatcttacctttatcacccttgttcctccaacaatcatcagccctattacatcagttacctttggtgcatttattggcacaaaacatcagggcacaacaactacaacaacttgtgctagcaaaccttgctgcctactctcagcaacagcagtttcttccattcaaccaactagctgcattgaactctgcttcttatttgcaacaacaacaac

SEQ ID NO: 88482 - DNA, 385 bp, Zea mays
gcctagcaattagctcatcgactccagattggagaactcgacaccatgaaggtgctgatcgttgcccttgctctcctggcgctcgctgcgagcgccgcctccagtacaagcggcggctgtggctgccagacaccaccgtttcatctaccgcctccgttctatatgccgcctccgttctatctgccgccgcagcagcagccgcagccatggcaataccccactcaaccaccgcagctaagcccgtgccagcagttcggatcctgcggcgtcggcagcgtcggcagcccgttcctgggccagtgcgtcgagttcctgaggcaccagtgcagcccggcggcgacgccctacggctcgccacagtgccaggcgctgcagcagcagtgct

SEQ ID NO: 88483 - DNA, 395 bp, Zea mays
aggcgatcattctgaataccatgaggcttgcactgtcgacgacctatctcctatgggggcccagagattatccctccttgcgcttcttgcccttttagtgagcgcaacaaatgcgttcattattccacagtgctcacttgctcctagtgccagtattccacagttcctcccaccagttacttcaatgggcttcgaacatccagccgtgcaagcctacaggctacaactagcgcttgcggcgagcgccttacaacaaccaattgcccaattgcaacaacaatccttggcacatctaaccctacaaaccattgcaacgcaacaacaacaacaacagtttctgccatcactgagccacctagccgtggtgaacccttgcacctacttgcaacagcagc

SEQ ID NO: 88484 - DNA, 422 bp, Zea mays
attttcagcattcaaaaacacaccaagcgaagcgcactagcaacgacctaacaccaatggctaccaagatattagccctccttgcgcttcttgcccttttagtgagcgcaacaaatgcgttcattattccacagtgctcacttgctcctagtgccattattccacagttcctcccaccagttacttcaatgggcttcgaacatccagccgtgcaagcctacaggctacaactagcgcttgcggcgagcgccttacaacaaccaattgcccaattgcaacaacaatccttggcacatctaaccctacaaaccattgcaacgcaacaacaacaacaacaacagtttctgccatcactgagccacctagccgtggtgaaccctgtcacctacttgcaacagcagctgcttgcatccaacccactt

SEQ ID NO: 88485 - DNA, 157 bp, Zea mays
ccatggaatgacacccacggctgccaagatattagccctccttgcgcttcttgcccttttagtgagcgcaacaaatgcgtgcattacttcacagggttgactttctcctagtgccataatgccaccgtagcttacactatttgcttgaaactgttac

SEQ ID NO: 88486 - DNA, 164 bp, Zea mays
cgacccacgcgtaccgatgcattattatgaagtaaatgaggctttgtctgttgttgctatagctaatcagaggcttcttggtatcccttccggaaagctaaacttaatgcgaggcgctgactgccagcatcatcctatacagagcacaaggcgcacagattata

SEQ ID NO: 88487 - DNA, 458 bp, Zea mays
accggttcggaattcccgggtttcagcattcaaaaacacaccaagcgaagcgcactagcaacgacctaacaccaatggctaccaagatattagccctccttgcgcttcttgcccttttagtgagcgcaacaaatgcgttcattattccacagtgctcacttgctcctagtgccagtattccacagttcctcccaccagttacttcaatgggcttcgaacatccagccgtgcaagcctacaggctacaactagcgcttgcggcgagcgccttacaacaaccaattgcccaattgcaacaacaatccttggcacatctaaccctacaaaccattgcaacgcaacaacaacaacaacagtttctgccatcactgagccacctagccgtggtgaaccctgtcacctacttgcaacagcagctgcttgcatccaacccacttgctctggcgaacgtagctgca

SEQ ID NO: 88488 - DNA, 413 bp, Zea mays
ggaagttctgtgggtagaggactagagactgcagatcgagggtctggcagcgggccgtggcagttgggtgattacgacgaagagagatgggcctcctcgacaagctgtgggacgacaccgtcgcaggcccgcgcccggacaccgggctcggccgcctccgcaagcagcctgtgcgtcccgccgccgtcaagatcagtgatccggccggggacgctgcggcgttcgtgccgccctcgccggcttcgggtagcgaggagacgccggtgaaggtgacgcgcagcatcatgatcaagcgccccgcggggtacccgtcgtcgccgaggagcgcggcaagcacgccaccggcctcgccactggggactacggccgccatctcgccgtttgccggcgccggtggtcggttcaaaaggaaa

SEQ ID NO: 88489 - DNA, 370 bp, Zea mays
cggaattcccggtcgcccacgcgtccggcagctcaagagagagtctggcatttggggccgggggcaagagagagagagagagccggggcggcggaccagcagccgcagctgcaggaggagatgaacgacgctgacggcggcggcctcaggctggctagagggttccgcttccacccgagcgacttagagattgtcagcttctacctcaccaacaaggtgctcaacacgcgcttcacctgcgccgccatcaccgaggccgacctaaacaagattgagccatgggaccttccgagcacggcgaagatgggcgagacagagtggtacttcttctaccagaaggacccgaagtacccgacggggctgacggcga

SEQ ID NO: 88490 - DNA, 410 bp, Zea mays
cttcaacaagcaatcgcagcaagcaacatacctttatcgcccttgttgtttcaacaagcgccagccctatctttggtgcagtcattggtacaaaccatcagggcacaacagctgcagcaactcgtgctacctctgatcaaccaagtagctctggcaaacctttctccctactctcagcaacaacaatttcttccattcaaccaactgtctacactgaaccctgctgcttatttgcagcaacaactattaccatttagccagctagctactgcctactctcagcaacaacaacttcttccatttaaccaattggccgcactgaaccccgctgcttatttgcagcagcaaatactactaccatttagccagctagctgcagcaaaccgtgcttccttcttgacacagcaaca

SEQ ID NO: 88491 - DNA, 404 bp, Zea mays
cgctctcctggctctcgctgcgagcgccacctccacgcatacaagcggcggctgcggctgccagccaccgccgccggttcatctaccgccgccggtgcatctgccacctccggttcacctgccacctccggtgcatctcccaccgccggtccacctgccgccgccggtccacctgccaccgccggtccatgtgccgccgccggttcatctgccgccgccaccatgccactaccctactcaaccgccccggcctcagcctcatccccagccacacccatgcccgtgccaacagccgcatccaagcccgtgccagctgcagggaacctgcggcgttggcagcaccccgatcctgggccagtgcgtcgagtttctgaggcatcagtgcagcccgacggcgacgccct

SEQ ID NO: 88492 - DNA, 417 bp, Zea mays
cacactcgagaactccatttcgatcccatttgaaatcaacccatcctcgtttcctccgtctagcagcctctcaccctcatggccaagatcaagatcgggatcaatgggtttggcaggatcggaaggctggtggccagggtggccctgcagagcgacgacgtcgagctcgtcgccgtgaacgaccccttcatcagcaccgattacatgacctacatgttcaagtatgacactgtgcacggacagtggaagcaccatgaggtcaaggtgaaggactccaagacccttctctttggtgagaaggaagttgctgtgtttggctgcaggaaccctgaggagatcccatggggttcggttggcgctgaatatgttgctgagtctactggtgttttcactgaccaggagaaggctgcagctcac

SEQ ID NO: 88493 - DNA, 265 bp, Zea mays
attgagaccaacaagcaacatagaaagtggaatccagtagcaacaatagagcaacaatggcgaccaagatattttccctccttatgctccttgctctttctacatgtgttgctaacgcgacaattttccctcaatgctcacaagctcctatagcttcccttcttcccccataccttccatcaattatagcttcaatatgtgaaaacccagctcttcaaccatataggcttcaacaagcaatcgcagcaagcaacatacctttatc

SEQ ID NO: 88494 - DNA, 421 bp, Zea mays
cgtgtctgcgattgagaaacgcgtagctgcttggacatttctcccggaagaaaacgccgaatcactccaggtcctgcgctacgaaaccggccagaagtatgacgcccacttcgactatttccacgacagaaacaacctgaagctcggcggccagcgagttgcgaccgtccttatgtacctcacagatgtcaagaaaggtggagagactgtatttccaaacgctgagggaagccatttacagtacaaggacgaaacttggtcggagtgttcaagatctggcctggcagtgaagccaaagaaaggagacgcgctactgttcttcaacctccacgtcaacgccacagccgatacaggcagtctccacgggagctgcccggtgatcgagggcgagaaatggtccgcgacgaaatggatccacgtc

SEQ ID NO: 88495 - DNA, 419 bp, Zea mays
cccacgcgtccggggtcttcagaccattagctttatctactccagagcgcagaagaacccgatcgacaccatgagggtgttgctcgttgccctcgctctcctggctctcgctgcgagcgccacctccacgcatacaagcggcggctgcggctgccagccaccgccgccggttcatctaccgccgccggtgcatctgccacctgcggttcacctgccacctccggtgcatctcccaccgccggtccacctgccgccgccggtccacctgccaccgccggtccatgtgccgccgccggttcatctgccgacggcaccatgccactaccctactcaaccgacccggcctcagcctcatccccagccacacccatgcccgtgccaacagccgcatccaagcccgtgccagctgcagggaacct

SEQ ID NO: 88496 - DNA, 192 bp, Zea mays
agggagaccaacaagcaacatagaatgtggaattcagcagcatcaatagaacaacggtgactgccaagatattatccctacttatgctccttgctctttctacatgcgttgctaacgcgacaattctacctcaatgctcacaagctgctatagcttcccttattcacccatacctttcaataattatagctt

SEQ ID NO: 88497 - DNA, 453 bp, Zea mays
accggtccggaatcccgggctgggtcttcagaccattagctctatctactccagagcgcagaagaacccgatcgacaccatgagggtgttggtcggtgccctcgctctcctggctctcgctgcgagcgccacctacacgcatacaagcggcggctgcggctgccagccaccggcgacggttcatctaccgccgccggcgcatctgccacctgcggctcacctgccacctccggtgcatctgccaccgccggtccacctgccgccgccggtccacctgccaccgtcggtccatgtgccgccgtcggttcatctgccgacgacaccatgccactaccctactcaaccgacccggcctcagcctcatccccagccacacccatgcccgtgccaacagccgcatgcaagcccgtgccagctgcaaggaacctgcggcgatggcagcaccccgatcct

SEQ ID NO: 88498 - DNA, 415 bp, Zea mays
caactagcaacatagaaagcacaatagtgtaccaacaatggcagccaaaatattttgcctccttatgctccttggtctttctgcaagtgctgctacggcgaccattttcccgcaatgctcgcaagctcctatagcttcccttcttcccccgtacctctcaccagcggtgtcttcggtatgtgaaaacccaattcttcaaccctacaggatccaacaggcaatcgcagctggcatcttacctttatcacccttgttcctccaacaatcatcagccctattacaacagttacctttggtgcattaattggcacaaaacatcagggcacaacaactacaacaacttgtgctagcaaaccttgctgcctactctcagcaacagcagtttcttccattcaaccaactaggttcattgaac

SEQ ID NO: 88499 - DNA, 422 bp, Zea mays
cccacgcgtccgaagcaacatagaaagtggaatccagtagcaacaacagagcaacaatggcgagcaagatattttccctccttatgctccttgctctttctgcatgtgttgctaacgcgacaattttccctcaatgctcacaagctcctatagcttcccttcttcccccataccttccatcaatgatagcttcagtatgtgaaaacccagctcttcagccctataggctccaacaagcaatcgcagcaagcaacatacctttatcacccttgttgtttcaacaatcgccagccctatctttggtgcagtcattggtacaaaccatcaaggcacagcagctgcagcaactcgtgctacctgtgatcaaaccagtaactctggcaaacctttctccctactctcagcaaccacaatttcttcca

SEQ ID NO: 88500 - DNA, 386 bp, Zea mays
caactagcaacatagaaagcacaatagtgtaccaacaatggcagccaaaatattttgcttcctgatgctccttggtctttctgcaagtgttgctaccgcaaccattttcccacaatgctcacaagctcctatagcttcccttcttcccccatacctctcaccagcggtgtcttcaatgtgtgaaaccccaattgttcaaccctacaggatccaacaggcaatcgcaacaggcatcttaccattatcacccttgttcctccaacaaccgtcagccctattacagcagttacctttggtccatttggtggcacaaaacatcagggcacaacaactacaacaacttgtgctagcaaaccttgctgcatactctcagcaacatcagtttc

SEQ ID NO: 88501 - DNA, 416 bp, Zea mays
caagctgccccgcagcaacgaacacgaaccttggcagaacgaagctgaagtagttcggtgtgaacccagtatggcaaacgcgccgaggatcctggccctcggcctgctgctagcgctcctgtgcgctgccgccggcccggccgccgcgcagaactgcggctgccagcctaacttctgctgcagcaagttcggctactgcggcacgaccgacgactactgcggcgacgggtgccagtcgggcccgtgccgctcgggcggcggcggcggcggcggcggaggcggaggcagtggcggtgcgaacgtggctaacgtggtcagcgacgcgttcttcaacggcatcaagaaccaggccgggagcgggtgcgagggcaagaacttctacacccggagcgcgttcctgagcgccgtcaacaagt

SEQ ID NO: 88502 - DNA, 446 bp, Zea mays
cggaattcccgggtcgacccacgtgtccgagttacctttggtgcatttattggcacaaaacatcagggcacaacaactacaacaggtggggctagcaaaccttgctgcctactctcagcaacagcagtttcttccattcaaccaactagctgcattgaactctgcttcttatttgcaacaacaacaactaccattcagccagctacctgctgcctacccccagcaatttcttccattcaaccaactggcagcattgaactctcctgcttatttacagcagcaacaactactaccattcagccagctagctggtgtgagccctgctaccttcttgatacaaccacagttgttgccgttctaccagcacgctgcgcctaacgctggcaccctcttacaactgcaacaattgctgccattcaaccaacttgctttgacaaacccagcag

SEQ ID NO: 88503 - DNA, 392 bp, Zea mays
cagaaacacacctagcgaagcgcactatcaacgacctaacaacaatggctaccaagatattgtgcctctttgcgcttcttgccctttttgtgagcgcaacagatgcgtgcattattccacaatgctcacttgctcctagtgccattattccacagttcctccctccagttacttcaatgggcttcgaacacccagctgtgcaagcctacaggctacaacaagcgcttgcggtgagcgtcttacaacaaccaattgcccaattacaacagctatccttggcacatctaaccatacaaaccatcgcaacgcaacagcaacagcaattgctaccagcactgagccaactagctgtggagaaccctgtcgactacttgcaacagcagctgcttgca

SEQ ID NO: 88504 - DNA, 447 bp, Zea mays
ccgaaccgagccacgcatgcgcagcaacatttacgcacatattgcaccaacaatggcacctaaaacattttgccgcgttatgctaattggcctctctgcaagtgctgctacagcgaccattttaccacaatgctcacaagctcctatagcttcccttcttcccccgtacctctcaccaaccagcgtcttcggtatgtgaaaacccaattcttcaaccctacaggatccaacaggcaatcgcagctggcatcttacctttatcacccttgttgcttcaacaatcatcagccctattacagcagatacctttggtgcatttattggcacataacatcatgacacaacaactacaacaacttgtgctagcaaaccttgctgcctactctcagcaacagcagtttcttccattcaaccaactagctgcattgaactctgcttcttatttgc

SEQ ID NO: 88505 - DNA, 386 bp, Zea mays
ttcgacctcaaccacccgtgcaactgacctatccatgtgaactaccgtctatctagcatctgtaaacccaatgagacagccctatatgatccaacatgcaatcgcagctagcatattacctgcatcacatcttgttcctacaacactcatgatccctattacagcagttacctttggcgcatttattgtaacaaaacatgatggcacaacaactacgacaacttgtgctagcaaaccttgctgcctactctcagcaacaacagtttattacattcaaccaactagctgcattgaactgtgcttcttattagcaacaccatcaactaccattcagccagctatctgctgcctaccctcagcaatctctttcatgcaaccaactgaca

SEQ ID NO: 88506 - DNA, 461 bp, Zea mays
ctcggttcggaattcccgactcgacccacgcatccgaaaccttgctgcctactctcagtaacttcagtttcttccattcaaccaactaggtgggttgaactctgcttcttatttgcaacaacaacaactaccattcagccagctacctgttgcctacccccaacaatttcttccattcaaccaactggcagcattgaactctcctgcttatttacagcagcaacaactactaccattcagccagctagctggtgtgagccctgctaccttcttgacacaaccacagttgttgccgttctaccatcacgctgcgcctaacgctggcaccctcttacaactgcaacaattgctgccattcaaccaacttgctttgacaaacctagcagtgttctaccaacatcccatcattggtggtgccctcttttagatttcttatgagttatagttcaataataaagttt

SEQ ID NO: 88507 - DNA, 446 bp, Zea mays
ccggttcggaattcccggctcgacccagcgtccggaaagcacaatagtgtaccaacaatggcagccaaaatattttgcctacttatgctccttggtctttctgcaagagctgctaccgcgaccattttaccgcaatgctcgcaagctcctatagcttcccttcgttccaccatacctatcaccagcggcgtcttctgtatgtgaaaacccaattcttcaaccctacaggatccaacatgcaatcacagctggcatcttacctttatcacccttgttcctacaacaatcatgatgcctattacatcaattacctatagagcatttattggcacaaaacatcagggcacaacaactacaacaactagcgctagcaaacctttgttgatactctcagcaacatcagattcatgcattcaaccaactagctgcattgaactctgcttctt

SEQ ID NO: 88508 - DNA, 393 bp, Zea mays
  unsure (1)..(393): unsure at all n locations
cctgggtcgtcagaccattagcttgatctactccagagcgcagaagaacccgatcgagaccgggagggtgttgctcgtggccctcgctctcctggctctcgctgcgagcgccacctccacgcatacaagcggcggctgcggctgccagccaccgccgccggttcatctaccgccgccggtgcatctgccacctccggttcacctgccacctgcggtgcatatcccaccgccggtccacctgccgccgccggtccacctgccaccgtcggtccatgtgccgncgccggttcatctgccgtcgncaccatgccactaccctactcaaccgtcccggactcagcctcatgcccagccacacccatgcccgtgccaacagacgcatccaaacccgtg

SEQ ID NO: 88509 - DNA, 413 bp, Zea mays
  unsure (1)..(413): unsure at all n locations
caagcaacatagaaagtggaatccagtatcaacaatagagcaacaatggcgaccaagaggtggtccctccttatgctccttgctctttctacatgtgttgctaacgcgacaattttccctcaatgctcacaagctcctatagcttcccttcttcccccataccttccatcaattatagcttcaatatgtgaaaacccagctcttcaaccatataggcttcaacaagcaatcgcagcaagcaacatacctttatcgcccttgttgtttcaacaatcgccagccctatctttggtgcagtcattggtacaaaccatcagggcacaacagctgcagcaactcgtgctacctctgatcaaccaagtagctctggcaaacctttctncctactctcagcaacaacaatttcttccatt

SEQ ID NO: 88510 - DNA, 447 bp, Zea mays
accggtctcggaattcccgactcgacccacgcgtgcaacataaaaagaaaaatcacaatatcactaataaagcaacaatgacaaccaagagataggccctacttatgctccttgactctttctacatgtgttgctaacgcgacaattttccctcaatgctcacaagctcctatagcttcccttcttcccccataccttccatcaattatagcttcaatatgtgaaaacccagctcttcaaccatataggcttcaacaagcaatcgcagcaagcaacatacctttatcgcccttgttgtttcaacaatcgccagccctatctttggtgcactcattggtacaaaccatcagggcacaacagctgcagcaactcgtgctacctatgatcaaccaagtagctctggcaaacctttctccctactttcagctacaacaatttcttccattc

SEQ ID NO: 88511 - DNA, 290 bp, Zea mays
ctactaccatctagctcgctccaggcgtccaatgcaactacctacctacaagagcaggtgctgcaacaaataggaccagctctgactcaactagctgtagcaaaccctgatccctacttacaacagttgcttccattcaaccaactgtctgcagtcaaactctgctgcgtacctacaacagctacatcagttacttaatacattgccagtggctaacccattggtcgctaccttactgcagcagctgcaacaattgctgacatacaaccagctctctctgatgaaccatg

SEQ ID NO: 88512 - DNA, 376 bp, Zea mays
  unsure (1)..(376): unsure at all n locations
cactactgctgcctaccccagcaattcttcattcaaccaactagcgcgtgaacttctgcttatttacagcacacaactactaccattcaccagctgctggtgtgagccctgctaccttcttgacacaccacagtgtgccgtctaccagcacgttgcgcctaacgctggcaccctcttacaactgcacaattgctgccattcaccaacttgctttgacaaacccacagtgttctaccaacaacccatcatttggtgtgccctcttttagattcttatgagttatagttcaataataaagttgcttatctgatgtttgtggcttcccaaaaataagaaagtacatttctagattaaaaaaaataaanaacaacaaaaa

SEQ ID NO: 88513 - DNA, 388 bp, Zea mays
aacacaccaagcgaagcgcactagcaacaacctaacaacaatggctaccaagatatggtccctccttgcgcttcttgcgctttttgcgagcgcaacaaatgcgtccattattccacaatgctcacttgctcctagttccattattccacagttcctcccaccagttacttcaatggccttcgaacacccagctgtgcaagcctataggctacaacaagcgattgcggcgagcgtcttacaacaaccaattgcccaattgcaacaacaatccttggcacatctaacaatacaaaccatcgcaacgcaacagcaacaacagttcctaccagcactgagccacctagccatggtgaaccctgtcgcctacttgcaacagcagctgcttgca

SEQ ID NO: 88514 - DNA, 445 bp, Zea mays
taccggttcggaattcccgactcaacccacgcgtgcaaggaacaaaaactgtgccaaactacaatcaaaaactcaacaacaataagcacgggcagattttccatacttatgctccttgctctttctgcatctgttgctaacaccaccatttttcctcaatactcacaagctcctataactgcccttcttcccccataccttccatcaatgaccgctttagtatgtgacaacccaacccttcaaccctacaggatccaacaagcaatcgcaacaagcaacttacctttatcacacctgttctttcaacaatcgccagccctatctttggagcagtcattggtacaaaccatcaccgcagaacagatgcagcaactcgtgctaccaatgatcagccaaatagctctcgcaaacctttccccctactatgagcaacaacaatttcttc

SEQ ID NO: 88515 - DNA, 378 bp, Zea mays
ggtccggaattcccgggctgggattccaaatgttaagtggtttggcgttgagggtgattacaatgttttggttatggacttactgggacggaggcttgaagatctttgctagcttttgcaacacgaagttgtccctcaaaactgatttgatgcttgctgatcaaatgatcaatctagttgagttttttcattccaagtcattcttgcatagagatatcaagcctgacaattgtctcatgggtctcgggaaaagagcaaaccaaggttatgttatcgatttaggacttgcaaagaagtacagacatacattatcacaccgacacattccatacacagagaacacgaacttgactggaacatgcagatatgcacgtgtta

SEQ ID NO: 88516 - DNA, 432 bp, Zea mays
cgagaaaagcccgcccgtcagaccgcaccgcggtccagcctcgcgtcgtcgccccgggccgcgcgagccttcgccgatccgcgagcgcagatcgccgaagccaggcggcggagagggagctcgaggcggcggaggaaggcgttcgccacagtcgctgatttccctggggaagagatgggtctctcctttgggaagctgttcagccgcctcttcgccaagaaggagatgaggattctcatggtcgggctcgatgccgccggtaagaccaccatcctctacaagctcaagctcggcgagatcgtcaccaccatccccactatcggattcaatgttgaaactgttgagtataagaacattagcttcactgtttgggatgttggtggccaggacaagatcatgcccctgtggaggcactactttcagaacacacag

SEQ ID NO: 88517 - DNA, 214 bp, Zea mays
attgagaccaactagcaacatataaagcacaatagtgtaccaacaatggcaggcaagatattttgcttccttatgctccttggtctttctgcaagtgctgctaccgcaaccattttcccacaatgctcacaagctcctatagcttcctttcttcccccatacctctcaccagcggtgtcttcagtatgtgaaaacccaattcttcaaccctaca

SEQ ID NO: 88518 - DNA, 423 bp, Zea mays
tagcaacatataaagcacaatagtgtaccaacaatggcagccaaaatattttgcttcgttatgctccttggtctttctgcaagtgctgctaccgcaaccattttcccacaatgctcacaagctcctatagcttcctttcttcccccatacctctcaccagcggtgtcttcagtatgtgaaaacccaattcttcaaccctacaggatccaacatgcaatcgcagcaggcatcttacctttatcacccttgttcctccaacaaccgtcagccctattacagcagttacctttggtgcatttgttggcacagaacatcaaggcacaacaactacaacaacttgtgctaggaaaccttgctgcctactctcagcaacagcagtttcttccattcaaccaactggctgcattgaactctgctgcttat

SEQ ID NO: 88519 - DNA, 297 bp, Zea mays
ccctttcgaccgacgcgtccgcgccagagattcgactgatccgtcaattacatcaccaataaatgaacaaacgtgtgaaacattcaaagagtgatgaaagcatgcatagagagttgtgtttcttccccggaagtgcttccgagaataaatttttcttatctgattgtctaaaacctataacgggtgtaatggtatcacagtggttggttgatcatcaagtgactcatattatgtcaagtctatgtgtcatcgttaaacttttaaccgacattatattacaaaagttatgcattttcc

SEQ ID NO: 88520 - DNA, 416 bp, Zea mays
ccacaagcagcatagaaagtggaatacagtggcaacaatagagcaacaatggcgggggcgatatggtccatcctgtatgctccttgctctttctgcatgtgttgataacgcgaccatgcttccttaatactcacaagctcctatagctgcccttcttcccccatacctgccatcaatgaccgcttcagtttgcgaaaacccatcccttcaaccctacaagctccaacatgcaatcgcaacaagcagcttatctttatcacccctgttctatcaacaatcgccagtcctatgtatggagcagtcattggtacaaaccatcagggcacaacagctgcaacaactggtgctaccagtgatcagtctagtagctatcgcaaacctttattcatactattagctacatcgatctcttccat

SEQ ID NO: 88521 - DNA, 418 bp, Zea mays
  unsure (1)..(418): unsure at all n locations
caccaacgcaaattgcaccaagaaatccatcgagaggccgtcgacaggggaattaagggcggcgtcgtctagcagcagccaccgccgcctcatcctcgcagccgccgtcctgctctccgtgctcgcggctgccagcgccagcgccgggacctcctgcgtgccggggtgggccatcccgcacaacccgctcccgagctgccgctggtacgtgaccagccggacctgcggcatcgggccgcgcctcccgtggccggagctgaagaggagatgctgccgggagctggcggacatcccggcgtactgccggtgcacggcgctgagcatcctcatggacggcgcgatcccgccgggcccggacgcgcagctggagggccgnctagaggccctgccgggctgcccgcgggaggtgcagagggga

SEQ ID NO: 88522 - DNA, 387 bp, Zea mays
cggacgcgtgggttgcgcttcttgccctttttgtgagtgcaacaaatgcgttcattgttggacaatgctcacttgctccgagtgccattattccacagttcctccctccagttacttcaatgggcttcgaacacccagctgtgcaagcctataggctacaacaagcgcttgcggcgagcgtcttagaacaaccaattgcccaattacaacaacaatccttagcacatctaaccatacaaaccatcgcaacgcagcagcaacaagcactgagccacctagccgtggtgaaccctatcgcctacttgcaacaacagctgcttgcatccaacccacttgctttggcaaacgtagctgcataccaacaacaacaacagttgcaacagtttc

SEQ ID NO: 88523 - DNA, 394 bp, Zea mays
ggtccggaattcccggctcgacccacgcgtacgccagcaagcaacatataacgtcagaatccattaccaacaatagagcaacaatggcgagcaagatgattttccctccttatgctccttgctctttctacatgtgttgctaacgcgacaattttccctcaatgctcacaagctcctatagcttcccttcttcccccataccttccatcaattatagcttcagtatgtgaaaacccagctcttcaaccatataggcttcaacaagcaatcgcagcaagcaacatacctttatcgcccttgttgtttcaacaatcaccagccctatctttggtgcactcattggtacaaaccatcaaggcacaacagctgcagcaactcgtgctacctgtgatca

SEQ ID NO: 88524 - DNA, 473 bp, Zea mays
tatagtaagtctggtccggaattcccgggtcgacccacgcgttcggagcgagcgcagcaaatgcgatcattattacacagagctcacttgctcctagtgccaggatggcacagttcctaccaccagttacttcaatgggcttcgaacatccagccgtgcaagcctacaggctacaactagcgcttgcggcgagcgccttacaacaaccaattgcccaattgcaacaacaatccttggcacatctaaccctacaaaccattgcaacgcaacaacaacaacaacaacagtttctgccatcactgagccacctagccgtggtgaaccctgtcacctacttgcaacagcagctgcttgcatccaacccacttgctctggcgaacgtagctgcataccagcaacaacaacagctgcaacagtttatgccagtgctcagtcaactagccatggtgaaccctgccgtctacctacaacta

SEQ ID NO: 88525 - DNA, 475 bp, Zea mays
ttctgtaacactcgtaccggttcggaattcccgggtcgacccacgcgtgcgcacgtttgatacaaccaagtagctgccaggtattgcagcaacaatgttgtcgggatcgtaggcagattgagccacaatacattcaccaagcaatctacaacatggttcaatccataatccaggaggagcaacaacaacaaccatgtgagttatgtggatctcaacaagctactcaaagtgcggtggcaatcttgacagcagcacaatacctaccatcaatgtgcggcttgtaccactcatactaccaaaataatccatgcagcagcaatgacattagtggtgtttgcaattgaagaattgtgtctacctagccgttatactcatataacggtgttaagcaataaagtaccatacattatgatgtttgtactacaaaaaaaagagctctcgacaatcgactgctggcacacataccaaacaccca

SEQ ID NO: 88526 - DNA, 437 bp, Zea mays
cgttcggattcccgggtcgcccagcgtccggtgagagccaatggtatagactggctactttcgcagttcctaacgcttagagacgggatgaatcccttggtcgtcaatgatttcagggtagctgctcgaaatgcgattgaagctggatttgatggtgtcgaaatccatggagctcacggttacctgattgatcagtttctaaaggacggggtcaacgaccgcacagacaaatacggtggcagtctggagaaccgctgccggtttgcactggaagtaactcaagccgtggtcgacgaaattggagctgacaaggtctggataaggctgtcaccattcgctagctactcggaggcgccggactcagacccggaagctcttggcatgtacatggcgaacgcgctgaacgagttcgcgattctctactgccacatggttga

SEQ ID NO: 88527 - DNA, 369 bp, Zea mays
ccagcaagcaacatagaaagtagaatccattatcaacaatagagcaacaatggcgaggaaggtattttccctccttatgctccttgctctttctacatgtgttgctaacgcgacaattttccctcaatgctcacaagctcctatagcttcccttcttcccccataccttccatcaattatagcttcagtatgtgaaaacccagctcttcaaccatataggcttcaacaagcaatcgcagcaagcaacatacctttatcgcccttgttgtttcaacaatcaccagccctatctttggtgcagtcattggtacaaaccatcaaggcacaacagctgcagcaactcgtgctacctgtgatcaaccaagtagc

SEQ ID NO: 88528 - DNA, 428 bp, Zea mays
cttgcctgcccgtgactacctcgctgtcccctctcagtgtccaagcgacgacaccaggccggcgagatgtggatctcagattccgcctttgtggagccctcatcttcctccccatccgcctctgcctccccgccgccgagcccgccaccagcacgccttctccgccaacgcaaccgtcgccgacgccgcatcagccggaaacagggcagtgccagcgccgtcgacggcgtcgccgaccccgaggcggatgacgtgtggcgtggggcgcagtgtgaggcggcgtggccggcgaggcgggactcgaaacccgtcgtgctcgcggtcggagacgacgcggtggggcggtccaggagcctcacggacgacgacctcgaggagctcaagggatgcgccgacctgggcttcggcttcaactacgacgagatccc

SEQ ID NO: 88529 - DNA, 420 bp, Zea mays
agaaagtagaatccattagcaacaatagagcatcaatggcgaccaagatattttccgtcggatgctccttgctctttctacatgtgttgctaacgcgacaattttccctcaatgctcacaagctcctatagcttcccttcttcccccataccttccatcaattatagcttcagtatgtgaaaacccagctcttcaaccatataggcttcaacaagcaatcgcagcaagcaacatacctttatcgcccttgttgtttcaacaatcaccagccctatctttggtgcagtcattggtacaaaccatcagggcacaacagctgcagcaactcgtgctacctgtgatcaaccaagtagctctggcaaacctttctccctactctcagcaacaacaatttcttccattcaaccaactgtctacact

SEQ ID NO: 88530 - DNA, 111 bp, Zea mays
cttttagattacatatgagatgtactcgacaatggtgccctcataccgacatgtgtgtgctagaaataatcaatatattgattgagatttatctcgatatatttctgaact

SEQ ID NO: 88531 - DNA, 412 bp, Zea mays
gctgctgagaaggcaaaggttgaactttcgtctacttctcagacagaaatcaatcgggcatgcataacagctgatgcttcaggggcaaaacatttgaacatcacactgacaaggtcaaaatttgaatctcttgtacacaatctgattgagagaactagagatccatgcaagaactgtttgaaggatgccggaatatctactaaagaggtggatgaagtacttcttgttggtggaatgactagggttccaaaggtgcaggaggtagtctctgaaatctttgggaagaacccaagcaaaggagtcaatccagatgaagctgtggccatgggtgctgcacttcaaggtggcattctccgtggagatgttaaggagcttcttcttcttgatgttactgccctgtcactaggtattg

SEQ ID NO: 88532 - DNA, 465 bp, Zea mays
ccggatttgaattctcgactcaagccacccgttcgtgacaaggcctagcatacactgttgtctactcttaacaccaacatcaatttgcgttgaatcaactactctggacttgaacgtctgctaactatatttaacataacaccgactaccatacaaccagaaacctgctgcctacccccagcaattacttccattcaaccaactggcaacattgaactctactgcttatttacagcagcagcaactactaccattcagccagctagctgaagtaagccctgctaccttgttgatacaaccacagttgatgccgttctaccaacacgctgcgcctaacgctgtcaccatcttacaactgcaacaattgctgccattcaaccaactagctttgacaaacacagcagcgatctaccaacaacccatcattggtggtgccctctttgagatgtctcacgagttatagtt

SEQ ID NO: 88533 - DNA, 420 bp, Zea mays
gcatcatagaaagtggaatacagtagcatcaatagagcaacaatggcggccgagatagtttccatccttatgctccttgctctttctgcatgtgttgctaacgcgaccatttttcctcaatactcacaagctcctatagctgcccttcttaccccataccttccatcaatgaccgcttcagtttgtgaaaacccagcccttcaaccctacaggctccaacaagcaatcgcaacaagcaacttacctttatcacccctgttctttcaacaatcgccagccctatctttggtgcagtcattggtacaaaccatcatggcacaacagctgcaacaactcgtgctaccagtgatcagccaagtagctctggcaaacctttctccctactctcagcaacaacaatttcttccattcaaccaactg

SEQ ID NO: 88534 - DNA, 372 bp, Zea mays
cagctagcatcatataaagcacaatcttgtaccaacaatggctgccaaaatattttgcctccttatgctccttggtatttctgcaagtgctgctacggcgaccattttcccgcaatgctcacaagctcctatagcttctcttcttaccccgtacctatcaccagcagtgtgttcagcatgctaaaacccaattcgttaaccatacaggatccaacatgcaatcgcacctggcatactacctttatcaccctagttcctgcaacaatcatcagcccttatacagcagttcacctatggtgcatttattgtcacaatacatcatggcacaacaactacaacaacttgtgctagcaaacctagctgtctactctc

SEQ ID NO: 88535 - DNA, 420 bp, Zea mays
cttcagtatgtgaaaacccaattctttaaccctacaggatccaacaggcaagggcagcatgcatcttacctttatcacccttgttcctccaacaaccgtcagccctattacagcagttacctttggtgcatttgttggcacaaaacatcaaggcacaacaactacaacaacttgtgctaggaaaccttgctgcctactctcagcaacagcagtttcttccattcaaccaactggctgcattgaactctgctgcttatttgcaacaacaactaccattcagtcagctagctgctgcctacccccagcaatttcttccattcaaccaactggcagcattgaactctgctgcttatttacaacagcaacagctaccaccattcagccagctagctgatgtgagccctgttgccttcttgacac

SEQ ID NO: 88536 - DNA, 441 bp, Zea mays
gtccggaattccaggctcgacccaagcgtccccaactagcaacatagaaagcacactagtgtaccaacaatggcagccaaaatattcaggcttgttatgctacttggtctcactgcaagtgctgctacggcgaccattgtcccgcaatgctcgcaagctcctatagcttcccttcttccctggtacctgtcaccagcggcgtcttcggtatgtgaaaacccaattcttcaaccctacaagatccaacaggcaatcacagctggcatcttacctttatcacccttgttcctccaacaatcatcagccctattacatcagttacctttggtgcatctattggcacaaaacatcagggcacaacaactacaacaacttgtgctagcataccttgctgcctactctcagcaacagcagtttcttgcattcaaccaactagctgca

SEQ ID NO: 88537 - DNA, 343 bp, Zea mays
ccggtttcggaattcccgactcaagccacgcgtgacacgacgcctgacatttagcgagtctcttgacgcaagtcgagcttccttcttgacacgtcaacagttgctgcctttgtacaagcagcttgctgctaaccccgcaaccgtcttacaactacaacaatgcttgcactctgctcaacttgctttgacaaacccatccgtctcataccaacaacacatcattggtggtgccctattttatatcgaatattagctgtaattcactattaaagctttcaggatgatgtatgcggccaaccagaaatacaaagctacattctcagattctaacgtgatattggtc

SEQ ID NO: 88538 - DNA, 383 bp, Zea mays
cggacgcgtgggtgagaccagcaggcatcatagagagtagaatccattagcggcaagggatcatcaatggcgaccaagatattgcccctacttatgctccttgctctttctacatgtgttgctaacgcgacaattttccctcaatgctcacaagctcctatagcttcccttctttccgcataccttccatcaattatagcttcagtatgtgaaaacccagctgttcaaccatataggctataacaagcaatcgtagcacgctacatacctctatcgcccttgttgtctcaacagtcaccagcgctatctttggtgcagtcattgctactaaccatcatggcacaacagctgcaggatctcgagctacctgtgatcaaccaagt

SEQ ID NO: 88539 - DNA, 404 bp, Zea mays
attttgagcattcagaaacacaccaagcgaagcgcactagcaacaacctaacgacagtggctaccaagatattatccgtacttgcgcttcttgcgctttttgcgagcgcaacacatgcgtccattattccacaatgctcacttgctcctagttccattattccacagttactaccaccagttacttcaatggccttagaacacccagctgtgcaagcctataggctacaacatgcgattgccgccagcgtcttacaacaaccaattgcccaattgcaacaacaatccttggcacatctaacaatacagaccattgtaacgcatcagcaacaacaggtcctaccagcactgagccacctagccatggtgaaccctgtcgcctacttgcaacagcagctgcttgca

SEQ ID NO: 88540 - DNA, 425 bp, Zea mays
  unsure (1)..(425): unsure at all n locations
caacaagcaacatataaagcggaatccagtagcaacaatagagcaacaatggcgaccaggatattttccctgcttatgctccttgctctttctacatgtgttgctaacgcgacaattttccctcaatgctcacaagctcctatagcttcccttcttcccccataccttccatcaattatagcttcaatatgtgaaaacccagctcttcaaccatataggcttcaacaagcaatcgcagcaagcaacatacctttatcgcccttgctgtttcaacaatcgccagccctatctttggtgcagtcattggtacaaaccatcanggcacaacagctgcagcaactcgtgctacctctgatcaaccaagtagctctggcaaacctttctccctactctcagcaacaacaatttcttccattcaaccaact

SEQ ID NO: 88541 - DNA, 426 bp, Zea mays
catacaaagcacaataatataccaacaattgcttccaaaacattctgcttccttatgcgactggatctttctgcaagtgtatgctacctgatccatgtacatacattgctcacacgctactatagcttccattcttacaccatacctttgaccacctgtgtcttcaatgcgtgaaaccccaattgagcaaccttacaggatccaacactctataacaacaggcattttaccatgatcacccttgttcctacaacaaccgatagccctattacatcaaacacttctgatccatatgtttgcacaaaacatcatggcacaacatctacaacaacatgctctagcaaatcttgctacatactctcatcaacatcattctcgtgcatgcaactaactactttcattgcactcagctgcttattttcaaca

SEQ ID NO: 88542 - DNA, 423 bp, Zea mays
ccaacaagcaacatagaaagtgtaatccagtagcaacaatagagcaacaatggcgacgaagatactttccctccttatgctccttgctctttctgcatgtgttgctaacgcgacaattttccctcaatgctcacaagctcctatagcttcccttcttcccccataccttccatcaatgatagcttcagtatgtgaaaacccagctcttcaaccctataggctccaacaagcaatcgcagcaagcaacatacctttatcacccttgtttcaacaatcgccagccctatctttggtgcagtcattggtacaaaccatcaaggcacagcagctgcagcaactcgtgctacctgtgatcaaccaagtagctctggcaaacctttctccctactatcagcaacaacaatttcttccattcaaccaact

SEQ ID NO: 88543 - DNA, 455 bp, Zea mays
tccggaattcccgggtcgacccaacgtaccgtccgcggcacgctcgcaagctcctattgcttcccttcttcccccgtacctctcacgagcggggtcttcggtatgtgaaaacccaattcttcaaccctacaggatccaacaggcaatcgcagctggcatcttacctttatcacccttgttcctccaacaatcatcagccctattacaacagttacctttggtgcatttattggcacaaaacatcagggcacaacaactacaacaacttgtgctagcaaaccttgctgcctactctcagcaacagcagtttcttccattcaaccaactaggttcattgaactctgcttcttatttgcaacaacaacaactaccattcagccagctacctgctgcctacccccagcaatttcttccattcaaccaactagcagcattgaactctcctgcttatttac

SEQ ID NO: 88544 - DNA, 513 bp, Zea mays
agtttcttagggaggaatgttttttctacgtcggggggtatagctacgctctaccggtccggaattcccgggtcgacccacgcgtccggtgagccctgctaccttcttgatacaaccacagttgttgccgttctaccagcgggcggggcctaacgctgtcacggctgttacaactgcaacaattgctgccattcaaccaacttgctttgacaaacccagcagcgttctaccaacatcccatcattgttggtgcccttttttagattacttatgagtaatagtacaataatatagttgcttgtctgatgtatgaggctttccagaaatatgaaagtacatttgtagataatgctgaaataaggagcggacgctctagatgatccaagcttacgtacgcgtgcatgcgacgtcatacctcttctatagtgtcacctacattcaattcactgaccgtcgttttacaacaccttgactggtaactccctgccgtctgccaacttaatcgtcttgcac

SEQ ID NO: 88545 - DNA, 346 bp, Zea mays
cccacgcgtacggaaagcacaatagtgtaccaacaatggcagccaacatattttgccgcctgatgctccttggtctttctgcaagtgctgctacggcgaccattttcccgcactgctcgcaagctcctatagcttcccttcatcccccgtacctttcaccaacggtgtctatagtatgtgaaaacccaattcttcaaccctacaggatccaactggcagtcacagctggcatcttacctttatcacccttgttcctacaacaatcagcagccctattacatgagttacctttggtgcatttattggcacaaaacatcagggcacaacaactacaacaacttgtgct

SEQ ID NO: 88546 - DNA, 399 bp, Zea mays
catagaaagcacaatagtgtaccaacaatggctgccaaaatattttgcttccttatggtccgggatctttatgcaagtgttgctaccgcaaccattttcccacaatgctcacaagctcctatagcttcccttctttcctcatacctctcaccatccgcgtcttcaatgtgtgataccaccattctccaaccctacacgatccaatatgcaatcacaacatgcatattaccattatcacccttgatcctgcaacatccgtcaatcctattacagtaactacctctgctccatttatgtggcacaaaacatcaggtgcacaacatctacaacaacttgtgctagcacacctagctgcatactcataccaacatctacatcttccattcaaccaactggctg

SEQ ID NO: 88547 - DNA, 385 bp, Zea mays
cttgctcctagtgccattattcgacagttcctaccaacagttacttaaatggggttggtacacctacatatgcaggccaacatgcaccatcaagcgctcgctgctagcgtcttacatcaaccaattgcccaatctcatcatcaatcgcttccacatctaacatatacaagccatcacaacgcagcagcatcaacaattcgcactagcactgaaccacctagccatagtgaaccctgaacgatacttgcaagagcatctgcttgcattcgatccacttgctgtggccaacgtagttgcataaccacacagcaacatctacttacaacagtgcatgccaacgatcagtctactagccatggtgaaccatgtctactacgtacaacaa

SEQ ID NO: 88548 - DNA, 427 bp, Zea mays
caagcaacataggaagtggaatccaccatcaacaacagagcaacaatggcgacgaagagatcttccctccttatgctccttgctctttctgcatgtgtagctaacgcgacaattttccctcaatgctcacaagctcctatagcttgccttcttcccccataccttccatcaatgatagcttcagtatgtgaaaacccagctcttcagccctataggctacaacaagcaatcgcagcatgcaacatacctttatcacccttgatgattcaacaatcgtcagccatatctttggcgcagtcattgctacaaaccatcagggcacagcagttgaagaaactcgcgctacctgtgatcaaccaagtagctatggcaaacctttctccctactctcagcatcaacaatttcttccattcaaccaactgtcta

SEQ ID NO: 88549 - DNA, 466 bp, Zea mays
  unsure (1)..(466): unsure at all n locations
ctcggtctcggaattcccgactcgacccacgcgtgcgctgtccggtcacagacgcgggatttcaacacccaactatacaatcctacatgcggcaggatgccatcgtagcaagcatcttacggtcattagcattaaccctccaacagccatatgccctattgcaacaaccatccttagtgcatctgtatctccaaagaatcgcgacacaacaactacaacaacagttgctaccaacaatcaatcaagtagttgcagcgaaccttgctgcttatctncagcaacaacaatctctttcattcaatcaactagctgcggtgaaccctgctgtctactggcaggcacaacaactcctacaatttaaccaacttgtcggaagccctaatgccttctaactgcaccaccagcttctgccattccatctgcaagctgtggaaaacattgcttctttcttgcgacaacaacaatt

SEQ ID NO: 88550 - DNA, 428 bp, Zea mays
gcaaaccatggacatggctttggcgtctaaagcctcccctccgccatggaaggccagcgccgccgagcagccaattccaaagcgtgacaaagccgctgcaaatgattcaacatacctcaatcctcaagctcatgatagtgttcttggaatcattctgggaggtggtgctgggactagattgtaccccttgacaaagaagcgtgccaagcctgcagtgccattgggtgccaactatagactgattgatattcctgtcagcaattgtctcaacagcaacatatccaagatctatgtgctaacgcaatttaactctgcttccctcaaccgtcacctctcaagagcctacgggagcaacattggagggtacatgaatgaagggtctgttgaagtcttagctgcacagcatagcccagataatccaaactggt

SEQ ID NO: 88551 - DNA, 423 bp, Zea mays
attgagaccaacaagcaacatataaagtggaatccagtagcaacaatagagcggcaagggcgaccaagatatttgccctccttatgctccttgctctttctacatgtgttgctaacgcgacaattttccctcaatgctcacaagctcctatagcttcccttcttcccccataccttccatcaattatagcttcaatatgtgaaaacccagctcttcaaccatataggcttcaacaagcaatcgcagcaagcaacatacctttatcgcccttgttgtttcaacaatcgccagccctatctttggtgcagtcattggtacaaaccatcagggcacaacagctgcagcaactcgtgctacctctgatcaaccaagtagctctggcaaacctttctccctactctcagcaacaacaatttcttccat

SEQ ID NO: 88552 - DNA, 375 bp, Zea mays
caccaagcgaagcacattagcatcagcctagctacaatggctaccacgatattatgcgtgcttgcgcttcttgcgctttttgcgagcgcaacaaatgcgttcattattccacaatgctcacttgctccaagttccattattacacagattctcccaccagttacttcaatgggcttcgaacacccagctgtgcaagcctataggctacaacaagcaattgctgcgagcgtattacaacaaccaattttccaggtgcaacaacaatccttggcacatgtaacaatacaaaccatcgcatcgcatcagcatcaacaattcctaccagcactgagccacctagccatggtgaaccctgccggctacttgcaacagcag

SEQ ID NO: 88553 - DNA, 391 bp, Zea mays
ctcgcctactctccctagcctgcacgacgcaagggagagtgacggacagcgacgcggcgcgagcgaggagggccaaggggaagaggggaagcaccgcaccaggacccttgttcgccgacgccgcctctgatctccgcgaggttgtcaggattcaatatgtcgaccagcacattcgctacttcctgcacgctgttgggcaatgttagaacaacgcaggcctcccagacagcggtgaagagcccttcgtctctaagcttcttcagccaagttacgaaggttccaagcctgaagacctccaagaaactggatgtctccgccatggctggatacaaggtgaagcttgtcgggcctgaaggtgaagagcacgagtttgatgctccagacgacgcct

SEQ ID NO: 88554 - DNA, 333 bp, Zea mays
aaagcacaatagtgtaccaacaatggcagccaaaatattttgcctccttatgctccttggtatttctgcaagtgctgctacggcgaccattttcccgcaatgctcacaagctcctatagcttcccttcttcccccgtacctctcaccagcggtgtcttcggtatgtgaaaacccaattcttcaaccctacaggatccaacaggcaatcgcagctggcatcttacctttatcacccttgttcctccaacaatcatcagccctattacagcagttacctttggtgcatttattggcacaaaacatcagggcacaacaactacaacaacttgggct

SEQ ID NO: 88555 - DNA, 350 bp, Zea mays
gtaccggtccggtaattcccgggctcccaggaaagaggacggcgtccaggacaaccccggcgccaagaagagatcccggccggagtccagcgcgccacccggcaccaaggcttgccgtgagaagctccggcgagacaggctcaacgaaaggttcaacgagctctgtgccatcttggaacccggcaagccacccaaggccgacaaagtcgctatcctaagcgacgctgcccgtctcctgaaccagctgcagggcgaggcccagaagcttaagcaatcgaacgaatcgctccaggagtccatcaagagtcttaaggctgagaagtccgagctgcgagacgagaagacgaggc

SEQ ID NO: 88556 - DNA, 407 bp, Zea mays
agtaccatcaatcatcattcatcttagtagtataggcaccaaatcaaatctgcaacgtcaattatctaactccaaaaaccatgaagctggtgcttgtggttcttgctttcattgctttagtatcaagtgtttcttgtacacagacaggcggctgcagctgtggtcaacaacaagccatgagcagcaacatcatccacaacaacatcatccacaaaaacaacaacatcaaccaccaccacaacatcaccagcagcagcaacaccaacaacatcaagttcacatgcaaccacaaaaacatcagcaacaacaagaagttcatgttcaacaacaacaacatcaaccgcagcaccaccaccatcaacaacaacaacagcaccaacatcaacatcaatgtgaaggccaacaac

SEQ ID NO: 88557 - DNA, 436 bp, Zea mays
gaattcccggtcgaccagctccgtgcacctaaaaggcccatatgtcccaccatgggcagccaaaaaattttgcctccttaggctccttggtctttctgcaagtgctgctacggcgaccattttcccgcaatgctcgcaagctcctatagcttcccttcttcccccgtacctctcaccagcggtgtcttcggtatgtgaaaacccaattcttcaaccctacaggatccaacaggcaatcgcagctggcatcttacctttatcacccttgttcctccaacaatcatcagccctattacaacagttacctttggtgcatttattggcacaaaacatcagggcacaacaactacaacaacttgtgctagcaaaccttgctgcctactctcagcaacagcagtttcttccattcaaccaactaggttcattgaactctgct

SEQ ID NO: 88558 - DNA, 407 bp, Zea mays
aacgttgctgcctactatagacaccagcagttgcttccattcaaccaactagcgggatggaactctgcttcttatttgcaacaacaacaactaccattcagccagctacctgctgcctacccccagcaatttcttccattcaaccaactggcagcattgaactctcctgcttatttacagcagcaacaactactaccattcagccagctagctggtgtgagccctgctaccttcttgatacaaccacagttgttgccgttctaccagcacgctgcgcctaacgctggcaccctcttacaactgcaacaattgctgccattcaaccaacttgctttgacaaacccagcagcgttctaccaacaacccatcattggtggtgccctcttttagatctcttatgagtgata

SEQ ID NO: 88559 - DNA, 443 bp, Zea mays
cggaattcccgggtcgaccacgcctccgcctggttcctccaacaaccgtaagccttattacagcagttacctttggtgcattggggggcacaaaacatcaaggcacaacaactacaacaacttgtgctaggaaaccttgctgcctactctcagcaacagcagtttcttccattcaaccaactggctgcattgaactctgctgcttatttgcaacaacaactaccattcagtcagctagctgctgcctacccccagcaatttcttccattcaaccaactggcagcattgaactctgctgcttatttacaacagcaacagctaccaccattcagccagctagctgatgtgagccctgttgccttcttgacacaacaacagttgttgccgttctacctgcacgctgcgcctaacgctggcaccctcttacaactgcaacaattgct

SEQ ID NO: 88560 - DNA, 449 bp, Zea mays
tcccgaattcgccggctagcaacatagaaagcacaatattgtaccaataatggcagccaaaatattttgcctcattatgctccttggtctttctgcaagtgctgctacggcgagcattttcccgcaatgctcacaagctcctatagcttcccttcttcccccatacctctcaccagcgatgtcttcagtatgtgaaaatccaattcttctaccctacaggatccaacaggcaatcgcagcaggcatcttacctttatcacccttgttcctccaacaatcatcagccctattacagcagttacctttggtgcatttattggcacaaaacatcagggcacaacaactacaacaactcgggctagcaaaccttgctgcctactctcagcaacagcagttacctttggtgcatttgttggcacaaaacatcaaggcacaacaactacaacaac

SEQ ID NO: 88561 - DNA, 432 bp, Zea mays
ggaattcccggctagcaacatagaaagcacaatattgtaccaataatggcagccaaaatattttgcctcattatgctccttggggttgcgtgcaagtgctgctacggcgagcattttcccgcaatgctcacaagctcctatagcttcccttcttcccccatacctctcaccagcgatgtcttcagtatgtgaaaatccaattcttctaccctacaggatccaacaggcaatcgcagcaggcatcttacctttatcacccttgttcctccaacaatcatcagccctattacagcagttacctttggtgcatttattggcacaaaacatcagggcacaacaactacaacaactcgtgctagcaaaccttgctgcctactctcagcaacagcagttacccttttgtgcatttgttggcacaaaacatcagggcac

SEQ ID NO: 88562 - DNA, 511 bp, Zea mays
gaggggagaaggtgtgggttacgaatcgagcgtatgtatactcgtaccggtccggaattcccgggatggacgtcgccaaggccatcgagaaggtgggcacccgcaacggctccacctccaaggtggtcaaggtcggtgactgcggacagctctcctagatctctctgatctggtctgttcggccgccctccctccgtcatcgtcgactccccctgcgtccgttcctttggatctgaataagacggtggtgatctgagtggtggtcttaacaaaaacagcttgatgggctgttcatccctaaaactaaagggccgccgctctagaggatccaagcttacgtacgcgtgcatgcgacgtcatagctcttcaatagtgcaactaaaattcaattaactgggccgtgatttacaaccgtgtgacggggaaaaccctggcgttaccccaacttaaatcgcttgcagcacatcccctttcgcaaactggcgtaattacgaaaaggcccgtaccgttc

SEQ ID NO: 88563 - DNA, 407 bp, Zea mays
  unsure (1)..(407): unsure at all n locations
aactagcaacatagaaagcacaatagtgtaccaacaatggcagccaaaatatttggcttccttatgctccttggtctttctgcaagtgctgctaccgcaaccattttcccacaatgctcacaagctcctatagcttcctttcttcccccatacctctcaccagcggtgtcttcagtatgtgaaaacccaattcttcaaccctacaggatccaacaggcaatcgcagcaggcatcttacctttatcacccttgatcctccaacaaccgtcagccctattacagcagttacctttggtgcatttgttggcacagaacatcaaggcacaacaactacaacaactngtgcctaggaacccttgctgcctactctcaagcacagcagtttcttccattcaaccaactggctg

SEQ ID NO: 88564 - DNA, 342 bp, Zea mays
gcatcatagaaagcacaatactgtaccaacaatggcagccaaaatattatgcctggttatgctactcggtctgtctgcaagtgctgctacggcgaccattttaccgcaatgctcgcaagctactatagcttcccttcttcccccgtacctctcaccagcggtgtcttcggtatgtgaaaacccaattcttcaaccctacaggatccaacaggcaatcgcagctggcatcttacctttatcaccctagttcctccaacaatcatcagccctattacaacagttacctttggtgcatttattggcacaaaacatcacggcacagcaactacaacaacttgcgct

SEQ ID NO: 88565 - DNA, 336 bp, Zea mays
tgaaggtgctgatcgcagcccttgctctcctggcgctcgctagcagcgccggctggcaatcaagcgtgcggttgtggctgccacacaccaccgtcccatctaccgtctgcgcactatatgccgccatccggtctatctgtcgccgcggcaccatcacgcaccatggcaataccccactcaaccaccgcagctaagcccgtgccgatagttcagatcctgcggtgtagcaagcagaccgcagccacgatcctgggccagagcgtccaggtcctgaggcacaacagcaaccctagctgcgacgccctacggctcgccacaaagccagggcgctgcagc

SEQ ID NO: 88566 - DNA, 416 bp, Zea mays
ccgggtcgacccacgcgttcgccaaaccctaattgcgacctccgttcccccataaccctacggccatggacggcggaggcgggggtgtagggggaggcggagttggggcaggtgtcatggtgggcggcggagtcgggccgggcggcggcgttggcggcgacgtggagctcgtcagcaagacgctgcagttcgagcacaagctgttctacttcgatctgaaggagaacccgcgggggaggtacctcaagatctccgagaagacctcggccacgcgctccaccatcatcgtccccgtcgacggcgtggcctggttcctcgacctcttcgactactacatccgcaccgacgagcgcgacgccttcagcaaggagctgcgactccagaccaagggtgtctatttcgatatcggggagaac

SEQ ID NO: 88567 - DNA, 415 bp, Zea mays
ggcaaacaggcccctggtcatctccggtttcctcgtttcctttcctcttcgtcccagggacgtcagtacgtcacccatcggcacccgcgccgctgacccccgccaccgtgtcacgatcccgtccccgctcgcacgcctagcgcgatggcgcacccgatgtacggctccggaccgctccgatccaggaacgcggcgagctcggacgaaatccagctgcggatcgacccggtgcacggggacctcgacgaggagatcgacgggctgcactccagggtccgcatgctcaaaggggtggcccaggagataaattctgaagccaagttccagaatgattttcttcatgaactgcaaatgacccttgcaaaagctcaggctggagtgaagaacatcatgcggagatggaacaagagcatca

SEQ ID NO: 88568 - DNA, 370 bp, Zea mays
gattacttctatcctctaggaaccaggcccaccgctggctgccaataggttgattgtcgcttactactcttaggcaagctccactagtgcgacccatattacaggcacttgcaccaatcagccattgggttccatgaaccctgcatgcaatactgatgatgcacacgtgcttgcagcttgatggcctgttcacgcctgatgctgcacaactgacgccttaccggttagagatgccagcgatgatgccacagatgatgactcctaacatgatgtaccatagatatgccgatcatgatgtgccatagtcttgcccacatgatgtcacaactgatgatgcccactgtcactggactccgctcgcaatcatgct

SEQ ID NO: 88569 - DNA, 381 bp, Zea mays
gcaacatagaaagcacaatagtgtaccaacaatggcagccaaaatattttgcctcgttatgctccttggtctttctgcaagtgctgctacggcgaccattttcccgcaatgctcgcaagctcctatagcttcccttcttcccccgtacctctcaccagcggtgtcttcggtatgtgaaaacccaattcttcaaccctacaggatccaacaggcaatcgcagctggcatcttacctttatcacccttgttcctccaacaatcatcagccctattacaacagttacctttggtgcatttattggcacaaaacatcagggcacaacaactacaacaacttgtgctagcaaaccttgctgcctactctcagcaacagcagtttct

SEQ ID NO: 88570 - DNA, 416 bp, Zea mays
ggaacttgcaatgttacttttataaggattgctgaaaagcatcgacggctgctcaacgtgttcattagacaaaacccaagcatactggagaagtcactttctatgatgttgaaagtgccaaggctgatagattttgacaacaaacgtgcttactttcggtcacgtatcagacagcagcatgatcagcaccttccagctcctctacacattagtgttcgcagggcttatgttttggatgactcatataatcagttgagattacgtcgtacccaggatctcaaaggtcgtttgactgtgcaatttcaaggggaagagggcatagatgcaggaggactaactagggagtggtatcaactgctctctagagttatttttgacaaaggaactcttcttttcactacaggtggaaacaatgc

SEQ ID NO: 88571 - DNA, 387 bp, Zea mays
gaatacagtagcaaaaatagagcaacaatggcggccaagatattttccatccttatgctccttgctctttctgcatgtgttgctaacgcgaccatttttcctcaatactcacaagctcctatagctgcccttcttcccccataccttccatcaatgaccgctttagtatgtgaaaacccagcccttcaaccctacaggatccagcaagcaatcgcaacaagcaacttacctttatcacacctgttctttcaacaatcgccagccctatctttggtgcagtcattggtacaaaccatcaaggcagaacagttgcagcaactcgtgctaccagtgatcagcccagtagctctggcaaaactttccccctactttagcaacaacaatttc

SEQ ID NO: 88572 - DNA, 360 bp, Zea mays
attttgagcattcagaaacacaccaagcgaagcgcactagcaacgacctaacaacaatggctaccaagatattagccctccttgcgcttcttgccctttttgtgagcgcaacaaatgcgtacattattccacaatgctcacttgctcctagtgccattattccacagttgctcccaccagttacttcaatgggcttcgaacacctagctgtgcaagccaacatgcaacaacaagcgcttgcggcgagcgtcttacaacaaccaattgcccaattgcaacaacaatccttgccacatctaacaatacaagccatcacaacgcaacagcaacaacagtttctaccagcactgagccacctag

SEQ ID NO: 88573 - DNA, 349 bp, Zea mays
ccaactagcaacatagaaagcacaatagtgtaccaacaatggcagccaaaatattgtgcttccttatgctccttggtctttctgcaagtgctgctaccgcaaccattttcccacaatgctcacaagctcctatagcttcctttcttcccccatacctctcaccagcggtgtcttcagtatgtgaaaacccaattcttcaaccctacaggatccaacaggcaatcgcagcaggcatcttacctttatcacccttgttcctccaacaaccgtcagccctattacagcagttacctttggtgcatttgttggcacaaaacatcaaggcacaacaactacaacaacttgtgct

SEQ ID NO: 88574 - DNA, 411 bp, Zea mays
agcaacatagaaagcacaatagtgtaccaacaatggcagccaaaatatgttgcctcgttatgctccttggtctttctgcaagtgctgctactgcgaccattttcccgcaatgctcgcaagctcctatagctctccttcttcccccgtacctctcaccagcggagtcttcggtatgtgaaaacccaattcttcaaccctacaggatccaacaggcactcgcagctggcatcttacctttatcacccttgttcctacaacaatcatcagccctattacaacagctacctttggtgcatttattggcacaatacatcagggcacaacatctacaacaacttgtgctagcaaaccttgctgactactctcagcaacagctgtctcttgcattcaaccaactaggttcatcgaact

SEQ ID NO: 88575 - DNA, 418 bp, Zea mays
cgaactagcaacatacatagtgaagtacactagcaacatcttagcaccaatggcagccaagatttttgccatccttgccctccttgctctttcagcaagcgttgctaccgcgactattattccacaatgctcacaacaatacctctctccggtgacagccgcgagatttgaatacccaactatacaatcctacaggctacaagaggccatcgcagcaagcatcttacggtcgttagcattgaccgtccaacaaccatatgccctattgcaacaaccatccttaatgaatctatatctccaaagaatcgcagcacaacaactacaacaacagttgcttccaacaatcaatcaagtagttgcagcgaaccttgctgcttacctccagcatcaactatttcttccattcaatcaactagct

SEQ ID NO: 88576 - DNA, 420 bp, Zea mays
cgcacgcgttcgattttgagcattcataaacacaccaagcgaagcacattagcaacagcctgaacaacaatggctaccaagatattatccctccttgcgcttcttgcgctttttgcgagcgcaacaaatgcgttcattattccacaatgctcacttgctccaagttccattattacacagtttctgccaccagttacttcaatgggcttcgaacacccagctgtgcaagcctataggctacaacaagcaattgcggcgagcgtcttacaacaaccaattttgcagttgcaacaacaatgcttggcacatctaacaatacaaaccatcgcaacgcaacagcaactacaattcctaccagcactgagccacctagccatggtgaaccctgccgactacttgcaacagcagttgcttgcatca

SEQ ID NO: 88577 - DNA, 300 bp, Zea mays
cagcctagcaattagctcatcgactccagattggagaactcgacaccatgaaggtgctgatcgttgcccttgctctcctggcgctcgctgcgagcgccgcctccagtacaagcggcggctgtggctgccagacaccaccgtatcatctaccgcctgcgttctatatgccgcctccgttctatctgccgccgcagcagcagccgcagccatggcaataccccactcaaccaccgcagctaagcccgtgccagcagttcggatcctgcggcgtcggcagcgtcggcagaccgttcctgggcc

SEQ ID NO: 88578 - DNA, 510 bp, Zea mays
  unsure (1)..(510): unsure at all n locations
nggttagggggtttgttacgcgcgggagtaagcagtctcgtaccggtccggaattcccgggtcgacccacgcgtccgcaatttcttccattcaaccaactggcagcattgaactctcctgcttatttacaggggcaacaactactaccattcagccagctagctggtgtgagccctgctaccttcttgacacaaccacagttgttgccgttctaccagcacgctgcgcctaacgctggcaccctcttacaactgcaacaattgctgccattcaaccaacttgctttgacaaacctagcagtgttctaccaacaacccatcattggtggtgccctcttttagatttcttatgagttatagttcaataataaagttttctgtctgaaaaattactgaagattaaaagcaaaacaaaagggcaggccgctctagaggatccaagcttacgtacgcgtgcatgcgacgtcatagctcttctatagtgtcacctaaaattcaattcactggccgc

SEQ ID NO: 88579 - DNA, 335 bp, Zea mays
tagcaacatagaaagcacaatagtgtaccaacaatggcagccaaaatattttgcctccttatgctccttggtctttctgcaagtgctgctacggcgaccattttcccgcaatgctcgcaagctcctatagcttcccttcttcccccgtacctctcaccagcggtgtcttcggtatgtgaaaacccaattcttcaaccctacaggatccaacaggcaatcagacctattacatcagttacctttggtgcatttattggcacaaaacatcagggcacaacaactacaacaacttgtgctagcaaaccttgctgcctactctcagcaacagcagtttc

SEQ ID NO: 88580 - DNA, 409 bp, Zea mays
cagcaagcaacatagaacgtagaatccattaccaacaatagagcaacaatggcgagcaagatattttccctccttatgctccttgctctttctacatgtgttgctaacgcgacaattttccctcaatgctcacaagctcctatagcttcccttcttcccccataccttccatcaattatagcttcagtatgtgaaaacccagctcttcaaccatataggcttcaacaagcaatcgcagcaagcaacatacctttatcgcccttgttgtttcaacaatcaccagccctatctttggtgcagtcattggtacaaaccatcagggcacaacagctgcagcaactcgtgctacctgtgatcaaccaagtagctctggcaaacctttctccctactctcagcaacaacaatttc

SEQ ID NO: 88581 - DNA, 413 bp, Zea mays
gtcatcgttctcgtcgtgtgcctggctctgtcagctgccagcgcctctgcaatgcagatgccctgcccctgcgcggggctgcagggcttgtacggcgctggcgccggcctgacgacgatgatgggcgccggcgggctgtacccctacgcggagtacctgaggcagccgcagtgcagcccgctggcggcggcgccctactacgccgggtgtgggcagccgagcgccatgttccagccgctccggcaacagtgctgccagcagcagatgaggatgatggacgtgcagtccgtcgcgcagcagctgcagatgatgatgcagcttgagcgtgccgctgccgccagcagcagcctgtacgagccagctctgatgcagcagcagcagcagctgctggcagcccaaggtctcaaccccat

SEQ ID NO: 88582 - DNA, 408 bp, Zea mays
cacagatcacacacactcgagatctccatttcgatcccatttgaaatcaacccatcgtcgtgtcctccgtctagcagcctctcaccctcatggccaagatcaagatcgggatcaatgggttcggcaggatcggaaggctggtggccagggtggccctgcagagcgacgacgtcgagctcgtcgccgtgaacgaccccttcatcagcaccgattacatgacctacatgttcaagtatgacactgtgcacggacagtggaagcaccatgaggtcaaggtgaaggactccaagacccttctctttggtgagaaggaggtcgctgtgtttggctgcaggaaccctgaggagatcccatggtgctcggttggcgctgaatatgctgtcgagtctactggtgttttcactgacc

SEQ ID NO: 88583 - DNA, 348 bp, Zea mays
ttcagaaacacaccaagcgaagcgcactagcaacgacctaacaacaatggctaccaagatgttagccctccttgcgcttcttgccctttttgtgagcgcaacaaatgcgttcattattccacaatgctcacttgctcctagtgccattattccacagttcctcccaccagttacttcaatgggcttcgaacacctagctgtgcaagccaacatgcaacaacaagcgcttgcggcgagcgtcttacaacaaccaattgcccaattgcaacaacaatccttgccacatctaacaatacaagccatcacaacgcaacagcaacaacagttcctaccagcactgagccacct

SEQ ID NO: 88584 - DNA, 321 bp, Zea mays
gtgctgacatgcgtctcctacccaaagtccgactgcgtcatccacacccacaaggaaggcgacctgtactagggctagggctttccaatttggcgagggacaaaaaatgctctcgagtggtgtgttgtcaagcaaagctcctccatctgcgccctaccccgttgtgcgaactgtttggcatcaaacttgtgtggttgctatcttctatgttctgctagttaatgttcggagtccgtgggaatatactagctaattaataaaaggaaaaactgatgtgatgccataatagtataatgtcatggcttttggttatgtttggag

SEQ ID NO: 88585 - DNA, 428 bp, Zea mays
  unsure (1)..(428): unsure at all n locations
ggtccggaattcccggggctttatctactccagagcgcagaagaacccgatcgacaccatgagggtgttgctcgttgccctcgctctgctggctctcgctgcgagcgccacctccacgcatacaagcggcggctgcggctgccagccaccgccgccggttcatctaccgccgccggtgcatctgccacctccggttcacctgccacctccggtgcatctcccaccgccggtccacctgccgccgccggtccacctgccaccgncggtccatgtgccgncgncggttcatctgccgncgncaccatgccactaccctactcaaccgccccggcctcagcctcatccccagccacacccatgcccgtgccaacagccgcatccaagcccgtgccagctgcagggaacctgncgcgttggcagcacccccg

SEQ ID NO: 88586 - DNA, 285 bp, Zea mays
agcaaaccttgctgcctactctcagcaacagcagtttcttccattcaaccaactaggttcattgaactctgcttcttatttgcacaacaactacaacaacttgtgctagcaaaccttgctgcatactctcagcaacatcagtttcttccattcaaccaactggctgcattgaactctgctgcttatttgcaacaacaattaccattcaaccagctagttgctggctacccccaacaatttcttccattcaaccaactagcagcattgaactctggtgcttattta

SEQ ID NO: 88587 - DNA, 416 bp, Zea mays
ctactatactatactctaggaagcaaggacaccaccgccatggcagccaagatgcttgcattgttcgctctcctagctctttgtgcaagctccactagtgcgacccatattccagggcacttgccaccagtcatgccattgggtaccatgaacccatgcatgcagtactgcatgatgcaacaggggcttgccagcttgatggcgtgtccgtccctgatgctgcagcaactgttggccttaccgcttcagacgatgccagtgatgatgccacagatgatgacgcctaacatgatgtcaccattgatgatgccgagcatgatgtcaccaatggtcttgccgagcatgatgtcgcaaatgatgatgccacaatgtcactgcgacgccgtctcgcagattatgctgcatcagcagttacc

SEQ ID NO: 88588 - DNA, 408 bp, Zea mays
caagcaacatagaaagtagaatccattagcaacaatagagcaacaatggcgaccaagatattttccctccttatgctccttgctctttctacatgtgttgctaacgcgacaattttccctcaatgctcacaagctcctatagcttcccttcttcccccataccttccatcaattatagcttcagtatgtgaaaacccagctcttcaaccatataggcttcaacaagcaatcgcagcaagcaacatacctttatcgcccttgttgtttcaacaatcaccagccctatctttggtgcagtcattggtacaaaccatcagggcacaacagctgcagcaactcgtgctacctgtgatcaaccaagtagctctggcaaacctttctccctactcttagcaacaacaatttctt

SEQ ID NO: 88589 - DNA, 366 bp, Zea mays
  unsure (1)..(366): unsure at all n locations
aagcacaatagtgtaccaacaatggcagccaaaatattttgcctccttatgctccgtgggatttctgcaagtgctgctacggcgaccattttcccgcaatgctcacaagctcctatagcttcccttcttcccccgtacctctcaccagcggtgtcttcggtatgtgaaaacccaattcttcaaccctacaggatccaacaggcaatcgcagctggcatcttacctttatcacccttgttcctccaacaatcatcagccctattacagcagttacctttggtgcatttattggcacanaacatcagggcacagcaactacaacaacttgtgctagcaaaccttgctgcctactctcagcaacagcag

SEQ ID NO: 88590 - DNA, 351 bp, Zea mays
gcggcggctgcggctgccagccacctccgccggttcatctaccgccgccggtgcatctgccacctccggttcacctgccacctgcggtgcatctgccaccgccggtccacctgccgccgccggtccacctgccaccgccggtccatgtgccgccgccggttcatctgccgccgccaccatgccactaccctactcaaccgccccggtctcagcctcatccgcagccacacccatgcccgtgccaacagccgcatccaagcccgtgccagctgcagggaacctgcggcgttggcagcaccccgatcctgggccagtgcgtcgagtttctgaggcatcagtgcagccccgacg

SEQ ID NO: 88591 - DNA, 359 bp, Zea mays
cccacgcgtccgcaatagtgtaccatacaatggcagccaaaatattttgcctcctgatgctccttggtctttctgcaagtgctgctacggcgaccattttcccgcaatgctcgcaagctcctatagcttcccttcttcccccgtacctctcaccagcggtgtcttcggtatgtgaaaacccaattcttcaaccctacaggatccaacaggcaatcgcagctggcatcttacctttatcacccttgttcctccaacaatcatcagccctattacaacagttacctttggtgcatttattggcacataacatcagggcacaacaactacaacaacttgtgctagcaaaccttgctgcctac

SEQ ID NO: 88592 - DNA, 399 bp, Zea mays
  unsure (1)..(399): unsure at all n locations
gccagaaccacacggataaaccctagctgcgcgagccccccggcgatgtcggtggccatccgctccggcgagctccttgcgtgccccgtcgcactccggcgggcgcccttggctgtgtctgtggtgtcggtgcggatgagggctaggggcgccgtggctgtgcgggcggaggcaacggccgagggggtagggaaagaggggaagaaggcggcggngaagaagaagccggcgagcgggatcaccaagccgaagcccatctctacagagctgcaggagttcgtcggcggcgcggcggagctgccccggactgaggccatcaagctggtatgggcgcacatcaagggcaacaacctccaggatccaaacaacangaagataataatctgcgatgagaaactg

SEQ ID NO: 88593 - DNA, 413 bp, Zea mays
  unsure (1)..(413): unsure at all n locations
cggacgcgtgggtcagcattcanaatctcatcaagcgaagcgcactagcaacgaccgaacgccaatggctaccaagatattagccctccttgcgcttcttgcccttttagtgagcgcaacaaatgcgttcattattccacagtgctcacttgctcctagtgccattattccacagttcctcccaccagttacttcaatgggcttcgaacatccagccgtgcaagcctacaggctacaactagcgcttgcggcgagcgccttacaacaaccaattgcccaattgcaacaacaatccttggcacatctaaccctacaaaccattgcaacgcaacaacatcaacatcaacagtttctgccatcactgagccacctagccgtggtgaaccctgtcacctacttgcaacagcagctgc

SEQ ID NO: 88594 - DNA, 418 bp, Zea mays
  unsure (1)..(418): unsure at all n locations
atgaatctaaaatggttgctaactgatagaatgcaccatcgaccattctgtgatgggagtctgttcacgtgtaagttttggtggtgaactcaaggactccgtgatgatgggagcggacacctatgaaactgaagaagaagcttcaaagctactgttagctgggaaggtcccagttggaataggaaggaacacanagataaggaactgtatcattgacatgaatgctaggattgggaagaacgtggtgatcacaaacagtaagggcatccaagaggctgatcacccggaagaagggtactacataaggtctggaatcgtggtgatcttgaagaatgcaaccatcaacgatgggtctgtcatatagatcggctgcgtttgcgtctacataacatgaacctacaatggtatngcatcgatg

SEQ ID NO: 88595 - DNA, 349 bp, Zea mays
ctgctctccttcgtcctgtcggtcctcgtctccgccgtcatcctgctgtgccgggactacatcagctacatcttcaccgagggtgaggacgtgtcgcaggcggtctcccggctcaccccgctgctggcgttcacgctcatcctcaacggcatccagctccagcccgtcctctctggggtcgctgtggggtgtggatggcaggcgttcgtcgcgtacgtcaacgtcggctgctactacatcgtcggcatcccgctcgggtgcctcctaggcttctactttgacctaggagcagcgggtatttggagcggtatgatcggcggcaccttgatgcagaccttgatcttgatat

SEQ ID NO: 88596 - DNA, 223 bp, Zea mays
caatcatcaaccctaatacatcaagtacctttggggcatttaatggcaccaaacaggctgggacaacaacctccacaacttgggctagcaaaacttggttgctacttttagaacaagcggttctttcatttcaaccactaactgcattggactctggttcttaattgcaacaacaacaactaccaattcagcagctacctgctgcctacccccagcaatttct

SEQ ID NO: 88597 - DNA, 385 bp, Zea mays
attcagccagctacctgctgcctacccccagcaatttcttccattcaaccaactggcagcattgaactctcctgcttatttacagcagcaacaactactaccattcagccagctagctggtgtgagccctgctaccttcttgatacaaccacagttgttgccgttctaccagcacgctgcgcctaacgctggcaccctcttacaactgcaacaattgctgccattcaaccaacttgctttgacaaacccagcagcgttctaccaacaacccatcattggtggtgccctcttttagatttcttatgagttatagttcaataataaagttttttgtctgatgtttgtggcttcccagaaataagaaggtacatttctagaataaaaa

SEQ ID NO: 88598 - DNA, 407 bp, Zea mays
gttcgatgcaccgctactccgacaaacacgactgccagttcgactatcgaactgcggctagggacgctatcgccaaggccaatccagtggtgaaggcggagaagcttgacaagatctgaggcgggggcattgggtaacgaaaaatggttgcgatctgcaagaattcagcatgtctctttgctgctttatcattgaacttcccattcttgtcttgctgtcacgtaccctggggttcaatactatgatgcgcacagcatcctggcagctgcaagaattcatccccagtcgagtcacgaaaatggtttgcgtgttgactatgtcgtgtaagcttattcagttattcttggtggtttgggtcggtatcgtgtcatgtccccgttacgtagctctgtaatctactattctca

SEQ ID NO: 88599 - DNA, 333 bp, Zea mays
aacatagaaagcacaatagtgtaccaacaatggcagccaaaatattttgcctcctgatgctccttggtctttctgcaagtgctgctacggcgaccattttcccgcaatgctcgcaagctcctatagcttcccttcttcccccgtacctctcaccagcggtgtcttcggtatgtgaaaacccaattcttcaaccctacaggatccaacaggcaatcacagctggcatcttacctttatcacccttgttcctccaacaatcatcagccctattacatcagttacctttggtgcatttattggcacaaaacatcaaggcacaacaactacaacaac

SEQ ID NO: 88600 - DNA, 433 bp, Zea mays
tgcaaccctacaggatccaacaggcaatcgcagctggcatcttacctttatcacccttgttcctccaacaatcatcagccctattacaacagttacctttggtgcatttattggcacaaaacatcagggcacaacaactacaacaacttgtgctagcaaaccttgctgcctactctcagcaacagcagtttcttccattcaaccaactaggttcattgaactctgcttcttatttgcaacaacaacaactaccattcagccagctacctgctgcctacccccagcaatttcttccattcaaccaactagcagcattgaactctcctgcttatttacagcagcaacaactactaccattcagccagctagctggtgtgagccctgctaccttcttgacacaaccacaagtgttgccgttctaccagcacgttgc

SEQ ID NO: 88601 - DNA, 430 bp, Zea mays
  unsure (1)..(430): unsure at all n locations
ccgggtcgacccaagcgttcgatcgggaacaccgggggccccgacgcgcaacaagccctgggggttccgttcaacggcggacggaccggtcctgaacggcttgaacctgttggggcaccaggacacgctgtacgcgcacgccttgcgccagttctacacccggtgccgcgtggcgggcaccgtcgacttcgtcttcggcaactccgccgcggtgctccacgacaccgtcctcgtcgtgctgccgcggcagctgcggccggagaagggcgagaacgacgccgtcacggcgcagggccgcaccgacccggcccagcccacggggatcgtgctcagccgctgctccgtcaacggcagcgaggagtacatggcgctgtaccgcgagaggcccggcgtgcaccacgtctacctgagccgnccgtggaaggagtac

SEQ ID NO: 88602 - DNA, 393 bp, Zea mays
gaaagcacaacagtgtaccaccatggtgcaccaaaatatttggcctcctaatgctcctggggctttctgcaagtcctgttacggcaaccattttcccacaaggctcacaacctgcaatagctgcccttcttccacagtacctgtcaccagcggtgtcttgggtatgtgaaaacccaattcttcaaccctatgcgatccaacaggcaatcgcagctggcatcttacctttatcacccttgttcctgcaacaatcatcagccctattacagcagttacctttggtgcatttattggcacaaaacatcagggcacaacatctacaacaacttgtgctagcaaaccttgctgcctactctcagcaacaacagtttcttccattcaaccaactgacag

SEQ ID NO: 88603 - DNA, 385 bp, Zea mays
ccatataggcttcaacaagcaatcgcagcaagcaacatacctttatcgcccttgttgtttcaacaatcaccagccctatctttggtgcagtcattggtacaaaccatcagggcacaacagctgcagcaactcgtgctacctgtgatcaaccaagtagctctggcaaacctttctccctactctcagcaacaacaatttcttccattcaaccaactgtctacactgaaccctgctgcttatttgcagcaacaactattaccatttagccagctagctactgcctactctcagcaacaacaacttcttccatttaaccaattggccgcactgaaccccgctgcttatttgcagcagcaaatactactgccatttagcgagctagctg

SEQ ID NO: 88604 - DNA, 370 bp, Zea mays
  unsure (1)..(370): unsure at all n locations
tcccgcgtcgacccacgcgtgtctgtggcatgatacaagcaatcacttgtttcaacatacctttatcgaccttggtgaccgaancatcaccagccctatctttggtgcagccattggtacataccatcacgtcacaacagctgcagcatctcgtgctacctgtgatcaaccaagtagctctggcaaacctttctcactactatcagcaacaacaatttcttccattcaaccaactgtctacactgaaccctgctgcttatttgcagcaacaactattaccatttagccagctagctactgcctactttcagcaacaacaacttcttacatttaaccaattggccgtactgaaccccgctgcttatttgca

SEQ ID NO: 88605 - DNA, 409 bp, Zea mays
gctcgtaccggtccggaattcccgggatcagcaaagcggcagtgcgtagagaggatcgtcgaacagaacagcatgaagatggtcatcgttctcgtcgtgtgcctggctctgtcagctgccagcgcctctgcaatgcagatgccctgcccctgcgcggggctgcagggcttgtacggcgctggcgccggcctgacgacgatgatgggcgccggcgggctgtacccctacgcggagtacctgaggcagccgcagtgcagcccgctggcggcggcgccctactacgccgggtgtgggcagacgagcgccatgtaccagccgctccggcaacagtgctgccagcagcagatgaggatgatggacgtgcagtccgtcgcgcagcagctgcagatgatgatgcagcttgagcgtg

SEQ ID NO: 88606 - DNA, 427 bp, Zea mays
taccggtccggcattcccgacccagcctacgcgtccgatagaaagcacaatagtgtaccaacaatggcagccaaaatattttgcctccttatgctccttggtctttctgcaagtgctgctacggcgaccattttcccgcaatgctcgcaagctcctatagcttcccttcttcccccgtacctctcaccagcggtgtcttcggtatgtgaaaacccaattcttgaaccctacaggatccaacaggcaatcgcagctggcatcttacctttatcacccttgttactccaacaatcatcagccctattacaacagatacctatgctgcatccatcggcacaatacatgcccgtacaagctgtacggaacctggtgcgatcgcagcaccctgatccctgtccagtgcgtcgagttcctgaggcatcaatgc

SEQ ID NO: 88607 - DNA, 390 bp, Zea mays
gacgcggtgaacgggacggagtacgtacccacgtacgaggacaaggatggcgactggatgctcgtcggcgacgtcccctggaagatgttcgtggaaacctgccagcgccttcgtctgatgaaaggttcagaggccgtgaacttggcaccaagagccgcccgatgaggcacactccgttgggcgttggcacgcacgcacgcactggcgtcttgaaggaaagggggaactctgctggtcttgatgaggatcttcacgtgagataggaacgtgtgtacagttgtcgccttatggtattgagttgaggaaacttggaagttccattacttgtctgtagtctctactttatatagatgcgaagaagcttgagatacacattgcctacattgtctt

SEQ ID NO: 88608 - DNA, 430 bp, Zea mays
atagaaagcacaatagtgtaccaacatatggcagccaaaatattttgcctccttatgctccttggtctttctgcaagtgctgctacggcgaccattctcccgcaatgctcacaagctcctataactttccttcttcccccgcacctctcaccagcggtgtcttcggtatgtgaaaacccaattcttcaaccctacaggatccaacaggcaatcgcagctggcatcttaccttaatcaccctagctactacaacaatcaacacacctattacaacactaacctctggtacatttatcgacacaccacatcacagcacaacaactacaacaacttgtgctagcaaaccttgctgcctactttcaacaacagcagtttcttccattcaaccaactaggttcattgaaatcctgttcttatttgcaacaacaac

SEQ ID NO: 88609 - DNA, 321 bp, Zea mays
agcgtgacggttgagggcagcgtctgcccggtgaaggccatggtcaggctgggcgccagcgtcggggaggccattgctgccgtggtcgagaggtacgccagggaggggagaagcccgcgcctggacccggccgcagccgagagcttccaacttcaccactcccacttcagccttgagagtctgaacaagaaggacagaatcggagacgtgggaggtaggaacttctacctgcacaagaacgattcaagcaacgacgggctctacctccagggccaggaggagcccggtgcagatccaagtggtggtgacatcagccggcac

SEQ ID NO: 88610 - DNA, 444 bp, Zea mays
  unsure (1)..(444): unsure at all n locations
cggtccggaattcccgggcttcctcccgggctacatcggcttccccgccgacgccgtcgacctctccacccgcctctcccgccgcataccgctatccatcccctgcgtcgcgtctccgatggacactgtctccgaggccgctatggccgcggccatggcatcactcggcgccgccgccgtcgtgcactgcaacaccgatccccacgcccaggccgccatcgtccgcgctgccaagtcccgccgccttcccttcgtttcctccgtgccctttttctccccgtcctccgccccgacgctcaacgatttcgctggcagcgagtacgccctcgtcaccgagcgcggagattcgctctccaggctcgtcggcgtcgctgtcgcggccgatgctgcctnccgcgaggttcccgtctctgtctcggagtacatgcgaccgacgccgcgctc

SEQ ID NO: 88611 - DNA, 398 bp, Zea mays
gtggctctgaattgactgacccatggttgcgacaatggcagtgacgacgatggtgaccaggaccaaggagagctggtcgccattgcaggtcccggcggtggcattcccttggaagccatgaggcggtggcaagaccggcggcctcgagttccctcgccgggcgatgttcgccagcgtcggcctcaacgtgtgcccggacgtcccggccgggcgcgacccgcgggagcccgatcccaaggtcgtacgggccgccgacaactgcgacatcgcgcgccagcttgtcgccgccgttcccggacagcaggccgcctgagaggccgatgaagaggcagcgaacaggaggaagcagaatggcggcggcagctagaagcagcaacagctgggcgatctgagcctga

SEQ ID NO: 88612 - DNA, 257 bp, Zea mays
agcgaagctacctagcaacgacttaacaacaatggctaccaagattttagcggtccttgcacttcttgccctttttgtgagcgcaacaaatgcgtgcattattccacaatgctcacttgctcctagtgccattataccacagttcctccgaccagttacttcaatgggcttcgaacacctagctgtgcaagcctacaggctacaacaagcgcttgcggcgagcgtattacaacaaccaattgaccaattgcaacaac

SEQ ID NO: 88613 - DNA, 450 bp, Zea mays
  unsure (1)..(450): unsure at all n locations
cggtccggaattcccgggtcgacccaccctnccggcctctggcttttgcgccttcattttcggctttggtccttgcaaggtcaattttggcttccaacattggttaagaggaattccaacttaaccatgggggtaatggtcaatgtcaactttgccaagtcgaccacaacaggacacctaatctacaaccttgaaggcattgacaagcgtgtgatcaagaggttcaagaaggaggctgctgaaatgaacaagcggtccttcaagtacgcgtgggtgctcgacaagctcaaggctgagcgtgagagaggtatcaccattgatatcgctctgtggaagtttgagaccaccaagtactactgcacggtcattgatgcccctggacaccgtgacttcatcaagaacatgatcactggtacctnccaggctgactgtgctgtccttatcattgac

SEQ ID NO: 88614 - DNA, 401 bp, Zea mays
ggggttggctttcttgccgttaagccccaacggggacggcaagttaatgtattacaggaacccaaccgcggacatgctgtttacggaggcggagctggacctgggcctggtccggtgcgccagggtgttccactacgggtccatctcgctcatctccgatccgtgccggtcggcgcacatggccgacatgcgcgcagccaatgccgcgggcgtgctctggtcctacgacctcaacgtgcgccttccgctctggccgtcgcccgacgccgtacgcgagggcatcctcagcatctggaacgaggccgacttcatcaaggtcagcgacgacgatgtggccttactcacgcgcggggacgccaacgacgagaagaacgtgctgtccctgtggtttgacgggctca

SEQ ID NO: 88615 - DNA, 197 bp, Zea mays
gtcttcggtatgtgaaaacccaattcttcacccctacaggatccatcaggcaatgacagctggcatcttacctttatgacccttgttcctccaacaatcatgaggcctattacatcagttacctttggtgcatttattggcacaaaacatcagggcacaacaactacaacaacttgtgctagcaaaccttgatgact

SEQ ID NO: 88616 - DNA, 424 bp, Zea mays
gctctttctgcatgtgttgctaacgcgacaattttccctcaatgctcacaagctggtgaagctatcattgatggaaggtatgggggaagaagggaagctataggagcttcagtatgtgaaaacccagctcttcaaccctataggctccaacaagcaatcgcagcaagcaacatacctttatcacccttgtttcaacaatcgccagccctatctttggtgcagtcattggtacaaaccatcaaggcacagcagctgcagcaactcgtgctacctgtgatcaaccaagtagctctggcaaacctttctccctactatcagcaacaacaatttcttccattcaaccaactatctacactgaaccctgctgcttatttgcagcaacaactattaccattcagccagctagctactgcctactctcatc

SEQ ID NO: 88617 - DNA, 437 bp, Zea mays
cgcgtgccagcaacatagaaagtggaatccagtttcaacaatagagcaacaatggcgaccaaggtattttccctccttatgctccttgctctttctacatgtgttgctaacgcgacaattttccctcaatgctcacaagctcctatagcttcccttcttcccccataccttccatcaattatagcttcaatatgtgaaaacccagctcttcaaccatataggcttcaacaagcaatcgcagcaagcaacatacctttatcgcccttgttgtttcaacaatcgccagccctatctttggtgcagtcattggtacaaaccatcagggcacaacagctgcagcaactcgtgctacctctgatcaaccaagtagctctggcaaacctttctccctactctcagcaacaacaatttcttccattcaaccaactgtctacact

SEQ ID NO: 88618 - DNA, 381 bp, Zea mays
ccaacaagcaacatagaaagtggaatccagtagcaacaacagagcaacaatggcgagcaagatattttccctccttatgctccttgctctttctgcatgtgttgctaacgcgacaattttccctcaatgctcacaagctcctatagcttcccttcttcccccataccttccatcaatgatagcttcagtatgtgaaaacccagctcttcagccctataggctccaacaagcaatcgcagcaagcaacatacctttatcacccttggtggttcaaccatcggcaagccctatctttggtgcaatcattggtaccaaccattaaggcacaacaactgcagcaactcgtgctacctgggatcaacccagttgcttttgccaaac

SEQ ID NO: 88619 - DNA, 407 bp, Zea mays
  unsure (1)..(407): unsure at all n locations
gccgccggtgcatctgccacctccggttcacctgccacctccggtgcatctcccaccgccggtccacctgccgccgccggtccacctgccaccgccggtccatgtgccgccgccggttcatctgccgccgtcaccatgccactaccctactcaaccgccccggcctcagcctcatccccagccacacccatgcccgtgccaacagccgcatccaagcccgtgccagctgcagggaacctgcggcgttggcagcaccccgatcctgggccagtgcgtcgagttcctgaggcatcagtgcagcccgacggcgacgccctactgctcgcctcagtgccagtcgttgcggcagcagtgttgccagcagctcangcaggtggagccgcagcaccggtaccaggcgatcttcg

SEQ ID NO: 88620 - DNA, 410 bp, Zea mays
ggagaagcacggtacctgcgcagccgacgtcttggacgagcacgggtacttccaggcggcgctgcgcctgcgggaccagctgggagtgctaggcgcgctcacctccgccggcgtcaagcccgacggcgggtactacacgctgagccagatcaagggcgccatgcgtcagggcaccggcttcgagccctacgcggagtgcaaccgcgacgaggccggcaacagccagctctaccagctctacttctgcgtcgacgccgccggcgacagcttcgtcgactgccccgtgctgctcagcggcaggcccttgcattctatgcaagaggataatggaatgctcattccccattcttcatgttgtctggcacataagcggagggcgatcggtgttccatacttaacaatcttcggct

SEQ ID NO: 88621 - DNA, 418 bp, Zea mays
atttgcactcatgcatcacaaaacatccttctatcagtaccatcaatcatcatgcatgcttagtagtataggcaccaaatcaaatctgcaacatcaattatctaactccaaaaaccatgaagctggtgcttgtggttcttgctttcattgctttagtatcaagtgtttcttgtacacagacaggcggctgcagctgtggtcaacaacaaagccatgagcagcaacatcatccacaacaacatcattcacaaaaacaacaacatcaaccaccaccacaacatcaccagcagcagcaacaccaacaacaacatgttcacatgcaaccacataaacatgagcaacaacaagaagttcatgttcaacatcaacaacaacaaccgcagcaccaccaccatacaacaacaacatcagcaccaac

SEQ ID NO: 88622 - DNA, 431 bp, Zea mays
cagcatagaaagcacaatagtgtaccaacaatggcagccaaaatattttgcctccgtatgctccttggtctttctgcaagtgctgctacggcgaccattttcccacaatgctcacaagctcctatagcttcccttcttcccccgtacctctcaccagcggtgtcttcggtatgtgaaaacccaattcttcaaccctataggatccaacaggcaatcgcagctggcatcttacctttatcacccttgttcctccaacaatcatcagccctattacagcagttacctttggtgcatttattggcacaaaacatcagggcacaacaactacaacaacttgtgctagcaaaccttgctgcctactctcagcaacaacagtttcttccattcaaccaactagctgcattgaactctgcttcttatttgcaacaaca

SEQ ID NO: 88623 - DNA, 429 bp, Zea mays
  unsure (1)..(429): unsure at all n locations
cttcgtactcgcctacctccgcggctcaaacctttcccccttctcccaattccctgcgggggccgccgctccatcccgtacgacgacaccatgagggagtgcatttcgatccacatcggccaggccggtatccaggtcggaaacgcgtgctgggagctgtactgccttgagcatggcattcaggctgacggtcagatgcccggtgacaagaccattgggggaggtgatgatgctttcaacaccttcttcagtgagactggtgctgggaagcacgtgccccgtgctgtttttgttgaccttgaacccactgtcatcgatgaggtgaggactggcacctaccgtcagctcttccaccctgagcagctcatcagtgggaaggaggatgccgncaacaactttgcccgtggtcactacaccattggcaaggag

SEQ ID NO: 88624 - DNA, 427 bp, Zea mays
attgagaccaactagcaacatagaaagcacaatagtgtaccaacaatggcagccagaatgttttgcctccttatgctccttggtctttctgcaagtgctgctacggcgaccattttcccgcaatgctcgcaagctcctatagcttcccttcttcccccgtacctctcaccagcggtgtcttcggtatgtgaaaacccaattcttcaaccctacaggatccaacaggcaatcacagctggcatcttacctttatcacccttgttcctccaacaatcatcagccctattacatcagttacctttggtgcatttattggcacaaaacatcagggcacaacaactacaacaacttgtgctagcaaaccttgctgcctactctcagcaacagcagtttcttccattcaaccaactagctgcattgaactctg

SEQ ID NO: 88625 - DNA, 425 bp, Zea mays
gacctaacatcaatggctaccaagatattagccctccttgcgcttcttgccctttttgtgagcgcaacaaatgcgttcattattccacaatgctcacttgctcctagtgccattattccacagttcctcccaccagttacttcaatgggcttcgaacacctagctgtgcaagccaacatgcaacaacaagcgcttgcggcgagcgtcttacaacaaccaattgcccaattgcaacaacaatccttgccacatctaacaatacaagccatcacaacgcaacagcaacaacagttcctaccagcactgagccacctagccatggtgaaccctgccgcctacttgcaagagcagctgcttgcatccaacccacttgctctggcgaacgtagttgcaaaccagcaacaacaacagctacaacagtttct

SEQ ID NO: 88626 - DNA, 401 bp, Zea mays
gtgagcgcaacaaatgcgttcattattccacaatgctcacttgctcctagtgccatgattccacagttcctcccaccagttacttcaatgggcttcgaacacctagctgtgcaagccaacatgcaacaacaagcgcttgcggcgagcgtcttacaacaaccaattgcccaattgcaacaacaatccttgccacatctaacaatacaagccatcacaacgcaacagcaacaacagttcctaccagcactgagccacctagccatggtgaaccctgccgcctacttgcaagagcagctgcttgcatccaacccacttgctctggcgaacgtagttgcaaaccagcaacaacaacagctacaacagtttctgccaacgctcagtcaactagccatggtgaaccc

SEQ ID NO: 88627 - DNA, 390 bp, Zea mays
attttgagcattcagaaacacaccaagcgaagcacattagcaacaacctaacaacagtggctaccaagatattatccctccttgcgcttcttgcgctttttgcgagcgcaacaaatgcgttcattattccacaatgctcacttgctccaagttccattattacacagttactcccaccagttacttcaatgggcttcgaacacccagctgtgcaagcctataggctacaacaagcaattgcggcgagcgtcttacatcaaccaatttcccagttgcaacaacaatccttggcacatgtaacaatacaaaccatcgcatctcaacagcatcaacaattactaccagcactgagccacctagccatggtgaaccctgccgactacttgcaac

SEQ ID NO: 88628 - DNA, 327 bp, Zea mays
ggtgatatcactggctcacaaattcacgaagctgcaagttctatctctacgccagatcaggcctcagctagaagacagcggcgtggaggccgtggcaaaccactgccacgacctgcgcgagctggatctcagcagaagcttcaggctgagcgaccggtccttgtacgccctggcgcacgggtgccctcagcttaccaagcgtaacatcagcgggtgcctcaagttcaacggcctggcgctcggggtccttttcaagccatgccggaacccggaaaggcctgaaccgtgccggttgtgtaagggcagcctctgccaaagcgctccagg

SEQ ID NO: 88629 - DNA, 395 bp, Zea mays
attgagaccaactagcatcatagaaagcacaatagtgtaccaacaatggcagccaaaatgttttgcctccttatgctccttggtctttctgcaagtgctgctacggcgaccattttcccgcaatgctcgcaagctcctatagcttcccttcttcccccgtacctctcaccagcggtgtcttcggtatgtgaaaacccaattcttcaaccctacaggatccaacaggcaatcacagctggcatcttacctttatcacccttgttccttcaacaatcatcagccctattacatcagttacctttggtgcatttattggcacaaaacatcaaggcacatcaactacaacaacttgtgctagcaaaccttggttgctactttcagcaacagcagtttct

SEQ ID NO: 88630 - DNA, 428 bp, Zea mays
  unsure (1)..(428): unsure at all n locations
ccaactagcaacatagaacgcacaatagtgtaccatcaatgggccgccaaatattgggcctccttatgctccttggtctntctgcaagtgctgctacggcgaccattttcccacaatgctcacaagctcctatagcttcccttcttcccccgtacctctcaccagcggtgtcttcggtatgtgaaaacccaattcttcaaccctataggatccaacaggcaatcgcagctggcatcttacctttatcacccttgttcctccaacaatcatcagccctattacagcagttacctttggtgcatttattggcacaaaacatcagggcacaacaactacaacaacttgtgctagcaaaccttgctgcctactctcagcaacaacagtttcttccattcaaccaactagctgcattgaactctgcttcttat

SEQ ID NO: 88631 - DNA, 91 bp, Zea mays
cggactcgtgggtaataatgcagtatgacgacacacattatcatgtgtggtatgagcaataatatatgcatcataataaagttttggtttt

SEQ ID NO: 88632 - DNA, 466 bp, Zea mays
gtaccggtccggaattcccgggcacaatagtgcaccaacaatggcagccaaaatattttgcctccttatgctccttggtctttctgcaagtgctgctacggcgaccattttcccacaatgctcacaagctcctatagcttcccttcttcccccgtacctctcaccagcggtgtcttcggtatgtgaaaacccaattcttcaaccctataggatccaacaggcaatcgcagctggcatcttacctttatcacccttgttcctccaacaatcatcagccctattacagcagttacctttggtgcatttattggcacaaaacatcagggcacatcaactactacaacttgtgctagcaaaccttgctgcctactctcagcaacaacagtttcttccattcaaccaactagctgcattgaactctgcttcttatttgcaacatcaacatctaccattcagccagctatct

SEQ ID NO: 88633 - DNA, 419 bp, Zea mays
cccaattccctccgtcggccgccgctccatcccgtacgacgacaccatgagggagtgcatttcgatccacatcggccaggccggtatccaggtcggaaacgcgtgctgggagctgtactgccttgagcatggcattcaggctgacggtcagatgcccggtgacaagaccattgggggaggtgatgatgctttcaacaccttcttcagtgagactggtgctgggaagcacgtgccccgtgctgtttttgttgaccttgaacccactgtcatcgatgaggtgaggactggcacctaccgccagctcttccaccctgagcagctcatcagtgggaaggaggatgccgccaacaactttgcccgtggtcactacaccattggcaaggagattgttgacctgtgccttgatcgcatcaggaagc

SEQ ID NO: 88634 - DNA, 404 bp, Zea mays
ggacgtcagcctagcaattagctcatcgactccagattggagaactcgacaccatggaggtgctgatcgttgcccttgctctcctggcgctcgctgcgagcgccgcctccagtacaagcggcggctgtggctgccagacaccaccgtttcatctaccgcctccgttctatatgccgcctccgttctatctgccgccgcagcagcagccgcagccatggcaataccccactcaaccaccgcagctaagcccgtgccagcagttcggatcctgcggcgtcggcagcgtcggcagcccgttcctgggccagtgcgtcgagttcctgaggcaccagtgcagcccggcggcgacgccctacggctcgccacagtgccaggcgctgcagcagcagtgctgccaccagatc

SEQ ID NO: 88635 - DNA, 409 bp, Zea mays
  unsure (1)..(409): unsure at all n locations
ggtggagatgctggggcgcgccggggaggtggaggaggccgagcgactcgtggccgggatggaggcgcgcccggacagggtcatcttcgcggcgctcctcgccgcgtgccgcgtgcacggccgggttgacgttgccgagcgggtggccgggctcatgcgccggtatgccgttgcgtgaaaactcgcggtctgactaatgcatcatcagttgaagacttgaagcgcagttcagacctgtgatctgaaataatcatccatcgccatgcatcttttgggttgattgcttgcttggacacgaatcggactaagaaatactccatagctggcaatgtggtagcgttgcttgtaagtgcattgtatgttttcagtcattcatgcagcangagcccctcctggctagtaaaatcag

SEQ ID NO: 88636 - DNA, 418 bp, Zea mays
ggtcttcagaccattagctttaactactccagagcgcagaagaacccggacgacacgatgagggtgttgctcgttgccctcgctctcctggctctcgctgcgagcgccacctccacgcatacaagcggcggctgcggctgccagccaccgccgccggttcatctaccgccgccggtgcatctgccacctccggttcacctgccacctccggtgcatctcccaccgccggtccacctgccgccgccggtccacctgccaccgccggtccatgtgccgccgccggttcatctgccgccgccaccatgccactaccctactcaaccgccccggcctcagcctcatccccagccacacccatgcccgtgccaacagccgcatccaagcccgtgccagctgcagggaacctgcggcgttggca

SEQ ID NO: 88637 - DNA, 399 bp, Zea mays
gagaccaactagcaacatagaaagcacaatagtgtaccaacaatggcagccaaaatattttgcctccttatgctccttggtctttctgcaagtgctgctacggcgaccattttcccgcaatgctcgcaagctcctatagcttcccttcttcccccgtacctctcaccagcggtgtcttcggtatgtgaaaacccaattcttcaaccctacaggatccaacaggcaatcgcagctggcatcttacctttatcacccttgttcctccaacaatcatcagccctattacaacagttacctttggtgcatttattggcacaaaacatcagggcacaacaactacaacaacttgtgctagcaaaccttgctgcctactctcagcaacagcagtttcttccattc

SEQ ID NO: 88638 - DNA, 458 bp, Zea mays
tccggaattcccggtccgcccaagccttccgaggaaggcaccttgaaaggagaattcatttaccaccattgaaccaccattgccagccaggatattttccttcctaatgctcctggctctttctacaggtgttgcttaacgcgacaattttccttcaatgctcacaagctcctatagcttcccttcttcccccataccttccatcaattatagcttcagtatgtgaaaacccagctcttcaaccatataggcttcaacaagcaatcgcagcaagcaacatacctttatcgcccttgttgtttcaacaatcaccagccctatctttggtgcagtcattggtacaaaccatcagggcacaacagctgcagcaactcgtgctacctgtgatcaaccaagtagctctggcaaacctttctccctactctcagcaacaacaatttcttccattcaaccaactg

SEQ ID NO: 88639 - DNA, 359 bp, Zea mays
  unsure (1)..(359): unsure at all n locations
gcgatctaagccgtcgactctactactgcatctacctcgctctcgccgtctcgatcgctgggtcttcgccccgtaccgtcccgagcagagcgcagtcctatgctgagctgggatggcggacgcgaagcagcagcagcagcagcagcagcagtcacagcaggcggctgcggtagccaccggcgtgtggaagacggtcaagcccttcgttaacggtggnggctctgggatgctcgcgacctgcgtcatacagcctatcgacatgggcaaggtgaggatccagctgggcgatggctgctgtggtcatggtaccaggcacatgcgttgcaacgacggtggccggtccttctaccaggggttgg

SEQ ID NO: 88640 - DNA, 379 bp, Zea mays
ggacaccgtggggcagtacgagttcctgattgtgtttactcttcctgggctctagcgcgtggtccatggcatcgatgttttcgatcccaagttcaacattgtctcccctggagcagacatcactgtttactacccgtatacggaaaccgacaagagactcactgccttgcatcctgaaatcgaggagctcatctacagcgacttcgataactccgagcacaatttcatgctgaaggactacatgatgccgatcatcttctcgatggcgcgtctataccgcgtgaagaacatgactggcctgatcgagatgtacggcatgatcgcgcgcctgagggagctgtcgaacctcgtgatcgttgccggtgaccactgcaaggag

SEQ ID NO: 88641 - DNA, 413 bp, Zea mays
gcacaatagtgtaccaacaatggcagccaaaatatcttgcctccttatgctgcttggtctatctgcaagtgctgctacggcgaccattttcccgcaatgctcgcaagctcctatagcttcccttcttcccccgtacctctcaccagcggtgtcttcggtatgtgaaaacccaattcttcaaccctacaggatccaacaggcaatcacagatggcatcttacctttatcacccttgttcctccaacaatcatcagccctattacatcagttacctttggtgcatttattggcacaaaacatcagggcacaccaactacaacaactcgtgctatcaaaccttgctgcctactctcagcaacagcagtttctttcattcaaccaactagctgcattgaactctgcttattatttgc

SEQ ID NO: 88642 - DNA, 511 bp, Zea mays
tggtttaagcgtgtagtgaccgacggggggggtatagcatactcgtaccggtccggaattcccgggtcgtacccacgcgtccggacgtcagcctagcaattagctcatcgactccagattggagaactcgacaccatggaggtgctgatcgttgcccttgctctcctggcgctcgctgcgagcgccgccttcagtacaagcggcggctgtggctgccagacaccaccgtttcatctaccgcctccgttctatatgccgcctacgttctatctgccgccgcagcagcagccgcagccatggcaataccccactcaaccaccgcagctaagcccgtgccagcagttcggatcctgcggcgtcggcagcgtcggcagcccgttcctgggccagtgcgtcgagttcctgaggcaccagtgcagcccggcggcgacgccctacggctcgccacagtgccaggcgctgcagcagcagtgctgccaccagatcaggcaggtggagccgctgcaccgtt

SEQ ID NO: 88643 - DNA, 570 bp, Zea mays
  unsure (1)..(570): unsure at all n locations
nggagagcttgnagtttacgacacgacgatgtatatgcattgctggtactcggtccggaattcccgggtacgacccacgcgtctcggacagcattgcaactctcctggcttatttacagcagcaaacgaactacttaccattgcagggcagtctacgctgagtgtgagcctctgcttaccttcgttggacacaatccagcagcttgttgctcgtatctacacagcagcgtctgcgtcctaacgcatgagcacactgttacaatctgcaacacattgcttgtcattcgaaccaacttgcttnagacaaacgccagcatgcattctaccaacaactccatcatatggtggtgccactattcgtagattctcttatgagtctatnagttcaagtaataagagtctttttagtcatgatgtatcgtggccttcccatgaaataagtacagtacagtttctagaattcctcaatgcagaaacaaaaaggtgacggccgatcttagaggatccaatgcttacgtaccgcgtgcatgacgacgtcatagcatattatatagtgtcacctaaattcac

SEQ ID NO: 88644 - DNA, 292 bp, Zea mays
gctgcagcaagtcgtgcttccttcttgacacagcatcagttgctgcctttctacaagcagtttgcggctaaccccgcatccctcttacaactacaacaattgttgccctttgtccaacttgctttgacaaacccagcagcctcctaccaacaacacatcattggtggtgccctcttttagattgattattagttgtaattcaataataaagttttttggatgatgtatgtggccaaccagaaataagaagttacatttccaaaataataaagttttttgtctgatgtttgtg

SEQ ID NO: 88645 - DNA, 353 bp, Zea mays
tccgattcggtcgaccagctcgagggctggcccctgaaaacctggttgtcttgatccaatgaaggacgggtaggaccattccggaaaggaccgtccgatcaccggtcggccgtcagcgatgctggatggaattacaccccgttacaccatgagatcgactcgcatgaatctaggcgagagtggagctaaagacagcagaacacaatgtatcaccttcaaagcctgacttggctctttagctgggtcgaattgctgatgccgtgctgctgctttgagatctgatgggatcctttggatcaagacggagacttgcgagggacattgtcggcgctttggcgttatcaggaaggagc

SEQ ID NO: 88646 - DNA, 413 bp, Zea mays
  unsure (1)..(413): unsure at all n locations
cggacgcgtgggcggcatccgccgccatcgatcgatcgcccggaaactgacctctaccgatgtctggagccggcgaggaggataagaagcccgcggagggcggcgcccacatcaaccttaaggtcaagggacaggatggcaatgaggtgttctttcgcataaagaggtccacccagctgaagaagctgatgaacgcctattgcgaccgccagtctgtggacatgaatgccattgcattcctgtttgatggccgcaggcttcgcggcgagcagacccctgatgagctggagatggaggacggcgacgagatcgacgccatgcttcaccagaccggaggcagcgttcctagcaccacctaatagcagcagctgcggagcctcgttttgctctccgncctgcgtagtactaaacaa

SEQ ID NO: 88647 - DNA, 413 bp, Zea mays
ccaactagcaacatagaaagcacaatagtgtaccaacaatggcagccaaaatattttgcttccttatgctccttggtctttctgcaagtgttgctaccgcaaccattttcccacaatgctcacaagctcctatagcttcccttcttcccccatacctctcaccagcggtgtcttcaatgtgtgaaaccccaattgttcaaccctacaggatccaacaggcaatcgcatcaggcatcttaccattatcacccttgttcctccaacaaccgtcagccctattacagcagttacctttggtccatttggtggcacaaaacatcagggcacaacaactacaacaacttgtgctagcaaaccttgctgcatactctcagcaacatcagtttcttccattcaaccaactggctgcattg

SEQ ID NO: 88648 - DNA, 425 bp, Zea mays
aagcgcactagcaacgacctaacaaccaagggctttccaagacattatccttccttgggctggttgcccttttggggagtgcaccaaatgcgttcattattccacaatgctcacttgctccgagtgccattattccacagttcctccctccagttacttcaatgggcttagaacacccagctgtgcaagcctataggctacaacaagcgcttgcggcgagcgtcttagaacaaccaattgcccaattacaacaacaatccttggcacatctaaccatacaaaccatcgcaacgcagcatcaacaagcactgagccacctagccgtggtgaaccctatcgcctacttgcaacaacagctgcttgcatccaacccacttgctttggcaaacgtagctgcataccaaccacaacaacagttgcaacag

SEQ ID NO: 88649 - DNA, 452 bp, Zea mays
gtccggattccgggctagatgtggcgaccccggtcgcttacttgcacctgccggtgctggcttccaacccatttgctctgccaaaggtggctgcataccaacagcatcaacaattgcaacagtttatgccagagctcagactactagccatggtgaaccttgccgactacctacaacagcgacaactgctgtcatctagccctctcgtcgtggctaatgcacatacttacctgcgacatcaattgctgcagcagatagcaccagctctgactcagctagctgcggcaaacgctgctgcctactatgcacagctgcttacattcaaccaactgactgtttcgaactctgctgcgtacgtacaacagcgactacaggtacttaatccagtatcagtgcctaacccattgttcactgccttactacagctacaacaattgctaccatacagtcag

SEQ ID NO: 88650 - DNA, 425 bp, Zea mays
gcatcatagaaagtggaatccagtagcaacaatagagcaacaatggcgaccaagatattttccctccttatgctccttgctctttctacatgtgttgctaacgcgacaattttccctcaatgctcacaagctcctatagcttcccttcttcccccataccttccatcaattatagcttcaatatgtgaaaacccagctcttcaaccatataggcttcaacaagcaatcgcagcaagcaacatacctttatcgcccttgttgtttcaacaatcgccagccctatctttggtgcagtcattggtacaaaccatcatggcacaacagctgcatcaactcgtgctacctctgatcaaccaagtagctctggcaaacctttctacctactctcagcaactacaatttcttccattcaaccaactgtctac

SEQ ID NO: 88651 - DNA, 423 bp, Zea mays
gtaccggtccggaattcccgggagttacttaatccattggcagtggctaacccattggtcgctaccttcctgcagcagcaacaacaattgctgccatacaaccagttctctttgatgaaccctgccttgcagcaacccatcgttggaggtgccatcttttagattacatatgagatgtactcgacaatggtgccctcataccgacatgtgtttcctagaaataatcaatatattgattgagatttatctcgataaaaaaaaaaaaaaaaaaaaaaaaaaaaaaaaaaaaaaaaaaaaaaaaaaaaaaataaaaagaaaaaaaaaaaaaagaaaaaaaaaaaacaaaaaaaaaaatacacaacaaaaagaacaaactaaaactaactaaaaaaaaaacaaaaaacgggggccctctttaaaggg

SEQ ID NO: 88652 - DNA, 416 bp, Zea mays
ccttcttcccccgtacctctcaccagcggtgtcttcggtatgtgaaaacccaattcgtcaaccctacaggatccaacaggcaatcacagctggcatcttacctttatcacccttgttcctccaacaatcatcagccctattacatcagttacctttggtgcatttattggcacaaaacatcagggcacaacaactacaacaacttgtgctagcaaaccttgctgcctactctcagcaacagcagtttcttccattcaaccaactagctgcattgaactctgcttcttatttgcaacaacaacaactaccattcagccagctacctgctgcctacccccagcaatttcttccattcaaccaactggcagcattgaactctcctgcttatttacagcagcaacaactactaccattca

SEQ ID NO: 88653 - DNA, 419 bp, Zea mays
cggacgcgtgggtcagcattcaaaaacacaccaagcgaagcgcactagcaacgacctaacaccaatggctaccaagatattagccctccttgcgcttcttgcccttttagtgagcgcaacaaatgcgttcattattccacagtgctcacttgctcctagtgccattattccacagttcctcccaccagttacttcaatgggcttcgaacatccagccgtgcaagcctacaggctacaactagcgcttgcggcgagcgccttacaacaaccaattgcccaattgcaacaacaatccttggcacatctaaccctacaaaccattgcaacgcaacaacatcaacaacaacagtttctgccatcactgagccacctagccgtggtgaaccctgtcacctacttgcaacagcagctgcttgcat

SEQ ID NO: 88654 - DNA, 414 bp, Zea mays
gtttgatattgatgcaaatggtatcctctcagttgctgccattgataagggcactggaaagaaacaggacatcaccatcactggtgctagtacgctacctaaggatgaggttgagagaatggtagaagaagccgataagtttgccaaggaggacaaagagaagagagatgcaatcgacaccaaaaaccaggcggactcagtggtctaccagactgagaagcaactgaaggagcttggcgacaaagtccccgctcctgtgaaagagaaggtggatgtgaagctccaggagctcaaagacgccatttctggtggatcaacacagagtatgaaagatgccatggctgctctgaaccaggaggtgatgcagattggccaggcaatgtataaccagcctggtgccagtgctgctgggcc

SEQ ID NO: 88655 - DNA, 431 bp, Zea mays
aagcatcatagacagtagaatccattagcatcattagagcaccaatggcgaccaagatagtttccctccttatgctccttgctctttctacatgtgttgctaacgcgacaattttccctcaatgctcacaagctcctatagcttcccttcttcccccataccttccatcaattatagcttcagtatgtgaaaacccagctcttcaaccatataggcttcaacaagcaatcgcagcatgcaacatacctttatcgcccttgttgcttcaacaatcaccagccctatctttggtgcagtcattggtacaaaccatcagggcacaacagctgcagcaactcgtgctacctgtgatcaaccaagtagctctggcaaacctttctccctactctcagcatcaacaatttcttccattcaaccaactgtctacactg

SEQ ID NO: 88656 - DNA, 444 bp, Zea mays
  unsure (1)..(444): unsure at all n locations
ggtccggaattcccgggtacgacccacgtcgtccgagaccattagcatttatctaactccagagtcgcagaagaactccgatcgacgaccatgaggggtgtctgctcgttgcacctcgctctcctggcatctcgctgctgagcgtccacctccacgcatacatagcgtgcggctgcggcttgccagtccaccgtcgtccggttcatcgtaccgtcgtcggtgcatctgccaccgtncggttcacctgccacctccggtgcatctcccaccgccggtccacctgccgccgccggtacacctgccaccgccggtccatgtgccgtcgtcggttcatctgccgccgccaccatgccactaccctactcaaccgtcccggcctcagcctcatccacagccacacccatgcccgtgccaacagccgcatccaagcccgtgccagctgca

SEQ ID NO: 88657 - DNA, 445 bp, Zea mays
gtaccggtccggaattcccggggcaaaaccatcagatctagcagaactctctcgacctcatcggcgttggcggagcgcgtgttgaccggagatggcgccgatcgggtggaggaggagcgcggcggcgcgggtcgcctggcgcccggccacggtttgcctgtggctcgcgctcgccgccgccgcactgacgctcgcccaggctaagaaggacctgacggatgttacccacatggtctacttcgacatcgagatcgacggctagcccgtaggccggattgtcatggtgctttttgggaagactgttcctaagacggcagagaacttgcgagctctttgcacatgagagaaaggcgtcggcaagagtggcatagccctccactacaagggaagtaagttccacagaatcatccacagcttcatgctccaaggaggtgacttcactctc

SEQ ID NO: 88658 - DNA, 371 bp, Zea mays
atagaaagcacaatagtgtaccaacaatggcagccaaaatattttgcttccttatgctccttggtctttctgcaagtgttgctaccgcaaccattttcccacaatgctcacaagctcctatagcttcccttcttcccccatacctctcaccagcggtgtcttcaatgtgtgaaaccccaattgttcaaccctacaggatccaacaggcaatcgcaacaagcatcttaccattatcacccttgttactgcaacaaccgtcagccctattacaacaggtacctttggtccattcggtggcacaaaacattaaggcaccacaactaccacaacctgggcttgcaaaccttgctggatacttttaacaacattaa

SEQ ID NO: 88659 - DNA, 418 bp, Zea mays
cttgcatccaacccacttgctctggcgaacgtagctgcataccagcaacaacaacagctgcaacagtttatgccagtgctcagtcaactagccatggtgaaccctgccgtctacctacaactactttcatctagcccgctcgcggtgggcaatgcacctacgtacctacaacaacagttgctgcaacaaattgtaccagctctgactcagctagctgtggcaaaccctgctgcctacttacaacagttgcttccattcaaccaactggctgtgtcaaactctgctgcgtacctacaacagcgacaacagttacttaatccattggcagtggctaacccattggtcgctaccttcctgcagcagcaacaacaattgctgccatacaaccagttctctttgatgaaccctgccttgcagc

SEQ ID NO: 88660 - DNA, 412 bp, Zea mays
tcccggctcgacccaagccttccgccacttgccaccttaaaaggcccatttttgtcccaccattggcagccaaaatatttggctgccttatgctccttggtctttctgcaagtgttgctaccgcaaccattttcccacaatgctcacaagctcctatagcttcccttcttcccccatacctctcaccagcggtgtcttcaatgtgtgaaaacccaattgttcaaccctacaggatccaacaggcaatcgcaacaggcatcttaccattatcacccttgttcctccaacaaccgtcagccctattacagcagttacctttggtccatttggtggcacaaaacatcagggcacaacaactacaacaacttgtgctagcaaaccttgctgcatactctcagcaacatcagtttct

SEQ ID NO: 88661 - DNA, 364 bp, Zea mays
  unsure (1)..(364): unsure at all n locations
attgagaccaactagcaacatataaagcacaatagtgtaccaacaatggcagccaggatattttgcctccttatgctccttggtctttctgcaagtgctgctacggcgaccattttcccgcaatgctcgcaagctcctatagcttcccttcttcccccgtacctctcaccagcggtgtcttcggtatgtgaaaacccaattcttcaaccctacaggatccaacaggcaatcacagctggcatattacctttatcacccttgttcctccaacaatcatcagccctattacatcagctacctttggtgcatttattggcacanatcatcagggcacaacaactactacaacttgtgctagcaaacc

SEQ ID NO: 88662 - DNA, 417 bp, Zea mays
gaactctgcttctaattggcaccacctccacctaccattaacccagctacctgttgggtacccccaacaatttcttccattcaaccaactggcagcattgaactctcctgcttatttacagcagcaacaactactaccattcagccagctagctggtgtgagccctgctaccttcttgacacaaccacagttgttgccgttctaccagcacgctgcgcctaacgctggcaccctcttacaactgcaacaattgctgccattcaaccaacttgctttgacaaacctagcagtgttctaccaacaacccatcattggtggtgccctcttttagatttcttatgagttatagttcaataataaagttttttgtctgatgtttgtggcttcccagaaataagaaagtacatttctagattc

SEQ ID NO: 88663 - DNA, 389 bp, Zea mays
attcaaaaacacaccaagcgaagcgcactagcaacgacctaacaccaatggctaccaagatattagccctccttgcgcttcttgcccttttagtgagcgcaacaaatgcgttcattattccacagtgctcacttgctcctagtgccattattccacagttcctcccaccagttacttcaatgggcttcgaacatccagccgtgcaagcctacaggctacaactagcgcttgcggcgagcgccttacaacaaccaattgcccaattgcaacaacaatccttggcacatataaccctacaaaccattgcaacgcaacaacaacaacaacaacagtttgtgccatcactgagccacctagccgtggtgaaccctgtcacctacttgcaacag

SEQ ID NO: 88664 - DNA, 498 bp, Zea mays
  unsure (1)..(498): unsure at all n locations
tggtaggtttgatccagcccgtacagnattgctgtaccggtccggaattcccgggtcgacttacgcgtccgggtgggtcggcttctcctcccccttcggttcgggttcgggttcgtgaggttctccgggtttcggtttcgtgggtgggcggatcgagatggcggcgtcggatgttgagtaccgctgcttcgtcggcggcctcgcctgggccacggacgaccactccctccacaacgccttcagcacctacggcgaggtcctcgagtccaagatcatcctcgatcgggagacgcagaggtcccgcggcttcggcttcgtcaccttctccacggaggaggcgatgcggaacgccatcgagggcatgaacggcaaggagctggacggtcgcaacatcaccgtcaacgaggcccagtcccgcggcggccgtggaggcggcggcggcggctacggtggtggcccgtgaggcggcggctacgggcgtggcgggcgccgtgatgg

SEQ ID NO: 88665 - DNA, 392 bp, Zea mays
cgacctacgcgtacgggggcggtggcttctactccccctcttggtctagctccggttcatgaagttctcgggatgggctgtttcgtgggtgggcggatcgagatggcggcgtctgatgttgagtaccgctgcttcgtcggcggcctcacctgggccactgacgaccactccgtacacaacgccttcagcacctacggcgaggtcctcgagtccaagatcatcctcgatcgggagacgcagaggtcccgcggcttcggcttcgtcaccttctccacggaggaggcgatgcggaacgccatcgagggcatgaacggcaaggagctggacggtcgcaacatcaccgtcaacgaggcccagtcccgctgcggccgtggaggcggctgcagcggcta

SEQ ID NO: 88666 - DNA, 307 bp, Zea mays
tcttttagacgggcttccattagaatatatctatcagcaatgaccttcaatatattttccatccttatgctccttgctctttctgcatgtgttgctaacgcgaccatttttcctcaatactcacaagctcctatagctgccctttttgacccataccttccatcaatgaccgatctagtatgtgaaaaccgcaccctttaaccctacaggatccatcaagcaactctaacatgcaacttacctttatcacacctgttatttcaacaatcgccagtcctatctttggtgcaatcatctgtacaaacca

SEQ ID NO: 88667 - DNA, 285 bp, Zea mays
gcaacatagaaagtggaatccagtatcatcaacagagcatcaatggcgaccaagatattttccctccttatgctccttgctctttctgcatgtgttgctaacgcgacaattttccctcaatgctcacaagctcctatagcttcccttcttcccccataccttccatcaatgatagcttcagtatgtgaaaacccagctcttcagccctataggctccaacaagcaatcgcagcaagcaacatacctttatcacccttgttgtttcaacaatcgccagcccctatc

SEQ ID NO: 88668 - DNA, 420 bp, Zea mays
gaccaacaagcaacatagaaagtggaatccagtagcaacaatagagcaacagtggcgaccaagatattttccctccttatgctccttgctctttctacatgtgttgctaacgcgacaattttccctcaatgctcacaagctcctatagcttcccttcttcccccataccttccatcaattatagcttcaatatgtgaaaacccagctcttcaaccatataggcttcaacaagcaatcgcagcaagcaacatacctttatcgcccttgctgtttcaacaatcgccagccctatctttggtgcagtcattggtacaaaccatcatggcacaacagctgcagcaactcgtgctacctctgatcaaccaagtagctctggcaaacctttctccctactctcagcaaccaccatttcttccattc

SEQ ID NO: 88669 - DNA, 466 bp, Zea mays
ccggttcggaattcccgggcttacctactcgccccataccttacatcaatgatagcttcattatgagaaaacccagctcttcagcgcctaggggctacaacaagcaatctcattatgcaacatacctttatcacccttgttgtttcaacaatcgccagccctatatttggtgcagccattgttacttaccatcatggcacataagttgcatcaactatagctacctgtgatcaaccaagtagctttggcaaacctttcttcctactctcagcaacaacaatctatttcattcaaccaactgtctacactgaaccctgctgattattagcagcaacaactattaccattcagacagctagctactgcctactctcagcaacaacaacttctttcatttaaccaattggcctcactgaaccccgctgcttatttgcagcagcacatactactaccatttagccagcta

SEQ ID NO: 88670 - DNA, 428 bp, Zea mays
gaattcccggctcaagccttccatcggcaacaccggaggccccgacacttccttgcccatggggatccgtacgacggcggacggaccgttgctggacggcttgaacctgttggggcaccaggacacgctgtacgcgcacgccttgcgccagttctacacccggtgccgcgtggcgggcaccgtcgacttcgtcttcggcaactccgccgcggtgctccacgacaccgtcctcgtcgtgctgccgcggcagctgcggccggagaagggcgagaacgacgccgtcacggcgcagggccgcaccgacccggcccagcccacggtgatcgtgctcagccgctgctccgtcaacggcagcgaggagtacatggcgctgtaccgcgagaggcccggcgtgcaccacgtctacctgatgccgccgtggaaggagt

SEQ ID NO: 88671 - DNA, 390 bp, Zea mays
cgctgcaactacttgattgattgttggtagcgaaccttgctgcttatctccagcaacaacaatttcttccattcaatcaactagctggggtgaaccctgctgtctacttgcaggcacaacaactactaccatttaaccaacttgtcgggagccctgatgccttcttactggaacaacagcttctggcattccatctggaagctggggaaaacattggttctttcttgcgacaaccaccattggtggcacattacacccacagtttggggaacacataaatgctcttttgcaacagaaacaatggcggccattctacccacataatgtggcaaacattgttgccttcttacaacaacaacaattgctgccatttagccaacatgctttgac

SEQ ID NO: 88672 - DNA, 372 bp, Zea mays
gtaccggtccggaattcccgggcgtacctacaacagcgacaacagttacttaatccattggtagtggctaacccattggtcgccgccttcctacagcagcaacaattgctgccatacaaccagttctctttgatgaatcctgtcttgtcgaggcagcaacccatcgttggaggtgccatcttttagattacatatgagatgtactcgataatggtgccctcataccgacgtgtgtttcctagaaataatcaatatattgattgagatttatctcgataaaaaaaaaaaaaaaaaaaaaaaactaaaaaaaaaaaaataaaaaaaaaatacaaaacaaaaacagaaaaaaccaaaacaaaaaaaaagggcggc

SEQ ID NO: 88673 - DNA, 409 bp, Zea mays
ggcaacttcgccaggcccaccttttgtgccatggaggtgaggcccagcttcaaccggctgtaccaggccgacgtctacagccctggggctgggaggatcacacgcctgaccagccacaagttccccgtgctcaacctcgtacagatgagcgcggtgcgggtagacctgtaccaggacgccatcatgtcgccgttctggaacttcaacgcccacagcgccatgtacggcatcaggggcagtgcaagggtccaggtcgccagcgacaacgggaccacggtgttcgacgacgtgctccgtgcggggcagctgctcatcgtaccccagggctacctcgtcgccaccaaggcgcatggagaaggcttccagtacatcgccttcgagacgaaccctgacaccatggtcagccacg

SEQ ID NO: 88674 - DNA, 452 bp, Zea mays
gtaccggtccggagttccggcctaggcgtaccggtggtccggggcaggcgtacgtcgtggaccacctgctgggcgacatcgaaggccaggacggaaccgccgccgccatcgtcggccacgacggcagcgtctgggcacagtccgagaacttccccgagttaaagcctgacgaggttgctgggatgataaaggactttgatgaacctggaactcttgcaccaactggtctttttgctggaggtacgaagtacatggtgatccaaggtgaacctggagttgtcatccgaggaaagaagggcactggaggcattactatcaagaaaactggcatgtccttgattatcggtatctatgatgagccaatgactccagggcaatgcaatatggtggtggagaggctcggcgattacctgatcgaacagggcttctaagtttgtcataatgctattttg

SEQ ID NO: 88675 - DNA, 429 bp, Zea mays
aaggcccattatggtcccaccatggccacctaaaaattttggcctcctaatgctcctgggtcttcctgcaagtgctgctacggctaccattttccaacaatggctcacaagctcctatagcttcccttcttcccccgtacctctcaccaacggtgtcttcggtatgtgaaaacccaattcttcaaccctacaggatccaacaggcaatcgcagctggcatcttacctttatcacccttgttcctccaacaatcatcagccctattacagcagttacctttggtgcatttattggcacaaaacatcagggcacaacaactacaacaacttgtgctagcaaaccttgctgcctactctcagcaacagcagtttcttccattcaaccaactagctgcattgaactctgcttcttatctgcaacaacaacaac

SEQ ID NO: 88676 - DNA, 332 bp, Zea mays
tatgctccggggtcgttctgcaagtgctgctacggcgaccattttcccacattgctcacaagctcctatagcttcccttcttcccccgtacctctcaccaacggtgtcttcggtatgtgaaaacccaattcttcaaccctactggatccaacaggcaatcgcagctggcatcttacctttatcacccttgttcctccaacaatcatcagccctattacagcagttacctttggtgcatttattggcacaaaacatcagggcacaacaactacaacaacttgtgctagcaaaccttgctgcctactctcagcaacagcagtttcttccattca

SEQ ID NO: 88677 - DNA, 322 bp, Zea mays
taccggtccggaattcccggggcggcgctgatggcggcccaggtagcgcagcagctgacggcgatgtgcggtctgcagctgcagcagccaggtccctgcccttgcaacgcagctgccggcggtgtctactactgaggaaactatgtactgtagtaataatgtaatggagccgctgactagctacctatagggctatagctagttcactcgtttagcggcgatgagtaacggagtgtcacccatcaccatgggtggcaatgtgagcaatgacctggatgaaccattggaatggaaaggaataatatatagggaaaaaggatgt

SEQ ID NO: 88678 - DNA, 431 bp, Zea mays
ctagcaacatacatagtgaagtacactagcaacatcttagcaccaatggcagccaagatttttgccatccttgccctccttgctctttcagcaagcgttgctaccgcgactattattccacaatgctcacaacaatacctctctccggtgacagccgcgagatttgaatacccaactatacaatcctacaggctacaagaggccatcgcagcaagcatcttacggtcgttagcattgaccgtccaacaaccatatgccctattgcaacaaccatccttaatgaatctatatctccaaagaatcgcagcacatcatctacaacaacagttgcttccaacaatcaatcaagtagttgcagcgaaccttgctgcttacctccagcaacaacaatttcttccattcaatcaactagctggggtgaaccctgctgc

SEQ ID NO: 88679 - DNA, 433 bp, Zea mays
  unsure (1)..(433): unsure at all n locations
gcgccgccaacatctccggcggccacgtcaacccggccgtcaccttcggcgcgctgatcgccggccggatctgcctcgtccgctccctcatctactgggccgcgcagttgctcggcgccgtcgccgccgcgctcgtgctcaggctcgccaccggagggatgcatctgccggagtacgcgctggccgggggcgtgagcggatggaacgcggcggtgctggaggcggccatggcgttcgggctcatgtacgcctactttgcgacggtgatggacaaagcgcggagggtccgcgccggcgccggagcgctggcggcgccgctcgccgtggggctcctggcggtggccaacgtgctggcctgcggcgcgctggagggcgccgtgatgaatccggcgcgcgcgttcggtcccgncgtcgtgggctcccgtcgctggaa

SEQ ID NO: 88680 - DNA, 412 bp, Zea mays
gcagcgaaccttgctgcttatctccagcaacaacaatttcttccattcaatcaactagctggggtgaaccctgctgtctacttgcaggcacaacaactactaccatttaaccaacttgtcgggagccctgatgccttcttactgcaacaacagcttctgccattccatctgcaagctgtggaaaacattgcttctttcttgcgacaacaacaattgttgccattttacccacaggttgtgggaaacattaatgccttcttgcaacagcaacaattgctgccattctacccacataatgtggcaaacattgttgccttcttacaacaacaacaattgctgccatttagccaacatgctttgacgaatcctaccaccttattgcaatcgcccaccattggtggtgccatcttct

SEQ ID NO: 88681 - DNA, 120 bp, Zea mays
ccggtccggaattcccgggttggagaccaactagcaacatagaaagcacaatagtgttccaacaatggcagccaaaatattgcctccttatgctccctgggctttctgcaagtgctggta

SEQ ID NO: 88682 - DNA, 417 bp, Zea mays
attgagaccaacaagcaacatagaaagtggaatacagtagcaacaatagagcaacaatggcggccaagatattttccatccttatgctccttgctctttctgcatgtgttgctaacgcgaccatttttcctcaatactcacaagctcctatagctgcccttcttcccccataccttccatcaatgaccgcttcagtttgtgaaaacccagcccttcaaccctacaggctccaacatgcaatcgcaacaagcaacttacctttatcacccctgttctttcaacaatcgccagccctatctttggtgcagtcattggtacaaaccatcagggcacatcagctgcaacaactcgtgctaccagtgatcagccaagtagctctggcaaacctttctccctactctcagcaacaacaatttt

SEQ ID NO: 88683 - DNA, 495 bp, Zea mays
  unsure (1)..(495): unsure at all n locations
naggggtnnnnacctgactcgcagccctccgcacgtctctaccggtccggaattcccgggtcgacccacgcgttcggccaacatacagctaactggcgagccgtggacgctcggccagctctgctggccgactaaggagggcgtcgttgggccttaccgccgccgagtgcgtccctgcgggtgggcacactgccgtcggttgtccagcacagctacaagtcgaggagctctgcagtaaaggaagtgtgtagtcaccatggtccatttcaagaataggtatatggtggtggagatctttatagatgcaggtagaggtgaacaggaccctataatcctcacccaatttaatatatcaaaagttataaaagacagcattcagctcaactttggtgagcgtggcctatctggatctcttggatcattgcaagttaagcatgtcaatcctgtaacgaatctctgcattgtccgcgtgtctcgcgaagaccacctaaagtt

SEQ ID NO: 88684 - DNA, 440 bp, Zea mays
attgagaccaactagcaacatagaaagcacaatagtgtaccaacaatggcagccaaaatattttgcctccttatgctccttggtctttctgcaagtgctgctacggcgaccattttcccacaatgctcacaagctcctatagcttcccttcttcccccgtacctctcaccagcggtgtcttcggtatgtgaaaacccaattcttcaaccctataggatccaacaggcaatcgcagctggcatcttacctttatcacccttgttcctccaacaatcatcagccctattacagcagttacctttggtgcatttattggcacaaaacatcagggcacaacaactacaacaacttgtgctagcaaaccttgctgcctactctcagcaacaacagtttcttccattcaaccaactagctgcattgaactctgcttcttatttgca

SEQ ID NO: 88685 - DNA, 410 bp, Zea mays
aacatcagacaaaaaactttattattgaactataactcataagaaatctaaaagagggcaccaccaatgatgggttgttggtagaacgctgctgggtttgtcaaagcaagttggttgaatggcagcaattgttgcagttgtaagagggtgccagcgttaggcgcagcgtgctggtagaacggcaacaattgtggttgtgtcaagaaggtagcagggctcacaccagctagctggctgaatggtagtagttgttgctgctgtaaataagcaggagagttcaaagctgtcagttggttgaatggaagaaattgctgggggtaggcagcagatagctggctgaatggtagttgttgttgttgcaaataagaagcagagttcaatgcagctagttggttgaatggaagaaactg

SEQ ID NO: 88686 - DNA, 407 bp, Zea mays
gcattttacacagaaaaacacattcggattccatgctttggcggtgaacgtgaagttaccttcttccatgagtctcgagattcagttgactgggtgtttgtcgatcatgcctcatatcacacacctggaaatatatatggagataagttcggtgcttttggtgatcatcagttcagatacacactcctttgctatgctgcatgtgaggctcctttgcaccttgaatcgggaggatatatttatggacagcatagcatgtttgttgtcaatgattggcatgccactctagtgccagtacttcttgctgcaaaatatagaccatatggcgtttataaagactcccgcagcattcttgtgatacataatttatcacatcaaggtgtacagcctgcaagcacatatgctga

SEQ ID NO: 88687 - DNA, 393 bp, Zea mays
ggaatccagctcgagcacgcgtacggagttacctttggtgcatttattggcacaaaacatcagggcacaacaacgacaagaacttgtgctagcaaaccttgctgcctactctgagcaacagcagagtgcttacattcaaccaactacctgcattgaactctgctgcttatgtgcaacatcaacaactaccattcagacagctatctgctgcctacccccagcagtgacttgcattcgaccaactgacagcattgaactctactgcttatttacagcagcaacgactactaccattcagccagctagctgaagtgagccctgctaccttgtagacacagccacacaagctgtcgaactaccagcacgctgcgcctaacgctgacactatattac

SEQ ID NO: 88688 - DNA, 439 bp, Zea mays
gcaacatagaaagcacaatagtgtaccaacaatggcagccaaaatattttgcctgcgtatgctccttggtctttctgcaagtgctgctacggcgaccattttcccgcaatgctcgcaagctcctatagcttcccttcttcccccgtacctctcaccagcggtgtcttcggtatgtgaaaacccaattcttcaaccctacaggatccaacaggcaatcgcagctggcatcttacctttatcacccttgttcctccaacaatcatcagccctattacaacagttacctttggtgcatttattggcacaaaacatcagggcacaacaactacaacaacttgtgctagcaaaccttgctgcctactctcagcaacagcagtttcttccattcaaccaactaggttcattgaactctgcttcttatttgcaacaacaacaacta

SEQ ID NO: 88689 - DNA, 419 bp, Zea mays
cgcaaatcgccccccaaaccaactgggccagccgacacaagcagcatcccgccggcggcgatggacctggcgtcgagcgacctcgcggcgctgggcgcggtggagctggtccgcgtctcggcgtcgatcccgcgcgcggctccgcgcaccttcgcgctgctcaccgcctgcctcgtcttcccgctctccttcgccgtgctcgcgcactccctcttcacccaccccatcctgctccgcatccggggcgccgcccactcggggttcgcgccgtggctcggcctcttcgcgtaccagttcatgtacctcatcgtcctcttcaccttctccctcctctccaccgccgccgccgtcttcaccgtcgcctccctctacgccgggaagcccgcgtccgtctcctcctcgctcagcgcgctgcgccc

SEQ ID NO: 88690 - DNA, 439 bp, Zea mays
agaacgcgcgcctgagggagctggcgaacctcgtgatcgttgccggtgaccacggggaggagtccaaggacagggaggagcaggcggagttcaagaagatgtacagcctcatcgacgagtacaagttgaagggccatatccggtggatctcggcgcagatgaaccgcgtccgcaacggggagctgtaccgctacatttgcgatacgaagggcgcattcgtgcagcctgcgttctacgaagcgttcggcctgactgtgatcgagtccatgacgtgcggtctgccaacgatcgcgacctgccatggtggccctgctgagatcatcgtggacggggtatctggcctgcacattgacccttaccacagcgacaaggccgcggatatcctggtcaacttctttgacaaatgcaaggcagatccgagctactgggacaagatctc

SEQ ID NO: 88691 - DNA, 434 bp, Zea mays
gcacaatagtgtaccaacaatggcagccaaaatattttgcctccttatgctccttggtctttctgcaagtgctgctacggcgaccattttcccgcaatgctcgcaagctcctatagcttcccttcttcccccgtacctctcaccagcggtgtcttcggtatgtgaaaacccaattcttcaaccctacaggatccaacaggcaatcacagctggcatcttacctttatcacccttgttcctccaacaatcatcagccctattacatcagttacctttggtgcatttattggcacaaaacatcaaggcacaacaactacaacaacttgtgctagcaaaccttgctgcctactctcagcaacagcagtttcttccattcaaccaactagctgcattgaactctgcttcttatttgcaacaacaacaactaccattca

SEQ ID NO: 88692 - DNA, 338 bp, Zea mays
ctggacgtcagcctagcaattagctcatcgactccagattggagaactcgacaccatgaaggtgctgatcgttgcccttgctctcctggcgctcgctgcgagcgccgcctccagtacaagcggcggctgtggctgccagacaccaccgtttcatctaccgactgcgttctatatgccgcctacgttctatctgccgacgcagcagcagccgcagccatggcaatacccgactcaaccaccgcagctaagcccgtgccagcagttcggatcctggcggcgtcggcagcgtcggcagcccgttcctgggccagtgcgtcgagttcctgaggcaccagtgc

SEQ ID NO: 88693 - DNA, 424 bp, Zea mays
ccaactaccaacatacatagtgaagtacactagcaacatcttagcaccaatggcagccaagatttttgcgctccttgccctccttgctctttcagcaagtgttgctaccgcgactattattccacaatgctcacaacaatacctctctccagtgatagccgcgagatttgaatacccatctatacaatcctacaggctacaagaggccatcacagcaagcatcttacggtcgttagcattgaccgtccaacaaccatatgccctattgcaacaaccatccttagtgaatctgtatctccaaagaatcacagcacaacaactacaacaacggttgcttccaacaattaatcaagtagttgcagcgaaccttgctgcttaccttcagcaccaacaatttcttccattcaatcaactagctggggtg

SEQ ID NO: 88694 - DNA, 391 bp, Zea mays
gtaccggtccggaattcccgggtgcttgcatctcaaacagcattatcggctggcactcaactgttggtcaatgggcacggatagagaatatgactatcctgggggaggatgttcatgtgtgtgatgaggtgtacagcaatggcggtgttgttctcccacataaagagatcaagtcaagcattctgaagcctgagatcgtcatgtgagctctccagttttagctacagtacattcttaacttctttgacgaagggaggattgcagatccccttttataaacgatattgcttggtatcttcgatctaatgcaaacagcttcatacttggtctcttgttaaactattgacaatgtatcttggtctttgttgaaaagtttagtacttgagtgtca

SEQ ID NO: 88695 - DNA, 425 bp, Zea mays
tcaaatcttcgcatcagtgcaaacttcaatgagcatctctgcagaaaagtaactgaggcttgtgctcgtgtaggtgccgttgactatgggttgaaggctttatggaaacataatgtttatggaataacaccaacgattggttctgctcattatctactgcaacatgctaaagagcaaaatgacaacaaactaatggaaaacgtaattcatgtactatcgagaaatttcttaccgctgcaaccaggcacagctgatataggcttcagtatctgttataatgctgatagatgggatttactctcaaaatacgcggagagatttgataaggcaggtgtcaaactgcatcgagctgcatttgacatttggatggactgtgctgccaaagttggcgattctcaatctatttggcacattaatagtctaag

SEQ ID NO: 88696 - DNA, 428 bp, Zea mays
  unsure (1)..(428): unsure at all n locations
cgcaaattgcaccaagaaatccatcgagaggccgtcgacaggggaattaatggcgtggtcgtctagcagcagccaccgtcgtctcatcctcgcagccgccgtcctgctctccgtgctcgcggctgccagcgccagcgccgggacctcctgcgtgccggggtgggccatcccgcacaacccgctcccgagctgccgctggtacgtgaccagccggacctgcggcatcgggccgcgcctcccgtggccggagctgaagaggagatgctgccgggagctggcggacatcccggcgtactgccggtgcacggcgctgagcatcctcatggacggcgcgatcccgccgggcccggacgcgcagctggagggccgcctagaggacctgccgggctgcccgcgggaggtgcagaggggattcgccgncaccctcg

SEQ ID NO: 88697 - DNA, 435 bp, Zea mays
tagaaagcacaatattgtaccaataatggcagccaaaatattttgcctcattatgctccttggtctttctgcaagtgctgctacggcgagcattttcccgcaatgctcacaagctcctatagcttcccttcttcccccatacctctcaccagcgatgtcttcagtatgtgaaaatccaattcttctaccctacaggatccaacaggcaatcgcagcaggcatcttacctttatcacccttgttcctccaacaatcatcagccctattacagcagttacctttggtgcatttattggcacaaaacatcagggcacaacaactacaacaactcgtgctagcaaaccttgctgcctactctcagcaacagcagttacctttggtgcatttgttggcacaaaacatcagggcacaacaactacaacaactcgtgctagc

SEQ ID NO: 88698 - DNA, 227 bp, Zea mays
  unsure (1)..(227): unsure at all n locations
taccggttctcggaattcccggcgagaccaacaangcaacatangaaaggtggaatacagtnagccaactaatagagcaacccaatggcgnngccaagatnattggcggcgatccttatgctnnccttgctctgttnnctgcatgnnngttgctaacngcngnnaccatttnnttcctcaatacctcnnacaagctcnnctatagnnctgcccnnttcttnnccccc

SEQ ID NO: 88699 - DNA, 438 bp, Zea mays
gatctgacgctcatcccacatcagtagtcgaccaagcacaagcagcagagccggccggaatatgtggacgatcaggaaggtggcgacgccgcaggtggccgtcctcctgctgctcctcatcgtcgttgcgcaggaggcggcgccgttggcggaggcgcgcgtgtgccggcgccggagcgcgggcttcaagggggtctgcatgtccgaccacaactgcgcgcaggtgtgcttgcaggagggctacggcggcggcaactgcgacggcatcatgcgccagtgcaagtgcatcagggagtgctagctagctaggctctaggatctagcaagctagctatatcggcctttaattaaattaataaggatcgacgtcgtggccggtcgctaaatatgtactactatacgtctacactacatgcaataatgcaccacatgtacgcg

SEQ ID NO: 88700 - DNA, 440 bp, Zea mays
gccgccggttcatctaccgccgccggtgcatctgccacctccggttcacctgccacctccggtgcatctcccaccgccggtccacctgccgccgccggtccacctgccaccgccggtccatgtgccgccgccggttcatctgccgccgccaccatgccactaccctactcaaccgccccggcctcagcctcatccccagccacacccatgcccgtgccaacagccgcatccaagcccgtgccagctgcagggaacctgcggcgttggcagcaccccgatcctgggccagtgcgtcgagttcctgaggcatcagtgcagcccgacggcgacgccctactgctcgcctcagtgccagtcgttgcggcagcagtgttgccagcagctcaggcaggtggagccgcagcaccggtaccaggcgatcttcggcttggtcctccagt

SEQ ID NO: 88701 - DNA, 432 bp, Zea mays
cagctcttcagccctataggctccatcaagcaatcgcagcaagcaacataccttgatcacccttgttgtttcaacaatcgccagccctatctttggtgcagtcattggtacaaaccatcagggcacagcagctgcagcaactcgtgctacctgtgatcaaccaagtagctctggcaaacctttctgcctactctcagcaacaacaatttcttccattcaaccaactgtctacactgaaccctgctgcttatttgcagcatcaactattaccattcagccagctagctactgcctactgtcagcaacaacaacttcctacatttaaccaattggccgcactgaaccccgctgcttatttgcagcatcacatactactaccatttagccagctagctgcagcaaaccgtgctttcttcttgacacagcatcagt

SEQ ID NO: 88702 - DNA, 435 bp, Zea mays
  unsure (1)..(435): unsure at all n locations
cccacgcgtccgagcagatcaaacaagtagcgacagctcgacaaagatttgtgagagtgatccggcgctgagaagagatggctaagatcgccgcagccgccgcggcggcggcggcgctgtgcttcgcggccctggtggccgtggccgtctgccaaggcgaggtcgagcggcagaggctcagggacctgcagtgctggcaggaggtccaggagagcccgctcgacgcgtgccgccaggtcctcgaccggcagctaaccggcggcggcgtcggcggcccgttccggtggggcaccgggctccggatgcggtgctgccagcagctccaggacgtgagccgcgagtgccgctgcgccgncatccggagcatggtcaggggctacgaggaggccatgccgnctctggagaaaggctggtggccatgggggcngcagcagc

SEQ ID NO: 88703 - DNA, 430 bp, Zea mays
  unsure (1)..(430): unsure at all n locations
gctgtgcaagcctataggctacaacaagctgggtgttcgaaggccattgaagtaactggtgggaggaactgtggaataatggaactaggagcacccagctgtgcaagcctataggctacaacaagcgattgcggcgagcgtcttacaacaaccaattgcccaattgcaacaacaatccttggcacatctaacaatacaaaccatcgcaacgcaacagcaacaacagttcctaccagcactgagccacctagccatggtgaaccctgtcgcctacttgcaacagcagctgcttgcatccaacccacttgctctagcaaacgtagttgcaaaccagcaacaacaacaactgcaacagtttctgccagcgcttagtcaactagccatggtgaaccctgccgnctacctacaacagcaacaactgctttcatct

SEQ ID NO: 88704 - DNA, 341 bp, Zea mays
cgcaaccctcttacaactgcaacagttgctgccctttgtccaacttgctttgacaaacccagcagccttctaccaacaacacatcattggcggtgccatcttttagattgcttattagttgtaattcaataatgaagttttttggctgatgtatgtggcctcctagaaataagaagttacatttccaaattctaatgtgctattggcctgcaagggtgttcgataattattttccctaagattgggaagcaagctataaatcatccttatagtgtgatacccgattcattgagaattataaaacacagacatcacgaggatggtataatcaaaaaaaaaca

SEQ ID NO: 88705 - DNA, 434 bp, Zea mays
  unsure (1)..(434): unsure at all n locations
cggaatctantatctccaaagaatcgcagtcacaacaacctacaacaacagttgcttccaacgaatcaatcaagtagttgcagcgaaccttgctgcttacctccagcaacaacaatttcttccattcaatcaactagctggggtgaaccctgctgcttacttgcaggcacaacagctactaccattcaaccaacttgtcaggagccctgctgccttcttactgcagcaacagttgcttccattccatctacaagttgtggcaaacattgctgctttcttgcaacaacaacaacaattgctgccattttacccacaggttgtgggaaacattaacgccttcttgcaacagcaacagttgctaccattctacccacaggatgtggcaaagaatgtcgccttcttacaacaacaacaattgctgccatttaaccaac

SEQ ID NO: 88706 - DNA, 557 bp, Zea mays
  unsure (1)..(557): unsure at all n locations
taccggttctcggaattcccgggtgcgactccacgcccgtccgctgctnngctgcttnnatttgcaaccaactatactacncnnattcagtcanngctagctnngctgcctacgcgcccnnagcaatttgcttccatttcannaccaactgnngcagcattgaacctctgctnnngcttatttacccaacagnncaacagcntnnaccaccannttcagccagcttanngctgatgtganngccctgttgcnncttcttgacaccannacaacagnnttgttgggccgttctaaacctgcannngctgcgcnnctaacgcnntggcaccctttcttaccaactnggcaacaattggctgcnncattcannaccaacttgggctttgacccaaacccannacagcgttctaaccanacaacnnccatcannttggtggtgggccctctnnttagaattgggcttatgagttattacccttcaataatggannagttttttgggatgaaatgtttggtggctttttcccagannnataagaaaaggtacaaaatttcta

SEQ ID NO: 88707 - DNA, 294 bp, Zea mays
tccaacaatcatcagccctattacattagttacctttggtgcatttattggcacaaaacatcagggcacaacaactacaacaacttgtgctagcaaaccttgctgcctactctcagcaacaacaattgctgccattcaaccaacttgctttgacaaacccaacagcgttctaccaacaacccatcattggtggtgccctcttttagattgcttatgagttatacttcaataatgaagttttttggatgatgtttgtggcttcccagaaataagaaagtacatttctagattctt

SEQ ID NO: 88708 - DNA, 437 bp, Zea mays
acggcgaccattttcccgcaatgctcacaagctcctatagcttcccttcttcccccgtacctctcaccagcggtgtcttcggtatgtgaaaacccaattcttcaaccctacaggatccaacaggcaatcgcagctggcatcttacctttatcacccttgttcctccaacaatcatcagccctattacagcagttacctttggtgcatttattggcacaaaacatcagggcacaacaactacaacaacttgtgctagcaaaccttgctgcctactctcagcaacagcagtttcttccattcaaccaactagctgcattgaactctgcttcttatttgcaacaacaacaactaccattcagccagctacctgttgcctacccccaacaatttcttccattcaaccaactggcagcattgaactctcctgcttatttaca

SEQ ID NO: 88709 - DNA, 435 bp, Zea mays
cagcattcaaaaacacaccaagcgaagcgcactagcaacgacctaacaccaatggctaccaagatattagccctccttgcgcttcttgcccttttagtgagcgcaacaaatgcgttcattattccacagtgctcacttgctcctagtgccattattccacagttcctcccaccagttacttcaatgggcttcgaacatccagccgtgcaagcctacaggctacaactagcgcttgcggcgagcgccttacaacaaccaattgcccaattgcaacaacaatccttggcacatctaaccctacaaaccattgcaacgcaacaacaacaacaacaacagtttctgccatcactgagccacctagccgtggtgaaccctgtcacctacttgcaacagcagctgcttgcatccaacccacttgctctggcgaacgtagct

SEQ ID NO: 88710 - DNA, 426 bp, Zea mays
caactagcaacatagaaagcacaatagtgtaccaacaatggcagccaaaatattgtgcctccttatgctccttggtctttctgcaagtgctgctacggcgaccattttcccgcaatgctcgcaagctcctatagcttcccttcttccaccgtacctctcaccagcggtgtcttcggtatgtgaaaacccaattcttcaaccctacaggatccaacaggcaatcacagctggcatcttacctttatcacccttgttcctacaacaatcatcagccctattacatcagttacctttggtgcatttatcggcacaaaacatcagggcacaacaactacaacaacttgtgctaacaaaccttgctgcctactcttagcaacagcagtttcttccattcaaccaactagctgcattgaactctgcttctta

SEQ ID NO: 88711 - DNA, 430 bp, Zea mays
aactagcaacatagaaagcacaatagtgtaccaacaatggcagccaaaatattttgcctccttatgctccttggtctttctgcaagtgctgctacggcgaccattttcccgcaatgctcgcaagctcctatagcttcccttcttcccccgtacctctcaccagcggtgtcttcggtatgtgaaaacccaattcttcaaccctacaggatccaacaggcaatcacagctggcatcttacctttatcacccttgttcctccaacaatcatcagccctattacatcagttacctttggtgcatttattggcacaaaacatcagggcacaacaactacaacaacttgtgctagcaaaccttgctgcctactctcagcaacagcagtttcttccattcaaccaactagctgcattgaactctgcttcttatttgc

SEQ ID NO: 88712 - DNA, 429 bp, Zea mays
  unsure (1)..(429): unsure at all n locations
gtcgtggtggtgatatttggctttgttgctgcacttgtgacctggaacatctgctggggaacaagaggtgtgattgattttatcggtcgctattctgatgtagaccttagaactgcaaaagatggagagtatgttaaggttactggggttgttacttgtggaaatttgccccttgagtcctcattccaacgggtgccacgatgtgtgtacacttcaacttgcttgtacgagtacaggggttgggactcgaaagccgcaaacgccacacaccgacggtttacttggggtctcaggtcaatggaacggcacgcggtggacttctacatctccgatttccagtccgggctgcgagcactggtcagggcaggatccggcgcgcgcgtgaccccatacgtggacgagtccgtcgctatcgacgtanacccagac

SEQ ID NO: 88713 - DNA, 437 bp, Zea mays
aagcaacatagaaagtggaatccagtagcaacaacagagcaacaatggcgaccaagatattttccctccttatgctccttgctctttctgcatgtgttgctaacgcgacaattttccctcaatgctcacaagctcctatagcttcccttcttcccccataccttccatcaatgatagcttcagtatgtgaaaacccagctcttcagccctataggctccaacaagcaatcgcagcaagcaacatacctttatcacccttgttgtttcaacaatcgccagccctatctttggtgcagtcattggtacaaaccatcagggcacagcagctgcagcaactcgtgctacctgtgatcaaccaagtagctctggcaaacctttctccctactctcagcaacaacaatttcttccattcaaccaactgtctacactgaaccct

SEQ ID NO: 88714 - DNA, 442 bp, Zea mays
attgagaccaactagcaacatagaaagcacaatagtgtaccaacaatggcagccaaaatattttgcttccttatgctccttggtctttctgcaagtgttgctaccgcaaccattttcccacaatgctcacaagctcctatagcttcccttcttcccccatacctctcaccagcggtgtcttcaatgtgtgaaaccccaattgttcaaccctacaggatccaacaggcaatcgcaacaggcatcttaccattatcacccttgttcctccaacaaccgtcagccctattacagcagttacctttggtccatttggtggcacaaaacatcagggcacaacaactacaacaacttgtgctagcaaaccttgctgcatactctcagcaacatcagtttcttccattcaaccaactggctgcattgaactctgctgcttatttgcaac

SEQ ID NO: 88715 - DNA, 438 bp, Zea mays
  unsure (1)..(438): unsure at all n locations
caacatagaaagcacaatagtgtaccaacaatggcagccaaaatattttgcctccgtatgctccttggtctttctgcaagtgctgctacggcgaccattttcccgcaatgctcgcaagctcctatagcttcccttcttcccccgtacctctcaccagcggtgtcttcggtatgtgaaaacccaattcttcaaccctacaggatccaacaggcaatcgcagctggcatcttacctttatcacccttgttcctccaacaatcatcagccctattacaacagttacctttggtgcatttattggcacanaacatcagggcacaacaactacaacaacttgtgctagcaaaccttgctgcctactctcagcaacagcagtttcttccattcaaccaactaggttcattgaactctgcttcttatttgcaacaacaacaacta

SEQ ID NO: 88716 - DNA, 440 bp, Zea mays
cccacgcgtccgcaacaagcaacatataaagtggaatacagtagcaacaatagagcaacaatggcggccaagatattttccatccttatgctccttgctctttctgcatgtgttgctaacgcgaccatttttcctcaatactcacaagctcctatagctgcccttcttcccccataccttccatcaatgaccgcttcagtttgtgaaaacccagcccttcaaccctacaggctccaacaagcaatcgcaacaagcaacttacctttatcacccctgttctttcaacaatcgccagccctatctttggtgcagtcattggtacaaaccatcagggcacaacagctgcaacaactcgtgctaccagtgatcagccaagtagctctggcaaacctttctccctactctcagcaacaacaatttcttccattcaaccaactgtc

SEQ ID NO: 88717 - DNA, 434 bp, Zea mays
gaccaactagcaacatagaaagcacaatagtgtaccaacaatggcagccaaaatgttttgcctccttatgctccttggtctttctgcaagtgctgctacggcgaccattttcccacaatgctcacaagctcctatagcttcccttcttcccccgtacctctcaccagcggtgtcttcggtatgtgaaaacccaattcttcaaccctataggatccaacaggcaatcgcagctggcatcttacctttatcacccttgttcctccaacaatcatcagccctattacagcagttacctttggtgcatttattggcacaaaacatcagggcacaacaactacaacaacttgtgctagcaaaccttgctgcctactctcagcaacaacagtttcttccattcaaccaactagctgcattgaactctgcttcttatttgc

SEQ ID NO: 88718 - DNA, 428 bp, Zea mays
caaccatataggcttcaacaagcaatcgcagcaagcaacatacctttatcgcccgtgttgtttcaacaatcgccagccctatctttggtgcagtcattggtacaaaccatcagggcacaacagctgcagcaactcgtgctacctctgatcaaccaagtagctctggcaaacctttctccctactctcagcaacaacaatttcttccattcaaccaactgtctacactgaaccctgctgcttatttgcagcaacaactattaccatttagccagctagctactgcctactctcagcaacaacaacttcttccatttaaccaattggccgcactgaaccccgctgcttatttgcagcagcaaatactactaccatttagccagctagctgcagcaaaccgtgcttccttcttgacacagcaacagttgct

SEQ ID NO: 88719 - DNA, 507 bp, Zea mays
gagttgaggggttagtatgattagcatttatgcatactcgtaccggtccggaattcccgggtcgactcacgcgtccgcattcatcagggttatatttggttgtcaaaaagtactgtacttaattcacatctttcacatttttcactagcaatagcagccccaaattgctttcctgactaggaacatattctttacaggtataagcatgccaactctaaactatatgaatccttttatattctcatttttaagtacttctctgtttctgctacttttgtactgtatattttcagcttctccatcagactgatgaccccatattcagtgtgctgcaagtgatttgacatatgtggcttatccttcaggtatgtctcatgttgtgacttcattgctgattgcttttgtaatggtactgttgagttcatttctggttacaatcagcctttactgctttatattgttctactaattttggcttgcacagccaggatgattggttttctgcat

SEQ ID NO: 88720 - DNA, 432 bp, Zea mays
aaaagaatctcctgtgatgcatataacagatttaacaactgtatctgcaaagaaggccaaagatttccttcccttcttgcagaggaacagaaggcattctgccgttgttgaatatgtttttagtggccatcggttcaaactaacaattcctaaggagacttgcagtattgccttctcattatctggtgttcggtgtcctggtaaaggcgagccatactcagatgaagctattgctttgatgaagagaaagatactacagcgtgatgtggagatagaagttgaagcagttgacagaacaagaacattcataggttcgttgtgggagtccaagaccaacatgggctctgtacttctggaagctgggctggcgaagctgagttcttttggcttggataggatgtcagatgctcatgtcctaacaagagctgaaca

SEQ ID NO: 88721 - DNA, 432 bp, Zea mays
attgagaccaactagcaacatagatagcacaatagtgtaccaacaatggcagccggaatattttgcctccttatgctccttggtctttctgcaagtgctgctacggcgaccattttcccgcaatgctcgcaagctcctatagcttcccttcttcccccgtacctctcaccagcggtgtcttcggtatgtgaaaacccaattcttcaaccctacaggatccaacaggcaatcacagctggcatcttacctttatcacccttgttcctccaacaatcatcagccctattacatcagttacctttggtgcatttattggcacaaaacatcagggcacaacaactacaacaacttgtgctagcaaaccttgctgcctactctcagcaacagcagtttcttccattcaaccaactagctgcattgaactctgcttct

SEQ ID NO: 88722 - DNA, 282 bp, Zea mays
gcagcattgaactctcctgcttatttacagcagcaacaactactaccattcagccagctagctggtgtgagccctgctaccttcttgacacaaccacagttgttgccgttctaccagcacgttgcgcctaacgctggcaccctcttacaactgcaacaattgctgccattcaaccaacttgctttgacaaacccagcagtgttctaccaacaacccatcattggtggtgccctcttttagatttcttatgagttatagttcaataataaagttttttatctg

SEQ ID NO: 88723 - DNA, 442 bp, Zea mays
  unsure (1)..(442): unsure at all n locations
attgagaccaactagcaacatagaaagcacaatattgtaccaataatggcagccaggatattttgcctcattatgctccttggtctttctgcaagtgctgctacggcgagcattttcccgcaatgctcacaagctcctatagcttcccttcttcccccatacctctcaccagcgatgtcttcagtatgtgaaaatccaattcttctaccctacaggatccaacaggcaatcgcagcaggcatcttacctttatcacccttgttcctccaacaatcatcagccctattacagcagttacctttggtgcatttattggcacaaaacatcagggcacaacaactacaacaactcgtgctagcaaaccttgctgcctactctcagcaacagcagttacctttggtgcatttgttggcacanaacatcagggcacaacaactacaac

SEQ ID NO: 88724 - DNA, 440 bp, Zea mays
  unsure (1)..(440): unsure at all n locations
gaccaactagcaacatagaaagcacaatagtgtaccaacaatggcagctaaaatgtgttgcctccttatgctccttggtctttctgcaagtgctgctacggcgaccattttcccacaatgctcacaagctcctatagcttcccttcttcccccgtacctctcaccaacggtgtcttcggtatgtgaaaacccaattcttcaaccctacaggatccaacaggcaatcgcagctggcatcttacctttatcacccttgttcctccaacaatcatcagccctattacagcagttacctttggtgcatntattggcacaaaacatcaaggcacaacaactacaacaacttgtgctagcaaaccttgctgcctactctcagcaacagcagtttcttccattcaaccaactagctgcattgaactctgcttcttatttgcaacaac

SEQ ID NO: 88725 - DNA, 365 bp, Zea mays
cagagcgcagaagaacccgatcgacaccatgagggtgttgctcgttgccctcgctctcctggctctcgctgcgagcgccacctccacgcatacaagcggcggctgcggctgccagccaccgccgccggttcatctaccgccgccggtgcatctgccacctccggttcacctgccacctccggtgcatctcccaccgccggtccacctgccgccgccggtccacctgccaccgccggtccatgtgccgccgccggttcatctgccgccgccaccatgccactaccctactcaaccgccccggcctcagcctcatccccagccacacccatgcccgtgccaacagccgcatccaagcccgtgccagc

SEQ ID NO: 88726 - DNA, 427 bp, Zea mays
gaaagtggaatccagtagcaacaatagagcaacaatggcgaccaagatattttccctccttatgctccttgctctttctacatgtgttgctaacgcgacaattttccctcaatgctcacaagctcctatagcttcccttcttcccccataccttccatcaattatagcttcaatatgtgaaaacccagctcttcaaccatataagcttcaacaagcaatcgcagcaagcaacatacctttatcgcccttgttgtttcaacaatcgccagccctatctttggtgcagtcattggtacaaaccatcaaggcacaacagctgcagcaactcgtgctacctctgatcaaccaagtagctctggcaaacctttctccctactctcagcaacaacaatttcttccattcaaccaactgtctacactgaaccct

SEQ ID NO: 88727 - DNA, 428 bp, Zea mays
atctaaccctacaaaccattgcaacgcaacaacaacaacaacaacagtttctgccatcactgagccacctagccgtggtgaaccctgtcacctacttgcaacagcagctgcttgcatccaacccacttgctctggcgaacgtagctgcataccagcaacaacaacagctgcaacagtttatgccagtgctcagtcaactagccatggtgaaccctgccgtctacctacaactactttcatctagcccgctcgcggtgggcaatgcacctacgtacctacaacaacagttgctgcaacaaattgtaccagctctgactcagctagctgtggcaaaccctgctgtctacttacaacagttgcttccattcaaccaactggctgtgtcaaactctgctgcgtacctacaacagcgacaacagttacttaat

SEQ ID NO: 88728 - DNA, 435 bp, Zea mays
ctttatctactccagagcgcagaagaacccgatcgacaccatgagggtgttgctcgttgccctcgctctcctggctctcgctgcgagcgccacctccacgcatacaagcggcggctgcggctgccagccaccgccgccggttcatctaccgccgccggtgcatctgccacctccggttcacctgccacctccggtgcatctcccaccgccggtccacctgccgccgccggtccacctgccaccgccggtccatgtgccgccgccggttcatctgccgccgccaccatgccactaccctactcaaccgccccggcctcagcctcatccccagccacacccatgcccgtgccaacagccgcatccaagcccgtgccagctgcagggaacctgcggcgttggcagcaccccgatcctgggccagtgcgtcgagttcct

SEQ ID NO: 88729 - DNA, 396 bp, Zea mays
  unsure (1)..(396): unsure at all n locations
cgcaaattgcaccaagaaatccatcgagaggccgtcgacaggggaattaatggcgtcgtcgtctagcagcagccaccgccgcctcatcctcgcagccgccgtcctgctctccgtgctcgcggctgccagcgccagcgccgggacctcctgcgtgccggggtgggccatcccgcacaacccgctcccgagctgccgctggtacgtgaccagccggacctgcggcatcgggccgcgcctcccgtggccggagctgaagaggagatgctgccgggagctggcggacatcccggcgtactgccggtgcacggcgctgagcatcctcatggacggcgcgatcccgccgggcccggacgcgcagctggagggccgnctagaggacctgccgggctgcccgcg

SEQ ID NO: 88730 - DNA, 379 bp, Zea mays
gaactctcctgcttatttacagcagcaacaactactaccattcagccagctagctggtgtgagccctgctaccttcttgacacaaccacagttgttgccgttctaccagcacgctgcgcctaacgctggcaccctcttacaactgcaacaattgctgccattcaaccaacttgctttgacaaacctagcagtgttctaccaacaacccatcattggtggtgccctcttttagatttcttatgagttatagttcaataataaagttttttgtctgaaaaaaaagccataccctactaaaccgacccggactaaaactcatacacagacacacccatgcttatgccaacaaaaaaactccaacaaaaaaaaaagggggggc

SEQ ID NO: 88731 - DNA, 435 bp, Zea mays
caacaagcaacatagaaagtggaatacagtagcaaaaatagagcaacaatggcggccaagatattttccatccttatgctccttgctctttctgcatgtgttgctaacgcgaccatttttcctcaatactcacaagctcctatagctgcccttcttcccccataccttccatcaatgaccgctttagtatgtgaaaacccagcccttcaaccctacaggatccagcaagcaatcgcaacaagcaacttacctttatcacacctgttctttcaacaatcgccagccctatctttggtgcagtcattggtacaaaccatcagggcagaacagttgcagcaactcgtgctaccagtgatcagccaagtagctctggcaaacctttccccctactctcagcaacaacaatttcttccattcaaccaactgtctatactg

SEQ ID NO: 88732 - DNA, 439 bp, Zea mays
attttgagcattcagaaacacaccaagcgaagcacattagcaacaacctaacaacagtggctaccaagatattatccctccttgcgcttcttgcgctttttgcgagcgcaacaaatgcgttcattattccacaatgctcacttgctccaagttccattattacacagttcctcccaccagttacttcaatgggcttcgaacacccagctgtgcaagcctataggctacaacaagcaattgcggcgagcgtcttacaacaaccaatttcccagttgcaacaacaatccttggcacatctaacaatacaaaccatcgcaacgcaccagcaccaccaattcctacaagcactgagccacctagccatggtgaaccctgccgcctacttgcaacagcagttgcttgcatcaaacccacttgctctggcaaacgtagttgcaaa

SEQ ID NO: 88733 - DNA, 475 bp, Zea mays
gtaccggtccggaattcccgggtgagaccaactagcaacatagaaagcacaatattgtaccaataatggcagccaaaatattttgcctcattatgctccttggtctttctgcaagtgctgctacggcgagcattttcccgcaatgctcacaagctcctatagcttcccttcttcccccatacctctcaccagcgatgtcttcagtatgtgaaaatccaattcttctaccctacaggatccaacaggcaatcgcagcaggcatcttacctttatcacccttgttcctccaacaatcatcagccctattacagcagttacctttggtgcatttattggcacaaaacatcagggcacaacaactacaacaactcgtgctagcaaaccttgctgcctactctcagcaacagcagttacctttggtgcatttgttggcacaaaacatcagggcacaacaactacaacaactcgtgctagc

SEQ ID NO: 88734 - DNA, 442 bp, Zea mays
  unsure (1)..(442): unsure at all n locations
gcctcagcaatatcagcagggccaggaaaaatcacaacagcaacaatgtcattgccaggagcagcaacagactacaaggtgcagctataactactatagcagtagctcaaatctaaaaaattgtcatgaattcctaaggcagcagtgcagccctttggtaatgccttttctccaatcacgtttgatacaaccaagtagctgccaggtattgcagcaacaatgttgtcatgatcttaggcagattgagccacaatacattcaccaagcaatctacaacatggttcaatccataatccaggaggagcaacaacaacaaccatgtgagttatgtggatctcaacaagctactcanagtgcggtggcaatcttgacagcagcacaatacctaccatcaatgtgcggcttgtaccactcatactaccaaaataatccatgcagcagc

SEQ ID NO: 88735 - DNA, 435 bp, Zea mays
caactagcaacatagaaagcacaatagtgtaccaacaatggcagccaaaatattttgcctgcttatgctccttggtctttctgcaagtgctgctacggcgaccattttcccgcaatgctcgcaagctcctatagcttcccttcttcccccgtacctctcaccagcggtgtcttcggtatgtgaaaacccaattcttcaaccctacaggatccaacaagcaatcgcagctggcatcttacctttatcacccttgttcctacaacaatcatcagccctattacaacagttacctttggtgcatttattggcacaaaacatcagggcacaacaactacaacaacttgtgctagcaaaccttgctgcctactctcagcaacagcagtttcttccattcaaccaactaagttcattgaactctgcttcttatttgcaaca

SEQ ID NO: 88736 - DNA, 435 bp, Zea mays
caactagcaacatagaaagcacaatagtgtaccaacaatggcagccaaaatatggtgcctgcttatgctccttggtctttctgcaagtgctgctacggcgaccattttcccacaatgctcacaagctcctatagcttcccttcttcccccgtacctctcaccagcggtgtcttcggtatgtgaaaacccaattcttcaaccctataggatccaacaggcaatcgcagctggcatcttacctttatcacccttgttcctccaacaatcatcagccctattacagcagttacctttggtgcatttattggcacaaaacatcagggcacaacaactacaacaacttgtgctagcaaaccttgctgcctactctcagcaacaacagtttcttccattcaaccaactagctgcattgaactctgcttcttatttgcaaca

SEQ ID NO: 88737 - DNA, 440 bp, Zea mays
acgcgttcggcaacatagaaagcacaattcattttcaacaatggcgcaacaatggcgagcacgaggttatccctccttatgctccttgctctttctacatgtcttgctaacgcgacaattgtccctcaatgctcacaagctcctatagcttcccttatttctccataccttccatcaattatagcttcagcatgtgaaaacccagctcttcaaccatatatgcttcaacaagcaatcgcagcaagcaacatacctttatcgcccttgttgttttaacaatcaccaaccctatctttggtgcagtcattggtacaaaccatcaaggcacaacaactgctgcaactcgtgctacctgtgatcaaccaagtaactctggcaaacctttctccctactcttaacaacaacaatttctttcattcaaccaactgtctacactgaa

SEQ ID NO: 88738 - DNA, 337 bp, Zea mays
cagaaacacaccaagcgaagcgcactagcaacaacctaacaacaatggctaccaagatatgatccctccttgcgcttcttgcgctttttgcgagcgcaacaaatgcgtccattattccacaatgctcacttgctcctagttccattattccacagttcctcccaccagttacttcaatggccttcgaacacccagctgtgcaagcctataggctacaacaagcgattgcggcgagcgtcttacaacaaccaattgcccaattgcaacaacaatccttggcacatctaacaatacaaaccatcgcaacgcaacagcaacaacagttcctaccagcact

SEQ ID NO: 88739 - DNA, 430 bp, Zea mays
ccggatttaacttcaaacatggcggacgtcgatgtcgagccggaggtcgccgccggtgctcccaagaagaggacgttccgcaagtacagctaccgcggcgtcgacctcgatgcgctgcttgacatgtccaccgacgacctcgttcagctcttcccagcgcgcgccaggagaaggttccagaggggtttgaagaggaagcccatggcgctcatcaagaagctgcgcaaggcgaaaaaggatgctcctgtcggcgagaagccagagccagtgaagacccatctccgcaacatgatcattgtccccgagatgattggcagcattgttggtgtctacaatggcaagaccttcaaccaggttgagatcaagcctgagatgattggccactatcttgcagagttctccatttcctacaagccggtcaagcacggta

SEQ ID NO: 88740 - DNA, 111 bp, Zea mays
aagacgacacacattatcatgtgtggtatgaccaataatatatgcatggtcatgataaagttttggttttaatgaatctatcggccgcttgatgtctatgatggacaaatc

SEQ ID NO: 88741 - DNA, 429 bp, Zea mays
gcaacatagaaagtagaatccattatcaacaatagagcaacaatggcgaccaagatattttccctccttatgctccttgctctttctacatgtgttgctaacgcgacaattttccctcaatgctcacaagctcctatagcttcccttcttcccccataccttccatcaattatagcttcagtatgtgaaaacccagctcttcaaccatataggcttcaacaagcaatcgcagcaagcaacatacctttatcgcccttgttgtttcaacaatcaccagccctatctttggtgcagtcattggtacaaaccatcagggcacaacagctgcagcaactcgtgctacctgtgatcaaccaagtagctctggcaaacctttctccctactctcagcaacaacaatttcttccattcaaccaactgtctacactg

SEQ ID NO: 88742 - DNA, 438 bp, Zea mays
gtgcgatttcgatctcgcagccaccttttttttgttctgttgtgtatctagtagtgggaggagatatgcagtttgcacttgcattggacacgaactcaggtcctcaccagataagatcttgtgagggtgatgggattgacaggttggaaaaattaagtattgggggcagaaagcaggagaaagctttgagaaataggtgctttggtggtagagttgctgcaactacacaatgtattcttacctcagatgcttgtcctgaaactcttcattctcaaacacagtcctctaggaaaaattatgctgatgcaaaccgtgtatctgctatcattttgggcggaggcactggatctcagctctttcctctgacaagcacaagagctacgcctgctgtacctgttggaggatgttacaggcttattgatatccctatgagtaact

SEQ ID NO: 88743 - DNA, 439 bp, Zea mays
tcagcattcaaaaacacaccaagcgaagcgcactagcaacgacctaacaccaatggctaccaagatattagccctccttgcgcttcttgcccttttagtgagcgcaacaaatgcgttcattattccacagtgctcacttgctcctagtgccagtattccacagttcctcccaccagttacttcaatgggcttcgaacatccagccgtgcaagcctacaggctacaactagcgcttgcggcgagcgccttacaacaaccaattgcccaattgcaacaacaatccttggcacatctaaccctacaaaccattgcaacgcaacaacaacaacaacagtttctgccatcactgagccacctagccgtggtgaaccctgtcacctacttgcaacagcagctgcttgcatccaacccacttgctctggcgaacgtagctgcatac

SEQ ID NO: 88744 - DNA, 443 bp, Zea mays
cccacgcgtccgcaactaccaacatacatagtgaagtacactagcaacatcttagcaccaatggcagccaagatttttgcgctccttgccctccttgctctttcagcaagtgttgctaccgcgactattattccacaatgctcacaacaatacctctctccagtgatagccgcgagatttgaatacccatctatacaatcctacaggctacaagaggccatcacagcaagcatcttacggtcgttagcattgaccgtccaacaaccatatgccctattgcaacaaccatccttagtgaatctgtatctccaaagaatcacagcacaacaactacaacaacggttgcttccaacaattaatcaagtagttgcagcgaaccttgctgcttaccttcagcaacaacaatttcttccattcaatcaactagctggggtgaaccctgc

SEQ ID NO: 88745 - DNA, 429 bp, Zea mays
gccctcttttagatttattattgaactataactcataagaaatctaaaagagggcaccaccaatgatgggttatagttcaataataaagttttttgtctgatgtttgtggcttcccagaaataagaaagtacatttctagattcttaaaaaaaaaaaaaaaaaaaaaaaaaaaaaaaaaaaaaaaaaaaccaaaaaaaattaaaaaaaaaaaaaaaaaaaaaaaaaaaaattaaaaaaaaaaaaaccaaaaaaaaaaaaaaaaaggggcgcccgttttaaaggacccaagtttacttccccttgcttgcaacgtaatagcttttttatggggccccctaatttaatttcattggccgtcgtttaacaacgtcggaactggaaaacccttggggttcccaaattaaatcgctttgaagaaaatccccttt

SEQ ID NO: 88746 - DNA, 410 bp, Zea mays
gcaagtcgtgcttccttcttgacacagcaacagttgctgcctttctacaagcagtttgcggctaaccccgcaaccctcttacaactacaacaattgttgccctttgtccaacttgctttgacaaacccagcagccttctaccaacaacacatcattggtggtgccctcttttagattgattattagttgtaattcaataataaagtttttcggatgatgtatgtggccaaccagaaataagaagttacatttccagattctaaaagaatcaacaatcaccagacctatctttggtgcagacattggtacaaaacaataagggaacatcagctgcagcaactcgtgctacctgtgatcaaccaagtagctctggcaaacctttctgcctactcttagcaacaacaatttct

SEQ ID NO: 88747 - DNA, 315 bp, Zea mays
cggaatacccgggctgccagtctcgcatcccgtccccgtccgcgccggccgactctcgccttttcgtccccgcgtcagcgtcgcggctccggtgagcgtgcgcgtcaccggcggcaggcgagggcaggcggtggtggcgatggcgtccgctgatgcgcgcttggcggtgatcgtctcctccatcctggtcatgcccgactttcccaagccagtgatcatgtttcaggacatcacgacgttgctgttcgatcccaaggcgtaccgtgacaacatctgaccttttgtcaagcggtacatggaccaagggatcaccgt

SEQ ID NO: 88748 - DNA, 441 bp, Zea mays
aacacaccaagcgaagcgcactagcaacgacctaacaccaatggctaccaagatattagccctccttgcgcttcttgcccttttagtgagcgcaacaaatgcgttcattattccacagtgctcacttgctcctagtgccattattccacagttcctcccaccagttacttcaatgggcttcgaacatccagccgtgcaagcctacaggctacaactagcgcttgcggcgagcgccttacaacaaccaattgcccaattgcaacaacaatccttggcacatctaaccctacaaaccattgcaacgcaacaacaacaacaacaacagtttctgccatcactgagccacctagccgtggtgaaccctgtcacctacttgcaacagcagctgcttgcatccaacccacttgctctggcgaacgtagctgcttaccagcaacaaca

SEQ ID NO: 88749 - DNA, 385 bp, Zea mays
cggacgcgtggggcaatttcttccattcaaccaactggcagcattgaactctgctgcttatttacaacagcaacagctaccaccattcagccagctagctgatgtgagccctgttgccttcttgacacaacaacagttgttgccgttctacctgcacgctgcgcctaacgctggcaccctcttacaactgcaacaattgctgccattcaaccaacttgctttgacaaacccaacagcgttctaccaacaacccatcattgggggtgcccttttttagattgcttatgagttatacttcaataatgaagtcttttggatgatgtctgtggcttcccagaaataagaaagtacatttctagattcttaaaacacaaatggccttaac

SEQ ID NO: 88750 - DNA, 431 bp, Zea mays
cgcagcaccaccaccaacaacaacatcaacagcaccaacaacaacatcaatgtgaaggccaacaacaacatcaccaacaatcacaaggccatgtgcaacaacacgaacagagccatgagcaacaccaaggacagagccatgagcaacaacatcaacaacaattccagggtcatgacaagcagcaacaaccacaacagcctcagcaatatcagcagggccaggaaaaatcacaacagcaacaatgtcattgccaggagcagcaacagactacaaggtgcagctataactactatagcagtagctcaaatctaaaaaattgtcatgaattcctaaggcagcagtgcagccctttggtaatgccttttctccaatcacgtttgatacaaccaagtagctgccatgtattgcagcaacaatgttgtcatgatctt

SEQ ID NO: 88751 - DNA, 459 bp, Zea mays
gtaccggtccggaattcccggggtgtaccaacaatggcagccaaaatattttgcttccttatgctccttggtctttctgcaagtgttgctaccgcaaccattttcccacaatgctcacaagctcctatagcttcccttcttcccccatacctctcaccagcggtgtcttcaatgtgtgaaaccccaattgttcaaccctacaggatccaacaggcaatcgcaacaggcatcttaccattatcacccttgttcctccaacaaccgtcagccctattacagcagttacctttggtccatttggtggcacaaaacatcagggcacaacaactacaacaacttgtgctagcaaaccttgctgcatactctcagcaacatcagtttcttccattcaaccaactggctgcattgaactctgctgcttatttgcaacaacaattaccattcagccagctagttgct

SEQ ID NO: 88752 - DNA, 449 bp, Zea mays
catcgcggagggtacaataatgtaccaacaatggcagccaaaatattttgcttccttatgctgcttggtctttctgcaagtgctgctaccgcaaccattttcccacaatgctcacaagctcctatagcttcctttcttcccccatacctctcaccagcggtgtcttcagtatgtgaaaacccaattcttcaaccctacaggatccaacaggcaatcgcagcaggcatcttacctttatcacccttgttcctccaacaaccgtcagccctattacagcagttacctttggtgcatttgttggcacaaaacatcaaggcacaacaactacaacaacttgtgctaggaaaccttgctgcctactctcagcaacagcagtttcttccattcaaccaactggctgcattgaactctgctgcttatttgcaacaacaactaccattcagtcagct

SEQ ID NO: 88753 - DNA, 470 bp, Zea mays
  unsure (1)..(470): unsure at all n locations
taccggttcggaattcccggcaaagcacaatagtgtaccaacaatggcagccaaaatattttgctctccttatgctccttggtctttctgcaagtgctgctacggcgaccattttcccgcaatgctcgcaagctcctatagcttcccttcttcccccgtacctctcaccagcggtgtcttcggtatgtgaaaacccaattcttcaaccctacaggatccaacaggcaatcacagctggcatcttacctttatcacccttgttcctccaacaatcatcagccctattacatcagttacctttggtgcatttattggcacanaacatcagggcacaacaactacaacaacttgtgctagcaaaccttgctgcctactctcagcaacagcaagttctttcattcaaccaactagctgcattgaactctgcttcttatttgcaacaacaacaactaccattcagccagctacct

SEQ ID NO: 88754 - DNA, 440 bp, Zea mays
cggaattcccggctgagcattcaaaaacacacaaagggaagtgcactagcaactttctaacaacaatggctaccaagatattagccctccttgcgctcctttccctttcagtgagcgcaacaactgcattcattattccacaatgctcacttgctcctaatgccattattccacagttcctcccatcagttacatcaatgggcatcgaacaccctattgtgcaagcctataggctacaacaagcgcttgcggcgagcgtcttacaacaaccgtttgcccaattacaacaacaatccttggcacatctaaccatacaaaccatcgcaacacaactagagcaacagtttgtgcccgcattgagccaactagccgcggtgaaccctgtctcctacttgcaacagcaactgcttgcatccaacccacttgctctggcgaacaca

SEQ ID NO: 88755 - DNA, 425 bp, Zea mays
caactagctgcattgaactctgcttcttatttgcaacaacaacaactaccattcagccagctacctgctgcctacccccagcaatttcttccattcaaccaactggcagcattgaactctcctgcttatttacagcagcaacaactactaccattcagccagctagctggtgtgagccctgctaccttcttgatacaaccacagttgttgccgttctaccagcacgctgcgcctaacgctggcaccctcttacaactgcaacaattgctgccattcaaccaacttgctttgacaaacccagcagcgttctaccaacaacccatcattggtggtgccctcttttagatttcttatgagttatagttcaataataaagttttttgtctgatgtttggggcttcccagaaataagaaagtacatttct

SEQ ID NO: 88756 - DNA, 399 bp, Zea mays
gagcattcagaaacacacctagcgaagcgcactagcaacgacctaacaacaatggctaccaagatattatccctctttgcgcttcttgccctttttgtgagcgcaacaaatgcgttcattattccacaatgctcacttgctcctagtgccattattccacagttcctccctccagttacttcaatgggcttcgaacacccagctgtgcaagcctacaggctacaacaagcgcttgcggcgagcgtcttacaacaaccaattgcccaattacaacaacaatccttggcacatctaaccatacaaaccatcgcaacgcaacagcaacaacaatttctaccagcactgagccaactagctgtggtgaaccctgtcgcctacttgcaacagcagttgcttgca

SEQ ID NO: 88757 - DNA, 332 bp, Zea mays
cggtcgcgtgggcaacaactacaattgctgacattctacccacaggctgcgggaaacattaacgccttcttgcaacagcaacagttgctaccattctacccacaggatgtggcaaacaatgttgccttcttacaacaacaacaattgctgccatttaaccaacttgctttgacgaatactaccaccttattgcagcagcccaccattggtggcgccatcttctagattgtgctatgctgtatactgtaatcataaagatctgatactgatatgtgcaacttctcagtaattaaagatttgagatctaatatatcagttcaaaaacaacaaat

SEQ ID NO: 88758 - DNA, 412 bp, Zea mays
gaatttctaattcttgctggcgatcacctgtaccggatggactatgaaaagttcattcaggcacacagagaaacaaatgctgatattaccgttgctgccctaccgatggatgagaaacgtgcaactgcatttggcctcatgaaaattgatgaagaagggaggatcattgagtttgctgagaaaccgaaaggagagcagttgaaagcaatgatggttgacaccaccatacttggccttgatgacgtgagggcaaaggaaatgccttatattgctagcatgggtatctatgttttcagcaaagatgtaatgcttcagctcctccgtgaacaatttcctgaagccaatgactttggaagtgaagttattccaggtgcaaccagcattggaaagagggttcaggcttatctgtatg

SEQ ID NO: 88759 - DNA, 389 bp, Zea mays
gaattcccagctagacgtacgagttcgagcattcagaaacacaccaagcgaaatgcactagcaacaacctatcaacaatggctgccaagatattatccctccttgcgcttcttgcgctttttgcgagcgcaacaaatgcgtccattattccacaatgctcacttgctcctagttccattattccacagttcctcccaccagttacttcaatggccttcgaacacccagctgtgcaagcctataggctacaacaagcgattgcggcgagcgtcttacaacaaccaattgcccaattgcaacaacaatccttggcacatctaacaatacaaaccatcgcaacgcaacagcaacaacagttcctaccagcactgagccacctaaccatggtg

SEQ ID NO: 88760 - DNA, 427 bp, Zea mays
ccgatgatattttgctgaaaagtggagaatttaacagagctctattgggacaaatcgtattttctgacccatcaaaacgtcaacttctaaaccgtcttctggcaccacatatttcttatagcattgtctgggagatagcaaaactgtggatgaaaggctgcaaggttatcatccttgacatcccgctgctgtttgagacaaagatggatagatggacgaatccaatcattgttctctgggttgatccaaaagtccagattgagaggctcatttcaagagatggatgctctgaaggacaagctcagaataggatcaatgcacagcttgcactagactggaagaaatcagaagcagacatagtgattgacaattctggttccctggatgacaccaaacagcaattccaagaagtgttgatgaaagtctc

SEQ ID NO: 88761 - DNA, 414 bp, Zea mays
cggaattcccgggtcgacccacgcgtaccaccaccaggggaagcgcactaccaactacctaacaccaatggctaccaagatattagccctgcttgcgcttcttgcccttttagtgagcgcaacaaatgcgttcattattccacagtgctcacttgctcctagtgccattattccacagttcctcccaccagttacttcaatgggcttcgaacatccagccgtgcaagcctacaggctacaactagcgcttgcggcgagcgccttacaacaaccaattgcccaattgcaacaacaatccttggcacatctaaccctacaaaccattgcaacgcaacaacaacaacaacaacagtttctgccatcactgagccacctagccgtggtgaaccctgtcacctacttgcaacagcagct

SEQ ID NO: 88762 - DNA, 378 bp, Zea mays
cccacgcgtccggaccattagctttatctactccagagcgcagaagaacccgatcgacaccatgagggtgttgctcgttgccctcgctctcctggctctcgctgcgagcgccacctccacgcatacaagcggcggctgcggctgccagccaccgccgccggttcatctaccgccgccggtgcatctgccacctccggttcacctgccacctccggtgcatctcccaccgccggtccacctgccgccgccggtccacctgccaccgccggtccatgtgccgccgccggttcatctgccgccgccaccatgccactaccctactcaaccgccccggcctcagcctcatccccagccacacccatgcccgtgccaacagcc

SEQ ID NO: 88763 - DNA, 397 bp, Zea mays
gaccaactagcaacatagaaagcacaatagtgtaccaacaatggcagccaaaatattgtgcctccttatgctccttggtctttctgcaagtgctgctacggcgaccattttcccgcaatgctcgcaagctcctatagcttcccttcttcccccgtacctctcaccagcggtgtcttcggtatgtgaaaacccaattcttcaaccctacaggatccaacaggcaatcgcagctggcatcttacctttatcacccttgttcctccaacaatcatcagccctattacaacagttacctttggtgcatttattggcacaaaacatcagggcacaacaactacaacaacttgtgctagcaaaccttgctgcctactctcagcaacagcagtttcttccattc

SEQ ID NO: 88764 - DNA, 405 bp, Zea mays
cgtcagcctagcaattagctcatcgactccagattggagaactcgacaccatgaaggtgctgatcgttgcccttgctctcctggcgctcgctgcgagcgccgtctccagtacaagcggcggctgtggctgccagacaccaccgtttcatctaccgcctccgttctatatgccgcctccgttctatctgccgccgcagcagcagccgcagccatggcaataccccactcaaccaccgaagctaagcccgtgccagcagttcggatcctgccgcgttagcagcgtcggcagcccgttcctgggccagggcgtcgagtttctgaggcaccagtgcaacccggcggcgacgccctacggctcgtcacagtgccaagcgctgcagcagcagtgctgccaccagatcaggc

SEQ ID NO: 88765 - DNA, 366 bp, Zea mays
  unsure (1)..(366): unsure at all n locations
ccgacgcgtgcggaccattagctctatctactctagagcgcagaagaacccgatcgagaccgtgagggtgttgctcgttgccctcgctctcctggctctcgctgcgagcgccacctncacgcatacaagcggcggctgcggctgccagccaccggcgccggttcatctaccgccgccggtgcatctgccacctacggttcacctgccacctccggtgcatctcccaccgccggtccacctgccgccgccggtccacctgccaccgccggtccatgtgccgccgccggttcatctgccgncgncaccatgccactaccctactcaaaccgcccggcctcagcctcattcccagccacacccatgccc

SEQ ID NO: 88766 - DNA, 393 bp, Zea mays
atcaatcatcattcatcttagtaggattggcaccagatcaaatctgcaacatcaatgatctaactccaaaaaccatgaagctggtgcttgtggttctcgctttcattgctttagtatcaagggtttcttgtacacagacaggcggctgtagatgtggtcaacaacatatccatgatcagcaacatcatccacaacaacatcatccacaaaaacggcaatatcaaccaccaccacaacattatcagcaccagcaacaccaacaacaacaagttcacatgcaaccacaacaacatgagcatcaacaagaacttcatgttcaacgacaacaactacaaccgcagcagcatcaccaacaacgtcgacaacagtgccaacaacaacatcaatgtgaat

SEQ ID NO: 88767 - DNA, 411 bp, Zea mays
attttgagcattcagaaacacaccaagcgaagcgcactagcaacgacctagcaacaatggctaccaagatattagccctccttgcgcttcttgccctttttgtgagcgcaacaaatgcgttcattattccacaatgctcacttgctcctagtgccattattccacagttcctcccaccagttacttcaatgggcttcgaacacctagctgtgcaagccaacatgcaacaacaagcgcttgcggcgagcgtcttacaacaaccaattgcccaattgcaacaacaatccttgccacatctaacaatacaagccatcacaacgcaacagcaacaacagttcctaccagcactgagccacctagccatggtgaaccctgccgcctacttgcaagagcaagcaacatagaaagcac

SEQ ID NO: 88768 - DNA, 413 bp, Zea mays
cggattcccgggtcgacccacgcgttcgcccacgcgtccgagaaagcacaatagtgtaccaacaatggcagccaaaatattttgcttccttatgctccttggtctttctgcaagtgttgctaccgcaaccattttcccacaatgctcacaagctcctatagcttcccttcttcccccatacctctcaccagcggtgtcttcaatgtgtgaaaccccaattgttcaaccctacaggatccaacaggcaatcgcaacaggcatcttaccattatcacccttgttcctccaacaaccgtcagccctattacagcagttacctttggtccatttggtggcacaaaacatcagggcacaacaactacaacaacttgtgctagcaaaccttgctgcatactctcagcaacatcagtttc

SEQ ID NO: 88769 - DNA, 392 bp, Zea mays
ccaatccagatcagcaaagcggcagtgcgtagagaggatcgtcgaacagaacagcatgaagatggtcatcgttctcgtcgtgtgcctggctctgtcagctgccagcgcctctgcaatgcagatgccctgcccctgcgcggggctgcagggcttgtacggcgctggcgccggcctgacgacgatgatgggcgccggcgggctgtacccctacgcggagtacctgaggcagccgcagtgcagcccgctggcggcggcgccctactacgccgggtgtgggcagccgagcgccatgttccagccgctccggcaacagtgctgccagcagcagatgaggatgatggacgtgcagtccgtcgcgcagcagctgcagatgatgatgcagcttgagcgtg

SEQ ID NO: 88770 - DNA, 423 bp, Zea mays
  unsure (1)..(423): unsure at all n locations
cagaaacacaccaagcgaagcacattatcaacaacctaacaacaatggctaccaagagatgatccctacttgcgcttcttgcgctttttgcgagcgcaacaaatgcgttcattattccacaatgctcacttgctccaagttccattattacacagttcctcccaccagttacttcaatgggcttcgaacacccagctgtgcaagcctataggctacaacaagcaattgcggcgagcgtcttacaacaaccaatttcccagttgcaacaacaatccttggcacatctaacaatacaaaccatcgcaacgcaacagcaacaacaattcctaccagcactgagccacctagccatggtgaaccctgccgnctacttgcaacagcagttgcttgcatcanacccacttgctctggcaaacgtagttg

SEQ ID NO: 88771 - DNA, 455 bp, Zea mays
ggaattcccgggcaatcatcattcatcttagtagtataggcaccaaatcaaatctgcaacatcaattatctaactccaaaaaccatgaagctggtgcttgtggttcttgctttcattgctttagtatcaagtgtttcttgtacacagacaggcggctgcagctgtggtcaacaacaaagccatgagcagcaacatcatccacaacaacatcatccacaaaaacaacaacatcaaccaccaccacaacatcaccagcagcagcaacaccaacctcaacaaggtcacatgcaaccacaaaaacatcagcaacaacaagaagttcatgttcaacaacaactacaacaaccgcagcaccaccaccaacaacaactactacagcaccaacaacaacatcaatgtgaaggccaacaacaacatcatcaacaatcacaaggccatgttcaacaactcgaaca

SEQ ID NO: 88772 - DNA, 413 bp, Zea mays
agaccagcaagcaacatagaaagtagaatccattagcaacaatagagcaacaatggcgaccaagatattttccctccttatgctccttgctctttctacatgtgttgctaacgcgacaattttccctcaatgctcacaagctcctatagcttcccttcttcccccataccttccatcaattatagcttcagtatgtgaaaacccagctcttcaaccatataggcttcaacaagcaatcgcagcaagcaacatacctttatcgcccttgttgtttcaacaatcaccagccctatctttggtgcagtcattggtacaaaccatcagggcacaacagctgcagcaactcgtgctacctgtgatcaaccaagtagctctggcaaacctttctccctactctcagcaacaacaatttc

SEQ ID NO: 88773 - DNA, 424 bp, Zea mays
  unsure (1)..(424): unsure at all n locations
gagaccaactagcaacatagaaagcacaatagtgtaccaacaatggcagccaaaatattttgcctccttatgctccttggtctttctgcaagtgctgctacggcgaccattttcccgcaatgctcgcaagctcctatagcttcccttcttcccccgtacctctcaccagcggtgtcttcggtatgtgaaaacccaattcttcaaccctacaggatccaacaggcaatcgcagctggcatcttacctttatcacccttgttccttcaacaatcatcagccctattacaacagttacctttggtgcatntattggcacaaaacatcagggcacaacaactacaacaacttgtgctagcaaaccttgctgcctactctcagcaacagcagtttcttccattcaaccaactaggttcattgaactctg

SEQ ID NO: 88774 - DNA, 432 bp, Zea mays
gcaacatagaaagcacaatagtgtaccaacaatggcagccaaaatattttgcttccttatgctccttggtctttctgcaagtgttgctaccgcaaccattttaccacaatgctcacaagctcctatagcttcccttcttcccccatacctctcaccagcggtgtcttcaatgtgtgaaaacccaattgttcaaccctacaggatccaacaggcaatcgcaacaggcatcttaccattatcacccttgttcctgcaacaaccgtcagccctattacagcaattacctttggtccatttggtggcacaaaacatcaaggcacaacaactacaacaacttgtgctagcaaaccttgctgcatactctcagcaacatcaagttcttccattcaaccaactggctgcattgaactctgctgcttatttgcaacaacc

SEQ ID NO: 88775 - DNA, 350 bp, Zea mays
cggattcccggctcgacccacgccgtccgccaactagcaccatagaaagcacatttttgtaccaacaatggcagccaaaatatttggcctgcttatgctccttggtctttctgcaagtgctgctacggcgaccattttcccacaatgctcacaagctcctatagcttcccttcttcccccgtacctctcaccagcggtgtcttcggtatgtgaaaacccaattcttcaaccctataggatccaacaggcaatcgcaactggcatcttacctttatcaaccttggtccttcaacaatcatcaaccctattacagcaggtacctttggtgcatttattggcacaaaacatta

SEQ ID NO: 88776 - DNA, 414 bp, Zea mays
ctgcaaccctacaggatccaacaggctttcgcagctggcatcttacctttatcacccgtgtgcctccaacaatcatcagccctattacagcagttacctttggtgcatttattggcacaaaacatcagggcacaacatctacaacaacttgtgctagcaaaccttgctgcctactctcagcaacagcagtttcttccattcaaccaactagctgcattgaactctgcttcttatttgcaacatcatcaactaccattcagccagctacctgttgcctacccccaacaatttcttccattcaaccaactggcagcattgaactctcctgcttatttacagcagcaacaactactaccattcatccagctagctggtgtgagccctgctaccttcttgacacaaccacagttgttg

SEQ ID NO: 88777 - DNA, 295 bp, Zea mays
acgagcaaaggaaggccagtctcattgaagggctcaaccaactcaactcctcgggcggcgcagatgacgacgatgaggatgacgagtaaagtttggtcccatcgaagtagtgctatcttatgcggcgatcagtatttgtgctatggcatttatcgctacctgtagtcgtgcaacatgcatttttgtttaagtttgtcgatgcgaacaaagttgtttctgttagtttggagctggagttctgaatatttacttttataatattaaaattggaccgagttgaacaaaaaaaactaac

SEQ ID NO: 88778 - DNA, 391 bp, Zea mays
  unsure (1)..(391): unsure at all n locations
ctcccgaatcaccaaaccggcattccgtttaagagggatcgtcgaccagaccagcttgaagatggtcatcgttctcgtcgtgtgcctggctctgtcagctgccagcgcctctgcaatgcagatgccctgcccctgcgcggtgctgcagggcttgtacggcgctggcgccggcctgacgacgatgatgggcgccggcgggctgtacccctacgcggagtacctgaggcagccgcagtgcagcccgctggcggcggcgccctactacgcncggtgtgggcagtcgagcgccatgttccagccgctccggcaacagtgctgccagcagcagatgaggatgatggacgtgcattccgtcgcgcatcaactgcagatgatgatgcagcttgagcgt

SEQ ID NO: 88779 - DNA, 386 bp, Zea mays
gagaccaactagcaacatagaaagcacaatagtgtaccaacaatggcagccaaaatattttgcttccttatgctccttggtctttctgcaagtgctgctaccgcaaccattttcccacaatgctcacaagctcctatagcttcctttcttcccccatacctctcaccagcggtgtcttcagtatgtgaaaacccaattcttcaaccctacaggatccaacaggcaatcgcagcaggcatcttacctttatcacccttgttcctccaacaaccgtcagccctattacagcagttacctttggtgcatttgttggcacaaaacatcaaggcacaacaactacaacaacttgtgctaagaaaccttgctgcctactctcagcaacagca

SEQ ID NO: 88780 - DNA, 417 bp, Zea mays
cccacgcgtccggggaaatccttcagtggaggtgactgaggaaaaccgtgatgcttcccaagaagcaaaaggcaaggctatggaagcaatttctgaaggaaaacttgaagatgctattgaacaccttaccaacgcaatagtgctgaatccactctcagcaatcatgtatggtactagagcatctgtgtttataaaaatgaagaaaccagctgctgccattcgtgatgccaatgctgctctagagatcaacccagactctgcaaaaggctataaaactcgtggaatggcatatgccatgcttggcaaatgggaggaagctgctcatgatctgcacacagcatctaacatggattacgacgaggagatcaatgctgtgctcaagaaggtggagcctaatgctcacaagatagtggaaca

SEQ ID NO: 88781 - DNA, 382 bp, Zea mays
agctgcagagccggcgtgaccagcgaggcgagatcgtccgcgtggagccggagcacggctttcaccagctgaatccgtcgccgtcgtcgtcgtcgttttcgttcccatcgtcacaaggccagtaccaaacgtgccagcgcgacgtcgacaggcacaacgtctgcgccatggaggtgaggcacagcgtcgaacggctggaccaggccgacgcctacagccctggggctgggaggatcacacgcctcaccagccacaagttccccgtcctcaacctcgtacagatgagcgcggtgcgggtagacctgtaccaggacgccatcatgtcgccgttctggaacttcaacgcccacagcgccatgtacggcatcaggggcagtgcaag

SEQ ID NO: 88782 - DNA, 395 bp, Zea mays
cgctcactgactgactactgtaataccagagatcgaacaacttggtcctgcagctcaagaagagagttttgtgcatttgggggccgggggcaagagagagagagagagccatggcggcggaccagcagccgcagctgcaggaggagatgaacgacgctgccggcggcggcctcaggctgcctccagggttccgcttccacccgagcgacttcgagattgtcagcttctacctcaccaacaaggtgctcaacacgcgcttcacctgcaccgacatcacggaggccgacctaaacaagattgagccatgggaccttccgagccaggcgaaaatgggcgagaaagagtggtacttcttctaccagaaggaccgcaagtacccgacggggcttgaggcg

SEQ ID NO: 88783 - DNA, 433 bp, Zea mays
gcattcagaaacacacctagcgaagcgcactagcaacgacctaacaacaatggcttccaagacattatccctccttgcgcttcttgccctttttgtgagtgcaacaaatgcgttcattattccacaatgctcacttgctccgagtgccattattccacagttcctccctccagttacttcaatgggcttcgaacacccagctgtgcaagcctataggctacaacaagcgcttgcggcgagcgtcttagaacaaccaattgcccaattacaacaacaatccttagcacatctaaccatacaaaccatcgcaacgcagcagcaacaagcactgagccacctagccgtggtgaaccctatcgcctacttgcaacaacagctgcttgcatccaacccacttgctttggcaaacgtagctgcataccaaccaccaaca

SEQ ID NO: 88784 - DNA, 454 bp, Zea mays
cggaattcccggctcgacccacgcgttcgcaggccacttaaaaggtagaatccattttcaccaatatagcaccaatggcgaccaaggtatgttccctccttatgctccttgctctttctacatgtgttgctaacgcgacaattttccctcaatgctcacaagctcctatagctttccttcttcccccataccttccatcaattatagcttcagtatgtgaaaacccagctcttcaaccatataggcttcaacaagcaatcgcagcaagcaacatacctttatcgcccttgctgtttcaacaatcaccagccctatctttggtgcagtcattggtacaaaccatcagggcacaacatctgcagcaactcgtgcttcctgtgatcaaccaaattgctctagcaataccttttccctactcttagcaacaacaatttctttcattcaaccaactgtc

SEQ ID NO: 88785 - DNA, 420 bp, Zea mays
ggaattcccgggctgaggcatcagtgcagcccgacggcaacgccctaactgctcgtctcagtgccagtcgttgcggcagcagtgtggccagcagctcaggcaggtggagccgcagcaccggtaccaggcgatcttcggcttggtcctccagtccatcctgcagcagcagccgcaaagcggccaggtcgcggggctgttggcggcgcagatagcgcagcaactgacggcgatgtgcggcctgcagcagccgactccatgcccctacgctgctgccggcggtgtcccccactgaagaaactatgtgctgtagtatagccgctggctagctagctagttgagtcatttagcggcgatgattgagtaataatgtgtcacgcatcaccatgggtggcagtgtcagtgtgagcaaatgacctgatg

SEQ ID NO: 88786 - DNA, 444 bp, Zea mays
ggaattcccggctcgacccacgcgttcgcaggaagccacataaaaaggtgaatccattatccaccattgaaccaccatggccacccagagtttttccttcctaagcctcctggttctttctacatgggtgctaacgcgccatttttccctcaatgctcacaagctcctatagcttcccttcttcccccataccttccatcaattatagcttcagtatgtgaaaacccagctcttcaaccatataggcttcaacaagcaatcgcagcaagcaacatacctttatcgcccttgttgtttcaacaatcaccagccctatctttggtgcagtcattggtacaaaccatcagggcacaacagctgcagcaactcgtgctacctgtgatcaaccaagtagctctggcaaacctttctccctactctcagcaacaacaatttcttccattc

SEQ ID NO: 88787 - DNA, 437 bp, Zea mays
ccggaattcccgggtcgacccacgccgtccggctcctgggtctttctgcaagtgctggctacggcgaccattttcccgcaatgctcgcaagcgcctatagcttcccttgttcccccgtacctctcaccagcggtgtcttcggtatgtgaaaacccaattcttcaaccctacaggatccaacaggcaatcacagctggcatcttacctttatcacccttgttcctgcaacaatcatcagccctattacatcagttacctttggtgcatttattggcacaaaacatcagggcacatcatctactacaacttgtgctagcataccttgctgcctactctcagcaacagcagtttcgtccattcaaccaactagctgcatggaactctgcttcttacttgcaacaacggcaactaccattcagtcagctacctgctgccta

SEQ ID NO: 88788 - DNA, 342 bp, Zea mays
gtgcagcccgacggcgacgccctactgctcgcctcagtgccagtcgttgcggcagcagtgttgccagcagctcaggcaggtggagccgcagcaccggtaccaggcgatcttcggcttggtcctccagtccatcctgcagcagcagccgcaaagcggccaggtcgcggggctgttggcggcgcagatagcgcagcaactgacggcgatgtgcggcctgcagcagccgactccatgcccctacgctgctgccggcggtgtcccccactgaagaaactatgtgctgtagtatagccgctggctagctagctagttgagtcatttagcggcgatgattgagtaata

SEQ ID NO: 88789 - DNA, 377 bp, Zea mays
gagacacagaaagtgaagagcactatctgcgaactgacaccaatgactaccaagatgttaatgctgcttgcactgattgcactatgtgtgagcgcaacaaatgcgctcattattgcacaatgctcacttgctactagtgtcattatatcacagattgctgcaccagttacttcgatgggctacgaacacctagatgtgcaggccaacatgcagcaacgagcgattgcggcgagcgtgttacaacaactgatagtgcaattgcaacaagaattcttgccgcatctaacaatacaagccatgacaacgcaacagatcagcagttgctaccagcactgatccagctagccatggtgaaccctgtctgctacttgcaagag

SEQ ID NO: 88790 - DNA, 392 bp, Zea mays
gaagaccgaagaccgagccgtgcggtggctcgtgacgggaacgggacaggacctcagaatctcagatccttcctgcccgcccgcccgtgcccgtcgacgcgtcgttcttgccggccgcgccccacctacgccctctcctactacagggggatcggatacgccacaggctgcgcgatggtgctgtgggtcttcggctaccgctccctcatctggaaccccggcttcgacttcgacgacacaatgctcggcttcatcaagggctacaagcgcacctttaatctcgcttgcattgaccacagatgcacaccggagcatgcggcgaggacctgcacgcttgaaaccgacgacgaggccatatgctggggaattgcatattgtgtcaagggtggtcc

SEQ ID NO: 88791 - DNA, 432 bp, Zea mays
ggaattcccgggtcgacccacgcctcccgggttttggaaaccccaatccttaacccttccaggatccaccaggcaatcacagctggcatggaaccttaatcacccttgttcctccaacaatcatcagccctattacatcagttacctttggtgcatttattggcacaaaacatcagggcacaacaactacaacaacttgtgctagcaaaccttgctgcctactctcagcaacagcagtttcttccattcaaccaactagctgcattgaactctgcttcttatttgcaacaacaacaactaccattcaaccagctacctgctgcctacccccagcaatttcttccattcaaccaactggcagcattgaactctcctgcttatttacagcagcaacaactactaccattcagccagctagcttgtgtgagccct

SEQ ID NO: 88792 - DNA, 225 bp, Zea mays
ggaattcccgggtctacctgcacgctgcgcctaacgctggcaccctcttacaactgcaacaattgctgccattcaaccaacttggtttgacaaacccaacagcgttctaccaacaacccatcattggtggtgccctcttttagattgcttatgagttatacttcaataatgaagttttttggatgatgtttgtggcttcccagaaataagaaagtacatttctag

SEQ ID NO: 88793 - DNA, 395 bp, Zea mays
ggaattcccgggtcgacccacgcgttcggaacaattaaggcattgcaaaaggccgtgaagccttccttccccaactccaagaagggctggcccccttgcttcaacgccgccaagacatggatggcgattcctgctccaaagcgaggagagatcgttaggcaaatcggtgatgcactgagagcaaagctccatcaccttggcaggcttgtgtcacttgagatggggaaaattcttcctgaagggatcggtgaggttcaggaaatcatcgacatgtgtgattatgctgtggggctaagtcgccaactaaatggatccattataccatctgaacgaccaaaccatatgatgatggaagtgtggaatccccttggagttgtgggtggtataacggcatt

SEQ ID NO: 88794 - DNA, 322 bp, Zea mays
cttgcgaccgtccctcgaccgtgtcgcgttgcattgtacgatccaaagctctgtatgctagcaggtcgcagccatggcgaagaactacccgaccgtgagcgcctagtacagcgaggctgtggacaaggccaggcgcatgctccgagccctcatagccgagaagagctgcgccccgctcatgctccgactcgcgtggcactccgcggggacgttcgacgtgtaagcgaggaccggcggtgcattcggtacgatgaatgatcagacggaattggctcacggcgctaacgcggagctggacatcgaggtgcgtgtgctcgagccc

SEQ ID NO: 88795 - DNA, 340 bp, Zea mays
cccacgcgtccgaaagcacaatagtgtaccaacaatggcagccaaaatattttgcctgcttatgctccttggtctttctgcaagtgctgctacggcgaccattttcccgcaatgctcgcaagctcctatagcttcccttcttcccccgtacctctcaccagcggtgtcttcggtatgtgaaaacccaattcttcaaccctacaggatccaacaggcaatcacagctggcatcttacctttatcacccttgttcctccaacaatcatcagccctattacatcagttacctttggtgcatttattggcacaaaacatcaaggcacaacaactacaacaactt

SEQ ID NO: 88796 - DNA, 433 bp, Zea mays
caacaagcaacatagaaagtggaatacagtagcaacaatagagcaacaatggcggccaagatattttccatccttatgctccttgctctttctgcatgtgttgctaacgcgaccatttttcctcaatactcacaagctcctatagctgcccttcttcccccataccttccatcaatgaccgcttcagtttgtgaaaacccagcccttcaaccctacaggctccaacaagcaatcgcaacaagcaacttacctttatcacccctgttctttcaacaatcgccagccctatctttggtgcagtcattggtacaaaccatcagggcacaacagctgcaacaactcgtgctaccagtgatcagccaagtagctctggcaaacctttctccctactctcagcaacaacaatttcttccattcaaccaactgtctacac

SEQ ID NO: 88797 - DNA, 396 bp, Zea mays
gacaaccgtagccctattacagcagtacctttgggcatttgttggcacagagcatcaaggcacatcaactacaacaacttgtgctaggaaaccttgctgcctactctcagcaacagcagtttcttccattcaaccaactggctgcattgaactctgctgcttatttgcaacaacaactaccattcagtcagctagctgctgcctacccccagcaattgcttccattcaaccaactggcagcattgaactctgctgcttatttacaacagcaacagctaccaccattcagccagctagctgatgtgagcccttgtgccttcttgacacaacaacagctgttgccgctctacctgcacgctgcgcctaacgctggcaccctgttacaactgcaacaat

SEQ ID NO: 88798 - DNA, 387 bp, Zea mays
caactagcaacatagaaagcacaatagtgtaccaacaatggcagccaaaatattttgcctccttatgctccttggtctttctgcaagtgctgctacggcgaccattttcccgcaatgctcgcaagctcctatagcttcccttcttcccccgtacctctcaccagcggtgtcttcggtatgtgaaaacccaattcttcaaccctacaggatccaacaggcaatcacagctggcatcttacctttatcacccttgttcctgcaacaatcatcagccctattacatcagttacctttggtgcatttattggcacaaaacatcagggcacaacaactacaacaacttgtgctagcaaaccttgctgcctactctcagcaacagcagtttct

SEQ ID NO: 88799 - DNA, 426 bp, Zea mays
agattgcccaattgcaacatcaatccttggcacatctaaccctacaaacgattgcaacgcaacaacaacaacaacaacagtttctgccatcactgagccatctagtcgtggtgaaccctgtcacctacttgcaacagtagctgcttgcatccaacccacttgctctggcgaacgtatctgcataccagcaacaacatcagctgtaacagcttatgccagtgcttagtcaactagccatggtgaaccctgctcgtgacctacaactactttcatatagcccgctatgtggtgcgcaatgcacatacgtacctacaacaacagttgatgcaacaaattgtaccagctctgaatcagctagctgtggctaacgctgctgcctacttacaacagttgcattcattgaaccaactggctgtggcaaactct

SEQ ID NO: 88800 - DNA, 433 bp, Zea mays
cggaattcccgggtcgacccacgcgttccgtcggaccttttttcctttcctaatcctttaggaaccagggccaccaccgccatggcagccaggatgcttgcattgttcgctctcctagctctttgtgcaagcgccactagtgcgacccatattccagggcacttgccaccagtcatgccattgggtaccatgaacccatgcatgcagtactgcatgatgcaacaggggcttgccagcttgatggcgtgtccgtccctgatgctgcagcaactgttggccttaccgcttcagacgatgccagtgatgatgccacagatgatgacgcctaacatgatgtcaccattgatgatgccgagcatgatgtcaccaatggtcttgccgagcatgatgtcgcaaatgatgatgccacaatgtcactgcgacgccgtctcgc

SEQ ID NO: 88801 - DNA, 335 bp, Zea mays
gcaacatagaaagcacaattttgtaccaacaatggcagccaaaatattttgcttccgtatgctccttggtctttctgcaagtgttgctaccgcaaccattttcccacaatgctcacaagctcctatagcttcccttcttcccccatacctctcaccagcggtgtcttcaatgtgtgaaaacccaattgttcaaccctacaggatccaacaggcaatcgcaacaggcatcttaccattatcacccttgttgctccaacaaccgtcagccctattacagcagttacctttggtccatttggtggcacaaaacatcaaggcacaacaactacaacaac

SEQ ID NO: 88802 - DNA, 344 bp, Zea mays
gcaatgcagcttttgagtcattggatataatgagggatgaaagcaagaaaaatacattaaagctagttgacatggaatgcagctacttgacagtagatttcttcaggaagcttcctcaggatgttgagaagggtggaaatccaagccactctatttttgatagatataatgactcttatcttagacgaattggacaaactgttctgtcatatgttaatatggtgtgttcgaccttgaggaactccatcccaaaatctattgtttattgtcaagtgcgagaggccaagcgctcgctgctcgatcacttcttcactgaactgggagcaagagagatgaagcagctt

SEQ ID NO: 88803 - DNA, 326 bp, Zea mays
gaaatcgaggagctcatcaacagcgacgtcgagaactccgagcacaagttcgtgctgaaggacaagaagaagccgatcatcttctcgatggcgcgtctcgaccgcgtgaagaacatgacaggcctggtggagatgtacggcaagaacgcgcgcctgagggagctggcgaacctcgtgatcgtcgccggtgaccacggcaaggagtccaaggacagggaggagcaggccgagttcaagaagatgtacaggctcatcgacgagtacaagttggagggccatatccggtggatctaggcgcagatgaaccgggttccgcacggggagct

SEQ ID NO: 88804 - DNA, 388 bp, Zea mays
gcaacatagaaagcacaatagtgtaccaacaatggcagccaaaatattttgcttccttatgctccttggtctttctgcaagtgctgctaccgcaaccattttcccacaatgctcacaagctcctatagcttcctttcttcccccatacctctcaccagcggtgtcttcagtatgtgaaaacccaattcttcaaccctacaggatccaacaggcaatcgcagcaggcatcttacctttatcacccttgttcctccaacaaccgtcagccctattacagcagttacctttggtgcatttgttggcacaaaacatcaaggcacaacaactacaacaacttgtgctaggaaaccttgctggctactctcagcaacagcagtttcttccattc

SEQ ID NO: 88805 - DNA, 429 bp, Zea mays
agcccagcaggcaccttagaaggtagattccattaccaccattagagcaccattggcgaccgagatattttccctccttatgctccttgctctttctacatgtgttgctaacgcgacaattttccctcaatgctcacaagctcctatagcttcccttcttcccccataccttccatcaattatagcttcagtatgtgaaaacccagctcttcaaccatataggcttcaacaagcaatcgcagcaagcaacatacctttatcgcccttgttgtttcaacaatcaccagccctatctttggtgcagtcattggtacaaaccatcagggcacaacagctgcagcaactcgtgctacctgtgatcaaccaagtagctctggcaaacctttctccctactctcagcaacaacaatttcttccattcaaccaact

SEQ ID NO: 88806 - DNA, 392 bp, Zea mays
cggaattcccgcgtagacccacgcgtccaactagcaccatagaaagcacattactttaccaacaatggcagccaaaatatggtgggtgcttatgctccttggtatttctgcaagtgctgctactgcgaccattttcccgcaatgctcacaagctcctatagcttcccttcttcccccgtacctctcaccagcggtgtcttcggtatgtgaaaacccaattcttcaaccctacaggatccaacaggcaatcgcagctggcatcttacctttatcacccttgttcctccaacaatcatcagccctattacagcagttacctttggtgcatttattggcacataacatcagggcacaacaactacaacaacttgtgctagcaaaccttgctgcct

SEQ ID NO: 88807 - DNA, 334 bp, Zea mays
tcccgggtcggcccaatccttccggtaaacctcgccatctaattggctcatggcatggagtatgtcttcgttgctaactcggacagcttggttgctatagtcgacatcaagatcctgaaccatctgatcaataaccagaatgaatactgcatggaggttactccaaaaacattggctgatgttaaaggcggtactctcatctcttacgaaggaagagttcagcttttggagattgcccaagtacctgatgagcatgtgaatgagtttaaatcaatcgagaagtttaagatattcaacactaacaacttgtgggtgaacctttaagctgtcaaga

SEQ ID NO: 88808 - DNA, 407 bp, Zea mays
ggaattcccggcattgagaccaactagcaacatagaaagcacaatagtgtaccaacaatggcagccaaaatattttgcttccttatgctccttggtctttctgcaagtgttgctaccgcaaccattttcccacaatgctcacaagctcctatagcttcccttcttcccccatacctctcaccagcggtgtcttcaatgtgtgaaaccccaattgttcaaccctacaggatccaacaggcaatcgcaacaggcatcttaccattatcacccttgttcctccaacaaccgtcagccctattacagcagttacctttggtccatttggtggcacaaaacatcaaggcacaacaactacaacaacttgtgctagcaaaccttgctgcatactctcagcaacatcagtttct

SEQ ID NO: 88809 - DNA, 377 bp, Zea mays
attttcagcattcaaaaacacaccaagcgaagcgcactagcaacgacctaacaccaatggctaccaagatattagccctccttgcgcttcttgcccttttagtgagcgcaacaaatgcgttcattattccacagtgctcacttgctcctagtgccagtattccacagttcctcccaccagttacttcaatgggcttcgaacatccagccgtgcaagcctacaggctacaactagcgcttgcggcgagcgccttacaacaaccaattgcccaattgcaacaacaatccttggcacatctaaccctacaaaccattgcaacgcaacaacaacaacaacagtttctgccatcactgagccacctaaccgtggtgaaccct

SEQ ID NO: 88810 - DNA, 243 bp, Zea mays
cgcgtcgagctacgatagcgtgaattatagcttcagacttcgaacttgcaacgtctgaagcatatgggcttccacgggcaataccatacaggatcctacatgcattggcagcggggatctaacatttaccagccctgtctctggagcagtcatcagtcctatcactgcaggtacatcaggtgcatctactggcacaaaatatcatggctcaactactactacaactcgtgcttgcaaactttg

SEQ ID NO: 88811 - DNA, 376 bp, Zea mays
agcgccgcgcttgcgtttccttctcttcgcttccaagatgtcgaagcgagggcgtggaggttcggctggtaacaagttccggatgtcactgggtctaccagtggcagctactgtgaactgtgccgataacactggagccaagaacctgtacatcatttctgtgaagggaatcaagggtcgccttaacaggcttccttctgcctgtgttggtgacatggttatggctaccgtgaagaagggaaagcctgaccttagaaagaaagtgatgccagctgttattgtgaggcagcgcaagccatggcgccgaaaggatggtgtctacatgtactttgaagacaatgctggagtgaatgtgaacccaaaagggagagatgaa

SEQ ID NO: 88812 - DNA, 310 bp, Zea mays
taacatcaatggctaccaagatattatccctctttgcgcttcttgccctttttgtgagcgcaacaaatgcgttcattattccacaatgctcacttgctcctagtgccattattccacagttcctccctccagttacttcaatgggcttcgaacacccagctgtgcaagcctacaagctacaacaagcgcttgcggcgagcgtcttacaacaaccaattgcccaattacaacaacaatccttggcacatctaaccatacaaaccatcgcaacgcaacagcaacaacaatttctaccagcacttaaccaact

SEQ ID NO: 88813 - DNA, 410 bp, Zea mays
ctccgctcggccaccagctttgaccgtctcccctcccctccgctcctgttcctccatacccggcccccccgcaggagcggcgcggcggcggcggcggcaaagccaaaggcaagatgttcgggcgcgcgccgaagaagagcgacaacaccaagtactacgagatcctcggggtgcccaagtcggcgtcccaggacgacctcaagaaggcctaccgcaaggcagctatcaagaaccaccccgacaagggcggtgaccccgagaagttcaaggagctcgcacaagcctatgaggttttgagtgatccagagaaacgtgagatttatgatcagtatggtgaagatgcccttaaggaaggaatgggtggtggtgggtcccatgctgatccatttgacattttctcatcattcttt

SEQ ID NO: 88814 - DNA, 419 bp, Zea mays
  unsure (1)..(419): unsure at all n locations
cacctaccaccttccatagtgaagtacactagcaacatcttagcaccaatggcagccaagatttttgcgctccttgccctccttgctctttcagcaagtgttgctaccgcgactattattccacaatgctcacaacaatacctctctccagtgatagccgcgagatttgaatacccatctatacaatcctacaggctacaagaggccatcacagcaagcatcttacggtcgttagcattgaccgtccaacaaccatatgccctattgcaacaaccatccttagtgaatctgtatcttcaaagaatcacagcacaacaactacaacaacggttgcttncaacaattaatcaagtagttgcagcgaaacctgctgcttaccttcagcatcaacaatttcttncattcaatcaactaactgg

SEQ ID NO: 88815 - DNA, 337 bp, Zea mays
ttttagttttataggcaccaaatcaaatctgggacatgaattatctaactgcaaataccatgaagctggtgcttgtggttcttgctttcattgctttagtatcacgtgtttcttgtacacagacaggcggctgcagctgtgttcaacaacaaatccatgagcagcaacatcattcacaacagcatcatacacagcatcatcaacatgttccaccaccacagcataaccagctgcagctgtcaccaactactccaagttcacatgcaaccacttaaacatcaataacaacgcgaagtctatgttcaacatcgacaacaacaaccgaatcaccacctgc

SEQ ID NO: 88816 - DNA, 244 bp, Zea mays
tgcatttattggcacaaaacatcagggctcaacaactacaacaactcgtgctagcaaaccttgctgcctactctcagcaacagcagttacctttggtgcatttgttggcacaaaacatcagggcacaacaactacaacaactcgtgctagcaaaccttgctgcctactctcagcaacaacagtttctgccattcaaccaactagctgcattgaactctgctgcttatttgcagcaacaacaacc

SEQ ID NO: 88817 - DNA, 244 bp, Zea mays
ctagcagctagcacatcaaacaagtggcgacagacaaagatttgtgagggtgatccgcgctgagaagagatggctaagatcgccgcggcggcggcggcggcgctgtgcttcgcggccctggtggccgtggccgtctgccaaggcgaggtcgagcggcagaggctcagggacctgcagtgctggcaggaggtccaggagagcccgctcgacgcgtgccgccaggtcctcgaccggcagctaaccg

SEQ ID NO: 88818 - DNA, 246 bp, Zea mays
cacgcgtccgccgctccgagcctcagttcgtatccacgcgcgccgccgccgcctcgccggtcgacgctcaccgcgcagccatggcggaacagactgagaaggctttcctcaagcagccaaaggttttcctcagctcaaagaaatctggcaagggtaagaagcctggcaagggcggcaaccgattctggaagagcattggccttggcttcaagactcccagggaagcaatcgaagggacctacattg

SEQ ID NO: 88819 - DNA, 260 bp, Zea mays
tactcggttcggaattcccggcagcaagatataaagcacaggagtgtaccaacaatggtatccaatttatattgcctccttatgctcctgggaatgtgagaaagttcagagaccgagaccattgacaaggattctgtgcatgatgctactgctgtccttagctcatatgaaatgtcaagatcaacaacacaggctcaggcacctgcagtgcttgcaagagcttcaggatagcctgctagactcgtaccgacagaatctaa

SEQ ID NO: 88820 - DNA, 418 bp, Zea mays
gcccagttcaacctttagccaatggagttaaaaaagaaccaccggttactctggtcgataaaaatttccagggcatattgaccaatgaaacaagatgcctaagatgtgaaacagtaactgcaagggatgaaacgtttcttgatcttagcgttgacattgaacaaaatagttctatcacaagctgcctgaaaaatttctgttctacagagactttaaacgcagaggataaattcttctgtgacaaatgctgcagtttgcaagaagcacagaagagaatgaagatcaagaaagctccccacatactggtgatccatctaaagcgtttcaagtacattgaacagcttggccggtataagaagctttcataccgggttgtattccccatggaactgaagctcaggtatacatctgacgatgt

SEQ ID NO: 88821 - DNA, 444 bp, Zea mays
accgttcgattcccggtcgagtacgtggcaacgtagaaagcacaatagtgttccaactatggcagccaaaatattttgctgccttatgctccttggtctttctgcaagtgctgctaccgcaaccattttcccacaatgctcacaagctcctatagcttcctttcttccgccatacctatcaccagcggtgtcttcagtatgtgaaaacccaattcttcaaccctacaggatccaacaggcaatcgcagcaggcatcttacctttatcacccttgttcctccaacaaccgtcagccctattacagcagttacctttggtgcatttgttggcacaaaacatcaaggcacaacaactacaacaacttgtgctaggaaaccttgctgcctactctcagcaacagcagtttcttccattcaaccaactggctgcattgaactctgctgc

SEQ ID NO: 88822 - DNA, 241 bp, Zea mays
ggaattcccggggccattctacccacaggatgtggcaaacattgtcgccttcttacaacaacagcaattgctgccatttagccaactcgctttgacgaatcctaccaccttattgcatcagcccaccattggtggtaccatcttctagattttttatgctttatactgtaataataaatttctcatactgatatgtgcaacttctcagtaataaaagattagagatctatattttaagttc

SEQ ID NO: 88823 - DNA, 245 bp, Zea mays
gttctgcacgatttcaccacagagtgcacgagagtgaaggactgcctgcttcgagaaatggcgaaggcgctagatgagctcggcgacgacgacgactacttcatcgaccagttcggcgacagggccgacacccatgccaggttcagctactaccctccgtgcgcgcggccggacctcgtcttcggcctgaggcctcactccgacggcacgttcctctcgcttctcatgctagacgacagcgtcgg

SEQ ID NO: 88824 - DNA, 242 bp, Zea mays
gcaacatcttagcaccaatggcagccaagatttttgcgctccttgccctccttgctctttcagcaagtgttgctaccgcgactattattccacaatgctcacaacaatacctctctccagtgatagccgcgagatttgaatacccatctatacaatcctacaggctacaagaggccatcacagcaagcatcttacggtcgctagcattgaccgtgcaacaaccatatgccctattgcaacaa

SEQ ID NO: 88825 - DNA, 244 bp, Zea mays
attttcagcattcaaaaacacaccaagctaagcgcactagcaacgacctaacaccaatggctaccaagatattagccctccttgcgcttcttgcccttttagtgagcgcaacaaatgcgttcattattccacagtgctcacttgctcctagtgccattattccacagttcctcccaccagttacttcaatgggcttcgaacatccagccgtgcaagcctacaggctacaactagcgcttgcggc

SEQ ID NO: 88826 - DNA, 237 bp, Zea mays
ctactatagcagtagctcatttctaaataaattgtcatgaattcctaagggggcagtgcagccctttggtagtgccttttctccaatcacgtttgatacaaccaagtagctgccaggtattgcagcaacaatgttgtcatgatcttaggcagattgagccacaatacattcaccaagcaatctacaacatggttcaatccataatccaggaggagcaacaacaacaaccatgtgagt

SEQ ID NO: 88827 - DNA, 343 bp, Zea mays
ccacgcgtccgcacaaataccggaatcaaggaagctgttatagtttcactgcttggtgatgtcggttgtgcaagccaagaagttatggaatcctatgaggttgaaatcaatggcaaagttttccaagctaaaactgttctgaacctcaatggacacagcatccggccatatcaaatccatgctgggaaatcagctccaatactgaaaggtggacagcaaacaaaaatggatgaaggggagttttatgccattgatacttttggatctacggcaaatggatttgtcaggcaggacttgcaatgcattcattacatgaacaactttgatgacagacatgtgcctt

SEQ ID NO: 88828 - DNA, 401 bp, Zea mays
gggccagcttgcgcccgcaatggcacttttctccgcctcctcgtcctccaggaccggggtcactgctctccgcagcagtgggcagcgggcgtcgtcctccttcctcggcggcaagacgctgctgagacaggccgaggcggcccggccgtcgttcgccgtgcgcgccgcggcggaccccaacaggccgatctggttccccggcagcacccctccgccgtggctcgacggcagccttcccggcgacttcggctttgatccctggggcctcggatctgacccggagagcctgcggtggaacgtgcaggcggagctggtgcactgccggtgggcgatgctcggcgcggcgggcatcttcataccggagttcctgaccaagatcggcgtcctcaacacgctcttct

SEQ ID NO: 88829 - DNA, 242 bp, Zea mays
gaccaactagcaacatagaaagcacaatagtgtaccaacaatggcagccaaaatatttggcctccttatgctccttggtatttctgcaagtgctgctacggcgaccattttcccgcaatgctcacaagctcctatagcttcccttcttcccccgtacctctcaccagcggtgtcttcggtatgtgaaaacccaattcttcaaccctacaggatccaacaggcaatcgcagctggcatcttac

SEQ ID NO: 88830 - DNA, 241 bp, Zea mays
atcaattatagcttcaatatgtgaaaacccagctcttcaaccatataggcttcaacaagcaatcgcagcaagcaacatacctttatcgcccttgttgtttcaacaatcgccagccctatctttggtgcagtcattggtacaaaccatcagggcacaacagctgcagcaactcgtgctacctctgatcaaccaagtagctctggcaaacctttctccctactctcagcaacaacaatttctt

SEQ ID NO: 88831 - DNA, 246 bp, Zea mays
caggattcaaaaacacaccaagcgaagttcactagcaacgacctaacaccaatggctagcgaagatattagccctccttgcgcttcttgcccttttagtgagcgcaacaaatgcgttcattattccacagtgctcacttgctcctagtgccagtattccacagttcctcccaccagttacttcaatgggcttcgaacatccagccgtgcaagcctacaggctacaactagcgcttgcggcgagcgc

SEQ ID NO: 88832 - DNA, 237 bp, Zea mays
cggacgcgtgggtgctcgacgtaggtatcgtcatctgatgcaggacgtgttgtcgatgctcccgcacgcgaagaaggacagcaaggtcgagtcgaagcagagcaaggggaacgctctcaacgagatgctcgagctcaggagctgctccagttgtctcttcttcgagtgccgaaaacagaaggatctttacctttggatggtgaagtctcctggaggaccatcagtgaaatttctagt

SEQ ID NO: 88833 - DNA, 238 bp, Zea mays
taagcccgtgccagcagttcggatcctgcggcgtcggcagcgtcggcagcccgttcctgggccagtgcgtcgagttcctgaggcaccagtgcagcccggcggcgacgccctacggctcgccacagtgccaggcgctgcagcagcagtgctgccaccagatcaggcaggtggagccgctgcaccggtaccaggcgacatacggtgtggtcctgcagtccttcctgcagcagcagccgcc

SEQ ID NO: 88834 - DNA, 238 bp, Zea mays
cacagcgaaccgagaaaccaacacaactagcaaagcagcgatccgacatccgagagatggacgcggtgatgttcgggctggagactcccctgatggccgcgctgcagcacctgctggacgtgcccgacggcgacgccggcgcgggcggcgacaacaagacgggcagcggcggcagcgccacgcgcacctacgtccgcgacgcgcgcgccatggcggccaccccggccgacgtgaagga

SEQ ID NO: 88835 - DNA, 246 bp, Zea mays
aaagaagatggtacttatgcacctaaggtgaaaaggaagaagcaagaggagaaagctgctgagaaaaaacgacgagcagaagaggcacagcaagctggccccaatgctgctgctgctcaaagcaatggaactggctatcaagcgtctcgtctgggcaaggcttcgcaggagccacctgctcctccgaacaacatcctcttcatccagaacttgccagaccagaccacgagcatgatgctccagatc

SEQ ID NO: 88836 - DNA, 269 bp, Zea mays
  unsure (1)..(269): unsure at all n locations
aatttccggctcgacgcacgcgtccgattgagaccagcaagcaacatagaaagtttaatcttttagcaacaatagagcaacaatgtcnaccgagatattttccctgcttatgctccttgctctttctacatgtgttgctaacgcgacaattttccctcaatgctcacaagctcctatagctttccttcttcccccataccttccatcaattatagcttcagtatgtgaaaacccagctcttcaaccatataagcttcaacaagcaatct

SEQ ID NO: 88837 - DNA, 246 bp, Zea mays
attgagaccaactagcaacatagaaagcacaatagtgtaccaacaatggcagccaaaatattttgcttccttatgctccttggtctttctgcaagtgctgctaccgcaaccattttcccacaatgctcacaagctcctatagcttcctttcttcccccatacctctcaccagcggtgtcttcagtatgtgaaaacccaattcttcaaccctacaggatccaacaggcaatcgcagcaggcatctta

SEQ ID NO: 88838 - DNA, 238 bp, Zea mays
attgagaccaactagcaacatagaaagtacaatagtgtaccaacaatggcggccaaaatattttgcctccttatgctccttggtctttctgcaagtgctgctacggcgaccattttcccgcaatgctcgcaagctcctatagcttcccttcttcccccgtacctctcaccagcggtgtcttcggtatgtgaaaacccaattcttcaaccctacaggatccaacaggcaatcacagctg

SEQ ID NO: 88839 - DNA, 236 bp, Zea mays
gcgtaacctgctcggctccgacgccagcctcgccgtccacgcgggggagaggctgggaagaaggatagccacggatgctatcaccacgccggtagtgaacacgtcggcctactggttcaacaactcgcaagagctaatcgactttaaggaggggaggcatgctagcttcgagtatgggaggtatgggaacccgaccacggaggcattagagaagaagatgagcgcactggagaaag

SEQ ID NO: 88840 - DNA, 239 bp, Zea mays
gcacaatagtgtaccaacaatggcagccaaaatattttgcttccttatgctccttggtctttctgcaagtgttgctaccgcaaccattttcccacaatgctcacaagctcctatagcttcccttcttcccccatacctctcaccagcggtgtcttcaatgtgtgaaaacccaattgttcaaccctacaggatccaacaggcaatcgcaacaggcatcttaccattatcacccttgttcc

SEQ ID NO: 88841 - DNA, 286 bp, Zea mays
acagcacagagtgaggtaagcatccgtaaaaagctgtgatctgatcgacatggccggcgccaccatggctctcacctcccgcgcgctcgtcggcaagccggcgaccagcaccagggacgtcttcggcgaggggcgcatcaccatgcgcaagactgctggcaagcccaagccagcggcgtccggcagcccctggtacggggccgaccgcgtcctgtacctgggcccgctgtccggccagcccccaagctacctgaccggcgagttccccggcgactacggctgggac

SEQ ID NO: 88842 - DNA, 325 bp, Zea mays
caaggtgtggcgcgtgtccgactcccggtgcctcgagtccgtggtgcgcgcccacggggacgccgtcaacgccgtcgccgccgcgggcttcgacgcgctcgtgctcacgggctccgccgacggcacggtcaaggcgtggcggcggcgcgcggccgagggcaagggccgggccacgcggcacgccatggagcgcgtgctgcgggagggcgaccgagccgataccgccatcatagtgtgagctcaagtcaatgtagtgtacgccggcttacaacacggtgactgggacactgctgtcgttcgccaagtgaatcgcctagcagcacat

SEQ ID NO: 88843 - DNA, 379 bp, Zea mays
  unsure (1)..(379): unsure at all n locations
cactcccacaccaaccaaccaacctcctctgcctgccgcttctcctgctgcgggcggtcacggctgcaagtactagaggaggacatccgcttccattactgcgcctgcggaggatcggaggaaccagtagcggaggcttcgattttcggcgggcgcaataaatttcccgcatggctcggagggccgcgtcctcgctcgtctcccgctgcctcctggcgagggcccctgccggcgcgccgnccgctgccccctctgcgctgcgcangacagtgcctgcagatgggatgcacaggcttgtggccagtgtccttcagaggttcagcactgcagcagcagtagaggagcccatcacgccgtcagtccatgtgaactacacaaa

SEQ ID NO: 88844 - DNA, 246 bp, Zea mays
cccacgcgtccgcaactagcaacatagaaagcacaatagtgtaccaacaatggcagccaaaatattttgcttccttatgctccttggtctttctgcaagtgttgctaccgcaaccattttcccacaatgctcacaagctcctatagcttcccttcttcccccatacctctcaccagcggtgtcttcaatgtgtgaaaccccaattgttcaaccctacaggatccaacaggcaatcgcaacaggcat

SEQ ID NO: 88845 - DNA, 242 bp, Zea mays
gagaccaacaagcaacatagaaagtggaatccagtagcaacaatagagcaacaatggcgaccaagatattttccctccttatgctccttgctctttctacatgtgttgctaacgcgacaattttccctcaatgctcacaagctcctatagcttcccttcttcccccataccttccatcaattatagcttcaatatgtgaaaacccagctcttcaaccatataggcttcaacaagcaatcgca

SEQ ID NO: 88846 - DNA, 272 bp, Zea mays
ggaattcccggctcgacccagcgtccggaccaactagcaacatataaagcacaatattgtaccaacaatggcagccaaaatattgggcttccttatgctccttggtctttctgcaagtgctgctaccgcaaccattttcccacaatgctcacaagctcctatagcttcctttcttcccccatacctctcaccagcggtgtctacagtatgtgaaaacccaattcttcaaccctacaggatccaacaggcaatcgcagcaggcatcttacctt

SEQ ID NO: 88847 - DNA, 238 bp, Zea mays
aacaaatgcgttcattattccacaatgctcacttgctcctagtgccattaggccacagggcctccctccagttacttcaatgggcttcgaacacccagctgtgcaagcctacaggctacaacaagcgcttgcggcgagcgtcttacaacaaccaattgcccaattacaacaacaatccttggcacatctaaccatacaaaccatcgcaacgcaacagcaacaacaatttctaccagca

SEQ ID NO: 88848 - DNA, 272 bp, Zea mays
accggtccggaattcccgggattgagaccagcaagcaacatagaaagtagaatccattagcaacaatagagcaacaatggcgaccaagatattttccctccttatgctccttgctctttctacatgtgttgctaacgcgacaattttccctcaatgctcacaagctcctatagcttcccttcttcccccataccttccatcaattatagcttcagtatgtgaaaacccagctcttcaaccatataggcttcaacaagcaatcgcagcaagca

SEQ ID NO: 88849 - DNA, 421 bp, Zea mays
  unsure (1)..(421): unsure at all n locations
cgtcaagttccactggcgccccaccttcggcgtgcgctcgctgatggacgacgaggccgtcgccgttggcggcgccaaccacagccacgccaccaaggacctcacggacgccatcgcggcggggaacttccccgagtggacgctctacatccagaccatggaccccgagatggaagaccgcctcgacgacctggacccgctggacgtgaccaagacgtggcccgaggacgcgttcccgctgcagcccgtgggccgcctggtgctcaaccgcaacatcgacaacttcttcgcggagaacgagcagctggccttctgcccgggcctcatcgtccccgggatctactactccgacgacaagctgctgcagaccaggatcttctnctacttcgacacgcagcgccaccgnctcggccccaattac

SEQ ID NO: 88850 - DNA, 387 bp, Zea mays
cacgcaccttgccatcctgtcccagacgccggacaccatcaacgggtccatgcgtgtgacggtgcagggcgaggtcatcgagttctgcttcggggaggagcacctgtgcttccagactctgcagcgcttcacggccgccacgctggagcacggcatgcacccgccggtctctcccaagcccgagtggcgcaagctcatggacgagatggcggtcgtggccacggaggagtaccgctccgtcgtcgtcaaggagccgcgcttcgtcgagtacttcagatcggctacaccggagaccgagtacgggaggatgaacatcggcagccggccagccaagaggaggcccggcggcggcatcacgaccctgcgcgccatgccctggatcttctc

SEQ ID NO: 88851 - DNA, 245 bp, Zea mays
caagcaagcatcttacggtcattagcattaaccctccaacaaccatatgctctattgcagcagccatccttagtgcatctgtatctccaaagaatcgcggcacaacaactacaacaacagttgctaccaacaatcaatcaagtagttgcagcgaaccttgctgcttacctccagcaacaacagtttcttccattcaatcaactagctggggtgaaccctgctatctacttgcaggcacaacagct

SEQ ID NO: 88852 - DNA, 237 bp, Zea mays
cggacgcgtggggcggtgtcttcagtatgtgaaaacccaattcttcaacccgacaggagccaacaggcaatcgcagcaggcatcttacctttatcacccttgttcctccaacaaccgtcagccctattacagcagttacctttggtgcatttgttggcacaaaacatcaaggcacaacaactacaacaacttgtgctaggaaaccttgctgcctactctcagcaacagcagtttctt

SEQ ID NO: 88853 - DNA, 287 bp, Zea mays
ggaattcccggctcgacgccacgcgtccgattgagaccaactagcaacatagaatgtacaattttgtaccaacaatggcagccaaagtatggtgcctccttatgctccttggtctttctgcaagtgctgctaccgcgaccatttttccacaatgcttacaagctcctatagcttcccttcttcccctgtacctcttaccagctgtgtcttccttatgtgaaaacccaattcttcaactctataggatcctacaggcaatcgcagctggcatcttacctttatcaccc

SEQ ID NO: 88854 - DNA, 245 bp, Zea mays
cggacgcgtgggtttgcctacttatgcttcttggtctttctgcaagtgctgctacggcgaccattgtccccgcatgctcgcaagctcctatagctttccttcttccaccgtacctctcaccagcggtgtcttcggtatgtgaaaacccaattcttcaaccctacaagatccaacaggcaatcacagctggcatcttacctttatcacccttgttcctccaacaatcatcagccctattacatcag

SEQ ID NO: 88855 - DNA, 245 bp, Zea mays
ctcgatcttccaagtcaccaacgcaaattgcaccaagaaatccatcgagaggccgtcggcaggtgaattaatggcgtcgtcgtctagcagcagccaccgccgcctcatcctcgcagccgccgtcctgctctccgtgctcgcggctgccagcgccagcgccgggacctcctgcgtgccggggtgggccatcccgcacaacccgctcccgagctgccgctggtacgtgaccagccggacctgcggca

SEQ ID NO: 88856 - DNA, 243 bp, Zea mays
  unsure (1)..(243): unsure at all n locations
gcaacatagaaagtggaatccagtagcaacaatagagcaacaatggcgaccaagatatgttccctgcttatgctccttgctctntctacatgtgttgctaacgcgacaatttttcctcaatgctcacaagctcctatagcttcccttctttccccataccttccatcaattatagcttcaatatgtgaaaacccagctcttcaaccatataggcttcaacaagcaatcgcagcaagcaacata

SEQ ID NO: 88857 - DNA, 273 bp, Zea mays
accggtccggaattcccggggaccaactagcaacatagaaagcacaatagtgtaccaacaatggcagccaaaatattttgcctccttatgctccttggtctttctgcaagtgctgctacggcgaccattttcccgcaatgctcgcaagctcctatagcttcccttcttcccccgtacctctcaccagcggtgtcttcggtatgtgaaaacccaattcttcaaccctacaggatccaacaggcaatcacagctggcatcttacctttatcaccc

SEQ ID NO: 88858 - DNA, 231 bp, Zea mays
cccacgcgtccgagccactgtacttgctaacgccccaccagatcagcagagacttatgcttggtgagaacctgtatcctcttgttgaacagctggaacgtgagcaggctgccaaggtcactggcatgcttttggagatggatcagactgaggttcttcacctgctgtagtcgccagatgctctgaaagccaaggttgctgaagccatggatgtcctccgctctgcccagca

SEQ ID NO: 88859 - DNA, 251 bp, Zea mays
tatactcctgttcaacttattctcccacgtagccctctcgtgataccgtctacacgcactagacctctgcaacaattcctgcaacagaccgtaccagcttttactcagaatgtaacactcaaaccctactaactacttgcaacagctgatatcattcatccaatagactgtgacgaactatactgcgtacctacatcaactatactactcatacatgtgactacctctgtctatctctcttttcactttct

SEQ ID NO: 88860 - DNA, 246 bp, Zea mays
acgcaacagcaacaacaatttctaccagcactgagccaactagctgtggtgaaccctgtggcctacttgcaacagcagttgcttgcatccaacccacttgctctggcaaacatagttgcataccaacaacaacaacaattgcaacagtttctaccagcgctcagtcaactagccatggtgaaccctgccgcctacctacaacagcaacaactgatttcatctagccctctcgctgtggttaatgca

SEQ ID NO: 88861 - DNA, 245 bp, Zea mays
gcagccctttggtaatgccttttctccaatcacgtttgatacaaccaagtagctgccaggtattgcagcaacaatgttgtcatgatcttaggcagattgagccacaatacattcaccaagcaatctacaacatggttcaatccataatccaggaggagcaacaacaacaaccatgtgagttatgtggatctcaacaagctactcaaagtgcggtggcaatcttgacagcagcacaatacctacca

SEQ ID NO: 88862 - DNA, 241 bp, Zea mays
cccacgcgtccgcttctagagcaaaaagacctagacaaaacgttcctccacgttcactggaatcatctgttctcacaaaagaaggtgcaaccaaggtcgaaatcgattcagctcaaacacaacaccaaaattcggtcttgcaaggtcaggagcagatgaccttgaggaacaacctgactgaaagcgctgattctgattccactgttcagaagccgatgatgtggtccccatcactcaatgg

SEQ ID NO: 88863 - DNA, 443 bp, Zea mays
  unsure (1)..(443): unsure at all n locations
attttgagcattcagaaacacaccaagtgaagcgcactagcaacgacctaacaacagtggctaccaagatattagccctccttgcgcttcttgccctttttgtgagcgcaacaaatgcgttcattattccacaatgctcacttgctcctagtgccattattccacagttcctcccaccagttacttcaatgggcttcgaacacctagctgtgcaagccaacatgcaacaacaagcgcttgcggcgagcgtcttacaacaaccaattgcccaattgcaacaacaatccttgccacatctaacaatacaagccatcacaacgcaacagcaacaacagttcctaccagcactgagccacctagccatggtgaaccctgccgnctacttgcaagagcagctgcttgcatccaacccacttgctctggcgaacgtagttgcaaaccag

SEQ ID NO: 88864 - DNA, 428 bp, Zea mays
cgcggtctgctcgttcgatctgtgcagcagatctgaggtcccgggcgaccgtgaagcagcttcaatcgtcggcatggcgctcgtattgcatagtggggctggaaacaagaatgccttcaaagcacttattgctgcagaatacagtgggatcaaggttgagttgaccaaggattttgagatgggtgtctccaacaagacccctgagtttcttaagatgaacccccttgggaaggttcctgttctggagactcctgatggccctgtttttgagagtaatgctatcgcacgctatgttgctcgcttgaaagatgacaaccctctttttgggtcttcccgtattgaacaagcccacgttgagcaatggatggattttgccgcaacagaagttgatcctggtgttgcatggtacttgtatccaaggcttgggt

SEQ ID NO: 88865 - DNA, 444 bp, Zea mays
gagcattcagaaacacaccaagcgaagcgcactagcaacgacctaaccaccattggctgaccaaggttttacccctccttgcgcttcttgccttttttgtgagcgcaccaaatgcgttaattattcaacattgctaacttgttcttagggccataattcaacagttcttccaaccagttacttaaatgggcttgaaacactatattgtgcaggccaacatgcaacaacaagcgtttgcggagagcgttttacaacaaccaattgcccaattgcaacaacaatccttgccacatctaacaatacaagccatcacaacgcaacagcaacaacagttcctaccagcactgagccacctagccatggtgaaccctgccgtctacttgcaagagcagctgcttgcatccaacccacttgctctggcgaacgtaattgcaaaccaacaac

SEQ ID NO: 88866 - DNA, 522 bp, Zea mays
agtaggctgtgttgtcctagttctaagatacctccgtactgccgtaccggtctcggaattcccgggtcgacccacgcgttcgattttgagcattcagaaacacaccaagcgaagcgcactagcaacgacctaacaacgggggctaccaagatattagccctacttgcgcttcttgccctttttgtgagcgcaacaaatgcgttcattattccacaatgctcacttgctcctagtgccattattccacagttcctcccaccagttacttcaatgggcttcgaacacctagctgtgcaagccaacatgcaacaacaagcgcttgcggcgagcgtcttacaacaaccaattgcccaattgcaacaacaatccttgccacatctaacaatacaagccatcacaacgcaacagcaacaacaagtcctaccagcactgagccacctagccatggtgaacccttgccgctacttgcaagagcaactgctttcatccaacccaccttgctttggcgaacgtagttgcaaa

SEQ ID NO: 88867 - DNA, 426 bp, Zea mays
gagaccaactagcaacatataacgcacagtagtgtaccaacaatggcagggaaaaggtgttgcctacttatgctccttggtctttgtgcaagtgctgctacggcaaccattttcctgcaatgctcgcaagctcctatagcttcccttcttccgccgtacctctcaccagcggcgtcttcggtatgtgaaaacccaattcttcaaccctacaggatccaacaggcaatcacagctggcatcttacctttatcacacttgttcctccaacagtcatcagccctattacatcagttacctttggtgcatttattggcacacaacatcagggcacaacaactacaacaacttgtgctagcaaaccttgctgcctactgtcagcaacagcagttgcttccattcaaccaactagctgcattgaactctgat

SEQ ID NO: 88868 - DNA, 423 bp, Zea mays
ctcagagaacctttgtctacatcaaggatgccatcgaagctgtagtgctgatgataggaaatcctgctcgagccaatggccacatcttcaatgttgggaatccgaacaatgaagttaccgttagggagttggcccaaatgatgacagaggtctacgcaaatgtctcaagagaggcaccgctggatgagcccatgattgacgtgagctcgagtcagttctacggcgaaagatacgatgatagcgacaagaggatccccgacatgactataatcaacaagcagctaggttggaacccatagacgcctgtcaaggatctgctggagacaacgctgacgtatcagcacaagacatacaaagaagctgtgaaaaggcaaatgtcgcatgcttcagcgtcgacttagatagcgtgcccctggctctcgt

SEQ ID NO: 88869 - DNA, 440 bp, Zea mays
gtggggaccgaggccgtcgcgatactcgtcagcggggtgctgcttgacgctgacacgaaggccgcgctcatgcagccggcgaaggtgtcgctcgtggtcgacatgctcaacgagggcgccgcggacaccaagatcaactgtgtccgcctcatccgcatcctcatggtcgagaggggtttccggccggagacggtggcgagcctcagcctcttggtcggcgtcatgcgcctcatccgggacaagcggcatccggacggtgtggccgcggggctcgagctgctgaattcgatctgcgcggtgcacaggccagcgaggtgtatgattgttagcatcggtgcggtgccgcagctggcggaattgctgccggagctagcgacagagtgtgtcgagccggctttggacatcttggatgccctggctgcgggtccagaggggaggat

SEQ ID NO: 88870 - DNA, 439 bp, Zea mays
gtggaatccagtagcaacaatagagcaacaatggcgaccaagatattttccctcctggtgctccttgctctttctacatgtgttgctaacgcgacaattttccctcaatgctcacaagctcctatagcttcccttcttcccccataccttccatcaattatagcttcaatatgtgaaaacccagctcttcaaccatataggcttcaacaagcaatcgcagcaagcaacatacctttatcgcccttgttgtttcaacaatcgccagccctatctttggtgcagtcattggtacaaaccatcagggcacaacagctgcagcaactcgtgctacctctgatcaaccaagtagctctggcaaacctttctccctactctcagcaacaacaatttcttccattcaaccaactgtctacactgaaccctgctgcttatttgcagc

SEQ ID NO: 88871 - DNA, 438 bp, Zea mays
gtgaaaccccaattgttcaaccctacaggatccaacaggcaatcgcaacaggcatcgtaccattatcacccttgttcctccaacaaccgtcagccctattacagcagttacctttggtccatttggtggcacaaaacatcagggcacaacaactacaacaacttgtgctagcaaaccttgctgcatactctcagcaacatcagtttcttccattcaaccaactggctgcattgaactctgctgcttatttgcaacaacaattaccattcagccagctagttgctgcctacccccagcaatttcttccattcaaccaactagcagcattgaactctgctgcttatttacagcagcaacaactactaccattcagccagctagctgatgtgagccctgctgccttcttgacacaacaacagttgttgccgttctacctgc

SEQ ID NO: 88872 - DNA, 144 bp, Zea mays
acccgatcgacaccatgagggtgttgctcgatgccctagctctcctggctgtagctgggagcgccacctccacgcatacaagcggcggctgcggctgccagccaccgacgccggatcatctaccgccgtcggtgcatctgccac

SEQ ID NO: 88873 - DNA, 369 bp, Zea mays
accggtctcggattcccggtcgacgcacgcgtccgcagctagcaacataaaagttcatttttcaaccaacaatgacagctaagaggtttggattacttatgatccttggtcgaattgcaagtactgttacctgaaccattttcccacaatgctcacatgctcctataccttcctatcttaccctatatcaatcaacagcagagtattcagaatgtgaaaacccaattacttaaaccctaccagatccaacacgcaataacaatacgcatcttacctatatcacgcttgttaatgcaacaaccgataaacctattacaactattacctttggtgcattaattgacacaaaacattaaggcacaacaacta

SEQ ID NO: 88874 - DNA, 457 bp, Zea mays
  unsure (1)..(457): unsure at all n locations
accggtctcggaattcccggctcgacgcactcgttcgcccacgcctcccgtcttatttcccttcatgtcgagaggtatttctggaccatggttaacgagcctaacttcaagaaggtgattggtgaggtcaatcaggcagagtctgcacctcctattccgaaaaaggctgctcctcctaaggagccaaaggcaaaggatgtcaagaaggaggctccaaaggaggcccccaagccaaaggtggttgaggcaccagcagaagaggaagcaccaaatccaaagccaaagaatcctcttgacttgctgccaccaagcaagatggtccttgatgactggaagaggctatactcaaacacaaagactaacttccgggaggttgccatcaaaggtttctgggacatgtacgacccantaggctactctttgtggttctgtgactactagtacaatgatgagaaca

SEQ ID NO: 88875 - DNA, 425 bp, Zea mays
cccacgcgtccggccctattacatcagttacctttggtgcatttattggcacaaaacagcagggcacaacaactacaacaacttgtgctagcaaaccttgctgcctactctcagcaacagcagtttcttccattcaaccaactagctgcattgaactctgcttcttatttgcaacaacaacaactaccattcagccagctacctgctgcctacccccagcaatttcttccattcaaccaactggcagcattgaactctcctgcttatttacagcagcaacaactactaccattcagccagctagctggtgtgagccctgctaccttcttgatacaaccacagttgttgccgttctaccagcacgctgcgcctaacgctggcaccctcttacaactgcaacaattgctgccattcaaccaacttgg

SEQ ID NO: 88876 - DNA, 480 bp, Zea mays
accgcccggaattcccgggtcgaccaacgcgtccggcaacatagaaagcacaatagtgtaccaacaatggcagccaaaatattttgcttcctgatgctccttggtctttctgcaagtgctgctaccgcaaccattttcccacaatgctcacaagctcctatagcttcctttcttcccccatacctctcaccagcggtgtcttcagtatgtgaaaacccaattcttcaaccctacaggatccaacaggcaatcgcagcaggcatcttacctttatcacccttgttcctccaacaaccgtcagccctattacagcagttacctttggtgcatttgttggcacaaaacatcaaggcacaacaactacaacaacttgtgctaggaaaccttgctgcctactctcagcaacagcagtttcttccattcaaccaactggctgcattgaactctgctgcttatttgcaacaacaactaccattcagt

SEQ ID NO: 88877 - DNA, 438 bp, Zea mays
gcaacatagaaagcacaatactatactttacaatgtccagccaaaatatattgcttccgtatgctgcttactctttatgcaagtgctgctaccgcaaccattttcccacaatgctcacaagctcctatagcttcctttcttaccccatacctctcaccagctcagtcttcagtatgtgaaaacccaattcttcaaccctacaggatccaacaggcaatcgcagcaggcatattacctttatcacccttgatcctacaacaaccgtcagccctattacagcaactacctttagtgcatttgttggcacataacattaaggcacaacaactacaacaacttgtgctaggaaaccttgctgtctactctcaacaacagcagattttttcattcaaccaactggctgcattgaactctgctacttatgttgaacaacaacta

SEQ ID NO: 88878 - DNA, 442 bp, Zea mays
attgagaccaactagcaacatagaaagcacaatagtgtaccaacaatggcagctaaagtatttggcctccttatgctccttggtctttctgcaagtgctgctacggcgaccattttcccacaatgctcacaagctcctatagcttcccttcttcccccgtacctctcaccaacggtgtcttcggtatgtgaaaacccaattcttcaaccctacaggatccaacaggcaatcgcagctggcatcttacctttatcacccttgttcctccaacaatcatcagccctattacagcagttacctttggtgcatttattggcacaaaacatcagggcacaacaactacaacaacttgtgctagcaaaccttgctgcctactctcagcaacagcagtttcttccattcaaccaactagctgcattgaactctgcttcttatttgcaac

SEQ ID NO: 88879 - DNA, 299 bp, Zea mays
caaacaatgaacgtgcagcagcccgctgatgttgccggacccagcgagggggtgggggcgatctccaaaggggggaaggtagggccgaaccggtgcagcgcctgcaggaagagggttggacttacgggattcaactgccggtgtgggaacttgtactgcgcactccaccgctactccgacaagcacgactgcaagttcgactaccggactgctgccagggacgccattgccaaagctaatccgctggtgaatgcagacaagctcgacaagatctagggggggtttcctacggttgggta

SEQ ID NO: 88880 - DNA, 350 bp, Zea mays
  unsure (1)..(350): unsure at all n locations
cgcgctgagaagagatggctaagatcgccgcggcggcggcggcggcgctgtgcttggcggccctggtggccgtggccgtctgccaaggcgaggtcgagcggcagaggctcagggacctgcagtgctggcaggaggtccaggagagcccgctcgacgcgtgccgccaggtcctcgaccggcagctaaccggcggcggcggcggcggcggcgttggcccgttccggtggggcaccgggctccggatgcggtgctgccagcagctccaggacgtgagccgcgagtgccgctgcgccgncatccggagcatggtcaggggatacgaggaggccatgccgncgctggagaaaggc

SEQ ID NO: 88881 - DNA, 433 bp, Zea mays
gaccaactagcaacatagatagcacaatagtgtaccaacaatggcagccaaaatatgttgcttccttatgctccttggtctttctgcaagtgttgctaccgcaaccattttcccacaatgctcacaagctcctatagcttcccttcttcccccatacctctcaccagcggtgtcttcaatgtgtgaaaccccaattgttcaaccctacaggatccaacaggcaatcgcaacaggcatcttaccattatcacccttgttcctccaacaaccgtcagccctattacagcagttacctttggtccatttgttggcacaaaacatcagggcacaacaactacaacaacttgtgctagccaaccctgctgcatactttcagcaacatcagtttcttccattcaaccaactggctgcattgaactctgctgcttatttg

SEQ ID NO: 88882 - DNA, 371 bp, Zea mays
cgttcggtgagaacccaattgttcaaccctacatgatccaacaggcgatcgcaacatgcatattgccattatcacccgtgtgcgtgggacaaccgtcagccctattacagcagttacctttggtccatttggtggcacaaaacatcagggcacaacaactactacatcttgtgctagcaaaccttgctgcatactctcagcaacatcagtttcttccattcaaccaactggctgcattgaactctgctgcttatttgcaacaacaattaccattcagccaactagttgctgcctacccccagcgattggggtgctttcaaccaacttgcaacatttgactctgctggttatttacagggagcaacaacttc

SEQ ID NO: 88883 - DNA, 334 bp, Zea mays
  unsure (1)..(334): unsure at all n locations
cgcccttgttgtttcaacaaagaccatccctaactttggtgcagtcattggtacaaaccatcanggcacaacagctgcagcaactcgtgctacctgtgatcaaccaagtagctctggcaaacctttctccctactctcagcaacaacaatttcttccattcaaccaactgtctacactgaaccctgctgcttatttgcagcaacaactattaccatttagccagctagctactgcctactctcatcaacaacaacttcttccatttaaccaattggccgcactgaaccccgctgcttatttgcagcaacaaatactactgccatttatcgaact

SEQ ID NO: 88884 - DNA, 258 bp, Zea mays
ctctttctacatgtgttgctaacgctacaattttccctcaatgctcacaagctcctatatcttcccttcttcccccataccttccatcaattatagcttcaatatgtgaaaaccctactcttcaaccatatatgcttcaacaatcaatcgcaacaagcaacatacctttatcaccctttttttttcaacaatcaccatccctatctttttttcattcattaggtcaatccatcattgcatctcatcttcatcatcttt

SEQ ID NO: 88885 - DNA, 199 bp, Zea mays
ccggttctcggaattcccggctgcgacgccacgtcgtctcggcgaagatgcaagcatagaagatggactgacatagttgcggcgccacgagatgcctgtgcggactcgcgtcggctgtcgcggcgtaggctggaccctgataatagctgcttcccgagccggcatcggtgattcctggttccatgttcctagatgcccg

SEQ ID NO: 88886 - DNA, 437 bp, Zea mays
cgacgcggaaggcctggaaaaaatcgagaacctacagagccatgataataatgaaatgctatgagaaggctgtgaagcttcttgagacttactggatggaggaggaagatgatgcaatggctactgctggggaagctgctcctgctgtttttgactttagccaaggtggcaaccctcctggtggtggtttgaacctcaactgaatacagtatttgaccaaaagggtgttaattccctcatgacaacctagtctggtcgattccatgtgggataatggtttgtggttggtccagtaaattcgagatttcaagggagatgggttagcattattcccaagctgtcatggatatcagtatcgcagggtctgtaacaggaccataatcgtcgaacatgagtctgggtttttgagcaggctactctctagggtttgcgtcatt

SEQ ID NO: 88887 - DNA, 441 bp, Zea mays
gcccgaaccagcgctcgggatcaacttcgccagggacggcatgaggcgtcgcgactggctctcgctcgtcgccgtacactctgacgcttggctcgtctccgtcgcattcttcttcgccgccaaactcaacggcaacgacaggaagcgattattcaacatgattaatgatcatccatctgtgtatgaaataatggctgaccggaagggaagggagaataatcctggtgttgataacagcagcaaatccaggcactcaacgaagcgatcaaatgatggaaagataaagaactcaagagtggcagttggtgaatgtaggtatgagaatgatgaagaccacagcgaaaccctttgtggttcttgcagtggtctctacaactcaagtgagttctggattggatgcgacatttgtgagcggtggttccacggcaaatgtgtgaggat

SEQ ID NO: 88888 - DNA, 439 bp, Zea mays
aattactgataagaaagaaattgagggtttacctgctacagcccttggtttagcagggcagactgctgtgtcaaagggccatgaaaatgctacagctgaaaatggaccttgggttatcacgttggatgcaccaagctatattcctgttatgcaacatgctcgaaacagagagctccgcgaagaagtttatcatgcttatctgacccgcgcctcaagcagtgaacttgataacaccaacatcatctgccaaattctaaagttaaggctagagaaggctaaacttcttggctacaagaactatgctgaggtaagcatggctcagaaaatggcaactgttgagcgagtagaagagcttctcgagaagctgcgtgctgcttcctgggatcatgctgtcaaagatatggaagatctaaaagtctttgcgaaagattctggttct

SEQ ID NO: 88889 - DNA, 431 bp, Zea mays
gctcacaagctcctatagcttcccttcttcccccgtacctctcaccagcggtgtctgcggtatgtgaaaacccaattgttcaaccctacaggatccaacaggcaatcgcagctggcatcttacctttatcacccttgttcctccaacaatcatcagccctattacagcagttacctttggtgcatatattggcacaaaacatcagggcacaacaactacaacaacttgtgctagcaaaccttgctgcctactctcagcaacagcagtttcttccattcaaccaactagctgcattgaactctgcttcttatttgccacaacaacaactaccaattcaccagctacctgttgcctacccccaacaatttcttccattcaaccaactggcagcattgaactcttctgcttatttacagcagcaacaactacta

SEQ ID NO: 88890 - DNA, 387 bp, Zea mays
  unsure (1)..(387): unsure at all n locations
cggaattcccgggtggaggcactcgtccgatgtaaggcaaatttttactccgtatgtganaaatttcctatgtgaagaatcctgtatgcaaacattgaagatttgttgagtttaccagcaggtcatgtgcagatgaagccatccgaatgctgaatgggagtcaagttggtgggcagaaagttcggctttcatggggccgtagtcctcaaaacagacaggcttctcagcatgatgccaacaaccagtataatgggaacagctattatggataccaacagccgggttatgaaggttatggctatggtgcttccagtgcacaagacccaatcatgcaaaactactacggatactctggttgtggtaactatgagcagcagcatccaacac

SEQ ID NO: 88891 - DNA, 495 bp, Zea mays
  unsure (1)..(495): unsure at all n locations
tagatgtgtatggtatcgacatacagttatntctaccggtccggaattcccggctcgacccactcgtccggtggaatccagtagcaacaacagagcatcaatggcgaccaagatattttccctccttagtctccttgctctttctgcatgtgttgctaacgcgacaattttccctcaatgctcacaagctcctatagcttcccttcttcccccataccttccatcaatgatagcttcagtatgtgaaaacccagctcttcagccctataggctccaacaagcaatcgcagcaagcaacatacctttatcacccttgttgtttcaacaatcgccagccctatctttggtgcagtcattggtacaaaccatcagggcacagcagctgcagcaactcgtgctacctgtgatcaaccaagtagctctggcaaacctttctccctactctcagcaacaacaatttcttccattcaaccaactgtctacactgaaccctgc

SEQ ID NO: 88892 - DNA, 449 bp, Zea mays
ccggttcggaattcccggcgcgagccactcgtccgcagcaacaatccttggcacatctaacttctcaaaccatcgcaacgcaacagcttcatagatttctaccagcgctgaggcgactagctgtggtgaaccctgtcgcctacttgcaacagcagttgcttgcatccaacccacttgctctggcaaacatagttgcataccaacaacaacaacaattgcaacagtttctaccatcgctcagtcaactagccatggtgaaccctgccggctacctacaacagcatcaactgatttcatctagccctctcgctgtggttaatgcacctacatacctgcagcaacaattgctgcaacagattgtaccagctctgactcacctagctgtggcaaaccctgctggctacttgcaacaactgcttccattcaaccaactgactgtgtcgaactct

SEQ ID NO: 88893 - DNA, 423 bp, Zea mays
aacacaccaagcgaagcgcactagcaactacctaacaccaatggctaccaagatattaggcctccttgcgcttcttgcccttttagtgagcgcaacaaatgcgttcattattccacagtgctcacttgctcctagtgccattattccacagttcctcccaccagttacttcaatgggcttcgaacatccagccgtgcaagcctacaggctacaactagcgcttgcggcgagcgccttacaacaaccaattgcccaattgcaacaacaatccttggcacatctaaccctacaaaccattgcaacgcatcatcaacaacaacaacagtttctgccatcactgagccacctagccgtggtgaaccctgtcacctacttgcaacagcagctgcttgcatccaacccacttgctctggcgaacgtagc

SEQ ID NO: 88894 - DNA, 438 bp, Zea mays
aagcaacatagaaagtggaatccagtatcaacaatagagcaacaatggcgaccaagagattttgcctccttatgctccttgctctttctacatgtgttgctaacgcgacaattttccctcaatgctcacaagctcctatagcttcccttcttcccccataccttccatcaattatagcttcaatatgtgaaaacccagctcttcaaccatataggcttcaacaagcaatcgcagcaagcaacatacctttatcgcccttgttgtttcaacaatcgccagccctatctttggtgcagtcattggtacaaaccatcagggcacaacagctgcagcaactcgtgctacctctgatcaaccaagtagctctggcaaacctttctccctactctcagcaacaacaatttcttccattcaaccaactgtctacactgaaccctg

SEQ ID NO: 88895 - DNA, 512 bp, Zea mays
accgcctccggaattcccgggtgcgactccacgcccgtccgacatgaaaacagccactaatgagtagtcactcatacgaatagtgcgagctcataatgtatgtattgcactgcctctatggcgtcctatggtactattctagcatagtgcatgctacctgcgaccattttgaccgcaatgctcgcaagctcctatagctacccttcttcccgcgtacctctcaccagcggtgtcttcaggatgagaaaacccaaatcttcaaccctacaggatccaacatgcaatcgcagctggcatcttacctttatcacccttgctcctacaacaatcatcacccctattacaacagttacctttggtgcatttataggcacagaacatcagggcacaacatctacaacaacttgtgctagcaaacctcgctgcctactctcagcaacagcagtttcttccattcaaccaactaggttcattgaactctgctacttattcgcaacaacaacaactaccat

SEQ ID NO: 88896 - DNA, 195 bp, Zea mays
cggctgcttttagtggcggttcagattcatgctatgatgaattagtcaaacatacggatccccgtgacgttagatcaggaatggctaatgatgcataccttggtccagtgatcaacccacaggcataggatcgtatctgtaaattacttcaaagtggtgttaacagtgatgctcgtatattgcttgatggaagaa

SEQ ID NO: 88897 - DNA, 384 bp, Zea mays
cccgtacctctcaccagcggtgtcttctgtatgtgcaaacccaattcttggaccctggaggatccaacaggcaagcgcagctggcatcttacctttatcacccatgttcctccaacaattatcatccttattacaacagtcacctttggtgcatctattggcacaaaacatcatggcacatcaactaccacaacttgtactagcataccttgctgcctactatcagcatcagcagcatatttcattcaaccaactaggttcattgaactctggttcttatttgcaacaactgcaactaccattcaatcagctacctgcttgcctacgcttagcaatctactccattcaaccaactagcatcattcaactcttttgcttatttac

SEQ ID NO: 88898 - DNA, 424 bp, Zea mays
gtgaggttctccggggttcggtttcgtgggtgagcggatcgagatggcggcgtcggaggttgagtaccgctgcttcgtcggcggcctcgcctgggccacggacgaccactccctccacaacgccttcagcacctacggcgaggtcctcgagtccaagatcatcctcgatcgggagacgcagaggtcccgcggcttcggcttcgtcaccttctccacggaggaggcgatgcggaacgccatcgagggcatgaacggcaaggagctggacggccgcaacatcaccgtcaacgaggcccagtcccgcggcggccgtggaggcggcggcggcggcgggtacggtggtggccgtggaggcggcggctacggcggtggcgggcgccgtgatggcggcggcggctacggcggtggcggcggctacggtggt

SEQ ID NO: 88899 - DNA, 293 bp, Zea mays
aataagtaccaacaatgtcaagcgaaatattttgcttcttatgcttcttggtctatcttcaagtgttgctaccgaaaccattttaccacaatgctcacaagctcctatagcttaccgtttttccccatacctgtcaccaacagtgactatcaatgtgtgaaaccccaattgttcaaccctacatgatccaacacgcaatctcaacatgcatttaaccattatcactcttgtgtctttaacaaccatcaaacctattacagtagttacccttttattcatttttttggacaaaa

SEQ ID NO: 88900 - DNA, 376 bp, Zea mays
aacatacctttatcaacctttttacaacaatcgccagccctatctcttagtcaattcttaatgcaaaccagcataccacagcagctgcatcaactcgttctacctctgatcaaccaaataactatcccaaacctttctccctactatcatcaacaacaatttcttccattcaacctactatctacactaaaccctactccttattttcatcatcaactattaccattcatcctactatctactgcctactcttatcaacaacatcttcttccatttaaccaattatccatactaaacctcgctacttattttcaacatcatatattactaccatttatccttctatcttcatcaaatccttccttcttcttgactc

SEQ ID NO: 88901 - DNA, 226 bp, Zea mays
cagcattcaaaaacacaccaagcgaatcgcactatcaacgacctaacaccaatggctgccaagatattagccctccttgcgcttcttgcccttttagtgagcgcaacaaatgcgttcattattccacagtgctcacttgctcctagtgccagtatttcacagttccttccaccagttacttcaatgggcttcgaacattcagccgtgcaagcctacaggctacaac

SEQ ID NO: 88902 - DNA, 421 bp, Zea mays
attcagaaacacaccaagcgaagcgcactagcaacgacctaacaacaatggctaccgggatattagccctccttgcgcttcttgccctttttgtgagcgcaacaaatgcgttcattattccacaatgctcacttgctcctagtgccattattccacagttcctcccaccagttacttcaatgggcttcgaacacctagctgtgcaagccaacatgcaacaacaagcgcttgcggcgagcgtcttacaacaaccaattgcccaattgcaacaacaatccttgccacatctaacaatacaagccatcacaacgcaacagcaacaacagttcctaccagcactgagccacctagccatggtgaaccctgccgcctacttgcaagagcaactgcttgcatccaacccacttgctctggcgaacgt

SEQ ID NO: 88903 - DNA, 177 bp, Zea mays
ccggtccggattgccggacacccgctcgttcaagatcgcctacgtgccgaacggcaaggtctacgccgagatcgtgtgcccagaccgtcagtcgcagggcggcgagagcgagcgcgagcccgacaaggccatgaggagcgaacaagaagaagaagaatcgtctgaggagcagaagga

SEQ ID NO: 88904 - DNA, 438 bp, Zea mays
  unsure (1)..(438): unsure at all n locations
attttgagcattcagaaacacaccaagcgaagcacattagcaacaacctggcaacaggggctaccaagatattatccctccttgcgcttcttgcgctttttgcgagcgcaacaaatgcgttcattattccacaatgctcacttgctccaagttccattattacacagttcctcccaccagttacttcaatgggcttcgaacacccagctgtgcaagcctataggctacaacaagcaattgcggcgagcgtcttacaacaaccaatttcccagttgcaacaacaatccttggcacatctaacaatacaaaccatcgcaacgcaacagcaacaacaattcctaccagcactgagccacctagccatggtgaaccctgccggctacttgcaacagcagttgcttgcatcaaacccacttgctctggcanacgtagttgcaa

SEQ ID NO: 88905 - DNA, 428 bp, Zea mays
  unsure (1)..(428): unsure at all n locations
gcagcagccaccgccgcctcatcctcgcagccgccgtcctgctctccgtgctcgcggctgccagcgccagcgccgggacctcctgcgtgccggggtgggccatcccgcacaacccgctcccgagctgccgctggtacgtgaccagccggacctgcggcatcgggccgcgcctcccgtggccggagctgaagaggagatgctgccgggagctggcggacatcccggcgtactgccggtgcacggcgctgagcatcctcatggacggcgcgatcccgccgggcccggacgcgcagctggagggccgcctagaggacctgccgggctgcccgcgggaggtgcagaggggattcgccgncaccctcgtcacggaggccgagtgcaacctggccaccatcagcggcgtcgccgaatgcccctggattctcggc

SEQ ID NO: 88906 - DNA, 496 bp, Zea mays
tagtgtttagtgaaacgacataaaggaaatctctaccggtccggaattcccgggtcgacccacgcgttcgcgggccccttggtccaaaccaacttggctctatcaaaacgtagttgcaaaaccaacaacaacggcaactgcaacagtttctgccagcgcttagtcaactagccatggtgaaccctgccgcctacctacaacagcaacaactgctttcatctagcccgctcgctgtggccaatgcacctacatacctgcaacaagaattgttgcaacagattgtaccagctctaactcagctagctgtggcaaaccctgttgcctacttgcaacagctgcttccattcaaccaactaactatgtcgaactctgttgcgtacctacaacagcgacaacagttacttaatccattggcagtggctaacccattggtcgctgccttcctacagcagcaacaattgctgccatacaaccggttctctttgatgaatcctgt

SEQ ID NO: 88907 - DNA, 458 bp, Zea mays
accgttcggaattcccggctcgacccactcgtccgcagctagcaacatagaaagcacaatagtttaccaacaatggcagccaaaatattttgccggcttatgctccttggtctgtctgcaagtgctgctacggcgaccattttcccacaatgctcacaagctcctatagcttcccttcttcccccgtacctctcaccagcggtgtcttcggtatgtgaaaacccaattcttcaaccctataggatccaacaggcaatcgcagctggcatcttacctttatcacccttgttcctccaacaatcatcagccctattacagcagttacctttggtgcatttattggcacaaaacatcagggcacaacaactacaacaacttgtgctagcaaaccttgctgcctactctcagcaacaacagtttcttccattcaaccaactagctgcattgaactctgcttc

SEQ ID NO: 88908 - DNA, 443 bp, Zea mays
  unsure (1)..(443): unsure at all n locations
cccacgcgtccgtgagaccagcaagcaacatagaaagtagaatccattagcaacaatagagcagcaatggcgaccaagatattttccctccttatgctccttgctctttctacatgtgttgctaacgcgacaattttccctcaatgctcacaagctcctatagcttcccttcttcccccataccttccatcaattatagcttcagtatgtgaaaacccagctcttcaaccatataggcttcaacaagcaatcgcagcaagcaacatacctttatcgcccttgttgtttcaacaatcaccagccctatctttggtgcagtcattggtacaaaccatcagggcacaacagctgcagcaactcgtgctacctgtgatcaaccaagtagctctggcaaacctttcntcctactctcagcaacaacaatttcttccattcaaccaact

SEQ ID NO: 88909 - DNA, 435 bp, Zea mays
  unsure (1)..(435): unsure at all n locations
cagcaagcaacatagaaagtggaatacagtagcaacaatagagcaacaatggcggccgggatatgttccatccttatgctccttgctctttctgcatgtgttgctaacgcgaccatttttcctcaatactcacaagctcctatagctgcccttcttcccccataccttccatcaatgaccgcttcagtttgtgaaaacccagcccttcaaccctacaggctccaacaagcaatcgcaacaagcaacttacctttatcacccctgttctttcaacaatcgccagccctatctttggtgcagtcattggtacaaaccatcagggcacaacagctgcaacaactcgtgctaccagtgatcagccaagtagctctggcaaacctttctccctactctcagcnacaacaatttcttccattcaaccaactgtctacactg

SEQ ID NO: 88910 - DNA, 416 bp, Zea mays
agagagtatcgtcagctagcagagagagtgcgtagcaactagcaatggcggagaacgctgctcggagttccccgctagtgacttctcccgacgccgctgcgccgcctctgccagcggagttcaccaagctcaccttccgtagcctgtacatccgtcggacaggtccaggcagccgggagatgactgtggacgggaggccgtctgaccagctgggacgacggttcgtgagcgactttcccatatacgatggccgtggctccggcgcccacctcgtcgctcgcttgcagggagtcactgtccaaatcggcagctcgcaccagctagtcagcatcgtcttcgaggccgagaggcttaagggcttcacgctgctcaccaacggagtgataacggatgggtcagacgagtgggccatctac

SEQ ID NO: 88911 - DNA, 403 bp, Zea mays
gcctggcaatctcaaggttgcgtattttgtgaattctgggaccgaagcgaatgagtgggcaatgttgatggcccggctgtatagtgggaatctcagtatggttgcgctcagaaatgcatatcatggcggaagtgccggtacgattggattgactggtatgcagacgtggaaatacccaattcctcagggtgaaatacatcatgtcatgaaccctgatccttatcgggggactttcgggtctgatgctgcagcttatgctaaggaagtcgaagaacacataacttatggaagttcaggaagggttgcaggcttcattgcagaaacattccaaggtgtgggaggtgctgatgaactagctcctggatacctaaagttagcttatgacattgtgcgcaaggctggt

SEQ ID NO: 88912 - DNA, 357 bp, Zea mays
cccacgcgtccgattattgagaccaactagcaacatagaaagcacaatagggtaccggcaatggcagccaaaatattgtgcctccttatgctccttggtctttctgcaagtgctgctactgcgaccattttcccgcaatgctcacaagctcctatagcttaccttcttcccccgtacctgtcaccagcggtgtcttcggtatgtgaaaacccaattcttcaaccctacaggatccaacaggcaatcacagctggcatcttacctttatcacccttgttcctgcaacaatcatcagccctattacatcagttacctttggtgcatatattggcacaaaacatcatggcacaacaacta

SEQ ID NO: 88913 - DNA, 462 bp, Zea mays
  unsure (1)..(462): unsure at all n locations
taccgtccggattcccggtcgacnacgcgtccgcactagcaacatagaaagcacaatattgtaccaacaatggcagccaaagtattttggctccatatgctgcttggtctttctgcaagtgcttctacggcgaccatttatccacaatgcttacaagctcctatagcttgccttctttcgccgtacctatcaccagcggtgtcttcggtatgtgaaaacccaattcttcaatcctatagtatccaacaggcaatcgcatctggcatcttacctttatcacacatgttccttcaacaatcatcagccctattacagcatttacctttgcatgcattcattgccacaaaacatcagggcacatcaactacaacaacttgtgctagcaaaccttgctgtctactctcagcaacaacatactctttcattcaaccaactagctgcattgaactctgcttattattt

SEQ ID NO: 88914 - DNA, 428 bp, Zea mays
gcgtccgattgagacccacttgccaccttaaaaggcccattatggtcccaccattgccagccaaaggattttgcttccttatcctccttggtctttctgcaagtgctgctaccgcaaccattttcccacaatgctcacaagctcctatagcttcctttcttcccccatacctctcaccagcggtgtcttcagtatgtgaaaacccaattcttcaaccctacaggatccaacaggcaatcgcagcaggcatcttacctttatcacccttgttcctccaacaaccgtcagccctattacagcagttacctttggtgcatttgttggcacaaaacatcaaggcacaacaactacaacaacttgtgctaggaaaccttgctgcctactctcagcaacagcagtttcttccattcaaccaactggctgcattg

SEQ ID NO: 88915 - DNA, 390 bp, Zea mays
ccctcgctctcctggctctcgctgcgagcgccacctccacgcatacaagcggcggctgcggctgccagccaccgccgccggttcatctaccgccgccggtgcatctgccacctccggttcacctgccacctccggtgcatctcccaccgccggtccacctgccgccgccggtccacctgccaccgccggtccatgtgccgccgccggttcatctgccgccgccaccatgccactaccctactcaaccgccccggcctcagcctcatccccagccacacccatgcccgtgccaacagccgcatccaagcccgtgccagctgcagggaacctgcggcgttggcagcaccccgatcctgggccagtgcgtcgagttcctgaggcatcagtgca

SEQ ID NO: 88916 - DNA, 429 bp, Zea mays
gcaacatagaaagtggaatccagtagcaacaacagagcaacaatggcgaccaagatggtttccgtccttatgctccttgctctttctgcatgtgttgctaacgcgacaattttccctcaatgctcacaagctcctatagcttcccttcttcccccataccttccatcaatgatagcttcagtatgtgaaaacccagctcttcagccctataggctccaacaagcaatcgcagcaagcaacatacctttatcacccttgttgtttcaacaatcgccagccctatctttggtgcagtcattggtacaaaccatcagggcacagcagctgcagcaactcgtgctacctgtgatcaaccaagtagctctggcaaacctttctccctactctcagcaacaacaatttcttccattcaaccaactgtctacactg

SEQ ID NO: 88917 - DNA, 446 bp, Zea mays
ggctgcattgaactctgctgcttatttgcaacaacaattaccattcagccagctaggtgctgggtacccccagcaatttcttccattcaaccaactagcagcattgaactctgctgcttatttacagcagcaacaactactaccattcagccagctagctgatgtgagccctgctgccttcttgacacaacaacagttgttgccgttctacctgcacgctatgcctaacgctggcaccctcttacaactgcaacaattgctgccattcaaccaacttgctttgacaaactcaacagtgttctaccaacaacccatcattggtggtgccctcttttagattgcttatgagttatagttcaataatgaagttttttggatgatgtttgtggcgtcccagaaataagaaagtacatttctagattcaaaagaaaaaaaaaaagggcggc

SEQ ID NO: 88918 - DNA, 445 bp, Zea mays
  unsure (1)..(445): unsure at all n locations
tgagcattcagaaacacacctagcgaagcgcactagcaacgacctaacaacaatggcttccaagacattatccctccttgcgcttcttgccctttttgtgagtgcaacaaatgcgttcattattccacaatgctcacttgctccgagtgccattattccacagttcctccctccagttacttcaatgggcttcgaacacccagctgtgcaagcctataggctacaacaagcgcttgcggcgagcgtcttagaacaaccaattgcccaattacaacaacaatccttggcacatctaaccatacaaaccatcgcaacgcagcagcaacaagcactgagccacctagccgtggtgaaccctatcgnctacttgcaacaacagctgcttgcatccaacccacttgctttggcaaacgtagctgcataccaacaacaacaacagttgcaa

SEQ ID NO: 88919 - DNA, 394 bp, Zea mays
aaacaagtagcgacagctcgacaaagatttgtgagagtgatccggcgctgggaagaggtggctaacatcgtcgcagccgccgcggcggcggcggcgctgtgcttcgcggccctggtggccgtggccgtctgccaaggcgaggtcgagcggcagaggctcagggacctgcagtgctggcaggaggtccaggagagcccgctcgacgcgtgccgccaggtcctcgaccggcagctaaccggcggccgcgtcggcggcccgatccggcggggcaccgggctccggatgcggtgctgccagcagctccaggacgtgagccgtgagtgccgctgcgccggcatccggagcatggtcaacggctacgaggaggccatgccgcctctggagaaaggctggt

SEQ ID NO: 88920 - DNA, 439 bp, Zea mays
ttgagaccaactagcaacatagaaagcacaatagtgtaccaacaatggcagccaaaggattttgcttccttatgctccttggtctttctgcaagtgttgctaccgcaaccattttcccacaatgctcacaagctcctatagcttcccttcttcccccatacctctcaccagcggtgtcttcaatgtgtgaaaacccaattgttcaaccctacaggatccaacaggcaatcgcaacaggcatcttaccattatcacccttgttcctccaacaaccgtcagccctattacagcagttacctttggtccatttggtggcacaaaacatcagggcacatcaactacaacaacttgtgctagcaaaccttgctgcatactctcagcaacatcagtttcttccattcaaccaactggctgcattgaactctgctgcttatttgca

SEQ ID NO: 88921 - DNA, 338 bp, Zea mays
cgtccgattcccggtcgcccaccgtccgccgtgcatctcccaccgccggtccacctgccgccgccggtccacctgccaccgccggtccatgtgccgccgccggttcatctgccgccgccaccatgccactaccctactcaaccgccccggcctcagcctcatccccagccacacccatgcccgtgccaacagccgcatccaagcccgtgccagctgcagggaacctgcggcgttggcagcaccccgatcctgggccagtgcgtcgagtttctgaggcatcagtgcagcccgacggcgacgccctactgctcgcctcagtgccagtcgttgcggcagca

SEQ ID NO: 88922 - DNA, 459 bp, Zea mays
  unsure (1)..(459): unsure at all n locations
cggtccggaattcccgggtcgacccacgcctnccgcaacatacatagtgaagtacactagcttcatcttagcaccaatggcagccaagattggtgcgctccttgccctccttgctctttcagcaagtgttgctaccgcgactattattccacaatgctcacaacaatacctctctccagtgatagccgcgagatttgaatacccatctatacaatcctacaggctacaagaggccatcacagcaagcatcttacggtcgttagcattgaccgtccaacaaccatatgccctattgcaacaaccatccttagtgaatctgtatctccaaagaatcacagcacaacaactacaacaacggttgcttccaacaattaatcaagtagttgcagcgaaccttgctgcttaccttcagcaacaacaatttcttccattcaatcaactagcntgggtgaaccctgc

SEQ ID NO: 88923 - DNA, 446 bp, Zea mays
ttcccgggtcggcccaagccttccgttgaagaaccacaccaagcgaaccgcactaccaccgacctaccaccaatggctaccaaggtattatccctccttgcgcttcttgccctttttgtgagcgcaacaaatgcgttcattattccacaatgctcacttgctcctagtgccattattccacagttcctcccaccagttacttcaatgggcttcgaacacctagctgtgcaagccaacatgcaacaacaagcgcttgcggcgagcgtcttacaacaaccaattgcccaattgcaacaacaatccttgccacatctaacaatacaagccatcacaacgcaacagcaacaacagttcctaccagcactgagccacctagccatggtgaaccctgccgcctacttgcaagagcagctgcttgcatccaacccacttgctctggcgaacgt

SEQ ID NO: 88924 - DNA, 458 bp, Zea mays
  unsure (1)..(458): unsure at all n locations
cggtccggaattcccgggcaagcaacataganagtggattacagtagcaaaaatagagcaacattggcggccaagatattttccatccttattgtccttgctctttctgcatgtgttgctaacgcgaccatttttcctcaatactcacaagctcctatagctgcccttcttcccccataccttccatcaatgaccgctttagtatgtgaaaacccagcccttcaaccctacaggatccagcaagcaatcgcaacaagcaacttacctttatcacacctgttctttcaacaatcgccagccctatctttggtgcagtcattggtacaaaccatcagggcagaacagttgcagcaactcgtgctaccagtgatcagccaagtagctctggcaaacctttccccctactctcagcaacaacaatttcttccattcaaccaactgtctatactgaaccctgc

SEQ ID NO: 88925 - DNA, 416 bp, Zea mays
attgagaccaacaagcaacatagaaagtggaatccagtagcaacaatagagcaacagtggcgaccaagatactttccctccttatgctccttgctctttctgcatgtgttgctaacgcgacaattttccctcaatgctcacaagctcctatagcttcccttcttcccccataccttccatcaatgatagcttcagtatgtgaaaacccagctcttcaaccctataggctccaacaagcaatcgcagcaagcaacatacctttatcacccttgtttcaacaatcgccagccctatctttggtgcagtcattggtacaaaccatcaaggcacagcagctgcagcaactcgtgctacctgtgatcaaccaagtagctctggcaaacctttctccctactatcagcaacaacaatttctt

SEQ ID NO: 88926 - DNA, 459 bp, Zea mays
accggttcggaattcccggctcgacgccacgcgtccggtggaatccagtagcaacaacagagcttctttggcgaccaagatattttccctccttagtctccttgctctttctgcatgtgttgctaacgcgacaattttccctcaatgctcacaagctcctatagcttcccttcttcccccataccttccatcaatgatagcttcagtatgtgaaaacccagctcttcagccctataggctccaacaagcaatcgcagcaagcaacatacctttatcacccttgttgtttcaacaatcgccagccctatctttggtgcagtcattggtacaaaccatcagggcacagcagctgcagcaactcgtgctacctgtgatcaaccaagtagctctggcaaacctttctccctactctcagcaacaacaatttcttccattcaaccaactgtctacactgaaccc

SEQ ID NO: 88927 - DNA, 327 bp, Zea mays
aactatccatggtgaaccctaccgcctacctacaacatcaactactgctttcatctagcccactctctatgtccaattcacctacatacctgcaacaagaattgttgcaacagattgtaccatctctaactcatctagctattacaaaccctgtttcctacttgcaacatctgctttcattctaccaactaactatttctaactctagagcgtacctacttcagcgacaacatttacttaatccattggcaatttctaacccattgttcactaccttcctacatcatcatcaattgctgccatacaaccgattctctttgatgaatc

SEQ ID NO: 88928 - DNA, 371 bp, Zea mays
  unsure (1)..(371): unsure at all n locations
cctaccaacaatagcagccaaaaagatnttcttaaatattctgcgtactctttctacaagttctactacctcaaccattttcccacaatgctcacaatctcctatatcttcctttcttcccccatacctctcaccatctttatcttcagtatgtcaaaacccaattcttcaaccctacattatccaacatgcaatcacatcatccatcttacctttatcacccttattcctccaacaaccgtcatccctattacatcatttacctttggtgcatttatttgcacataacatcatatcacaacaactactacaactttttctataaaacctttcttcctactctcatcaacaacaatatccttcattcaacc

SEQ ID NO: 88929 - DNA, 121 bp, Zea mays
attccacaccgacccactctcctattgataccaacaacaacatataaatttaatccagtagcaacaatatatcatcaatgactaccattatactttccctccttattctcctttctctttc

SEQ ID NO: 88930 - DNA, 444 bp, Zea mays
  unsure (1)..(444): unsure at all n locations
aattcccggctcgacccacgcgtgcgtatgattgagaccagcaagcaacatatattgtagaatccattagcaacaatagagcaacgatggcgaccaagatattttgccttcttatgcttcttgctctttctacatgtgttgctaacgcgacaatttttcctcaatgctcacaagctcctatagcttcacttcttgccccataccttgcatcaattatagcttcagtatgtgaaaacccagctcttgaaccatataggcttcaacaagcaatcgcagcaagcaacatacctttatcggccttggagcttcaacaatcaccagccctatctttggtgcagtcattggtacaaaccatcagggggcaacagctgcagcaactagtgctacctgtgatcaaccaagtagctctgggaaacctttctncctactttcagtaccaacaat

SEQ ID NO: 88931 - DNA, 278 bp, Zea mays
cagaaacacaccaagcgaagcgcactagttacgacctaacaacaatggctaccaagatattagcgcttcttgggcttattggcctttttgggaacgccaaaaaaggggttaatatttcccaaaggctaatttgttccaagggcctttattccaaagttcctccaaccagttacttaaaggggctttgaacacctagttgtgcaagccaacttgcaacaacaagcgcttgcggcaagcgttttacaccaaccaattgccaaattggaacaacaatcctt

SEQ ID NO: 88932 - DNA, 365 bp, Zea mays
cctcctcgcctttctcgcagcttccgccactctactcgtcgccttacgcggcttcgacggcgtcgggcgtggctgggccgatgggcctgaaccagctcggcccggcccagatccagcagatccaggcccagctcatgttccagcaccagcagcagaggggcctgcacgcggcgttcctgggcccgcgggcgcagccgatgaagcagtccgggtcgccgccggcgcagtcgaagctgtaccgcggcgtgcgccagcgccactggggcaagtgggtggcggagatccgcctccccaagaaccgcacgcggctgtggctcggcaccttcgacaccgccgagggcgcggcgctggcctacgacgaggcg

SEQ ID NO: 88933 - DNA, 397 bp, Zea mays
agaaagtggaatccagtagcaacaacagttcaacaatggcgaccaagatattttccctccttatgctccttgctctttctgcatgtgttgctaacgcgacaattttccctcaatgctcacaagctcctatagcttcccttcttcccccataccttccatcaatgatagcttcagtatgtgaaaacccagctcttcagccctataggctccaacaagcaatcgcagcaagcaacatacctttatcacccttgttgtttcaacaatcgccagccctatctttggtgcagtcattggtacaaaccatcaaggcacagcagctgcagcaactcgtgctacctgtgatcaaccaagtagctctggcaaacctttctccctactctcagcaacaacaatttct

SEQ ID NO: 88934 - DNA, 364 bp, Zea mays
tatgattgagaccagcaagcaacatagatagtagaatccattagcaacaatagagcaacgatggcgaccaagatattttcccttcttatgcttcttgctctttctacatggggtggtaacgcgacaaatttcccttaatggtcacaagcttctatagcttgccttctttccccatacctttcatcaattattggttcaacatgtgaaaacccaacttttcaaccatattggcttcaacaagcaatcgcaggaagcaacatacctttatcggccttggtgtttcaacaatcaccaaccctatctttggtgcagtcattggtacaaaccatcaggggacaacagcttcagcaacttgtggtacctg

SEQ ID NO: 88935 - DNA, 351 bp, Zea mays
ggcctctgtccctcgcaagttcaatctcacctccaaccatgggtaaagagaagtcccacatcaacattgtggttattggtcatgtcgactctggcaagtcgaccaccacaggacaccttatctacaagcttggaggcattgacaagcgtgtgatcgagaggttcgagaaggaggctgctgaaatgaacaagcggtccttcaagtacgcgtgggtgctcgacaagctcaaggctgagcgtgagagaggtatcaccattgatatcgctctgtggaagtttgagaccaccaagtactactgcacggtcattgatgcccctggacaccgtgacttcatcaagaacatgatcactg

SEQ ID NO: 88936 - DNA, 475 bp, Zea mays
accggtttcggaattcccgggctcgacccacgccgtccgactcgatgagcagcgacttggttaggccgttcgcgcaccggtcaagggaaaaactttggctggtgtcttgcccatattggagtctttggttaatggggcaaacaaggcatctagacggactgaacatggcaggaccccaagtgttctcgttctactaccaacaagagagctggccaatcaggtgcacgctgactttgagttttatggtgcaacatttgggctctctgcatgttgtgtgtatgggggatcaccttatcgtcctcaagaaatggcattgagaagaggtgtggatattgtcgttggaactcctggtcgtgtcaaggatttcattgctaaaggaactctcaatttgaaatgcttgaaattccgtgtccttgatgaagctgatgagatgctaaacatggggttcgttgatgatgtcgagctcattcttggc

SEQ ID NO: 88937 - DNA, 375 bp, Zea mays
gcaacatagaaagcacaatagtgtaccatcaatggcagctaaaatattttgcctccttatgctccttggtctttctgcaagtgctgctacggcgaccattttcccacaatgctcacaagctcctatagcttcccttcttcccccgtacctctcaccaacggtgtcttcggtatgtgaaaacccaattcttcaaccctacaggatccaacaggcaatcgcagctggcatcttacctttatcacccttgttcctccaacaatcatcagccctattacagcagttacctttggtgcatttattggcacaaaacatcagggcacaacaactacaacaacttgtgctagcaaaccttgctgcctactctcagcaacagca

SEQ ID NO: 88938 - DNA, 401 bp, Zea mays
tctggatcgcaacaacttgcctatactttcgcgcaccgtacatggaaaaactatgcctggtgtcttgcccatatcggcggctctggttaatgatgcaaacaaggcatctagacggactgaacattgcaagaccccaagtgttcttcttatactaccaacaagagagctggccaatcaggtgcacgctgactttcagttttatggtgcaacatttgggctctctgcatgttgcgtgaatgggggatcaccttatcggcctcaagaaatggcattgagaacaggtgaggctattgttagtgcaactcctggtcgtgtcaaggattccatcgctaaaggaactttcaatttgaaatgcttgaaattccgtagtcttgatgaatctgaagagatgctaaacatgg

SEQ ID NO: 88939 - DNA, 370 bp, Zea mays
ctctgcttcttatttgcaacaacaacaactaccattcagccagctatctgctgcctacccccagcaatttcttccattcaaccaactgacagcattgaactctcctgcttatttacagcagcaacaactactaccattcagccagctagctggtgtgagccctgctaccttcttgacacaaccacagttgttgccgttctaccagcacgctgcgcctaacgctggcaccctcttacaactgcaacaattgctgccattcaaccaacttgctttgacaaacccagcagcattctaccaacaacccatcattggtggtgccctcttttagatttcttatgagttatagttcaataataaagttttttgtctg

SEQ ID NO: 88940 - DNA, 431 bp, Zea mays
atggattcgcattcgtcctattcgtattcgccatcggcgcaggaccgaacccgatccgggaggcctaactaaccctaggaggcatgcggcggcggggatggtgtactacgcgctggtggtgggcgcggagctggatggcctcaccaacctgcagccccgccacggctgcgacgaccccaacttaccctactacctcaagctcaagtgcgagaactgccgcgaggtcaccgtcaagtccacctacgtcaccctcagcgagcaagtcgacctgcccaaaggacacggcgccgctcacctcgtccagaagtgcaagctttgtgggagagatggaacaattgtgatgattcctggtcaggggacaccacttactattgagcagagccagaaagaggagaagacttgcttgatggtgtttgactgcataggctatg

SEQ ID NO: 88941 - DNA, 316 bp, Zea mays
  unsure (1)..(316): unsure at all n locations
atcgcattccccttccccctcttcgtcttcgtcggcggcgtcggaccgaacccgagcccggagccctaactaaccctaggaggcaggcggcggcggggatggtgtactacgcgctgttggtgggcgcggagctggatggcctcaccaacctgcagccccgccacggctgcgacgaccccaacttcccctactacctcaagctcaagtgcgagaactgcggngaggtcaccgncaagtccacctacgtcaccctcagcgagcaagtcgacctgcccaaaggacacggggccgctcacctcgtccagaagtgcaagct

SEQ ID NO: 88942 - DNA, 450 bp, Zea mays
  unsure (1)..(450): unsure at all n locations
cccacgcgtccgtctaaccatacaaaccatcgcaacgcagcagcaacaagcactgagccacctagccgtggtgaaccctatcgcctacttgcaacaacagctgcttgcatccaacccacttgctttggcaaacgtagctgcataccaacaacaacaacagttgcaacagtttctaccagcgctcagtcaactagccatggtgaaccctatcgcctacctacaacagcaacaacttctttcatctagcccgctcgctatgggcaatgcacctacatacctgcaacaacagttgttgcaacaacagttgctgcaacaaattgtaccagctcttactcagctagctgtggcaaaccctgctgcctacttgcaacaactacttncattcaaccaactgactgtgtcgaactctgctgcgtacctacaacagcgacaacagttacttaatccact

SEQ ID NO: 88943 - DNA, 482 bp, Zea mays
accggttcggaatcccggtcgacctacgcgtccgcttcagaccattagctttatctactccagagcgcagaagaacccgatcgacaccatgagggtgttgctcgttgccctcgctctcctggctctcgctgcgagcgccacctccacgcatacaagcggcggctgcggctgccagccaccgccgccggttcatctaccgccgccggtgcatctgccacctccggttcacctgccacctccggtgcatctcccaccgccggtccacctgccgccgccggtccacctgccaccgccggtccatgtgccgacgccggttcatctgccgccgccaccatgccactaccctactcaaccgacccggcctcagcctcatccccagccacacccatgcccgtgccaacagccgcatccaagcccgtgccagctgcagggaacctgcggcgttggcagcaccccgatcctgggccagtgcgtcgagtttc

SEQ ID NO: 88944 - DNA, 430 bp, Zea mays
  unsure (1)..(430): unsure at all n locations
gcagggcagccacaagcaaatgtggttcctattccaatccccggtgatggcgttgggcactgttccgaagaaaaacatgagggtgcctgctctgagagcaaacgggaggacacacatgctggagccatcagaacggctgatctgttggcctcagaagtcgctgggagctgggcagtggaaacagctccgtctgtcaatggggagaacgaatctccaaggagcttgggcgatgctacagagcacgatgaagctggaggcagcgctgcaggcgatgctttggtaactctggtgaactcagagggccaggcggctgggagccagaacaacgttgagcgtggcagcttccaaaataacccatcatcatcatcatcaccatcgtgttcttagtgccatgattggaatngntgatcctgagttcangaagcaaatg

SEQ ID NO: 88945 - DNA, 441 bp, Zea mays
ggctagcaaaccttgctgcatactctcatcaacatcagtttcttccattcaaccaactggctgcattgaactctgctgcttatttgcaacaacaattaccattcagccagctagttgctgcctacccccagcaatttcttccattcaaccaactagcagcattgaactctgctgcttatttacagcagcaacaactactaccattcagccagctagctgatgtgagccctgctgccttcttgacacaacaacagttgttgccgttctacctgcacgctatgcctaacgctggcaccctcttacaactgcaacaattgctgccattcaaccaacttgctttgacaaacccaacagtgttctaccaacaacccatcattggtggtgccctcttttagattgcttatgagttatagttcaataatgaaagtttttggatgatgt

SEQ ID NO: 88946 - DNA, 436 bp, Zea mays
  unsure (1)..(436): unsure at all n locations
gatgagtctgaccgtctgctaaagatggtagagacactgcatacacgtatcattggccaggacgaggctgtcaaagctattagccgtgctatccgccgtgctcgtgttggcctgaagaatccaaataggccaattgccagcttcatattctctggaccaactggagttggcaaatcagagctagcaaaggctctggcagcctactactttggctcagaggaggctatgattaggcttgacatgagtgagttcatggagagacatactgtctccaagcttattggatcacctccaggttatgttgggtacactgagggaggccaactaactgaagcagtccgtcgccgcccatacacagttgttctctttgatgagattgagaaggcacatnctgatgttttcaacatgatgcttcagatattagaggatggggcga

SEQ ID NO: 88947 - DNA, 445 bp, Zea mays
cagtagcaacaatagagcaacaatggcgaccaagatactttccctccttatgctccttgctctttctgcatgtgttgctaacgcgacaattttccctcaatgctcacaagctcctatagcttcccttcttcccccataccttccatcaatgatagcttcagtatgtgaaaacccagctcttcaaccctataggctccaacaagcaatcgcagcaagcaacatacctttatcacccttgtttcaacaatcgccagccctatctttggtgcagtcattggtacaaaccatcaaggcacagcagctgcagcaactcgtgctacctgtgatcaaccaagtagctctggcaaacctttctccctactatcagcaacaacaatttcttccattcaaccaactatctacactgaaccctgctgcttatttgcagcaacaactattaccattc

SEQ ID NO: 88948 - DNA, 422 bp, Zea mays
  unsure (1)..(422): unsure at all n locations
gaactagcaacatacatagtgaagtacactagcaacatcttagcaccaatggcagccaagatttttgccatccttgccctccttgctctttcagcaagcgttgctaccgcgactattattccacaatgctcacaacaatacctctctccggtgacagccgcgagatttgaatacccaactatacaatcctacaggctacaagaggccatcgcagcaagcatcttacggtcgttagcattgaccgtccaacaaccatatgccctattgcaacaaccatccttaatgaatctatatctccaaagaatcgcagcacaacaactacaacaacagttgcttccaacaatcaatcaagtagttgcagcgaaccttgctgcttacctncagcaacaacaatttcttccattcaatcaactagctggggt

SEQ ID NO: 88949 - DNA, 452 bp, Zea mays
cggacgcgtgggcaactagcaacatagatagcacaatagtgtaccaacaatggcagccaaaatattttgcctccttatgctccttggtctttctgcaagtgctgctacggcgaccattttcccgcaatgctcgcaagctcctatagcttcccttcttcccccgtacctctcaccagcggtgtcttcggtatgtgaaaacccaattcttcaaccctacaggatccaacaggcaatcacagctggcatcttacctttatcacccttgttcctccaacaatcatcagccctattacatcagttacctttggtgcatttattggcacaaaacatcagggcacaacaactacaacaacttgtgctagcaaaccttgctgcctactctcagcaacagcagtttcttccattcaaccaactagctgcattgaactctgcttcttattgcaacaacaaca

SEQ ID NO: 88950 - DNA, 437 bp, Zea mays
gccaaaatattttgcctccttatgctccttggtatttctgcaagtgctgctacggcgaccattttcccgcaatgctcacaagctcctatagcttcccttcttcccccgtacctctcaccagcggtgtcttcggtatgtgaaaacccaattcttcaaccctacaggatccaacaggcaatcgcagctggcatcttacctttatcacccttgttcctccaacaatcatcagccctattacagcagttacctttggtgcatttattggcacaaaacatcagggcacaacatctacaacaacttgtgctagcaaaccttgctgcctactcttaacaacagcaggttctttcaattcaaccaactagctgcttggaactctgttcctaatttgccacaccaccaactaccattcagccagctacctgatgcctacccccaac

SEQ ID NO: 88951 - DNA, 430 bp, Zea mays
cggacgcgtgggcaactagcaacatagaaagcacaatagtgtaccaacaatggcagctaaaatattttgcctccttatgctccttggtctttctgcaagtgctgctacggcgaccattttcccacaatgctcacaagctcctatagcttcccttcttcccccgtacctctcaccaacggtgtcttcggtatgtgaaaacccaattcttcaaccctacaggatccaacaggcaatcgcagctggcatcttacctttatcacccttgttcctccaacaatcatcagccctattacagcagttacctttggtgcatttattggcacaaaacatcagggcacaacaactacaacaacttgtgctagcaaaccttgctgcctactctcagcaacagcagtttcttccattcaaccaactagctgcattgaactct

SEQ ID NO: 88952 - DNA, 318 bp, Zea mays
cccacgcgtccgcagctagctgcagcaagccgtgcttccttcttgacacagcaacagttgctgcctttctaccagcagtttgcggctaaccccgcaaccctcttacaactacaacaattgttgccctttgtccaacttgctttgacaaacccagcagcctcctaccaacaacacatcattggtggtgccctcttttagattgcttattagttgtaattcaataataaagttttttggatgatgtatgtggccaaccagaaataagaagttacatttccagattctaatgtgaaaaaaattaagtgcataaacagacac

SEQ ID NO: 88953 - DNA, 407 bp, Zea mays
cggacgcgtgggcgaccctgtcgtggctttgaggaggttcttgtaaggtatcgacagattgtaccacatttgaacctttcaggaccaacttcttttgcacctcttatttatgcagcgatttctgttgttgaaaacagtaattggcagtaccatgtcctcgtgatcatagctgatggacaggtgactgccgcgaatataaatgatggaagattaagtccacaggaacaagcaactatacaagcaattgtcgatgctagctactatcctctttcaatagtaatggttggggtgggtgatggaccatgggatgcgatgcagcattttgatgactgtatccctgaaagagcttttgacaattttcagtttgtgaacttcactggtattatgtcaacaaagtaggatatgtc

SEQ ID NO: 88954 - DNA, 439 bp, Zea mays
gaccaactagcaacatagaaagcacaattgtgtaccaacaatggcagccaaaatattttgcttccttatgctccttggtctttctgcaagtgctgctaccgcaaccattttcccacaatgctcacaagctcctatagcttcctttcttcccccatacctctcaccagcggtgtcttcagtatgtgaaaacccaattcttcaaccctacaggatccaacaggcaatcgcagcaggcatcttacctttatcacccttgttcctccaacaaccgtcagccctattacagcagttacctttggtgcatttgttggcacaaaacatcaaggcacaacaactacaacaacttgtgctaggaaaccttgctgcctactctcagcaacagcagtttcttccattcaaccaactggctgcatttgactctgctgcttatttgcaacaa

SEQ ID NO: 88955 - DNA, 434 bp, Zea mays
tgcgatttcgatctcgcagccaccttttttttgttctgttgtgtatctagtagttggaggagatatgcagtttgcacttgcattggacacgaactcaagtcctcaccagataagatcttgtgagggtgatgggattgacaggttggaaaaattaagtattgggggcagaaagcaggagaaagctttgagaaataggtgctttggtggtagagttgctgcaactacacaatgtattcttacctcagatgcttgtcctgaaactcttcattctcaaacacagtcctctaggaaaaattatgctgatgcaaaccgtgtatctgctatcattttgggcggaggcactggatctcagctctttcctctgacaagcacaagagctacgcctgctgtacctgttggaggatgttacaggcttattgatatccctatgagta

SEQ ID NO: 88956 - DNA, 423 bp, Zea mays
cctgacgcgcggaactggcggtggcgatctcatctaatggccatccatgccccgctccgcctctgcctccgcctccatgcgaggaaggtagccagacgcgtataaagggcagccagaaattcagatccacctgtatgcgtctccgttcgttcacgccacaggcaaggcacagaggcttgtgagggagagcgaggagcggatgaggacatggtgcacgggacgctggaagtgctgctcgttggggccaagggcctcgagaacaccgattacctctgtaacatggatccgtatgcaattctcaagtgccgttcacaggagcagaagagcagtattgcaactggaaaaggaactacccctgagtggaatgaaaactttatcttcactgtgtcttgacctgacaacagacttgggtatcaagcttat

SEQ ID NO: 88957 - DNA, 444 bp, Zea mays
atttctaccagcactgagccaactagctgtggtgaaccctgtcgcctacttgcaacagcagttgcttgcatccaacccacttgctctggcaaacatagttgcataccaacaacaacaacaattgcaacagtttctaccagcgctcagtcaactagccatggtgaaccctgccgcctacctacaacagcaacaactgatttcatctagccctctcgctgtggttaatgcacctacatacctgcaacaacagttgctgcaacagattgtaccagctctgactcagctagctgtggcaaaccctgctgcctacttgcaacagctgcttccattcaaccaactgactgtgtcgaactctgctgcgtacctacaacagcgacaacagttacttaatccactagcggtggctaacccattggtcgttgccttcctacagcagcaacaatt

SEQ ID NO: 88958 - DNA, 407 bp, Zea mays
agtatagccgctggctagctagctagtttagtcatttagcggcgatgattgagtaataatgtgtcacgcatcaccatgggtggcagtgtcagtgtgagcaatgacctgaatgaacaattgaaatgaaaagaaaaaagtattgttccaaaaaaaaaaaaaaaaaaaaaaaaaaaaaaaaaaaaaaaaaaaaaaaaaaaaaaaaaaaaaaaaaggaaaaaattaaaaaaaaaaaaaaaaaaaaaaaaaaaaaaaaaaaaaaaaaaaaaaaaaatttaaaaaaaaataaaaaaaataaaaaaaaaaaataaaaaaaaataaaaaaaaaaaaaaaaaataaaaaaaaaaaaaaggggggcccctttaaaggaaccaattttaaattcccgggtttggaagaataaaacttt

SEQ ID NO: 88959 - DNA, 424 bp, Zea mays
atcgcagcaagcaacatacctttatcgcccttgttgtttcaacaatcaccagccctatctttggtgcagtcattggtacaaaccatcagggcacaacagctgcagcaactcgtgctacctgtgatcaaccaagtagctctggcaaacctttctccctactctcagcaacaacaatttcttccattcaaccaactgtctacactgaaccctgctgcctatttgcagcaacaactattaccatttagccagctagctactgcctactctcagcaacaacaacttcttccatttaaccaattggccgcactgaaccccgctgcttatttgcagcagcaaatactactgccatttagcgagctagctgcagcaagtcgtgcttccttcttgacacagcaacagttgctgcctttctacaagcagtttg

SEQ ID NO: 88960 - DNA, 383 bp, Zea mays
gatcagcaaagcggcagtgcgtagagaggatcgtcgaacagaacagcatgaagatggtcatcgttctcgtcgtgtgcctggctctgtcagctgccagcgcctctgcaatgcagatgccctgcccctgcgcggggctgcagggcttgtacggcgctggcgccggcctgacgacgatgatgggcgccggcgggctgtacccctacgcggagtacctgaggcagccgcagtgcagcccgctggcggcggcgccctactacgccgggtgtgggcagccgagcgccatgttccagccgctccggcaacagtgctgccagcagcagatgaggatgatggacgtgcagtccgtcgcgcagcagctgcagatgatgatgcagcttgagcgt

SEQ ID NO: 88961 - DNA, 442 bp, Zea mays
  unsure (1)..(442): unsure at all n locations
ccttcttgaacttagcggaaacaatgccatcattgttatggatgatgtagatatccagctagctgtgcgatctgtcttgttcgctgctgttggtacagcaggacaacgctgcaccacatgtcgtaggctgattcttcatgagaacatatatcaaaccttccttgatcagcttgttgaggtatacaaacaagtccgaattggggatccgttggagaaaggcaccttactgggaccactgcacactcctgcttcaaaagagaactttttgaaaggcattcagactatcaaatctcagggagggaaaatcctttttggaggatctgccattgaatcagaaggaaactntgtgcaaccgacaattgtggaaattacaccttctgcaccagttgtgaaagaagaactctntggtcctgtcctttatgttatgaaatttcagaccttg

SEQ ID NO: 88962 - DNA, 322 bp, Zea mays
cggcccgacccacgcgtgctaaggtcgagaggttctccgggttccggtttcgagggtgagcggatcgagatgggggcggcggatgttgagtaccgctgcttcgtcggcggcctcgcctgggccacagacgaccactccctccacaacgccttcagcacctacggcgaggtcctcgagtccaagatcatcctcgatcgggagacgcagatgtcccgcggcttcagcttcgtcaccttttccacggaggaggcgatgcggaacgccatcgatggcatgaacggcaaggagctggacggccgctacatcaccgtcaacgaagccc

SEQ ID NO: 88963 - DNA, 399 bp, Zea mays
  unsure (1)..(399): unsure at all n locations
cggattcccggtcgaccaacgcgtccgggcaatcgcagctggcatcttaccttttcacccttgtcctccacaatatcaccctattacaacagtacctttggtgcatnattggcacaaaacatcaggcacaacactacaacacttgtgctagcaaccttgctgctactctcacaacagcagtttcttccattcaaccaactaggttcattgaactctgcttcttatttgcaacaacaacaactaccattcagccagctacctgctgcctacccccagcaatttcttccattcaaccaactagcagcattgaactctcctgcttatttacagcagcaacaactactaccattcagccagctagctggtgtgagccctgctaccttcttgacacaaccacag

SEQ ID NO: 88964 - DNA, 407 bp, Zea mays
tcggattcccggtcgaccacgcgtacgaaacccaccaagcgaacgcactaccatcacctaccaccacggcttccaagatattgggccctcctgggcctctttgccctttaaatgggcgcaaccaaatgcgggcattattactaagggctcacttgctcctagagccagatttccacagttactaccaccagttacttcaatgggctcagatcatccaaccgtgctagcctacaggctacaactagcgcttgcggcgagcgccttacatcaaccaattgtccaattgcaacaacaatccttggcacatctaaccctacaaaccattgcaacgcaacatccacaacaacaacagtttatgccatcactgagccacctagccgaggtgaaccctgtcacctacttgcaac

SEQ ID NO: 88965 - DNA, 388 bp, Zea mays
gacccacgcgtacgaaagcacacgaagcgaatcgcactagcattgacctaacaccaatggctaccaagatatggcccggcttgcgcttcttgcccttttagtgagcgcaacaaatgcgttcattattacacagcgctcacttgctcctagagccattattccacagttcctcccaccagttacttcaatgggcttcgaacatccagccgtgcaagcctacaggctacaactagcgcttgcggcgagcgccttacaacaaccaattgcccaattgcaacaacaatccttggcacatataaccctacaaaccatagcaacgcaacatcaacgacaacaacagtttctgccatcactgagccacctatccgtggtgaaccctgtcacctac

SEQ ID NO: 88966 - DNA, 332 bp, Zea mays
cgggtcgactcacgcgtccgttgcgttacccggcggcttaaaccctatttcccattccatcttcggttccgctccgccggcggcgatggagttctggggtcttgaggtcaaacctggatccactgtcaagtgtgaacctggacatgggtttatcctggacgtttcccaagctggccttggggaatcaaagaaaagtgaccgtgccttaatggatgtcaaagttgatgaccagaagcttggcattggaaccctttctattgaccaatacccaccggttccattccatttggttttcaataaagagattgagccggcacacaccttgaaaactt

SEQ ID NO: 88967 - DNA, 411 bp, Zea mays
gagagctattccacctcgtctcaggcaccctcgggggtccccttcccccgccgcgtgccggcgagccgcggagatccgggttctgacctcgcctccttctgctgacttgtgaacgaggcagcatcatagttcagtttggaaacatgtcatcgaagaagatagagttggatcacaaggacatggtccatgattctgccatcgactactatggcaagcgccttgccactgcctcttcagacttcaccgtgaagatcgtcaacattggtgctgcaaatgccccatcccaggtccttgcaacgctaagtggccactatggtcctgtgtggcgtgttgcttgggcccatccaaagtatggtgcaatccttgcatcgtgcagttatgatggccgtgtcattatttggaaagaggatg

SEQ ID NO: 88968 - DNA, 444 bp, Zea mays
agaccattagctttatctactccagagcgcagaagaacccgatcgacaccatgagggtgttgctcgttgccctcgctctcctggctctcgctgcgagcgccacctccacgcatacaagcggcggctgcggctgccagccaccgccgccggttcatctaccgccgccggtgcatctgccacctccggttcacctgccacctccggtgcatctcccaccgccggtccacctgccgccgccggtccacctgccaccgccggtccatgtgccgccgccggttcatctgccgccgccaccatgccactaccctactcaaccgccccggcctcagcctcatccccagccacacccatgcccgtgccaacagccgcatccaagcccgtgccagctgcagggaacctgcggcgttggcagcaccccgatcctgggccagtgcgtcgagtttc

SEQ ID NO: 88969 - DNA, 445 bp, Zea mays
cttcccttcttcccccgtacctctcaccagcggtgtcttcggtatgtgaaaacccaattcttcaaccctacaggatccaacaggcaatcgcagctggcatcttacctttatcacccttgttcctccaacaatcatcagccctattacagcagttacctttggtgcatttattggcacaaaacatcagggcacaacaactacaacaacttgtgctagcaaaccttgctgcctactctcagcaacagcagtttcttccattcaaccaactagctgcattgaactctgcttcttatttgcaacaacaacaactaccattcagccagctacctgttgcctacccccaacaatttcttccattcaaccaactggcagcattgaactctcctgcttatttacagcagcaacaactactaccattcagccagctagctggtgtgagccctgc

SEQ ID NO: 88970 - DNA, 403 bp, Zea mays
cgtgatcagagagggatatatagctagctagctagcatagcatggcgcttgtagccgacgacgacgccgagctcaaggccaaggccaaggccaaggccgaggtctactacggcgacgaggcctgtcagctgtgcgcgcagctcctgctgagggaagcaggcctccccaacggcctgctgccgctggaggacctgacggagtgcggctacgtccaggagaccgggtacgtgtggctgaagcagggcaggagggtcgaccacgtcttccggagcctcggacgcctcgtctcctacggcgccgagatcaccgggtacgccgagaagggccggatcaggaaggtgaaggggataaagaccagggagctcatgctgtgggtgcccgtcgaggagatcgccgctcttgg

SEQ ID NO: 88971 - DNA, 314 bp, Zea mays
tcagtaacacattctattttatctacctagcaacaacttaacaagaaaggctaccaagatattaaccctgcttgcgcttattgccctttatgagatcgcaacaaatgcgttcattattccacaatgctcacttgctcctagtgccattataccacagttcctccgaccagttacttcaatgagcttcgaacaccttactgagcaagcctacaggctacaacaagcgcttgcggctaacgtcttacaacaaccaattaaccaattgcaacaacaattcttggcacatttaaccatacaaaccattgcaactcaac

SEQ ID NO: 88972 - DNA, 452 bp, Zea mays
  unsure (1)..(452): unsure at all n locations
ggattcccggtcgaccagcgtncgactctctggttgagtaaacggcttttgattaaaatggtactggtaaagagaggaactctttgcaaatgggtcctatttcgacagggcgccaccaaactcccagagactgaacttgcaagctgcaggcgttgagattgaccgggttggagccatcaaggttgacgaatattctcgtacttctgctcctagtgtatgggctgtgggtgatgtaacaaaccggattaatttaacacctgttgcattgatggaggcaacttgctttgctaaaactgtgtttggtggccagcaagttaagcctgatcacagagatgttccttgtgctgttttctccattccaccactatctgtagtgggcctcagcgaagaacaggccttggaggaagctaatggtgatattcttgttttcatctcatcattcaacccaatga

SEQ ID NO: 88973 - DNA, 408 bp, Zea mays
gagaccagcaagcaacatagaaagtagaatccattagcaacaatagagcaacaatggcgaccaagatattttccctccttatgctccttgctctttctacatgtgttgctaacgcgacaattttccctcaatgctcacaagctcctatagcttcccttcttcccccataccttccatcaattatagcttcagtatgtgaaaacccagctcttcaaccatataggcttcaacaagcaatcgcagcaagcaacatacctttatcgcccttgttgtttcaacaatcaccagccctatctttggtgcagtcattggtacaaaccatcagggcacaacagctgcagcaactcgtgctacctgtgatcaaccaagtagctctggcaaacctttctccctactctcagcaacaac

SEQ ID NO: 88974 - DNA, 379 bp, Zea mays
  unsure (1)..(379): unsure at all n locations
ggcgcattcgtgcagcctgcgttctacgaagcgttcggcctgactgtgatcgagtccatgacgtgcggtctgccaacgatcgcgacctgccatggtggccctgctgagatcatcgtggacggggtatctggcctgcacattgacccttaccacagcgacaaggccgcggatatcctggtcaacttctttgacaaatgcaaggcagatccgagctactgggacaagatctcacagggcggcctgcagagaatttatgagaagtacacctggaagctctactccgagaggctgatgaccctgaccggcgtgtacgggttctggaagtacgtgagcaacctggagaggcgcgagacccgncgctacatcgagatgttctacg

SEQ ID NO: 88975 - DNA, 435 bp, Zea mays
ggaattcccgggtttttttttcaaacaacaaacttattcatgatttgtcatagttctgggtagtacgcacacacaacacaaccggtccattattaaaccaacactgacacgaacagcagatacttcgacaacctccatatggagagggcaccagacgacgcaggcacatcggcagcttaaacgacccatgacttactgaccaccacggagacggagcacaaggtggagggtgctctccttttggatgttgtagtctgctagggtgcggccatcctccagctgtttgccggcgaagatcagacgctgctggtccggggggatgccctccttgtcctggatcttcgccttcacattgtcgatggtgtccgagctctcaacctccagggttatggtttttccagtcagggtcttcacaaagatctgcataccacccct

SEQ ID NO: 88976 - DNA, 441 bp, Zea mays
cctctgggtgccgtcctccaagtgctacttctcgatcgcttgctacttccactcgcgctacaagtcagggcagtcaagcacttacaagaagaacggaaaacctgctgccattcgctatggaactggttccattgctggttttttcagtgaggatagcgttacattaggtgatctggttgtgaaggatcaggaatttattgaagctacaaaggagccagggcttaccttcatggttgcaaaatttgatggcattcttgggctaggctttcaagaaatctctgttgggaatgcaacaccagtgtggtataacatggtgaaacaaggtctcatcagcgaccctgttttctctttctggtttaaccgacatgctgatgaaggagaaggtggtgaaattgcgtttggtggaatggattctagccactacaagggcgatcacacgtt

SEQ ID NO: 88977 - DNA, 80 bp, Zea mays
atttcttatgagttatagttcaataataaagttttttgtctgatgtttgtggcttcccagaaataagaaagtacatttct

SEQ ID NO: 88978 - DNA, 392 bp, Zea mays
gagaccaactagcaacatagaaagcacaatagtgtaccaacaatggcagccaaaatattttgcttccttatgctccttggtctttctgcaagtgttgctaccgcaaccattttcccacaatgctcacaagctcctatagcttcccttcttcccccatacctctcaccagcggtgtcttcaatgtgtgaaaccccaattgttcaaccctacaggatccaacaggcaatcgcaacaggcatcttaccattatcacccttgttcctccaacaaccgtcagccctattacagcagttacctttggtccatttggtggcacaaaacatcagggcacaacaactacaacaacttgtgctagcaaaccttgctgcatactctcagcaacatcagtttct

SEQ ID NO: 88979 - DNA, 419 bp, Zea mays
gcattcagaaacacacctagcgaagcgcactagcaacgacctaacaacaatggcttccaagacattatccctccttgcgcttcttgccctttttgtgagtgcaacaaatgcgttcattattccacaatgctcacttgctccgagtgccattattccacagttcctccctccagttacttcaatgggcttcgaacacccagctgtgcaagcctataggctacaacaagcgcttgcggcgagcgtcttagaacaaccaattgcccaattacaacaacaatccttggcacatctaaccatacaaaccatcgcaacgcagcagcaacaagcactgagccacctagccgtggtgaaccctatcgcctacttgcaacaacagctgcttgcatccaacccacttgctttggcaaacgtagctgcat

SEQ ID NO: 88980 - DNA, 440 bp, Zea mays
gcaacatagaaagcacaatagtgtaccatcaatggcagccaaaatattttgcctccttatgctccttggtctttctgcaagtgctgctacggcgaccattttcccacaatgctcacaagctcctatagcttcccttcttcccccgtacctctcaccagcggtgtcttcggtatgtgaaaacccaattcttcaaccctataggatccaacaggcaatcgcagctggcatcttacctttatcacccttgttcctccaacaatcatcagccctattacagcagttacctttggtgcatttattggcacaaaacatcagggcacaacaactacaacaacttgtgctagcaaaccttgctgcctactctcagcaacaacagtttcttccattcaaccaactagctgcattgaactctgcttcttatttgaacaacaacaactacc

SEQ ID NO: 88981 - DNA, 391 bp, Zea mays
tgagcattcagaaacacacctagcgaagcgcactagcaacgacctaacaacaatggctaccaagatattatccctctttgcgcttcttgccctttttgtgagcgcaacaaatgcgttcattattccacaatgctcacttgctcctagtgccattattccacagttcctccctccagttacttcaatgggcttcgaacacccagctgtgcaagcctacaggctacaacaagcgcttgcggcgagcgtcttacaacaaccaattgcccaattacaacaacaatccttggcacatctaaccatacaaaccatcgcaacgcaacagcaacaacaatttctaccagcactgagccaactagctgtggtgaaccctgtcgcctacttgcaacagcag

SEQ ID NO: 88982 - DNA, 337 bp, Zea mays
cttgtactcccactccggttcgggttcgggttcgtgaggctctccggcgttcggtttcgcgggtgggcggatcgagatggcggcgtcggatgttgagtaccgctgcttcgtccgcggactcgcctgggccacggacgaccacttactgcacaacgccttcagcacctacggcgaggtcctcgagtccaagatcatcctcgatcgggagacgcagaggtcccgcggcttcggcttcgtcaccttctccacggaggacgcgatgcggaacgccatcgacggcatgaacggcaaggagctggacggccgcaacatcaccgtcaacgaggcccagtcccgc

SEQ ID NO: 88983 - DNA, 445 bp, Zea mays
gaccaactagcaacatagaaagcacaattgtgttccaacaatggcagccaaaatatttggcttgcttatgctccttggtctttctgcaagtgctgctaccgcaaccattttcccacaatgctcacaagctcctatagcttcctttcttcccccatacctctcaccagcggtgtcttcagtatgtgaaaacccaattcttcaaccctacaggatccaacaggcaatcgcagcaggcatcttacctttatcacccttgttcctccaacaaccgtcagccctattacagcagttacctttggtgcatttgttggcacaaaacatcaaggcacaacaactacaacaacttgtgctaagaaaccttgctgcctactctcagcaacagcagtttcttccattcaaccaactggctgcattgaactctgctgcttatttgcaacaacaacta

SEQ ID NO: 88984 - DNA, 447 bp, Zea mays
gaccaactagcaacatagaaagcacaatagtgtaccaacaatggcagctaaaatattttgcctccttatgctccttggtctttctgcaagtgctgctacggcgaccattttcccacaatgctcacaagctcctatagcttcccttcttcccccgtacctctcaccaacggtgtcttcggtatgtgaaaacccaattcttcaaccctacaggatccaacaggcaatcgcagctggcatcttacctttatcacccttgttcctccaacaatcatcagccctattacagcagttacctttggtgcatttattggcacaaaacatcagggcacaacaactacaacaacttgtgctagcaaaccttgctgcctactctcagcaacagcagtttcttccattcaaccaactagctgcattgaactctgcttcttatttgcaacaacaacaact

SEQ ID NO: 88985 - DNA, 396 bp, Zea mays
  unsure (1)..(396): unsure at all n locations
ggtgatagtaaatgatcaatggggagacagccggctgtgacaggagggggtgaagcgagggccatggacagcggagaggacaagaagctcattagcttatcctgacacatggccggtgctgctggcggcagtgcctaaactcgcagggctgcttcgttgcggcaagagctgccgtctgcggtggactaactatcttcgccctgacctcaagcgtggcctcctcagcactgccgaggagcagcttgtcattgacctccatgccaagctcggaaatagatggtcccagattgctgccaagttgcctgngagaacagacaacgagatcaagaaccactggaacacgcacatcaagaagaagcttgtcaagatgggtgtcgacccggccacacacgagcc

SEQ ID NO: 88986 - DNA, 399 bp, Zea mays
cccacgcgttcgaccacgcgtccggcaacatataaagcacaatagtgtaccaacaatggcagccaaaatattgtgcttccttatgctccttgatctttctgcaagtgctgctaccgaaaccattttgccacaatgctcacaagctcctatagcttcctttcttcccacatacctctcaccagcggtgacttcagtatgtgaaaacccaattcttcaaccctacaggatccaacaggcaatcgcagcaggcatcttacctttatcaccctcgtacctacaacaaccgtcagccctattacagcagctacctttggcgcatgtgacggcacaaaacatcaaggcacagcaactacaacaacttgtgctaggaaaccttgctgcctactctcagcaacagca

SEQ ID NO: 88987 - DNA, 393 bp, Zea mays
attcaaaaacacaccaagcgaagcgcactagcaacgacctaacaccaatggctaccaagatattagccctccttgcgcttcttgcccttttagtgagcgcaacaaatgcgttcattattccacagtgctcacttgctcctagtgccattattccacagttcctcccaccagttacttcaatgggcttcgaacatccagccgtgcaagcctacaggctacaactagcgcttgcggcgagcgccttacaacaaccaattgcccaattgcaacaacaatccttggcacatctaaccctacaaaccattgcaacgcaacaacaacaacaacaacagtttctgccatcactgagccacctagccgtggtgaaccctgtcacctacttgcaacagcagc

SEQ ID NO: 88988 - DNA, 409 bp, Zea mays
cggaattcccgggtcgacccacgcgtacggcaaagcggcagtgcgtagagaaggatcgtcgaccagaccagcttgaaaatggtcatcgtgctcgtcgtgtccctggctctgtcagctgccagcgcctctgcaatgcagatgccctgcccctgcgcggagctgcagggcttgtacggcgctggcgccggcctgacgacgatgatgggcgccggcgggctgtacccctacgcggagtacctgaggcagccgcagtgcagcccgctggcggcggcgccctactacgccgggtgtgggcagacgagcgccatgtaccagccgctccggcaacagtgctgccagcagcagatgaggatgatggacgtgcagtccgtcgcgcagcagctgcagatgatgatgcagcttgagcgtg

SEQ ID NO: 88989 - DNA, 426 bp, Zea mays
caacaactcgagctagcaaaccttgctgtctactctcagcaacagcagttacctttggtgcatttgttggcacaaaacatcagggcacaacaactacaacaactcgtgctagcaaaccttgctgcctactctcagcaacaacagtttctgccattcaaccaactagctgcattgaactctgctgcttatttgcagcaacaacaactactaccattcagccagctagctgctgcctacccccggcaatttcttccattcaaccaactggcagcattgaactctcatgcttatgtacaacaacaacaactactaccattcagccagctagctgctgcgagccctgctgccttattgacacagcaacattcgttgccagtttacctgcacactgcgcctaacgttggcaccctcttacaacttgcacaa

SEQ ID NO: 88990 - DNA, 300 bp, Zea mays
ccgttcggattccgccagcgccgctgtcggtgcctgctctgcagtgtacgcccggcaggaaagccctcggtggcgggctgaggctggacggactgcgccggctgacgacagatggcgccggcggctgtaccctacgcggatacctgagcagcgcagtgcatcccgctgcggcgggccctactacgccggtgtgggcagccgacgccatgtccaccgctcggcaacatgctgcagcagcagatgagatgatggacgtgcagccgtccgcacagctgagatgagatgcacttgagcgtgccg

SEQ ID NO: 88991 - DNA, 423 bp, Zea mays
ggcgaggagggcaggaagaccgaagaccgagccgtgcgggggctcgggacgggaacgggacaggaccccaaaatctcagatccttcctgcccgcccgcccgtgcccgtcgacgcgtcgttcttgccggccgcgcctcacctccgccctctcctcctccagggggatcggatacgccacaggctgcgcgatggtgctgtgggtcttcggctacggctccctcatctggaaccccggcttcgacttcgacgacaaaatcctcggcttcatcaagggctacaagcgcacctttaatctcgcttgcattgaccacagaggcacaccggagcatccggcgaggacctgcacgcttgaaaccgacgacgaggccatatgctggggaattgcatattgtgtcaagggtggtccaaaaaaagagctaaaag

SEQ ID NO: 88992 - DNA, 379 bp, Zea mays
caactagcaacatagaaagcacaatagtgtaccaacaatggcagctaaaatattttgcctccttatgctccttggtctttctgcaagtgctgctacggcgaccattttcccacaatgctcacaagctcctatagcttcccttcttcccccgtacctctcaccaacggtgtcttcggtatgtgaaaacccaattcttcaaccctacaggatccaacaggcaatcgcagctggcatcttacctttatcacccttgttcctccaacaatcatcagccctattacagcagttacctttggtgcatttattggcacaaaacatcagggcacaacaactacaacaacttgtgctagcaaaccttgctgcctactctcagcaacag

SEQ ID NO: 88993 - DNA, 452 bp, Zea mays
cgacccacgcgtacgaagcaacatagaaagtggaatacagtatcaaaaatagagcaacaatggcggccaagatgttttcgatccttatgctccttgctctttctgcatgtgttgctaacgcgaccatttttcctcaatactcacaagctcctatagctgcccttcttcccccataccttccatcaatgaccgctttagtatgtgaaaacccagcccttcaaccctacaggatccagcaagcaatcgcaacaagcaacttacctttatcacacctgttctttcaacaatcgccagccctatctttggtgcagtcattggtacaaaccatcagggcagaacagttgcagcaactcgtgctaccagtgatcagccaagtagctctggcaaacctttccccctactctcagcaacaacaatttcttccattcaaccaactgtctatactgaaccct

SEQ ID NO: 88994 - DNA, 371 bp, Zea mays
cccgaccaagaggcagtggccgtgcgccgcggggcagaagtactacgggcgcggcccgctgcagatctcgtggaactacaactacgggcccgcggggagggccatcggcttcgacgggctcggggaccccggcagggtggcgcgggacgccgtggtggcgttcaaggcggcgctctggttctggatgaacagcgtgcacggggtggtgccgcaggggttcggcgccaccaccagggccatcaacggcgccctcgagtgcggcgggaacaaccccgaccagatgaacgcgcgcgtcggctactacaggcagtactgccgccagctcggcgtcgaccccgggcccaacctcacctgctaggctaggcggcatc

SEQ ID NO: 88995 - DNA, 409 bp, Zea mays
  unsure (1)..(409): unsure at all n locations
atgaaccaactagcacatataaagctcatattgtaccaataatggcagccaaaatatttgactcatagctccttgtctttctgcaagtgctgctcgggagcatttaccgcaatgctcacaagctgctatagcttcccttcttcccccgatacctctcccaacgagtcttcagtatgagaaaatccaattcttctaccctacaggatccaacaggcaatcgcagcaggcatcttacctttatcacccttgttcctacaacaatcatcagccctattacagcagttacctatggtgcattgattggcacaaaacatcagggcacaacaactacaacaactcgtgctagtgcaccttgctgcctactctcagcatcagcttttacctatggtgcatttggaagcacanaaca

SEQ ID NO: 88996 - DNA, 449 bp, Zea mays
cttgcattcaaccaactgtctacactgatccctgctgcttatttgcagcaacaactattaccatttagccagctagctactgcctactctcagcaacaacaacttcttccatttaaccaattggccgcactgaaccctgccgcctacctacaacagcaacaactgatttcatctagccctctcgctgtggttaatgcacctacatacctgcaacaacagttgctgcaacagattgtaccagctctgactcagctagctgtggcaaaccctgctgcctacttgcaacagctgcttccattcaaccaactgactgtgtcgaactctgctgcgtacctacaacagcgacaacagttacttaatccactagcggtggctaacccattggtcgctgacttcctacagcagcaacaattgctgccatacaaccagttctctttgatgaaccctgc

SEQ ID NO: 88997 - DNA, 324 bp, Zea mays
tatgctcgttgctctttctgcatgtgttgctaacacgaccatttctgatgagtactcacatgctcctatagacgcccttattgcgatataccattgatcactcaccgctttagattgtgaaatcccaggccttctaaccctacgagatccaattatcaatctaaccaggcacctaacctttatcacatctgttctttgaacaatcgccagccctatctttgatgcagccattggtacaaaccattaggttgcaacagactcggcaactcgtgctaccagagatcattcaagtagctttggcaaacctttgctgctactattatc

SEQ ID NO: 88998 - DNA, 427 bp, Zea mays
cacgcgtacgatagcttcccttcttcccccgtacctcttaccatcggggtcttcggtatgggaaaaccgagtctgtaacccttacaggatccaacaggcaatcacagctggcatcttacctttataacccttgttcctgcaacaatcatcagccctattacatcagttacctttggtgcatttattggcacataacatcagggcacaacaactacaacaacttgtgctagcaaaccttgctgcctactctcagcaacagcagtttcttccattcaaccaactatctgcattgaactctgcttcttatttgcaacaacaacaactaccattcagtcagctacctgctgcctacccccagcaatttcttccattcaaccaactggcagcattgaactctcctgcttatttacagctgcaacaactacta

SEQ ID NO: 88999 - DNA, 437 bp, Zea mays
  unsure (1)..(437): unsure at all n locations
cgccccctcttgccttccctcctccgccttaccgctgctgtccgcctccaaccctccaggtcgacgcaggcggcgacggcggcgcgccgagatgaaggtctccgtgaagacgctcaagggatctagcttccagatcgaagtggagcccaccgacaaggttgctgctgtgaaaaaggtcatagagaatatgcaagagcaggcttcctatccagctgaccaacaagtccttatacatcaaggaaaggtgctcagcgatgacaccacattagaggaaaatcaagtgactgagaataatttccttgttataatgctcagacagaacaagggatcatcaagtgcagcaccggctaagacaactgcgaatcaggcacctnctactcagacagtgcctgttgttccacctcaaacgtcagcagccccagctgcaccagcaccta

SEQ ID NO: 89000 - DNA, 431 bp, Zea mays
ctagcaacatagaaagcacaatagtgtaccaacaatggcagctaaaatattttgcctccttatgctccttggtctttctgcaagtgctgctacggcgaccattttcccacaatgctcacaagctcctatagcttcccttcttcccccgtacctctcaccaacggtgtcttcggtatgtgaaaacccaattcttcaaccctacaggatccaacaggcaatcgcagctggcatcttacctttatcacccttgttcctccaacaatcatcagccctattacagcagttacctttggtgcatttattggcacaaaacatcagggcacaacaactacaacaacttgtgctagcaaaccttgctgcctactctcagcaacagcagtttcttccattcaaccaactagctgcattgaactctgcttcttatttgcaac

SEQ ID NO: 89001 - DNA, 415 bp, Zea mays
acgcatctagcagacatcagtaaagcacaatattgtaccaacaatggcagccaaaatattatgcctgcttatgctccttggtctatctgcaagtgctgctaccgcgaccattttgccgcaatgctcgcaagctcctatagcttatcttcttacaacgtacatttgatcagcggtgtattatgactgtgaaaacccaattattcaaccctacaggatccaacaagcaatctcagctggcatattagctatatcacgcatttgcctccaacaattatcagccctattacatcaagtacctacggcgcatctattggcacataacattacggcacatcaactacaacaacttgtgctagcaaaacttgctgtgtactatcatcaacagcagaatcttgcattctaccaactaactgca

SEQ ID NO: 89002 - DNA, 435 bp, Zea mays
atccaatccagatcagcaaagcggcagtgcgtagagaggatcgtcgaacagaacagcatgaagatggtcatcgttctcgtcgtgtgcctggctctgtcagctgccagcgcctctgcaatgcagatgccctgcccctgcgcggggctgcagggcttgtacggcgctggcgccggcctgacgacgatgatgggcgccggcgggctgtacccctacgcggagtacctgaggcagccgcagtgcagcccgctggcggcggcgccctactacgccgggtgtgggcagacgagcgccatgtaccagccgctccggcacagtgctgccagcagcagatgaggatgatggacgtgcagtccgtcgcgcagcagctgcagatgatgatgcagcttgagcgtgccgctgccgccagcagcagcctgtacgagccagctctgatgc

SEQ ID NO: 89003 - DNA, 333 bp, Zea mays
caagtagcagcatagatagcacaatagtttaccaactaaggcagccaaaaaattagccggaccatgcaccaagggctatcagcatatgctgctaccgtgagcatcttgcgctaatggtcagcggatcatatacgttcattatttcacaatgatcacttactacaagtgtcattattacacagataactcccaccagttactccaacgggattcaaacagccagcatagcaagcctataagctacatcaagcaattgctgccaagcgtcttacaacacccaatattccagttgcaacaacgatcctttggacatctaacaatacagaccatcgc

SEQ ID NO: 89004 - DNA, 401 bp, Zea mays
aattcccgggtcgaccacgcgtccggtttgtaccccttgctgaacttcctcaaggctcataactacaagggcacgacgatgatgttgaatgacagaatccaaagccttcgtggtctccaatcatccctgagaaaggcagaggagtatctactgagtgttcctcaagacactccctactcggagttcaaccataggttccaagagcttggcttggagaagggttggggtgacactgcgaagcgtgtactcgacacactccacttgcttctcgaccttctggaggcccctgatcctgccaacttggagaagttccttggaactataccaatgatgttcaacgttgttatcctgtctcctcatggctacttcgcccagtccaatgtgcttggataccctgacac

SEQ ID NO: 89005 - DNA, 352 bp, Zea mays
gcaacatagagagcacaatagagtaccatcaaggctactaaaatattttgcctccttatgctccttggtctttctgcaagtgctgctacggcgaccattttcccacaatgctcacaagctcctatagcttcccttcttcccccgtacctctcaccaacggtgtcttcggtatgtgaaaacccaattcttcaaccctacaggatccaacaggcaatcgcagctggcatcttacctttatcacccttgttcctacaacaatcatcagccctattacagcagttacctttggtgcatttattggcacaaaacatcatggcacaacaactacaacaaacttgggctagcaaacctt

SEQ ID NO: 89006 - DNA, 431 bp, Zea mays
actcgatggcagcgacttggttggccgatcgcgcaccggtcagggaaaaactttggctgttgtcttgcccatattggagtctttggttaatggggcaaacaaggcatctagacggactgaacatggcaggaccccaagtgttctcgttctactaccaacaagagagctggccaatcaggtgcacgctgactttgagttttatggtgcaacatttgggctctctgcatgttgtgtgtatgggggatcaccttatcgtcctcaagaaatggcattgagaagaggtgtggatattgttgttggaactcctggtcgtgtcaaggatttcattgttaaaggaactctcaatttgaaatgcttgaaattccgtgtccttgatgaagctgatgagatgctaaacatgggttttgttgatgatgtcgagctcattcttg

SEQ ID NO: 89007 - DNA, 409 bp, Zea mays
cagcaaccacagcgtcctgctggtagacgtgctggtggaatgcagcagcccatgccaatgggtggtcagcaacaggtgttccctagaggtggtcgtggctatcgctatcctactggacgtggaatgcctgatcctggcatgcacagtgttggtgctgtgatgccaccttcatatgagatgggagggatgccaatgagagaagctgccccccaacctgttccaattggggcgctagccactgcacttgctaacgccccaccagatcagcagagacttatgcttggtgagaacctgtatcctcttgttgaacagctggaacgtgagcaggctgccaaggtcactggcatgcttttggagatggatcagacggaggttcttcacctgctggagtcgccagatgctctgaaag

SEQ ID NO: 89008 - DNA, 344 bp, Zea mays
  unsure (1)..(344): unsure at all n locations
agtttccatctgtcttggttaacagtgctactggaaaactcgaagaatgcttccaaacatatgttcggccgacgtatcatcaattnttgactgatttttgcaaggagcttactggcatacaacagattcaggtggacagaggtgtgcctctaggtgaagccttactcatgcacgataaatggctagaggacaagggcatcaagaacacaaactttgctattgtgacctggtctaactgggactgccgtataatgctggagtcggaatgcagatttaagagaatcaggaagcccccttattttaacaggtggatcaacttgagggtaccgttccaggaagtgtac

SEQ ID NO: 89009 - DNA, 435 bp, Zea mays
gcaacatagaaagtagaatccattagcatcaatagagcaacaatggcgaccaagatattttccctccttatgctccttgctctttctacatgtgttgctaacgcgacaattttccctcaatgctcacaagctcctatagcttcccttcttcccccataccttccatcaattatagcttcagtatgtgaaaacccagctcttcaaccatataggcttcaacaagcaatcgcagcaagcaacatacctttatcgcccttgttgtttcaacaatcaccagccctatctttggtgcagtcattggtacaaaccatcagggcacaacagctgcagcaactcgtgctacctgtgatcaaccaagtagctctggcaaacctttctccctactctcagcaacaacaatttcttccattcaaccaactgtctacactgaaccct

SEQ ID NO: 89010 - DNA, 451 bp, Zea mays
accggtccggaattcccgggctagcaacatagaaagcacaatagtgtaccaacaatggcagccaaaatattttgcttccttatgctccttggtctttctgcaagtgttgctaccgcaaccattttcccacaatgctcacaagctcctatagcttcccttcttcccccatacctctcaccagcggtgtcttcaatgtgtgaaaccccaattgttcaaccctacaggatccaacaggcaatcgcaacaggcatcttaccattatcacccttgttcctccaacaaccgtcagccctattacagcagttacctttggtccatttggtggcacaaaacatcagggcacaacaactacaacaacttgtgctagcaaaccttgctgcatactctcagcaacatcaggttcttccattcaaccaactggctgcattgaactctgctgcttatttgcaac

SEQ ID NO: 89011 - DNA, 382 bp, Zea mays
ccgacccacgcgtgcggaagcaccatctgttgttgctccagtggtcgaaattatgcccctgcaagacatcaacagcgatgaaaatgctttggtgaatgatgtggaagagagatccaaagaagaacatccttgtactgagagcctgaaaggcagcaagaggaggtcttcattctcagctaagcctgaatatccagaaaatggctccaaaaattctccagctctgccaagctacatggctgctacacaatcagcaaaggcgaaactgcggtgaaatagctcaccaaaacttagctctgattcagcagagaaaaacggcttcactcgtcgtcactcccttccatcctctaacaacggtaagatgggttcacattctccacgtaca

SEQ ID NO: 89012 - DNA, 449 bp, Zea mays
ccaggctcgacccacgcgttcggaaagtagaatccattagcaactatagatcaacaatggcgaccaagatattttggctgcttatgctccttgctcttactacatgcgtcgctaacgcgacaatcatctctcaaggctctcaagctcagtatagctttccatttaaccaaataccatccatcgaactctgctgctgattgacagcaccaacaactactaccattcaggctgctagctgctgtgagccctggtgacttattgacacaacaacagttgttgccgctctaactggacgctatgcctaacgctggcacgctactacaactgcaacaactgctgccagttaaccaacttgctttgacaaaccccacagtggtctaccaacaacccatcattggaggtgccctctattagattgcttatgaggtatagctcaataatgaaagttt

SEQ ID NO: 89013 - DNA, 403 bp, Zea mays
ctggacgtcagcctagcaattagctcatcgactccagattggagaactcgacaccatgaaggtgctgatcgttgcccttgctctcctggcgctcgctgcgagcgccgcctccagtacaagcggcggctgtggctgccagacaccaccgtttcatctaccgcctccgttctatatgccgcctccgttctatctgccgccgcagcagcagccgcagccatggcaataccccactcaaccaccgcagctaagcccgtgccagcagttcggatcctgcggcgtcggcagcgtcggcagcccgttcctgggccagtgcgtcgagttcctgaggcaccagtgcagcccggcggcgacgccctacggctcgccacagtgccaggcgctgcagcagcagtgctgccaccag

SEQ ID NO: 89014 - DNA, 421 bp, Zea mays
cctagatcttctgctagctgagacgcaaccagcgaagatctgttctcaggttggcctgtgcacttttgatggcactcacggtgttagcactggaattcgtagcgtagtggatgacaaagctgggaaatcaaatggtggtctcaagagtgatccaatgtgcaatgcctgtgagatggctgtggtatggatgcagaaccaactggcccagaacaagacacaggagctcatcctgacctacattaatcagctttgtgagcgtcttccttctcccatgggagaatcagccgtggactgtgccagtcttgggtccatgcccgacattgcgttcaccattggaggcaagaagttcaagctgaaaccggagcagtacattctgaaggtcggtgaaggacaagctgcccagtgcatcagtggattcaca

SEQ ID NO: 89015 - DNA, 364 bp, Zea mays
  unsure (1)..(364): unsure at all n locations
cgcacaagcagggacaaggaagtgcaccggcggcgtcgccatcgatcgagtagatactagatagtgtgtcaggttgctgtcagctagagccatggcgtccatgcagaagagccgcgagcagcgcgcccaggccgcggcgcagaaggcggccgacgagctccacgcgtcgaggcaggacagagtccccgaggaggcgcccgtcagcccccgcggcggcggcggcatcctgggcagcctgcaggaggggaaggcgaacgccaggggcgtggcggacgccgccatgggcaaggccagcgagacgaaggacgcggcggcggacaaggcgggtggcgtcagggaccgcgcngcggacaggacggggaat

SEQ ID NO: 89016 - DNA, 466 bp, Zea mays
gaatacccgggaacacaccaagcgaagcacattagcaacaacctaacaacaatggttaccaagatattatccctccttgcgcttcttgcgctttttgcgagcgcaacaaatgcgttcattattccacaatgctcacttgctccaagttccattattacacagttcctcccaccagttacttcaatgggcttcgaacacccagctgtgcaagcctataggctacaacaagcaattgcggcgagcgtcttacaacaaccaatttcccagttgcaacaacaatccttggcacatctaacaatacaaaccatcgcaacgcaacagcaacaacaattcctaccagcactgagccaactagccatggtgaaccctgccgcctacttgcaacagcagttgcttgcataaaaccaacttgctctggcaaacgtagttgcaaaccagccacaacaacagctgcaacagtttttgc

SEQ ID NO: 89017 - DNA, 434 bp, Zea mays
  unsure (1)..(434): unsure at all n locations
cacaagtttcgtgggtagaggaggcactagatactgtgccagatcggggtctggtagtggcagttgggtgattacgacggagtgggatgggcctcctcgacaagctgtgggacgacaccgtcgcgggcccgcgcccggacaccggcctcggccgcctccgcaagcagcccgcgcgccccgccgccgttaagatcagtgatccggccggggacgctgcagcgctcgtgccgccctcgccggcttcgggtagcgaggagacgccggtgaaggtgacgcgcagcatcatgatcaagcgtcccgcggggtacccgtcttcgccgaggagcgcggcaagcacgccgncggcctctccactagggactaccccgcccatctcgccgtttgccggcgctggtggtcgcttcagaaagaaatcatcatccgacgcatatgag

SEQ ID NO: 89018 - DNA, 162 bp, Zea mays
agaaactatgtgctgtagtatagccgctggctagctagctagttgagtcatttagcggcgatgattgagtaataatgtgtcacgcatcaccatgggtggcagtgtcagtgtgagcaatgacctgaatgaacaattgaaatgaaaagaaaaaagtattgttcc

SEQ ID NO: 89019 - DNA, 368 bp, Zea mays
gctgccaccagatcaggcaggtggagcctctgcaccggtaccaggcgacatacggtgtggtcctgcagtccttcctgcagcagcagccgcagggcgagctcgcggcgctgatggcggcccaggtagcgcagcagctgacggcgatgtgcggcctgcagctgcagcagccaggtccctgcccttgaacgcagctgccggcggtgtctactactgaagaaactatgtactgtagtaataatgtaatggagccgctgactagctacctagctagctagttgagtcatttagcggcgatgattgagtaataatgtgtcacgcatcaccatgggtggcagagtcagtgtgagcaatgacctgaatgaacaatt

SEQ ID NO: 89020 - DNA, 340 bp, Zea mays
agcgacaacagttacttaatccattggctgtggctaacccattggtcgctgccttcctacagcagcaacaattgctgccatacaaccggttctctttgatgaatcctgtcttgtcgaggcagcaacccatcgttggaggtgccatcttttagattacatatgagatgtactcgataatggtgccctcataccggcatgtgtttcctagaaataatcaatatattggttgagatttatctcgataaaaaaaagaaactataaaatataaaacacaatactataagaaaaaatatagctataaaaaaacgaaaatatgatataaattaagagcagaagaact

SEQ ID NO: 89021 - DNA, 422 bp, Zea mays
  unsure (1)..(422): unsure at all n locations
gacaagcagcaacaaccacaacagcctcagcaatatcagcagggccaggaaaaatcacagcagcaacaatgtcattgccaggagcagcaacagactacaaggtgcagctataactactatagcagtagctcaaatctaaaaaattgtcatgaattcctaaggcagcagtgcagccctttggtaatgccttttctccaatcacgtttgatacaaccaagtagctgccaggtattgcagcaacaatgttgtcatgatcttaggcagattgagccacaatacattcaccaagcaatctacaacatggttcaatccataatccaggaggagcaacaacaacaaccatgtgagttatgtggatctcaacaagctactcanagtgcggtggcaatctagacagcagcacaatacctaccatcaatgtg

SEQ ID NO: 89022 - DNA, 387 bp, Zea mays
atggacgtcagcctagcaattagctcatagactccagataggagaactcgacaccatgaaggcgctgatcgttgcccttgctctcctggcgctcgctgcgagcgccgcctccaatacaagcggaggctgtggctgccagacaccaccgtcacatctaccgcctccgatctatatgccgcctccgttctatctgacgacgcagcagcagccacagccatggcaataccccactcaaccaccgcagctaagcccgtgccagcagctcggatcctgcggcgtcagcagcagtcggcagaccgttcctgggccagtgcgtcaagttcctgaggcaccagtgcagcccggatgcgacgccatacggctagtcacagtgccaggcgctgcaat

SEQ ID NO: 89023 - DNA, 438 bp, Zea mays
cagaggcatcttctgaccaatgaaaatggtgaaaccaggtagagtatctgactcaaagataacaacgtttacatgcagatacaagacaacaatatcattgttctctgaacacacatgacctccattgtgacccagcctgtgatgtcttctcgtggtcattctcaagctggctgaagttccccttctccttgatcagctggatgtggtggtgcttgcagtacagcttcccctcgtgcgcaatgtagttagaagggctgatggtgcaccctccatggcagcacttgaagcagctcttgtggtacatagtgttgttaacagtgacctggatgcttaaccggttgtcaagtgaagaaggctcaaactaccggaagaatgattgagatggttgaacacagaatcttaccctctcagttggatagactgtcttgctgcatccaa

SEQ ID NO: 89024 - DNA, 423 bp, Zea mays
gaaagcacaatagtgtaccaacaatggcagccaaaatattttgcctccttatgctccttggtctttctgcaagtgctgctacggcgaccattttcccgcaatgctcgcaagctcctatagcttcccttcttcccccgtacctctcaccagcggtgtcttcggtatgtgaaaacccaattcttcaaccctacaggatccaacaggcaatcgcagctggcatcttacctttatcacccttgttcctccaacaatcatcagccctattacaacagttacctttggtgcatttattggcacaaaacatcagggcacaacaactacaacaacttgtgctagcaaaccttgctgcctactcttaacaacagcagtttcttccattcaaccaactaggttcattgaactctgcttcctatttgcaacaac

SEQ ID NO: 89025 - DNA, 380 bp, Zea mays
catcaagcaacatagaaagtggcatactttagcatcaatagagcaacaatggcggccatggaatattccatccttacgttcagagctctttctgcatgtgttgctaacgcgaccatcatatctcattacttacaagctactatagctgccctttttgcggcatccttacattaatgaccgcttcagtttgcgagatcccatgcatttaaccgtacaggctccaacacgtctatctagcacgccatgttacctgtatgacctgtgtggtttcaatcaatggcagccttatatctggtgcatgtcattgatacagaccatcacggcacaccagctgcatcaactcgtgctaccagtgatcagccaagtagctctggcaaacc

SEQ ID NO: 89026 - DNA, 365 bp, Zea mays
aattcccgggctgccaaaacactgacttgtgtctgatgaacttagatgtttacattgatgatgaaaagttgcgtgaaatcggtggtgtgtatggcaatattacttgttgcaaggttatgctggattcgtatggtgtcagcagacgttctggatacggtgcattcagatctgctgtagatgctaaccgagctcttaccgagatgaatggcacaatggttggaagcaagcccctttatgtcgctcttgcacagcctagcgatgacacacatgcaaagctacgggcacagagttcacaaatgcgtcctgttgcagtggcaccttcagtaggttctcgcatgcccatgtttacacctagtgttcctgga

SEQ ID NO: 89027 - DNA, 386 bp, Zea mays
gggttcgtgaggttctccggggttcggtttcgtgggtgagcggatcgagatggcggcgtcggatgttgagtaccgctgcttcgtcggcggcctcgcctgggccacggacgaccactccctccacaacgccttcagcacctacggcgaggtcctcgagtccaagatcatcctcgatcgggagacgcagaggtcccgcggcttcggcttcgtcaccttttccacggaggaggcgatgcggaacgccatcgagggcatgaacggcaaggagctggacggccgcaacatcaccgtcaacgaggcccagtcccgcggcggccgcggaggcggcggcggcggcgggtacagtggtggccgtggaggcggcggctacggcggtggcgggcgcc

SEQ ID NO: 89028 - DNA, 404 bp, Zea mays
cgcaaattgcaccaagaaatccatcgagaggccgtcgacaggggaattaatggcgtcgtcgtctagcagcagccaccgccgcctcatcctcgcagccgccgtcctgctctccgtgctcgcggctgccagcgccagcgccgggacctcctgcgtgccggggtgggccatcccgcacaacccgctcccgagctgccgctggtacgtgaccagccggacctgcggcatcgggccgagcctcccgtggccggagctgaagaggagatgctgccgggagctggcggacatcccggcgtactgccggtgcacggcgctgagcatgctcatggacggcgcgatcccgccgggcccggacgcgcagctggagggccgcctagaggacctgccgggctgcccgcgggaggtgc

SEQ ID NO: 89029 - DNA, 401 bp, Zea mays
attttgagcattcagaaacacaccaagctaagctacctagcaacgacttaacaacaatggctaccaagatattagccctccttgcgcttcttgccctttttgtgagcgcaacaaatgcgttcattattccacaatgctcacttgctcctagtgccattataccacagttcctccgaccagttacttcaatgggcttcgaacacctagctgtgcaagcctacaggctacaacaagcgcttgcggcgagcgtcttacaacaaccaattaaccaattgcaacaacaatccttggcacatctaaccatacaaaccatcgcaacacaacagcaacaacagttcctaccagcactgagccaactagatgtggtgaaccctgtcgcctacttgcaacagcaggtgctt

SEQ ID NO: 89030 - DNA, 414 bp, Zea mays
cttcctttcttcccccatacctctcaccagcggtgtcttcagtatgtgaaaacccaattcttcaaccctacaggatccaacaggcaatcgcagcaggcatcttacctttatcacccttgttcctccaacaaccgtcagccctattacagcagttacctttggtgcatttgttggcacaaaacatcaaggcacaacaactacaacaacttgtgctaggaaaccttgctgcctactctcagcaacagcagtttcttccattcaaccaactggctgcattgaactctgctgcttatttgcaacaacaactaccattcagtcagctagctgctgcctacccccagcaatttcttccattcaaccaactggcagcattgaactctgctgcttatttacaacagcaacagctaccaccat

SEQ ID NO: 89031 - DNA, 459 bp, Zea mays
gctgtaccggttcggaattcccggggttccaaaacactaacttgtatctgaagaacttagatgataacattgatgatgaaaagttgcgtgaaatctttgctgagtatggcaatattacttcttgcaaggttatgcgggattcttatggtgttagcagagggtctggatttgttgcattcaaatctgctgaagatgctaaccgagctcttaccgagatgaatggcaaaatggttggaagcaagcccctttatgtagctcttgcacagcgtaaagatgacagaaaggcaaagctacaggcacagttttcacaaatgcgtcctgttgcaatggcaccttcagtaggtcctcgcatgcccatgttttcacctagtgttcctggagttggtcagcagctgttttatggtcagccaccttcagccttcattaacccttaggctggatttgctttccagcaaccta

SEQ ID NO: 89032 - DNA, 437 bp, Zea mays
cagatcagcaaagcggcagtgcgtagagaggatcgtcgaacagaacagcatgaagatggtcatcgttctcgtcgtgtgcctggctctgtcagctgccagcgcctctgcaatgcagatgccctgcccctgcgcggggctgcagggcttgtacggcgctggcgccggcctgacgacgatgatgggcgccggcgggctgtacccctacgcggagtacctgaggcagccgcagtgcagcccgctggcggcggcgccctactacgccgggtgtgggcagccgagcgccatgttccagccgctccggcaacagtgctgccagcagcagatgaggatgatggacgtgcagtccgtcgcgcagcagctgcagatgatgatgcagcttgagcgtgccgctgccgccagcagcagcctgtacgagccagctctgatgcagcagcagc

SEQ ID NO: 89033 - DNA, 437 bp, Zea mays
tgagcattcagaaacacaccaagtctaagcgcactagcaacaacctaacaacaatggctaccaagatattatccctccttgcgcttcttgcgctttttgcgagcgcaacaaatgcgtccattattccacaatgctcacttgctcctagttccattattccacagttcctcccaccagttacttcaatggccttctgaacacccagctgtgcaagcctataggctacaacaagcgattgcggcgagcgtcttacaacaaccaattgcccaattgcaacaacaatccttggcacatctaacaatacaaaccatcgcaacgcaacagcaacaacagttcctaccagcactgagccacctagccatggtgaaccctgtcgcctacttgcaacagcagctgcttgcattcaacccacttgctctagcaaacgtagttgcaaa

SEQ ID NO: 89034 - DNA, 436 bp, Zea mays
ctagcaacatagaaagcacaatagtgtaccaacaatggcagccaaaatattttgcctccttatgctccttggtctttctgcaagtgctgctacggcgaccattttcccgcaatgctcgcaagctcctatagcttcccttcttcccccgtacctctcaccagcggtgtcttcggtatgtgaaaacccaattcttcaaccctacaggatccaacaggcaatcacagctggcatcttacctttatcacccttgttcctccaacaatcatcagccctattacatcagttacctttggtgcatttattggcacaaaacatcagggcacaacaactacaacaacttgtgctagcaaaccttgctgcctactctcagcaacagcagtttcttccattcaaccaactagctgcattgaactctgcttcttatttgcaacaacaa

SEQ ID NO: 89035 - DNA, 419 bp, Zea mays
  unsure (1)..(419): unsure at all n locations
aaagcttacaccaagggggcattgcttgttgaagttcctgcaaatagtgttggctctaatctggattcggcgccattggctgcagaaaaaactgactccattgaccttgcatgtccattgtgtcgtggcaaggtgaaagggtggacggtggtggaaccagctcgaagctacctcaatggaaaacgaagaacatgcatgcaggatggttgctcatttgtggtgacctacaaggagctccgcaagcatgtcaagttggaacaccctcttgcaaagccaagggaagttgatcctgtccttgagcaaaaatggagattgctcgagattganagagagctgcaagatgcgctcagcacgatcacggcaacaatgggcagagcccgtgtttttcgtgattatgtgctagacttggacgatggaat

SEQ ID NO: 89036 - DNA, 302 bp, Zea mays
cttgcaacaacaacaattgctgccattctacccacaggatgtggcaaacattgtcgccttcttacaacaacagcaattgctgccatttagccaactcgctttgacgaatcctaccaccttattgcatcagcccaccattggtggtaccatcttctagattttttatgctttatactgtaataataaatttctcatactgatatgtgcaacttctcagtaataaaagattagagatctataaaaaaaacgaaaaaaaacaaacaaaagaccaaaagcaacaacaaaacaaggcacatctaaca

SEQ ID NO: 89037 - DNA, 428 bp, Zea mays
attagcggctacacaaatgcctgaagagccagctggatggttccagggtacagcagactctatcagaaaatttatctgggtactcgaggattattacagtcacaaatccattgacaacattgtaatcttgagtggcgatcagctttatcggatgaattacatggaacttgtgcagaaacatgtcgaggacgatgctgatatcactatatcatgtgctcctgttgatgagagccgagcttctaaaaatgggctagtgaagattgatcatactggacgtgtacttcaattctttgaaaaaccaaagggtgctgatttgaattctatgagagttgagaccaacttcctgagctatgctatagatgatgcacagaaatatccataccttgcatcaatgggcatttatgtcttcaagaaagatgcacttttag

SEQ ID NO: 89038 - DNA, 420 bp, Zea mays
  unsure (1)..(420): unsure at all n locations
caatcgcagcaagcaacatacctttatcgcccttgttgtttcaacaatcaccagccctatctttggtgcagtcattggtacaaaccatcagggcacaacagctgcagcaactcgtgctacctgtgatcaaccaagtagctctggcaaacctttctccctactctcagcaacaacaatttcttccattcaaccaactgtctacactgaaccctgctgcttatttgcagcaacaactattaccatttagccagctagctactgcctactctcagcaacaacaacttcttccatttaaccaattggccgcactgaaccccgctgcttatttgcagcagcaaatactactgccatttagcgagctagctgcagcaagtcgtgcttncttcttgacacagcaacagttgctgcctttctacaagc

SEQ ID NO: 89039 - DNA, 432 bp, Zea mays
gaaagcacaatagtgtaccaacaatggcagccaaaatattttgcctccttatgctccttggtctttctgcaagtgctgctacggcgaccattttcccgcaatgctcgcaagctcctatagcttcccttcttcccccgtacctctcaccagcggtgtcttcggtatgtgaaaacccaattcttcaaccctacaggatccaacaggcaatcgcagctggcatcttacctttatcacccttgttcctccaacaatcatcagccctattacaacagttacctttggtgcatttattggcacaaaacatcagggcacaacaactacaacaacttgtgctagcaaaccttgctgcctactctcagcaacagcagtttcttccattcaaccaactaggttcattgaactctgcttcttatttgcaacaacaacaactac

SEQ ID NO: 89040 - DNA, 434 bp, Zea mays
gcaacatagaaagcacaatagtgtaccaacaatggcagccaaaatattttgcctccttatgctccttggtctttctgcaagtgctgctacggcgaccattttcccgcaatgctcgcaagctcctatagcttcccttcttcccccgtacctctcaccagcggtgtcttcggtatgtgaaaacccaattcttcaaccctacaggatccaacaggcaatcacagctggcatcttacctttatcacccttgttcctccaacaatcatcagccctattacatcagttacctttggtgcatttattggcacaaaacatcagggcacaacaactacaacaacttgtgctagcaaaccttgctgcctactctcagcaacagcagtttcttccattcaaccaactagctgcattgaactctgcttcttatttgcaacaacaac

SEQ ID NO: 89041 - DNA, 471 bp, Zea mays
accggttcggaattcccggcattgagaccaactagcaacatagaaagcacaatattgtaccaataatggcagccaaaatattttgcctcattatgctccttggtctttctgcaagtgctgctacggcgagcattttcccgcaatgctcacaagctcctatagcttcccttcttcccccatacctctcaccagcgatgtcttcagtatgtgaaaatccaattcttctaccctacaggatccaacaggcaatcgcagcaggcatcttacctttatcacccttgttcctccaacaatcatcagccctattacagcagttacctttggtgcatttattggcacaaaacatcaaggcacaacaactacaacaactcgtgctagcaaaccttgctgcctactctcagcaacagcagttacctttggtgcatttgttggcacaaaacatcagggcacaacaactacaacaactcgtgc

SEQ ID NO: 89042 - DNA, 209 bp, Zea mays
gagagagatggatagaggagatttcccatatatcatgaatcagtagtagggcggaatggcagcggagacgccacacattatcatgtgtggtatgaccaataatatatgcatggtcataataaagttttggttttaatgaatcaaaaaaaaaaaaaaaaaaaaaagaaaaataaaaaaaaataaaaaacaaaaaaaaaaacatacaagaa

SEQ ID NO: 89043 - DNA, 433 bp, Zea mays
aggccatcgcagcaagcatcttacggtcgttagcattgaccgtccaacaaccatatgccctattgcaacaaccatccttaatgaatctatatctccaaagaatcgcagcacaacaactacaacaacagttgcttccaacaatcaatcaagtagttgcagcgaaccttgctgcttacctccagcaacaacaatttcttccattcaatcaactagctggggtgaaccctgctgcttacttgcaggcacaacagctactaccattcaaccaacttgtcaggagccctgctgccttcttactgcagcaacagttgcttccattccatctacaagttgtggcaaacattgctgctttcttgcaacaacaacaacaattgctgccattttacccacaggttgtgggaaacattaacgcctacctacaacagcaacaact

SEQ ID NO: 89044 - DNA, 362 bp, Zea mays
cgaagatcacattctcaagagaagctgtgtcgagcgtgtgctcctttgtgtcagagcacgtcccttccatagacttggaatcctgggatgaaagtgccatgaccgaaggcacacccccagccaaagcacagctgttttgccccgagggtaaaagtatatcttccgtgaagtttgcgagcttgggaaaccccagtggaacctgtagatcataccaaatggggcgctgccaccacccgaactccttatctgttgctgagaaggcttgtctgaacaccaacagctgtacagtctccctgacagacgagagctttgggaaggatctatgccctggagtcaccaaaacactcgacatcgaagcggac

SEQ ID NO: 89045 - DNA, 473 bp, Zea mays
aattccgcgattcgaggccacgacccacgcgtctcggcaacatagaaagcacaatagtgtaccaacaatggcagccaaaatattttgcctccttatgctccttggtctttctgcaagtgctgctacggcgaccattttcccgcaatgctcgcaagctcctatagcttcccttcttcccccgtacctctcaccagcggtgtcttcggtatgtgaaaacccaattcttcaaccctacaggatccaacaggcaatcacagctggcatcttacctttatcacccttgttcctccaacaatcatcagccctattacatcagttacctttggtgcatttattggcacaaaacatcagggcacaacaactacaacaacttgtgctagcaaaccttgctgcctactctcagcaacagcagtttcttccattcaaccaactagctgcattgaactctgcttcttatttgcaacaacaacaac

SEQ ID NO: 89046 - DNA, 428 bp, Zea mays
gtattttgcagcaaaaggcagatgagggtaagttaaaatctcaaattgcttccctggagtctagggtgagtatcagtgagggtaggttgtcggcaacacgtgaacaggctgattctgctcaagaggaagcatccgaatggaaacgcaaatatgacgttgctgttagtgaggccaaaacagctctgcagagagcggcggtagcacaggaacacacaaataagaaagtgcaagagagggaagatgctttgagggtagagcttgctaaccgactatctgagaaggaagagaaaattgcaagattacatgcaaaacttagtcaaatggaaattcatgctacaagtttgatctcgaggcttgaggccactgaagcgaagtcgaagagccatgagtctgattcgttggctttgatggaggagatcagattactg

SEQ ID NO: 89047 - DNA, 434 bp, Zea mays
gctgtggtgaaccctgtcgcctacttgcaacagcagttgcttgcatccaacccacttgctctggcaaacatagttgcataccaacaacaacaacaattgcaacagtttctaccagcgctcagtcaactagccatggtgaaccctgccgcctacctacaacagcaacaactgatttcatctagccctctcgctgtggttaatgcacctacatacctgcaacaacagttgctgcaacagattgtaccagctctgactcagctagctgtggcaaaccctgctgcctacttgcaacagctgcttccattcaaccaactgactgtgtcgaactctgctgcgtacctacaacagcgacaacagttacttaatccactagcggtggctaacccattggtcgctgccttcctacagcagcaacaattgctgccatacaacca

SEQ ID NO: 89048 - DNA, 438 bp, Zea mays
acaggatccaacaggcaatcgcaacaggcatcttaccattatcacccttgttcctccaacaaccgtcagccctattacagcagttacctttggtccatttggtggcacaaaacatcagggcacaacaactacaacaacttgtgctagcaaaccttgctgcatactctcagcaacatcagtttcttccattcaaccaactggctgcattgaactctgctgcttatttgcaacaacaattaccattcagccagctagttgctgcctacccccagcaatttcttccattcaaccaactagcagcattgaactctgctgcttatttacagcagcaacaactactaccattcagccagctagctgatgtgagccctgctgccttcttgacacaacaacagttgttgccgttctacctgcacgctatgcctaacgctggcaccc

SEQ ID NO: 89049 - DNA, 437 bp, Zea mays
agcaacatagaaagcacaatagtgtaccaacaatggcagctaaaatattttgcctccttatgctccttggtctttctgcaagtgctgctacggcgaccattttcccacaatgctcacaagctcctatagcttcccttcttcccccgtacctctcaccaacggtgtcttcggtatgtgaaaacccaattcttcaaccctacaggatccaacaggcaatcgcagctggcatcttacctttatcacccttgttcctccaacaatcatcagccctattacagcagttacctttggtgcatttattggcacaaaacatcagggcacaacaactacaacaacttgtgctagcaaaccttgctgcctactctcagcaacagcagtttcttccattcaaccaactagctgcattgaactctgcttcttatttgcaacaacaacaa

SEQ ID NO: 89050 - DNA, 437 bp, Zea mays
attcaaaaacacaccaagcgaagcgcactagcaacgacctaacaccaatggctaccaagatattagccctccttgcgcttcttgcccttttagtgagcgcaacaaatgcgttcattattccacagtgctcacttgctcctagtgccagtattccacagttcctcccaccagttacttcaatgggcttcgaacatccagccgtgcaagcctacaggctacaactagcgcttgcggcgagcgccttacaacaaccaattgcccaattgcaacaacaatccttggcacatctaaccctacaaaccattgcaacgcaacaacaacaacaacagtttctgccatcactgagccaactagccgtggtgaaccctgtcacctacttgcaacagcagctgcttgcatccaacccacttgctctggcgaacgtagctgcataccac

SEQ ID NO: 89051 - DNA, 310 bp, Zea mays
caactagcaacatagaaagcacaatagtgtaccaacaatggcagccaaaatattttgcctgcttatgctccttggtcctttttgcaggtgctgttacgggaacaattttcccgcattgctcgcaggctctaatagcttcccttcttcccccgtacctttaaccagcggtgtcttcggtatgtgaaaacccaattcttcaaccctacaggatccaacaggcaatcacagttggcatcttacctttatcaccctggttcctccaacaatcatcagccctattacatcagttaccttgggcgcatatattggc

SEQ ID NO: 89052 - DNA, 441 bp, Zea mays
ctagcaacatagaaagcacaatagtgtaccaacattggcagccaaaatattttgcctccgtatgctccttggtctttctgcaagtgctgctacggcgaccattttcccgcaatgctcgcaagctcctatagcttcccttcttcccccgtacctctcaccagcggtgtcttcggtatgtgaaaacccaattcttcaaccctacaggatccaacatgcagtcacagctggcatcttacctttatgacccttgtttctgcaacaatcatcagccctatctcatcagttacctttgttgcattgatcggcacataccatcacggcacatcaactacaacaacttgtgctagcaaaccttgctgcctactctcagcaacagcagtttcttccattcaaccaactagctgcattgaactctgcttcttatttgcaacaacaacaact

SEQ ID NO: 89053 - DNA, 418 bp, Zea mays
  unsure (1)..(418): unsure at all n locations
caactagcaacatagaaagcacaatagtgtaccaacaatggcagccaaaatattttgcctccttatgctccttggtctttctgcaagtgctgctacggcgaccattttcccacaatgctcacaagctcctatagcttcccttcttcccccgtacctctcaccagcggtgtcttcggtatgtgaaaacccaattcttcaaccctataggatccaacaggcaatcgcagctggcatcttacctttatcacccttgttcctccaacaatcatcagccctattacagcagttacctttggtgcatttattggcacaaaacatcaaggcacaacaactacaacaactngtgctagcaaaccttgctgcctactctcagcaacaacagtttcttccattcaaccaactagctgcattgaactct

SEQ ID NO: 89054 - DNA, 278 bp, Zea mays
gtgtgggtagcctgcgttctacgaagcgttcggcctgactgtgatcgagtccatgacgtgcggtctgccaacgatcgcgacctgccatggtggccctgctgagatcatcgtggacggggtatctggcctgcacattgacccttaccacagcgacaaggccgcggatatcctggtcaacttctttgacaaatgcaaggcagatccgagctactgggacaagatctcacagggcggcctgcagagaatctatgagaagtacacctggaagctctactccg

SEQ ID NO: 89055 - DNA, 413 bp, Zea mays
cgtaaattatctaccaaaaaaatttcaagattttttattgattgtctccgctctctgtataatatttttttttgatttggctaactgatgttattgtttacaccatgcaatatgtcttggtacaacacggctaatgaagtgagcgattagaagagagttcacaacgactgactgaacgaacaaagattataaaatgacataattccaccataaagagaccaaataagagaaagtttgtgagctcaagtttctaaaataagtcacatgaactcaaacttataaaaagatagatcaaaatatgaagtgattgctaaagtcatgcatcaataaaaactggatgcgctctttgtagcaattattaacatttaaaaccaacaaataactttttattttactgttagtgtgataaatca

SEQ ID NO: 89056 - DNA, 351 bp, Zea mays
  unsure (1)..(351): unsure at all n locations
catttaaccaattggccgcactgaaccctgctgcttatttgcagcagcaaatactactgccatttagcgagctagctgcagcaagtcgtgcttccttcttgacacagcaacagttgctgcctttctacaagcagtttgcggctaaccccgcaaccctcttacaactacaacaattgttgccctttgtccaacttgctttgacaaacccagcagcctnctaccaacaacacatcattggtggtgccctcttttagattgattattagttgtaattcaataataaaagtttttggatgatgtatgttggcaaccagaaataagaagttacattttcagattctaaaaaataaa

SEQ ID NO: 89057 - DNA, 474 bp, Zea mays
accggttcggaattcccggggacctttacagcagctaaacttacaagatatctccgatggttaggtcatgaaacaaaacacttcaatgttggaaagtaccgccggctcaagcatggaactaatcagactgctgatttctttcgtggagataacagggagggtgtggaggcacgtaacgaggtggctgcattagcaatggaagatatgctatcttggatgcaggagggtggtcaggttggtattttcgatgccacaaacagcacaagaatacggaggaacatgctgatgaaaatggctgaaggaaaatgtaagatcatctttttggaaacattatgtaatgaccaagatgttcttgagagaaatatacgattgaaagttcaacaaagtcctgattatgcagagcaaacagattttgaagctggtgtacaagatttcaaagagcgattgacctattatgaaaaggtctatgaaccg

SEQ ID NO: 89058 - DNA, 417 bp, Zea mays
tcagaaacacacctagcgaagcgcactagcaacgacctaacaacaatggcttccaagacattatccctccttgcgcttcttgccctttttgtgagtgcaacaaatgcgttcattattccacaatgctcacttgctccgagtgccattattccacagttcctccctccagttacttcaatgggcttcgaacacccagctgtgcaagcctataggctacaacaagcgcttgcggcgagcgtcttagaacaaccaattgcccaattacaacaacaatccttggcacatctaaccatacaaaccatcgcaacgcagcagcaacaagcactgagccacctagccgtggtgaaccctatcgcctacttgcaacaacagctgcttgcatccaacccacttgctttggcaaacgtagctgcatac

SEQ ID NO: 89059 - DNA, 435 bp, Zea mays; identical to SEQ ID NO: 88731

SEQ ID NO: 89060 - DNA, 434 bp, Zea mays
caactagcaacatagaaagcacaatagtgtaccaacaatggcagccaaaatattttgcctccttatgctccttggtctttctgcaagtgctgctacggcgaccattttcccgcaatgctcgcaagctcctatagcttcccttcttcccccgtacctctcaccagcggtgtcttcggtatgtgaaaacccaattcttcaaccctacaggatccaacaggcaatcacagctggcatcttacctttatcacccttgttcctccaacaatcatcagccctattacatcagttacctttggtgcatttattggcacaaaacatcagggcacaacaactacaacaacttgtgctagcaaaccttgctgcctactctcagcaacagcagtttcttccattcaaccaactagctgcattgaactctgcttcttatttgcaac

SEQ ID NO: 89061 - DNA, 342 bp, Zea mays
gcaacatagaaagcacaatagtgtaccatcaatgtcagccaaaatattttgcttccttatgctccgtggtctttctgcaagtgctgctaccgcaaccattttcccacaatgctcacaagctcctatagcttcctttcttcccccatacctctcaccagcggtgtcttcagtatgtgaaaacccaattcttcaaccctacaggatccaacaggcaatcgcagcaggcatgttacctttatcacccttgatcctacaacaaccgtgagccctattacagcagctacctttggtgcatttgctgtcacaaaacatcaaggcacaacaactacaacaacttgtgct

SEQ ID NO: 89062 - DNA, 416 bp, Zea mays
catcaagcaacatacaaagtggaatccagtatcaacaacagagcaacaatggcgaccaagatatgctccatccttatgctccttgctctttctgcatgtgttgctaacgcgacaattttccctcaatgctcacaagctactatagcttatcttattcacacataccttccatcaatgatagcttcagtatgtgaaaacccagctcttcagccctataggctgcaacaagcaatcgcagcaagcaacatacctttatcacccttgttggttcaacaatcgacagccctatatgcggtgcactcattggttcaaaccatcatggcacagtatctgcagcaactcgtgctacctgtgatcaaccaagtagctatggcaaacctttctacctactctcagcaacaaacaatttcttccat

SEQ ID NO: 89063 - DNA, 470 bp, Zea mays
  unsure (1)..(470): unsure at all n locations
ccggttcggaattcccgggcattttgagcattcagaaacacaccaagcgaagcgcactagcaactacctaacaacaatggctaccaagatattagccctccttgcgcttcttgccctttttgtgagcgcaacaaatgcgttcattattccacaatgctcacttgctcctagtgccattattccacagttcctcccaccagttacttcaatgggcttcgaacacctagctgtgcaagccaacatgcaacaacaagcgcttgcggcgagcgtcttacaacaaccaattgcccaattgcaacaacaatccttgccacatctaacaatacaagccatcacaacgcaacagcaacaacagttcctaccagcactgagccacctagccatggtgaaccctgccgnctacttgcaagagcagctgcttgcatccaacccacttgctctggcgaacgtagttgcaaaccagcaacaac

SEQ ID NO: 89064 - DNA, 437 bp, Zea mays
caactagcaacatagaaagcacaatagtgtaccaacaatggcagccaaaatattttgcctccttatgctccttggtctttctgcaagtgctgctacggcgaccattttcccgcaatgctcgcaagctcctatagcttcccttcttcccccgtacctctcaccagcggtgtcttcggtatgtgaaaacccaattcttcaaccctacaggatccaacaggcaatcgcagctggcatcttacctttatcacccttgttcctccaacaatcatcagccctattacaacagttacctttggtgcatttattggcacaaaacatcagggcacaacaactacaacaacttgtgctagcaaaccttgctgcctactctcagcaacagcagtttcttccattcaaccaactaggttcattgaactctgcttcttatttgcaacaac

SEQ ID NO: 89065 - DNA, 437 bp, Zea mays
aacaagcaacatagaaagtggaatccagtagcaacaatagagcaacaatggcgaccaagatactttccctccttatgctccttgctctttctgcatgtgttgctaacgcgacaattttccctcaatgctcacaagctcctatagcttcccttcttcccccataccttccatcaatgatagcttcagtatgtgaaaacccagctcttcaaccctataggctccaacaagcaatcgcagcaagcaacatacctttatcacccttgtttcaacaatcgccagccctatctttggtgcagtcattggtacaaaccatcaaggcacagcagctgcagcaactcgtgctacctgtgatcaaccaagtagctctggcaaacctttctccctactatcagcaacaacaatttcttccattcaaccaactatctacactgaaccct

SEQ ID NO: 89066 - DNA, 462 bp, Zea mays
accggttcggaattcccgggcagaaacacacctagcgaagcgcactagcaacgacctaacaacaatggctaccaagatattatccctctttgcgcttcttgccctttttgtgagcgcaacaaatgcgttcattattccacaatgctcacttgctcctagtgccattattccacagttcctccctccagttacttcaatgggcttcgaacacccagctgtgcaagcctacaggctacaacaagcgcttgcggcgagcgtcttacaacaaccaattgcccaattacaacaacaatccttggcacatctaaccatacaaaccatcgcaacgcaacagcaacaacaatttctaccagcactgagccaactagctgtggtgaaccctgtcgcctacttgcaacagcagttgcttgcatccaacccacttgctctggcaaacatagttgcataccaacaacaacaaca

SEQ ID NO: 89067 - DNA, 461 bp, Zea mays
  unsure (1)..(461): unsure at all n locations
ggaattcccgggtcgaccacgcgtncgacagtggcaccagttctaaccagggttaattcacttggccttggggaaccttatggcctacttacaccaggcacaacttctttcatctagcccgctcgctatgggcaatgcacctacatacctgcaacaacagttgttgcaacaacagttgctgcaacaaattgtaccagctcttactcagctagctgtggcaaaccctgctgcctacttgcaacaactacttccattcaaccaactgactgtgtcgaactctgctgcgtacctacaacagcgacaacagttacttaatccactagcggtggcttaacccatggtcgctgcctttctacagcagcaacaattgctgccatacaaccagttctctttgatgaaccctgccttgtcgtggcagcaacccatcgntggtggtgccatcttttagattacatatgaga

SEQ ID NO: 89068 - DNA, 442 bp, Zea mays
  unsure (1)..(442): unsure at all n locations
gccgccgtatcaaacgcactctcctccgccgtcgcccgaggcaagatggttctccagaacgacatcgaccttctgaacccgccggcagagctcgagaaactcaagcacaagaagaagcgcctcgtccaatcccccaactccttcttcatggatgtcaagtgccagggatgcttcagcataaccacggttttcagccactcccagactgttgttgtgtgcccaggctgccaaactgttctctgccagcccacgggaggaaaggcgaggctcacggagggatgctctttccgccggaagggagactagagtggagtctgttattagtactggatcggttgtcaatctccagtatgtggattcaaattttgctctgtgcccagacgttaaggtcatgaactaccttagctaaggctntccgcatgtntgtctggtgctgctatgt

SEQ ID NO: 89069 - DNA, 436 bp, Zea mays
agcaaaccttgctgcctattttaagatccaccagttctggcctttaaaccaactagcggattggaactctgctgctaattggcagcaccaccaactactaccattcagccagctagctgctgcctaccccgggcaatttctttcattcaaccaactggcagcattgaactctcatgcttatgtacaacaaccaacaactactaccattcagccagctagctgctgtgagccctgcttgcttcttgacacagcaacatttgttgccgttctacctgcacactgcgcctaacgttggcaccctcttacaactgcaacaattgctgccattcgaccaacttgctttgacaaacccagcagtgttctaccaacaacccatcattggtggtgccctcttttagattgcttatgagttatagttcaataataaagttttttt

SEQ ID NO: 89070 - DNA, 406 bp, Zea mays
aagcaacatagaaagtagaatccattatcaacaatagagcaacaatggcgaccaagatattttccctccttatgctccttgctctttctacatgtgttgctaacgcgacaattttccctcaatgctcacaagctcctatagcttcccttcttcccccataccttccatcaattatagcttcagtatgtgaaaacccagctcttcaaccatataggcttcaacaagcaatcgcagcaagcaacatacctttatcgcccttgttgtttcaacaatcaccagccctatctttggtgcagtcattggtacaaaccatcaaggcacaacagctgcagcaactcgtgctacctgtgatcaaccaagtagctctggcaaacctttctccctactctcagcaacaacaatttct

SEQ ID NO: 89071 - DNA, 465 bp, Zea mays
ggaaaacccgccccaacaagcaccatagagggagcataccatttacaacttaagtgcaacaatggagccacaatgacgaccaagggatattctctacttatgctccttgctctttctacatgtgttgctaacgcgacaattttccctcaatgctcacaagctcctatagcttcccttcttcccccataccttccatcaattatagcttcagtatgtgaaaacccagctcttcaaccatataggcttcaacaagcaatcgcagcaagcaacatacctttatcgcccttgttgtttcaacaatcaccagccctatctttggtgcagtcattggtacaaaccatcagggcacaacagctgcagcaactcgtgctacctgtgatcaaccaagtagctctggcaaacctttctccctactctcagcaacaacaatttcttccattcaaccaactgtctacactgaaccct

SEQ ID NO: 89072 - DNA, 410 bp, Zea mays
cagccattagctttatctactccagagcgcagaagaacccgatcgacaccatgagggtgttgctcgttgccctcgctctcctggctctcgctgcgagcgccacctccacgcatacaagcggcggctgcggctgccagccaccgccgccggttcatctaccgccgccggtgcatctgccacctccggttcacctgccacctccggtgcatctcccaccgccggtccacctgccgccgccggtccacctgccaccgccggtccatgtgccgccgccggttcatctgccgccgccaccatgccactaccctactcaaccgccccggcctcagcctcatccccagccacacccatgcccgtgccaacagccgcatccaagcccgtgccagctgcagggaacctgcggcgttggc

SEQ ID NO: 89073 - DNA, 551 bp, Zea mays
  unsure (1)..(551): unsure at all n locations
ttattaaaatattattaagtagttnataggaaggtgtttactacagaatactgtatgctctacggtctcgattccgggtcgaccccgcgtccgcggacgcgtgggttttgggcagcgctgttctggttcctagtatggtgagaattggctgcaccttttgcttcgaataaaaatgcctgctcgttaaaaaaaaaaaaaaaaaaaaaaaaaaaaaaaaaaaaaaaaaaaaaaaaaaaaaaaaaaaataaaaaaaaaaaataaaaaaaaaaaaaaaaaaaaaaaaaaaaaaaaaaaagggcggccgatttaaaggatccaagcttacttacccttgcatgcaacgtcatagcttttcaatagtgtcacctaaattaaattaactggccgtcgtttaaaaacgtctgaactggaaaaaccctggctttacccaacttaatcgctttgcagcaaatccccttatggcaagctggcataataccgaaaaggcccgaaccgaatgccgctcccaaaatttgcccaacccttaatggcaaatgggaccccccctgtaa

SEQ ID NO: 89074 - DNA, 396 bp, Zea mays
gcggcggctgcggctgccagccaccgccgccggttcatctaccgccgccggtgcatctgccacctccggttcacctgccacctccggtgcatctcccaccgccggtccacctgccgccgccggtccacctgccaccgccggtccatgtgccgccgccggttcatctgccgccgccaccatgccactaccctactcaaccgccccggcctcagcctcatccccagccacacccatgcccgtgccaacagccgcatccaagcccgtgccagctgcagggaacctgcggcgttggcagcaccccgatcctgggccagtgcgtcgagtttctgaggcatcagtgcagcccgacggcgacgccctactgctcgcctcagtgccagtcgttgcggcagcagt

SEQ ID NO: 89075 - DNA, 303 bp, Zea mays
atccaatccagatcagcaaagcggcagtgcgtagagaggatcgtcgaacagaacagcatgaagatggtcatcgttctcgtcgtgtgcctggctctgtcagctgccagcgcctctgcaatgcagatgccctgcccctgcgcggggctgcagggcttgtacggcgctggcgccggcctgacgacgatgatgggcgccggcgggctgtacccctacgcggagtacctgaggcagccgcagtgcaacctgttggctgctgtgccctactacgccgtgtgtgggctgtcgagcgccatgttccagtcg

SEQ ID NO: 89076 - DNA, 448 bp, Zea mays
ggtccggaaaaccagcctcgacccacgcgtgcgcgggcaagactattaccttggttgattagagctctgacaccattgacaatgtgaagggcaagatccaggacaaggagggcattcccccagaccagcagcgtctgatctttgcgggcaagcagctggaggatggccgcactctcgcggactacaacatccagaaggagagcacccttcaccttgttctccgactcaagggtggtatgcagatctttgtgaagaccctgactggaaaaaccataaccctggaggttgagagctcggacaccatcgacaatgtgaaggcgaagatccaggacaaggagggcatccacacggaccagcagcgtctgatcttcgccggcaaacagctggaagatggccgcaccctaacagactacaacattcataaagagagcacccttcaccttgtgct

SEQ ID NO: 89077 - DNA, 435 bp, Zea mays
  unsure (1)..(435): unsure at all n locations
gaaggccgagaggagtgacatcccagtcatcgacaagaaaaaagtaccttgtccccgccgacctcacagtgggacagtttgtgtacgtggtgcggaagcgcatcaagctcagcgccgagaaggcgatcttcatcttcgtgaagaacaccctcccaccaacagctgccctgatgtctgccatctacgaggagaacaaggacgaggacgggttcctctacatgacctacagcggcgagaacacctttgggctgctatgagtggcgccgcgccgccgtggatcgacgtcggacaatgcccctccttctgtaaatacttaaaaaaaaaataggcgtctcaagaatccgtgtacataataatctggcatgtcttgcatcaaaagcaactcgttgcgtccactgtctgttgaaactattgaagcgtactanacatttaagc

SEQ ID NO: 89078 - DNA, 481 bp, Zea mays
tgctcgtaccggtccggaattcccgggattttgagcattcagaaacacaccaagcgaagcacattagcatcaacctaacaacaatggctaccaagatattatccctccttgcgcttcttgcgctttttgcgagcgcaacaaatgcgttcattattccacaatgctcacttgctccaagttccattattacacagttcctcccaccagttacttcaatgggcttcgaacacccagctgtgcaagcctataggctacaacaagcaattgcggcgagcgtcttacaacaaccaatttcccagttgcaacaacaatccttggcacatctaacaatacaaaccatcgcaacgcaacagcaacaacaattcctaccagcactgagccacctagccatggtgaaccctgccgcctacttgcaacagcagttgcttgcatcaaacccacttgctctggcaaacgtagttgcaaaccagccacaacaaca

SEQ ID NO: 89079 - DNA, 512 bp, Zea mays
tggtaggttactcgatgtccagccagttagtacctgcagtaccggtccggaattcccgggtcgacccacgcgtacggagaccaactagcaacatagaaagcacaatagcgtaccaacaatggcagccaaaagatcttgctgccttatgctcctgggcctctctgcaagtgatgctaccgcaacgattattcgacaatgctcacatgctcatatagcttctcttattacccaatacctctcaccagcagcgtctacaatgtctgaaacctcaattgctcaacgctacaggatccagcatgcaatagcaacaggcatcttaccagcatcacccttgctcgtccaacatccgacagccctattacagcacttacctgcggtacatttggtgacacacaacatcacggctacacctctacaacaacgttggctagcagacctagctgcatactcttagcacatcagtctcttgcattcaccaactggctgcattgaactctgctgcttatcagcac

SEQ ID NO: 89080 - DNA, 435 bp, Zea mays
gaccaacaagcaacatagaaagtggaatccagtagcaacaatagagcaacaatggcgaccaagatactttccctccttatgctccttgctctttctgcatgtgttgctaacgcgacaattttccctcaatgctcacaagctcctatagcttcccttcttcccccataccttccatcaatgatagcttcagtatgtgaaaacccagctcttcaaccctataggctccaacaagcaatcgcagcaagcaacatacctttatcacccttgtttcaacaatcgccagccctatctttggtgcagtcattggtacaaaccatcaaggcacagcagctgcagcaactcgtgctacctgtgatcaaccaagtagctctggcaaacctttctccctactatcagcaacaacaatttctttcattcaaccaactatctacactg

SEQ ID NO: 89081 - DNA, 386 bp, Zea mays
caactagcaacatagaaagcacaatagtgtaccaacaatggcagccaaaatattttgcttccttatgctccttggtctttctgcaagtgttgctaccgcaaccattttcccacaatgctcacaagctcctatagcttcccttcttcccccatacctctcaccagcggtgtcttcaatgtgtgaaaccccaattgttcaaccctacaggatccaacaggcaatcgcaacaggcatcttaccattatcacccttgttcctccaacaaccgtcagccctattacagcagttacctttggtccatttggtggcacaaaacatcagggcacaacaactacaacaacttgtgctagcaaaccttgctgcatactctcaacaacatcagtttc

SEQ ID NO: 89082 - DNA, 436 bp, Zea mays
  unsure (1)..(436): unsure at all n locations
gcacatagaagcgcaatatgtactatctatggcagccaaaatattttgcctccttatgctccttggtctttctgcaagtgctgctacngcgaccattttcccgcaatgctcgcaagctcctatagcttcccttcttcccccgtacctctcaccagcggtgtcttcggtatgtgaaaacccaattcttcaaccctacaggatccaacaggcaatcgcagctggcatcttacctttatcacccttgttccttcaacaatcatcagccctattacaacagttacctttggtgcatttattggcacaaaacatcagggcacaacaactacaacaacttgtgctagcaaaccttgctgcctactctcagcaacagcagtttcttccattcaaccaactaggttcattgaactctgcttcttatttgcaacaacaacaacta

SEQ ID NO: 89083 - DNA, 424 bp, Zea mays
ctcattgttaccaggctgttgcctgatgctgctgggactacgtgcggtcagcggctggagaaggtcattggtactgagcacacagacatcattcgcgttccgttcagaaatgagaatggcatcctccgcaagtggatctctcgttttgatgtctggccatacctggagacatacactgaggatgtttccagtgaaataatgaaagaaatgcaggccaagcctgaccttatcattggcaactacagcgatggcaacctagtcgccactctgctcgcacacaagttgggagtcactcagtgtaccatcgctcatgccttggagaaaaccaaataccccaactcggacatctacttggacaagttcgacagccagtaccacttctcttgccagttcacagctgaccttattgccatgaaccacactg

SEQ ID NO: 89084 - DNA, 427 bp, Zea mays
  unsure (1)..(427): unsure at all n locations
cttcggtcgccgtcctcgcaagcagactccgtcgcgcccagcgcggagggatgctttggatggctcgatcgtagcggctacgctggcgcatgagttgtcttggacccgtgactgcttggaggacccccgctgccgtgcggccgactcccggcgcccgtgtcccatcgctcgtgcgggcatcccgtgcctgctgcgttgagaagtgcttgcgtgctgctacccgtcccacgggaagccgtgctcgatacacgttgccttcgtcgagctcaccccccggggtgcggctcgtcggctcgagagcgcccgcggcgtttgcctcgtgccgncgtcagcctatggccggcggcaccgaggacacctcgctggcgcttttggtctcggatgtggctcacgctgaaggccggagacgcgttggcgtcacgcgccc

SEQ ID NO: 89085 - DNA, 442 bp, Zea mays
ccctacaggatccaacaggcaatcgcttcatgcatcttaccattatcacccttgttcgctccaacaaccgtcagccctattacagcagttacctttggtccatttggtggcacaaaacatcagggcacaacaactacaacaacttgtgctagcaaaccttgctgcatactctcagcaacatcagtttcttccattcaaccaactggctgcattgaactctgctgcttatttgcaacaacaattaccattcagccagctagttgctgcctacccccagcaatttcttccattcaaccaactagcagcattgaactctgctgcttatttacagcagcaacaactactaccattcagccagctagctgatgtgagccctgctgcctttttgacacaacaacagttgttgccgttctacctgcacgctatgcctaacgctggcacc

SEQ ID NO: 89086 - DNA, 439 bp, Zea mays
cacgcatacaagcggcggctgcggctgccagccaccgccgccggttcatctaccgccgccggtgcatctgccacctccggttcacctgccacctccggtgcatctcccaccgccggtccacctgccgccgccggtccacctgccaccgccggtccatgtgccgccgccggttcatctgccgccgccaccatgccactaccctactcaaccgccccggcctcagcctcatccccagccacacccatgcccgtgccaacagccgcatccaagcccgtgccagctgcagggaacctgcggcgttggcagcaccccgatcctgggccagtgcgtcgagttcctgaggcatcagtgcagcccgacggcgacgccctactgctcgcctcagtgccagtcgttgcggcagcagtgttgccagcagctcaggcaggtggagccgcac

SEQ ID NO: 89087 - DNA, 321 bp, Zea mays
gtaccggtccggaattcccgggcagaaacacacgaagcgaagcgcactatctacgacctaacaacatgggctacacaagatattacacctactagcgcttattgcgctagctgcgagcgcatcaaatgcgcacattattccacaatgctcactagctcctagagcgatacattccacgattatctgccaccagttactatcaatgagcatttaaacacgctagctgcgcaaggcaacacgcaacatcaagcgcatgcagagagcgtgttacaactaccaatagccgaatggcaacaacaatccttgccacatctaacaata

SEQ ID NO: 89088 - DNA, 426 bp, Zea mays
agtgccagtattccacagttcctcccactagttacttcaatgggcttcgaacatccagccgtgcaagcctacaggctacaactagcgcttgcggcgagcgccttacaacaaccaattgcccaattgcaacaacaatccttggcacatctaaccctacaaaccattgcaacgcaacaacaacaacaacagtttctgccatcactgagccacctagccgtggtgaaccctgtcacctacttgcaacagcagctgcttgcatccaacccacttgctctggcgaacgtagctgcataccagcaacaacaacagctgcaacagtttatgccagtgctcagtcaactagccatggtgaaccctgccgtctacctacaactactttcatctaacccgctcgcggtgggcaatgcacctacgtacctacaacaa

SEQ ID NO: 89089 - DNA, 428 bp, Zea mays
gcaacatataaagcacaatagtgtaccaacaatggcagctcaaatattttgcctccttatgctccttggtctttctgcaagtgctgctacggcgaccattttcccacactgctcacaagctcctatagcttccctgcttgcacggtacctttcaccaacggtgtcttcggtatgtgaaaacccaattcttcaaccctacaggatccaacaggcaatcgcagctggcatcttacctttatcacccttgttccttcaacaatcatcagccctattacagcagttacctatggtgcatatatcggcacataacatcagggcacaacaactaccacaacttgtgctagcaaaccttgctgcctactctgagcaacagcagtttcttccattcaaccaactagctgcattgaactctgcttcttatatgcaac

SEQ ID NO: 89090 - DNA, 471 bp, Zea mays
ggattcccgggtcgacccagcgtccgagaagtggaatccagtagcaacaatagagcaacaatggcgaccaagatactttccctgcttatgctccttgctctttctgcatgtgttgctaacgcgacaattttccctcaatgctcacaagctcctatagcttcccttcttcccccataccttccatcaatgatagcttcagtatgtgaaaacccagctcttcaaccctataggctccaacaagcaatcgcagcaagcaacatacctttatcacccttgtttcaacaatcgccagccctatctttggtgcagtcattggtacaaaccatcaaagcacagcagctgcaacaactcgtgctacctgtgatcaaccaaatagctctggcaaacctttctccctactatcagcaacaacaatttctttcattcaacccactatctacactgaaccctgctgcttatttgcagcaacaa

SEQ ID NO: 89091 - DNA, 414 bp, Zea mays
cggaattcccgggtcgacccacgcgtacgatctgaaatagctgatgcgtctgctattcctcaaggtctacttcatggaggtcctgcatacgggtggatattccactgcactgacataacctccgatggcttcagaatctgctgtaaaccggttgtatgctagcagcttggaccgaattgatgctgaacattacactgctcccaggatggttcttgcagcatcacgagttgatcatgatgcgctgatgtcagtagtagaaccacttctgtctgaccttacgagcgtgaaacgtcctgtagagccaaaatctgtgtacatgggaagagactatctgtgtctagcagattgttcaaacacacgcatggcacttgcttttgacgtgccacgttgatggaatcactagataactgctat

SEQ ID NO: 89092 - DNA, 439 bp, Zea mays
attgagaccaactagcaacatagaaagcacaatagtgtaccaacaatggcagccaaaatattttgcttccttatgctccttggtctttctgcaagtgttgctaccgcaaccattttcccacaatgctcacaagctcctatagcttcccttcttcccccatacctctcaccagcggtgtcttcaatgtgtgaaaacccaattgttcaaccctacaggatccaacaggcaatcgcaacaggcatcttaccattatcacccttgttccttcaacaaccgtcagccctattacagcagttacctttggtccatttggtggcacaaaacatcaaggcacaacaactacaacaacttgtgctagcaaaccttgctgcatactctcagcaacatcaagttcttccattcaaccaactggctgcattgaactctgctgcttatttgc

SEQ ID NO: 89093 - DNA, 431 bp, Zea mays
ggcatcttacctttatcacccttgtttcttcaacaaccgtcagccctattacagcagttacctttggtgcatttgttggcacaaaacatcaaggcacaacaactacaacaacttgtgctaggaaaccttgctgcctactctcagcaacagcagtttcttccattcaaccaactggctgcattgaactctgctgcttatttgcaacaacaactaccattcagtcagctagctgctgcctacccccagcaatttcttccattcaaccaactggcagcattgaactctgctgcttatttacaacagcaacagctaccaccattcaaccagctagctgatgtgagcccttgtgccttcttgacacaacaacagttgttgccgttctacctgcacgctgcgcctaacgctggcaccctcttacaactgcaacaatt

SEQ ID NO: 89094 - DNA, 437 bp, Zea mays
gcgaagcgcactagcaacgacctaactccaatggctaccaagatattagccctccttgcgcttcttgcccttttagtgagcgcaacaaatgcgttcattattccacagtgctcacttgctcctagtgccattattccacagttcctcccaccagttacttcaatgggcttcgaacatccagccgtgcaagcctacaggctacaactagcgcttgcggcgagcgccttacaacaaccaattgcccaattgcaacaacaatccttggcacatctaaccctacaaaccattgcaacgcaacaacaacaacaacaacagtttctgccatcactgagccacctagccgtggtgaaccctgtcacctacttgcaacagcagctgcttgcatccaacccacttgctctggcgaacgtagctgcataccagcaacaacaacagct

SEQ ID NO: 89095 - DNA, 438 bp, Zea mays
gcaacatagaaagcacaatattgtactaataatggcagccaaaatattttgcctcattatgctccttggtctttctgcaagtgctgctacggcgagcattttcccgcaatgctcacaagctcctatagcttcccttcttcccccatacctctcaccagcgatgtcttcagtatgtgaaaatccaattcttctaccctacaggatccaacaggcaatcgcagcaggcatcttacctttatcacccttgttcctccaacaatcatcagccctattacagcagttacctttggtgcatttattggcacaaaacatcagggcacaacaactacaacaactcgtgctagcaaaccttgctgcctactctcagcaacagcagttacctttggtgcatttgttggcacaaaacatcagggcacaacaactacaacaactcgtgct

SEQ ID NO: 89096 - DNA, 436 bp, Zea mays
ctggcaaacctttctccctactctcatcaacaacaatttcttccattcaaccaactgtctacactgaaccctgctgcttatttgcagcaacaactattaccatttagccagctagctactgcctactctcagcaacaacaacttcttccatttaaccaattggccgcactgaaccccgctgcttatttgcagcagcaaatactactgccatttagcgagctagctgcagcaagtcgtgcttccttcttgacacagcaacagttgctgcctttctacaagcagtttgcggctaaccccgcaaccctcttacaactacaacaattggtgccctttgtccaacttgctttgacaaacccagcaaccttctaccaacaacacatcattggtggtgccctcttttagatttcttatgagttatagttcaataataaagttt

SEQ ID NO: 89097 - DNA, 424 bp, Zea mays
gcaacatagaaagtggaatccagtagcatcaatagagcaacaatggcgaccaagatactttccctccttatgctccttgctctttctgcatgtgttgctaacgcgacaattttccctcaatgctcacaagctcctatagcttcccttcttcccccataccttccatcaatgatagcttcagtatgtgaaaacccagctcttcaaccctataggctccaacaagcaatcgcagcaagcaacatacctttatcacccttgtttcaacaatcgccagccctatctttggtgcagtcattggtacaaaccatcaaggcacagcagctgcagcaactcgtgctacctgtgatcaaccaagtagctcttgcaaacctttctccctactatcagcaacaacaatttcttccatgcaaccaactatctacac

SEQ ID NO: 89098 - DNA, 407 bp, Zea mays
cagcctagcaattagctcatcgactccagattggagaactcgacaccatgaaggtgctgatcgttgcccttgctctcctggcgctcgctgcgagcgccgcctccagtacaagcggcggctgtggctgccagacaccaccgtttcatctaccgcctccgttctatatgccgcctccgttctatctgccgccgcagcagcagccgcagccatggcaataccccactcaaccaccgcagctaagcccgtgccagcagttcggatcctgcggcgtcggcagcgtcggcagcccgttcctgggccagtgcgtcgagttcctgaggcaccagtgcagcccggcggcgacgccctacggctcgccacagtgccaggcgctgcagcagcagtgctgccaccagatcaggcaagtg

SEQ ID NO: 89099 - DNA, 443 bp, Zea mays
caaaaacacaccaagcgaagcgcactatcaacgacctaacaccaatggctaccaagatattagccctccttgcgcttcttgcccttttagtgagcgcaacaaatgcgttcattattccacagtgctcacttgctcctagtgccattattccacagttcctcccaccagttacttcaatgggcttcgaacatccagccgtgcaagcctacaggctacaactagcgcttgcggcgagcgccttacaacaaccaattgcccaattgcaacaacaatccttggcacatctaaccctacaaaccattgcaacgcaacaacaacaacaacaacagtttctgccatcactgagccacctagccgtggtgaaccctgtcacctacttgcaacagcagctgcttgcatccaacccacttgctctggcgaacgtagctgcataccagcaacaa

SEQ ID NO: 89100 - DNA, 375 bp, Zea mays
ccagcagcaggcgcgccgcgggggcttgttctccgtcgctcgtcgtgtgcgccagcgccggcatgaacgtcgtcttcgtcggcgccgagatggcgccgtggagcaagaccggcggcctcggcgacgtcctcggcggcctgccgccggccatggccgcgaacgggcaccgtgtcatggtcgtctctccccgctacgaccagtacaaggacgcctgggacaccagcgtcgtgtccgagatcaagatgggagacgggtacgagacggtcaggttcttccactgctacaagcgcggagtggaccgcgtgttcgttgaccaacccactgtcctggagagggtttggggaagaccgaggagaagatctacggccctgtcgc

SEQ ID NO: 89101 - DNA, 421 bp, Zea mays
gcgtgctcaaggcgaacgtaataaagttcgagcctgagctgccccagtggaagagctccgccatcgccgacctcggcgtgggcaccgagaacaagatcgccatgcacttcgacagggtcttttggcccaacgtcgaggtgctgggaatggtcgggccgacgcccaaagcctgtgggtacttcctgaacctgcacaaagccaccggcaatccggtcctcgtgtacatggccgccggaaggttcgcccaggaggtggagaagctgtcggacaaggaagccgtcggcctggtcgtttctcacctgaagaagatgctcccggatgccactgaaccgacgcagtacctggtgtcgcgatggggcttcgaccccaactccctggggtcctactcgtgcgacctggtcgcgaagccggccgacgtgtg

SEQ ID NO: 89102 - DNA, 398 bp, Zea mays
  unsure (1)..(398): unsure at all n locations
cccacgcgtccggtcagcctagcaattagctcatcgactccagattggagaactcgacaccatgaaggtgctgatcgttgcccttgctctcctggcgctcgctgcgagcgccgnctccagtacaagcggcggctgtggctgccagacaccaccgtttcatctaccgcctccgttctatatgccgcctccgttctatctgccgccgcagcagcagccgcagccatggcaataccccactcaaccaccgcagctaagcccgtgccagcagttcggatcctgcggcgtcggcagcgtcggcagcccgttcctgggccaatgcgtcgagttcctgaggcaccagtgcagcccggcggcgacgccctacggctcgccacagtgccaggcgctgcagcagcagt

SEQ ID NO: 89103 - DNA, 436 bp, Zea mays
cccacgcgtccgggcttctcctccccctccggttcgggttcgggttcgtgaggttctccggggttcggtttcgtgggtgagcggatcgagatggcggcgtcggatgttgagtaccgctgcttcgtcggcggcctcgcctgggccacggacgaccactccctccacaacgccttcagcacctacggcgaggtcctcgagtccaagatcatcctcgatcgggagacgcagaggtcccgcggcttcggcttcgtcaccttctccacggaggaggcgatgcggaacgccatcgagggcatgaacggcaaggagctggacggccgcaacatcaccgtcaacgaggcccagtcccgcggcggccgtggaggcggcggcggcggcgggtacggtggtggccgtggaggcggcggctacggcggtggcgggcgccgtgatggcg

SEQ ID NO: 89104 - DNA, 334 bp, Zea mays
actcggtccgaatacccgcctcgacccacgcgtgcgcgcacgcgtccggtcttctccttccataccggatcgggttcgggttcgtaagggtcggcagggttcggtttcgtgggtgagcggatcgagatggcggcgtcacgatgttgagtaccgctgcttcatcggcggactcgcctgagccacggacgaccactccatacacaacgcctacagcacctaaggtgaggacctcgagtccaagatcatccatgatcggcagacacataggtccctcagcttctgctatgtcaccttttccacggaagtagcgatgcggaacgccatctagggcatg

SEQ ID NO: 89105 - DNA, 413 bp, Zea mays
cggacgcgtgggttttcagcattcatttacacaccaagcgaagcgcactagcaacgacctaacaccaatggctaccaagatattagccctccttgcgcttcttgcccttttagtgagcgcaacaaatgcgttcattattccacagtgctcacttgctcctagtgccattattccacagttcctcccaccagttacttcaatgggcttcgaacatccagccgtgcaagcctacaggctacaactagcgcttgcggcgagcgccttacaacaaccaattgcccaattgcaacaacaatccttggcacatctaaccctacaaaccattgcaacgcaacaacaacaacaacaacagtttctgccatcactgagccacctagccgtggtgaaccctgtcacctacttgcaacagcagc

SEQ ID NO: 89106 - DNA, 376 bp, Zea mays
cccacgcgtccgttcagaaacacacctatcgaagcgcactagcaacgacctaacaacaatggctaccaagatattatccctctttgcgcttcttgccctttttgtgagcgcaacaaatgcgttcattattccacaatgctcacttgctcctagtgccattattccacagttcctccctccagttacttcaatgggcttcgaacacccagctgtgcaagcctacaggctacaacaagcgcttgcggcgagcgtcttacaacaaccaattgcccaattacaacaacaatccttggcacatctaaccatacaaaccatcgcaacgcaacagcaacaacaatttctaccagcacttgaccaactagcttgggtgaaccct

SEQ ID NO: 89107 - DNA, 425 bp, Zea mays
atagaaagcacaatagtgtaccaacaatggcagccaaaatattttgcttccttatgctccttggtctttctgcaagtgttgctaccgcaaccattttcccacaatgctcacaagctcctatagcttcccttcttcccccatacctctcaccagcggtgtcttcaatgtgtgaaaccccaattgttcaaccctacaggatccaacaggcaatcgcaacaggcatcttaccattatcacccttgttcctccaacaaccgtcagccctattacagcagttacctttggtccatttggtggcacaaaacatcagggcacaacaactacaacaacttgtgctagcaaaccttgctgcatactctcagcaacatcagtttcttccattcaaccaactggctgcattgaactctgctgcttatttgcaaaca

SEQ ID NO: 89108 - DNA, 422 bp, Zea mays
ttgcctccttatgctccttggtctttctgcaagtgctgctacggcgaccattttcccacaatgctcacaagctcctatagcttcccttcttcccccgtacctctcaccagcggtgtcttcggtatgtgaaaacccaattcttcaaccctataggatccaacaggcaatcgcagctggcatcttacctttatcacccttgttcctccaacaatcatcagccctattacagcagttacctttggtgcatttattggcacaaaacatcaaggcacaacaactacaacaacttgtgctagcaaaccttgctgcctactctcagcaacaacagtttcttccattcaaccaactagctgcattgaactctgcttcttatttgcaacaacaacaactaccattcagccagctatctgctgcctaccccc

SEQ ID NO: 89109 - DNA, 431 bp, Zea mays
cggttcggaattcccgggcaagcggcggctgcggctgccagccaccgccgccggttcatctaccgccgccggtgcatctgccacctccggttcacctgccacctccggtgcatctcccaccgccggtccacctgccgccgccggtccacctgccaccgccggtccatgtgccgccgccggttcatctgccgccgccaccatgccactaccctactcaaccgccccggcctcagcctcatccccagccacacccatgcccgtgccaacagccgcatccaagcccgtgccagctgcagggaacctgcggcgttggcagcaccccgatcctgggccagtgcgtcgagtttctgaggcatcagtgcaacccgacggcgacgccctactgctcgcctcagtgccagtcgttgcggccgcagtgttgccagcagctc

SEQ ID NO: 89110 - DNA, 439 bp, Zea mays
  unsure (1)..(439): unsure at all n locations
gtcagcctagcaattagctcatcgactccagattggagaactcgacaccatgaaagtgctgatcgttgcccttgctctcctggcgctcgctgcgagcgccgnctccagtacaagcggcggctgtggctgccagacaccaccgtttcatctaccgcctccgttctatatgccgcctccgttctatctgccgccgcagcagcagccgcagccatggcaatacccccactcaaccaccgcagctaagcccgtgccagcagttcggatcctgcggcgtcggcagcgtcggcagcccgttcctgggccagtgcgtcgagttcctgaggcaccagtgcagcccggcggcgacgccctacggctcgccacagtgccaggcgctgcagcagcagtgctgccaccagatcaggcaagtggagccgctgcaccggtaccaggcgacata

SEQ ID NO: 89111 - DNA, 427 bp, Zea mays
acaagctcctatagcttcccttcttttcccatacctctcaccagcggtgtcttcaatgtgtgaaaccccaattgttcaaccctacaggatccaacaggcaatcgcaacaggcatcttaccattatcacccttgttcctccaacaaccgtcagccctattacagcagttacctttggtccatttggtggcacaaaacatcagggcacaacaactacaacaacttgtgctagcaaaccttgctgcatactctcagcaacatcagtttcttccattcaaccaactggctgcattgaactctgctgcttatttgcaacaacaattaccattcaaccagctaggtgcttgctacccccagcaatttctttcattcaaccaactagcaacattgaactcttgtgcttatttacagcagcaaccactactacca

SEQ ID NO: 89112 - DNA, 439 bp, Zea mays
gcattcagaaacacacctagcgaagcgcactagcaacgacctaacaacaatggcttccaagacattatccctccttgcgcttcttgccctttttgtgagtgcaacaaatgcgttcattattccacaatgctcacttgctccgagtgccattattccacagttcctccctccagttacttcaatgggcttcgaacacccagctgtgcaagcctataggctacaacaagcgcttgcggcgagcgtcttagaacaaccaattgcccaattacaacaacaatccttggcacatctaaccatacaaaccatcgcaacgcagcagcaacaagcactgagccacctagccgtggtgaaccctatcgcctacttgcaacaacagctgcttgcatccaacccacttgctttggcaaacgtagctgcataccaacaacaacaacagttg

SEQ ID NO: 89113 - DNA, 347 bp, Zea mays
tagcaacatagaaagcacaatagtgtaccaacaatggcagccaaaatattttgcctccttatgctccttggtctttctgcaagtgctgctacggcgaccattttcccgcaatgctcgcaagctcctatagcttcccttcttcccccgtacctctcaccagcggtgtcttcggtatgtgaaaacccaattcttcaaccctacaggatccaacaggcaatcacagctggcatcttacctttatcacccttgttcctccaacaatcatcagccctattacatcagttacctttggtgcatttattggcacaaaacatcagggcacaacaactacaacaacttgtgctagc

SEQ ID NO: 89114 - DNA, 439 bp, Zea mays
cagaaacacacctagcgaagcgcactttcaacgacctaacaacaatggcttccaagacattatccctccttgcgcttcttgccctttttgtgagtgcaacaaatgcgttcattattccacaatgctcacttgctccgagtgccattattccacagttcctccctccagttacttcaatgggcttcgaacacccagctgtgcaagcctataggctacaacaagcgcttgcggcgagcgtcttagaacaaccaattgcccaattacaacaacaatccttggcacatctaaccatacaaaccatcgcaacgcagcagcaacaagcactgagccacctagccgtggtgaaccctatcgcctacttgcaacaacagctgcttgcatccaacccacttgctttggcaaacgtagctgcataccaacaacaacaacagttgcaaca

SEQ ID NO: 89115 - DNA, 418 bp, Zea mays
ctagtaacaaaagatgtctccgaagaggaaagagaagaaaaccttaccttccatagtgagaagctagcagtggcttatagtgtcctgaagactggtccagggacagaaataatggtttcaaagaatttgcaggtttgcagtgactgtcatgaatggatgaagataatctcaaaggtactttgccgtgttattattctgagggatagagttcggtttcaccggtttgaaagtggatggtgctcctgcaaggattactggtaggcctttcctggagcaatacagatgtaatccagctaatacaaaacgagcagttcctaggggatacatctgacctaattactttctccatctggagaatttggtgcttgttctgctgctgcatatcaatgaaatgaaatatttggacaattggttacta

SEQ ID NO: 89116 - DNA, 410 bp, Zea mays
tgcgcttcttgcccttttagtgagcgcatcaaatgcgttcattattccacagtgctcacttgctcctagtgccattattccacagttcctcccaccagttacttcaatgggcttcgaacatccagccgtgcaagcctacaggctacaactagcgcttgcggcgagcgccttacaacaaccaattgcccaattgcaacaacaatccttggcacatctaaccctacaaaccattgcaacgcaacaacaacaacaacaacagtttctgccatcactgagccacctagccgtggtgaaccctgtcacctacttgcaacagcagctgcttgcatccaacccacttgctctggcgaacgtagctgcataccagcaacaacaacagctgcaacagtttatgccagtgctcagtcaac

SEQ ID NO: 89117 - DNA, 323 bp, Zea mays
aacaaaggaatccattacaagagtaccatgtggcccatatccctggtgctttgttctttgatgttgatggaatatccgacagaacatctagtttaccacacatgctgccatctgaaaaggcattttcagctgctgtatctgctcttggcatctacaacaaagacgggatagtagtttatgatggaaaggggctgttcagtgctgctcgtgtttggtggatgttccgtgtatttggacatgataaagtttgggtgttggatggaggtttgccccaatggcgcgcttctgggtatgatgttgaatcaagtgcctctaagtgatgc

SEQ ID NO: 89118 - DNA, 453 bp, Zea mays
attgagaccaactagcaacatagaaagcacaatagtgtaccaacaatggcagccaaaatattgtgccttcttatgctccttggtctttctgcaagtgctgctacggcgaccattttcccacaatgctcacaagctcctatagcttcccttcttcccccgtacctctcaccagcggtgtcttcggtatgtgaaaacccaattcttcaaccctataggatccaacaggcaatcgcagctggcatcttacctttatcacccttgttcctccaacaatcatcagccctattacagcagttacctttggtgcatttattggcacaaaacatcagggcacaacaactacaacaacttgtgctagcaaaccttgctgcctactctcagcaacaacagtttcttccattcaaccaactagctgcattgaactctgcttcttatttgcaacaacaacaacta

SEQ ID NO: 89119 - DNA, 469 bp, Zea mays
tcggaatacccggctttgagcattcagaaacagaccaagcgaagtgcactagcaacttcctatcaacaatggctaccaagatattatgcctgcttgcgcttcttgcgctttttgcgagcgcaacaaatgcgtccattattccacaatgctcacttgctcctagttccattattccacagttcctcccaccagttacttcaatggccttcgaacacccagctgtgcaagcctataggctacaacaagcgattgcggcgagcgtcttacaacaaccaattgcccaattgcaacaacaatccttggcacatctaacaatacaaaccatcgcaacgcaacagcaacaacagtttctaccagcactgagccacctagccatggtgaaccctgtcgcctacttgcaacagcagctgcttgcatccaacccacttgctctagcaaacgtagttgcaaaccagcaacaacaacaact

SEQ ID NO: 89120 - DNA, 287 bp, Zea mays
  unsure (1)..(287): unsure at all n locations
agaagatgaaagaaatgagcacagattaaagagcaaagagctttgttccaagggtatgcatattcggtgggaaagcatttgccacatatatacaggcaaaaaggatcgttaaatttattacagatgtggcagctaccgtgaaccatgattcagacattggagatttgttgaaggtcgtatttgttccagactataatgttagtgttgccgangcgctaattcctgccagtgaattatcacagcatatcagtactgctggaatggaagctagtgggaccagtaacatg

SEQ ID NO: 89121 - DNA, 403 bp, Zea mays
  unsure (1)..(403): unsure at all n locations
agccctatcttgggtgccatcatgggtccaaaccatcagggcccaccagctgcagcacctcgtgctacctgtgatcaaccaagtagctctggcaaacctttctccctactctcagcaacaacaatttcttccattcaaccaactgtctacactgaaccctgctgcttatttgcagcaacaactattaccatttagccagctagctactgcctactctcagcaacaacaacttcttccatttaaccaattggccgcactgaaccccgctgcttatttgcagcagcaaatactactgccatttaacgagctagctgcagcaagtcgtgcttncttcttgacacagcaacagttgctgcctttctacaagcagtttgcgggtaaccccgcaaccctcttacaacta

SEQ ID NO: 89122 - DNA, 436 bp, Zea mays
cagcattcaataacacaccagttattgcactagcaacgacctaacaccaatggctgccaagatattagccctccttgcgcttcttgcccttttagtgagcgcaacaaatgcgttcattattccacagtgctcacttgctcctagtgccattattccacagttcctcccaccagttacttcaatgggcttcgaacatccagccgtgcaagcctacaggctacaactagcgcttgcggcgagcgccttacaacaaccaattgcccaattgcaacaacaatccttggcacatctaaccctacaaaccattgcaacgcaacaacaacaacaacaacagtttctgccatcactgagccacctagccgtggtgaaccctgtcacctacttgcaacagcagctgcttgcatccaacccacttgctttggcgaacgtatctgca

SEQ ID NO: 89123 - DNA, 416 bp, Zea mays
cccataccttccatcaattatagcttcagtatgtgaaaacccagctcttcaaccatataggcttcaacaagcaatcgcagcaagcaacatacctttatcgcccttgttgtttcaacaatcaccagccctatctttggtgcagtcattggtacaaaccatcagggcacaacagctgcagcaactcgtgctacctgtgatcaaccaagtagctctggcaaacctttctccctactctcagcaacaacaatttcttccattcaaccaactgtctacactgaaccctgctgcttatttgcagcaacaactattaccatttagccagctagctactgcctactctcagcaacaacaacttcttccatttaaccaattggccgcactgaaccccgcttgttatttgcagcagcaaatactac

SEQ ID NO: 89124 - DNA, 424 bp, Zea mays
gtgctcacttgctcctagtgccattattccacagttcctcccaccagttacttcaatgggcttcgaacatccagccgtgcaagcctacaggctacaactagcgcttgcggcgagcgccttacaacaaccaattgcccaattgcaacaacaatccttggcacatctaaccctacaaaccattgcaacgcaacaacaacaacaacaacagtttctgccatcactgagccacctagccgtggtgaaccctgtcacctacttgcaacagcagctgcttgcatccaacccacttgctctggccaaccgtactgcataccagcaacaacaacagctgcaacagtttatgccagtgctcagtcaactagccatggtgaaccctgccgtctacctacaactactttcatctagcccggtcgcggtgggcaat

SEQ ID NO: 89125 - DNA, 349 bp, Zea mays
gagaccaacaagcaacatagaaagtgtaatccagtagcaacaatagagcaacaatggcgaccaagatactttccctccttatgctccttgctctttctgcatgtgttgctaacgcgacaattttccctcaatgctcacaagctcctatagcttcccttcttcccccataccttccatcaatgatagcttcagtatgtgaaaacccagctcttcaaccctataggctccaacaagcaatcgcagcaagcaacatacctttatcacccttgtttcaacaatcgccagccctatccttggtgcagtcattggtacaaaccatcaaagcacagcagctgcagcaactcgtgct

SEQ ID NO: 89126 - DNA, 414 bp, Zea mays
attgagaccaactagcaacatagaaagctcaatagtgtaccaacaatggcagccaaaatattttgcctccttatgctccttggtctttctgcaagtgctgctacggcgaccattttcccgcaatgctcgcaagctcctatagcttcccttcttcccccgtacctctcaccagcggtgtcttcggtatgtgaaaacccaattcttcaaccctacaggatccaacaggcaatcacagctggcatcttacctttatcacccttggtcctgcaacaatcatcagccctattacatcagttacctttggtgcatttattggcacaaaacatcagggcacaacaactacaacaacttgtgctagcaaaccttgctgcctactctcagcaacagcagtttcttccattcaaccaactagct

SEQ ID NO: 89127 - DNA, 439 bp, Zea mays
catttattggcacaaaacatcagggcacaacaactacaacaactcgtgctagcaaaccttgctgcctactctcagcaacagcagttacctttggtgcatttgttggcacaaaacatcagggcacaacaactacaacaactcgtgctagcaaaccttgctgcctactctcagcaacaacagtttctgccattcaaccaactagctgcattgaactctgctgcttatttgcagcaacaacaactactaccattcagccagctagctgctgcctacccccggcaatttcttccattcaaccaactggcagcattgaactctcatgcttatgtacaacaacaacaactactaccattcagccagctagctgctgtgagccctgctgccttcttgacacagcaacatttgttgccgttctacctgcacactgcgcctaacgttg

SEQ ID NO: 89128 - DNA, 411 bp, Zea mays
  unsure (1)..(411): unsure at all n locations
aacccgatcgacaccatgagggtgttgctcgttgccctcgctctcctggctctcgctgcgagcgccacctccacgcatacaagcggcggctgcggctgccagccaccgccgccggttcatctaccgccgccggtgcatctgccacctccggttcacctgccacctccggtgcatctcccaccgccggtccacctgccgccgccggtccacctgccaccgccggtccatgtgccgccgccggttcatctgccgncgncaccatgccactaccctactcaaccgccccggcctcagcctcatccccagccacacccatgcccgtgccaacagccgcatccaagcccgtgccagctgcagggaacctgcggcgttggcagcaccccgatcctgggccaatgcgtcgagtttctg

SEQ ID NO: 89129 - DNA, 367 bp, Zea mays
  unsure (1)..(367): unsure at all n locations
aacccatccatcattntagctgttgatacaaagagaaaggaaagggccgagataaccctagagccgagtgatcttatggcgcanacaaacaaaagaatagtgccaaagttcactgaaatcttccccgtggaggacgcgaactacccttacagcgccttcatcgcgtcggtccggaaagacgtgatcaaacactgcaccgaccataaagggatcttccagcccgtgctgccaccggagaagaaggtcccggagctatggttctacacagagctcaaaactaggaccagctccatcacgctcgccatacgcatggacaacctgtacctcgggggctttaaggaccccggccgggtgttgttggaagttc

SEQ ID NO: 89130 - DNA, 334 bp, Zea mays
ggtcgctcgaccacgcgtccggcaacatagaaagcacaatagtgtaccaacaatggcagccaaaatattttgcctccttatgctccttggtctttctgcaagtgctgctacggcgaccattttcccgcaatgctcgcaagctcctatagcttcccttcttcccccgtacctctcaccagcggtgtcttcggtatgtgaaaacccaattcttcaaccctacaggatccaacaggcaatcgcagctggcatcttacctttatcacccttgttcctccaacaatcatcagccctattacaacagttacctttggtgcatttattggcacaaaacatc

SEQ ID NO: 89131 - DNA, 266 bp, Zea mays
gggaccctgttttctctttcttgttttaccgacatgctggtgaaggagaaggtggggaaattgtgtctggtggaatggattctagtcactacaagggtgatcacacctatgtcccagtcactcagaagggatactggcagtttaatatgggtgatgtcctgcttgatggaaagaccactgagttttgtgctcgaggttgtgcagcaatagcagattctggaacttccttgcttgatggccctacagccattattactgaaatcaac

SEQ ID NO: 89132 - DNA, 318 bp, Zea mays
gcaacatagaaagcacaatagtgtaccaacaatggcagccaaaatattttgcctccttatgctccttggtctttctgcaagtgctgctacggcgaccattttcccgcaatgctcgcaagctcctatagcttcccttcttcccccgtacctctcaccagcggtgtcttcggtatgtgaaaacccaattcttcaaccctacaggatccaacaggcaatcgcagctggcatcttacctttatcacccttggtcctccaacaatcatcagccctattacaacagttacctttggtgcatttattggcacaaaacatcagggc

SEQ ID NO: 89133 - DNA, 75 bp, Zea mays
ttaaaatatagatctctaatcttttattactgagaagttgcacatatcagtatgagaactttattattacagtat

SEQ ID NO: 89134 - DNA, 334 bp, Zea mays; identical to SEQ ID NO: 89130

SEQ ID NO: 89135 - DNA, 448 bp, Zea mays
  unsure (1)..(448): unsure at all n locations
agcattcagaaacacaccaagcgaagcgtactagcaacgacctaacaacaatggctaccaagatattagccctccttgcgcttcttgccctttttgtgagcgcaacaaatgcgttcattattccacaatgctcacttgctcctagtgccattattccacagttcctcccaccagttacttcaatgggcttcgaacacctagctgtgcaagccaacatgcaacaacaagcgcttgcggcgagcgtcttacaacaaccaattgcccaattgcaacaacaatccttgccacatctaacaatacaagccatcacaacgcaacagcaacaacagttcctaccagcactgagccacctagccatggtgaaccctgccgnctacttgcaagagcaactgcttgcatccaacccacttgctctggcgaacgtagttgcaaaccagcaacaacaaca

SEQ ID NO: 89136 - DNA, 392 bp, Zea mays
  unsure (1)..(392): unsure at all n locations
ggtcttcagaccattagctttatctacttcagagcgcagaagaacccgatcgacaccatgagggtgttgctcgttgccctcgctctcctggctctcgctgcgagcgccacctncacgcatacaagcggcggctgcggctgccagccaccgccgccggttcatctaccgccgccggtgcatctgccacctccggttcacctgccaccttcggtgcatcttccaccgccgggccacctgccgccgccggtccacctgccaccggcggtccatgtgccgtcgccggttcatctgccgtcggcaccatgccactaccctactcaaccgccccggcctcagcctcatccccagccacacccatgcccgtgccaacagccgcattcaagcccgtgcca

SEQ ID NO: 89137 - DNA, 409 bp, Zea mays
caacaagcaacatagaaagtggaatccagtagcaacaacagagcaacaatggcgaccaagatattttccctccttatgctccttgctctttctgcatgtgttgctaacgcgacaattttccctcaatgctcacaagctcctatagcttcccttcttcccccataccttccatcaatgatagcttcagtatgtgaaaacccagctcttcagccctataggctccaacaagcaatcgcagcaagcaacatacctttaatcacccttttgtttcaacaatcgccagccctatctttggtgcagtcattggtacaaaccatcagggcacagcagctgcagcaactcgtgctacctgtgatcaaccaagtagctctggcaaacctttctccctactctcagcaacaacaatttc

SEQ ID NO: 89138 - DNA, 437 bp, Zea mays
gaccaactagcaacatagaaagcacaatagtgtaccaacaatggcagccaaaatattttgcctccttatgctccttggtctttctgcaagtgctgctacggcgaccattttcccgcaatgctcgcaagctcctatagcttcccttcttcccccgtacctctcaccagcggtgtcttcggtatgtgaaaacccaattcttcaaccctacaggatccaacaggcaatcacagctggcatcttacctttatcacccttgttcctccaacaatcatcagccctattacatcagttacctttggtgcatttattggcacaaaacatcagggcacaacaactacaacaacttgtgctagcaaaccttgctgcctactctcagcaacagcagtttcttccattcaaccaactagctgcattgaactctgcttcttatttgcaac

SEQ ID NO: 89139 - DNA, 412 bp, Zea mays
ctgacgttaagggtggcactctcatctcttacgaaggaagagttcagctgttggagagtgcccaagtacccgatgagcatgtgaatgaatttaaatcaatcgagaagtttaagatattcaacactaacaacttgtgggtgaaccttaaagctatcaagagactcgtagaggctgaggcacttaagatggaaattattccaaaccccaaggaagttgatggtgtgaaagtccttcaactcgaaaccgcagctggtgcagctattcggttcttcgacaaagcgattggaattaatgttccccgctcaaggtttctcccagtgaaggctacatctgatctgttgcttgtgcagtctgatctttacaccttggttgatggctttgtcatccgcaacccatccagagcgaatccagc

SEQ ID NO: 89140 - DNA, 423 bp, Zea mays
attgagaccaactagcaacatagaaagcacaatagtgtaccaacaatggcagccaaggtattttgcctccttatgctccttggtctttctgcaagtgctgctacggcgaccattttcccgcaatgctcgcaagctcctatagcttcccttcttcccccgtacctctcaccagcggtgtcttcggtatgtgaaaacccaattcttcaaccctacaggatccaacaggcaatcgcagctggcatcttacctttatcacccttgttcctccaacaatcatcagccctattacaacagttacctttggtgcatttattggcacaaaacatcagggcacaacaactacaacaacttgtgctagcaaaccttgctgcctactctcagcaacagcagtttcttccattcaaccaactaagttcattgaac

SEQ ID NO: 89141 - DNA, 439 bp, Zea mays
gcacaatagtgtaccaacaatggcagccaaaatattttgcttccttatgctccttggtctttctgcaagtgctgctaccgcaaccattttcccacaatgctcacaagctcctatagcttcctttcttcccccatacctctcaccagcggtgtcttcagtatgtgaaaacccaattcttcaaccctacaggatccaacaggcaatcgcagcaggcatcttacctttatcacccttgttcctccaacaaccgtcagccctattacagcagttacctttggtgcatttgttggcacaaaacatcaaggcacaacaactacaacaacttgtgctaggaaaccttgctgcctactctcagcaacagcagtttcttccattcaaccaactggctgcattgaactctgctgcttatttgcaacaacaactaccattcagtcagcta

SEQ ID NO: 89142 - DNA, 418 bp, Zea mays
aagcaagtgaatgctgcaatgacaacatgccacagtctgaacttggatgggttggtgatcattggaggtgtgacctccaattcagatgctgcacagcttgcggagacccttattcagaataactgtaagaccaaggttgttggtgtgccagtttcattgaatggtgacctcaagaaccagtttgttgaaacaacagttggatttgatacagtatgtaaggttaattcacagcttgtaagcaatgtttgtcttgatgcgatctcagctggaaagtactattattttgttcgtctgatgggacgaaaagcatctcatgttgcctttgaatgtgcacttcagtcacacccaaacatgctcatcttaggcgaggaggtagcattgtcaaaactcacactgatggaaattataagcaagatat

SEQ ID NO: 89143 - DNA, 434 bp, Zea mays
cattcagccagctagctggtgtgagccctgctaccttcttgacacaaccacagttgttgccgtgctaccagcacgctgcgcctaacgctggcaccctcttacaactgcaacaattgctgccattcaaccaacttgctttgacaaacccagcagcattctaccaacaacccatcattggtggtgccctcttttagatttcttatgagttatagttcaataataaagttttttgtctgatgtttgtggcttcccagaaataagaaagtacatttctaaaaaaaaaaacaaataaaaaaaagaaacctaaataacaataaatataacaaaacatataagaataaaaacattaacaatcaagaactaaaaaaaaaaaggggcggccgttttagaggatccaagtttacgtacccgtgcatgcaacgtaatagcttttt

SEQ ID NO: 89144 - DNA, 518 bp, Zea mays
  unsure (1)..(518): unsure at all n locations
gaggaggaggggtctgatccatgcacatcagtncatcttcgtacagccttcgcggtccggaattcccgggtcgacccacgcgtacggggtcttcagaccattagctttatctactccagagcgcacaagaacccgagcgacagcatgagggtgttgctcgttgccctcgctctactggctctcgctgatagcgccaccttcacgcatacaagctgcggctgcagatgccagccaccgtcgacggttcatctaccgccagaacggagcatctgccacctacgaggaacctgccacctacggcacatctcacatcgccggtccaactgacgacgtcggtccacctgacaccgccggtccatgtgctgccgacggttcatctgccgacgccacgatgccactaccctactcaaccgccccggcctcagcctcatacgcagccacacctatgcccgtgccaacagccgcattcaagcccgtgccagctgcatggaatctgccgctgttgtaagaccccaaat

SEQ ID NO: 89145 - DNA, 212 bp, Zea mays
gtcttacaactgcagcaattgcagccattcaaccaacttgctttgacaaagccatcggcattctaccaactacccatcattggtggtgccctcttttagatatgttatgagttatcgttcaatactatagtgtctcggcgtgatagcgacagtctgtcgcagttcatggcgcgttagtgtctgatggtcgtccggtctacaggatccatgct

SEQ ID NO: 89146 - DNA, 404 bp, Zea mays
ggaattcccgggtcgacccacgcatccacgcgtccggagaaaggtttgccagagctacgcggctgatcactggtagcaccagttgtggcattgaaccaatcgtccgcactgaaccccgctgcttatttgcagcagcaaatactactgccatttagcgagctagctgcaacaagtcgtgcttacttcttgacacagcaacagttgctgcctttctacaagcagattgcggctaaccccgtaaccctattacaactacaacaagtgttgccctttgtgcaacttgctttgacaaacccagcagcctgctaccaacaacacatcattggtggtgccctcttttagattgattattagttgtaattcaataataaagttttttggatgatgtatgtggccaaccagaa

SEQ ID NO: 89147 - DNA, 468 bp, Zea mays
cggaattcccgggctatagctgcccttcttcccccataccttccatcaatgaccgcttcagtttgtgaaaacccagcccttcaacgctacaggctccaacaagcaatcgcaacaagcaacttacctttatcacccctgttctttcaacaatcgccagccctatctttggtgcagtcattggtacaaaccatcagggcacaacagctgcaacaactcgtgctaccagtgatcagccaagtagctctggcaaacctttctccctactctcagcaacaacaatttcttccattcaaccaactgtctacactgaaccctgctgcttatttacaacaacaacaactactaccattcagccagctagctactgcctactctcagcagcaacaatttcttccatttaaccaattggccgcactgaacccctctgcttatttccagcagcaaatactactaccatttggccagcta

SEQ ID NO: 89148 - DNA, 430 bp, Zea mays
tggctagcatcaatgtccgtttcagtttgcgaaaacccagtcctacaacgctacggctccaacaagctgtcgcatcaagcaacgtacctttatcacccctgttatttcaacaatcgccagccctatctttggtgcagccattgttacaaaccatcatggcacaacagctgcaacaactcgtgctaccagtgatcagccaagtagctctggcaaacctttctgcctactctcagcaacaacaattgcttccattcaaccaactgtctacactgaaccctgctgcttatttacaacaacaacaactactaccattcagccagctagctactgactactctcagcagcaacaatttcttgcatttaaccaattggccgcactgaacccctatgcttatttccagcagcaaatactactaccatttggccagct

SEQ ID NO: 89149 - DNA, 395 bp, Zea mays
gcgcttcttgccctttatgtgagcgcttcaaatgccgtcattaatccaaaatgcttggttgctgccaagggccatatttcaacagttcttccaaccatttacttcaatgggcttcgaacacctagctgtgcaagccaacatgcaacaacaagcgcttgcggcgagcgtcttacaacaaccaattgcccaattgcaacaacaatccttgccacatctaacaatacaagccatcacaacgcatcagcaacaacagttcctaccagcactgagccacctagccatggtgaaccctgccgtctacttgcaagagcagctgcttgcattcaacccacttgctctggcgaacgtagttgcaaaccagcaacaacaacagctacaacagtttttgccaacgc

SEQ ID NO: 89150 - DNA, 432 bp, Zea mays
caacaagcaacatagaaagtggaatctagtagcaacaatagagcaacaatggcgaccaagatactttccctccttatgctccttgctctttctgcatgtgttgctaacgcgacaattttccctcaatgctcacaagctcctatagcttcccttcttcccccataccttccatcaatgatagcttcagtatgtgaaaacccagctcttcaaccctataggctccaacaagcaatcgcagcaagcaacatacctttatcacccttgtttcaacaatcgccagccctatctttggtgcagtcattggtacaaaccatcaaggcacaacatctgcaacaactcgtgctacctgtgatcaaccaagtagctctggcaaacctttctccctactatcagcaacaacaatttcttccattcaaccaactatctacactg

SEQ ID NO: 89151 - DNA, 427 bp, Zea mays
cccacgcgtccgcccacgcgtccgcaacaagcaacatagaaagtggaatacagtagcgacaatagagcaacaatggcggccaagatattttccatccttatgctccttgctctttctgcatgtgttgctaacgcgaccatttttcctcaatactcacaagctcctatagctgcccttcttcccccataccttccatcaatgaccgcttcagtttgtgaaaacccagcccttcaaccctacaggctccaacaagcaatcgcaacaagcaacttacctttatcacccctgttctttcaacaatcgccagccctatctttggtgcagtcattggtacaaaccatcagggcacaacagctgcaacaactcgtgctaccagtgatcagccaagtagctctggcaaacctttctccctactctcagcaacaac

SEQ ID NO: 89152 - DNA, 326 bp, Zea mays
gaaggggttgaaagccatctcggagggtaagctggccgtagtccttttggccggtggtcatggtactcgactgggaagctcacatcctaagggatgtttcaatatcggacttccatcaggaaagtcacttttccagctgcaagctgaaaggatcttgtgcgttcaaaagctggctgctcaatctagcgatagcccgagtaacactgtgccgatccactggtacatattgacaagcccctttactgatgctgccatcggcaaattatctgaaacccgcagatattttggcttagacgctgaccaagtgacattattacaacaaggca

SEQ ID NO: 89153 - DNA, 426 bp, Zea mays
  unsure (1)..(426): unsure at all n locations
ctgcgatgtggagcctaaaagcgatgacgagagcgatgaagatgatgatgacgacgacactgaagctctaatggcagagcttgagaggattaagaaagaaagagccgaggagaagcttagaaaggagcggcaacaagcagaagaggaggcgaagatgaaggaggctgaactgatgcggggaaacccgttgattaatatcaataatgctggctccttcagtgttaagagaaggtgggacgacgacgtggtattcaagaatcaagcacgaggagagaccaagacaccgaaacggttcatcaacgacaccatcaagagtgatttccaccgtaaatttcttcagaggtacatgaagtgacgcttncgtcgttcacaattcagcctggagcccctcatcgntatcacgtttgtgtatgagcgaaagatcat

SEQ ID NO: 89154 - DNA, 374 bp, Zea mays
acccacgcatcacgcgtccgggacacgcaacataaaatgttgaatttttaatcaacaatagagcaacaagggctaggaagatactttccctccttatgctccttgctctttctgcatgtgttgctaacgcgacaattttccctcaatgctcacaagctcctatagcttcccttcttcccccataccttccatcaatgatagcttcagtatgtgaaaacccagctcttcaaccctataggctccaacaagcaatcgcagcaagcaacatacctttatcacccttgtttcaacaatcgccagccctatcttttgtgcagtcattggtaccaaccatcaaagcacaacaactgcatcaactcgtgctacctgtgatc

SEQ ID NO: 89155 - DNA, 396 bp, Zea mays
gagaccaacaagcaacatagaaagtggaatccagtagcaacaatagagcaacaatggcgaccaagatactttccctccttatgctccttgctctttctgcatgtgttgctaacgcgacaattttccctcaatgctcacaagctcctatagcttcccttcttcccccataccttccatcaatgatagcttcagtatgtgaaaacccagctcttcaaccctataggctccaacaagcaatcgcagcaagcaacatacctttatcacccttgtttcaacaatcgccagccctatctttggtgcagtcattggtacaaaccatcaaggcacagcagctgcagcaactcgtgctacctgtgatcaaccaagtagctctggcaaacctttctacctactatc

SEQ ID NO: 89156 - DNA, 369 bp, Zea mays
caccaacgcaaattgcaccaagaaatccatcgagaggccgtcgacaggggaattaagggcgtcgtcgtctagcagcagccaccgccgcctcatcctcgcagccgccgtcctgctctccgtgctcgcggctgccagcgccagcgccgggacctcctgcgtgccggggtgggccatcccgcacaacccgctcccgagctgccgctggtacgtgaccagccggacctgcggcatcgggccgcgcctcccgtggccggagctgaagaggagatgctgccgggagctggcggacatcccggcgtactgccggtgcacggcgctgagcatcctcatggacggcgcgatcccgccgggcccggacgcgcagctgga

SEQ ID NO: 89157 - DNA, 410 bp, Zea mays
gaagccgaagtggcatgaatatcgaggatgacgaggtcgcagtgaaaatagaaaagagtgtgaacgagatcctcttcagggcattaactctcctggcaatcactgcactgaagtttgcatgagcagtcatcacgattttataggtttgtcgatgcagttgtgatatactcacctatgtctatgtggttcagaagtgtagtactgctttctgtaggaccaagttccacctgcccaaaccatggttatagcttctcagttctcattgatctcgtagaaaatgagccaagttgtaaattgtacaggatttttgcaggaaactcggtgtatattgtggatgatggattttaactctgtgaacattggataatctgatgcccagagcttatttataatttatctacttaatagca

SEQ ID NO: 89158 - DNA, 434 bp, Zea mays
  unsure (1)..(434): unsure at all n locations
gtaccggtccggaattcgcggcacgcatcacgagtaccgagcaccatanacagtagaatccattatcaacaatagagcaacaatggcgaccaagatattttccctccttatgctccttgctctttctacatgtgttgctaacgcgacaattttccctcaatgctcacaagctcctatagcttcccttcttcccccataccttccatcaattatagcttcagtatgtgaaaacccagctcttcaaccatataagcttcaacaagcaatcgcagcaagcaacatacctttatcgcccttgttgtttcaacaatcaccagccctatctttggtgcagtcattggtacaaaccatcagggcacaacagctgcagcaactcgtgctacctgtgatcaaccaagtagctctggcaaacctttctccctactctcagcaac

SEQ ID NO: 89159 - DNA, 360 bp, Zea mays
attttcagcattcaaaaacacaccaagcgaagcgcactagcaacgacctagcaccagtggctaccaagatattagccctccttgcgcttcttgcccttttagtgagcgcaacaaatgcgttcattattccacagtgctcacttgctcctagtgccagtattccacagttcctcccaccagttacttcaatgggcttcgaacatccagccgtgcaagcctacaggctacaactagcgcttgcggcgagcgccttacaacaaccaattgcccaattgcaacaacaatccttggcacatctaaccctacaaaccattgcaacgcaacaacaacaacaacagtttctgccatcactgagccacc

SEQ ID NO: 89160 - DNA, 381 bp, Zea mays
agaagaacccgatcgacaccatgagggtgtcgctcgttgccctcgctctcctggctgtcgctgcgagcgccacctccacgcatacaagcggcggctgcggctgccagccaccgccgccggttcatctaccgccgccggtgcatctgccacctgcggttcacctgccacctccggtgcatctcccaccgccggtccacctgccgacgccggtccacctgccaccgccggtccatgtgccgccgccggttcatctgccgccgtcaccatgccactaccctactcaaccgacccggcctcagcctcatccccagccacacccatgcccgtgccaacagccgcatccaagcccgtgccagcttgcaggaacctgcggcgttggca

SEQ ID NO: 89161 - DNA, 428 bp, Zea mays
aacacacctagcgaagcgcactagcaacgacctaacaacaatggcttccaagacaggatccctccttgcgcttcttgccctttttgtgagtgcaacaaatgcgttcattattccacaatgctcacttgctccgagtgccattattccacagttcctccctccagttacttcaatgggcttcgaacacccagctgtgcaagcctataggctacaacaagcgcttgcggcgagcgtcttagaacaaccaattgcccaattacaacaacaatccttggcacatctaaccatacaaaccatcgcaacgcagcagcaacaagcactgagccacctagccgtggtgaaccctatcggctacttgcaacaacagctgcttgcattcaacccacttgctttgcaaacgtagctgcataccaacaacaacaacagtt

SEQ ID NO: 89162 - DNA, 441 bp, Zea mays
  unsure (1)..(441): unsure at all n locations
aacacaccaagcgaagcgcactagcatcgacctaacaacaatggctaccaagatatggagccctccttgcgcttcttgccctttttgtgagcgcaacaaatgcgttcattattccacaatgctcacttgctcctagtgccattattccacagttcctcccaccagttacttcaatgggcttagaacacctagctgtgcaagccaacatgcaacaacaagcgcttgcggcgagcgtcttacaacaaccaattgcccaattgcaacaacaatccttgccacatctaacaatacaagccatcacaacgcaactgcaacaacagttcctaccagcactgagccacctagccatggtgaaccctgccgnctacttgcaagagcagctgcttgcatccaacccacttgctctggcgaacgtagttgcaaaccagcagcaacaacagc

SEQ ID NO: 89163 - DNA, 395 bp, Zea mays
attttgagcattcagaaacacacctagcgaagcgcactagcaacgacctaacaacaatggctaccaagatattatccctctttgcgcttcttgccctttttgtgagcgcaacaaatgcgttcattattccacaatgctcacttgctcctagtgccattattccacagttcctccctccagttacttcaatgggcttcgaacacccagctgtgcaagcctacaggctacaacaagcgcttgcggcgagcgtcttacaacaaccaattgcccaattacaacaacaatccttggcacatctaaccatacaaaccatcgcaacgcaacagcaacaacaatttctaccagcactgagccaactagctgtggtgaaccctgtcgcctacttgcaacagcag

SEQ ID NO: 89164 - DNA, 432 bp, Zea mays
agccacgcgtcacgcgtccgagtttgagcattcagaaacttaccattcgaagcacattagcaacaacctggcaacggtggctaccaagatattatccctccttgcgcttcttgcgctttttgcgagcgcaacaaatgcgttcattattccacaatgctcacttgctccaagttccattattacacagttcctcccaccagttacttcaatgggcttcgaacacccagctgtgcaagcctataggctacaacaagcaattgcggcgagcgtcttacaacaaccaatttcccagttgcaacaacaatccttggcacatctaacaatacaaaccatcgcaacgcaacagcaacaacaattcctaccagcactgagccacctagccatggtgaaccctgccgtctacttgcaacagcagttgcttgcattaaaccc

SEQ ID NO: 89165 - DNA, 436 bp, Zea mays
taccggtccggaattcccggcaggagccacgcgtacggggccacataccacatagattgaagtttacactatcaaacatcgatcaccgagtctgggccaaaatatatcccattctgatcctccttgccttttttggaactcaacataagcctacattattccacaatgctcacttgctcctagtgccattattccacagttcctaccttcagttacttcaatgggcttcgaacacccagctgtgcaagcctacaggctacaacaagcgcttgctgcgagcgtcttacaacaaccaattgcccaattacaacaacaatccttggcacatctaaccatacaaaccatcgcaacgcaacatcaacaacaatttctaccagcactgagccaactagctgtggtgaaccctgtcgcctacttgcaacagcagttgcttgca

SEQ ID NO: 89166 - DNA, 434 bp, Zea mays
gaatttgcatcctcatcctgcggctgtcagtgtcaagcagccaggctcagggggttccggtgggatcggcagtgggtggtggtgaacgccaaagggcgagcatacacccagagggtggagcccaagcttgctctggtccaggtggagttgccgacggaggccttcgctgagaactggcagcccacgcccgactaccacctggttatcacagcacccggaatggacacactgaagatacctataataacggaacacaccacaatcgatgatgtctctgtctgggagtggtctggctctgcgtatgatgaacgggctgaagcgtctgaatggttcttcacttactttgggaagccaagtctactagtgcgctctaaagaagcatcggaaactaggccaaccgatccagattatgcccaaggttatcagatcatgtt

SEQ ID NO: 89167 - DNA, 408 bp, Zea mays
gaccaacaagcaacatagaacgtggaatacagtcgcaaaaatagagcaacgatggcggccaagatattttccatccttatgctccttgctctttctgcatgtgttgctaacgcgaccatttttcctcaatactcacaagctcctatagctgcccttcttacccccataccttccatcaatgaccgctttagtatgtgaaaacccagcccttcaaccctacaggatccagcactgcaatcgcaacaagcaacttacctttatcacacctgttctttcaacaatcgccagccctatctttggtgcagtcattggtacaaaccatcaaggcagaacagttgcagcaactcgtgctaccagtgatcagccaagtagctctggcagacctttccccctactgtcagcaacaac

SEQ ID NO: 89168 - DNA, 430 bp, Zea mays
  unsure (1)..(430): unsure at all n locations
attttgagcattcagaaacacaccatgcgaagcacattagcaacaacctagcaacgatggctaccaagatattatccctccttgcgcttcttgcgctttttgcgagcgcaacaaatgcgttcattattccacaatgctcacttgctccaagttccattattacacagttcctcccaccagttacttcaatgggcttcgaacacccagctgtgcaagcctataggctacaacaagcaattgcggcgagcgtcttacaacaaccaatttcccagttgcaacaacaatccttggcacatctaacaatacaaaccatcgcaacgcaacagcaacaacaattcctaccagcactgagccacctagccatggtgaaccctgccgnctacttgcaacagcagttgcttgcatcaaacccacttgctctggcaaacgt

SEQ ID NO: 89169 - DNA, 320 bp, Zea mays
cagctagcaacatacaaagctcaatattgtaccaacaatggcagccaaaagattagggctccttatgctccttggtctttctgcaagtgctgctaccgcgaccattttcccacaatgctcacaagctactatagcttaccttcttcccccgtacctctcaccagcggtgtcttcggtatgtgaaaacccaattcttcaaccctataggatccaacacgcaatcccagctggcatattacctttatcacacttgttcctccaacaatcatcagccctattacagcagttacctttggtgcatttattgccacacaacatca

SEQ ID NO: 89170 - DNA, 405 bp, Zea mays
ccattttcccacaatgctcacaagctctctatagcttcccttcttcccccgtacctctgaccagcggtgtcttcggtatgtgaaaacccaattcttcaaccctataggatccaacaggcaatcgcagctggcatcttacctttatcacccttgttcctccaacaatcatcagccctattacagcagttacctttggtgcatttattggcacaaaacatcagggcacaacaactacaacaacttgtgctagcaaaccttgctgcctactctcagcaacaacagtttcttccattcaaccaactagctgcattgaactctgcttcttatttgcaacaacaacaactaccattcagccagctatctgctgcctacccccagcaatttctttcattcaacccaactgac

SEQ ID NO: 89171 - DNA, 424 bp, Zea mays
gagaactcgacaccatgaaggtgctgatcgttgcccttgctctcctggcgctcgctgcgagcgccgcctccagtacaagcggcggctgtggctgccagacaccaccgtttcatctaccgcctccgttctatatgccgcctccgttctatctgccgccgcagcagcagccgcagccatggcaataccccactcaaccaccgcagctaagcccgtgccagcagttcggatcctgcggcgtcggcagcgtcggcagcccgttcctgggccagtgcgtcgagttcctgaagcaccagtgcagcccggcggcgacgccctacggctcgccacagtgccaggcgctgcagcagcagtgctgccaccagatcaggcaggtggagccgctgcaccggtaccaggcgacatacggtgtggtcctgcagtcctt

SEQ ID NO: 89172 - DNA, 393 bp, Zea mays
  unsure (1)..(393): unsure at all n locations
tcgtaccggttccgtgaattcccggcgagaaagcaccaatatgtgtacgcaacaataggcagcccaaaatatcttttcctccttatgcctccttggtatttgctgcaagtgctagctacgtgcgaccattttcnccgcaatgctcacaagnctcctatagcttcccttcttcccccgtacctctcaccagcggtgtcttcggtatgtgaaaacccaattcttcaaccctacaggatccaacaggcaatcgcagctggcatcttacctttatcacccttgttcctccaacaatcatcagccctattacagcagttacctttggtgcatttattggcacaaaacatcagggcacaacaactacaacaacttgtgctagcaaaccttgctgcctac

SEQ ID NO: 89173 - DNA, 427 bp, Zea mays
gctcctagtgccattataccacagtttctccgaccagttacttcaatgggcttcgagcacctagctgtgcaagcctacaggctacaacaagcgcttgcggcgagcgtcttacaacaaccaattaaccaattgcaacaacaatccttggcacatctaaccatacaaaccatcgcaacacaacagcaacaacagttcctaccagcactgagccaactagatgtggtgaaccctgtcgcctacttgcaacagcaggtgcttgcatccaacccacttgctctggcaaacgtagctgcataccaacaacaacaacaattgcaacagtttctgccagcgctcagtcaactagccatggtgaaccctgccgcctacctacaacagcaacaactgctttcatctagccctctcgttgtgggtaatgcacctacat

SEQ ID NO: 89174 - DNA, 440 bp, Zea mays
  unsure (1)..(440): unsure at all n locations
agaccaacaagcaacatagaaagtggaatccagtagcaacaacagagcaacaatggcgaccgagatattttccctccttatgctccttgctctttctgcatgtgttgctaacgcgacaattttccctcaatgctcacaagctcctatagcttcccttcttcccccataccttccatcaatgatagcttcagtatgtgaaaacccagctcttcagccctataggctccaacaagcaatcgcagcaagcaacatacctttatcacccttgttgtttcaacaatcgccagccctatctttggtgcagtcattggtacaaaccatcagggcacagcagctgcagcaactcgtgctacctgtgatcaaccaagtagctctggcaaacctttctccctactctcagcaacaacaatntcttccattcaaccaactgtctacactga

SEQ ID NO: 89175 - DNA, 369 bp, Zea mays
tccgggcacgcgtacgcccgactttctgtttgtcctggacgcattcacgttccgcgccggggccattcatggcctgaagggggccccgtcgtcggccgctgaggacacgctcacaatgcctaccagcgcgcgcgctgggcccacgcaccagcatcaggcgcgcctagggggcaggttcacgtagctcgctcatgtgcaccagcgcctgcatgaacgtcgtcttagtcggcgccgcgattgagccatgtaccaagaccggaggcctaagcgacgttctcagtggcctgactgcggtcattggcctcaactggctccgtgtcatggcagcctctaccacctacgaccagtacaaggactcctgggacacca

SEQ ID NO: 89176 - DNA, 429 bp, Zea mays
tagcaacatagaaagcacaatagtgtaccaacaatggcagccaaaatattgtgcttgcttatgctccttggtctttctgcaagtgttgctaccgcaaccattttcccacaatgctcacaagctcctatagcttcccttcttcccccatacctctcaccagcggtgtcttcaatgtgtgaaaccccaattgttcaaccctacaggatccaacaagcaatcgcaacaggcatcttaccattatcacccttgttcctccaacaaccgtcagccctattacagcagttacctttggtccatttggtggcacaaaacatcagggcacaacaactacaacaacttgtgctagcaaaccttgctgcatactctcagcaacatcagtttcttccattcaaccaactggctgcattgaactctgctgcttatttgcaa

SEQ ID NO: 89177 - DNA, 421 bp, Zea mays
ggcaatcgcagctggcatcttacctttatcacccttgttcctacaacagtgatcagcgcctattacagcagttacctttggtgcatttattggcacaaaacatcagggcacaacaactacaacaacttgtgctagcaaaccttgctgcctactctcagcaacagcagtttcttccattcaaccaactagctgcattgaactctgcttcttatttgcaacaacaacaactaccattcagccagctacctgttgcctacccccaacaatttcttccattcaaccaactggcagcattgaactctcctgcttatttacagcagcaacaactactaccattcagccagctagctggtgtgagccctgctaccttcttgacacaaccacagttgttgccgttctaccagcacgctgcgcctaacgc

SEQ ID NO: 89178 - DNA, 385 bp, Zea mays
cccgtatttgacggccgtggccctgacgccagcctcgtggctcgcgtacagggagtggctacccagatgggcgacgtgcgccagttgtacaccgtcgtgttccaggagaggccgctcaagggctccacgctcgtcaccgaaggcgcgatgacagaagggtcagacgagtgggcgatctactgtggaactggagtgttcgcgatggcgagaggcgtcataaggagaacgtttcttgccgacacgagcggcgggaacttcgacgagcttgccgtggaggttctctgcccggtgttccagccggcggtgtttggctcatcgtcgtcacagccagctgcaaaggacatcagctacaccgtcgtcgtcaccaaggtcggtatgtggggtg

SEQ ID NO: 89179 - DNA, 432 bp, Zea mays
cgcacgcgtccgcccgccggcctgggcgtcccggacgcgtccacgttccgccgcggcgccgcgcagggcctgaggggggcccgggcgtcggcggcggcggacacgctcagcatgcggaccagcgcgcgcgcggcgcccaggcaccagcagcaggcgcgccgcgggggcaggttcccgtcgctcgtcgtgtgcgccagcgccggcatgaacgtcgtcttcgtcggcgccgagatggcgccgtggagcaagaccggcggcctcggcgacgtcctcggcggcctgccgccggccatggccgcgaacgggcaccgtgtcatggtcgtctctccccgctacgaccagtacaaggacgcctgggacaccagcgtcgtgtccgagatcaagatgggagacgggtacgagacggtcaggttctttcactgctacaagcgc

SEQ ID NO: 89180 - DNA, 407 bp, Zea mays
gttccgggcttgacggatgcatccaggctatcgaagtaggaacatagagaggacatgaacgctactgcctttaccagtaagatagatggccaacttttcttgaagcctaacaggccagcacttgttgtgagcagcacaagctggactccagatgaacatttaaggatacttttggaagcaggactaatgtacgacagacgcgtcgctgcagctttaggtgaagatgattcaatggatgaagggcaactgtggattgatatcaataacgggaagcagattgtctacccaagattactgatcattattacaggtgaaggacctgataggacgaaatatgaggatcaaattaaaaggtcgaagtcgacacgtgctggcttgcggacaatgtggcttgcatcagaggacta

SEQ ID NO: 89181 - DNA, 422 bp, Zea mays
  unsure (1)..(422): unsure at all n locations
cccacgcgtccgagaccattagctttatctactccagagcgcagaagaacccgatcgacaccatgagggtgttgctcgttgccctcgctctcctggctctcgctgcgagcgccacctccacgcatacaagcggcggctgcggctgccagccaccgccgccggttcatctaccgccgccggtgcatctgccacctccggttcacctgccacctccggtgcatctcccaccgccggtccacctgccgccgccggtccacctgccaccgccggtccatgtgccgccgccggttcatctgccgncgccaccatgccactaccctactcaaccgncccggcctcagcctcatccncagccacacccatgcccgtgccaacagccgcatccaagcccgtgccagctgcagggaacctgcggcgttggc

SEQ ID NO: 89182 - DNA, 365 bp, Zea mays
accggtccggaattcccgggtcgacccaagccttccgtaaccattacaaaacacaccacgctacgcacattagccacactctcagcgctgtggtctccgatataatacctccttgtgctctttgtgctctttgtgagcagcagcacatgcgctcattattccacaacactgactagttcctagtaccattattacacagcagctcctaccacctacttcaatggtgttcgaacacccagctgttcaagcctatatgctacatcaagcaattactgccagcgacctacatcaaccaatttaccagctacaacaacaatcattggcacatctcactatacaaaccatcgcatcgcaacagaaacgac

SEQ ID NO: 89183 - DNA, 440 bp, Zea mays
tagcaacatagaaagcacaatagtgtaccaacaatggcagccaaaatattttgcctccttatgctccttggtctttctgcaagtgctgctacggcgaccattttcccacaatgctcacaagctcctatagcttcccttcttcccccgtacctctcaccagcggtgtcttcggtatgtgaaaacccaattcttcaaccctataggatccaacaggcaatcgcagctggcatcttacctttatcacccttgttcctacaacaatcatcagccctattacagcagttacctttggtgcatttattggcacaaaacatcagggcacaacaactacaacaacttgtgctagcaaaccttgctgcctactctcagcaacaacaagttcttccattcaaccaactagctgcattgaactctgcttcttatttgcaacaacaacaact

SEQ ID NO: 89184 - DNA, 333 bp, Zea mays
atcgactccagattggagaactcgacaccatgaacgtgctgatcgttgcccttgcggtcctggcgctcgctgcgagcgccgcctccagtacaagctgcggctgtggctgccagacaccaccgcttcatctaccggctccgttctatatgccgcctccgctctatctgccgtcgcagcagcagccgcagccatggcaataccccactcaaccaccgcagctaagcccgtgccagcagttcggatcctgcggcgtcatgcagcgtcggcagcccgttcctgagccagtgcgtcgagttcctgaggcaccagtgcagcccggcggcgacaccctac

SEQ ID NO: 89185 - DNA, 360 bp, Zea mays
caactagcaacatagaaagcacaatagtgtaccaacaatggcagccaaaatattttgcctccttatgctccttggtctttctgcaagtgctgctacggcgaccattttcccacaatgctcacaagctcctatagcttcccttcttcccccgtacctctcaccagcggtgtcttcggtatgtgaaaacccaattcttcaaccctataggatccaacaggcaatcgcagctggcatcttacctttatcacccttgttcctccaacaatcatcagccctattacagcagttacctttggtgcatttattggcacaaaacatcaaggcacaacaactacaacaacttgtgctagcaaaccttgc

SEQ ID NO: 89186 - DNA, 193 bp, Zea mays
cattcaaccaacttgctttgtcaaacccaacagcattctaccaacaacccatcattggtggtgccctcttttagatttcttatgagttatagttcaataataaagctttttgtctgatgtttgtggcttcccagaaataacaaagtacatttatcaatactacaagtatcaactctataccaacgtaaaaata

SEQ ID NO: 89187 - DNA, 440 bp, Zea mays
cccagctcttcagccctataggctcctaacaagcaatcgcagcaagcaacatacctggatcacccttgttgtttcaacaatcgccagccctatctttggtgcagtcattggtacaaaccatcagggcacagcagctgcagcaactcgtgctacctgtgatcaaccaagtagctctggcaaacctttctccctactctcagcaacaacaatttcttccattcaaccaactgtctacactgaaccctgctgcttatttgcagcaacaactattaccattcagccagctagctactgcctactctcagcaacaacaacttcttccatttaaccaattggccgcactgaaccccgctgcttatttgcagcagcaaatactactaccatttagccagctagctgcagcaaaccgtgcttccttcttgacacagcaacagttgctg

SEQ ID NO: 89188 - DNA, 415 bp, Zea mays
  unsure (1)..(415): unsure at all n locations
attgagaccaactagcaacatagaaagcacaatagtgtaccaacaatggcagccaagatattttgcttccttatgctccttggtctttctgcaagtgttgctaccggaaccattttcccacaatgctcacaagctcctatagcttcccttcttcccccatacctctcaccagcggtgtcttcaatgtgtgaaaacccaattgttcaaccctacaggatccaacaggcaatcgcaacaggcatcttaccattatcacccttgttcctccaacaaccgtcagccctattacagcagttacctttggtccatgtggtggcacaaaacatcagggcacaacaactacaacaactngtgctagcaaaccttgctgcatactctcagcaacattcagttcttccattcaaccaactggctg

SEQ ID NO: 89189 - DNA, 360 bp, Zea mays
gagcattcagaaacacaccaagcgaagcacattagcaacaacctaacaacaatggctaccaagatattatccctccttgcgcttcttgcgctttttgcgagcgcaacaaatgcgttcattattccacaatgctcacttgctccaagttccattattacacagttactcccaccagttacttcaatgggcttcgaacacccagctgtgcaagcctataggctacaacaagcaattgctgcgagcgtcttacaacaaccaatttcccagttgcaacaacaatccttggcacatctaacaatacaaaccatcgcaacgcaacagcaacaacaattcctaccagcactgagccacctaaccatg

SEQ ID NO: 89190 - DNA, 385 bp, Zea mays
gagaccaactagcaacatataaagcacaatagtgtaccaacaatggcagccaaaatgttttgcctccttatgctccttggtctttctgcaagtgctgctacggcgaccattttcccgcaatgctcgcaagctcctatagcttcccttcttcccccgtacctctcaccagcggtgtcttcggtatgtgaaaacccaattcttcaaccctacaggatccaacaggcaatcgcagctggcatcttacctttatcacccttgttcctccaacaatcatcagccctattacaacagttacctttggtgcatttattggcacaaaacatcagggcacaacaactacaacaacttgtgctagcaaaccttgctgcctactctcagcaacagc

SEQ ID NO: 89191 - DNA, 465 bp, Zea mays
ggaattcccgggcaacaagcaacatacaaagtggaatccagtagcaacaatagatcaacaatggcgaccaagatactttccctggttatgctccttgctctttctgcatgtgttgctaacgcgacaattttccctcaatgctcacaagctcctatagcttcccttcttcccccataccttccatcaatgatagcttcagtatgtgaaaacccagctcttcaaccctataggctccaacaagcaatcgcagcaagcaacatacctttatcacccttgtttcaacaatcgccagccctatctttggtgcagtcattggtacaaaccatcaaggcacagcatctgcagcaactcgtgctacctgtgatcaaccaagtagctctggcaaacctatctgcctactatcatcaacaacaatatctgccattcaaccaactatctacactgaaccctgctgctcatttgcag

SEQ ID NO: 89192 - DNA, 335 bp, Zea mays
gtgcaggcaagatctagtgccttgatgaatgctcgtcttgctgatgtgtgcattggcacgtgcgcagcaccgacggtcctccctgcgcactactttgaaaccgtggatcaccgcactggcgcatcgcgtagcttcaacgttatcgacgggggcctcgccgcaaacaatccggtgcttatttattgcttgcttggttatagtagtagttatttttctttcttctggctgggttttgacgactagcatgaaatcatgtgcgtatgttgctatgatctttttgtccctgtccctgtcctgtcctgtgatctgacagactctggtggcgattggtgaga

SEQ ID NO: 89193 - DNA, 433 bp, Zea mays
gtgaaatttggccaagcagcctggtagcacaattcagatacttggtgcagagaaggctttatgcagagctctaaagacaaagcattctacacctaagtatggcctcatctaccatgcatccttaattggcaaggcttctcaaaagcacaagggaaaaatctctcgttctcttgctgcaaaaacagctcttgctatccggtatgatgcccttggtgatggtgaggacaactccattggcactgagagtcgacttaagcttgagacacggcttcaagttcttgagggtagagaacttgggaaatctgctggttccacaaaggggaagcccaagatagaagtgtatgaaaaggaccggaagaagggtactggggctttaacaactcctgctaagacatataaccctgcagctgatctggtactcacggaagaaaca

SEQ ID NO: 89194 - DNA, 344 bp, Zea mays
gcaacatagaaagtggaatccagtatcaacaatagagcaacaatggcgaccaagagattttgcctccttatgctccttgctctttctacatgtgttgctaacgcgacaattttccctcaatgctcacaagctcctatagcttcccttcttcccccataccttccatcaattatagcttcaatatgtgaaaacccagctcttcaaccatataggcttcaacaagcaatcgcagcaagcaacatacctttatcgcccttgttgtttcaacaatcgccagccctatctttggtgcagtcattggtacaaaccatcagggcacaacagctgcagcaactcgtgctacc

SEQ ID NO: 89195 - DNA, 430 bp, Zea mays
ggcagcaccccgatcctgggccagtgcgtcgagttcctgaggcatcagtgcagccggacggcgacgccctactgctcgcctcagtgccagtcgttgcggcagcagtgttgccagcagctcaggcaggtggagccgcagcaccggtaccaggcgatcttcggcttggtcctccagtccatcctgcagcagcagccgcaaagcggccaggtcgcggagctgttggcggcgcagatagcgcagcaactgacggcgatgtgcggcctgcagcagccgactccatgcccctacgctgcatgccgcggtgtcccccactgaagaaactatgtgctgtagtatagccgctggctagctagctagttgagtcatttagcggcgatgattgagtaaatatgtgtcacgcatcaccatgggtggcagtgtcagtgtgagc

SEQ ID NO: 89196 - DNA, 447 bp, Zea mays
acccacgcgtacaggacagacccatgacactattaccagttgaccagcaactgcgaccaaaaggcaaccggtccttaaccacctagctctctctacatgtcctgctaacgcgacaatattgcctcaatgctcacaagctcctatagcttcactacttgcaccataccttccatcaattatagcttcaatatatgaaaacccagctcttcaaccatatacgcttcaacaagcaatcgcagcaagcaacatacctttatcgcccttgatgattcaacaatcagcagccctatctatgctgcaatcattggtacaaaccatcagggcacaacagctgcagcaactcgtgctacctctgatcaaccaagtatctcttgcaaaccttactccctactctcagcaacaacaatttcttccattcaaccaactgtctacactgaaccctgctgc

SEQ ID NO: 89197 - DNA, 375 bp, Zea mays
gcaacatagaaagcacaatagtgtaccaacaatggcagccaaaatatttggcttcgttatgctccttggtctttctgcaagtgttgctaccgcaaccattttcccacaatgctcacaagctcctatagcttcccttcttcccccatacctctcaccagcggtgtcttcaatgtgtgaaaccccaattgttcaaccctacaggatccaacaggcaatcgcaacaggcatcttaccattatcacccttgttccttcaacaaccgtcagccctattacagcagttacctttggtccatttggtggcacaaaacatcaaggcacaacaactacaacaacttgtgctagcaaaccttgctgcatactctcagcaacatca

SEQ ID NO: 89198 - DNA, 399 bp, Zea mays
cccacgcgtccgaagatattttccctccttatgctccttgctctttctacatgtgttgctaacgcgacaatcttccctcaatgctcacaagctcctatagcttcccttcttcccccataccttccatcaattatagcttcagtatgtgaaaacccagctcttcaaccatataggcttcaacaagcaatcgcagcacgcaacatacctttatcgcccttggtgtttcaacaatcaccagccctatctttggtgcagtcattggtacaaaccatcagggcacaacagctgcagcaactcgtgctacctgtgatcaaccaagtagctgtggcaaacctttctccctactctcagcaacaacaatcttctgcattcaaccaactgtctacactgaaccctgct

SEQ ID NO: 89199 - DNA, 420 bp, Zea mays
ctcgtaccggtccggaattcccgggctccattcgacaggtcacagacaagcctattctgatatatcccaacagtggtgaaagatatgatggtgaaaaaaaggagtgggtggaatccactggtgtgtcagatggtgattttgctttcgtacgtaaatgaatggtgcaaagatggggctgcgcttatcgggggctgctgcatgacaactccaaacactatcagggccatacacagaactcttaaccaaggctgtcacaagcatcagttacctgtagcatagatctgtgctccactcctgatgctctactaccagcaatacctcgagctgtatacccgagattgcttaaccagcgcgaaccaatatactgttgcgtgttctcctgctaatgagatgttctgcaactatgtgcgtaatgttgta

SEQ ID NO: 89200 - DNA, 337 bp, Zea mays
ccggtccggaattgacggatgcatccactcgtacgagcaatcgcagaagcattatacctttataggcttcgtggtctcaacaggggccaggcctatcttaggtgcagccatgggtgctaaacaagttaggtgatacatcagcctgcagcaactattgctacctttgatcatccatgtagctttggcaaacctatctctctactcttatcagcaacaatatgttacattcaaccgactgattacactgtaccctgctgcgtattagcagtaaccactattaccatttatgcagctagcgtctgactactttaagcaacaacagctgcatccatttaac

SEQ ID NO: 89201 - DNA, 411 bp, Zea mays
caccctcccgggccgccttctcttctccagcgtccgatctcccactcccctccctcaccgcagctctcccacctacgccctccccccgcacgcgctcgccacctcgccctcccctccacgttgctcgcacccgcgcttatataagtgcaggaggagctcatggcggaagctccggcgagccctggcggcggcggcgggagccacgagagcgggagccccaggggaggcggaggcggtggcagcgtcagggagcaggacaggttcctgcccatcgccaacatcagtcgcatcatgaagaaggccatcccggctaacgggaagaccatcccggctaacgggaagatcgccaaggacgctaaggagaccgtgcaggagtgcgtctccgagttcatctccttcatcactagcgaa

SEQ ID NO: 89202 - DNA, 313 bp, Zea mays
tgtcttgagacaacaacatttgttgccattttacccacaagttgtgggaaacattagtgccttcttgcaacagcaacaattgctaccattctacccacagaatgtggcaaacattgttgccttcttacaacaacaacaattgctaccatttagccaacatgctttgacgaatcctaccaccttattgcaaccgcccaccattggtggtgccatcttctagattttttatgatttatactgtaataataaagttctcatgctgatatgtgcgacctctcagtaataaagtattagagatctatattttaaattc

SEQ ID NO: 89203 - DNA, 429 bp, Zea mays
attgagaccaactagcaacatagaaagcacaatagtgtaccaacaatggcagccaaaatattttgcttccttatgctccttggtctttctgcaagtgctgctaccgcaaccattttcccacaatgctcacaagctcctatagcttcctttcttcccccatacctctcaccagcggtgtcttcagtatgtgaaaacccaattcttcaaccctacaggatccaacaggcaatcgcagcaggcatcttacctttatcacccttgttcctccaacaaccgtcagccctattacagcagttacctttggtgcatttgttggcacaaaacatcaaggcacaacaactacaacaacttgtgctaggaaaccttgctgcctactctcagcaacagcagtttcttccattcaaccaactggctgcattgaactctgct

SEQ ID NO: 89204 - DNA, 305 bp, Zea mays
gtaccggtccggaattcgagccacgcgtccgcgagatattagccctccttgcgcttcttgcccttttagtgaccgcaacaaatgcgtgcattattccacagtgctcacttgctcctagtgccattattccacagttcctcccaccagttacttcaatgggcttcgaacatccagccgtgcaagcctacaggctacaactagcgcttgcggcgagcgccttacaacaaccaattgcccaattgcaacaacaatccttggcacatctaaccctacaaaccattgcaacgcaacaacaacaacaacaa

SEQ ID NO: 89205 - DNA, 356 bp, Zea mays
cgggatattagccctccttgcgctttttgcccttttagtgagcgcaacaaatgcgtgcattattccacagtgctcacttgctcctagtgccattattccacagttcctcccaccagttacttcaatgggcttcgaacatccagccgtgcaagcctacaggctacaactagcgcttgcggcgagcgccttacaacaaccaattgcccaattgcaacaacaatccttggcacatctaaccctacaaaccattgcaacgcaacaacaacaacaacaacagtttctgccatcactgaaccacctagccgtggtgaaccctgtcacctactttgcacagcagctgcttgcattccacccaa

SEQ ID NO: 89206 - DNA, 423 bp, Zea mays
atggagaccaactagcaacatagaaagcacaatagtgtaccaacaatggcagccaagatattttgcctccttatgctacttggtctttctgcaagtgctgttacggtgaccattttccctcaatgctcgcaagctcctatagcttgccttcttccaccgtacctctcaccagcggtgtcttccgtatgtgaaaacccaattcttcaaccctacaggatccaacaggcaatcgcagctggcatcttacctttatcacccttgttactccaacaatcatcagccctattacaacagttacctttggtgcatatattggcacaaaacatcagggcacaacaactacaacaacttgtgctagcaaaccttgctgcctactctcagcaacagcagtttcttccattcaaccaactaggttcattgaac

SEQ ID NO: 89207 - DNA, 400 bp, Zea mays
cccagactctgcaaaaggctataaaactcgtggaatggcatatgccatgcttggcaaatgggaggaagctgctcatgatctgcacacagcatctaacatggattacgacgaggagatcaatgctgtgctcaagaaggtggagcctaatgctcacaagatagtggaacatcgcaggaagtatgagaggttgagaaaagagagggaggaaaagagagcgcagcgtgatcggcttcgtcaacgtgcagaggcgcaggctgcttacgacaaggccaagaagaaagagcaatcgtcaagtcgctcatcaggaggtgcatctcccagaggctttcctggacggatgcctggtggtggtttccctagagggatgcccggtggaggtttcccccggggtggcatgcct

SEQ ID NO: 89208 - DNA, 281 bp, Zea mays
tagcaacatagaaagcacattagtgtaccaacaatggcagccaaaatattttgcctgcttatgctccttggtctttgtgcaagtgctgctacggcgaccattttcccgcaatgctcgcaagcttgtatagcttaccttcttccctcgtacctatcaccaacggtgtcttcggtatgtgaaaacccatttcttcaaccctacaggatccaacaggcaatcacagctgccatttaaccttaataaccctggttcttccaccaataataagccctataacatca

SEQ ID NO: 89209 - DNA, 270 bp, Zea mays
ctagcaacatagaaagcacaatagtgtaccaacaatggcagccaaaatattttgcttgcttatgctccttggtctttctgcaagtgctgctaccgcaaccattttcccacaatgctcacaagctcctatagcttcctttcttcccccatacctctcaccagcggtgtcttcagtatgtgaaaacccaattcttcaaccctacaggatccaacaggcaatcgcagcaggcatcttacctttatcacccttgttcctccaaccaacgcgtca

SEQ ID NO: 89210 - DNA, 273 bp, Zea mays
gtcctccagtccatcctgcagcagcagccgcaaagcggccaggtcgcggggctgttggcggggcagatagcgcagcaactgacggcgatgtgcggcctgcagcagccgactccatgcccctacgctgctgccggcggtgtcccccactgaagaaactatgtgctgtagtatagccgctggctagctagctagttgagtcatttagcggcgatgattgagtaataatgtgtcacgcatcaccatgggtggcagtgtcagtcgtgagcaatttgg

SEQ ID NO: 89211 - DNA, 268 bp, Zea mays
  unsure (1)..(268): unsure at all n locations
cagcaagcaacatagaaagtagaatccattagcaacaatagagcaacaatggcgaccgagatgattttccctccttatgctccttgctctttctacatgtgttgctaacgcgacaattttccctcaatgctcacaagctcctatagcttcccttcttcccccataccttccatcaattatagcttcagtatgtgaaaacccagctcttcaaccatataggcttcaacaagcaatcgcagcaagcaacatancctttatncgcccttgt

SEQ ID NO: 89212 - DNA, 291 bp, Zea mays
accgttcggattccgggcccaattcttcaacctacaggatccaacaggcaatcgcagctggcatcttacctttatcacccttgtgcctgcaacaatcatcagccctattacaacagttacctttggtgcatttattggcacaaaacatcagggcacaacaactacaacaacttgtgctagcaaaccttgctgcctactctcagcaacagcagtttcttccattcaaccaactaggttcattgaactctgcttcttatttgcaacaacaacaactaccattcagccagctac

SEQ ID NO: 89213 - DNA, 343 bp, Zea mays
ggaggaggttcgtcaagaggggggggggaaggtatgctgtaccggttcggaattcccgggtcgagccacgcgtccgggtaatcgtgatgtcttgtgctccccactagctgaagcaaacaagaatgggagagatgtggtggaaacatttgctagttacttgaaagattattacattggaaaatttggggcgttagttgcatgatatgatcagcaatattcgaagaacacaactcctgctgaatcctgatatagactatggtggtaccaagtttgcagtgaggttgcatatttgcaggtggcaccaaagaaccatagtgttcgttccccagagatcgacacgggg

SEQ ID NO: 89214 - DNA, 375 bp, Zea mays
ctgtttctgccaactatggcatgtaggccgagcttctcaccaagtatatcaggcgggggctggtgctccgatatcctcaactgataagccaatatcatcaagatggaggatactgatgcccgatggatcctatggcaagtatccaactccgaggcgcctagccacatccgagataccagaaattgttgagcaataccgacaagcagccataaacgccatcaaagcaggcttcgatggcatcgagatccatggcgcccatggctacctcatcgatcagttcctcaagggcggtatcaacgaccggactgacgagtacagcggctcactctccaaccgctgccggatcctgctggatgcgacccgagccagggtctc

SEQ ID NO: 89215 - DNA, 370 bp, Zea mays
cgcttatttgcagcaacaacaactactaccattcagccagctagctgctgcctaccgccggcgatttcttccattcaaccaactggcagcattgaactctcatgcttatgtacaacaacaacaactactaccattcagccagctagctgctgtgagccctgctgccttcttgacacagcaacatttgttgccgttctacctgcacactgcgcctaacgttggcaccctcttacaactgcaacaattgctgccattcgaccaacttgctttgacaaacccagcagtgttctaccaacaacccatcattggtggtgccctcttttagattgcttatgagttatagttcaataataaagttttttttgctgat

SEQ ID NO: 89216 - DNA, 424 bp, Zea mays
gcgacaaggccgcggatatcctggtcaacttctttgacaaatgcaaggcagatccgagctagtgggacaagatctcacagggcggcctgcagagaatctatgagaagtacacctggaagctctactccgagaggctgatgaccctgaccggcgtgtacgggttctggaagtacgtgagcaacctggagaggcgcgagacccgccgctacatcgagatgttctacgccctgaagtaccgtagcctggcaagccaggttccgctgtccttcgattagtacggggaaagaagaagaagaagaagcccaggccggagaaccatcgcctgcatttcgatctgtttcaccgcaattcgcattgttagtcgtgtattggagttatgtgtacttggtttccaagaactttggttccttctcgtatattttcc

SEQ ID NO: 89217 - DNA, 266 bp, Zea mays
gcaacatagagagtggaatacagtagcaaacatagagcaacaatggcggccaagatagtctgcatccttatgctccttgctctttctgcatgtgttgctaacgcgaccatttttcctcaatactcacaagctcctatagctgcccttcttcccccatacctttcatcaatgaccgctttagtatgtgaaaacccagcccttcaaccctacaggatccagcaagcaatcgtagcaagcaacttacctttatcacacctgttctttca

SEQ ID NO: 89218 - DNA, 269 bp, Zea mays
gcaacatagaaagtagaatccattagcaacaatagagcaacaatggcgaccaagatagtttcgctccttatgctccttgctctttctacatgtgttgctaacgcgacaattttccctcaatgctcacaagctcctatagcttcccttcttcccccataccttccatcaattatagcttcagtatgtgaaaacccagctcttcaaccatataggcttcaacaagcaatcgcagcaagcaacatacctttatcgcccttgttgtttcaacc

SEQ ID NO: 89219 - DNA, 266 bp, Zea mays
ctcaatgctcacaagctcctatagcttcccttcttcccccataccttccatcaattagagcgtcaatatgtgaaaacccagctcttcaaccatataggcttcaacaagcaatcgcagcaagcaacatacctttatcgcccttgttgtttcaacaatcgccagccctatctttggtgcagtcattggtacaaaccatcagggcacaacagctgcagcaactcgtgctacctctgatcaaccaagtagctctggcaaaacctttctcc

SEQ ID NO: 89220 - DNA, 248 bp, Zea mays
gttgttgcaacaatcgccagccctatctttggtgccgtcattggtacaaaccgtcagggcacataagctgcaggaactcgcgctacctgtgatcaaccaagtcgctctggcaaacctttctccctactctcagcaacaacaatttcttccattcaaccaactgtctacactgaaccctgctgcttatttgcagcaacaactattaccattcagacagctagctactgcctactctcagcaacaacaac

SEQ ID NO: 89221 - DNA, 260 bp, Zea mays
caacaatggctaccaagatattatccctccttgcgcttcttgcgctttttgcgagcgcaacaaatgcgttcattattccacaatgctcacttgctccaagttccattattacacagttcctcccaccagttacttcaatgggcttcgaacacccagctgtgcaagcctataggctacaacaagcaattgcggcgagcgtcttacaacaaccaatttcccagttgcaacaacaatccttggcacatctaacaatacaaacc

SEQ ID NO: 89222 - DNA, 298 bp, Zea mays
taccggtctcggaattcccgactcgagccacgcgtccgggtgcattgaactctgctccttatctgcaacaacaacaactaccattcatccgggtgcctgctgcctacgccgagcaatttcttccattcaacgcaactggcagcattgaactctcctgcttatttacagcagcaacaactactaccattcatccagatagctggtgtgagccctgctaccttcttgatacatccacagttgttgccgttctaccatcacgctgcgcctaacgctggcaccctcttacaactgcaacaat

SEQ ID NO: 89223 - DNA, 468 bp, Zea mays
  unsure (1)..(468): unsure at all n locations
tgatatttgcgtccggaattcccgggtcgacccacgcgtacgaacaagcaacatagaaagtggaatccagtagcaacaatagagcaacaatggcgaccgggatggtttccctccttatgctccttgctctttctgcatgtgttgctaacgcgacaattttccctcaatgctcacaagctcctatagcttcccttcttcccccataccttccatcaatgatagcttcagtatgtgaaaacccagctcttcaaccctataggctccaacaagcaatcgcagcaagcaacatacctttatcacccttgtttcaacaatcgccagccctatctttggtgcagtcattggtacaaaccatcaaggcacagcagctgcagcaactcgtgctacctgtgatcaaccaagtagctctggcaaacctttcntcctactatcagncacaacgatttcttccattcaaccaactatctn

SEQ ID NO: 89224 - DNA, 426 bp, Zea mays
cgcaacatagaaagcacaatagtgcaccaacaatggcagccaaaatattacgcctcctgatgcgccttggtctttctgcaagtgctgctacggcgaccattttcccacaatgctcacaagctcctatagcttcccttcttcccccgtacctctcaccagcggtgtcttcggtatgtgaaaacccaattcttcaaccctataggatccaacaggcaatcgcagctggcatcttacctttatcacccttgttcctccaacaatcatcagccctattacagcagttacctttggtgcatttattggcacaaaacatcagggcacaacaactacaacaacttgtgctagcaaaccttgctgcctactctcagcaacaacagtttcttccattcaaccaactagctgcattgaactctgcttcttatttgc

SEQ ID NO: 89225 - DNA, 426 bp, Zea mays
ccagcaagcaacatagaaagtagaatccattagcaacaatagagcaacactggcgagcaagagattttccctccttatgctccttgctctttctacatgtgttgctaacgcgacaattttccctcaatgctcacaagctcctatagcttcccttcttcccccataccttccatcaattatagcttcagtatgtgaaaacccagctcttcaaccatataggcttcaacaagcaatcgcagcaagcaacatacctttatcgcccttgttgtttcaacaatcaccagccctatctttggtgcagtcattggtacaaaccatcagggcacaacagctgcagcaactcgtgctacctgtgatcaaccaagtagctctggcaaacctttctccctactctcagcaacaacaatttcttccattcaaccaact

SEQ ID NO: 89226 - DNA, 424 bp, Zea mays
gcaattagctcatcgactccagattggagaactcgacaccatgaaggtgctgatcgtggccgttgctctcctggcgctcgctgcgagcgccgcctccagtacaagcggcggctgtggctgccagacaccaccgtttcatctaccgcctccgttctatatgccgcctccgttctatctgccgccgcagcagcagccgcagccatggcaataccccactcaaccaccgcagctaagcccgtgccagcagttcggatcctgcggcgtcggcagcgtcggcagcccgttcctgggccagtgcgtcgagttcctgaggcaccagtgcagcccggcggcgacgccctacggctcgccacagtgccaggcgctgcagcagcagtgctgccaccagatcaggcaggtggagccgctgcagcggtaccaggcg

SEQ ID NO: 89227 - DNA, 269 bp, Zea mays
tagaaagcacaatagtgtaccaacaatggcagccaatattttgcttccttatgctccggggtgtttctgcaagtgttgctaccgcaaccattttcccacaatgctcacaagctcctatagcttcccttcttcccccatacctctcaccagcggtgtcttcaatgtgtgaaaacccaattgttcaaccctacaggatccaacaggcaatcgcaacaggcatcttaccattatcacccttgttcctccaacaacccgtcaagccctattac

SEQ ID NO: 89228 - DNA, 260 bp, Zea mays
atagaaagcacaatagtgtaccaacaatggcagccaaaatattttgcctccttatgcgccttggtctttctgcaagtgctgctacggcgaccattttcccgcaatgctcgcaagctcctatagcttcccttcttcccccgtacctctcaccagcggtgtcttcggtatgtgaaaacccaattcttcaaccctacaggatccaacaggcaatcacagctggcatcttacctttatcacccttgttcctccaacaatcatca

SEQ ID NO: 89229 - DNA, 269 bp, Zea mays
  unsure (1)..(269): unsure at all n locations
gtgatggcagattatggttacagcattgagcacattctcatggttgatatcatcccggacggtgctgttcgtaagggaatgaacgacataaatgcagcccaaaggcttcaactggcaagtgtttacaagggagaagcagagaagatccttatggtgaagaaagcggaggcagaagcagaggcgaaatatctttctggtgtcggtatcgctaaacagcggcaggcgataaccgacggccttagagagaacatncctcgaacttctcacaa

SEQ ID NO: 89230 - DNA, 260 bp, Zea mays
gaccaactagcaacatagaaagcacaatagtgtaccaacaatggcagccaaagtatggtgcttccttatgctccttggtctttctgcaagtgttgctacctgaaccattttcccacaatgctcacaagctcctatagcttccctacttcccccatacctctcaccagcggtgtcttcaatgtgtgaaaccccaattgttcaaccctacaggatccaacaggcaatcgcaacaggcatcttaccattatcacccttgttcc

SEQ ID NO: 89231 - DNA, 347 bp, Zea mays
  unsure (1)..(347): unsure at all n locations
nggaggaggttcgttctagcggatggggagatgagtagtcttctaccggtccggaattcccgggtcgacccacgcgtgcggtgttcttgggattattgagaatccggtgtctatcaaaagtatagaatgtgcggtcggagacaaaggttttgaagagggatggatgattccacgacctccacttcaaagaacaggaaggaaggtggccattgttggcagtggaccatctggtttggctgctgcagatcaactaaataaaatgggccacttcgtaactgtgttcgaacgtgcagatcgaattggaggtttaatgatgtatggtgtgccaaacatgaagacaagacccn

SEQ ID NO: 89232 - DNA, 246 bp, Zea mays
atccaatccagatcagcaaagcggcagtgcgtagagaggatcgtcgaacagggcaggatgaagatggtcatcgttctcgtcgtgtgcctggctctgtcagctgccagctcctctgcaatgcatatgccctgcccctgcgcggggctgcagggcttgtaccgcgctggcgccggcctgacgacgatgatgggcgcctgcggtctgtacccctacgcggagtacctgaagcagccgcagtgcatcccg

SEQ ID NO: 89233 - DNA, 472 bp, Zea mays
atatagttagtactcgtccggaattcccgggtcgacccacgcgtccggcacccgagtggtcgacctgatccgccacatgaacatcaccaagtaaatgaacaaagtgatgaaaacatgcaaagagtgatgaaagcatgcagagagagttgtgtttcttccccggaagtgcttccgagaataaatttttcttatctgattgtctaaaacctataacgggtgtaatggtatcgtagtggttggctgagcatcatgtgactcatattttgtcaggtctatgtgtcatccttaaacttgtaacggtcattatatttcaaaagttttgcattttccaaaactaacaacaaagggcggtcgctctagaggatccaagcttacgtacgcgtgcatgctacgtcatagctcttctatagtgtcacctaaattcaatgcactggccgtcgttttacaacgtcgtgactgggaaaaccctggc

SEQ ID NO: 89234 - DNA, 422 bp, Zea mays
tagcaacatagaaagcacaatagtgtaccaacattggcagccaaaatattttgcctggttaggctccttggtctttctgcaagtgctgctacggcgaccattttcccacaatgctcacaagctcctatagcttcccttcttcccccgtacctctcaccagcggtgtcttcggtatgtgaaaacccaattcttcaaccctataggatccaacaggcaatcgcagctggcatcttacctttatcacccttgttcctccaacaatcatcagccctattacagcaattacctttggtgcatttattggcacaaaacatcaaggcacaacaactacaacaacttgtgctagcaaaccttgctgactactctcagcaacaacagtttcttccattcaaccaactagctgcattgaactctgcttctta

SEQ ID NO: 89235 - DNA, 266 bp, Zea mays
ctcaatgctcacaagctcctatagcttcccttcttcccccataccttccatcaatgagagctgcagtatgtgaaaacgcagctcttcagccctataggctccaacaagcaatcgcagcaagcaacatacctttatcacccttgttgtttcaacaatcgccagccctatctttggtgcagtcattggtacaaaccatcagggcacagcagctgcagcaactcgtgctacctgtgatcaaccaagtagctctggcaaaccatttctcc

SEQ ID NO: 89236 - DNA, 267 bp, Zea mays
ctccggtgcatctcccaccgccggtccacctgccgccgccggtccacctgccaccgggggtgcatgtgccgccgccggttcatctgccgccgccaccatgccactaccctactcaaccgccccggcctcagcctcatccccagccacacccatgcccgtgccaacagccgcatccaagcccgtgccagctgcagggaacctgcggcgttggcagcaccccgatcctgggccagtgcgtcgagtttctgaggcatcagtgcagcccga

SEQ ID NO: 89237 - DNA, 238 bp, Zea mays
atttactccaccactacaggtccatttatttacgcgcagtataaaattaccgatcggtacttaactacacacgcaagcaattagttcatgcgcttattaggttgtgccactggccaccactacactacattacactagcacaagcaagcagctacacatacttgtccatatcacataaacgaaacagcatatataagaagatgtcccaacatctttgcaccacgcgctgagatcaggg

SEQ ID NO: 89238 - DNA, 295 bp, Zea mays
ggaattcccgggctcgtcgtgtgcctggctctgtcagctgccagcgcctctgcaatgcagatgccctgcccctgcgcggggctgcgaggggttgtacggcgctggcgccggcctgacgacgatgatgggcgccggcgggctgtacccctacgcggagtacctgaggcagccgcagtgcagcccgctggcggcggcgccctactacgccgggtgtgggcagccgagcgccatgttccagccgctccggcaacagtgctgccagcagcagatgaggatgatggacgtgcagtccgtc

SEQ ID NO: 89239 - DNA, 261 bp, Zea mays
caacaactaccattcagccagctacctgctgcctacccccagcaatttcttgcattcgaccaactggcagcattgaactctcctgcttatttacagcagcaacaactactaccattcagccagctagctggtgtgagccctgctaccttcttgatacaaccacagttgttgccgttctaccagcacgctgcgcctaacgctggcaccctcttacaactgcaacaattgctgccattcaaccaacttgctttgacaaaccca

SEQ ID NO: 89240 - DNA, 258 bp, Zea mays
agcggcagtgcgtagagaggatcgtcgaacagaacagcatgaagatggtcatggttgtggtcgtgtgcctggctctgtcagctgccagcgcctctgcaatgcagatgccctgcccctgcgcggggctgcagggcttgtacggcgctggcgccagcctgacgacgatgatgggcgcctgctggctgcacccatacgcggagtacctgatgcagccgcagagcagcccgctggctgcggcgccctactacaccaggtgtg

SEQ ID NO: 89241 - DNA, 425 bp, Zea mays
cgatgttcagcattcaaaaacacaccaagtttaatcgcactagcaacgacctaacaccaaggggtgccaagatattagccggccttgcgcttcttgcccttttagtgagcgcaacaaatgcgttcattattccacagtgctcacttgctcctagtgccattattccacaggtcctcccaccagttacttcaatgggcttcgaacattcagccgtgcatgcctacaggctacaactagcgcttgcggcgagcgccttacaacaaccaattgcccaattgcaacaacaatccttggcacatctaaccctacagaccattgcaacgcaacaacaacaacagcaacagtttctgccatcactgagccatctagccgtggtgaaccctgtcacctacttgcaacagcagctgcttgcatccaacccactt

SEQ ID NO: 89242 - DNA, 423 bp, Zea mays
cgaagaacccgatcgacaccatgagggtgttgctcgttgccctcgctctcctggctcgcgcggggagcgccacctccacgcatacaagcggcggctgcggctgccagccaccgccgccggttcatctaccgccgccggtgcatctgccacctccggttcacctgccacctccggtgcatctaccaccgccggtccacctgccgccgccggtccacctgccaccggcggtccatgtgccgccgccggttcatctgccgacgccaccatgccactaccctactcaaccgccccggcctcagcctcatccccagccacacccatgcccgtgccaacagccgcatacaagcccgtgccagctgcagggaacctgcggcgttggcagcaccccgatcctgggccagtgcgtcgagtttctgaggcatc

SEQ ID NO: 89243 - DNA, 267 bp, Zea mays
cagaaacacaccaagcgaagcgcactagcaacgacctaacaacaatggctaccaagagattagccctccttgcgcttcttgccctttttgtgagcgcaacaaatgcgttcattattccacaatgctcacttgctcctagtgccattattccacagttcctcccaccagttacttcaatgggcttcgaacacctagctgtgcaagccaacatgcaacaacaagcgcttgcggcgagcgtcttacaacaaccaattgtcccaattgcaa

SEQ ID NO: 89244 - DNA, 290 bp, Zea mays
accggtccggaattcccgggcgacccaaaaaaaggatcaaggtgggagaaacaaaacacaaggcggcgtccgcagcttccccactccaggttgggtgtttccgactccggtgactccaccaccagcaacccgtgcagcgagcgcactccgaccatcgccatgtcgaggcgcggcgactgggtctacgagaacaacggcgggacctgcgtggccatcgccggcgctgattactgtgtcgtcgctgcggacacccgcctctctgtaggatacagtatcctcacgccgtgatc

SEQ ID NO: 89245 - DNA, 419 bp, Zea mays
caagcggcagtgcgtagagaggatcgtccaacagaacagcatgaagatggtcatcgggctggtcgtgtgcctggctctgtcagctgccagcgcctctgcaatgcagatgccctgcccctgcgcggggctgcaaggcttgtacggcgctggcgccggcctgacgaccatgatgggcgccggcgggctgtacccctacgcggagtacctgaggcagccgcagtgcagcccgctggcggcggcgccctactacgcccggtgtgggcagccgagcgccatgttccagccgctccggcaacagtgctgccagcagcagatgaagatgatggacgtgcagtccgtcgcgcagcagctgcagatgatgatgcagcttgagcgtgccgctgccggcagcagcagcctgtacgagccagctctgatgc

SEQ ID NO: 89246 - DNA, 429 bp, Zea mays
cataccaactagcaacatacatagtgaagtacactagcaacatcttagcaccaatgggggccgggatttttgccctccttgccctccttgctctttcagcaagcgctgctacctcgacttttattccacaatgctcacaacaatacctctctccggtgacagccgcgggatttcaatacccaactatacaatcctacatggtacaagaggccatccaagcaagcatcttacggtcattagcattaaccctccaacaaccatatgctctattgcaacagccatccttagtgcatctgtatctccaaagaatcgcggcacaacaactacaacaacagttgctaccaacaatcaatcaagtagttgcagcgaaccttgctgcttacctacagcaacaacagtttcttccattcaatcaactagctggggtga

SEQ ID NO: 89247 - DNA, 426 bp, Zea mays
ggagttggaaaaactagctaatgggaatagcaagattcctggtacattagatgagtgtaggaagcttgtcgttccaataattgaggagtattttagtacaggagatgtggaattggcagcttctgagctgaagtgtcttggatctgatcagtttcatcattactttgtgaagaagcttatatctatggcaatggatcgccatgacaaagaaaaagaaatggcatcgattctgttatcatctttgtatgctgatctactgagctcctacaggatcagtgaaggttttatgatgcttctggagtctacagaagatctaactgttgatataccggatgctactgatgtattggcagtttttattgcacgggctattgttgatgaaattttgcctcctgttttcctcactcgagctagggcactacttcc

SEQ ID NO: 89248 - DNA, 267 bp, Zea mays
gcacaatagtgtaccaacaatggcagccaaaatattttgcctccttatgctccttggtcttggctgcaagtgctgctacggcgaccattttcccgcaatgctcgcaagctcctatagcttcccttcttcccccgtacctctcaccagcggtgtcttcggtatgtgaaaacccaattcttcaaccctacaggatccaacaggcaatcgcagctggcatcttacctttatcacccttgttcctccaacaatcatcagctcctattacaa

SEQ ID NO: 89249 - DNA, 268 bp, Zea mays
attttgagcattcagaaacacaccaagcgaagcgcactagcaacgacctaacaacaggggctaccaagatattagccctccttgcgcttcttgccctttttgtgagcgcaacaaatgcgttcattattccacaatgctcacttgctcctagtgccattattccacagttcctcccaccagttacttcaatgggcttcgaacacctagctgtgcaagccaacatgcaacaacaagcgcttgcggcgagcgtcttacaacaaccaattgg

SEQ ID NO: 89250 - DNA, 262 bp, Zea mays
ggtctttctgcaagtgctgctaccgcatccattttcccacaatgctcacaagctcggatagcttcctttcttcccccatacctctcaccagcggtgtcttcagtatgtgaaaacccaattcttcaaccctacaggatccaacaggcaatcgcagcaggcatcttacctttatcacccttgttcctccaacaaccgtcagccctattacagcagttacctttggtgcatttgttggcacaaaacatcaaggcacaacaactac

SEQ ID NO: 89251 - DNA, 271 bp, Zea mays
accggtccggattcccgggtcgaccagctccgaggaaccaatgcacatacaagcgcactagcgacacatgacgggggtaaatagttacctatcttgactcttgccctagtgctatgcacaaagctttcattttgctagtaggcacttacatcctagtgccattattccacagtttctcccaccagttacttcaatgggcttcgcacacctatctgagcatgccaacatgcaccagcaagcgcttgtggcgagcgacttacaacaaccaatt

SEQ ID NO: 89252 - DNA, 263 bp, Zea mays
gcaacagcagatgcttacattcaaccaactagctgcattgaactctgcttgtgatctgcaacaacaacaactaccattcagccagctacctgctgcctacccccagcaatttcttccattcaaccaactggcagcattgaactctcctgcttatttacagcagcaacaactactaccattcagccagctagctggtgtgagccctgctaccttcttgatacaaccacagttgctgccgttctaccagcacgctgaagcctaac

SEQ ID NO: 89253 - DNA, 426 bp, Zea mays
ccagtactccgcagtccgcacggccgcatccgtcaagatccgcgaaaaacaagtgagggagagagagagagagaggagggaaaatgctgcgccacgccgcccgccgcctcgtttcccgcgccgtcgctccgcccaccgcgcgccgggcgctcgccacggcggaggtgcccgcggaggccgtcgaggactccacgttcgtcgaggcctggaaaaaggtcgcccccaacatcgagcccccagcgacgcccctctccctcatgcagccgcgcccgcccacgccagctaccatccctaccaagctcaccgtcaacttcgtcctcccctacaagtccgagatcgccaacaaggaggttgacatggtaattgtaccagctacaactggtcagatgggtgttttgccaggccatgttgccacaattgcagagc

SEQ ID NO: 89254 - DNA, 266 bp, Zea mays
gggcacaacaactacaacaacttgtgctagcaaaccttgctgcatactctcagcaacgtcaggttcttccattcaaccaactggctgcattgaactctgctgcttatttgcaacaacaattaccattcagccagctagttgctgcctacccccagcaattacttccattcaaccaactagcatcattgaactctgctgcttatttacagcatcaacaactactaccattcagccagctagctgatgtgagccctgctgccttcttg

SEQ ID NO: 89255 - DNA, 258 bp, Zea mays
catggactttgacttcttcaagtccatcggcctcagcgacaagatctggaacaacgggccggtggacacccaaatccagtggttcaggcagctgctcccctccgtgtgcgggaaggattgcaagaactacctgtccaagtccctgttcgtggtgggcgagttcggcggcaacgactacaacgcggcgctcttctcggggcggtccatggcggaggtgagagggtacgtgcccatggtggtgagcaagctcgtccgcgg

SEQ ID NO: 89256 - DNA, 267 bp, Zea mays
attgagaccaacatgcaacatagaaagtggaatacagtagcaacaatagagcaacaggggcggccaagatattctccatccttatgctccttgctctttctgcatgtgttgctaacgcgaccatttttcctcaatactcacacgctcctatagcttcccttcttcccgcataccttccatcaatgaccgcttcagtttgcgaaaacccaacccttcaaccgtacatgctccaacaagcaatctcaacatgcaacattacgctttatc

SEQ ID NO: 89257 - DNA, 258 bp, Zea mays
caactagcaacataaaaagcacaatactgtaccaacaatggcagccaaaatatgttcggctccttatgctccttggtctttctgcaagtgctgctactgcgaccattttaccgcaatgctcacatgctcctataacttcccttcttcccccgtacctctcaccagcggcgactacagtatgtgaaaacccaattcttcaaccatacaggatccaacaggcaatcacagcttgcatcttacctttatcacccttgttcc

SEQ ID NO: 89258 - DNA, 269 bp, Zea mays
cctgctgcttatttgcagcaacaactattaccattcagccagctagctactgcgctagtctcatcaacaacaagttcttccatttaaccaattggccgcactgaacctcgctgcttatttgcagcagcaaatattactaccatttagccagctagctgcagcaagccgtgcttccttcttgacacaacaacagttgctgcctttctaccaacaatttggggataaccccgcaaccctcttacaacttacctccattggtggcccttttt

SEQ ID NO: 89259 - DNA, 417 bp, Zea mays
cgctctctggtggagttgctgtggttaatgttggagcatcgaccgaggcagagctaggggacgggcaagctccgcatagaggacgcgaagaatgcgacttttgcagcaatagaggaaggtattgttccaggaggcggtgcagcatatgttcatctatcgacattcgtaccggctatcaaggagacgttggatgatcctgaggagcgcctaggtgctgatatcattcagaaggctttggtggcacctgcagcgctgatagcccataatgctggggtggaaggtgaggtgattgtggataaaatccgggaaagcgagcgggagttcggttacaacgccatggcggacaagcacgagaacctggtggaggctggtgtgatcgaccctgccaaagtgactaggtgcgccctgcagaacgct

SEQ ID NO: 89260 - DNA, 452 bp, Zea mays
ccggttcggaatttcgacccacgcgtacggggtcttcgactcccgtctctcccccgtcgtcttctgatgattcagacgactcccgggagagtgcctcggaagtctggacgtacatccgggccgtcgagcgctccgggctcgagggctcggatgagtcggagtactcctcggatgaggaggactcggacggcggtgaggacgaggatgacgacgacgacggcgacgacgacgacgacggtggcgacggcgacagtgacggcagcagcagctgcggcggcagcatcggcagctactggagcaagggcagcaccagaggccgcagcaacatgggcagcaccaagcgctgcggcggcagcagaagcagcacggccagtggctaaacgccactggtctctagatattagtgtaatgtaattagaataatgtagtagtaatgtaaactagtatagtgt

SEQ ID NO: 89261 - DNA, 267 bp, Zea mays
attcagaaacacaccaagcgaagcgcactagcaacaacctaacaacaatggctaccaggatgttatccctccttgcgcttcttgcgctttttgcgagcgcaacaaatgcgtccattattccacaatgctcacttgctcctagttccattattccacagttcctcccaccagttacttcaatggccttcgaacacccagctgtgcaagcctataggctacaacaagcgattgcggcgagcgtcttacaacaaccaattgctccaattg

SEQ ID NO: 89262 - DNA, 295 bp, Zea mays
accggtccggagggtcgacccacgcgtacgcatctgccacctacggttcacctgccacctccggtgcatctcccaccgccggtccagctgccgccgccggtccacctgccaccgccggtccatgtgccgtcgccggttcatctgccgacgacaccatgccactaccctactcaaccgccccggcctcagcctcatccccagccacacccatgcccgtgccaacagccgcatccaagcccgtgccagctgcagggaacctgcggcgttggcagcaccccgatcctgggccagtgcg

SEQ ID NO: 89263 - DNA, 264 bp, Zea mays
acaagctcctatagctgcccttcttcccccataccttccatcaatgaccgctttagtgtgtgaaaacccagcccttcaaccctacaggatccagcaagcaatcgcaacaagcaacttacctttatcacacctgttctttcaacaatcgccagccctatctttggtgcagtcattggtacaaaccatcagggcagaacagttgcagcaactcgtgctaccagtgatcagccaagtagctctggcaaacctttccccctactctca

SEQ ID NO: 89264 - DNA, 253 bp, Zea mays
cccacgcgtccgatttgagcattcatatacacaccacgcgaagcacattagcaacgggctaggtacaatggctacgatgatattatccctccttgcgcttcttgcgctttttgctagcgcaacacatgcgatcattattccacattgctcactagcttcaatttacggtattccgcagacggtttgactatgcacagtcacggtcgacctatagcatgataggcgagccgattgtctacggcgagcactcgtt

SEQ ID NO: 89265 - DNA, 229 bp, Zea mays
tctttgacaaatgcaaggcagatccgtgctactggtacaagatctcacagggcggcgtgcacagaatctatgagacgtacacctggaagctctacttcgagaggctgatgaccctgaccggcgtgtacggcttctggaagtacgtgagcatactgtagaggcacgagaccctccgctacatcgagatgtactacgccctgaagcaccggatcctggcaagccaggttcc

SEQ ID NO: 89266 - DNA, 286 bp, Zea mays
ggaattcccgggtcgacccacgcctacgcgtacgggcaaacattgttgccttcttacaacatcaacaattgctaccatttagccagcatgggttgactaatcctacgaccttattgcaacctcccaccattggtggtgccatcttctagatcttatacgattaatactgtaataatcaaactctcatgctgatatgtgcgacctctcaataataaagcattaaagatctatattttaaaacacacatctatgcaagcttatacgctacaacaagcaatatggtcgg

SEQ ID NO: 89267 - DNA, 261 bp, Zea mays
gtcagggagactccacgccgtgtctttgatgccgtgctcttcagcaatgagcgtgagatccttgatatccgctggcacgagcttagcccgtatgtgtcagaatttgtgctgcttgagtccaattcaacttttaccggcataaagaaggaccttcacttcaaggaaaaccgccaacggtttggctttgcagagtcacggttgacctatggcatgataggtggaaggtttgtgaagggagagaacccatttgtcgaggagtcg

SEQ ID NO: 89268 - DNA, 426 bp, Zea mays
gtgtcttgcattcaaccaactagctgcattgaactctgcttcttatttgcaacaacagcaacgaccattcagccagctacctgctgcctacccccagcaatttcttccattcaaccaactggcagcattgaactctcctgcttatttacagcagcaacaactactaccattcagccagctagctggtgtgagccctgctaccttcttgatacaaccacagttgttgccgttctaccagcacgctgcgcctaacgctggcaccctcttacaactgcaacaattgctgccattcaaccaacttgctttgacaaacccagcagcgttctaccaacaacccatcattggtggtgccctctcttagatttcttatgagttatagttcaataataaagttctttgtctgatgtttgtggcttcccagaaata

SEQ ID NO: 89269 - DNA, 332 bp, Zea mays
cgacctcacgcgtacgctctgctgcttatttacagcagcaacaactactaccattcagccagctagctgatgggagcgctgctgccttcttgacacaacaacagttgttgccattctacctgcacgctatgcctaacgctggcaccctcttacaactgcaacaattgctgccattcaaccaacttgctttgacaaacccaacagtgttctaccaacaacccatcattggtggtgccctcttttagattgcttatgagttatagttcaataatgaagttttttggatgatgtttgtggcgtcccagaaataagaaagtacatttctagattct

SEQ ID NO: 89270 - DNA, 389 bp, Zea mays
gaacaatgagaacaagcctgtcacaaacagccgtgacactcaggagatacgcctcgagcaaggccttcagatgctcaagatattcaaggatcatgtcagcaaaacttccatcctcgacgactttgccttctatgagagccgccagaagttgatgcaggataagaggtccaaacagcagcagctccaaaagcaggtctgggacactaggacccccgtttctgtcaccggtgaacgaccacaggaacctgctaatgggaagcccaatccgtccgtaccagatggtgtcacggcagaggtgaaggcggtgaaggctcccgcagagaacggcatcactgctcctgttgtttcctatgcagcaaaggtggcccagacagcaccagagaaacccg

SEQ ID NO: 89271 - DNA, 438 bp, Zea mays
  unsure (1)..(438): unsure at all n locations
tacgaactagcaacatacatagtgaagtacactagcaacatcttagcaccaatggcagccaagatttttgcgatccgggccctccttgctctttcagcaagcgttgctaccgcgactattattccacaatgctcacaacaatacctctctccggtgacagccgcgagatttgaatacccaactatacaatcctacaggctacaagaggccatcgcagcaagcatcttacggtcgttagcattgaccgtccaacaaccatatgccctattgcaacaaccatccttaatgaatctatatctccaaagaatcgcagcacaacaactacaacaacagttgcttccaacaatcaatcaagtagttgcagcgaaccttgctgcttacctncagcaacaacaatttcttccattcaatcaactagctggggtgaaccctgctgct

SEQ ID NO: 89272 - DNA, 394 bp, Zea mays
ccctactcaaccgtcccggcctcagccttatccccagccacacccatgcccgtgccaacagccgcatccaagcccgtgccagctgcagggaacctgcggcgttggcagcaccccgatcctgggccagtgcgtcgagttcctgaggcatcagtgcagcccgacggcgacgccctactgctcgcctcagtgccagtcgttgcggcagcagtgttgccagcagctcaggcaggtggagccgcagcaccggtaccaggcgatcttcggcttggtcctccagtccatcctgcagcagcagccgcaaagcggtcaggtcgcggggctgttggcggcgcagatagcgcagcaactgacggcgatgtgcggcctgcagcagacgacttcatgcccctacgct

SEQ ID NO: 89273 - DNA, 150 bp, Zea mays
gtacgcgtgacttagcgctacctgtgatcaacttattagctgtgacacacattcctgcgtactcggacgagcaacaatttctgccagtcaaccaactagctacactgaaccctgctgcttatttgtaggaccaactattaccattcagac

SEQ ID NO: 89274 - DNA, 513 bp, Zea mays
agagagaggcttagtcacgagaccgcaatatagtatgctctaccggtccggaattcccgggtcgacccacgcgttcggggaatttttgggctgcttgttgccgcactctttttataaagtcgacccaccctgacctaattttaatgtcaaaagaacccgcagcaggggagactgggagatacagagaggagagggagggtttcctcaaagagacccaaacccaagcagagaacactagcgttccctcaccagggcgtccatcccagcagccatggcgatggcgtacaagatggcgacggaggggatgaacgtgaaagaggagtgccagcgctggttcatggagatgaagtggaagaaggtgcaccgcttcgtggtgtacacgatcgacgagcggtcgcgcgccgtgctggtggacaaggtgggcggccccggcgaagggtacgaggagctcgtggccgatctgcccggcgacgactgccgctacgccgacttcgacttcgacttcgtcaccgc

SEQ ID NO: 89275 - DNA, 418 bp, Zea mays
ctgcattgaactctgcttcttatttgcaacaacaacaactaccattcagccaggtacctgttgcctacccccaacaatttcttccattcaaccaactggcagcattgaactctcctgcttatttacagcagcaacaactactaccattcagccagctagctggtgtgagccctgctaccttcttgacacaaccacagttgttgccgttctaccagcacgctgcgcctaacgctggcaccctcttacaactgcaacaattgctgccattcaaccaacttgctttgacaaacctagcagtgttctaccaacaacccatcattggtggtgccctcttttagatttcttatgagttatagttcaataataaagttttttgtctgatgtttgtggcttcccagaaataggaaagtacattttt

SEQ ID NO: 89276 - DNA, 408 bp, Zea mays
gcaacatagaaagtggaatccagtagcaacaatagagcaacaatggcgaccaagatactttccctccttatgctccttgctctttctgcatgtgttgctaacgcgacaattttccctcaatgctcacaagctcctatagcttcccttcttcccccataccttccatcaatgatagcttcagtatgtgaaaacccagctcttcaaccctataggctccaacaagcaatcgcagcaagcaacatacctttatcacccttgtttcaacaatcgccagccctatctttggtgcagtcattggtacaaaccatcaaggcacagcagctgcagcaactcgtgctacctgtgatcaaccaagtagctctggcaaacctttctccctactatcagcaacaacaatttcttgcattc

SEQ ID NO: 89277 - DNA, 440 bp, Zea mays
tcccgggtcgacccacgcgttcgcgctcatcccacatcagtagtcgaccaagcacaagcagcagagccggccggaatatgtggacgatcaggaaggtggcggcgccgttggcggaggcgcgcgtgtgccggcgccggagcgcgggcttcaagggggtctgcatgtccgaccacaactgcgcgcaggtgtgcttgcaggagggctacggcggcggcaactgcgacggcatcatgcgccagtgcaagtgcatcagggagtgctagctagctaggctctaggatctagcaagctagctatatcggcctttaattaaattaataaggatcgacgtcgtggccggtcgctaaatatgtactactatacgtctacactacatgcaataatgcaccacatgtacgcgtacgcgcgccgagctgtgtggacgccgcatctagcatgca

SEQ ID NO: 89278 - DNA, 388 bp, Zea mays
tcgagccacgcgtacgcacagttcctgccaccagttacttcaatgggcttcgaacacccagctgtgcaagcctgtaggctacaacaagcaattgcggcgagcgtcttacaacaaccaatttcccagttgcaacaacaatccttggcacatctaacaatacaaaccatcgcaacgcaacagcaacaacaattcctaccagcactgagccacctagccatggtgaaccctgccgactacttgcaacagcagttgcttgcatcaaacccacttgctctggcaaacgtagttgcaaaccagccacaacaacagctgcaacagtttctgccagcgctcagtcaactagccatggtgaaccctgccgtctacctacaacagcaacaactgcttt

SEQ ID NO: 89279 - DNA, 392 bp, Zea mays
ctccgaagatcctcattgttaccaggctgttgcctgatgctgctgggactacgtgcgggcagcggctggagaaggtcattggtactgagcacacagacatcattcgcgttcccttcagaaatgagaatggcatcctccgcaagtggatctctcgttttgatgtctggccatacctggagacatacactgaggatgtttccagtgaaataatgaaagaaatgcaggccaagcctgaccttatcattggcaactacagcgatggcaacctagtcgccactctgctcgcgcacaagttgggagtcactcagtgtaccatcgctcatgccttggagaaaaccaaataccccaactcggacatatacttggacaaattcgacagccagtaccacttc

SEQ ID NO: 89280 - DNA, 384 bp, Zea mays
ggattcccgggtcgacccacgcgtacgctgggtcttcagaccattagctttatctactccatagcgcagaagaacccgatcgacacgatcagggtgttgctcgtagcgctcgctctcatggctctaactgccagcgccaaattctcgcatacaatcacaggctgcacaatgtactacaattcacgcagatcatttacgtgagccctggtaccttcttgacacagccacagttgttagccgttctaccagcacgctgcgcctaacgcttgcaccctcttacaactgcaacaattgctgtcattgaaccaacttgctttgacaaacctagcagtgttctaccaacaacccatcattggtggtgccctcttttagatttcttatgag

SEQ ID NO: 89281 - DNA, 387 bp, Zea mays
gcaacatagaagcacaatagtgtaccaacaatggcagccaaaatattttgcctccttaggctccttggtctttctgcaagtgctgctacggcgaccattttcccgcaatgctcgcaagctcctatagcttcccttcttcccccgtacctctcaccagcggtgtcttcggtatgtgaaaacccaattcttcaaccctacaggatccaacaggcaatcgcagctggcatcttacctttatcacccttgttcctccaacaatcatcagccctattacaacagttacctttggtgcatttattggcacaaaacatcagggcacaacaactacaacaacttgtgctagcaaaccttgctgcctactctcagcaacagcagtttcttccattc

SEQ ID NO: 89282 - DNA, 415 bp, Zea mays
ggattcccggtcgacgcacgcgtccggctttactgtggatgatggtccactgagatactacgatgatcctgaaaatgaagagttgcttgagagccttaagatgtcaaagtgccccaaggagctggtgcctactgatggagaacatgttgatgtgtctgttattaaaaggatggaagattaccgggaacctgtaaggcctcaatcagctttccagggtgttggaagaacccttggtggtggaccttccccagatgagagtgcaacacctgctcctgcaccaacggcccctgctgcttcgaggtccgctggcatagtcgtggatgactcccagccatttacatccatacagctgaggctggctgatggcactcgcatggtcgcccggttcaacatgcaccacaccgtgggagacatc

SEQ ID NO: 89283 - DNA, 439 bp, Zea mays
gaattcccgggtcgacgcacgcgtccgctccgaagatcctcattgttaccaggctgttgcctgatgctgctgggactacgtgcggggatcggctggagaaggtcattggtactgagcacacagacatcattcgcgttcccttcagaaatgagaatggcatcctccgcaagtggatctctcgttttgatgtctggccatacctggagacatacactgaggatgtttccagtgaaataatgaaagaaatgcaggccaagcctgaccttatcattggcaactacagcgatggcaacctagtcgccactctgctcgcgcacaagttgggagtcactcagtgtaccatcgctcatgccttggagaaaaccaaataccccaactcggacatatacttggacaaattcgacagccagtaccacttctcttgccagttcacagctga

SEQ ID NO: 89284 - DNA, 429 bp, Zea mays
gtgaaaacccagctcttcaaccctataggctccaacaagcaatcgcagcaagcggcatagctttatcacccttgtttcaacaatcgccagccctatctttggtgcagtcattggtacaaaccatcaaggcacagcagctgcagcaactcgtgctacctgtgatcaaccaagtagctctggcaaacctttctccctactatcagcaacaacaatttcttccattcaaccaactatctacactgaaccctgctgcttatttgcagcaacaactattaccattcagccagctagctactgcctactctcatcaacaacaacttcttccatttaaccaattggccgcactgaacctcgctgcttatttgcagcagcaaatattactaccatttagccagctagctgcagcaagccgtgcttccttcttgacac

SEQ ID NO: 89285 - DNA, 388 bp, Zea mays
gcaacatagaaagcacaatagtgtaccaacaatggcagccaaaatattttgcttcctgatgcgccttggtctttctgcaagtgttgctaccgcaaccattttcccacaatgctcacaagctcctatagcttcccttcttcccccatacctctcaccagcggtgtcttcaatgtgtgaaaccccaattgttcaaccctacaggatccaacaggcaatcgcaacaggcatcttaccattatcacccttgttcctccaacaaccgtcagccctattacagcagttacctttggtccatttggtggcacaaaacatcagggcacaacaactacaacaacttgtgctagcaaaccttgctgcatactctcagcaacatcagtttcttccattc

SEQ ID NO: 89286 - DNA, 440 bp, Zea mays
  unsure (1)..(440): unsure at all n locations
cggaattcccgggtcgacgcacgcgtncgcaatttcttccattcaaccaactgtctacactgaaccctgctgcttatttgcagcaagaactattaccatttagccagctagctactgcctactctcagcaacaacaacttcttccatttaaccaattggccgcactgaaccccgctgcttatttgcagcagcaaatactactgccatttagcgagctagctgcagcaagtcgtgcttccttcttgacacagcaacagttgctgcctttctacaagcagtttgcggctaaccccgcaaccctcttacaactacaacaattgttgccctttgtccaacttgctttgacaaacccagcagccttctaccaacaacacatcattggtggtgccctcttttagattgattattagttggaattcaataataaagttttttggatg

SEQ ID NO: 89287 - DNA, 432 bp, Zea mays
  unsure (1)..(432): unsure at all n locations
agcaacatagaaagtagaatccatgagcaacaatagagcaacaatggcgaccaagatggttgccctccttatgctccttgctctttctacatgtgttgctaacgcgacaattttccctcaatgctcacaagctcctatagcttcccttcttcccccataccttccatcaattatagcttcagtatgtgaaaacccagctcttcaaccatataggcttcaacaagcaatcgcagcaagcaacatacctttatcgcccttgttgtttcaacaatcaccagccctatctttggtgcagtcattggtacaaaccatcagggcacaacagctgcagcaactcgtgctacctgtgatcaaccaagtagctctggcaaacctttctccctactctcagcaacaacaatntcttccattcaaccaactgtctacactgaa

SEQ ID NO: 89288 - DNA, 439 bp, Zea mays
caaccaattgcccaattgcaacaacaatccttgccacatctaacaatacaagccatcagggcgcggcagcaacaacagttcctaccagcactgagccacctagccatggtgaaccctgccgcctacttgcaagagcagctgcttgcatccaacccacttgctctggcgaacgtagttgcaaaccagcaacaacaacagctacaacagtttctgccaacgctcagtcaactagccatggtgaaccctgccgcctacgtacaacaacaacaactgctttcatctagcccgctcgctgtgggcaatgcacctacatacctgcaacaacaattgttgcaacagattgtaccagctctgactcaactagctgtggcaaaccctgttgcctacttgcaacagctggcttcattcaaccaactgactctgtcgaactctgctgcgt

SEQ ID NO: 89289 - DNA, 399 bp, Zea mays
cacaatagtgtaccaacaatggcagccaaaatattttgcctccttatgctccttggtctgtctggaagtgctgctacggcgaccattttcccgcaatgctcgcaagctcctatagcttcccttcttcccccgtacctctcaccagcggtgtcttcggtatgtgaaaacccaattcttcaaccctacaggatccaacaggcaatcacagctggcatcttacctttatcacccttgttccttcaacaatcatcagccctattacatcagttacctctggtgcatttattggcacaaaacatcagggcacaacatctacaacaacttgtgctagcaaaccttgctgcctactctcagcaacagcagtttcttccattcaaccaactagctgcattgaactct

SEQ ID NO: 89290 - DNA, 387 bp, Zea mays
gcattcagaaacacaccaagcgaagcgcactagcaacaacctaacaacaatggcgaccaggatattatccctccttgcgcttcttgcgctttttgcgagcgcaacaaatgcgtccattattccacaatgctcacttgctcctagttccattattccacagttgctcccaccagttacttaaatggccttcgaacacccagctgtgcaagcctataggctacaacaagcgattgcggcgagcgtcttacaacaaccaattgcccaattgcaacaacaatccttggcacatctaacaatacaaactattgcaacgcaacagcaacagcagttcctaccagcactgagccacctagccatggtgaaccctgtcgtctacttgcaacagca

SEQ ID NO: 89291 - DNA, 385 bp, Zea mays
ggatttattccttgggaacctgcaacatcaatgctaagtttgatgctaaacctattgagcttattgttacaacatatcaggctgcattgctactactgtttaatggatctgacaggcttagttattctgagattgtaacacaattaaacctgtcagatgatgatgtagtgcgtttgctccattctctttcttgtgcgaagtacaagatccttaacaaggaaccggctagtagatccatctctcccaatgatgtttttgagttcaattcaaagtttactgacagaatgagaagaatcaaggttccactccctcctgttgatgagaagaacaaggttgttgaagatgttgacaaagacaggaggtatgcaattgatgcatcaattgt

SEQ ID NO: 89292 - DNA, 513 bp, Zea mays
tgggggaggtgcgttacgacaccgcagtatagtatgctctaccggtctcggaattcccgggtcgacgcacgcgtccgcaggcaggcaggtcggcgaggagggcatgaagaccgaagaccgagccgtgcgggggctggggacgggaacgggacaggaccccaaaatctcagatccttcctgcccgcccgcccgtgcccgtcgacgcgtcgttcttgccggccgcgcctcacctccgccctctcctcctccagggggatcggatacgccacaggctgcgcgatggtgctgtgggtcttcggctacggctccctcatctggaaccccggcttcgacttcgacgacaaaatcctcggcttcatcaagggctacaagcgcacctttaatctcgcttgcattgaccacagaggcacaccggagcatccggcgaggacctgcacgcttgaaaccgacgacgaggccatatgctggggaattgcatattgtgtcaagggtggtccagaaaaagagctaaaa

SEQ ID NO: 89293 - DNA, 355 bp, Zea mays
attcactataaccttgatacctggtagatagccatgctttatgcatatcgtattgcagatgagctcatcaagaatgctgactacattggcacccctgacaagggtatccttgctgctgatgagtccactggcaccattggcaagcgcctttccagcatcaatgtctagaacgttgacgagaaccgccgtgccctccgtgagctcctattctgctgccctggtgctctccagtacatcagcggtgtgatcctcttcgaggagaccctgtaccagaagaccaaggatggctagccttctgtcgatgtcctgaacgagggaggcgttctccatagcatcaaggttgacaagggcacca

SEQ ID NO: 89294 - DNA, 345 bp, Zea mays
gttgtaattcaataataaagttttttggatgatgtatgtggccaaccagaaataaggggttacatttccagattttaaaaaaaaaaaaaaataattaaactaaaaaataaatataaataaaaaaaaaaaaaaaaaaatataaaataaaaaaataaaaaaactaatataaataaaaataaaaaaaaacataaataaaataaaatgggagcttctttatgagaaaacaaattttttcaatcatatatgcttcaacaagcttttttatcaggcaccataaatttatcgcccttgctgttttaacaatagccatccctagaaaaaccgctggcattgctacatataatc

SEQ ID NO: 89295 - DNA, 453 bp, Zea mays
tccggaattcccgggtcgacgcacgcgtccgcatcaaccatattattgagaccaacaagcaacatagaaagtggaatccagtagcaacgatagagcaacaatggcgaccaagatattttccctccttatgctccttgctctttctacatgtgttgctaacgcgacaattttccctcaatgctcacaagctcctatagcttcccttcttcccccataccttccatcaattatagcttcaatatgtgaaaacccagctcttcaaccatataggcttcaacaagcaatcgcagcaagcaacatacctttatcgcccttgttgtttcaacaatcgccagccctatctttggtgcagtcattggtacaaaccatcagggcacaacagctgcagcaactcgtgctacctctgatcaaccaagtagctcttgcaaacctttcttcctactctcagcaaca

SEQ ID NO: 89296 - DNA, 405 bp, Zea mays
  unsure (1)..(405): unsure at all n locations
ataaagcacaatagtgtaccaacagtggcagccaaactattttgcttccttatgctcgttgggctttctgcaagtgctgctaccgcatccattttcccacaatgctcacaagctcctatagcttccttctgtcccccatacctgtcaccagcgctgtcttcaatatgtgaaatcccaattcttcaaccctacaggatccaacatgctatcccagcatgcatcttaccttcatcacccttgttcctgcaacatccgtcagccctattacagcagttacctttggtgcatttgttgtcacatagcattacggcacaacatctacatcaactcgtgctaggaaaccttgctgcctactctcagcaacagcagcttcttncatgcaaccaactggctgcattgaactct

SEQ ID NO: 89297 - DNA, 418 bp, Zea mays
attgagaccagcaagcaacatagaaagtagaatccattagcaacaatagagcaacaatggcgacggagatattttccctccttatgctccttgctctttctacatgtgttgctaacgcgacaattttccctcaatgctcacaagctcctatagcttcccttcttcccccataccttccatcaattatagcttcagtatgtgaaaacccagctcttcaaccatataggcttcaacaagcaatcgcagcaagcaacatacctttatcgcccttgttgtttcaacaatcaccagccctatctttggtgcagtcattggtacaaaccatcagggcacaacagctgcagcaactcgtgctacctgtgatcaaccaagtagctctggcaaacctttctccctactctcagcaacaacaatttct

SEQ ID NO: 89298 - DNA, 466 bp, Zea mays
ggaattcccgggtcgaccgcacgcgtccggttgtggaccaggtcggggatcgcgctaccagctacgatgacttcacaaacagcctcggggagagtgactgccgatacgcgatctatgatttcgactttgttactgcagaggatgtccagaagagcaggatcttctatatcctatggtccccatcctccgccaaggtgaagagcaagatgctttacgcaagctcaaaccagaaattcaagagtggcctcaatggcattcaggttgaactccaggccacagatgcgagtgaaatcagcctcgatgagatcaaggatcgggcacgctaggcgcaccgccatcgcgagtttcatgatcacgcatcatggactcgcctactactgtggatttgtatgccattatagacttggtgctgcgaaagactgctttggtgatttgtgggtttgttgctgtgtaaaaagatcctcat

SEQ ID NO: 89299 - DNA, 460 bp, Zea mays
ggaattcccgggtcgaccgacgcgtacgcccacgcgtgcgcataaacacaccaagctaagcgcactagcaacgacctaacaacaatggctacggggatattagcccttcttgcgcttcttgccctttttgtgagcgcaacaaatgcgttcattattccacaatgcttacttgctcctagtgccattattccacagttcctcccaccatttacttcaatgggcttccaacacctagctgtgcaagccaacatgcaacaacaagcgcttgcggctagcgtcttacaacaaccaattgcccaattgcaacaacaatatttgccacatctaacaatacaatccattacaacgcaacagcagcaacagtttctaccagcactgagccacctagccatggtgaaccctgccgcctacttgcaagagcagctgcttgcatccaacccacttgctatggcgaacgtag

SEQ ID NO: 89300 - DNA, 465 bp, Zea mays
attcccgggtcgacccacgcgtacgattgagaccagcaagcaacatagaaagtttaagctattagcaacaatagagcaacaatggcgacgaagatattttccgtccttatgctccttgctctttctacatgtgttgctaacgcgacaattttccctcaatgctcacaagctcctatagcttcccttcttcccccataccttccatcaattatagcttcagtatgtgaaaacccagctcttcaaccatataggcttcaacaagcaatcgcagcaagcaacatacctttatcgcccttgttgtttcaacaatcaccagccctatctttggtgcagtcattggtacaaaccatcagggcacaacagctgcagcaactcgtgctacctgtgatcaaccaagtagctctggcaaacctttctccctactctcagcaacaacaatgtcttccattcaaccaactgtctaca

SEQ ID NO: 89301 - DNA, 423 bp, Zea mays
accggttcggaattccggggtacgacgcacgcgtgcgcttgctcctagtgccattattccacagttcctcgcactcagactacttcaacggggtgagagcgtccagccgtgcaagcctacaggctacaactagcgcttgcggcaagcgccttacaacaaccaattgcccaattgcaacaacaatccttggtacatctaaccctacaaaccattgcaacgcaacagcatcaacaacaacagtttctgccatcactgatccacctagccgtggacgaaccctgtcacctacttgcagcagtaactgcttgcatgcaacccacttgctctcgctaacgtcactgcataccagcgacaacagcagactgcatcatggaatgccagagctcagtcaactagccatggtgaaccatgccgtctacctac

SEQ ID NO: 89302 - DNA, 523 bp, Zea mays
  unsure (1)..(523): unsure at all n locations
tgagtggagggaatggtgnagtcacgaacacgccagtatagtaatgctctaccggttcggaattcccgggtcgacgcacgcgtccgcagaccattagctttatctactccagagcgcagaagaacccgatcgacaccagggggggggtgctcgttgccctcgctctcctggctctcgctgcgagcgccacctccacgcatacaagcggcggctgcggctgccagccaccgccgccggttcatctaccgccgccggtgcatctgccacctccggttcacctgccacctccggtgcatctcccaccgccggtccacctgccgccgccggtccacctgccaccgccggtccatgtgccgccgccggttcatctgccgccgccaccatgccactaccctactcaaccgccccggcctcagcctcatccccagccacacccatgcccgtgccaacagccgcatccaagcccgtgccagctgcagggaacctgcggcgttggcagcaccccgatcctgggccagtgcgt

SEQ ID NO: 89303 - DNA, 363 bp, Zea mays
gaactcgacaccatgacagtgctgatcgttgcccttgctctgctggcgctcgctgcgagcgcgcgctgcagtacaagcggcggctgcggctgccagacaccaccgtttcatctaccggctccgttctatatgccgcctccgttctatctgccgccgcagcagcagccgcagccatggcaataccccactcaaccaccgcagctaagcccgtgccagcagttcggatcctgcagcgtcggcagtgtcggcagcccgttcctgggccagtgcgtcgagttcctgaagcaccagtgcagcccggcggcgacgccctacggttcgccacagtgccatgcgctgcatcagcagtgctgccaccagatc

SEQ ID NO: 89304 - DNA, 420 bp, Zea mays
agacgattgcatttaagtggaagtccaagttagataatcttgacattgatgctagcaatgggaactgtcttgaagctcatgcgtttcttcaactcctggcaacctttggtatttctgctgaattcaatgaagatgacttgtgcaaattgcttccatatgtcagtcgtcgtcgtcagacacctgaactttgtcgattgcttgggttgtcgcagaaaatgccaggtgtcattgaagttctggtggaaagtggaagacctattgatgcaattaattcggcttatgtgtttgagcttactgaacaatttgaaccagtacaccttcttaaagcatatctaagggatgttaagaaaatgtcacacgccaggaatgtcaaaacttctcctggagcacagaatgagatgaatgaacgtgagttatctg

SEQ ID NO: 89305 - DNA, 422 bp, Zea mays
ggaattcccggctcgacgcacgcgtccgcaactagcaacatagaaagcacaatagtgtaccaacaatggcagccaaaatattttagctccttatgctccttggtatttctgcaagtgctgctacggcgaccattttcccgcaatgctcacaagctcctatagcttcccttcttcccccgtacctctcaccagcggtgtcttcggtatgtgaaaacccaattcttcaaccctacaggatccaacaggcaatcgcagctggcatcttacctttatcacccttgttcctccaacaatcatcagccctattacagcagttacctttggtgcatttattggcacaaaacatcagggcacaacaactacaacaacttgtgctagcaaaccttgctgcctactctcagcaacagcagtttctttcattc

SEQ ID NO: 89306 - DNA, 412 bp, Zea mays
cccacgcgtgcgattcaaaaacacaccaagcgaagcgcactagcaacgacctaacaccggtggctaccaagatattagccctccttgcgcttcttgcccttttagtgagcgcaacaaatgcgttcattattccacagtgctcacttgctcctagtgccattattccacagttcctcccaccagttacttcaatgggcttcgaacatccagccgtgcaagcctacaggctacaactagcgcttgcggcgagcgccttacaacaaccaattgcccaattgcaacaacaatccttggcacatctaaccctacaaaccattgcaacgcaacaacaacaacaacaacagtttctgccatcactgagccacctagccgtggtgaaccctgtcacctacttgcaacagcagctgcttgc

SEQ ID NO: 89307 - DNA, 262 bp, Zea mays
gaattcccggttcgacgcacgcgtacgaagcacaatactataccaacaatgtcgattcaaaatatttagcctccttatgctcctcgtgctgtgtgcaattgctgctatggctaccattttctcgctatgctcgcaagctcctataatacaaccttttcctccgtatctcacacaagcgctgcctttcatataccaaaacccatacatctaacacctccggttcacctaccacctcccatgcatctaccacacccggatcacc

SEQ ID NO: 89308 - DNA, 464 bp, Zea mays
ggaattcccgggatagaaagcacaatagtgtaccaacaatggcagccaaaatattttgcttccttatgctccttggtctttctgcaagtgttgctaccgcaaccattttcccacaatgctcacaagctcctatagcttcccttcttcccccatacctctcaccagcggtgtcttcaatgtgtgaaaacccaattgttcaaccctacaggatccaacaggcaatcgcaacaggcatcttaccattatcacccttgttcctccaacaaccgtcagccctattacagcagttacctttggtccatttggtggcacaaaacatcagggcacaacaactacaacaacttgtgctagcaaaccttgctgcatactctcagcaacatcagtttcttccattcaaccaactggctgcattgaactctgctgcttatttgcaacaacaattaccattcagccagctagttgct

SEQ ID NO: 89309 - DNA, 464 bp, Zea mays
ggaattcccggttcgacccacgcgtacgctttctggcataccagaaaccagcagggtcatgtatagatgcaaatgcacttgttaaacgctacgggatccaacaaacgatcgcaacaagcatcttaccattatcacccttgttcctccaacaaccgtcagccctattacagcagttacctttggtccatttggtggcacaaaacatcagggcacaacaactacaacaacttgtgctagcaaaccttgctgcatactctcagcaacatcagtttcttccattcaaccaactggctgcattgaactctgctgcttatttgcaacaacaattaccattcagccagctagttgctgcctacccccagcaatttcttccattcaaccaactagcagcattgaactctgctgcttatttacagcagcaacaactactaccattcagccagctagctgatgtgagccctgct

SEQ ID NO: 89310 - DNA, 520 bp, Zea mays
ggggggagtgtgtagtcacgacgccaagaactatctgtcatgctctaccggtctcggaattcccgggtcgacgccacgcgtacgattgagaccaacaagcaccatataaagtgtaatccagtagcaacattacagcagcaatggcgaccaagatacttttccttcttatgctccttgctctttctgcatgtgttgctaacgcgacaattttacctcaatgctcacaagcttctatagcttcccttcttcccccataccttgcatcaatgatagctctagtatgagaaaacccagctattcaaccctatacgcttcaacatgcaatcgtattacgcaacatacctttatgacccttggtgtaacaattgctaggcatatcttagctgcaatcatttgtacaaaccatcactgcacagcagctgcagcatcttctgctacctgagatcaaccaagtagctcttgcaaactttctgaatactatcagcatcaactactactactattcaatgagctatgtacc

SEQ ID NO: 89311 - DNA, 293 bp, Zea mays
ttgccattttacccacaagttgtgggaaacattaatgccttcttgcaacagcagcaatggctaccattctacccacagaatgtggcaaacattgttgccttcttacaacaacaacaattgctaccatttagccaacatgctttgacgaatcctaccaccttattgcaaccgaccaccattggtggtgccatcttctagattttttatgattaatactgtaataataaagtcctcatgctgatatgtgcgacctctcagtaataaagtattagagatctatattctaaattcaa

SEQ ID NO: 89312 - DNA, 431 bp, Zea mays
cccatacctctcaccagcggtgtcttcaatgtgtgaaaccccaattgttcaaccctacgggatccaacaggcaatcgcaacaggcatcttaccattatcacccttgttcctccaacaaccgtcagccctattacagcagttacctttggtccatttggtggcacaaaacatcagggcacaacaactacaacaacttgtgctagcaaaccttgctgcatactctcagcaacatcagtttcttccattcaaccaactggctgcattgaactctgctgcttatttgcaacaacaattaccattcagccagctagttgctgcctacccccagcaatttcttccattcaaccaactagcagcattgaactctgctgcttatttacagcagcaacaactactaccattcagccagctagctgatgtgacccctgctg

SEQ ID NO: 89313 - DNA, 415 bp, Zea mays
tccggaattcccgggtcgacccacgcgttcgcagaaacacaccaagcgaagcgcactatcaacaacctaacaacaatggctaccaagggattatccctccttgcgcttcttgcgctttttgcgagcgcaacaaatgcgtccattattccacaatgctcacttgctcctagttccattattccacagttcctcccaccagttacttcaatggccttcgaacacccagctgtgcaagcctataggctacaacaagcgattgcggcgagcgtcttacaacaaccaattgcccaattgcaacaacaatccttggcacatctaacaatacaaaccatcgcaacgcaacagcaacaacagttcctaccagcactgagccacctagccatggtgaaccctgtcgcctacttgcaacagcagc

SEQ ID NO: 89314 - DNA, 419 bp, Zea mays
tcccgggtcgacgcacgcgtccgcaaacatgcttttgggggatcgccacatattgtttgcaagaggggttcaatcgaagggcttaggttatgcttcgacaaagaattgaagcctcgtgattgccttaccacttctttggcgaatggaagtgtatcaaaaagcaagcactgcccgcggtacatcaccttgccaacatatgatccccttgtgcttgccaattcaactgtagagatcatgacacagttcgatgaatttgaggtgcctgcagctctttatacagcttaaaatgcaattattgcaatagcagaaggtgctcgcgtgagcacctagaaccaggcacatttatcctgggatattcaatcatttgtacatgtacacttgaaagagaactgacatcttttcaacctgaaaatttataa

SEQ ID NO: 89315 - DNA, 420 bp, Zea mays
  unsure (1)..(420): unsure at all n locations
aacaacagctgcaacagtttctgccagcgctcattcaactagccatggtgaaccctggcgngtacctacaacagcaacaactgctttcatctagcccgctcgctgtggccaatgcacctacatacctgcaacaacaattgttgcaacagattgtaccagctctgactcagctagttgtggcaaaccctgctgcctacttgcaacagctgcttccattcaaccaactgactatgtcgaactctgctgcgtacctacaacagcgacaacagttacttaatccactagcagtggctaacccattggtcgctgccttcctacagcagcaacaattgctgccatacaaccagttctctttgataaaccctgtcttgtcgaggcagcaacccatcgttggaggtgccatcttttagattacatatg

SEQ ID NO: 89316 - DNA, 466 bp, Zea mays
ggattcccggtcgacgcacgcgtccgcagaaacacaccaagcgaagcgcactagcaacgacctaacaacaatggctaccaagatgtgagccgtccttgcgcttcttgccctttttgtgagcgcaacaaatgcgttcattattccacaatgctcacttgctcctagtgccattattccacagttcctcccaccagttacttcaatgggcttcgaacacctagctgtgcaagccaacatgcaacaacaagcgcttgcggcgagcgtcttacaacaaccaattgcccaattgcaacaacaatccttgccacatctaacaatacaagccatcacaacgcaacagcaacaacagttcctaccagcactgagccacctagccatggtgaaccctgccgcctacttgcaagagcagctgcttgcattcaacccacttgctctggcgaacgtagtttgcaaccagcaacaacaa

SEQ ID NO: 89317 - DNA, 437 bp, Zea mays
ccaacaagcaacatagaaagtggaatacagtagcatcaatagagcaacaatggcggccgggatagtttccatccttatgctccttgctctttctgcatgtgttgctaacgcgaccatttttcctcaatactcacaagctcctatagctgcccttcttaccccataccttccatcaatgaccgcttcagtttgtgaaaacccagcccttcaaccctacaggctccaacaagcaatcgcaacaagcaacttacctttatcacccctgttctttcaacaatcgccagccctatctttggtgcagtcattggtacaaaccatcagggcacaacagctgcaacaactcgtgctaccagtgatcagccaagtagctctggcaaaccttactgcctactctcagcatcaacaatttcttccattcaaccaactgtctacactga

SEQ ID NO: 89318 - DNA, 392 bp, Zea mays
cggacgcgtgggtgtcagccaacgtcacacttatttattatctgctggtgatgacaaacgaggtggatgttgggatcttgaacaaaacaaggttattaggtcctaccatgggcatctgagtggtgtttactgcctagctctccatccaacaattgatatcttactgactggtggccgggattcagtttgcaatgtgtgggacatcagaacaaaagcacatgtttctgctttaacagggcatgacaacactgtctgttcagtgattgctcgtcctacggatcctgaagttgttactggttcacatgagacaactattaaatactgggatcttgtaactgggaggactatgtgtacccttactgatcataaaaagtctgtccgatctatggcgc

SEQ ID NO: 89319 - DNA, 467 bp, Zea mays
ggaattcccgggtcgacgccacgcgtccgcaagcaacatagaaagtggaatccagtagcaacaatagagcaacaatggcgaccaagatgttttggctccttatgctccttgctctttctacatgtgttgctaacgcgacaattttccctcaatgctcacaagctcctatagcttcccttcttcccccataccttccatcaattatagcttcaatatgtgaaaacccagctcttcaaccatataggcttcaacaagcaatcgcagcaagcaacatacctttatcgcccttgttgtttcaacaatcgccagccctatctttggtgcagtcattggtacaaaccatcagggcacaacagctgcagcaactcgtgctacctctgatcaaccaagtagctctggcaaacctttctccctactctcagcaacaacaatttcttccattcaaccaactgtctacactgaaccct

SEQ ID NO: 89320 - DNA, 400 bp, Zea mays
ggacgtcagcctagcaattagctcatcgactccagattggagaactcgacaccatgaaggtgctgatcgttgcccttgctctcctggcgctcgctgcgagcgccgcctccagtacaagcggcggctgtggctgccagacaccaccgtttcatctaccgcctccgttctatatgccgcctccgttctatctgccgccgcagcagcagccgcagccatggcaataccccactcaaccaccgcagctaagcccgtgccagcagttcggatcctgcggcgtcggcagcgtcggcagcccgttcctgggccagtgcgtcgagttcctgaggcaccagtgcagcccggcggcgacgccctacggctcgtcacagtgccaggcgctgcagcagcagtgctgccacca

SEQ ID NO: 89321 - DNA, 458 bp, Zea mays
ccggttcgacccacgcgtgacgccaacaagcgacatagaaagtggaatacattagcatcaatagagcaacaatggcagccaggatagtttccatccttatgctccttgctctttctgcatgtgttgctaacgcgaccatttttcctcaatactcacaagctcctatagctgcccttcttcctacataccttccatcaatgaccgcttcagtttgagaaaacccagcccttcaaccctacaggctccaacaagcaatcgcaacaagcaacttacctttatcacccctgttctttcaacaatcgccagccctatctttggtgcattcattggtacaaaccatcagggcacaacagctgcaacaactcgtgctaccagtgatcagccaagtagctctggcaaacctttctacttactctcagcaacaacaatttcttccattcaaccaactgtctacactg

SEQ ID NO: 89322 - DNA, 373 bp, Zea mays
  unsure (1)..(373): unsure at all n locations
gggtcttcagaccattagctttatctactccagagcgcagaagaacccgatcgacaccgtgagggtgttgctcgttgccctcgctctcctggctctcgctgcgagcgccacctccacgcatacaagcggcggctgcggctgccagccaccgccgccggttcatctaccgccgccggtgcatctgccacctccggttcacctgccacctccggtgcatctcccaccgccggtccacctgccgccgccggtccacctgccaccgccggtccatgtgccgccgccggttcatctgccgacgccaccatgccactaccctactcaaccgncccggcctcagcctcatccccagccacacccatgcccgtgccaacag

SEQ ID NO: 89323 - DNA, 385 bp, Zea mays
agaccaactagcaacatagaaagcacattagtgtaccatcaatggcaaccaaaatatggggcgtccttatgctccttggtctttctgcaagtgctgctaccgcgaccattttcccgcaatgctcacaagctactatagcttcccttcttaccccatacctctcaccatcggtgtcttcagtatgtgaaaacccaattcttcaaccctacaggatccaacatgcaatcgcagcaggcatcttacctttatcacccttgttcctccaacaaccgtcagccctattacagcagttaccttcggtgcatttgtcggcacaaaacatcagggcacatcaactacaacaacttgtgctagcaaaccttgctgcctactctcagcaacagca

SEQ ID NO: 89324 - DNA, 396 bp, Zea mays
gaaactatgtgctgtatattagccgctggctatcctagctagttgagtcatttaccgggaatgattgagtaataatgtggtcacgcatcaccatgggtggcaacgtcagtgtgagcaatgacctgaatgaacaattgacatgaacagataaaaagtactacatctgttccaaattaaaattggttttaaccttttaataggtttatactatagaacaataccttggcttggaacacaccgatacaacatcgaaaaggtcttacacagacaatcagaatcggcacacctatgagaagcccgtgaaaatttataattgagaaaacttaaagtttcaatcgattgacggaggcctcgacaacaatatgcccaagatgatgaggcttaaaacagaaaaat

SEQ ID NO: 89325 - DNA, 329 bp, Zea mays
tgaagtgctgatcggggccgttgctctgctggcgctcgctgctagcgccgcctccagtacaagcggcggctgtggctgccagacaccaccgtttcatctaccgcctccgttctatatgccgccttcgttctatctgccgtcgcagcagcagccgcagccatggcaataccccactcaaccaccgcagctaagcccgtgccagcagttcggatcctgcggcgtaagcagcgtcggcagaccgttcctgggccagtgcgtccagttcctgaggcaccagtgcagcccggcggcgacgccctacggctcgccacagtgccaggcgcttgcac

SEQ ID NO: 89326 - DNA, 466 bp, Zea mays
ggaattcccgggtcgacccacgcgtacggaccaacaagcaacatagaaagtggaatacagtatcaaaaatagagcaacaatggcgggcgagagattttccatccttatgctccttgctctttctgcatgtgttgctaacgcgaccatttttcctcaatactcacaagctcctatagctgcccttcttcccccataccttccatcaatgaccgctttagtatgtgaaaacccagcccttcaaccctacaggatccagcaagcaatcgcaacaagcaacttacctttatcacacctgttctttcaacaatcgccagccctatctttggtgcagtcattggtacaaaccatcagggcagaacagttgcagcaactcgtgctaccagtgatcagccaagtagctctggcaaacctttccccctactctcagcaacaacaatttcttccattcaaccaactgtctatactg

SEQ ID NO: 89327 - DNA, 333 bp, Zea mays
caaggctgggaaagtgaagcttgctgatttcggactcgctgcacgggtcactaatggtgagaaagtgtttggtgttgctgggagccctgcatatgtggcacctgaagttctttctggaagctattcggagaaggttgatatatggcgtgcctgtgtgctactacatgtacttctatgtgcgtcactttcatttcaagggggctctttgtacgcttcttgctagtccatgcagtcgcaataaggatcttacctttatcacacctggtctttaaacaatcttcatgcatatttttggtgctgccattggtccaaatcataatggcggatcagttt

SEQ ID NO: 89328 - DNA, 514 bp, Zea mays
  unsure (1)..(514): unsure at all n locations
agggagagggttgttacgacccgcagtattgcatgacttaccggtctcggaattcccgggtcgacgcacgcgtccggttcgccgtgcgggccgacctgtgcgccaccgtgggaacgttcaaggcgatcggggccggtagctgcgacgtgccggcgccgcagcagcggctgatctacaagggccggatcttgaaggacgagcaaaccctagccagctacggtgtggagacagaccatacaatccacatggtacgtggtgctgcgccaccaccagcatccactgcacctgcagccaaccaagaacctaccactgctgctcctgccagttccccagcagcaggattgggtggcttgttgcaaaatctgggtgctacaggggctgctgctaacagtgggggtttgggtttgcttggatctgggctccctgaattagaccacatgcaacaacagctagctgaaaatcctaacttgatgaggganataatgaatatgccactcatggcagaacttaatga

SEQ ID NO: 89329 - DNA, 519 bp, Zea mays
  unsure (1)..(519): unsure at all n locations
agggaggagggttattaaagcacacagattattgtcatgctctaccggttcggaattcccgggtcgacgccacgcgtccgcccacgcgtccggcaacatagaaagcacaatagtgtaccaacaatggcagccagagataggttgcctccttatgctccttggtctttctgcaagtgctgctacggcgaccattttcccgcaatgctcgcaagctcctatagcttcccttcttcccccgtacctctcaccagcggtgtcttcggtatgtgaaaacccaattcttcaaccctacaggatccaacaggcaatcacagctggcatcttacctttatcacccttgttcctccaacaatcatcagccctattacatcagttacctttggtgcatttattggcacaaaacatcagggcacaacaactacaacaacttgtgctagcaaaccttgctgcctactctcagcaacagcagtttcttccattcaaccaactagctgcattgaactctgcttcttatttgcn

SEQ ID NO: 89330 - DNA, 520 bp, Zea mays
  unsure (1)..(520): unsure at all n locations
atgggagaggttgnctttacgagcaagacaagtatcgttactgctctaccggtccggaattcccgggtcgacgcacgcgtccgaagcaacatagaaagtggaatacaggagcaaaaatagagcaacaatggcggccaggatagtttccatccttatgctccttgctctttctgcatgtgttgctaacgcgaccatttttcctcaatactcacaagctcctatagctgcccttcttcccccataccttccatcaatgaccgctttagtatgtgaaaacccagcccttcaaccctacaggatccagcaagcaatcgcaacaagcaacttacctttatcacacctgttctttcaacaatcgccagccctatctttggtgcagtcattggtacaaaccatcagggcagaacagttgcagcaactcgtgctaccagtgatcagccaagtagctctggcaaacctttccccctactctcagcaacaacaatttcttccattcaaccaactgtctatactgaaccct

SEQ ID NO: 89331 - DNA, 519 bp, Zea mays
agagaggagctgtctaccgagacgacggttattgtcatgctctaccggttcggaattcccgggtcgacgccacgcgtccgatatcttggtagccattggtgttagccctccttgcgcttcttgcccttttagtgagcggggcaaatgcgttcattattccacagtgctcacttgctcctagtgccagtattccacagttcctcccaccagttacttcaatgggcttcgaacatccagccgtgcaagcctacaggctacaactagcgcttgcggcgagcgccttacaacaaccaattgcccaattgcaacaacaatccttggcacatctaaccctacaaaccattgcaacgcaacaacaacaacaacagtttctgccatcactgagccacctagccgtggtgaaccctgtcacctacttgcaacagcagctgcttgcatccaacccacttgctctggcgaacgtagctgcataccagcaacaacaacagctgcaacagtttatgccagtgctcagtcaac

SEQ ID NO: 89332 - DNA, 372 bp, Zea mays
gcgactctgttttcaagaagacaggataagggagctgtagtgagtctttaagcaatggcgagtgcacaggcagcggagcaaggagaacgaggccacttcgttctgaacagcggacacaccattccgggcgttggtctaggcacttggagggccggctcagataccgctcactctgttcggaccgccatcgccgaagctggatataggcacgtggacacagctgcccaatacggagtagagaaagagatcggtagaggacttaaagctgcgatggaaggcgggatcaacaggaaagatcagtcagtgacgtcgaagctatggtgcaccgagctggctcctgatagggctcggtcagcactcgagataacactc

SEQ ID NO: 89333 - DNA, 324 bp, Zea mays
ccggattcccgggtcgacgcactcgtccggcccgacggcgactccctactgctcgcctctatgccagtcgttgcggcagcagtgtggccagcagctcaggcaggtggagccgcatcaccggtaccaggcgatcttcggcttggtcctacagtccatcctgcatcatcagccgcatagcggccaggtcgcggggctgttggcggcgcatatagcgcatcatctgacggctatgtgcggcctgcatcatccgactccatgcccctacgctgctgccgccggtgtcccccactgaaaaaactatgtgctgtagtatagccgctggct

SEQ ID NO: 89334 - DNA, 404 bp, Zea mays
cggaattcccgggtcgacccacgcgtacgattcagccagctacctgctgcctacccatagcaatttcttccattcaaccaactagcaggattgggctctcctgcttatttacagcatcaacaactactaccattcagccagctagctggtgtgagccctgctaccttcttgacacaaccacagttgttgccgttctaccagcacgttgcgcctaacgctggcaccctcttacaactgcaacaattgctgccattcaaccaacttgctttgacaaacccagcagtgttctaccaacaacccatcattggtggtgccctcttttagatttcttatgagttatagttcaataatcaagtgctttatctgatgtttgtggcttcccagaaataagaaagtacatttct

SEQ ID NO: 89335 - DNA, 430 bp, Zea mays
cccacgcgtccgcaggcaggcaggtcggcgaggagggcaggaagaccgaagaccgagccgtgcgggggctcgggacgggaacgggacaggaccccaaaatctcagatccttcctgcccgcccgcccgtgcccgtcgacgcgtcgttcttgccggccgcgcctcacctccgccctctcctcctccagggggatcggatacgccacaggctgcgcgatggtgctgtgggtcttcggctacggctccctcatctggaaccccggcttcgacttcgacgacaaaatcctcggcttcatcaagggctacaagcgcacctttaatctcgcttgcattgaccacagaggcacaccggagcatccggcgaggacctgcacgcttgaaaccgacgacgaggccatatgctggggaattgcatattgtgtcaagggtggt

SEQ ID NO: 89336 - DNA, 399 bp, Zea mays
caactattaccatttagccagctagctactgcctactctcagcaacaacaacttcttgcgtttaaccaattggccgcactgaaccccgctgcttatttgcagcagcaaatactactgccatttagcgagctagctgcagcaagtcgtgcttccttcttgacacagcaacagttgctgcctttctacaagcagtttgcggctaaccccgcaaccctcttacaactacaacaattgttgccctttgtccaacttgctttgacaaacccagcagcctcctaccaacaacacatcattggtggtgccctcttttagattgattattagttgtaattcaataataaagttttttggatgatgtatgtggccaaccagaaataagaagttacatttccagattct

SEQ ID NO: 89337 - DNA, 416 bp, Zea mays
ttcccggttaaatgaatgtgcattccgtacgtcgaaatgacattgagattgatggagcgttttggtgtgaaagcagaacattgtgatagcggcgacagattctacattaatggaagtcaaaaatacaagtcccctaaagatgcctatgttgaaggtgatacctctagcgcaagctatgttttggatggtgctacgattactgcagggactgacactgatagaggttgtggcacacaccactttgcaggttgatataaagttagctgaagtactgcaaatgatgggagcaaaggtcacatggaccgagactagcggaactggtactgagccatgctggtagccattctacaggaaacatctcaaggctagtgatgacaacatgaacaagactcccgatgttgacatggctctggctg

SEQ ID NO: 89338 - DNA, 400 bp, Zea mays
cgtcagcctagcaattagctcatcgactccagattggagaactcgacaccatgaaggtgctgatcgttgcccttgctctcctggcgctcgctgcgagcgccgcctccagtacaagcggcggctgtggctgccagacaccaccgtttcatctaccgcctccgttctatatgccgcctccgatctatctgccgccgcagcagcagccgcagccatggcaataccccactcaaccaccgcagctaagcccgtgccagcagttcggatcctgcggcgtcggcagcgtctgcagcccgttcctgggccagtgcgtcgagttcctgaggcaccagtgcagcccggcggcgacgccctacggctcgccacagtgccaggcgctgcagcagcagtgctgccaccagat

SEQ ID NO: 89339 - DNA, 517 bp, Zea mays
  unsure (1)..(517): unsure at all n locations
ngagggaaagggtgngttacgaagcccgcattatagtatgctctaccggttcggaattcccgggtcgacccacgcgttcgcggacgcgtgggtttcagcattcaaaaacacaccaagcgaagcgcactagcaacgacctgagcaccaatggctaccaagatattagccctccttgcgctgcttgcccttttagtgagcgcaacaaatgcgttcattattccacagtgctcacttgctcctagtgccattattccacagttcctcccaccagttactttaatgggcttcgaacatccagccgtgcaagcctacaggctacaactagcgcttgcggcgagcgccttacaacaaccaattgcccaattgcaacaacaatccttggcacatgtaaccctacaaaccattgcaacgcaacaacaacaacaacaacagtttatgccatcactgagccacctagccgaggtgaaccctgtcacctacttgcaccagcagatgtttgcatccaacccactagctt

SEQ ID NO: 89340 - DNA, 527 bp, Zea mays
  unsure (1)..(527): unsure at all n locations
gggtggnngggggagagaggtagaggagtctgtgacatgacgagaagcggtatctgtaatactgcttcggaattcccgggtcgagccaggcgtacgcgagtgtcagtgtgagcaatgaccctgccacctatggtgatgcgtgacacattattgctcaatcatcgccatgggtggcagtgtcagtgtgagcaatgacctgaatgaacaattgaaatgaaaagaaaaaaagtactccatctgttccaaaaaaaaaaaaaaagggcggccgctctagaggatccaagcttacgtacgcgtgcatgcgacgtcatagctcttctatagtgtcacctaaattcaattcactggccgtcgttttacaacgtcgtgactgggaaaaccctggcgttacccaacttaatcgccttgcagcacatccccctttcggcagctggcgtaatagcgaagaggcccgcaccgatcgcccttcccaacagttgcgcaacctgaatggcgaatgggacgcgccctgtatcggcgcattaagc

SEQ ID NO: 89341 - DNA, 472 bp, Zea mays
accggtccggaattcccgggcaactagcaacatagaaagcacaatagtgtaccaacaatggcagctaaaatattttgcctccttatgctccttggtctttctgcaagtgctgctacggcgaccattttcccacaatgctcacaagctcctatagcttcccttcttcccccgtacctctcaccaacggtgtcttcggtatgtgaaaacccaattcttcaaccctacaggatccaacaggcaatcgcagctggcatcttacctttatcacccttgttcctccaacaatcatcagccctattacagcagttacctttggtgcatttattggcacaaaacatcagggcacaacaactacaacaacttgtgctagcaaaccttgctgcctactctcagcaacagcagtttcttccattcaaccaactagctgcattgaactctgcttcttatttgcaacaacaacaactaccattca

SEQ ID NO: 89342 - DNA, 378 bp, Zea mays
ccgatcagctagcagcataaatcgcgcaatagtgtaccaacaatgtccctctaaactattctgtctacttatgctccttgagctctgggtaaatactgatactgcgaccattttcccacaatgctcacaagctaccataacttcccttcttcatccgtacctgttaccaacattctattgcctatattaaacaccaactctttaaacctacatgatccaacttgcaacaccaacctggcatattactctttatcaccctcattcgctacaacaataatgagtcatatcacagcatttacctttgctacatctattggcacataacataacgatacaacacctacaacaacttgtgctagcaaaccttgctgactactc

SEQ ID NO: 89343 - DNA, 432 bp, Zea mays
cttgaaaccagctgtgacaggcgtcttagtgttcgtttccactccagatccaattggcaacaaggactatcttggccctgctcctttgcaggatatggcaaggcaaattgctacagccaatggccctactggctataatagggattacctgttctcaatggagaaggcattagccagcattagccacgaagatgattcgatcatagagcttgcaaacgaggtgaggaaggtgctcaacagaacaaaggagaccaagatcactggtgccaatgcttccctgaaatcacatgcccctcttgtgcacctgtccgcgcttccagaaggcaccgttgtggactcgagatagcgagagccttggacgttggacctctactcggaatctacttccagctcttgcatgtttgtggccatcatgtactgattttccctttt

SEQ ID NO: 89344 - DNA, 423 bp, Zea mays
agcgcttgcggcgagcgtcttacaacaaccaattgcccaattgcaacaacaatccttggcacatctaacaatacaagccatcacaacgcaacagcaacaacagttcctaccagcactgagccacctagccatggtgaaccctgccgcctacttgcaagagcagctgcttgcatccaacccacttgctctggcgaacgtagttgcaaaccagcaacaacaacagctacaacagtttctgccaacgctcagtcaactagccatggtgaaccctgccgcctacgtacaacaacaacaactgctttcatctagcccgctcgctgtgggcaatgcacctacatacctgcaacaacaattgttgcaacagattgtaccagctctgactcaactagctgtggcaaaccctgttgcctacttgcaacagct

SEQ ID NO: 89345 - DNA, 429 bp, Zea mays
attgtgagcattcagaaacacacctagcgaagcgcactagcaacgacctaacaacaatggcttccaagacattatccctacttgcgcttattgccctttttgtgagtgcaacaaatgcgttcattattccacaatgctcacttgctccgagtgccattattccacagttcctccctccagttacttcaatgggcttcgaacacccagctgtgcaagcctataggctacaacaagcgcttgcggctagcgtcttagaacatccaattgcccaattactacaacaatccttggcacatgtaaccatacaaaccatcgcaacgcagcagcaacaagcactgagccacctagccgtggtgaaccctatcggctacttgcaacaacagctgcttgcatgcaacccacttgctttggcaaacgtagctgcatacc

SEQ ID NO: 89346 - DNA, 471 bp, Zea mays
accggtccggaattcccgggattgagaccaactagcaacatagaaagcacaatagtgtaccaacaatggcagccaaaatattttgcctgcttatgctccttggtctttctgcaagtgctgctacggcgaccattttcccgcaatgctcgcaagctcctatagcttcccttcttcccccgtacctctcaccagcggtgtcttcggtatgtgaaaacccaattcttcaaccctacaggatccaacaggcaatcacagctggcatcttacctttatcacccttgttcctccaacaatcatcagccctattacatcagttacctttggtgcatttattggcacaaaacatcagggcacaacaactacaacaacttgtgctagcaaaccttgctgcctactctcagcaacagcagtttcttccattcaaccaactagctgcattgaactctgcttcttatttgcaacaacaacaac

SEQ ID NO: 89347 - DNA, 427 bp, Zea mays
attgacatacacaccatgcgaatcgctctaacaacgacctaacaacattggctaccaggatattagccctacttgcgcttcttgccctatttgcgagcgcaacagatgcgttcattattccacaatgctcacttgctcctagtgccattattgcacagttacttgcaccagttacttcaatgggcttcgaacacctatctgtgcaagccaacatgcatcaacaagcgcttgcggcgagcgtcttacaacaaccaattgcccaattgcaacaacaatccttgccacatctaacactacaagccatctcaacgcaacagcaacatcagttgctaccagcactgagccacctagccatggcgaaccctgccggctacttgcaagagcagctgcttgcatccaacccacttgctctggcgaacgtaattgc

SEQ ID NO: 89348 - DNA, 56 bp, Zea mays
aataaagttcaagctgattgcgaacctctagttaaaggtttagagctctatattat

SEQ ID NO: 89349 - DNA, 409 bp, Zea mays
cgttcacggtagcgagagcttatcgtcgtcggcggcgaagatggtgtcgctgaagctgcggaagcggctcgccgcgagcgtcctcaagtgtgggaaaggcaaagtctggcttgaccccaatgaagtcagcgagatctccatggctaactcccgccagaacatccggaagttggttaaggatgggtttatcatcaggaagcctcagaaagttcactctatgtcccgtgcaagaaaggcacatgaggccaagcagaagggaaagcactctggatatggcaagcgcacgggtaccagggaggctatgcttcccaccaagattctgtggatgaggaggatgcgtgttctgaggcgcctgcttcgcaagtaccccgagggccagaagatcgacaagcacatgtatcatgacatg

SEQ ID NO: 89350 - DNA, 365 bp, Zea mays
tatgctccttgctctttctgcatgtgttgctaacgcgacaattttccctcaatgctcacaagctcctatagcttcccttcttcccccataccttccatcaatgatagcttcagtatgtgaaaacccagctcttcaaccctataggctccaacaagcaatcgcagcaagcaacatacctttatcacccttgtttcaacaatcgccagccctatctttggtgcagtcattggtacaaaccatcaaggcacagcagctgcagcaactcgtgctacctgtgatcaaccaagtagctctggcaaacctttctccctactatcagcaacaacaatttcttccattcaaccaactatctacactgaaccctg

SEQ ID NO: 89351 - DNA, 355 bp, Zea mays
aatggttcaaatggtatagtaatcaatctggctgatggtcccgaaataccacctctcaaggagatagttgcaaaggagactgctgatctacttgatcgtagtcagcgtctctctgtccgtgaacttgcgatgaagtttgagaagggtctcagcactgccacattgctgtcgaatgaggttaaatggagacaagtagctttgatggagcgggatatccttttgaagaatctaaagagtgtattatagtcactgagaggtcaggtgacaggcaaaactaacgatgaaatccaggagtctatatctatggtggagatccttacggttcagctctgcaaaagagaatctgagttggttc

SEQ ID NO: 89352 - DNA, 389 bp, Zea mays
gaccaactagcaacatagaaagcacaatagtgtaccaacaatggcagccaaaatatggtgcttccttatgctccttggtctttctgcaagtgctgctaccgcaaccattttcccacaatgctcacaagctcctatagcttcctttcttcccccatacctctcaccagcggtgtcttcagtatgtgaaaacccaattcttcaaccctacaggatccaacaggcaatcgcagcaggcatcttacctttatcacccttgttcctccaacaaccgtcagccctattacagcagttacctttggtgcatttgttggcacaaaacatcaaggcacaacaactacaacaacttgtgctaggaaaccttgctgcctactctcagcaacagcaagttc

SEQ ID NO: 89353 - DNA, 435 bp, Zea mays
caacaacttgtgctagcaaaccttgctgcctactctcagcaacagcagtttcttccatgcaaccgactagctgcattgaactctgcttcttatttgcaacaacaacaactaccattcagccagctatctgctgcctacccccagcaatttcttccattcaaccaactgacagcattgaactctcctgcttatttacagcagcaacaactactaccattcagccagctagctggtgtgagccctgctaccttcttgacacaaccacagttgttgccgttctaccagcacgctgcgcctaacgctggcaccctcttacaactgcaacaattgctgccattcaaccaacttgctttgacaaacccagcagcattctaccaacaacccatcattggtggtgccctcttttagatttcttatgagttatagttcaataat

SEQ ID NO: 89354 - DNA, 395 bp, Zea mays
tccacgcgtccgcagaaacacacctagcgaagcgcactagcaacgacctaacaacaatggctaccaagatattatccctctttgcgcttcttgccctttttgtgagcgcaacaaatgcgttcattattccacaatgctcacttgctcctagtgccattattccacagttcctccctccagttacttcaatgggcttcgaacacccagctgtgcaagcctacaggctacaacaagcgcttgctgcgagcgtcttacaacaaccaattgcccaattacaacaacaatccttggcacatctaaccatacaaaccatcgcaacgcatcagcaacaacaatttctaccagcactgagccaactagctgtggtgaaccctgtcgcctacttgcaacagcag

SEQ ID NO: 89355 - DNA, 456 bp, Zea mays
cggcccgacccactcgtgcgccggcgcgtccgcagaaacactctctagttaagcgcactagcaacgacctaacggcaagggctaccaagatattatccctgtttgcgcttcttgccctttttgtgagcgcaacaaatgcgttcattattccacaatgctcacttgctcctagtgccattattccacagttcctccctccagttacttcaatgggcttcgaacacccagctgtgcaagcctacaggctacaacaagcgcttgcggcgagcgtcttacaacaaccaattgcccaattacaacaacaatccttggcacatctaaccatacaaaccatcgcaacgcaacagcaacaacaatttctaccagcactgagccaactagctgtggtgaaccctgtcgcctacttgcaacagcagttgcttgcatccaacccacttgctctggcaaacatagttg

SEQ ID NO: 89356 - DNA, 404 bp, Zea mays
gcagctagctgactgaatggtagttgttgcctacccccagcaatttcttccattcaacggactggcagcattgaactctgctgcttatttacaacagcaacagctaccaccattcagccagctagctgatgtgagccctgttgccttcttgacacaacaacagttgttgccgttctacctgcacgctgcgcctaacgctggcaccctcttacaactgcaacaattgctgccattcaaccaacttgctttgacaaacccaacagcgttctaccaacaacccatcattggtggtgccctcttttagattgcttatgagttatacttcaataatgaagttttttggatgatgtttgtggcttcccagaaataagatagtacatttctagattcttaaaagatagaat

SEQ ID NO: 89357 - DNA, 417 bp, Zea mays
caacaagcaacatagaaagtggaatccagtagcaacaatagagcaacaatggcgaccgagatattttccctccttatgctccttgctctttctacatgtgttgctaacgcgacaattttccctcaatgctcacaagctcctatagcttcccttcttcccccataccttccatcaattatagcttcaatatgtgaaaacccagctcttcaaccatataggcttcaacaagcaatcgcagcaagcaacatacctttatcgcccttgttgtttcaacaatcgccagccctatctttggtgcagtcattggtacaaaccatcagggcacaacagctgcagcaactcgtgctacctctgatcaaccaagtagctctggcaaacctttctccctactctcagcaacaacaatttcttccattc

SEQ ID NO: 89358 - DNA, 369 bp, Zea mays
caacttcttccatttaaccaattggccgcactgaaccccgctgcttatttgcagcagcaaatactactaccatttagccagctagctgcagcaaaccgtgcttccttcttgacacagcaacagttgctgcctttctaccagcagtttgcggctaaccccgcaaccctcttacaactacaacaattgttgccctttgtccaacttgctttgacagacccagcggcctcctaccaacaacacatcattggtggtgccctcttttagattgcttattagttgtaattcaataataaagttttttggatgatgtatgtggccaaccagaaataagaagttacatttccagattctaatgtgatattggtctcc

SEQ ID NO: 89359 - DNA, 392 bp, Zea mays
tagcaacatacaaagcacaatattgtaccaacaatggcagccaaaatattgcgcctggttatgctactaggacttactgcaagtagctgctacagcaaccattttcccgcaatagctagcaagctcctatagctttccatcttcacccggacctttcaccagcagcgtcttcagaatgacaaaacccaattctttaaccctacatgatccaacaagcaatagcagcttgcatcttacctctatcacccgtggtcctcctacaatcataagccctattacaacagttacctaaggagcatttattggcacagaacatcagggcacaacaactacgacaaccagtgctagcataccatgctgactactctcagcaacagcagtttcttccattc

SEQ ID NO: 89360 - DNA, 438 bp, Zea mays
caacaagcaacatagaaagtggaatccagtagcaacaatagagcaacaatggcgaccaagatacgttccctccttatgctccttgctctttctgcatgtgttgctaacgcgacaattttccctcaatgctcacaagctcctatagcttcccttcttcccccataccttccatcaatgatagcttcagtatgtgaaaacccagctcttcaaccctataggctccaacaagcaatcgcagcaagcaacatacctttatcacccttgtttcaacaatcgccagccctatctttggtgcagtcattggtacaaaccatcaaggcacagcagctgcagcaactcgtgctacctgtgatcaaccaagtagctctggcaaacctttctccctactatcagcaacaacaatttcttccattcaaccaactatctacactgaaccct

SEQ ID NO: 89361 - DNA, 386 bp, Zea mays
gggggtggctttcctgcccttcgttcgggttcgggttcgtgaggttctcaggggtgggttcggggtgagcggatcgagatggcggcgtcggatgttgagtaccgctgtttcgtctgcgggctcgcctgggccactgacgaccactctttccacatcgccttcatcacctacggcgaggtcctggagtccaagatcattctcgatcggtagactcagaggtgccgcggcttcgggttcgtcaccttcttcacggaggaggcgacgctgaacgccattgagggcatgaacggcatggagctggacggtcgcagcatcaccgttaacgaggcccagtcccgctgcggtcgtggaagcggctgcggcggcgggtactgtggtggtcgtgg

SEQ ID NO: 89362 - DNA, 337 bp, Zea mays
gtcgcattcgtgcagcctgcgttctacgaagcgttcggcctgactgtgatcgagtccatgacgtgcggtctgccaacgatcgcgacctgccatggtggccctgctgagatcatcgtggacggggtatctggcctgcacattgacccttaccacagctgacaaggccgctgatatcctggtcaacttctttgacaaatgcaaggcagatccgagctactgcgacaagatctcacagggcggcctgcagagaatctatgacaagtgcacctggaagctctactccgagaggctgatgaccctgaccggcgtgtacgggttctggaagtacgtgagcaac

SEQ ID NO: 89363 - DNA, 433 bp, Zea mays
aaagcacaatagtgtaccaccattggcagtcaaaatattttgcctgcttatgctccttggtctggctgcaagtgctgctactgcgaccattttcccgcaatgctcgcaagctcctatagcttcccttcttcccccgtacctctcaccagcggtgtcttcggtatgtgaaaacccaattcttcaaccctacaggatccaacaggcaatcacagctggcatcttacctttatcacccttgttcctccaacaatcatcagccctattacatcagttacctttggtgcatttattggcacaaaacatcagggcacaacaactacaacaacttgtgctagcaaaccttgctgcctactctcagcaacagcagtttcttccattcaaccaactagctgcattgaactctgcttcttatttgcaacaacaacaactacca

SEQ ID NO: 89364 - DNA, 521 bp, Zea mays
taggagtaaaaaggtgggattactgaacaccgacactgattgcaacgctctaccggtccggaattcccgggtcgacccactcgtccggcaacatagaaagcacaatagtgtaccaacaatggcagccaaaatattttgcctccttgtgctccttggtctttctgcaagtgctgctacggcgaccattttcccacaatgctcacaagctcctatagcttcccttcttcccccgtacctctcaccagcggtgtcttcggtatgtgaaaacccaattcttcaaccctataggatccaacaggcaatcgcagctggcatcttacctttatcacccttgttcctccaacaatcatcagccctattacagcagttacctttggtgcatttattggcacaaaacatcagggcacatcaactacaacaacttgtgctagcaaaccttgctgcctactctcagcaacaacagtttcttccattcaaccaactagctgcattgaactctgcttcttatttgcaacaacaac

SEQ ID NO: 89365 - DNA, 519 bp, Zea mays
  unsure (1)..(519): unsure at all n locations
tgagaaggtntataggtgtattacggaccccgacattatagttaagctctaccggtccggaattcccgggtcgacccactcgtccgcccacgcgtccggttcattattccacaatgctcacttgctccaagttccattgttacggagttcctcccaccagttacttcaatgggcttcgaacacccagctgtgcaagcctataggctacaacaagcaattgcggcgagcgtcttacaacaaccaatttcccagttgcaacaacaatccttggcacatctaacaatacaaaccatcgcaacgcaacagcaacaacaattcctaccagcactgagccacctagccatggtgaaccctgccgtctacttgcaacagcagttgcttgcatcaaacccacttgctctggcaaacgtagttgcaaaccagccacatcaacagctgcaacagtttctgccagcgctcagtcaactagccatggtgaaccctgccgcctacctactacagcatcaactgctttcatct

SEQ ID NO: 89366 - DNA, 431 bp, Zea mays
ctggcagtgactattcgacttctggaccctcccctccacgagttccttccagaagggggcgtcgaggaaatcgtgcgtgaactgtgttctgagacgggagccaaccaggaggatgccctcgcacggatcgaaaagctttcggaagtaaacccgatgcttggcttccgtggctgcaggcttggtatatcgtaccctgagctaacagaaatgcaagcccgtgccatctttgaagctgctatagcgatgaccaaccagggcgttcaagtctttccagagataatggttcctcttgttggaacaccgcaggaattgggacatcaggtggcccttatccgtcaagtcgctaacaaagttttcaccagtatggggaaaactattgggtacaagatcggaacgatgattgagattcccagggcagctctagtggctga

SEQ ID NO: 89367 - DNA, 377 bp, Zea mays
cagttgcttccattccatctacaagttgtggcaaacattgctgctttcttgcaacaggtacaacaattgctgccattttacccacaggttgtgggaaacattaacgccttcttgcaacagcatcagttgctaccattctacccacaggatgtggcaaacaatgtctccttcttacaacaacaacaattgctgccatttaaccaacttgctttgacgaatcctaccaccttattgcagcagcccaccattggtggtgccatcttctagattcttttatgctttatactgtaataataaagttctcatactgatatgtgcaacttctcagtaataaaagattagagatctatattttaagttcaaaaaaaatgaaaata

SEQ ID NO: 89368 - DNA, 426 bp, Zea mays
ccttcttcccccgtacctctcaccagcggtgtcttcggtatgtgaaaacccggttctgcaaccctacaggatccaacaggcaatcgcagctggcatcttacctttatcacccttgttcctccaacaatcatcagccctattacaacagttacctttggtgcatttattggcacaaaacatcagggcacaacaactacaacaacttgtgctagcaaaccttgctgcctactctcagcaacagcagtttcttccattcaaccaactaggttcattgaactctgcttcttatttgcaacaacaacaactaccattcagccagctacctgctgcctacccccagcaatttcttccattcaaccaactagcagcattgaactctcctgcttatttacagcagcaacaactactaccattcagccagctagc

SEQ ID NO: 89369 - DNA, 395 bp, Zea mays
cccactcgtccgcttcccttcttcccctataccttccatcaattatagcttcagtatgtgaaaacccagctcttcaaccatataggcttcaacaagcaatcgcagctagcaacatacctttatcgaccttgttgtttcaacaatcaccagccctatctttggtgcagtcattggtacaatccatcatggctcaacagctgcagtaactcttgctacctgtgatcaaccatgtaactctggcaaacctttctccttactctaagcaacatcattgacttccattcaacctactgactacactgaactctgatgctaattggtagctgctactatcaccatttaaccagctagctactgcctactatcagcatcaacatcttcttccatttaaccaa

SEQ ID NO: 89370 - DNA, 375 bp, Zea mays
gtttcttccattcaaccaactggctgcattgaactctgctgcttatttgcagcgaacaactaccattcagtcagctagctgctgcctacccccagcaatttcttccattcaaccaactggcagcattgaactctgctgcttatttacaacagcaacagctaccaccattcagccagctagctgatgtgagccctgttgccttcttgacacaacaacagttgttgccgttctacctgcacgctgcgcctaacgctggcaccctcttacaactgcaacaattgctgccattcaaccaacttgctttgacaaacccaacagcgttctaccaacaacccatcattggtggtgccctcttttagattgcttatgagttat

SEQ ID NO: 89371 - DNA, 395 bp, Zea mays
gcagcagcagcagcgacgaaggcgtcgtcgtggatggtggccatgagcgtgggcgccgtggaagcgctcaaggaccagggaggcctctgccgctggaactacgcgctgcggtccgtctaccggaccgccaaggccaacgtgcgcagcggcagcagaagcttcgccgcgcagcgggacaaggacctggccccggcggcggagaaggggcggcaggacaaggccgccgcggaggagggcttgaggaccgtcatgtacctcagctgctggggacccaattaactagcctttcgtatcttagctggtctttggccttcttcagcgaccgcgagctcgcgagctgattattgtaaatatacgacgatgatcggatgatgatgatgatgaaaagttctgcc

SEQ ID NO: 89372 - DNA, 513 bp, Zea mays
  unsure (1)..(513): unsure at all n locations
gagtagtnccaaggttgaacacgcacgacagtattctctaccgctctcggaattcccgggtcgacccacgcgtccggttggcttctcctccccctccggttcgggttcgggttcgtgaggttctccggggttcggtttcgtgggtgagcggatcgagatggcggcgtcggatgttgagtaccgctgcttcgtcggcggcctcgcctgggccacggacgaccactccctccacaacgccttcagcacctacggcgaggtcctcgagtccaagatcatcctcgatcgggagacgcagaggtcccgcggcttcggcttcgtcaccttctccacggaggaggcgatgcggaacgccatcgagggcatgaacggcaaggagctggacggccgcaacatcaccgtcaacgaggcccagtcccgcggccgctctagaggatccaagcttacgtacgcgtgcatgcgacgtcatagctcttctatagtgtcacctaaattcaattcactggccgtcgtttt

SEQ ID NO: 89373 - DNA, 438 bp, Zea mays
gaagaatgttgctgtgaaggatctgaagcgtgggtatgtggcctccaactccaaggatgaccctgccaaggaggctgctagcttcacctcccaggtcatcatcatgaaccaccctggccagattggcaatggctatgccccagttctggactgccacacctcacacattgctgtcaagtttgctgagctcgttaccaagattgataggcgatccggcaaggagctggagaaggagcccaaatttctcaagaacggtgatgctggtatggtgaagatggttcccactaagcccatggtggtggagaccttttctcagtatcctcctcttggtcgatttgctgtccgtgacatgaggcaaacggtggctgtcggagtcatcaagagtgtggagaagaaggacccaactggagccaatgtgactaaagctgctgccaagaa

SEQ ID NO: 89374 - DNA, 432 bp, Zea mays
gtccccttctccgaggaggagcttgagtacattgcaagacttgatcctgtaaaagatggagaaatgctacgcatggagctacccatgatacgagacgcatgtctcagggtgctggtgctatcaacagtatttctcaaggaagctgcagcgtctggcctctgcctctcggagattggagacatgatgagcaggcagttcactgcgaaggaggaggaaccgagtcagcttgagctgctctgcatggaggcaaggaagtgggttgaggaaagagagtcctttcttcccaacgaagccggagttgaagatgacgatgatgacttcacccagttccttatcgacgacgaggatgattatccggatgccttggaaccatcagctttctgcaagtttggtagcatgaaggcaagttctaggaatccactgtccaagcta

SEQ ID NO: 89375 - DNA, 466 bp, Zea mays
cggttcggaattaccggctcgacccactcgtccggtggccttctccgaggaggagcttgagttcattgcaagacttgatcctgtaagggatggagaaatgctacgcatggagctacccatgatacgagacgcatgtctcagggtgctggtgctatcaacagtatttctcaaggaagctgcagcgtctggcctctgcctctcggagattggagacatgatgagcaggcagttcactgcgaaggaggaggaaccgagtcagcttgagctgctctgcatggaggcaaggaagtgggttgaggaaagagagtcctttcttcccaacgaagccggagttgaagatgacgatgatgacttcacccagttccttatcgacgacgaggatgattatccggatgccttggaaccatcagctttctgcaagtttggtagcatgaaggcaagttctaggaatccactgtccaagcta

SEQ ID NO: 89376 - DNA, 416 bp, Zea mays
gctgcattgaactctgctgcttatttgcaacaacaactaccattcagtcagctagctgctgcctacccccagcaatttcttccattcaaccaactggcagcattgaactctgctgcttatttacaacagcaacagctaccaccattcagccagctagctgatgtgagccctgttgccttcttgacacaacaacagttgttgccgttctacctgcacgctgcgcctaacgctggcaccctcttacaactgcaacaattgctgccattcaaccaacttgctttgacaaacccaacagcgttctaccaacaacccatcattggtggtgccctcttttagattgcttatgagttatacttcaataatgaagttttttggatgatgtttgtggcttcccagaaataagaaagtacatttct

SEQ ID NO: 89377 - DNA, 520 bp, Zea mays
  unsure (1)..(520): unsure at all n locations
gtagttagggncatagctgnactcaagtaccagacattatagcatgctctaccggtccggaattcccgggtcgacccactcgtccgagaaaagagagaaaccagaatccatgatcgcatttgctcttatttcgaggtcgcaggggttcaaccttggaaatttgtttgagaaggagatgatgggaatggtaaagagggaaacatctttcacgtctcaatgcacagcacaggagatcatgacaaaaatagaggatgcatgtgggccactcggtttcaacgtgcggaaacaaaattacaagatgaaattgaaaggtgacaaatctggaagaaaaggtcacttatctgttgcaactgaggtttttgaggttgccccatcacttcacatggttgagcttcgtaaaaccggaggagacacattggagttccacagcttctacaagaacttctcatcggagctgaaagatatcgtgtggaaagctgaatctgacgcanataataaacagacgaataagtgatacccn

SEQ ID NO: 89378 - DNA, 396 bp, Zea mays
aaaacacaccaagcgaagcgcactatctacgacctaacaccaatggctaccaagatattagccctccttgcgcttcttgcccttttagtgagcgcaacaaatgcgttcattattccacagtgctcacttgctcctagtgccattattccacagttcctcccaccagttacttcaatgggcttcgaacatccagccgtgcaagcctacaggctacaactagcgcttgcggcgagcgccttacaacaaccaattgcccaattgcaacaacaatccttggcacatctaaccctacaaaccattgcaacgcatcaacaacaacaacaacagtttctgccatcactgagccacctagccgtggtgaaccctgtcacctacttgcaacagcagctgcttgca

SEQ ID NO: 89379 - DNA, 394 bp, Zea mays
gcggcggctgcggctgccagccaccgttcgccggttcatctaccgccgccggtgcatgtgccacctccggttcacctgccacctccggtgcatctcccaccgccggtccacctgccgccgccggtccacctgccaccgccggtccatgtgccgccgccggttcatctgccgccgccaccatgccactaccctactcaaccgccccggcctcagcctcatccccagccacacccatgcccgtgccaacagccgcatccaagcccgtgccagctgcagggaacctgcggcgttggcagcaccccgatcctgggccagtgcgtcgagtttctgaggcatcagtgcagcccgactgcgacgccctactgctcgcctcagtgccagtcgttgcggcagc

SEQ ID NO: 89380 - DNA, 416 bp, Zea mays
cttcaatgggcttcgaacatccagcctttcaagcctacaggctacaactagcgcttgcggcgagcgccttacaacaaccaattgcccaattgcaacaacaatccttggcacatctaaccctacaaaccattgcaacgcaacaacaacaacaacaacagtttctgccatcactgagccacctagccgtggtgaaccctgtcacctacttgcaacagcagctgcttgcatccaacccacttgctctggcgaacgtagctgcataccagcaacaacaacagctgcaacagtttatgccagtgctcagtcaactagccatggtgaaccctgccgtctacctacaactactttcatctagcccgctcgcggtgggcaatgcacctacgtaccttacacaacagttgctgcaacaaattgta

SEQ ID NO: 89381 - DNA, 395 bp, Zea mays
atgagctttatctactccagagcgcataagaacccgatcgacaccatgagggtgttgctcgttgccctcgctctcctggctctcgttgcgagcgccacctccacgcatacaagcggcggctgcggctgccagccaccgccgccggttcatctaccgccgccggtgcatctgccacctccggttcacctgccacctccggtgcatctcccaccgccggtccacctgccgccgccggtccacctgccaccgccggtccatgtgccgccgccggttcatctgccgccgccaccatgccactaccctactcaaccgccccggcctcagcctcatccccagccacacccatgcccgtgccaacagccgcatccaagcccgtgccagctgcagggaacctg

SEQ ID NO: 89382 - DNA, 269 bp, Zea mays
aatcctttacaacaaacaactccacataaactctactcttattacaacagctaccctaccaccattcaacacctacccatttcaccactaaccttcttaacacaacaacaactttctcactctatcttaaccctcctcctaactctgtctccctattacatctacatcaactacttccacacaaccaactcgcttttacaaaccaaacaactttctaccaacaacccatcattcttcctgccctactttatactgctcaacatttatac

SEQ ID NO: 89383 - DNA, 436 bp, Zea mays
  unsure (1)..(436): unsure at all n locations
ccgccgcgtcaacatcaacctccgccgcgtcgccgtcgcctccgcgctcgccgccaccggcgtgccggccctcgtccaggcgcgcggccaccgcatcgagtctgtccccgagatgccccttgtcatttccgactccgcggagtccattgagaagacctcccaggcgctcaagatcctcaagcagatcggcgcccacgccgacgccgagaaggccaaggactccgtcggcatccgccccggcaagggtaagatgcgcaaccgtcgctacatcaaccgcaagggcccgctcatcgtctacggcaccgagggctccaaggtcgtcaaggccttccgcaaccttcccggtgtggatgttgccaacgtcgagcgcctcaacctactagaccttgcccccggtggccaccttgggcgctntgtgatctggacccagagcgcg

SEQ ID NO: 89384 - DNA, 433 bp, Zea mays
ctagcaacatagaaagcacaatagtgtaccaacaatggcagccaaaatattttgcctggttatgctccttggtctttctgcaagtgctgctacggcgaccattttcccgcaatgctcgcaagctcctatagcttcccttcttcccccgtacctctcaccagcggtgtcttcggtatgtgaaaacccaattcttcaaccctacaggatccaacaggcaatcgcagctggcatcttacctttatcacccttgttcctccaacaatcatcagccctattacaacagttacctttggtgcatttattggcacaaaacatcagggcacatcatctacaacaacttgtgctagcaaaccttgctgcctactctcagcaacagcagtttcttgcattcaaccaactaggttcattgaactctgcttattatttgcaacaa

SEQ ID NO: 89385 - DNA, 433 bp, Zea mays
tcaactagcatcatataaagcacaatagtgtaccaacaatggcagccaaaatattttggtgtccttatgctccttggtctttctgcaagtgttgctaccgcaaccattttcccacaatgctcacaagctcctatagcttcccttcttcccccatacctctcaccagcggtgtcttcaatgtgtgaaaccccaattgttcaaccctacaggatccaacaggcaatcgcaacaggcatcttaccattatcacccttgttcctccaacaaccgtcagccctattacagcagttacctttggtccatttggtggcacaaaacatcaggtcacaacaactacaacaacttgtgctagcaaaccttgctgcatactctcagcaacatcagtttctttcattcaaccaactggctgcattgaactctgctgcttatttgc

SEQ ID NO: 89386 - DNA, 438 bp, Zea mays
accggttcggaattcccggctcgacccactcttcctcagctagcaacatataaagcacaatattttaccaacaatggcagccataatatggtaggttccttatgctccttggtctttctgcaagtgttgctaccgcaaccattttcccacaatgctcacaagctcctatagcttcccttcttcccccatacctatcaccagcggtgtcttcaatgtgtgaaaccccaattgttcaaccctacaggatccaacagtcaatcgcaacaggcatcttaccattatcacccttgttcctccaacaaccgtcagccctattacagcagttaccttcggtccatttggtggcacaaaacatcagggcacaacaactacaacaactggtgctagcaaaccttgctgaatactctcagcaacatcagtttcttccattcaaccaac

SEQ ID NO: 89387 - DNA, 414 bp, Zea mays
cccaattgttcaaccctacaggatccaacaggcaatcgcaacaggcatcttaccatgatcacccttgttcctccaacaaccgtcagccctattacagcagttacctttggtccatttggtggcacaaaacatcagggcacaacaactacaacaacttgtgctagcaaaccttgctgcatactctcagcaacatcagtttcttccattcaaccaactggctgcattgaactctgctgcttatttgcaacaacaattaccattcagccagctagttgctgcctacccccagcaatttcttccattcaaccaactagcagcattgaactctgctgcttatttacagcagcaacaactactaccattcagccagctagctgatgtgagccctgctgccttcttgacacaacaacagtt

SEQ ID NO: 89388 - DNA, 387 bp, Zea mays
gcaacatagaaagtggaatccagtagctacaatagagcaacaatggctaccaagatgggtttccctccttatgctccttgctctttctacatgtgttgctaacgcgacaattttacctcaatgctcacaagctcctatagcttcccttcttcccccataccttccatcaattatagcttcaatatgtgaaaacccagctcttcaaccatataggcttcaacaagcaatcgcagcatgcaacatacctttatcgcccttgttgtttcaacaatcgccagccctatctttggtgcagtcattggtacaaaccatcagggcacatcagctgcagcaactcgtgctacctctgatcaaccaagtagctctggcataaccttcttcctactc

SEQ ID NO: 89389 - DNA, 420 bp, Zea mays
attcagatcacccctgccgaacggaattccacggcctaacaaccatgggctcccaagatttttgcccctcctgggccttctggccctttctgtgagcgcaacatatgcgttcattattccacaatgctcactagctcctagtgccattattccacagttcctgccaccagttacttcaatggtcttcgaacacctagctgtgcaagccaacatgcaacaacaagcgcttgcggcgagcgtattacaactaccaattgcccaattgcaacatcaatccttgccacatctaacaatacaagccatcacaacgcaacagcaacaacagttcctaccagcactgagccacctagccatggtgaaccctgccgtctacttgcacgagcagctgcttgcatgcaacccacttgctctggcgaacgt

SEQ ID NO: 89390 - DNA, 434 bp, Zea mays
aacaagcaacatagaaagtggaatccagtagcatcaatagagcaacaatggcgaccaagatatggtccctccttatgctccttgctctttctacatgtgttgctaacgcgacaattttccctcaatgctcacaagctcctatagcttcccttcttcccccataccttccatcaattatagcttcaatatgtgaaaacccagctcttcaaccatataggcttcaacaagcaatcgcagcaagcaacatacctttatcgcccttgttgtttcaacaatcgccagccctatctttggtgcagtcattggtacaaaccatcagggcacaacagctgcagcaactcgtgctacctctgatcaaccaagtagctctggcaaacctttctccctactctcagcaacaacaatttcttccattcaaccaactgtctacactg

SEQ ID NO: 89391 - DNA, 435 bp, Zea mays
gttggcaccttgatctcttttactgtaatatcccttggcgctctaggactaatatcaaggcttaatatcggcgcacttgaactgggagactatcttgcacttggggcaatattctcggccacagactcggtttgcaccttgcagaactttgatcctggaaatatcagcagtgccaaattactgaacttcattggcagtttcctttatctgttcggctccagcaccattcttggagtagcttctggacttcttagtgcttataccattaagaagttgtacttcggcaggcattcaaccgatcgtgaagtttccattatgatgctaatggcttatttatcttacatgctagctgaattgctcgatttgagtggcattctcactgtgtttttctgcggtatcgtaatgtcacactatacttggcacaatgtaacagaa

SEQ ID NO: 89392 - DNA, 450 bp, Zea mays
accggtccggaattcccgggtttgagcattcataaacacaccaagcgaagcgcactatcatcgactctaacaacaatggctaccaagatattagcgctccttgcgcttcttgccctttttgtgagcgcaacaaatgcgttcattattccacaatgctcacttgctcctagtgccattattccacagttccttccaccagttacttcaatgggcttcgaacacctagctatgcaagccaacatgcaacaacaagcgcttgcggcgagcgtcttacaacaaccaattgcccaattgcaacaacaatccttgccacatctaacaatacaagccatcacaacgcaacagcaacaactgttcctaccagcactgaaccacctagccatggtgaaccctgccgtctacttgcaagagcatctgcttgcattcaacccacttgctctggcgaacgta

SEQ ID NO: 89393 - DNA, 473 bp, Zea mays
tctaccggtccggaattcccgggcagcacaacaactacaacaacggttgcttccaacaattaatcaagtagttgcagcgaaccttgctgcttaccttgagcaacaacaatttcttccattcaatcaactagctggggtgaaccctgctgcttacttgcaggcacaacagctactaccattcaaccaacttgtcgggagccctgctgccatcttattgcagcaacagttgctgccattccgtctacaagttgttgcaaacattgctgctttcttgcaacaacaacaattgctgccattttacccacaggttgtgggaaacattaacgccttcttgcaacaacaacaattgctgccattctacccacaggatgtggcaaacattgtcgccttcttacaacaacagcaattgctgccatttagccaactcgctttgacgaatcctaccaccttattgcatcagcccaccattggtg

SEQ ID NO: 89394 - DNA, 514 bp, Zea mays
  unsure (1)..(514): unsure at all n locations
nggtgagtatgaggtgtgttactgacagacgatatatagcaatngctcgtaccggtccggaattcccgggtcgacccactcgtccggcaacatagaaagcacaatagtgtacctacaatggcagctaaaatattttgcctccgtatgctccttggtctttctgcaagtgctgctacggcgaccattttcccacaatgctcacaagctcctatagcttcccttcttcccccgtacctctcaccaacggtgtcttcggtatgtgaaaacccaattcttcaaccctacaggatccaacaggcaatcgcagctggcatcttacctttatcacccttgttcctccaacaatcatcagccctattacagcagttacctttggtgcatttattggcacaaaacatcagggcacatcaactacaacaacttgtgctagcaaaccttgctgcctactctcagcaacagcagtttcttccattcaaccaactagctgctttgaactctggctcttatttgcaac

SEQ ID NO: 89395 - DNA, 402 bp, Zea mays
tagcaacatagaaagcacaatagtgttccaacaatggcagctaaaatattttgcctcgttatgctccttggtctttctgcaagtgctgctacggcgaccattttcccacaatgctcacaagctcctatagcttcccttcttcccccgtacctctcaccaacggtgtcttcggtatgtgaaaacccaattcttcaaccctacaggatccaacaggcaatcgcagctggcatcttacctttatcacccttgttcctccaacaatcatcagccctattacagcagttacctttggtgcatttattggcacaaaacatcagggcacaacaactacaacaacttgtgctagcaaaccttgctgcctactctcagcaacagcaagttcttccattcaaccaactagct

SEQ ID NO: 89396 - DNA, 393 bp, Zea mays
ttgaaaaacacaccatgcgaagcgctctagcaacgacctaacaccaatggctaccaagatattagccctccttgcgcttcttgcccttttagtgagcgcaacaaatgcgttcattattccacagtgctcacttgctcctagtgccattattccacagttcctgccaccagttacttcaatgggcttcgaacatccagccgtgcaagcctacaggctacaactagcgcttgcggcgagcgccttacatcaaccaattgcccaattgcaacaacaatccttggcacatctaaccctactaaccattgcaacgcaacaactacaacaacaacagtttctgccatcactgagccacctagccgtggtgaaccctgtcacctacttgcaacagcagct

SEQ ID NO: 89397 - DNA, 278 bp, Zea mays
gagcattcaaaaacacggcaagcgaagcgcactatcaacttcttaacatcaatggctaccaatatattatccgttctttttctaattgcccttgatgttagctctacaaattcattcattattccacaatgctcacttgctcctagtaccattattccacagttccttccaccatttacttcaatgagcttcgaacacctatctatacaagccaacattcatcaacaatctctttcatctaacttcttacaacaaccaattatccaattgtaacaaca

SEQ ID NO: 89398 - DNA, 439 bp, Zea mays
gaccaactagcaacatagaaagcacaatagtgtaccaacaatggcagccaaaatattttgcctgcttatgctccttggtctttctgcaagtgctgctacggcgaccattttcccgcaatgctcgcaagctcctatagcttcccttcttcccccgtacctctcaccagcggtgtcttcggtatgtgaaaacccaattcttcaaccctacaggatccaacaggcaatcgcagctggcatcttacctttatcacccttgttccttcaacaatcatcagccctattacaacagttacctttggtgcatttattggcacaaaacatcatggcacaacaactacaacaacttgtgctagcaaaccttgctgcctactctcagcaacagcagtttcttccattcaaccaactaggttcattgaactctgcttcttatttgcaacaa

SEQ ID NO: 89399 - DNA, 442 bp, Zea mays
  unsure (1)..(442): unsure at all n locations
cggttccggattcgagccacgcgtccggagctccgccgnctccccgtctctcgccgatcttccccaaaccctagcctcgacctgagcgccagcgggcccgcaggccggagaaggagtcggagtcgcccccacccacccaccctctgccgcgggcggtgagcgggcggcggacgagatgccgtcgcacggcgatctggaccggcagatcgcgcagctgcgcgactgcaagtacctgcccgaggcggaggtcaaggtgctctgcgagcaggccaaggccatcctcatggaagaatggaacgtgcagcccgtgcgcctgcccgtcaccgtccgcggcgacatccacggccagttctatgacctcatcgagctcttccgcatcggcggcgactctgccgacaccaactacctgttcatgggcgactacgtcgatcgtggctattat

SEQ ID NO: 89400 - DNA, 348 bp, Zea mays
cggtttcggattcccgggtcgacccactcgtccgaatggaagaaactgctgttgctgagagtaggcagcaaggtttcctagcacaagttgtggtagttgttgtgcctgcacgctgcgcctaacgctggcaccctcttacaactgcaacaattgctgccattcaaccaacttgctttgacaaacccaacagcgttctaccaacaacccatcattggtggtgccctcttttagattgcttatgagttatacttcaataatgaagttttttggatgatgtttgtggcttaccagaaataagaaagttcatttctagattcttaaaaaaaacaaacccaacagcgttttaac

SEQ ID NO: 89401 - DNA, 297 bp, Zea mays
tttacagcagcatcatctactaccattcatccagctagctggtgtgagccctgctaccgtcttgatacaaccacagttgttgccgttctaccagcacgctgcgcctaacgctggcaccctcttacaactgcaacaattgctgccattcaaccaacttgctttgacaaacccagcagcgttctaccaacaacccatcattggtggtgccctcttttagatttcttatgagttatagttcaataataaagttttttgtctgatgtttgtggcttcccagaaataagaaagtacatttct

SEQ ID NO: 89402 - DNA, 508 bp, Zea mays
agaaggataggtgagttatgaaacgcaatattgcattgctcgtaccggttcggaattcccgggtcgacccactcgtccgattgagaccaactagcaacatagaaagtcacaatagtgtaccaacaatggcaggcaagatattttgcctacttatgctcataggtactttctgcaagtgctgctacggcgaccattctcccgcaatgctcgcaagctcctatagcttcccttcttgcctcgtacctctcaccatcggtgtcttcggtatgtgaaaacccaattcttcaaccctacaggatccaacaggcaatcgcagctggcatctcacctttatcacccttgttcattcaacaatcatcagccctattacaacagttacctatggtgcattgattgtcacaaaacatcacggcacaacaactacgacaacttgtgctagcaaaccttgctgcctactctcatcatcagcagtttcttgcattcaaccaactatgttcattgaacctcg

SEQ ID NO: 89403 - DNA, 426 bp, Zea mays
gcaacatagaaagcacaatagtgtacctacaatggcagccaaaatattttgcctccttatgctccttggtatttctgcaagtgctgctacggcgaccattttcccgcaatgctcacaagctcctatagcttcccttcttcccccgtacctctcaccagcggtgtcttcggtatgtgaaaacccaattcttcaaccctacaggatccaacaggcaatcgcagctggcatcttacctttatcacccttgttcctccaacaatcatcagccctattacagcagttacctttggtgcatttattggcacaaaacatcagggcacaacaactacaacaacttgtgctagcaaaccttgctgcctactctcagcaacagcagtttcttccattcaaccaactagctgcattgaactctgcttcttatttgca

SEQ ID NO: 89404 - DNA, 417 bp, Zea mays
gtccgtgagcataaaaagctcaatagtgtactttcaatggcagccaaaatattttggctccgtatgctcctaggtatttctgcaagtgctgctacagcgaccattttaccgcaatgctcacaagctcctatagcttcccttcttaccccgtacctctcaccagcggtgtcttcggtatgtgaaaacccaattcttcaaccctacaggatccaacaggcaatcgcagctggcatcttacctttatcacccttgctcctccaacaatcatcagccctattacagcagttacctttggtgcatttattggcacaaaacatcagggcacaacaactacaacaacttgtgctagcaaaccttgctgcctactctcaacaacagcaagttcttccattcaaccaactagcttcattgaactct

SEQ ID NO: 89405 - DNA, 419 bp, Zea mays
ggaatacccggcgttggattgggttcaaagttgggcttttggacagctgtggtgtgcacggcagctctgtgacttgtgaggaggaagggaggaagaaagcggatccatggcgtcgaagcggatcctcaaggagctcaaggacctgcagaaggatcctcccacctcttgcagcgcaggccctgttgccgaagatatgttctactggcaggcgacgattatggggccatcagatagcccatacgctggtggcgtatttttggtcactattcactttccaccggactacccattcaaaccaccgaaggttgcattcaagacgaaggtttaccatccgaatatcaacagcaacgggagcatctgtcttgatatcttgaaggagcaatggagccctgcactgacagtttctaaagtcctcctct

SEQ ID NO: 89406 - DNA, 427 bp, Zea mays
cccacgcgtccggggcagatacggttcctagtatatactttggagaatgcaatcttgagcctgcctgaaggccaagaaaaaatggtatggctgattgatttcacaggatggacagtgtcccatgcttcgccgataaagacttgtagagaaactgcaaatatactgcaaaatcattttcctgaaaggctggccattggatttctatttaatccccccaaagtatttgaagctttttataaggtcatcaagattttcctcgatccaaaatcagtcgagaaggtgaacttcgtgtacgagaaggatgaggagagcatgaaggtcatgtacaaatacatcgatccggaagtcctttctgtagagtttgtagggaagagcaatgtggtgtacaaccacgaggagtactccgagttaatgagacaagatgaca

SEQ ID NO: 89407 - DNA, 504 bp, Zea mays
  unsure (1)..(504): unsure at all n locations
ggtttagtgtgttaaagaccaagcaatagtatactcgttccggtcggaattcccgggtcgacnacgcgtccgaagctccgacccaatctaatcgacacctcaccgagatgggccgcaagttcttcgtcggtggcaactggaaatgcaatggaaccacagatcaggtcgagaagattgtcaaaaccctgaatgaaggacaggttcccccttcagatgttgtcgaggtcgttgtcagccctccttatgtcttccttcctgtggtcaagagccagctgcgccaagagttccatgttgctgctcagaactgctgggtgaagaagggaggtgctttcactggtgaagtcagtgctgagatgctcgtcaaccttggtgttccctgggtcattcttggacactctgaaaggagagctctgctaggagaatcanatgaatctgttggagacaaggttgcgtatgccctgtcttaaggactaaaggtcattgcatgttgtggtgaaacccttg

SEQ ID NO: 89408 - DNA, 430 bp, Zea mays
gccaaatggtagtagtatttggccagctagctacaacaagccccgcttccttcttgacacaacaacaagtgcttccgttctaccagcagtctgtggctaaccccgcaaccctcttacaactgcaacagttgctgccctttgtccaacttgctttgacaaacccagcagacttctaccaacaacacatcattggcggtgccctctcttagattgcttattactagcaattcaataatgaacttttacggctgatgtatgtggcctgctagaaataagaagtcatatttccaaaagatgtacagactcatcgacgagtacaagttgaagggccatatacggtggatctcggcgcagatgaaccgcgtccgcaacggggagctgtaccgatacatttgcgatacgaagggcgcattcgtgcagcctgcgttct

SEQ ID NO: 89409 - DNA, 421 bp, Zea mays
ctctcaccagcggtgtcttcagtatgtgtaaacccaattcttcaaccctacaggatccaacaggcaatcgcagcaggcatcttacctttatcacccttgttcctccaacaaccgtcagccctattacagcagttacctttggtgcatttgttggcacaaaacatcaaggcacaacaactacaacaacttgtgctaggaaaccttgctgcctactctcagcaacagcagtttcttacattcaaccaactggctgcattgaactctgctgcttatttgcaacaacaactaccattcagtcagctagctgctgcctacccccagcaatttcttccattcaaccaactggcagcattgaactctgctgcttatttacaacagcaacagctaccaccattcagccagctagctgatgtgagccctg

SEQ ID NO: 89410 - DNA, 421 bp, Zea mays
gaccaactagcaacatagaaagcacaatagtgtaccaacaatggcagccaaaatattttgcctccttatgctccttggtctttctgcaagtgctgctacggcgaccattttcccacaatgctcacaagctcctatagcttcccttcttcccccgtacctctcaccagcggtgtcttcggtatgtgaaaacccaattcttcaaccctataggatccaacaggcaatcgcagctggcatcttacctttatcacccttgttcctccaacaatcatcagccctattacagcagttacctttggtgcatttattggcacaaaacatcagggcacaacaactacaacaacttgtgctagcaaaccttgctgcctactctcagcaacaacagtttcttccattcaaccaactagctgcattgaactct

SEQ ID NO: 89411 - DNA, 372 bp, Zea mays
  unsure (1)..(372): unsure at all n locations
agcagctagcacatcaaacaagtggcgacagacaaagatttgtgagggtgatccgcgctgagaagagatggctaagatcgccgcggcggcggcggcggcgctgtgcttcgcggccctggtggccgtggccgtctgccaaggcgaggtcgagcggcagaggctcagggacctgcagtgctggcaggaggtccaggagagcccgctcgacgcgtgccgccaggtcctcgaccggcagctaaccggcggcggcggcggcggcggcgttggcccgttccggtggggcaccgggctccggatgcggtgctgccagcagctccaggacgtgagccgcgagtgccgctgcgccgncatccggagcatggtcaggggata

SEQ ID NO: 89412 - DNA, 404 bp, Zea mays
cccacgcgtccggagaccaactagcatcatagaaagcacaatagtgtaccaacaatggcagctaaaatattttgcctccttatgctccttggtctttctgcaagtgctgctacggcgaccattttcccacaatgctcacaagctcctatagcttcccttcttcccccgtacctctcaccaacggtgtcttcggtatgtgaaaacccaattcttcaaccctacaggatccaacaggcaatcgcagctggcatcttacctttatcacccttgttcctccaacaatcatcagccctattacagcagttacctttggtgcatttattggcacaaaacatcatggcacaacaactacaacaacttgtgctagcaaaccttgctgcctactctcagcaacagcagtttct

SEQ ID NO: 89413 - DNA, 426 bp, Zea mays
ctgccgcctacctacaacagtaacaactgctttcatctagcccgctcgctgtggccaatgcacctacatacctgcaacaagaattgttgcaacagattgtaccagctctaactcagctagctgtggcaaaccctgttgcctacttgcaacagctgcttccattcaaccaactaactatgtcgaactctgttgcgtacctacaacagcgacaacagttacttaatccattggcagtggctaacccattggtcgctgccttcctacagcagcaacaattgctgccatacaaccggttctctttgatgaatcctgtcttgtcgaggcagcaacccatcgttggaggtgccatcttttagattacatatgagatgtactcgataatggtgccctcataccggcatgtgttttctagaaataatcaatata

SEQ ID NO: 89414 - DNA, 423 bp, Zea mays
caactagcaacatacaaagcacaatagtgtaccaacaatggcagccaaaatattttgcctccttatgctccttggtctttctgcaagtgctgctacggcgaccattttcccgcaatgctcgcaagctcctatagcttcccttcttcccccgtacctctcaccagcggtgtcttcggtatgtgaaaacccaattcttcaaccctacaggatccaacaggcaatcgcagctggcatcttacctttatcacccttgttccttcaacaatcatcagccctattacaacagttacctttggtgcatttattggcacataacatcagggcacaacaactacaacaacttgtgctagcaaaccttgctgcctactctcagcaacagcagtttctttcattcaaccaactaggttcattgaactctgcttc

SEQ ID NO: 89415 - DNA, 432 bp, Zea mays
cttacaacaaccaattgcccaattgcaacaacaatccttggcacatctaaccctacaaaccattgcaacgcaacaacaacaacaacagtttctgccatcactgagccacctagccgtggtgaaccctgtcacctacttgcaacagcagctgcttgcatccaacccacttgctctggcgaacgtagctgcataccagcaacaacaacagctgcaacagtttatgccagtgctcagtcaactagccatggtgaaccctgccgtctacctacaactactttcatctagcccgctcgcggtgggcaatgcacctacgtacctacaacaacagttgctgcaacaaattgtaccagctctgactcagctagctgtggcaaaccctgctgcctacttacaacagttgctttcattcaaccaactggctgtgtcaaactc

SEQ ID NO: 89416 - DNA, 166 bp, Zea mays
ctgccattcaaccaacttgctttgacaatcccagcagcgttctaccaacaacccatcattggtggtgccctcttttagatttcttatgagttatagttcaataataaagttttttgtctgatgtttgtggcttcccagaaataagaaagtacatttctagattctt

SEQ ID NO: 89417 - DNA, 373 bp, Zea mays
gatcagcaaagcggcagtgcgtagagtaggatcgtcgaacagaacagcatgaagatggtcatcgttctcgtcgtgtgcctggctctgtcagctgccagcgcctctgcaatgcagatgccctgcccctgcgcggggctgcagggcttgtacggcgctggcgccggcctgacgacgatgatgggcgccggcgggctgtacccctacgcggagtacctgaggcagccgcagtgcagcccgctggcggcggcgccctactacgccgggtgtgggcagccgagcgccatgttccagccgctccggcaacagtgctgccagcagcagatgaggatgatggacgtgcagtccgtcgcgcagcatctgcagatgatgatgc

SEQ ID NO: 89418 - DNA, 365 bp, Zea mays
ttgaccgtgacgcaggggaagcaggtgcagaagtgggacaggatctccaaggcggccttcgagtgggctgaccaccccaccgctgtgatccccgacatgcagaagcttggcatcaaggataagaacgaagcagcgaggatcgttgcgctcgttaagaatcaaactactgccgctgccgctactgctgccagtgctgacaacgacgacgacgaggcctgatcaatgcaacgacacatcatgatctgctgctgcacttaattactatgttcgtatacaaataaatacacccggcgtacgcggtgttccttatatggtctaaaatgtagccagtaaattttaaactactttatttcttgaggctctat

SEQ ID NO: 89419 - DNA, 413 bp, Zea mays
actgagtggaggcagcgtattcagtctgaggcagaacattttgtcgatgtttctgccatgacttccgataatatcgccaagcttatcaatcaagacaaaatacaaattttgataaatcttaatggctacacaaagggtgccaggaacgaaatttttgcaatgcagccagcacctatccaagtttcgtacatggggttccctggaacaacgggtgctgcatacatagattacttggtcacagatgagtttgtttctccatctagctatgcacatatatattcagaaaagctcgtccatttgcctcattgctattttgtcaatgactacaagcagaaaaatcgagactgtctcactccagtatgtccacacaaaagatctgattatggattacctgaggataaatttatttttgc

SEQ ID NO: 89420 - DNA, 439 bp, Zea mays
ccggaattcccgggattgagaccaactagcaacatagaaagcacaatagtgtaccaacaatggcagctaaaatattttgcctccttatgctccttggtctttctgcaagtgctgctacggcgaccattttcccacaatgctcacaagctcctatagcttcccttcttcccccgtacctctcaccaacggtgtcttcggtatgtgaaaacccaattcttcaaccctacaggatccaacaggcaatcgcagctggcatcttacctttatcacccttgttcctccaacaatcatcagccctattacagcagttacctttggtgcatttattggcacaaaacatcagggcacaacaactacaacaacttgtgctagcaaaccttgctgcctactctcagcaacagcagtttcttccattcaaccaactagctgcattgaactc

SEQ ID NO: 89421 - DNA, 399 bp, Zea mays
gtaccggtctcggaattccggggtcgacccacgcgtgcgcagacaagtagcgacagctcttcaaatattcgtgagagtgatccggcgctgagaagagatggctaagatcgccggagccgtcgcggcggcggcggcgctgtgcttcacggccctggtgggcgcggccgtctgccaaggcaaggtcgagcgggcaatgctcagggacccgctgtgctggcaggaggtccaggagagcccgctcgacgcgtgccgacaggtcctcgaccggcagataaccggctgcggcgttagctgtcccttccggcagggcaccgggcttcggatgctgtgctgccagcagcgttaggacgtgaagccgtagtgccgctgcgccgacatccggagcatggtcaggggcta

SEQ ID NO: 89422 - DNA, 428 bp, Zea mays
cagaaacacaccaagcgaagtacattatcaacaacctaacaacaatggctaccaagatattatccctccttgcgcttcttgcgctttttgcgagcgcaacaaatgcgttcattattccacaatgctcacttgctccaagttccattattacacagttcctcccaccagttacttcaatgggcttcgaacacccagctgtgcaagcctataggctacaacaagcaattgcggcgagcgtcttacaacaaccaatttcccagttgcaacaacaatccttggcacatctaacaatacaaaccatcgcaacgcaacagcaacaacaattcctaccagcactgagccacctagccatggtgaaccctgccgcctacttgcaacagcagttgcttgcatcaaacccacttgctctggcaaacgtagttgcaaac

SEQ ID NO: 89423 - DNA, 410 bp, Zea mays
gtgccctgatggtttgtaccaatgactgctacaacagctgcagcaactcgtgctacctgtgatcaaccaagtagctctggcaaacctttctccctactctcagcaacaattgctgccattcaaccaacttgctttgacaaacccaacagcgttctaccaacaacccatcattggtggtgccctcttttagattgcttatgagttatacttcaataatgaagttttttggatgatgtttgtggcttcccagaaataagaaagtacatttctaaaaaaaaaatataaaaaaaaaaaaaaaaaaaacataaaaaaaaaaaaaaagaaacaaaaaaaaaaaaaacaacaactaaaaaaaacaaaaacttgtaaaccaaaataaacaaatataaaaaaaaaaagggggcgccctt

SEQ ID NO: 89424 - DNA, 438 bp, Zea mays
gagaccagcaagcaacatagaaagtagattccattagcaacaatagagcaacaatggcgaccaagatattttccctccttatgctccttgctctttctacatgtgttgctaacgcgacaattttccctcaatgctcacaagctcctatagcttcccttcttcccccataccttccatcaattatagcttcagtatgtgaaaacccagctcttcaaccatataggcttcaacaagcaatcgcagcaagcaacatacctttatcgcccttgttgtttcaacaatcaccagccctatctttggtgcagtcattggtacaaaccatcagggcacaacagctgcagcaactcgtgctacctgtgatcaaccaagtagctctggcaaacctttctccctactctcagcaacaacaatttcttccattcaaccaactgtctacac

SEQ ID NO: 89425 - DNA, 366 bp, Zea mays
tattgagaccaacatgcaacatagaatgtggaatccagtagcaacaacagagcaacaatggcgaccaagatattttccctccttatgctccttgctctatctgcatgtgttgctaacgcgacaattttccctcaatgctcacaagctcctatagcttcccttcttcccccataccttccatcaatgatagcttcagtatgtgaaaacccagctcttcagccctataggctccaacaagcaatcgcagcacgcaacatacctttatcacccttgtagtttcaacaatcgccagccctatctttggtgcagtcattggtacaaaccatcatggcacagcaactgcaccaacttgtgctacctgtgatc

SEQ ID NO: 89426 - DNA, 419 bp, Zea mays
gcttcatataaagcacaatagtgtaccgacaatggcagccaaaacatcttgcttccttatgctccttggactttctgcatgtgtagctaccgcaaccattttgcaacaatgctcacagcctcctatagcttacattgttcacacatacctataaccagcggtgtattcaatgtgtgaaaccccaagagttcaaccctacaggatacaacaggcaatcgcaacaggcatcttaccattatcacccttgctcctacaacaaccgtcagacctattacagcacatacctctggtccattaggtggcacaaaacatcagggcacaacaactacgacaactcgtgctagcaaaccttggtgcatactctcagcaacatcagtttcttccattcgaccaactgtctgcattgaactctgctgctt

SEQ ID NO: 89427 - DNA, 312 bp, Zea mays
agcacgttgcgcctaacgctggcactctcttacaactgcaacaattgctgccattcaaccaacttgctttgacaaacccagcagtgttctaccaacaacccatcattggtggtgccctcttttagatttcttatgagttatagttcaataataaagttctttatctgatgtttgtggcttcccagaaataagaaagtacatttctagattcttatgtgcttctaaaaaattaccattatcaccctagaaaagggcggacgttctagaggatccacagcttacgtactcgtgcatgctacgttatacctcttc

SEQ ID NO: 89428 - DNA, 391 bp, Zea mays
agtaagcttagcaactagattatggtctacagattggagtactcgacaccgtgaaggtgctgatcgttgcccttgctcttctggcgctcgctgtgagcgccgccttcagtacaagcgtaggctgtggctgccagacaccaccgtttcatctaccgactgcgttctatatgccgcctccgttctatctgccgccgcagcatcagccgcaaccatggcaataccccactcaaccaccgcaactaatcccgtgccagcagttcggatcctgaggcgtcggcagcgtcagcagtccgtacctgggcacaatgcgtcgagcacctgaagcaccaatgcatgctggcaaagacgcgctactgctcgccacagtgccaggcgctgcaacagcagtgct

SEQ ID NO: 89429 - DNA, 290 bp, Zea mays
gcggggggaggcatcgtcctctccgtgctttctcagaggtgggttggcttctcctggcgcaccggttcgtgttcaggttctggttcctgggcgagagggaagagatggcggcatgcgacgtttagtaccgttgctctcttggcggcctcgtctgggccaccgacgaccactcgctcaacaactccttcagcacctacggcgaggtcctcgagtcgaagatcatcctgcatcgggagacgcagaggtcccgcggctactgcttacgcaccttctccacagacgacgcgatg

SEQ ID NO: 89430 - DNA, 437 bp, Zea mays
aagcaacatagaaagtagaatccattagcaacaatagagcaacaatggcgaccaagatattttccctccttatgctccttgctctttctacatgtgttgctaacgcgacaattttccctcaatgctcacaagctcctatagcttcccttcttcccccataccttccatcaattatagcttcagtatgtgaaaacccagctcttcaaccatataggcttcaacaagcaatcgcagcaagcaacatacctttatcgcccttgttgtttcaacaatcaccagccctatctttggtgcagtcattggtacaaaccatcagggcacaacagctgcagcaactcgtgctacctgtgatcaaccaagtagctctggcaaacctttctccctactctcagcaacaacaatttcttccattcaaccaactgtctacactgaaccct

SEQ ID NO: 89431 - DNA, 435 bp, Zea mays
gggcgctggcagacagtccgattataggggagatacgtggcttggggatgattatggggaccgaattcacaaacaacaagtcaccgactgatctgttccctgccgaatggggggttggtgccatcttcggcgaagagtgccagaagcgcggcatgctggtcagggtcgctggcgacgccatcatgatgtcgccgacgctgatcatgacgcccggcgaagtcgacgagttggtgcgcatctacggggaagccctcaaggccacggaggagagggtggcagccctgcagtccaagaagaactagccaaaagggcggcgacgacgataacgataaacgccgggcgacgacggaccatatttgatgtacaggtgaataaacagccaagttcgtggctgcgagatggcaatagcgcgccggtctctgttcttgctctgtc

SEQ ID NO: 89432 - DNA, 434 bp, Zea mays
gcagaactctctagacctcatcggcgttgtcggagcgcgtgttgaccggagatggcgccgagcgggtggaggacgagcgcggcggcgcggatcggctggctcccggacacggtttgcctgtggctcgcgctctccggcgccgcactgacgctcggccagtctaagaaggacctgacggaggttacccacaaggtctacttctacatcgagatcgacggctagcccacaggccggattgtcatggggctttttgggaagactgttcctaagacggcagagaacttccgagctctttgcacaggagagaaaggggtcggcaagagtggcaaagccctccactacaagggaagtcagttccacagaatcatgcacagcttcatgctccaaggaggtgacttcactctcgtggacgggaggggtggtgaatctatcta

SEQ ID NO: 89433 - DNA, 517 bp, Zea mays
agtatggttttctgattaatcgaatcgggggacaagtggtatcgccctcggaattcccgggtcgacccacgcgtccggcaacatttgttgccgttctacctgcacactgcgcctaacgttggcaccctcttacaactgcaacaattgctgccattcgaccaacttgctttgacaaacccagcagtgttctaccaacaacccatcattggtggtgccctcttttagattgcttatgagttatagttcaataataaagttttttttgctgatatttgtggcttcccagaaataagaaagtacatttctaaaaaaaaaaaaaaaagaaaaaaaaaatagacagaaaaaaaaaaggggcggccgttctagaggatccaagcttacgtacgcgtgcatgcgacgtcatacctcttctatagggtcacctaaattcaattcactggccgtcgttttacaacgttgcgactgggaaaaccctggcgttacccaacttaatcgccttgcagcacattcccctttc

SEQ ID NO: 89434 - DNA, 380 bp, Zea mays
aactactaccattcagccagctagcttatgtgagccctgctgccttcttgacacaacaacaggtgctgccggtctacctgcacgctatgcctaacgctggcaccctcttacaactgcaacaattgctgccattcaaccaactcgctttgacaaacccaacagtgttctaccaacaacccatcattggtggcgccctcttttagattgcttatgagttatagttcaataatgaagttctttggatgatgttcgtggcgtcccagaaataacaaagttaaataaaagcgtcagcataccgtacctgggtcaatgcgtcgagttcctgaagcaccaatgcaacccggcggcgacaccctacggctcgccacaatgccaggcgc

SEQ ID NO: 89435 - DNA, 386 bp, Zea mays
cggacgcgtgggccagcaagcaacatataaagtagaatccattagcaacaatagagcaacaatggcgaccaagatattttccctccttatgctccttgctctttctacatgtgttgctaacgcgacaattttccctcaatgctcacaagctcctatagcttcccttcttcccccataccttccatcaattatagcttcagtatgtgaaaacccagctcttcaaccatataggcttcaacaagcaatcgcagcaagcaacatacctttatcgcccttgttgtttcaacaatcaccagccctatctttggtgcagtcattggtacaaaccatcagggcacaacagctgcagcaactcgtgctacctgtgatcaaccaagtagctctgg

SEQ ID NO: 89436 - DNA, 415 bp, Zea mays
cgcgcgcgtgggccagcaagcaacatatcaagtagaatccattatcaacaatagagcgaacagtggcgaccaagatattttccctccttatgctccttgctctttctacatgtgttgctaacgcgacaattttccctcaatgctcacaagctcctatagcttcccttcttcccccataccttccatcaattatagcttcagtatgtgaaaacccagctcttcaaccatataggcttcaacaagcaatcgcagcaagcaacatacctttatcgcccttgttggttcaacaatcaccagccctatctttggtgcagtcattggtacaaaccatcagggcacaacagctgcagcaactcgtgctacctgtgatcaaccaagtgctctggcaaacctttttcctactcttagcaacaac

SEQ ID NO: 89437 - DNA, 438 bp, Zea mays
  unsure (1)..(438): unsure at all n locations
ggggttcgagccacgcgtcacgcgctagcgccagctcttcaaccatatatttgnctatacaagcaatcgcagcaagcaacatgacctgtgtcgcccttgttgtttcaacaatcaccagccctatctttggtgcagtcattggtacaaaccatcagggcacaacagctgcagcaactcgtgctacctgtgatcaaccaagtagctctggcaaacctttctccctactctaagcaactacaatgtcttccattcaaccaactgtctacactgaactctgctgcttatttgcagcaacaactatgtccatttagccagctagctactgcctactctcagcaacaacaacttcttccatttaaccaattggccgcactgaacctcgctgcttatttgcagcagcaaatactactgtcatttagcgagctagctgcagcaagt

SEQ ID NO: 89438 - DNA, 423 bp, Zea mays
aactagcaacatagaaagcataatagtgtaccaacaatggcagccaaaatattttgcgctccttatgctccttggtctttctgcaagtgctgctacggcgaccattttcccgcaatgctcgcaagctcctatagcttcccttcttcccccgtacctttcaccagcggtgtcttcggtatgtgaaaacccaattcttcaaccctacaggatccaacaggcaatcgcagctggcatcttacctttatcacccttgttcctccaacaatcatcagccctattacaacagttacctttggtgcatttattggcacaaaacatcagggcacaacaactacaacaacttgtgctagcaaacctagctgcctactctcagcaacagcaggtacatccatttaaccaactatgttcattgaactttgcttc

SEQ ID NO: 89439 - DNA, 473 bp, Zea mays
atcgccccggattcccgggtggacgtcagcctacaattagctcatcgactccagattggagaactcgacaccatgaaggtgctgatcgttgcccttgctctcctggcgctcgctgcgagcgccgcctccagtacaagcggcggctgtggctgccagacaccaccgtttcatctaccgcctccgttctatatgccgcctccgttctatctgccgccgcagcagcagccgcagccatggcaataccccactcaaccaccgcagctaagcccgtgccagcagttcggatcctgcggcgtcggcagcgtcggcagcccgttcctgggccagtgcgtcgagttcctgaggcaccagtgcagcccggcggcgacgccctacggctcgccacagtgccaggcgctgcagcagcagtgctgccaccagatcaggcaggtggagccgctgcaccggtaccaggcgacatacggtgtggtcct

SEQ ID NO: 89440 - DNA, 446 bp, Zea mays
cggaattcccgggtcgacgcacgcgtacgagttactaccagcactgatccacgtagttttggtgaaccctgacgtctacttgcaagagcagctgcttgcatccaacccacttgatgtggcgaacgtagctgcaaaccagctacaacaacagctacaacagtttcagccaacgctcagtcaactagccatggtgaaccctgacgtctacgtacaacaacaacaactgctttcatctaacccgctcgctgcgggcaatgcacactacatacctgcaacaacaattgctgcaacagattgtaccagctctgactcaactagctggggcaaacccatgtgcctacttgcaacagctgcttacatgcgaccaactgactctggcgaactctgctgacgacctacaacagcgacaacagttacttaatccattgttagtggctaacccattg

SEQ ID NO: 89441 - DNA, 437 bp, Zea mays
ggcgaccaagatattttccctccttatgctccttgctctttctgcatgtgttgctaacgcgacaattttccctcaatgctcacaagctcctatagcttcccttcttcccccataccttccatcaatgatagcttcagtatgtgaaaacccagctcttcagccctataggctccaacaagcaatcgcagcaagcaacatacctttatcacccttgttgtttcaacaatcgccagccctatctttggtgcagtcattggtacaaaccatcagggcacagcagctgcagcaactcgtgctacctgtgatcaaccaagtagctctggcaaacctttctccctactctcagcaacaacaatttcttccattcaaccaactgtctacactgaaccctgctgcttatttgcagcaacaactattaccattcagccagcaaatac

SEQ ID NO: 89442 - DNA, 353 bp, Zea mays
cggacgcgtgggccctgataagattgcctttgttcccatttctggttctgagggtgacaacatgattgagaggtccaccaaccttgactggtacaaaggcccaaccctgcttgaggctcttgaccagatcaccgagcccaagaggccttcagacaagcccctgcgtctgcccctccaggatgtgtacaagattggtggtattggaactgtaccggttggtcgtgtggagactggtgtcatcaaacctggtatggttgtcacctttggtccaactgggctgactaccgaggtgaactctggtgagatgcaccacgaggcgcttcacgaagcttttccgggtgacaatgttggct

SEQ ID NO: 89443 - DNA, 394 bp, Zea mays
cagctagcaacatagaaagcacaatattgtaccaacaatggcagccaaaatattttgcctccttatgctccttggtctttctgcaagtgctgctacggcgaccattttcccgcaatgctcgcaagctcctatagcttcccttcttcccccgtacctctcaccagcggtgtcttcggtatgtgaaaacccaattcttcaaccctacaggatccaacaggcaatcacagctggcatcttacctttatcacccttgttcctccaacaatcatcagccctattacatcagttacctttggtgcatttattggcacaaaacatcagggcacaacaactacaacaacttgtgctagcaaaccttgctgcctactctcagcaacagcagtttcttccattc

SEQ ID NO: 89444 - DNA, 432 bp, Zea mays
ggccgcccaagaagggttcagctgttcagcgccctcgcaccaggactctgactgctgtccatgatggcatcctggaggatgttgtcttcccagctgagattgtggggaagcgtgtcaggtaccgtctggatggtgccaagatcatcaagatcttcttggacccaaaggagaggaacaacacagaatacaagctggacacctacactacggtctaccgcaggctgtgtgggaaagatgtggtctttgagtaccctatggccgaaaatgcataaatatgacgcccggatatccccattttattttgttgaatctggatgtttctttggggtctcaactagactgctccgtatgtacttcaaaaaccatagttttgatgccaaagttgttgcctaggaatttggtactcgggaatggtagcggacctgaacaatg

SEQ ID NO: 89445 - DNA, 512 bp, Zea mays
  unsure (1)..(512): unsure at all n locations
nggtagaggagttgttaccgcacaaagcattagtagtattgctcgtaccggtccggaattccagggtcgacgtcacgcgtccgaccaagcgaagcacattagcttcaacttaacagcaatggctaccaagatctgatccgtacttgcgctgattgcgctatttgcgagcgcaacacatgcggttattattacataatgctcacttgctacaagttccattattacacagataccgttcaccaggcacttcaatgggcttcgaacacccaactgtgcaagcctataggctacaacaagcaatctctgcaagcgtattacatcaaccaagcttccagttgcagcaacaatccttggtacatcttacagtacaaaccatcgcaacgcatcagcaacaaccattcctaccagcactgaatcacctagccatagcgaaccctgccggctacttgcaacagcagatgcttgcatcaaagccactcgctctggctaacgtaattggcaaccaatcataa

SEQ ID NO: 89446 - DNA, 409 bp, Zea mays
gcgacgcgtccgattgagaccagcatttaacatagaaagtagaatccattagcaacggtagagcaacaatggcgaccaagatattttccctccttatgctccttgctctttctacatgtgttgctaacgcgacaattttccctcaatgctcacaagctcctatagcttcccttcttcccccataccttccatcaattatagcttcagtatgtgaaaacccagctcttcaaccatataggcttcaacaagcaatcgcagcaagcaacatacctttatcagccttggtggttcaacaatcaccagccctatctttggtgcagtcattggtacaaaccatcagggcacaacagctgcagcaacttgtgctacctgtgatcaaccaagtagctctggccaaccctttttccct

SEQ ID NO: 89447 - DNA, 421 bp, Zea mays
gaaacacacctagcgaagctcactatcaacgacctaacaacaatggcttccaagacattatccctccttgcgcttcttgccctttttgtgagtgcaacaaatgcgttcattattccacaatgctcacttgctccgagtgccattattccacagttcctccctccagttacttcaatgggcttcgaacacccagctgtgcaagcctataggctacaacaagcgcttgcggcgagcgtcttagaacaaccaattgcccaattacaacaacaatccttagcacatctaaccatacaaaccatcgcaacgcagcagcaacaagcactgagccacctagccgtggtgaaccctatcgcctacttgcaacaacagctgcttgcatccaacccacttgctttggcaaacgtagctgcataccaacaac

SEQ ID NO: 89448 - DNA, 422 bp, Zea mays
attcccgggccaattcttgaactcctacaggatccaacgaggctatcgcagctggtttctgacctttatcacccttgttcctccaacgaatcatgagccctattacagcagttacctttggtgcatttattggcacaaaacatcagggcacaacaactacaacaacttgtgctagcaaaccttgctgcctactctcagcatcagcagtttcttccattcaaccaactagctgcattgaactctgcttcttatttgcaacaactacttctaccattcagccagctatctgctggctaccttcagcaattccttccattcaaccaactgacagcattgaactctcctgcttatgtacagcagccacatctactaccattcagccagctagctggtgtgagccctgctaccttcttgacacaacc

SEQ ID NO: 89449 - DNA, 438 bp, Zea mays
gcgcttcttgcccttttagtgagcgcatctaaatgcgttcattattccacagtgctcactggcactaggagcaagtgagcactgtggaataatgaacgcattccacagtctctcccaccagttacttcaatgggcttccaacatccagccgtgcaagcctacacgctacaactagcgcttgctgcgagcgccttacaacaaccaattgcccaattgcaacaacaatccttggcacatctaaccctacaaaccattgcaacgcaacaacaacttcaacagtttctgccatcactgagccacctagccgtggtgaaccctgtcacctacttgcaacagcagctgcttgcatccaacccacttgctctggcgaacgtatctgcataccagcaacaacatcagcttgaacagtttatgccagtgctcagtcaactagccatg

SEQ ID NO: 89450 - DNA, 462 bp, Zea mays
cggaattcccgggcgccagcccggacggctataaagacgaggcccatctcgaaatcgtcggcgatgaagaagaccagttcccctctcctgatcgtgctgttcctcacagcagcagccatggcggccgagccggagaagcaggcggcccccgcggcacaggagacggccgtgcacatcgtgtacgttgaccgccccgaggacgccgaccctgaggagttccacatccgcaccctcacccccgtcctcggcagcgaacagaaggccagggacgcagtgctctaccactacaagaacgccgccagcggtttctccgcgaagctcaccccccagcaggtcaaggatctcaaggagcaaccaggtgttctccaggttgtgccgagccagacttaccagctacatggccctgggtctggcactcaccagggcacgacacacaccttgggccttatgtgaaagcgtatg

SEQ ID NO: 89451 - DNA, 427 bp, Zea mays
ctttggtgcatttattggcacaaaacatcagggcacaacaactacaacaacttgtgctagcaaaccttgctgcctactctcagcaacagcagtttcttccattcaaccaactagctgcattgaactctgcttcttatttgcaacaacaacaactaccattcagccagctacctgttgcctacccccaacaatttcttccattcaaccaactggcagcattgaactctcctgcttatttacagcagcaacaactactaccattcagccagctagctggtgtgagccctgctaccttcttgacacaaccacagttgttgccgttctaccagcacgctgcgcctaacgctggcaccctcttacaactgcaacaattgctgccattcaaccaacttgctttgacaaacctagcagtgttctaccaacaacc

SEQ ID NO: 89452 - DNA, 427 bp, Zea mays
attgacaccaactagcaacatagaatgcacaatagtgtaccaacaatggcagccaaaatattccgcttccttatgctccttggtctttctgcaagtgttgctaccgcaaccattttcccacaatgctcacaagctcctatagcttcccttcttcccccatacctctcaccagcggtgtcttcaatgtgtgaaaccccaattgttcaaccctacaggatccaacaggcaatcgcaacaggcatcttaccattatcacccttgttcctccaacaaccgtcagccctattacagcagttacctttggtccatttggtggcacagaacatcagggcacaacaactacaacaacttgtgctagcaaaccttgctgcatactctcagcaacatcagtttcttgcattcaaccaactggctgcattgaactctg

SEQ ID NO: 89453 - DNA, 350 bp, Zea mays
cactagcaacatataaagcacaattttgtaccaacaatggcagccaaaatattttgcctccttatgctccttggtctttctgcaagtgctgctacggcgaccattttcccacaatgctcacaagctcctatagcttcccttcttcccccgtacctctcaccagcggtgtcttcggtatgtgaaaacccaattcttcaaccctataggatccaacaggcaatcgcagctggcatcttacctttatcacccttgatcctccaacaatcatcagccctattacagcagttacctttggtgcatttattggcacaaaacatcagggcacaacaactacaacaccttgggctagc

SEQ ID NO: 89454 - DNA, 489 bp, Zea mays
ggtaagcttattacgatcccgactatagtattgatgtaccggttcggaattcgagcctcgactcacgcgtacgcacaccatctagctggtgtgttcccttctaccttcttgacacaaccacaggggttggcgttctaccagctcgttgcgcctaactgctggcgcctgttatacaactgcatcaactgctgtgattcaaccaactctgtttgacaaattcatcaacgatcgatcaacaacccatcattggtggtgccctattttacattcttatgcgtatagtcataatgagtttgatatgatcttatggctatccagatatagaaagtacatttctaaaaaatattacacagttacattaaaggcctttcgctctagaggatccaagcttacgtacgcttgcatgccacgtcatagctcttctatagtgtcacttaaattcaattcactggccttcgttttacaacgtggttactgggaaaaccctgc

SEQ ID NO: 89455 - DNA, 307 bp, Zea mays
caacaagcaacatagaaagtggaatacagtagcaacaatagagcaacaatggcggccaagatattttccatccttatgctccttgctctttctgcatgtgttgctaacgcgaccatttctcctcaatactcacaagctcctatagctgcccttctttccccataccttccatcaatgaccgcttcagtttgtgaaaacccagcccttcaaccctacaggctccaacaagcaatcgcatacaagcaacttacctttatcacccctgttctttcaacaatcgccagccctatctttggtgccatcattg

SEQ ID NO: 89456 - DNA, 319 bp, Zea mays
accatttagccagctagctgcagcataccgtgcttccttcttgacacagcaacagttgctgcctttctaccagcagtttgcggctaaccccgcaaccctcttacaactacaacaattgttgccctttgtccaacttgctttgacagaccgagcggcctcctaccaacaacacatcattggtggtgccctcttttagattgcttattagttgtaattcaataataaagttttttggatgatgtatgtggccaaccagaaataagaagttacatttccagattttaaaaagtgcaattaaaggcacaaaacattaagagac

SEQ ID NO: 89457 - DNA, 429 bp, Zea mays
tgcagcccgacggcgacgccctactgctctcctcagtgccagtcgttgcggcagcagtgttgccagcagctcaggcaggtggagccgcagcaccggtaccaggcgatcttcggcttggtcctccagtccatcctgcagcagcagccgcaaagcggccaggtcgcggggctgttggcggcgcagatagcgcagcaactgacggcgatgtgcggcctgcagcagccgactccatgcccctacgctgctgccggcggtgtcccccactgaagaaactatgtgctgtagtatagccgctggctagctagctagttgagtcatttagcggcgatgattgagtaataatgtgtcacgcatcaccatgggtggcagtgtcagtgtgagcaatgacctgaatgaacaattgaaatgaaaagaaaaaagtattgttcc

SEQ ID NO: 89458 - DNA, 435 bp, Zea mays
cctacaacaatcatcagccctattacattagttacctttggtgcatttattggcacaaaacatcagggcacaacatctacaacaacttgtgctagcaaaccttgctgcctactctcagcaacagcagtttctttcattcaaccaactagctgcattgaactctgcttcttatttgcaacaacaacaactaccattcagccagctacctgctgcctacccccagcaatttcttccattcaaccaactggcagcattgaactctactgcttatttacagcagcaacaactactaccattcagccagctagctggtgtgagccctgctaccttcttgatacatccacagttgttgccgttctaccagcacgctgcgcctaacgctggcaccctcttacaactgcaacaattgctgccattcaaccaacttgctttgac

SEQ ID NO: 89459 - DNA, 442 bp, Zea mays
accatataggcttcaacaagcaatcgcagtaagcaacattaccttattggcccttggtggttgcaacaattaaccaacccctatctttgggtgccattcattggtacaaaccaatcaggcacaacagctgcagcaactcgtgctacctgtgatcaaccaagtagctctggcaaacctttctccctactctcagcaacaacaatttcttccattcaaccaactgtctacactgaaccctgctgcttatttgcagcaacaactattaccatttagccagctagctactgcctactctcagcaacaacaacttcttccatttaaccaattggccgcactgaaccccgctgcttatttgcagcagcaaatactactgccatttagcgagctagctgcagcaagtcgtgcttccttcttgacacagcaacagttgctgcctttctac

SEQ ID NO: 89460 - DNA, 387 bp, Zea mays
  unsure (1)..(387): unsure at all n locations
gtgaagtacactagcaacatcttagctccaatggcagccaagatttttgccatccttgccctccttgctctttcagcaagcgttgctaccgcgactattattccacaatgctcacaacaatacctctctccggtgacagccgcgagatttgaatacccaactatacaatcctacaggctacaagaggccatcgcagcaagcatcttacggtcgttagcattgaccgtccaacaaccatatgccctattgcaacaaccatccttaatgaatctatatctccaaagaatcgcagcacaacaactacaacaacagttgcttccaacaatcaatcaagtagttgcagcgaaccttgctgcttacctncagcaacaacaatttcttccattc

SEQ ID NO: 89461 - DNA, 416 bp, Zea mays
ctcgaggccacgcgtcacgcggttcggcgagacacaccaatcgaatttcactatcaacaacctatcaacaatgtctagcaagatgtttatacttccttgcgcttcttgcgctttttgcgagcgcatcaaatgcgtacattattccagaatgctcacttgctgctagttacattattacacagttactgctaccagttacttaaatggccttcgaacactcagctgtgcaagcctatacgctacatcaagcgattgctgcgagcgtcttacaccaaccaattgcccaattgcaacaacaatccttagtacatataacaatacagaccatcgcagcgtaacagcaacaacagttactaccatcactgatccacctagccatggtgaacactgtacgctacttgcaacagcagctgctt

SEQ ID NO: 89462 - DNA, 367 bp, Zea mays
actcggtctcggaattccagggtcgactcacgcgtccgcggacacgtgggcggactcttggggctgcattgaactctgcttcttatttgcaacgacaacaactaccattcagccagctatctgctgcctacccccagcaatgtcttccattcaaccaactgacagctttgaactctcctgcttatttacaggagcatcaactactaccattcagtcagctagctggtgtgagctctgctaccttcttgacacaaccacaattgttgccgtgctaccagcacgctgcgcctaacgctggcaccctattacaactgccacaattgctgccattcaaccaacttgctttgacagacccaacagcatttta

SEQ ID NO: 89463 - DNA, 437 bp, Zea mays
gcctcgcgtcgtcgccccacagccacgctagccttctccgatccgcgagcgcagatcgccgaagccaggcggcggagagggagctcgaggcggcggaggaaggcgttcgccacagtcgctgatttccctggggaagagatgggtctctcctttgggaagctgttcagccgcctcttcgccaagaaggagatgaggattctcatggtcgggctcgatgccgcctgtaagaccaccatcctatacaagctcaagctcggcgagatcgtcaccaccatccgcactatcggattcaatgttgaaactgttgagtataagaacattagcttcactgtttgggatgttggtggccaggacaagatcaggcccctgttgaggcactactttcagaacacacagggacttatttttgttgtagacagcaacgactgggaacgtgt

SEQ ID NO: 89464 - DNA, 429 bp, Zea mays
gcgtcgttcttgccggccgcgcctcacctaggccctctcctcctccagggggatcggatactccacaggctgcgcgatggtgctgtgggtcttcggctacggctccctcatctggaaccccggcttcgacttcgacgacaaaatcctcggcttcatcaagggctacaagcgcacctttaatctcgcttgcattgaccacagaggcacaccggagcatccggcgaggacctgcacgcttgaaaccgacgacgaggccatatgctggggaattgcatattgtgtcaagggtggtccagaaaaagagctaaaagcaatgcagtacttggagagaagagagtgtgagtacgaccagaagatatccattgatttctacaaggaaggagatcccttgaaaccagctgtgacaggcgtcttaatggtcgtttccac

SEQ ID NO: 89465 - DNA, 437 bp, Zea mays
cggacgcgtggggagcattcagaaacactccaagcgaagctacctagcaacgacttaacaacaatggctaccaagatattagccctccttgcgcttcttgccctttttgtgagcgcaacaaatgcgttcattattccacaatgctcacttgctcctagtgccattataccacagttcctccgaccagttacttcaatgggcttcgaacacctagctgtgcaagcctacaggctacaacaagcgcttgcggcgagcgtcttacaacaaccaattaaccaattgcaacaacaatccttggcacatctaaccatacaaaccatcgcaacacaacagcaacaacagttcctaccagcactgagccaactagatgtggtgaaccctgtcgcctacttgcaacagcaggtgcttgcatccaacccacttgctctggcaaacgt

SEQ ID NO: 89466 - DNA, 441 bp, Zea mays
gaccaactagcaacatataaagcacaattgtgtaccaacaatggcagccaaaatattttgcctccttatgctccttggtctttctgcaagtgctgctacggcgaccattttcccgcaatgctcgcaagctcctatagcttcccttcttcccccgtacctctcaccagcggtgtcttcggtatgtgaaaacccaattcttcaaccctacaggatccaacaggcaatcacagctggcatcttacctttatcacccttgttcctccaacaatcatcagccctattacatcagttacctttggtgcatttattggcacaaaacatcagggcacaacaactacaacaacttgtgctagcaaaccttgctgcctactctcagcaacagcagtttcttccattcaaccaactagctgcattgaactctgcttcttatttgcaacaaca

SEQ ID NO: 89467 - DNA, 394 bp, Zea mays
cagcattcaaaaacacaccaagcgaagcgcactagcaacgacctaacaccaatggctaccaagatattagccctccttgcgcttcttgcccttttagtgagcgcaacaaatgcgttcattattccacagtgctcacttgctcctagtgccagtattccacagttcctcccaccagttacttcaatgggcttcgaacatccagccgtgcaagcctacaggctacaactagcgcttgcggcgagcgccttacaacaaccaattgcccaattgcaacaacaatccttggcacatctaaccctacaaaccattgcaacgcaacaacaacaacaacagtttctgccatcactgagccacctagccgtggtgaaccctgtcacctacttgcaacagcagc

SEQ ID NO: 89468 - DNA, 268 bp, Zea mays
atcgagaccaacaagcaacatacaaagtggaatccagtagcaacaatagagcatcaatggcgaccaagatactttccctccttatgctccttgctctttctgcatgtgttgctaacgcgacaattttacctcattgctaacaagctcctatagcttcccttgttcccccataccttccatcaatgatagctcaagaatgtgaaaccccagcttttcaaccttttaggctccaacagcgcattggcagcaggcaccatacctttatcac

SEQ ID NO: 89469 - DNA, 457 bp, Zea mays
accgctccggaattcccgggctcatcgactccagattggagaactcgacaccatgaaggtgctgatcgttgcccttgctctcctggcgctcgctgcgagcgccgtcttcagtacaagcggcggctgtggctgccagacaccaccgtttcatctaccgcctccgttctatatgccgcctccgttctatctgccgccgcagcagcagccgcagccatggcaataccccactcaaccaccgcagctaagcccgtgccagcagttcggatcctgcggcgtcggcagcgtcggcagcccgttcctgggccagtgcgtcgagttcctgaggcaccagtgcagcccggcggcgacgccctacggctcgccacagtgccaggcgctgcagcagcagtgctgccaccagatcaggcaagtggagccgctgcaccggtaccaggcgacatacggtgtggtcctgcag

SEQ ID NO: 89470 - DNA, 192 bp, Zea mays
gaagaaactatgtgctgtagtatagccgttggctagctagctagttgagtcatttagcggcgatgattgagtaataatgtgtcacgcatcaccatgggtggcagtgtcagtgtgagcaatgacctgaatgaacaattgaaatgaaaagaaaaaagtattgttccaaattaaaaaaaaaaaaaaaaaatgaac

SEQ ID NO: 89471 - DNA, 438 bp, Zea mays
ggccaatgcacctacatacctgcaacaagaattgttgcaacagattgtaccagctctaactcagctagctgtggcaaaccctgttgcctacttgcaacagctgcttccattcaaccaactaactatgtcgaactctgttgcgtacctacaacagcgacaacagttacttaatccattggcagtggctaacccattggtcgctgccttcctacagcagcaacaattgctgccatacaaccggttctctttgatgaatcctgtcttgtcgaggcagcaacccatcgttggaggtgccatcttttagattacatatgagatgtactcgataatggtgccctcataccggcatgtgtttcctagaaataatcaatatattggttgagatttatctcgatatatttctgaactatgttcatcatataaataattgaaaacatc

SEQ ID NO: 89472 - DNA, 471 bp, Zea mays
ccggtctcggaattgccgggagcagacatgagtgtgtactacccgtatacggaaaccgactagagactcactgccttccatcctgaaatcgaggagctcatctacagcgacgtcgagaactccgagcacaagttcgtgctgaaggacaagaagaagccgatcatcttctcgatggcgcgtctcgaccgcgtgaagaacatgacaggcctggtcgagatgtacggcatgaacgcgcgcctgagggagctggcgaacctcgtgatcgttgccggtgaccactgcaaggagtccaaggacagggaggagcaggcggagttcaagaagatgtacagcctcatcgacgagtacaagttgaagggccatatccggtggatctcggcgcagatgaaccgcgtccgcaacggggagctgtaccgctacatttgcgatacgaagggcgcattcgtgcagcctgcgttctacgaagcgttc

SEQ ID NO: 89473 - DNA, 432 bp, Zea mays
caagcaacatagaaagtggaatccagtagcaacaatagagcaacaatggcgaccaagatactttccctccttatgctccttgctctttctgcatgtgttgctaacgcgacaattttccctcaatgctcacaagctcctatagcttcccttcttcccccataccttccatcaatgatagcttcagtatgtgaaaacccagctcttcaaccctataggctccaacaagcaatcgcagcaagcaacatacctttatcacccttgtttcaacaatcgccagccctatctttggtgcagtcattggtacaaaccatcaaggcacagcagctgcagcaactcgtgctacctgtgatcaaccaagtagctctggcaaacctttctccctactatcagcaacaacaatttcttccattcaaccaactatctacactgaac

SEQ ID NO: 89474 - DNA, 475 bp, Zea mays
accgctccggaattcccgggcatacatagtgaagtacactagcaacatcttagcaccaatggcagccaagatttttgccatccttgccctccttgctctttcagcaagcgttgctaccgcgactattattccacaatgctcacaacaatacctctctccggtgacagccgcgagatttgaatacccaactatacaatcctacaggctacaagaggccatcgcagcaagcatcttacggtcgttagcattgaccgtccaacaaccatatgccctattgcaacaaccatccttaatgaatctatatctccaaagaatcgcagcacaacaactacaacaacagttgcttccaacaatcaatcaagtagttgcagcgaaccttgctgcttaccttcagcaacaacaatttcttccattcaatcaactagctggggtgaaccctgctgcttacttgcaggcacaacagctactaccattc

SEQ ID NO: 89475 - DNA, 443 bp, Zea mays
tagcaacatagaaagcacaatagtgtaccaacaatggcagctaaaatattttgcctccttatgctccttggtctttctgcaagtgctgctacggcgaccattttcccacaatgctcacaagctcctatagcttcccttcttcccccgtacctctcaccaacggtgtcttcggtatgtgaaaacccaattcttcaaccctacaggatccaacaggcaatcgcagctggcatcttacctttatcacccttgttcctccaacaatcatcagccctattacagcagttacctttggtgcatttattggcacaaaacatcagggcacaacaactacaacaacttgtgctagcaaaccttgctgcctactctcagcaacagcagtttcttccattcaaccaactagctgcattgaactctgcttcttatttgcaacaacaacaactacc

SEQ ID NO: 89476 - DNA, 447 bp, Zea mays
agaccattagctttatctactccagagcgcagaagaacccgatcgacaccatgagggtgttgctcgttgccctcgctctcctggctctcgctgcgagcgccacctccacgcatacaagcggcggctgcggctgccagccaccgccgccggttcatctaccgccgccggtgcatctgccacctccggttcacctgccacctccggtgcatctcccaccgccggtccacctgccgccgccggtccacctgccaccgccggtccatgtgccgccgccggttcatctgccgtcgccaccatgccactaccctactcaaccgccccggcctcagcctcatccccagccacacccatgcccgtgccaacagccgcatccaagcccgtgccagctgcagggaacctgcggcgttggcagcaccccgatcctgggccagtgcgtcgagtttctga

SEQ ID NO: 89477 - DNA, 405 bp, Zea mays
gcagtttcttccattcaaccatctggctgcattgaactctgctgcttatttgcgacaacaactaccattcagtcagctagctgctgcctacccccagcaatttcttccattcaaccaactggcagcattgaactctgctgcttatttacaacagcaacagctaccaccattcagccagctagctgatgtgagccctgttgccttcttgacacaacaacagttgttgccgttctacctgcacgctgcgcctaacgctggcaccctcttacaactgcaacaattgctgccattcaaccaacttgctttgacaaacccaacaacgttctaccaacaacccatcattggcggtgccctcttttagattgcttatgagttatagttcaataatgaagttttttggatgat

SEQ ID NO: 89478 - DNA, 438 bp, Zea mays
cggacgcgtgggttcgaggtgaaggccactgcgggcgacactcaccttggcggcgaggacttcgacaatcgcatggtgaaccacttcgtccaagagttcaagcgcaagaataagaaggacataagcggcaacccccgtgcactgcgccggctgcgcacggcgtgcgagcgcgccaagcgcacgctgtcatcgactgcccagacgaccattgagatcgactccctgttcgagggcatcgatttctactccacgatcaccagggctcgcttcgaggagctcaatatggacttgttccggaagtgcatggaacctgtggagaagtgcttgcgcgacgccaagatggacaagagcagcgtgcacgacgtcgtgctcgtcggtggctccacccgcattcccaaggtgcagcagctgctgcaggacttcttcaacggaaggaat

SEQ ID NO: 89479 - DNA, 447 bp, Zea mays
gtggaatccagtagcaacaatacagcaacaatggcgaccaagatattttccctccttatgctccttgctctttctacatgtgttgctaacgcgacaattttccctcaatgctcacaagctcctatagcttcccttcttcccccataccttccatcaattatagcttcaatatgtgaaaacccagctcttcaaccatataggcttcaacaagcaatcgcagcaagcaacatacctttatcgcccttgttgtttcaacaatcgccagccctatctttggtgcagtcattggtacaaaccatcagggcacaacagctgcagcaactcgtgctacctctgatcaaccaagtagctctggcaaacctttctccctactctcagcaacaacaatttcttccattcaaccaactgtctacactgaaccctgctgcttatttgcagcaacaacta

SEQ ID NO: 89480 - DNA, 445 bp, Zea mays
ggaattccgggtcgacctacgcgtccgcgcgtctcgaccgcgtgaagaacatgacaggcctggtggagatgtacggcaagaacgcgcgcctgagggagctggcgaacctcgtgatcgtcgccggtgaccacggcaaggagtccaaggacagggaggagcatgcggagttcaagaagatgtacagcctcatcgacgagtacaagttgaagggccatatccggtggatctcggcgcagatgaaccgcgtccgcaacggggagctgtaccgctacatttgcgataccaagggcgcattcgtgcagcctgcgttctacgaagcgttcggcctgactgtgatcgagtccatgacgtgcggtctgccaacgatcgcgacctgccatggtggccctgctgagatcatcgtggacggggtatctggcctgcacattgacccttaccacagcga

SEQ ID NO: 89481 - DNA, 410 bp, Zea mays
caacaacaatttctaccagcactgagccaactagctgtggtgaaccctgtcgcctacttgcaacagcagttgcttgcatccaacccacttgctctggcaaacatagttgcataccaacaacaacaacaattgcaacagtttctaccagcgctcagtcaactagccatggtgaaccctgccgcctacctacaacagcaacaactgatttcatctagccctctcgctgtggttaatgcacctacatacctgcaacaacagttgctgcaacagattgtaccagctctgactcagctagctgtggcaaaccctgctgcctacttgcaacagctgcttccattcaaccaactgactgtgtcgaactctgctgcgtacctacaacagcgacaacagttacttaatccactagcggt

SEQ ID NO: 89482 - DNA, 483 bp, Zea mays
gtaccggtccggaattcccgggctctttcagcaagtgttgctaccgcgactattattccacaatgctcacaacaatacctctctccagtgatagccgcgagatttgaatacccatctatacaatcctacaggctacaagaggccatcacagcaagcatcttacggtcgttagcattgaccgtccaacaaccatatgccctattgcaacaaccatccttagtgaatctgtatctccaaagaatcacagcacaacaactacaacaacggttgcttccaacaattaatcaagtagttgcagcgaaccttgctgcttaccttcagcaacaacaatttcttccattcaatcaactagctggggtgaaccctgctgcttacttgcaggcacaacagctactaccattcaaccaacttgtcgggagccctgctgccatcttattgcagcaacagttgctgccattccgtctacaagttgttgcaaacatt

SEQ ID NO: 89483 - DNA, 442 bp, Zea mays
cacaaaacatcagggcacaacaactacaacaacttgtgctagcaaaccttgctgcatactctcagcaacatcagtttcttccattcaaccaactggctgcattgaactctgctgcttatttgcaacaacaattaccattcagccagctagttgctgcctacccccagcaatttcttccattcaaccaactagcagcattgaactctgctgcttatttacagcagcaacaactactaccattcagccagctagctgatgtgagccctgctgccttcttgacacatcaacagttgttgccgttctacctgcacgctatgcctaacgctggcaccctcttacaactgcaacaattgctgccattcaaccaacttgctttgacaaactcaacagtgttctaccaacaacccatcattggtggtgccctcttttagattgcttatga

SEQ ID NO: 89484 - DNA, 395 bp, Zea mays
attgagaccaactagcaacatagaaagcacaatagtgtaccaacaatggcagccaaaatattttgcctccttatgctccttggtctttctgcaagtgctgctacggcgaccattttcccgcaatgctcgcaagctcctatagcttcccttcttcccccgtacctctcaccagcggtgtcttcggtatgtgaaaacccaattcttcaaccctacaggatccaacaggcaatcgcagctggcatcttacctttatcacccttgttcctccaacaatcatcagccctattacaacagttacctttggtgcatttattggcacaaaacatcagggcacaacaactacaacaacttgtgctagcaaaccttgctgcctactctcagcaacaacaagtttc

SEQ ID NO: 89485 - DNA, 266 bp, Zea mays
gctggtgtgagccctgctaccttcttgacacaaccacagttgttgccgttctaccagcacgctgcgcctaacgctggcaccctcttacaactgcaacaattgctgccattcaaccaacttgctttgacaaacccagcagcattctaccaacaacccatcattggtggtgccctcttttagatttcttatgagttatagttcaataataaagttttttgtctgatgtttgtggcttcccagaaataagaaagtacatttctagatta

SEQ ID NO: 89486 - DNA, 427 bp, Zea mays
gtggcacaaaacatcagggcacaacaactacaacaacttgtgctagcaaaccttgctgcatactctcagcaacatcagtttcttccattcaaccaactggctgcattgaactctgctgcttatttgcaacaacaattaccattcagccagctagttgctgcctacccccagcaatttcttacattcaaccaactagcagcattgaactctgctgcttatttacagcagcaacaactactaccattcagccagctagctgatgtgagccctgctgccttcttgacacaacaacagttgttgccgttctacctgcacgctatgcctaacgctggcaccctcttacaactgcaacaattgctgccattcaaccaacttgctttgacaaactcaacagtgttctaccaacaacccatcattggtggtgccc

SEQ ID NO: 89487 - DNA, 442 bp, Zea mays
aactagcaacatagaaagcacaatagtgttccaacaatggcagccaaaatattttgcctccttatgctccttggtctttctgcaagtgctgctacggcgaccattttcccgcaatgctcgcaagctcctatagcttcccttcttcccccgtacctctcaccagcggtgtcttcggtatgtgaaaacccaattcttcaaccctacaggatccaacaggcaatcgcagctggcatcttacctttatcacccttgttcctacaacaatcatcagccctattacaacagttacctttggtgcatttattggcacaaaacatcaaggcacaacaactacaacaacttgtgctagcaaaccttgctgcctactctcagcaacagcagattcttgcattcaaccaactaggttcattgaactctgcttcttaattgcaacaacaacaac

SEQ ID NO: 89488 - DNA, 450 bp, Zea mays
attgatacgaactagcatcatacatagtgaagtacactagcaacatcttagcaccaatggcagccaagatttttgccatccttgccctccttgctctttcagcaagcgttgctaccgcgactattattccacaatgctcacaacaatacctctctccggtgacagccgcgagatttgaatacccaactatacaatcctacaggctacaagaggccatcgcagcaagcatcttacggtcgttagcattgaccgtccaacaaccatatgccctattgcaacaaccatccttaatgaatctatatctccaaagaatcgcagcacaacaactacaacaacagttgcttccaacaatcaatcaaatagttgcagcgaaccttgctgcttacctccagcaacaacaatttcttgcattcaatcaactagctggcgtgaaccctgctgcttacttgc

SEQ ID NO: 89489 - DNA, 436 bp, Zea mays
catcaagcttcattgaaagtgtaatccattagctacaatagagcaacaatggcgaccaagatatttaccctgcttatgctcctgtgctctgtctacatgtgttgctaacgcgacaattttccctcaatgctcacaagctcctatagctttcatatttgccccataccttccatcaattatagctgcaatatgagaaaacccagctattcaaccatataggcttaaacaagcaatctcagcaagctacatacctttatcgtccttgttgtttcaacaatcgccagccctatctttgatgcagtcattggtacaaaccatcagggctcaacagctgctgcaactggtgctacctctgatcaaccaagtagctctggctaacctttctccctactcttagcaacaacaatttcttacattcaaccaactgtctacactg

SEQ ID NO: 89490 - DNA, 431 bp, Zea mays
caactagcaacatagaaagcacaatagtgtaccaacaatggcagccaaaatattttgcctccttatgctccttggtctttctgcaagtgctgctacggcgaccattttcccgcaatgctcgcaagctcctatagcttcccttcttcccccgtacctctcaccagcggtgtcttcggtatgtgaaaacccaattcttcaaccctacaggatccaacaggcaatcacagctggcatcttacctttatcacccttgttcctccaacaatcatcagccctattacatcagttacctttggtgcatttattggcacaaaacatcagggcacaacaactacaacaacttgtgctagcaaaccttgctgcctactctcagcaacagcagtttcttccattcaaccaactagctgcattgaactctgcttcttatttgc

SEQ ID NO: 89491 - DNA, 426 bp, Zea mays
ctcagacgactgggccgccgccgcttggtgctgaggctttcgttggtctcttcggcggcgacgagcacccaccagttctgtagaaatggctgatggtgaagaccttcaaccctttggtttgcaacattggcaccggattggccaaggctggttttgctggggacgatgcaccaagggcggttttccttagcattgttggccgtcctggccacactggtgtcatggtagggatgggacagaaggatgcatatgttgccaatgaggcacagtccaggaaaggtattctaacgctcaagtacccgattgagcacggtattgtgagcaactgggatgacatggagaaaatctggcatcatactttatacaacgagcttcgtgttgcaccagaggagcaccctgtgtcgctcactgaggctcctttgaacc

SEQ ID NO: 89492 - DNA, 441 bp, Zea mays
gtggaatacagtagcaaaaatagagcatcaatggcggccaagatattttccatccttatgctccttgctctttctgcatgtgttgctaacgcgaccatttttcctcaatactcacaagctcctatagctgcccttcttcccccataccttccatcaatgaccgctttagtatgtgaaaacccagcccttcaaccctacaggatccagcaagcaatcgcaacaagcaacttacctttatcacacctgttctttcaacaatcgccagccctatctttggtgcagtcattggtacaaaccatcagggcagaacagttgcagcaactcgtgctaccagtgatcagccaagtagctctggcaaacctttccccctactctcaacaactactaccattcagccagctagctgatgtgagccctgctgccttcttgacacaacaacag

SEQ ID NO: 89493 - DNA, 447 bp, Zea mays
aaaaatcagtatgtaacaccagaaaaggcttcggcaccctcagcaacactcgagtcagatccattacctctcgtatggggaaaacaacgagatcacccgttaagtgtcgaagagtggacatctttcttagatcgtgaaggtaggattatggattcaaaggcactgaggaaaaaggttttctatgggggagttgatcatgctttgagaaaagaggtctggaaattcttgttggggtatcatgaatatgattcaacatatgctgagagggaataccttgctgtcatgaaacgagcagaatatgaagtcataaaatctcagtggaagagtatctcagccacccaagctaaaagattcaccaagtttagggaaagaaaaggcctaattgacaaagatgtggtgagaacagataggtccattccctattatgaaggagatgacaatcagaat

SEQ ID NO: 89494 - DNA, 442 bp, Zea mays
agcaattagctcatcgactccagattggagaactcgacaccatgaaggtgctgatcgttgcccttgctctcctggcgctcgctgcgagcgccgcctccagtacaagcggcggctgtggctgccagacaccaccgtttcatctaccgcctccgttctatatgccgcctccgttctatctgccgccgcagcagcagccgcagccatggcaataccccactcaaccaccgcagctaagcccgtgccagcagttcggatcctgcggcgtcggcagcgtcggcagcccgttcctgggccagtgcgtcgagttcctgaggcaccagtgcagcccggcggcgacgccctacggctcgccacagtgccaggcgctgcagcagcagtgctgccaccagatcaggcaagtggagccgctgcaccggtaccaggcgacatacggtgtggtcct

SEQ ID NO: 89495 - DNA, 440 bp, Zea mays
ggaggaacaagggtgataaaggtaagatgccagctgtgattgcctgttggatcctgtagggttgaagaatcatcagccctattacatcagttacctttggtgcatttattggcacaaaacatcagggcacaacaactacaacaacttgtgctagcaaaccttgctgcctactctcagcaacagcagtttcttccattcaaccaactagctgcattgaactctgcttcttatttgcaacaacaacaactaccattcagccagctacctgctgcctacccccagcaatttcttccattcaaccaactggcagcattgaactctcctgcttatttacagcagcaacaactactaccattcagccagctagctggtgtgagccctgctaccttcttgatacaaccacagttgttgccgttctaccagcacgctgcgcctaacgc

SEQ ID NO: 89496 - DNA, 435 bp, Zea mays
gtcgctgccagcagtcagcaacagcagtttcttccattcaaccaactagctgcattgaactctgcttcttattcgcaacaacaacaactaccattcagccagctacctgttgcctacccccaacaatttcttccattcaaccaactggcagcattgaactctcctgcttatttacagcagcaacaactactaccattcagccagctagctggtgtgagccctgctaccttcttgacacaaccacagttgatgccgttctaccagcacgctgcgcctaacgctggcaccctcttacaactgcaacaattgctgccattcaaccaacttgctttgacaaacctagcagtgttctaccaacaacccatcattggtggtgccctcttttagatttcttatgagttatagttcaataataaagtttaacgtctgatgttt

SEQ ID NO: 89497 - DNA, 433 bp, Zea mays
gcaattagctcatcgactccagattggagaactcgacaccatgaaggtgctgatcgttgcccttgctctcctggcgctcgctgcgagcgccgcctccagtacaagcggcggctgtggctgccagacaccaccgtttcatctaccgcctccgttctatatgccgcctccgttctatctgccgccgcagcagcagccgcagccatggcaataccccactcaaccaccgcagctaagcccgtgccagcagttcggatcctgcggcgtcggcagcgtcggcagcccgttcctgggccagtgcgtcgagttcctgaggcaccagtgcagcccggcggcgacgccctacggctcgccacagtgccaggcgctgcagcagcagtgctgccaccagatcaggcaggtggagccgctgcaccggtaccaggcgacatacggt

SEQ ID NO: 89498 - DNA, 330 bp, Zea mays
caactagccatggtgaaccctgtcttcctacgtacaacaacatcaactgctttcatctagcccgctcgctgcgggcaatgcacctacatacctgctacaacaattgttgcaacacattgtaccatctctgactcaactagctgtggcaaaccctgtctcctacttgcaacagctgcttgcattcaaccaactgactttgtcgaagtctgctgcgtacttacaacagctacatcagtcacttaatccattgttagtggctataccactgattggctgaataccactgcgtcaactattgctgccatacaagcagttctctatgatgaattc

SEQ ID NO: 89499 - DNA, 427 bp, Zea mays
gaccaactagcaacatagaaagcacaatattgtaccaacaatggcagctaaaatattttgcctccttatgctccttggtctttctgcaagtgctgctacggcgaccattttcccacaatgctcacaagctcctatagcttcccttcttcccccgtacctctcaccaacggtgtcttcggtatgtgaaaacccaattcttcaaccctacaggatccaacaggcaatcgcagctggcatcttacctttatcacccttgttcctccaacaatcatcagccctattacagcaggtacctttggtgcatttattggcacaaaacatcagggcacaacaactacaacaacttgtgctagcaaaccttgctgcctactctcagcaacagcagtttcttccattcaaccaactagctgcattgaactctgcttct

SEQ ID NO: 89500 - DNA, 440 bp, Zea mays
cccacgcgtccgtgagcattcagaaacacaccaagcgaagcgcactagcaacaacctaacaacaatggctaccaagatattatccctccttgcgcttcttgcgctttttgcgagcgcaacaaatgcgtccattattccacaatgctcacttgctcctagttccattattccacagttcctcccaccagttacttcaatggccttcgaacacccagctgtgcaagcctataggctacaacaagcgattgcggcgagcgtcttacaacaaccaattgcccaattgcaacaacaatccttggcacatctaacaatacaaaccatcgcaacgcaacagcaacaacagttcctaccagcactgagccacctagccatggtgaaccctgtcgcctacttgcaacagcagctgcttgcatccaacccacttgctctagcaaacgtag

SEQ ID NO: 89501 - DNA, 420 bp, Zea mays
gcttccactcttcccccgtgaaacttttctcacgcgcacccattccacccaccacccaccttcctttcctctctctctgtctgactgtctccctccgtccctcgaagcttctctggtttcagacgcaaccccgcgggtcgcgggatcaaggagccagagagcgggacgcagcgagcgttccgccagagatcgagaccgtagctagggcttgaggcgccgggctgcggtggacgagatgtcgacgccggcgaggaagcggctgatgcgggacttcaggcgcctgcagcaggacccgtccgtcgggatcagcggcgcgccgcacgacaacaacatcatgctctggaacgccgtcatattcgggccggatgatacgccgtgggacggtggcacgttcaagcttaccttgcagtttacagaaga

SEQ ID NO: 89502 - DNA, 447 bp, Zea mays
atagaaagcacaatagtgtaccaacaatggcagccaaaatattttgcctccttatgctccttggtctttctgcaagtgctgctacggcgaccattttcccgcaatgctcgcaagctcctatagcttcccttcttcccccgtacctctcaccagcggtgtcttcggtatgtgaaaacccaattcttcaaccctacaggatccaacaggcaatcacagctggcatcttacctttatcacccttgttcctccaacaatcatcagccctattacatcagttacctttggtgcatttattggcacaaaacatcagggcacaacaactacaacaacttgtgctagcaaaccttgctgcctactctcagcaacagcagtttcttccattcaaccaactagctgcattgaactctgcttcttatttgcaacaacaacaactaccattcagccagc

SEQ ID NO: 89503 - DNA, 446 bp, Zea mays
cccacgcgtccggaactagcaacatacatagtgaagtacactagcaacatcttagcaccaatggcagccaagatttttgccatccttgccctccttgctctttcagcaagcgttgctaccgcgactattattccacaatgctcacaacaatacctctctccggtgacagccgcgagatttgaatacccaactatacaatcctacaggctacaagaggccatcgcagcaagcatcttacggtcgttagcattgaccgtccaacaaccatatgccctattgcaacaaccatccttaatgaatctatatctccaaagaatcgcagcacaacaactacaacaacagttgcttccaacaatcaatcaagtagttgcagcgaaccttgctgcttaccttcagcaacaacaatttcttccattcaatcaactagctggggtgaaccctgctgc

SEQ ID NO: 89504 - DNA, 445 bp, Zea mays
gtagcaacaatagagcaacaatggcgaccaagatattttccctccttatgctccttgctctttctacatgtgttgctaacgcgacaattttccctcaatgctcacaagctcctatagcttcccttcttcccccataccttccatcaattatagcttcaatatgtgaaaacccagctcttcaaccatataggcttcaacaagcaatcgcagcaagcaacatacctttatcgcccttgttgtttcaacaatcgccagccctatctttggtgcagtcattggtacaaaccatcagggcacaacagctgcagcaactcgtgctacctctgatcaaccaagtagctctggcaaacctttctccctactctcagcaacaacaatttcttccattcaaccaactgtctacactgaaccctgctgcttatttgcagcatcaactattaccatt

SEQ ID NO: 89505 - DNA, 431 bp, Zea mays
tgagcattcagaaacacacctagcgaagcgcactagcaacgacctaacaacaatggcttccaagacattatccctccttgcgcttcttgccctttttgtgagtgcaacaaatgcgttcattattccacaatgctcacttgctccgagtgccattattccacagttcctccctccagttacttcaatgggcttcgaacacccagctgtgcaagcctataggctacaacaagcgcttgcggcgagcgtcttagaacaaccaattgcccaattacaacaacaatccttggcacatctaaccatacaaaccatcgcaacgcagcagcaacaagcactgagccacctagccgtggtgaaccctatcgcctacttgcaacaacagctgcttgcattcaacccactagctttggcaaacgtaactgcataccaacaac

SEQ ID NO: 89506 - DNA, 434 bp, Zea mays
agaccattagctttatctactccagagcgcagaagaacccgatcgacaccatgagggtgttgctcgttgccctcgctctcctggctctcgctgcgagcgccacctccacgcatacaagcggcggctgcggctgccagccaccgccgccggttcatctaccgccgccggtgcatctgccacctccggttcacctgccacctccggtgcatctcccaccgccggtccacctgccgccgccggtccacctgccaccgccggtccatgtgccgccgccggttcatctgccgccgccaccatgccactaccctactcaaccgccccggcctcagcctcatccccagccacacccatgcccgtgccaacagccgcatccaagcccgtgccagctgcagggaacctgcggcgttggcagcaccccgatcctgggccagtgc

SEQ ID NO: 89507 - DNA, 433 bp, Zea mays
agaaagcacaatagtgtaccaacaatggcagccaaaatattttgcctccttatgctccttggtctttctgcaagtgctgctacggcgaccattttcccacaatgctcacaagctcctatagcttcccttcttcccccgtacctctcaccagcggtgtcttcggtatgtgaaaacccaattcttcaaccctataggatccaacaggcaatcgcagctggcatcttacctttatcacccttgttcctccaacaatcatcagccctattacagcagttacctttggtgcatttattggcacaaaacatcagggcacaacaactacaacaacttgtgctagcaaaccttgctgcctactctcagcaacaacagtttcttccattcaaccaactagctgcattgaactctgcttcttatttgcaacaacaacaactac

SEQ ID NO: 89508 - DNA, 444 bp, Zea mays
ctccttgctctttctacatgtgttgctaacgcgacaattttccctcaatgctcacaagctcctatagcttcccttcttcccccataccttccatcaattatagcttcagtatgtgaaaacccagctcttcaaccatataggcttcaacaagcaatcgcagcaagcaacatacctttatcgcccttgttgtttcaacaatcaccagccctatctttggtgcagtcattggtacaaaccatcagggcacaacagctgcagcaactcgtgctacctgtgatcaaccaagtagctctggcaaacctttctccctactctcagcaacaacaatttcttccattcaaccaactgtctacactgaaccctgctgcttatttgcagcaacaactattaccatttagccagctagctactgcctactctcagcaacaacaacttcttccattt

SEQ ID NO: 89509 - DNA, 438 bp, Zea mays
ccaactagcaacatagaaagcacaatagtgtaccaacaatggcagccaaaatattttgcctccttatgctccttggtctttctgcaagtgctgctacggcgaccattttcccgcaatgctcgcaagctcctatagcttcccttcttcccccgtacctctcaccagcggtgtcttcggtatgtgaaaacccaattcttcaaccctacaggatccaacaggcaatcgcagctggcatcttacctttatcacccttgttcctccaacaatcatcagccctattacaacagttacctttggtgcatttattggcacaaaacatcagggcacaacaactacaacaacttgtgctagcaaaccttgctgcctactctcagcaacagcagtttcttccattcaaccaactaagttcattgaactctgcttcttatttgcaacaac

SEQ ID NO: 89510 - DNA, 446 bp, Zea mays
ggcaatcacagctggcatcttacctttatcacccttgttcctccaacaatcatcagccctattacatcagttacctttggtgcatttattggcacaaaacatcagggcacaacaactacaacaacttgtgctagcaaaccttgctgcctactctcagcaacagcagtttcttccattcaaccaactagctgcattgaactctgcttcttatttgcaacaacaacaactaccattcagccagctacctgctgcctacccccagcaatttcttccattcaaccaactggcagcattgaactctcctgcttatttacagcagcaacaactactaccattcagccagctagctggtgtgagccctgctaccttcttgatacaaccacagttgttgccgttctaccagcacgctgcgcctaacgctggcaccctcttacaactgcaacaat

SEQ ID NO: 89511 - DNA, 437 bp, Zea mays
gcaatcacagctggcatcttacctttatcacccttgttcctccaacaatcatcagccctattacatcagttacctttggtgcatttattggcacaaaacatcagggcacaacaactacaacaacttgtgctagcaaaccttgctgcctactctcagcaacagcagtttcttccattcaaccaactagctgcattgaactctgcttcttatttgcaacaacaacaactaccattcagccagctacctgctgcctacccccagcaatttcttccattcaaccaactggcagcattgaactctcctgcttatttacagcagcaacaactactaccattcagccagctagctggtgtgagccctgctaccttcttgatacaaccacagttgttgccgttctaccagcacgctgcgcctaacgctggcaccctcttacaact

SEQ ID NO: 89512 - DNA, 468 bp, Zea mays
cggattcccgggtcgacccacgcgttcgattgaaccagcaagcacatagaagtttaaccattatcacaatagagcaacaatggcgaccaagatattttccctccttatgctccttgctctttctacatgtgttgctaacgcgacaattttccctcaatgctcacaagctcctatagcttcccttcttcccccataccttccatcaattatagcttcagtatgtgaaaacccagctcttcaaccatataggcttcaacaagcaatcgcagctagcaacatacctttatcgcccttgttgtttcaacaatcaccagccctatctttggtgcagtcattggtacaaaccatcagggcacaacagctgcagcaactcgtgctacctgtgatcaaccaagtagctctggcaaacctttctccctactctcagcaacaacaatttcttccattcaaccaactgtctacactgaa

SEQ ID NO: 89513 - DNA, 441 bp, Zea mays
cccgacgcgcaagccagtgccgcacccataccagatctccgcgacatatcagtcgttcgtccagctaactgcactgcactgcactgcacgcaatggccaccacggcgaccgaggcggccaaggctgcaccggcgcaggagcagcaggccaacggcaacggcaacggcgagcagaagacgcgccactccgaggtcggccacaagagcctgctcaagagcgacgacctgtaccagtacatcctggacacgagcgtgtacccgcgggagccggagagcatgaaggagctgcgcgagatcaccgccaagcacccatggaacctgatgaccacctccgccgacgagggccagttcctcaacatgctcatcaagctcatcggcgccaagaagaccatggagatcggcgtctacaccggctactcgctcctcgtcaccgcgctcgcac

SEQ ID NO: 89514 - DNA, 443 bp, Zea mays
attgagaccaacaagcaacatagaaagtggaatacagtagcaacaatagagcaacaatggcggccaagatattttccatccttatgctccttgctctttctgcatgtgttgctaacgcgaccatttttcctcaatactcacaagctcctatagctgcccttcttcccccataccttccatcaatgaccgcttcagtttgtgaaaacccagcccttcaaccctacaggctccaacaagcaatcgcaacaagcaacttacctttatcacccctgttctttcaacaatcgccagccctatctttggtgcagtcattggtacaaaccatcagggcacaacagctgcaacaactcgtgctaccagtgatcagccaagtagctctggcaaacctttctccctactctcagcaacaacaatttcttccattcaaccaactgtctacactg

SEQ ID NO: 89515 - DNA, 431 bp, Zea mays
attcagaaacacaccaagcgaagctacctagcaacgacttaacaacaatggctaccaagatattagccctccttgcgcttcttgccctttttgtgagcgcaacaaatgcgttcattattccacaatgctcacttgctcctagtgccattataccacagttcctccgaccagttacttcaatgggcttcgaacacctagctgtgcaagcctacaggctacaacaagcgcttgcggcgagcgtcttacaacaaccaattaaccaattgcaacaacaatccttggcacatctaaccatacaaaccatcgcatcacaacagcaacaacagttcctaccagcactgagccaactagatgtggtgaaccctgtcgcctacttgcaacagcaggtgcttgcatccaacccacttgctctggcaaacgtagctgcatac

SEQ ID NO: 89516 - DNA, 433 bp, Zea mays
cctggctctcgctgcgagcgccacctgcacgcatacaagcggcggctgcggctgccagccaccgccgccggttcatctaccgccgccggtgcatctgccacctccggttcacctgccacctccggtgcatctcccaccgccggtccacctgccgccgccggtccacctgccaccgtcggtccatgtgccgccgccggttcatctgccgccgccaccatgccactaccctactcaaccgccccggcctcagcctcatccccagccacacccatgcccgtgccaacagccgcatccaagcccgtgccagctgcagggaacctgcggcgttggcagcaccccgatcctgggccagtgcgtcgagtttctgaggcatcagtgcagcccgacggcgacgccctactgctcgcctcagtgccagtcgttgcggcagcag

SEQ ID NO: 89517 - DNA, 430 bp, Zea mays
gcaattagctcatcgactccagattggagaactcgacaccatgaaggtgctgatcgttgcccttgctctcctggcgctcgctgcgagcgccgcctccagtacaagcggcggctgtggctgccagacaccaccgtttcatctaccgcctccgttctatatgccgcctccgttctatctgccgccgcagcagcagccgcagccatggcaataccccactcaaccaccgcagctaagcccgtgccagcagttcggatcctgcggcgtcggcagcgtcggcagcccgttcctgggccagtgcgtcgagttcctgaggcaccagtgcagcccggcggcgacgccctacggctcgccacagtgccaggcgctgcagcagcagtgctgccaccagatcaggcaagtggagccgctgcaccggtaccaggcgacatac

SEQ ID NO: 89518 - DNA, 404 bp, Zea mays
gcaacatagaaagtagaatccattagcatcaatagagcaacaatggcgaccaagatattttccctccttatgctccttgctctttctacatgtgttgctaacgcgacaattttccctcaatgctcacaagctcctatagcttcccttcttcccccataccttccatcaattatagcttcagtatgtgaaaacccagctcttcaaccatataggcttcaacaagcaatcgcagcaagcaacatacctttatcgcccttgttgtttcaacaatcaccagccctatctttggtgcagtcattggtacaaaccatcagggcacaacagctgcagcaactcgtgctacctgtgatcaaccaagtagctctggcaaacctttctccctactctcagcaacaacaatttct

SEQ ID NO: 89519 - DNA, 414 bp, Zea mays
gtgaaaccccaagtgttcaaccctacaggatccaacaggcaatcgcatcaggcatcttaccattatcacccttgttcctccaacaactcgtagccctattacagcagttacctttggtacatttggcggcacaaaacatcagggctcatcaactactacaacttgtgctagcaaaccttgctgcatactctcagcaacatcagattatttcattcaaccaactggctgcattgaactctgatgcttatttgcaacatcaattaccattcagccagctagttgctgcctacgcacagcaatttactacattcaaccaactagcagcattgaactctgctgcttatttacagcagccacatctactaccattcagccagctagctgatgtgagccctgctgcctttttgacacaac

SEQ ID NO: 89520 - DNA, 275 bp, Zea mays
gtcggatacaagaggtccaagtcgaaccattacgagaccacgtcgcttgtgcagatcgagggggtgaacaccaaggaggacgtcgcgtggtacgctggtaagcgcatggcgtacatttacagggccaagaccaagagcagtgagacccgctacaggtgcatctggtgcaaggtcacccgaccgcacggtaactccggcgttgtccgatccaagttcaagtaaaacctgccggctgagtctatggggctctaggtcagagtgttcaagtaccctag

SEQ ID NO: 89521 - DNA, 385 bp, Zea mays
gtcttcctctgctgtggactatgcgaagtttggatttgattttatacaacagagcaaccaaattggcccactcttccataacattgccctgcaacaatacatcctactttgttctcaggtactagagggaggcttgagggataagcctggaaagaacagagatcactatcattcatgctactgcctcagtggcctcgcagttagccagtacagtgccatgactgatactggttcgtgcccattacctcagcatgtgcttggaccgtactctaatttgctggagccaatccattcactctacaatgttgtcctagataagtaccatacagcctatgagttcttctcagaagagtgatctaatgttagaacctaagaacaattggct

SEQ ID NO: 89522 - DNA, 373 bp, Zea mays
agaaagcacaatagtgtaccaacaatggcagccaaaatattttgcttccttatgctccttggtctttctgcaagtgttgctaccgcaaccattttcccacaatgctcacaagctcctatagcttcccttcttcccccatacctctcaccagcggtgtcttcaatgtgtgaaaccccaattgttcaaccctacaggatccaacaggcaatcgcaacaggcatcttaccattatcacccttgttcctccaacaaccgtcagccctattacagcagttacctttggtccatttggtggcacataacatcagggcacatcaactacaacaacttgtgctagcaaaccttgctgcatactctcagcaacatcagtttc

SEQ ID NO: 89523 - DNA, 433 bp, Zea mays
caacatagaaagtggaatacagtagcaacaatagagcaacaatggcggccaagatattttgcatccttatgctccttgctctttctgcatgtgttgctaacgcgaccatttttcctcaatactcacaagctcctatagctgcccttattaccccataccttccatcaatgaccgcttcagtttgtgaaaacccagcccttcaaccctacaggctccaacatgcaatcgcaacaagcaacttacctttatcacccctgttctttcaacaatcgccagccctatctttggtgcagtcattggtacataccatcagggcacatcagctgcaacaactcgtgctaccagtgatcagccaagtagctctggcaaacctttctccctactctcatcaacaacaatttcttccattcaaccaactgtctacactgaaccc

SEQ ID NO: 89524 - DNA, 413 bp, Zea mays
ggagatacccaaccctgagtactttgagcttgacaggcctgattttgatccaattgctgctattgggattgagatctggacaatgcaggatggcatcctgttcgacaatatctcgattactgatgatgagaaagttgccacctgcattctcgagaagacctggaagcccaagtatgatgttgagaaggaaaaggagaaggctgaggatgctgctgctggtgcagatggtctttctgacttccagaagaagatttttgacgttctgtacaagattgctgatattccgttcttggcaccctactataccaacattattgatgctatcgagaaggcagagaaacagcccaacatcactattggcattttggtctccgttgtcatcgtgttcgttaccgttctcttcaagctcctgt

SEQ ID NO: 89525 - DNA, 404 bp, Zea mays
  unsure (1)..(404): unsure at all n locations
cccacgcgtccgattgagaccaactagcatcatagaaagcacaatagtgtaccaacaatggcagccaaaatattttgcctccttatgctccttggtctttctgcaagtgctgctacggcgaccattttcccgcaatgctcgcaagctcctatagcttcccttcttcccccgtacctctcaccagcggtgtcttcggtatgtgaaaacccaattcttcaaccctacaggatccaacaggcaatcacagctggcatcttacctttatcacccttgttcctccaacaatcatcagccctattacatcagttacctttggtgcatttattggcacanaacatcanggcacaacaactacaacaacttgtgctagcaaaccttgctgcctactctcagcaacagcagtt

SEQ ID NO: 89526 - DNA, 389 bp, Zea mays
gcggctgccagccaccgccgccggttcatctaccgccgccggtgcatctgccacctccggttcacctgccacctccggtgcatctcccaccgccggtccacctgccgccgccggtccacctgccaccgccggtccatgtgccgccgccggttcatctgccgccgccaccatgccactaccctactcaaccgccccggcctcagcctcatccccagccacacccatgcccgtgccaacagccgcatccaagcccgtgccagctgcagggaacctgcagcgttggcagcaccccgatcctgggccagtgcgtcgagttcctgaagcatcaatgcagcccgacggcgacgccctactgctcgcctcagtgccagtcgttgcggcagcagtgt

SEQ ID NO: 89527 - DNA, 450 bp, Zea mays
ccaactagcaacatagaaagcacaatagtgtaccaacaatggcagccaaaatattttgcctccttatgctccttggtctttctgcaagtgctgctacggcgaccattttcccgcaatgctcgcaagctcctatagcttcccttcttcccccgtacctctcaccagcggtgtcttcggtatgtgaaaacccaattcttcaaccctacaggatccaacaggcaatcacagctggcatcttacctttatcacccttgttcctccaacaatcatcagccctattacatcagttacctttggtgcatttattggcacaaaacatcagggcacaacaactacaacaacttgtgctagcaaaccttgctgcctactctcagcaacagcagtttcttccattcaaccaactagctgcattgaactctgcttcttatttgcaacaacaacaactaccat

SEQ ID NO: 89528 - DNA, 445 bp, Zea mays
tctcttcccaactgccatgtaactcttttatcgccaattgcctccccttccaaaccgtgtcataatgaatttcacatttatatttttcttccaaccttttctgcagctccttcggacccatgttagactccttgaggagatggataacctttgatgctacccaagcgctagtaggggtcgtggttttccttctagcactggaagtacaagtgtgttcctcaattaagacaattacctgcaataataaacctcagttagtaacaacatagatggcaagggcacaacatagattagtaataacaagtctataccataacactattcccagattattgcctacgtcccacaatatgccaagggcaaccttctccattgcaattaccaataaatcgacttggatcatttttatatatttctagctcaaactcttcattgatcgcaaact

SEQ ID NO: 89529 - DNA, 313 bp, Zea mays
gttgcaaaccatggacatggctttggcgtctaaagcctcccctccgccatggaatgccaccgccgccgagcagccaattccaaagcgtgacaaagccgctgcaaatgattcaacatacctcaatcctcaagctcatgatagtgttcttggaatcattctgggaggtggtgctgggactagattgtaccccttgacaaagaagcgtgccaagcctgcagtgccattgggtgccaactatagactgattgatattcctgtcagcaattgtctcaacagcaacatatccaagatctatgtgctaacgcaatttaac

SEQ ID NO: 89530 - DNA, 470 bp, Zea mays
accggttcggaattcccgggaccaactagcaacatagaaagcacaatagtgtaccaacaatggcagccaaaatattttgcttccttatgctccttggtctttctgcaagtgttgctaccgcaaccattttcccacaatgctcacaagctcctatagcttcccttcttcccccatacctctcaccagcggtgtcttcaatgtgtgaaaccccaattgttcaaccctacaggatccaacaggcaatcgcaacaggcatcttaccattatcacccttgttcctccaacaaccgtcagccctattacagcagttacctttggtccatttggtggcacaaaacatcagggcacaacaactacaacaacttgtgctagcaaaccttgctgcatactctcagcaacatcagtttcttccattcaaccaactggctgcattgaactctgctgcttatttgcaacaacaattaccattc

SEQ ID NO: 89531 - DNA, 386 bp, Zea mays
gatcagcaaagcggcagtgcgtagagaggatcgtcgaacagaacagcatgaagatggtcatcgttctcgtcgtgtgcctggctctgtcagctgccagcgcctctgcaatgcagatgccctgcccctgcgcggggctgcagggcttgtacggcgctggcgccggcctgacgacgatgatgggcgccggcgggctgtacccctacgcggagtacctgaggcagccgcagtgcagcccgctggcggcggcgccctactacgccgggtgtggggcagacgagcgcccatgtacccagccgttccgcaacagtgctgccagcaacaaatgaagatgatggacgtgcagtccgtcgcgcatcagctgcagatgatgatgcagcttgagcgtg

SEQ ID NO: 89532 - DNA, 81 bp, Zea mays
gaattcccgggccgacctacgcgtccgccagctagcaacatatatagcacaatagtgtactaacaatggcagccaaaatat

SEQ ID NO: 89533 - DNA, 421 bp, Zea mays
cccacgcgtccgcccacgcgtccgcaatggctaccaagatattatccctccttgcgcttcttgcgctttttgcgagcgcaacaaatgcgttcattattccacaatgctcacttgctccaagttccattattacacagttcctcccaccagttacttcaatgggcttcgaacacccagctgtgcaagcctataggctacaacaagcaattgcggcgagcgtcttacaacaaccaatttcccagttgcaacaacaatccttggcacatctaacaatacaaaccatcgcaacgcaacagcaacaacaattcctaccagcacttgaccacctagccatggtgaacccttgcgtctacttgcaacagcagttgcttgcatcaaaaccacttgctcttggcaacgtagttgcaaaccaaccacaaca

SEQ ID NO: 89534 - DNA, 415 bp, Zea mays
ctggcaagactatcaccttggaggtggagagctctgacaccattgacaatgtgaaggccaagatccaggacaaggagggcattcccccagaccagcagcgtctgatctttgcgggcaagcagctggaggatggccgcactctcgcggactacaacatccagaaggagagcacccttcaccttgttctccgcctcaggggtggtatgcagatctttgtgaagaccctgactggaaaaaccataaccctggaggttgagagctcggacaccatcgacaatgtgaaggcgaagatccaggacaaggagggcatccccccggaccagcagcgtctgatcttcgccggcaaacagctggaggatggccgcaccctagcagactacaacatccaaaaggagagcaccctacatcttgtgct

SEQ ID NO: 89535 - DNA, 197 bp, Zea mays
attggtggtgccctcttttagattgcttatgagttatagttcaataatgatgggttgtggatgaagcacggggcattccagaaataagaaagtacatttctacataaataaaaaaaacaaaaaaaagacaaacacaaaaaaacataaacaacaaaaaacataaaacacaaaaaaaaaacaagcataaaaaagaccaa

SEQ ID NO: 89536 - DNA, 431 bp, Zea mays
gcaacatagaaagtggaatacagtagcaacaatagagcaacaatggcggccaagatattgtccatccttatgctccttgctctttctgcatgtgttgctaacgcgaccatttttcctcaatactcacaagctcctatagctgcccttcttcccccataccttccatcaatgaccgcttcagtttgtgaaaacccagcccttcaaccctacaggctccaacaagcaatcgcaacaagcaacttacctttatcacccctgttctttcaacaatcgccagccctatctttggtgcagtcattggtacaaaccatcagggcacaacagctgcaacaactcgtgctaccagtgatcagccaagtagctctggcaaacctttctccctactctcagcaacaacaaattcttccattcaaccactgtctacactgaac

SEQ ID NO: 89537 - DNA, 459 bp, Zea mays
caacaagcaacatagaaagtggaatccagtagcaacaacagagcaacaatggcgaccaagatattttccctccttatgctccttgctctttctgcatgtgttgctaacgcgacaattttccctcaatgctcacaagctcctatagcttcccttcttcccccataccttccatcaatgatagcttcagtatgtgaaaacccagctcttcagccctataggctccaacaagcaatcgcagcaagcaacatacctttatcacccttgttgtttcaacaatcgccagccctatctttggtgcagtcattggtacaaaccatcagggcacagcagctgcagcaactcgtgctacctgtgatcaaccaagtagctctggcaaacctttctccctactctcagcaacaaacaatttcttccattcaaccaactgtctacactgaaccctgctgctaatttgcagca

SEQ ID NO: 89538 - DNA, 431 bp, Zea mays
tcagaccattagctttatctactccagatcgcacaagaacccgatcgacaccatgagggtgttgctcgttgccctcgctctcctggctctcgctgcgagcgccacctccacgcatacaagcggcggctgcggctgccagccaccgccgccggttcatctaccgccgccggtgcatctgccacctccggttcacctgccacctgcggtgcatcttccaccgccggtccacctgcccccgccggtccacctgccaccgccggtccatgtgccgacgccggttcatctgccgacgccaccatgccactaccctactcaaccgccccggcctcagcctcatccccagccacacccatgcccgtgccaacagccgcatccaagcccaggccagctgcagggaacctgctgcgttggcagcacccctatcctgggcc

SEQ ID NO: 89539 - DNA, 445 bp, Zea mays
gtagaggataggaggagaaccaaggttgcgtctcgaaggttcttgcctcgttgggaagggatggcgtcggaggtggaggacgaggcggcgacgccgctgctcgccaacggtgcagccgacgtccgccggaggagggaccaggcgaaggcaattctgtccacgcaggccgtcaggatcgccaccaaggccgagcagcatgagcgcttcatctttaaggtcacacacttgctgggtgttcttggatttgggggattttgctatctcttgggtgccagaccacaggatgtgccatatgtgtactgcctgttctatgtcatatttgttccgctccgctggatttactaccgctacaagaaatggcattactaccttctggacttctgctactatgccaacacctttctccttgtaatgattctcttctacccagaggatgaaaaacttt

SEQ ID NO: 89540 - DNA, 442 bp, Zea mays
aagcaagcccctttatgtagctcttgcacagcgtaaagatgacagaaaggcaaagctacaggcacagttttcacaaatgcgtcctgttgcaatggcaccttcagtaggtcctcgcatgcccatgtttccacctagtgttcctggagttggtcagcagctgttttatggtcagccacctccagccttcatcaaccctcaggctggatttgctttccagcaacctatgatgcctggtatgaggcctggtggtccaatgccgaactttatgatgcctatggttcagcagggacagcaaccgcaacgtcctgctggtaggcgtgctgggtctggtggaatgcagcagcccatgccaatgggtagtcagcaacagatattccctagaggtggtcgtggctaccgctatgctactggacgtggaatgcctgatcctggcatgcataat

SEQ ID NO: 89541 - DNA, 441 bp, Zea mays
cccacgcgtccgcgaacacctagctgtgcaagcctacaagctacaacaagcgcttgcggcgagcgtcttacaacaaccaattaaccaattgcaacaacaatccttggcacatctaaccatacaaaccatcgcaacacaacagcaacaacagttcctaccagcactgagccaactagatgtggtgaaccctgtcgcctacttgcaacagcaggtgcttgcatccaacccacttgctctggcaaacgtagctgcataccaacaacaacaacaattgcaacagtttctgccagcgctcagtcaactagccatggtgaaccctgccgcctacctacaacagcaacaactgctttcatctagccctctcgttgtgggtaatgcacctacatacctgcaacaacaattgctgcaacagattgtaccagctctgactcagctagctgt

SEQ ID NO: 89542 - DNA, 346 bp, Zea mays
ggtcggcgaggagggcaggaagaccgaataccgagccgtgcgggggctcgggacgggaacgggacaggaccccaaaatctcagatccttgctgcccgcccgcccgtgcccgtcgacgcgtcgttcttgccggccgcgcctcacctacgacctcttctcctccatggggatcggatacgccacaggctgcgcgatggtgctgcgggtcttcggctacggctccctcatatggaaccccggcttcgacttcgacgacaaaatcctaggcttcattaagggctacaagcgcacctttaatctcgcttgcattggccacagaggcacaccggagcatccggcgaggacct

SEQ ID NO: 89543 - DNA, 445 bp, Zea mays
  unsure (1)..(445): unsure at all n locations
cagcaaagcggcagtgcgtagagaggatcgtcgaacagaacagcatgaagatggtcatcgttctcgtcgtgtgcctggctctgtcagctgccagcgcctctgcaatgcagatgccctgcccctgcgcggggctgcagggcttgtacggcgctggcgccggcctgacgacgatgatgggcgccggcgggctgtacccctacgcggagtacctgaggcagccgcagtgcagcccgctggcggcggcgccctactacgccgggtgtgggcagccgagcgccatgttccagccgctccggcaacagtgctgccagcagcagatgaggatgatggacgtgcagtccgtcgcgcagcagctgcagatgatgatgcagcttgagcgtgccgctgccgncagcagcagcctgtacgagccagctctgatgcagcagcagcagcagctgctggc

SEQ ID NO: 89544 - DNA, 439 bp, Zea mays
ccctactcaaccgccccggcctcagcctcatccccagccacacccatgcccgtgccaacagccgcatccaagcccgtgccagctgcagggaacctgcggcgttggcagcaccccgatcctgggccagtgcgtcgagtttctgaggcatcagtgcagcccgacggcgacgccctactgctcgcctcagtgccagtcgttgcggcagcagtgttgccagcagctcaggcaggtggagccgcagcaccggtaccaggcgatcttcggcttggtcctccagtccatcctgcagcagcagccgcaaagcggccaggtcgcggggctgttggcggcgcagatagcgcagcaactgacggcgatgtgcggcctgcagcagccgactccatgcccctacgctgctgccggcggtgtcccccactgaagaaactatgtgctgtagtat

SEQ ID NO: 89545 - DNA, 437 bp, Zea mays
  unsure (1)..(437): unsure at all n locations
gtggaggcgggtgatctgtcgtcgctgtcgccggtgccgtatccgttcgacactgcgctgaggatgcggaagggacccaccgtcgagaaggtggtggagaggaggcagcgccgcatgatcaagaacagggagtcggccgccaggtcgcgtgcgaggaagcaggcgtacataatggagctggaagctgaggtggcaaaactcaaggaccagaatgaggagttgcagaaaaagcaggttgaaatgctaaagaagcaaaaggatgaggtcctggagcgtatcaacagccaacatggaccaaaggcaaagaagctttgcctgcgccgcaccctgactggcccatggtagcctgctgaagcttgcacanaattgaccgaagtcaagatcgtcgggctagatgtgcccgtgtgtatatatcagatgaagtcaagagtactgag

SEQ ID NO: 89546 - DNA, 403 bp, Zea mays
gcagaccacagcaagaagcgtagtcgtctccggaaggaaaggcgcggagcaagatgtcgtggcaggcgtacgtcgatgagcacctgatgtgcgagatcgaaggacaacatctcagcgccgccgccatcgtcggtcacgacggcagcgcttgggcgcagtccgagagcttccccgagttaaagcctgaggaggttgctggtatcataaaggactttgatgaacctggtactcttgcaccaactggtcttttcgttggaggtacaaagtgcatggtgatccaaggtgaacctggagttgtcatccgaggaaagaagggcactgggggcattactatcaagaaaaccggcatgttcctgattataggtgtctacgactagccaatgactccaaggcaatgcaacat

SEQ ID NO: 89547 - DNA, 391 bp, Zea mays
gtcgtcgtcgtcgttttcgttcccatcgtcacaaggccagtaccaaacgtgccagcgcgacgtcgacaggcacaacgtctgcgccatggaggtgaggcacagcgtcgaacggctggaccaggccgacgcctacagccctggggctgggaggatcacacgcctcaccagccacaagttccccgtcctcaacctcgtacagatgagcgcggtgcgggtagacctgtaccaggacgccatcatgtcgccgttctggaacttcaacgcccacagcgccatgtacggcatcaggggcagtgcaagggtccaggtcgccagcgacaacgggaccacggtgttcgacgacgtgctccgtgcggggcagctgctcatcgtaccccagggctacctcgtc

SEQ ID NO: 89548 - DNA, 358 bp, Zea mays
agaccaacaagcaacatagaaagtggaatccagtagcaacaatagagcaacaatggcgaccaagatactttccctccttatgctccttgctctttctgcatgtgttgctaacgcgacaattttccctcaatgctcacaagctcctatagcttcccttcttcccccataccttccatcaatgatagcttcagtatgtgaaaacccagctcttcaaccctataggctccaacaagcaatcgcagcaagcaacatacctttatcacccttgtttcaacaatcgccagccctatctttggtgcagtcattggtacaaaccatcaaggcacagcagctgcagcaactcgtgctacctgtgatc

SEQ ID NO: 89549 - DNA, 454 bp, Zea mays
  unsure (1)..(454): unsure at all n locations
ctttatcgcccttgttgtttcaacaatcaccagccctatctttggtgcagtcattggtacaaaccatcagggcacaacagctgcagcaactcgtgctacctgtgatcaaccaagtagctctggcaaacctttctccctactctcagcaacaacaatttcttccattcaaccaactgtctacactgaaccctgctgcttatttgcagcaacaactattaccatttagccagctagctactgcctactctcagcaacaacaacttcttccatttaaccaattggccgcactgaaccccgctgcttatttgcagcagcaaatactactgccatttaacgagctagctgcagcaagtcgtgcttncttcttgacacagcaacagttgctgcctttctacaagcagtttgcggctaaccccgcaacccttttacaactaccacaattggtggcctttgg

SEQ ID NO: 89550 - DNA, 467 bp, Zea mays
ggaattcccgggattttgagcattcagaaacacacctagcgaagcgcactagcaacgacctaacaacaatggctaccaagatattatccctctttgcgcttcttgccctttttgtgagcgcaacaaatgcgttcattattccacaatgctcacttgctcctagtgccattattccacagttcctccctccagttacttcaatgggcttcgaacacccagctgtgcaagcctacaggctacaacaagcgcttgcggcgagcgtcttacaacaaccaattgcccaattacaacaacaatccttggcacatctaaccatacaaaccatcgcaacgcaacagcaacaacaatttctaccagcactgagccaactagctgtggtgaaccctgtcgcctacttgcaacagcagttgcttgcatccaacccacttgctctggcaaacatagttgcataccaacaacaacaacca

SEQ ID NO: 89551 - DNA, 363 bp, Zea mays
gccacctagccgtggtgaaccctgtcactctacttgcaacagcagctgcttgcatccaacccacttgctctggcgaacgtagctgcataccagcaacaacaacagctgcaacagtttatgccagtgctcagtcaactagccatggtgaaccctgccgtctacctacaactactttcatctagcccgctcgcggtgggcaatgcacctacgtacctacaacaacagttgctgcaacaaattgtaccagctctgactcagctagctgtggcaaaccctgctgcctacttacaacagttgcttccattcaaccaactggctgtgtcaaactctgctgcgtacctacaacagcgacaacagttactt

SEQ ID NO: 89552 - DNA, 448 bp, Zea mays
tgagcattcagaaacacacctagcgaagcgcactagcaacgacctaacaacaatggctaccaagatattatccctctttgcgcttcttgccctttttgtgagcgcaacaaatgcgttcattattccacaatgctcacttgctcctagtgccattattccacagttcctccctccagttacttcaatgggcttcgaacacccagctgtgcaagcctacaggctacaacaagcgcttgcggcgagcgtcttacaacaaccaattgcccaattacaacaacaatccttggcacatctaaccatacaaaccatcgcaacgcaacagcaacaacaatttctaccagcactgagccaactagctgtggtgaaccctgtcgcctacttgcaacagcagttgcttgcatccaacccacttgctctggcaaacatagttgcataccaacaacaacaa

SEQ ID NO: 89553 - DNA, 211 bp, Zea mays
ctgccattcaaccaacttgctttgacaatcctagcagtgttctaccaacaacccatcattggtggtgccctcttttagatttcttatgagttatagttcaataataaagttttttgtctgatgtttgtggctaaaaaaaaaaactaaagcaaaaaaaagaaaaataaaaagtaaaaaaacaaaaataataataaaaactacaagctacaaa

SEQ ID NO: 89554 - DNA, 165 bp, Zea mays
gaattaccggcccgacccacgcgttcgcagctagcaacatagaaagcacattagtttaccaacaatggcagccaaaatattgggcgggcttatgctccttggtcttgtgtgcatatgctgatacagcgaccattttcccacaatgctcgcaagctcctatagctt

SEQ ID NO: 89555 - DNA, 362 bp, Zea mays
cgatcgacaccatgagggtgttgctcgttgccctcgctctcctggctctcgctgcgagcgccacctccacgcatacaagcggcggctgcggctgccagccaccgccgtcggttcatctaccgccgccggtgcatctgccacctccggttcacctgccacctccggtgcatctcccacccccggtccacctgccgccgccggtccacctgccaccgccggtccatgtgccgccgccggttcatctgccgtcgccaccatgccactaccctactcaaccgacccggcctcagcctcatccccagccacacccatgcccgtgccaacagccggatccaagcccgtgccagcttcagggaacctgc

SEQ ID NO: 89556 - DNA, 325 bp, Zea mays
  unsure (1)..(325): unsure at all n locations
gccagtacccacagtcctacgagcagtctcacgcaagtgtcaagagacaaaacggtcgacatggctcgcacgcaatctgccgtagcggtcgccgtggtggccgcggtgctgctgctggcagcggcggcgacgacctcggaggccgccatcacctgcgggcaggtgagctccgccatcgcgccctgcctctcctacgcccgcggcacggggtccggcccctccgcgtcctgctgtagcggcgtcaggaacctcaagagcgccggcagcaccggcggtcgacaggcggcgccgntctgcaactgcctcaagaacgccgacaggggcg

SEQ ID NO: 89557 - DNA, 395 bp, Zea mays
gttgcaacaactgttgttgcagcaacagttgctgcaacaaattgtaccagctctgactgagctagctgtggcaaaccctgctgcctacttgcaacaactacttccattcaaccaactgactgtgtcgaactctgctgcgtacctacaacagcgacaacagttacttaatccactagcggtggctaacccattggtcgctgccttcctacagcagcaacaattgctgccatacaaccagttctctttgatgaaccctgccttgtcgtggcaagcaacccatcgttggtggtgccatcttttagattacatatgagatgtactcgataatggtgccctcatagcggcatgtgtttcctaaaaataatcaatatattgattgagatttatctcgataa

SEQ ID NO: 89558 - DNA, 292 bp, Zea mays
  unsure (1)..(292): unsure at all n locations
ggaattcccgggcgactccagattggagaactcgacaccatgaaggtgctgatcgttgcccttgctctcctggcgctcgctgcgagcgccgnctccagtacaagcggcggctgtggctgccagacaccaccgtttcatctaccggctacgttctatatgccgcctacgttctatctgccgtcgcagcagcagccgcagacatggcaataccccactcaaccaccgcagctaaacccgtgccagcagttcggatcctgcggcgtcggcagcgtcggcaagccgttcctggggc

SEQ ID NO: 89559 - DNA, 455 bp, Zea mays
agcaagcaacatacctttatcgcccttgttgtttcaacaatcaccagccctatctttggtgcagtcattggtacaaaccatcagggcacaacagctgcagcaactcgtgctacctgtgatcaaccaagtagctctggcaaacctttctccctactctcagcaacaacaatttcttccattcaaccaactgtctacactgaaccctgctgcttatttgcagcaacaactattaccatttagccagctagctactgcctactctcagcaacaacaacttcttccatttaaccaattggccgcactgaaccccgctgcttatttgcagcagcaaatactactgccatttagcgagctagctgcagcaagtcgtgcttccttcttgacacagcaacagttgctgcctttctacaagcagtttgcggctaaccccgcaaccctcttacaactacaacaat

SEQ ID NO: 89560 - DNA, 331 bp, Zea mays
  unsure (1)..(331): unsure at all n locations
gttcgcagccctaggatttgggggtctgtaggggtttgatcgtttctcgccgtgaatctgctntggtgtaaaccaacggatctcggatcgtagtcttcagaagatcccggattttgcgcttctgcataagaacaacaaatcaaaagcgtgatcagctcggtgccaacaaaacctcaacaaccaagtttcatgtctgatctcgacgtccagcttccatctgcctttgatccgtttgctgaggcaaatgctgaggactctggtgctggtcctgtaacgaaggattatgtgcatgtgcgcatncagcagcgcaacggcagaaagagtctgacta

SEQ ID NO: 89561 - DNA, 406 bp, Zea mays
ccgctcgctgtgggcaatgcacctacatacctgcaacaacaattgttgcaacagattgtaccagctctgactcaactagctgtggcaaaccctgttgcctacttgcaacagctgcttccattcaaccaactgactctgtcgaactctgctgcgtacctacaacagcgacaacagttacttaatccattggtagtggctaacccattggtcgccgccttcctacagcagcaacaattgctgccatacaaccagttctctttgatgaatcctgtcttgtcgaggcagcaacccatcgttggaggtgccatcttttagattacatatgagatgtactcgataatggtgccctcataccgacgtgtgtttcctagaaataatcaatatattgattgagatttatctcgat

SEQ ID NO: 89562 - DNA, 344 bp, Zea mays
gctgtaccggtctcggattcccgggccggcggaggtggcctggcggcgctgagggcggcgcgcgccgtgaaggagacgacggggatcgtcggccttgaggtggcgcccaacgcgcgggaggttctcatcgggctctacacgcgtacgctcaaggagatcgaggccgtccccaaagacgagggctaccgcaaggccgttgagtccttcaccaatcaccgcctccagatctgccaggaggaggacgactggaagcgcatcgaggaccgaatcggatgcgggcaagtcgaggagctcatcgaggaggccgaggacgagctcaagctcatcgccaaaatgattgaatg

SEQ ID NO: 89563 - DNA, 451 bp, Zea mays
atacctctcaccagcggtgtcttcaatgtgtgaaaccccaattgttcaaccctacaggatccaacaggcaatcgcaacaggcatcttaccattatcacccttgttcctccaacaaccgtcagccctattacagcagttacctttggtccatttggtggcacaaaacatcagggcacaacaactacaacaacttgtgctagcaaaccttgctgcatactctcagcaacatcagtttcttccattcaaccaactggctgcattgaactctgctgcttatttgcaacaacaattaccattcagccagctaggtgcttgctacccccaacaatttctttcattcaaccaactagccacattgaactcttgtgcttatttacagcagcaacaactactaccattcagccagctagctgatgtgagccctgctgccttcttgacacaacaacagttg

SEQ ID NO: 89564 - DNA, 447 bp, Zea mays
aattatctaactccaaaaaccatgaagctggtgcttgtggttcttgctttcattgctttagtatcaagtgtttcttgtacacagacaggcggctgcagctgtggtcaacaacaaagccatgagcagcaacatcatccacaacaacatcatccacaaaaacaacaacatcaaccaccaccacaacatcaccagcagcagcaacaccaacaacaacaagttcacatgcaaccacaaaaacatcagcaacaacaagaagttcatgttcaacaacaacaacaacaaccgcagcaccaacaacaacaacaacaacaacagcaccaacaacaacatcaatgtgaaggccaacaacaacatcaccaacaatcacaaggccatgtgcaacaacacgaacagagccatgagcaacaccaaagacagaaccatgagcaacaacattaacaacaattt

SEQ ID NO: 89565 - DNA, 426 bp, Zea mays
cgggcgtcgtccccccggacgcgcccgtgctcttcgcttcgagggcgcctagaccatcgctcaagtacctggagctgctcctcccagcggaaatcggctccgaccacatcgaactaccgaccgctgccgccgcggggcacatcgtcgcccaagtcaccggcaacaacatggtgtccgtggcatagggccaactccggtgcgccctcgtcctcacgcataacttcctgtcaggccaccactaggccgtcagcaaggagtgggacgtggtcgccttcgcgcacccagtgtgcaacctggaggaaaagacggtggacaccatctacactggatagatcgagcacctgctgcagcagtacctcaagccttcacctaccttgattggtgccaagctgtttgtggggctgcagcactgccatgagcagggca

SEQ ID NO: 89566 - DNA, 450 bp, Zea mays
ccaccaccgacgaccctgtcatccgccgcctcgctgaggaggacaaagccacggtgttcgcgactgatgccatcctcgccgctctcatgtgcacgccccgcagcatcctgtcgtgggacattgtcgtgcagcgtgtgggcaacaagctgttccttgacaagcgtgatggctcccagctcgacctgctcactgtcaatgagactgcgcaggagcagcttcctgagaacaaggatgacatcaactccgcacactcgctcgctgttgaggccacctacatcaaccagaacttctctcagcaggtgctgcaccgcaatggtgagaaggttaactttgacgagcccaacccatttgcttctgaaggtggagaggcttcatctggtggctaccgctaccgccgtttggagttgaatgatgagatcaggcttgttgctcgctgtgaagtgcatgctg

SEQ ID NO: 89567 - DNA, 289 bp, Zea mays
ctactaccatttagccagctagctgcagcaaaccgtgcttccttcttgacacagcaacagttgctgcctttctaccagcagtttgcggctaaccccgcaaccctcttacaactacaacaattgttgccctttgtccaacttgctttgacagaccgagcggcctcctaccaacaacacatcattggtggtgccctcttttagattgcttattagttgtaattcaataataaagttttttggatgatgtatgtggccaaccagaaataagaagttacatttccagatttta

SEQ ID NO: 89568 - DNA, 415 bp, Zea mays
caaccctacaggatccaacaggcaatcgcaacaggcatcttaccattatcacccttgttgctgcaacaaccgtcagccctattacagcagttacctttggtccatttggtggcacaaaacatcagggcacaacaactacaacaacttgtgctagcaaaccttgctgcatactctcagcaacatcagtttcttccattcaaccaactggctgcattgaactctgctgcttatttgcaacaacaattaccattcagccagctagttgctgcctacccccagcaatttcttccattcaaccaactagcagcattgaactctgctgcttatttacagcagcaacaactactaccattcaacccagtagcttatgtgagccctggtggctttttgacacaacaacaggtggtggcggtct

SEQ ID NO: 89569 - DNA, 454 bp, Zea mays
caaaaacacaccaagcgaagcgcactagcaacgacctaacaccaatggctaccaagatattagccctccttgcgcttcttgcccttttagtgagcgcaacaaatgcgttcattattccacagtgctcacttgctcctagtgccagtattccacagttcctcccaccagttacttcaatgggcttcgaacatccagccgtgcaagcctacaggctacaactagcgcttgcggcgagcgccttacaacaaccaattgcccaattgcaacaacaatccttggcacatctaaccctacaaaccattgcaacgcaacaacaacaacaacagtttctgccatcactgagccacctagccgtggtgaaccctgtcacctacttgcaacagcagctgcttgcatccaacccacttgctctggcgaacgtagctgcataccagcaacaacaacagctgcaaca

SEQ ID NO: 89570 - DNA, 451 bp, Zea mays
  unsure (1)..(451): unsure at all n locations
cccttgttcttccaccacccgcaagccttataccagcagtaaccttgggtccattggggggcccaaaccatcagggcccaccactacaacaacttgtgctagcanaccttgctgcatactctcagcaacatcagtttcttccattcaaccaactggctgcattgaactctgctgcttatttgcaacaacaattaccattcagccagctagttgctgcctacccccagcaatttcttccattcaaccaactagcagcattgaactctgctgcttatttacagcagcaacaactactaccattcagccagctagctgatgtgagccctgctgccttcttgacacaacaacagttgttgccgttctacctgcacgctatgcctaacgctggcaccctcttacaactgcaacaattgctgccattcaaccaacttgctttgacaaacccaacagt

SEQ ID NO: 89571 - DNA, 485 bp, Zea mays
accggtttggaattcccgggattgagaccaacaagcaacatagaaagtggaatacagtagcaaaaatagagcaacaatggcggccaagatattttccatccttatgctccttgctctttctgcatgtgttgctaacgcgaccatttttcctcaatactcacaagctcctatagctgcccttcttcccccataccttccatcaatgaccgctttagtatgtgaaaacccagcccttcaaccctacaggatccagcaagcaatcgcaacaagcaacttacctttatcacacctgttctttcaacaatcgccagccctatctttggtgcagtcattggtacaaaccatcagggcagaacagttgcagcaactcgtgctaccagtgatcagccaagtagctctggcaaacctttccccctactctcagcaacaacaatttcttccattcaaccaactgtctatactgaaccctgctgcttatttgcagc

SEQ ID NO: 89572 - DNA, 420 bp, Zea mays
  unsure (1)..(420): unsure at all n locations
atggagaaccctccgagcatcctagtgactcccatggctccggccatgtcggcgcagttcacaagaatcaccttcagcaacctgtttgtccgtcgggctggcccaggcagcacggagctgaccgtggagggaaggccatccgaccagctgggcaggagaaacctcactgacagccccgtatttgacggccgtggccctgacgccagcctcgtggctcgcgtacagggagtcgctacccagatgggcgacgtgcgccagttgtacaccgtcgtgttccaggagaggccgctcaagggctccacgctcgtcnaccgaagcgcgatgacggaagggtcagacgagtgggcgatctacggcggaactggaatgttcgcgatggcgagaggcgtcattaggagaacgtttcttgccgacacgagc

SEQ ID NO: 89573 - DNA, 368 bp, Zea mays
aacagattgtaccagctctgactcaactagctgtggcaaaccctgttgcctacttgcaacagctgcttccattcaaccaactgactctgtcgaactctgctgcgtacctacaacagcgacaacagttacttaatccattggtagtggctaacccattggtcgccgccttcctacagcagcaacaattgctgccatacaaccagttctctttgatgaatcctgtcttgtcgaggcagcaacccatcgttggaggtgccatcttttagattacatatgagatgtactcgataatggtgccctcataccgacgtgtgtttcctagaaataatcaatatattgattgagatttatctcgatatatttctgaa

SEQ ID NO: 89574 - DNA, 450 bp, Zea mays
agaaagcacaatagtgtaccaacaatggcagccaaaatattttgcttccttatgctccttggtctttctgcaagtgttgctaccgcaaccattttcccacaatgctcacaagctcctatagcttcccttcttcccccatacctctcaccagcggtgtcttcaatgtgtgaaaccccaattgttcaaccctacaggatccaacaggcaatcgcaacaggcatcttaccattatcacccttgttcctccaacaaccgtcagccctattacagcagttacctttggtccatttggtggcacaaaacatcagggcacaacaactacaacaacttgtgctagcaaaccttgctgcatactctcagcaacatcagtttcttccattcaaccaactggctgcattgaactctgctgcttatttgcaacaacaattaccattcaaccagctagttgct

SEQ ID NO: 89575 - DNA, 450 bp, Zea mays
  unsure (1)..(450): unsure at all n locations
cccacgcgtccggagaccaacaagcaacatagaaagtggaatacagtagcaacaatagagcaacaatggcggccaagatattttccatccttatgctccttgctctttctgcatgtgttgctaacgcgaccatttttcctcaatactcacaagctcctatagctgcccttcttcccccataccttccatcaatgaccgcttcagtttgtgaaaacccagcccttcaaccctacaggctccaacaagcaatcgcaacaagcaacttacctttatcacccctgttctttcaacaatcgccagccctatctntggtgcagtcattggtacaaaccatcagggcacaacagctgcaacaactcgtgctaccagtgatcagccaagtagctctggcaaacctttctccctactctcaagcacaacaatttcttccattcaaccaactgtctacac

SEQ ID NO: 89576 - DNA, 438 bp, Zea mays
ttctgcaagtgctgctacggcgaccattttcccgcaatgctcacaagctcctatagctgcccttcttcccccgtacctctcaccagcggtgtcttcggtatgtgaaaacccaattcttcaaccctacaggatccaacaggcaatcgcagctggcatcttacctttatcacccttgttcctccaacaatcatcagccctattacagcagttacctttggtgcatttattggcacaaaacatcagggcacaacaactacaacaacttgtgctagcaaaccttgctgcctactctcagcaacagcagtttcttccattcaaccaactagctgcattgaactctgcttcttatttgcaacaacaacaactaccattcagccagctacctgttgcctacccccaacaatttcttccattcaaccaactggcagcattgaactc

SEQ ID NO: 89577 - DNA, 111 bp, Zea mays
gtaccatcattggcggtgccctcttttagattgcttatgagttatagttcaataatgaagttttttggatgatgtttgtggcttcccagaaataagaaagtacatttctaa

SEQ ID NO: 89578 - DNA, 444 bp, Zea mays
  unsure (1)..(444): unsure at all n locations
ncagtgccggacaaatctgctcccgtttacataacggtcggtgatggaggcaaccaggagggacttgcttcaaggttttataacccccagccggattactcagcgttcagggaggccagctatggtcactcagttttgcagctgaaaaacaggacccatgctatctaccagtggaatagaaacgatgatgggaatcctgttccagcagacaccgtgatgttccataaccagtattggacgagcagcacgcgccgcaggaggctgaagaagaaccatctccatctcgaggaccttgaggatttgatctccctattatagaaaaccgggttcgcaggacgcatgaactgtgtgtgggggaataatcgcaggttagcactgttgctagtgtgcccgcctctcttggaatggaagcagcagagccagctatcagactggcagtgacca

SEQ ID NO: 89579 - DNA, 349 bp, Zea mays
attcagaaacacaccaagcgaagcacattagcaaccacctaacaacaatggctaccaaggatttatcccttcctgggcttcttgggctttttgccagcgcaacaaatgcgttcattattccacaatgctcacttgctccaagttccattattacacagttccttccaccagttacttcaatgggcttcgaacacccagctgtgcaagcctataggctacaacaagcaattgccgcgagcgtcttacaacaaccaatttcccagttgcaacaacaatccttggcacatctaacaatacaaaccatcgcaacgcaacagcaacaacaattcctaccagcactgagccacct

SEQ ID NO: 89580 - DNA, 457 bp, Zea mays
cagcattcaaaaacacaccaagcgaagcgcactagcaacgacctaacaccaatggctaccaagatattagccctccttgcgcttcttgcccttttagtgagcgcaacaaatgcgttcattattccacagtgctcacttgctcctagtgccattattccacagttcctcccaccagttacttcaatgggcttcgaacatccagccgtgcaagcctacaggctacaactagcgcttgcggcgagcgccttacaacaaccaattgcccaattgcaacaacaatccttggcacatctaaccctacaaaccattgcaacgcaacaacaacaacaacaacagtttctgccatcactgagccacctagccgtggtgaaccctgtcacctacttgcaacagcagctgcttgcatccaacccacttgctctggcgaacgtagctgcataccagcaacaacaacagc

SEQ ID NO: 89581 - DNA, 434 bp, Zea mays
caaaccttgctgcctactctcagcaacaacagtttcttccattcaaccaactagctgcattgaactctgcttcttatttgcaacaacaacaactaccattcagccagctatctgctgcctacccccagcaatttcttccattcaaccaactgacagctttgaactctcctgcttatttacagcagcaacaactactaccattcagccagctagctggtgtgagccctgctaccttcttgacacaaccacaattgttgccgttctaccagcacgctgcgcctaacgctggcaccctcttacaactgcaacaattgctgccattcaaccaacttgctttgacaaacccaacagcattctaccaacaacccatcattggtggtgccctcttttagatttcttatgagttatagttcaataataaaagtttttggctg

SEQ ID NO: 89582 - DNA, 453 bp, Zea mays
caactagcaacatagaaagcacaatagtgtaccaacaatggcagccaaaatattttgcttccttatgctccttggtctttctgcaagtgctgctaccgcaaccattttcccacaatgctcacaagctcctatagcttcctttcttcccccatacctctcaccagcggtgtcttcagtatgtgaaaacccaattcttcaaccctacaggatccaacaggcaatcgcagcaggcatcttacctttatcacccttgttcctccaacaaccgtcagccctattacagcagttacctttggtgcatttgttggcacaaaacatcaaggcacaacaactacaacaacttgtgctaggaaaccttgctgcctactctcagcaacagcagtttcttccattcaaccaactggctgcattgaactctgctgcttatttgcaacaacaactaccattcagtca

SEQ ID NO: 89583 - DNA, 259 bp, Zea mays
gtcgtcgtctagcagcagccaccgccgcctcatcctcgcagccgccgtcctgctctccgtgctcgcggctgccagcgccagcgccgggacctcctgcgtgccggggtgggccatcccgcacaacccgctcccgagctgccgctggtacgtgaccagccggacctgcggcatcgggccgcgccttccgtggccggagctgaagaggagatgctgccgggagctggcggacatcccggcgtactggcggtgcacggcgctg

SEQ ID NO: 89584 - DNA, 444 bp, Zea mays
gaaaattgcagacaaggaatcagagtgcgatatcagtatcctgaatatacaggttggccttatccgtaaagcatggaagcatccatctgctgacagccttttagttgaggagatagatttgggagatggtaatgtgcgtcaagttgttagtggtcttgcaaagtattgcagcccagatgatcttactaatcggcatgttgtcttgatcacgaatgtgaagcctggaaagctgcgagatgtaatgtctgctggattggtcctttgtgcttcaactgaagatcatgctgctgtggagcctttgattcctccagaaggagccaagattggagaacgcatttcatttgctgggtttgatgggaagcctgaagatgttctaaatccaaagaaaaagcagctggacaagattaccccgcatcttcgtaccgacgagaatggaattgcaat

SEQ ID NO: 89585 - DNA, 444 bp, Zea mays
ctgaaggacaagaagaagccgatcatcttctcgatggcgcgtctcgaccgcgtgaagaacatgacaggcctggtcgagatgtacggcaagaacgcgcgcctgagggagctggcgaacctcgtgatcgttgccggtgaccacggcaaggagtccaaggacagggaggagcaggcggagttcaagaagatgtacagcctcatcgacgagtacaagttgaagggccatatccggtggatctcggcgcagatgaaccgcgtccgcaacggggagctgtaccgctacatttgcgatacgaagggcgcattcgtgcagcctgcgttctacgaagcgttcggcctgactgtgatcgagtccatgacgtgcggtctgccaacgatcgcgacctgccatggtggccctgctgagatcatcgtggacggggtatctggcctgcacattgaccct

SEQ ID NO: 89586 - DNA, 454 bp, Zea mays
atgctcacttgctcctagtgccattattccacagttcctcccaccagttacttcaatgggcttcgaacacctagctgtgcaagccaacatgcaacaacaagcgcttgcggcgagcgtcttacaacaaccaattgcccaattgcaacaacaatccttgccacatctaacaatacaagccatcacaacgcaacagcaacaacagttcctaccagcactgagccacctagccatggtgaaccctgccgcctacttgcaagagcagctgcttgcatccaacccacttgctctggcgaacgtagttgcaaaccagcaacaacaacagctacaacagtttctgccaacgctcagtcaactagccatggtgaaccctgccgcctacgtacaacaacaacaactgctttcatctagcccgctcgctgtgggcaatgcacctacatacctgcaacaacaattg

SEQ ID NO: 89587 - DNA, 443 bp, Zea mays
tgacaagaagactagaaccgaacctgaccatgtcgctgatccgccgcagcaacgtgttcgatcccttctccctcgacctctgggacccctttgagggcttccccttcggctccggcaacagcagcagtctcttcccctcgttcccgcggaccagctcggagaccgcggccttcgctggcgcgcggatcgactggaaggagactccagaggcgcacgtgttcaaggccgacgtaccggggctgaagaaggaggaggtcaaggtggaggtcgaggacggcaacgtccttcagatcagcggcgagcgcaacaaggagcaagaggagaagacggacacctggcaccgtgtggagcggagcagcgggaggttcctgcgcaggttccgactggccgagaacgccaagacggagcagatcacgggcggcatggagaacggcgtgcttaca

SEQ ID NO: 89588 - DNA, 451 bp, Zea mays
gtgaccctgttttctctttctggttaacccgacttgctggtgaaggaaaaggtggtgaaattgggtttggtggaatggattctagtcactacaagggtgatcacccctatgtcccagtcactcagaagggatactggcagtttaatatgggtgatgtcctggttgatggaaagtccactgggttttgtgctggtggttgtgcagcaatagcagattctggaacttccttgcttgctggccccacagccattattactgaaatcaacgaaaagatcggtgctgctggtgtagtcagccaggagtgcaagactgttgtttctcaatacggacaacagatcctagatcttctgctagctgagacgcaaccagcgaagatctgttctcaggttggcctgtgcacttttgatggcactcacggtgttagcactggaattcgtagcgtaatggatga

SEQ ID NO: 89589 - DNA, 289 bp, Zea mays
cagaggtgggctggcttctcctcccccttttaccaagtcctcctcgggttagggttccttagggttttgtggaggggcgatggcggcggctgatgtggagtaccgttgcttcgtcggcgggcttgcctgggccaccagcaacgagtcgctggagaatgccttcgcctcctacggcgagatcctcgactccaaggtcatcaccgaccgggagacggggaggtctcgcggcttcggcttcgttaccttcgccttcgagaactccatgctcgacgctatcgagaacatgaac

SEQ ID NO: 89590 - DNA, 488 bp, Zea mays
accggtccggaattcccgggcagcaagcaacatagaaagtagaatccattagcaacaatagagcatcaatggcgaccaagatattttccctccttatgctccttgctctttctacatgtgttgctaacgcgacaattttccctcaatgctcacaagctcctatagcttcccttcttcccccataccttccatcaattatagcttcagtatgtgaaaacccagctcttcaaccatataggcttcaacaagcaatcgcagcaagcaacatacctttatcgcccttgttgtttcaacaatcaccagccctatctttggtgcagtcattggtacaaaccatcagggcacaacagctgcagcaactcgtgctacctgtgatcaaccaagtagctctggcaaacctttctccctactctcagcaacaacaatttcttccattcaaccaactgtctacactgaaccctgctgcttatttgcagcaacaactatta

SEQ ID NO: 89591 - DNA, 475 bp, Zea mays
  unsure (1)..(475): unsure at all n locations
gctctaccggttcggaattcccgggcttgctgcttacctccagcaacaacagtttcttccattcaatcaactagctggggtgaaccctgctatctacttgcaggcacaacagctactaccatttaaccaacttgtcgggagcccttatgccttcttactgcaacaacagcttctgccattccatctgcaagctgtggcaaacattgttgctttcttgagacaacaacatttgttgccattttacccacaagttgtgggaaacattaatgccttcttgcaacagcaacaattgctaccattctacccacagaatgtggcaaacattggtgccttcttacaacaacaacaattgctaccatttagccaacatgctttgacgaatcctaccacctttatgcaaccgcccaccattgggggtgccatcttctagattttttatgattaatactgtnataattaagttctcatgctgata

SEQ ID NO: 89592 - DNA, 451 bp, Zea mays
catctagcaacatagaaagcacaatagtgtaccaacaatggcagccaaaatattttgcctccttatgctccttggtctttctgcaagtgctgctacggcgaccattttcccgcaatgctcgcaagctcctatagcttcccttcttcccccgtacctctcaccagcggtgtcttcggtatgtgaaaacccaattcttcaaccctacaggatccaacaggcaatcacagctggcatcttacctttatcacccttgttcctacaacaatcatcagccctattacatcagttacctttggtgcatttattggcacaaaacatcagggcacaacaactacaacaacttgtgctagcaaaccttgctgcctactctcagcaacagcagtttcttccattcaaccaactagctgcattgaactctgcttcttatttgcaacaacgacaactaccattc

SEQ ID NO: 89593 - DNA, 427 bp, Zea mays
atggagaaccctccgagcatcctagtgactcccatggctccggccatgtcggcgcagttcacaagaatcaccttcagcaacctgtttgtccgtcgggctggcccaggcagcacggagctgaccgtggagggaaggccatccgaccagctgggcaggagaaacctcactgacagccccgtatttgacggccgtggccctgacgccagcctcgtggctcgcgtacagggagtcgctacccagatgggcgacgtgcgccagttgtacaccgtcgtgttccaggagaggccgctcaagggctccacgctcgtcaccgaaggcgcgatgacggaagggtcagacgagtgggcgatctacggcggaactggagtgttcgcgatggcgagaggcgtcataaggagaacgtttcttgccgacacgagcggcggga

SEQ ID NO: 89594 - DNA, 451 bp, Zea mays
gaccaactagcaacatagaaagctcaatagtgtaccaacaatggcagccaaaatatttggcctccttatgctccttggtctttctgcaagtgctgctacggcgaccattttcccgcaatgctcgcaagctcctatagcttcccttcttcccccgtacctctcaccagcggtgtcttcggtatgtgaaaacccaattcttcaaccctacaggatccaacaggcaatcacagctggcatcttacctttatcacccttgttcctccaacaatcatcagccctattacatcagttacctttggtgcatttattggcacaaaacatcagggcacaacaactacaacaacttgtgctagcaaaccttgctgcctactctcagcaacagcagtttcttccattcaaccaactagctgcattgaactctgcttcttatttgcaacaacaacaactacca

SEQ ID NO: 89595 - DNA, 430 bp, Zea mays
gagaccaactagcaacatagaaagcacaatagtgtaccaacaatggcagccaaaatattttgcctccttatgctccttggtctttctgcaagtgctgctacggcgaccattttcccgcaatgctcgcaagctcctatagcttcccttcttcccccgtacctctcaccagcggtgtcttcggtatgtgaaaacccaattcttcaaccctacaggatccaacaggcaatcacagctggcatcttacctttatcacccttgttcctccaacaatcatcagccctattacatcagttacctttggtgcatttattggcacaaaacatcagggcacaacaactacaacaacttgtgctagcaaaccttgctgcctactctcagcaacagcagtttcttccattcaaccaactagctgcattgaactctgcttctt

SEQ ID NO: 89596 - DNA, 450 bp, Zea mays
  unsure (1)..(450): unsure at all n locations
ccggagtgtagcttgccactctcaccaatcaagttttcatgtctgatctcgacattcagatcccaactgccttcgatcccttcgctgaggccaatgctggggactctggtgcggcagcagggtcaaaggactacgttcacgtgcgcatccagcagcgtaatggtcgcaagagcctgactaccgtccagggattgaagaaggagttcagctacagcaagatcctcaaagatctcaagaaagagttctgctgcaatggtacagtggtccaggacccagaacttggacaggtcattcagctccagggtgatcagaggaagaacgtctcgaatttcctcgtccaggccggcattgtgaagaaggagcacatcaagattcatggtttctgagcaaccgcncggtccatagcaaaccaaccctgcatgcanggccagcttattatatataatatct

SEQ ID NO: 89597 - DNA, 368 bp, Zea mays
aaccaattggccgcactgaaccccgctgcttatttgcagcagcaaatactactgccatttagcgagctagctgcagcaagtcgtgcttccttcttgacacagcaacagttgctgcctttctacaagcagtttgcggctaaccccgcaaccctcttacaactacaacaattgttgccctttgtccaacttgctttgacaaacccagcagcctcctaccaacaacacatcattggtggtgccctcttttagattgattattagttgtaattcaataataaagttttttggatgatgtatgtggccaaccagaaataagaagttacatttccagattctaatgtgaaaaaaaatagatgaatactattatc

SEQ ID NO: 89598 - DNA, 424 bp, Zea mays
gcaacatcaattatctaactccaaataccatgaagctggtgcttgggttcttgggtggttgctttagtatcaagtgtttcttgacacagacaggcggctgcagctgtggtcaacaacaaagccatgagcagcaacatcatccacaacaacatcatccacaaaaacaacagcatcaaccaccaccacaacatcaccagcagcagcaacaccaacaacaacaagttcacatgcaaccacaaaaacatcagcaacaacaagaagttcatgttcaacaactacaacaacaaccgcagcaccaacaacaacaacaacatcaacagcaccaacaacaacatcaatgtgaaggccaacaacaacatcaccaacaatcacaaggccatgtgcaacaacacgaacagagccatgagcaacaccaaggacagag

SEQ ID NO: 89599 - DNA, 461 bp, Zea mays
gtccggaattcccgggccaacaagcaacatagaaagtggaatccagtagcaacaatagagcaacaatggcgaccaagatattttccctggttatgctccttgctctttctacatgtgttgctaacgcgacaattttccctcaatgctcacaagctcctatagcttcccttcttcccccataccttccatcaattatagcttcaatatgtgaaaacccagctcttcaaccatataggcttcaacaagcaatcgcagcaagcaacatacctttatcgcccttgttgtttcaacaatcgccagccctatctttggtgcagtcattggtacaaaccatcagggcacaacagctgcagcaactcgtgctacctctgatcaaccaagtagctctggcaaacctttctccctactctcagcaacaacaatttcttccattcaaccaactgtctacactgaaccctgct

SEQ ID NO: 89600 - DNA, 491 bp, Zea mays
  unsure (1)..(491): unsure at all n locations
cccgggtgtgagaccaactagcnaacatangaaagcacccaatagtgtacccaacaattgtgcagccaaaatanttttgcttcgcttatgccctccttggtctttctgcaagntgttgcttaccgcaaccattnttcccacaatgggctcacaagctcctatagncttcccttcttccncccataccctctcacnncagcggtgtcttcaatggtgtgaaanccccaatnntgttcaaccctacagngatccaacaggcnaatcgcaaccaggcattcttacncattatcancccttgtntcctccaaccaaccgtcagnccctattacagcagntntacctttggtccatttnggtggcaccaaaacatcaagggcacaacaactacaacaacttgtgctagcanaaccttgctgcatacctctcagcaacatcagtttcttccattcaaccaactggctgcattgaactctgctgcttatttgcaacaa

SEQ ID NO: 89601 - DNA, 422 bp, Zea mays
gttcttgccactctacatgaagctggttttcatgttgatattgacgcgagtgacaggacaatacaaaagaaggtacgggaagctcaactggcccaattcaactacattcttgtcgtaggtgcacaagaggccgagactggaaatatatgcgttagggtaagagacaatgctgacctggtcacaacgagtgtagatggcttcatcacacgtttgagggacgaaatcgcagccttcaaatgattttgatgctgcataatttcctactactcgtttgtgatcttgacgagtttttagtgaccagcatcgagtttctcgggttactgttctttgtctgtatgaagctaaaaggttgtcttttatgttattaattacagatgcgaagttaaatactgccgctagtaaaaaaatatgcttgttgacta

SEQ ID NO: 89602 - DNA, 423 bp, Zea mays
  unsure (1)..(423): unsure at all n locations
ctcaacatgagcattttactttcagtcaatgacctactggcatgctgcggttgtatgtgcggcgatgggtgtgatggaggctatcctatagaggcatggcgctactttgttcaaaatggtgttgttacggatgagtgtgatccatacttcgacccggtcggttgcaagcatcctggatgcgaacctgcttatcctacaccaaagtgtgaaaagaaatgcaaggagcagaaccaagtttggcaggaaaagaagcatttcagcattgatgcgtacagaataaattcagatccacatgacataatggcagaggtctacaaaaatggtcctgtagaagttgctttcacagtttacgaggatttcgcacactacanatctggagtgtacaagcacatcaccggtggcattatgggtggccatgccgtc

SEQ ID NO: 89603 - DNA, 420 bp, Zea mays
tagcaacatagaaagcacaatagtgtaccaacaatggcagccaaaatattttgcctgcttatgctccttggtctttctgcaagtgctgctacggcgaccattttcccacaatgctcacaagctcctatagcttcccttcttcccccgtacctctcaccagcggtgtcttcggtatgtgaaaacccaattcttcaaccctataggatccaacaggcaatcgcagctggcatcttacctttatcacccttgttcctccaacaatcatcagccctattacagcagttacctttggtgcatttattggcacaaaacatcagggcacaacaactacaacaacttgtgctagcaaaccttgctgcctactctcagcaacaacagtttcttccattcaaccaactagctgcattgaactctgcttct

SEQ ID NO: 89604 - DNA, 406 bp, Zea mays
ctcatctcttacgaaggaagagttcagcttttggagattgcccaagtacccggtgagcatgtgaatgaatttaaatcaatcgagaagtttaagatattcaacactaacaacttgtgggtgaaccttaaagctatcaagagactcgtagaggctgaggcacttaagatggaaattattccaaaccccaaggaagttgatggtgtgaaagtccttcaactcgaaaccgcagctggtgcagctattcggttcttcgacaaagcgattggaattaatgttccccgctcaaggtttctcccagtgaaggctacatctgatctgttgcttgtgcagtctgatctttacaccttggttgatggctttgtcatccgcaacccatccagagcgaatccagctaacccttcaattg

SEQ ID NO: 89605 - DNA, 358 bp, Zea mays
cagcagttgcaacagttgttgccgattttcatccaacacgccatggagaaccctatgacggatttaaaacaccgacggcttcttacatctagcccgctcgctatgggcaatgcacctacatacctgcaacaacagttgttgcaacaacagttgctgcaacaaattgtaccagctcttactcagctagctgtggcaaaccctgctgcctacttgcaacaactacttctatttttcctactgactgtgtcgaactctgctgcgtacctacaacagcgacaacagttacttaatccactatcggaggctaacccattggtcgctgccttcctacagcttcaacaattgcttgccatacaac

SEQ ID NO: 89606 - DNA, 427 bp, Zea mays
gaccaactagcaacatagaaagcacaatagtgtaccaacaatggcagccaaagtatggtgcctccttatgctccttggtctttctgcaagtgctgctacggcgaccattttcccgcaatgctcgcaagctcctatagcttcccttcttcccccgtacctctcaccagcggtgtcttcggtatgtgaaaacccaattcttcaaccctacaggatccaacaggcaatcgcagctggcatcttacctttatcacccttgttcctccaacaatcatcagccctattacaacagttacctttggtgcatttattggcacataacatcaaggcacaacaactacaacaacttgtgctagcaaaccttgctgcctactctcagcaacagcagcttcttccattcaaccaactaggttcattgaactctgcttct

SEQ ID NO: 89607 - DNA, 431 bp, Zea mays
  unsure (1)..(431): unsure at all n locations
caactagcaacatagaaagcacaatattgtaccaataatggcagccaaaataggttgcctcattatgctccttggtctttctgcaagtgctgctacggcgagcattttcccgcaatgctcacaagctcctatagcttcccttcttcccccatacctctcaccagcgatgtcttcagtatgtgaaaatccaattcttctaccctacaggatccaacaggcaatcgcagcaggcatcttacctttatcacccttgttcctccaacaatcatcagccctattacagcagttacctttggtgcatttattggcacaaaacatcagggcacatcaactactacaactcgtgctagcaaaccttgctgcctactctcagcaacagcagttacctntggtgcatttgttggcacaaaacatcaaggcacaacaactac

SEQ ID NO: 89608 - DNA, 398 bp, Zea mays
aatggcagccaaaatattttgcttccttatgctccttggtctttctgcaagtgttgctaccgcaaccattttcccacaatgctcacaagctcctatagcttcccttcttcccccatacctctcaccagcggtgtcttcaatgtgtgaaaccccaattgttcaaccctacaggatccaacaggcaatcgcaacaggcatcttaccattatcacccttgttcctccaacaaccgtcagccctattacagcagttacctttggtccatttggtggcacaaaacatcagggcacaacaactacaacaacttgtgctagcaaaccttgctgcatactctcagcaacatcagtttcttccattcaaccaactggctgcattgaactctgctgcttatttgcaac

SEQ ID NO: 89609 - DNA, 427 bp, Zea mays
  unsure (1)..(427): unsure at all n locations
ctctccggtgacagccgcgggatttcaatacccaactatacaatcctacatggtacgggaggccatccaagcaagcatcttacggtcattagcattaaccctccaacaaccatatgctctattgcaacagccatccttagtgcatctgtatctccaaagaatcgcggcacaacaactacaacaacagttgctaccaacaatcaatcaagtagttgcagcgaaccttgctgcttacctccagcaacaacagtttcttccattcaatcaactagctggggtgaaccctgctatctacttgcaggcacaacagctactaccatttaaccaacttgtcgggagcccttatgccttcttactgcaacaacagcttctgccattccatctgcaagctgtggcaaacattgntgctttcttgagacaacaacat

SEQ ID NO: 89610 - DNA, 430 bp, Zea mays
aagcacaatagtgtaccaacaatggcagccaaaatattttgcctccttatgctccggggggtttctgcaagtgctgctacggcgaccattttcccacaatgctcacaagctcctatagcttcccttcttcccccgtacctctcaccagcggtgtcttcggtatgtgaaaacccaattcttcaaccctataggatccaacaggcaatcgcagctggcatcttacctttatcacccttgttcctccaacaatcatcagccctattacagcagttacctttggtgcatttattggcacaaaacatcagggcacaacaactacaacaacttgtgctagcaaaccttgctgcctactctcagcaacaacagtttcttccattcaaccaactagctgcattgaactctgcttcttatttgcaacaacaacaactac

SEQ ID NO: 89611 - DNA, 423 bp, Zea mays
agaccaactagcaacatagaaagcacaatagtgtaccaacaatggcagccaaaatagttggcctccttatgctccttggtctttctgcaagtgctgctacggcgaccattttcccgcaatgctcgcaagctcctatagcttcccttcttcccccgtacctctcaccagcggtgtcttcggtatgtgaaaacccaattcttcaaccctacaggatccaacaggcaatcacagctggcatcttacctttatcacccttgttcctccaacaatcatcagccctattacatcagttacctttggtgcatttattggcacaaaacatcagggcacaacaactacaacaacttgtgctagcaaaccttgctgcctactctcagcaacagcagtttcttccattcaaccaactagctgcattgaactctg

SEQ ID NO: 89612 - DNA, 424 bp, Zea mays
atgttcccgcaatgctcgcaagctcctatagcttcccttcttcccccgtaccgcgtcggcagcggtgtcttcggtatgtgaaaacccaattcttcaaccctacaggatccaacaggcaatcgcagctggcatcttacctttatcacccttgttcctccaacaatcatcagccctattacaacagttacctttggtgcatttattggcacaaaacatcagggcacaacaactacaacaacttgtgctagcaaaccttgctgcctactctcagcaacagcagtttcttccattcaaccaactaggttcattgaactctgcttcttatttgcaacaacaacaactaccattcagccagctacctgctgcctacccacagcaatttcttccattcaaccaactagcagcattgaactctcctgcttat

SEQ ID NO: 89613 - DNA, 421 bp, Zea mays
  unsure (1)..(421): unsure at all n locations
gcattcagaaacacacctagcgaagcgcactagcaacgacctaacaacaatggcttgcaagacattatccctccttgcgcttcttgccctttttgtgagtgcaacaaatgcgttcattattccacaatgctcacttgctccgagtgccattattccacagttcctccctccagttacttcaatgggcttcgaacacccagctgtgcaagcctataggctacaacaagcgcttgcggcgagcgtcttagaacaaccaattgcccaattacaacaacaatccttggcacatctaaccatacaaaccatcgcaacgcagcagcaacaagcactgaaccacctagccgtggtgaaccctatcgcctacttgcaacaacagctgcttgcatccaacccacttgctnntgcaaacgtagctgcatac

SEQ ID NO: 89614 - DNA, 425 bp, Zea mays
ggcggagggcacgcggccaccggcatgcccgccggccacggcacgcgtcccggcgcgacaggcgtagctggaaccggcggcgcgttcccccatgcagctgagcacaagacgggcggcggcatccttcgccgctccggcagcagctccagctccagcagctcgtcatctgaagacgacggcatgggtgggcgccggaagaagggcctgaaggagaagatcaaggagaaaatgccaggaggccacagggaaggccagggccaggcgacggccaccggtgcgtacggcgggacagggtacgtggctgggccgacgaccggaggcccccacgagaagaagggtgtggtggagaagatcaaggagaagatcccaggcggccacaaggactacgaccagcatcagcacaccaccgcggcaaccggtggcgg

SEQ ID NO: 89615 - DNA, 430 bp, Zea mays
caccaagcgaagcacattagcaacaacctaacaacaatggctaccaagatattgtcgctccttgcgcttcttgcgctttttgcgagcgcaacaaatgcgttcattattccacaatgctcacttgctccaagttccattattacacagttcctcccaccagttacttcaatgggcttcgaacacccagctgtgcaagcctataggctacaacaagcaattgcggcgagcgtcttacaacaaccaatttcccagttgcaacaacaatccttggcacatctaacaatacaaaccatcgcaacgcaacagcaacaacaattcctaccagcactgagccacctagccatggtgaaccctgccgcctacttgcaacagcagttgcttgcatcaaacccacttgctctggcaaacgtagttgcaaaccagccacaac

SEQ ID NO: 89616 - DNA, 426 bp, Zea mays
  unsure (1)..(426): unsure at all n locations
cttccaccttcagcgagtacaccgtcatgcatgtgggttgtgttgcaaagatgaacgctcangctccccttgataaagtttgcgtccttagctgtggtatttctaccggtcttggtgcatcaattaatgttgcaaaacctccgaagggttcgacagtggctgttttcggtttaggagccgttggtcttgccgctgcagaaggtgcaaggattgctggagcgtcaaggatcattggtgtcgacctgaaccccagcagattcgaagaagctaggaagttcggttgcactgaatttgtgaacccaaaagaccacaacaagccagtgcatgaggtacttgctgagatgaccaacggangggtcgaccgcagtgtggaatgcactggcaacattaatgctatgatccaagctttcgaatgtgttcatgatg

SEQ ID NO: 89617 - DNA, 429 bp, Zea mays
cccacgcgtccgagaccaactagcaacatagaaagcacaatagtgtaccaacaatggcagccaaaatattttgcctccttatgctccttggtctttctgcaagtgctgctacggcgaccattttcccgcaatgctcgcaagctcctatagcttcccttcttcccccgtacctctcaccagcggtgtcttcggtatgtgaaaacccaattcttcaaccctacaggatccaacaggcaatcacagctggcatcttacctttatcacccttgttcctccaacaatcatcagccctattacatcagttacctttggtgcatttattggcacaaaacatcagggcacaacaactacaacaacttgtgctagcaaaccttgctgcctactctcagcaacagcagtttcttccattcaaccaactagctgcattga

SEQ ID NO: 89618 - DNA, 63 bp, Zea mays
gttttttggatgatgtatgtggccaaccagaaataagaagttacatttccagattctaatgtg

SEQ ID NO: 89619 - DNA, 457 bp, Zea mays
ggtccggaattcccggtcgacgcacgcgtccgctcaaatactgatctcactgatccagtatggctatggcaaaggcaggcgcgccgagggtcgcggcggcccagctggtgactctcgggctatcactcctctgcgctgtcgccggcccggccgccgcgcagaactgcggctgccagccaaacgtatgctgcagcaagtttggctactgcggcacgaccgacgagtactgcggcgacgggtgccagtcgggcccgtgccgctcgggcggcggcggcagcagtggcggcggtggtgcgaacgtggctagcgtcgtcaccggctccttcttcaacggcatcaagagccaggccgggagcgggtgcgagggcaagaacttctacacccggagcgcgttcctgagcgccgtcaaggcgtacccaggcttcgcccatggcgggtcgcaggtgcagggcaagcg

SEQ ID NO: 89620 - DNA, 432 bp, Zea mays
gaccaactagcaacatagaaagcacaatagtgtaccaacaatggcagccaaaatatgtggggctccttatgctccttggtctttctgcaagtgctgctacggcgaccattttcccgcaatgctcgcaagctcctatagcttcccttcttcccccgtacctctcaccagcggtgtcttcggtatgtgaaaacccaattcttcaaccctacaggatccaacaggcaatcgcagctggcatcttacctttatcacccttgttcctccaacaatcatcagccctattacaacagttacctttggtgcatttattggcacaaaacatcagggcacaacaactacaacaacttgtgctagcaaaccttgctgcctactctcagcaacagcagtttcttccattcaaccaactaggttcattgaactctgcttcttatt

SEQ ID NO: 89621 - DNA, 428 bp, Zea mays
atgttgcctccttatgctccttggtctttctgcaagtgctgctacggcgaccatttgcccgcaatgctcgcaagctcctatagcttcccttcttcccccgtacctctcaccagcggtgtcttcggtatgtgaaaacccaattcttcaaccctacaggatccaacaggcaatcacagctggcatcttacctttatcacccttgttcctccaacaatcatcagccctattacatcagttacctttggtgcatttattggcacaaaacatcagggcacaacaactacaacaacttgtgctagcaaaccttgctgcctactctcagcaacagcagtttcttccattcaaccaactagctgcattgaactctgcttcttatttgcaacaacaacaactaccattcagccagctacctgctgcctacccccagc

SEQ ID NO: 89622 - DNA, 432 bp, Zea mays
  unsure (1)..(432): unsure at all n locations
gagcaaccaagtagctctggcaaacctttctccctactctcagcaacaacaatttcgtccattcaaccaactgtctacactgaaccctgctgcttatttgcagcaacaactattaccattcagccagctagctactgcctactctcagcaacaacaacttcttccatttaaccaattggccgcactgaaccccgctgcttatttgcagcagcaaatactactaccatttagccagctagctgcagcaaaccgtgcttccttcttgacacagcaacagttgctgcctttctaccagcagtttgcggctaaccccgcaaccctcttacaactacaacaattgttgccctttgtccaacttgctttgacagaccgagcggcctnctaccaacaacacatcattggtggtgccctcttttagattgcttattagtt

SEQ ID NO: 89623 - DNA, 376 bp, Zea mays
tactcgtctcggaattcccgggctttgagaggttactggaagaggaggctctgacgacaagcacactcgccgccggtggtggtggtgccgaggtgtggttgctcagccgccctaaatgttgaccggccgccggtgatggaagaggcggcaacgacgatggcgcatgcggcggtgagtagtgccgtagtaggtgaccccatggagtacaatgccatactgaggaggaagctagaggaggacctcgaggccttcaaaatgtggaggacggcctcctccagcgtagtgacctctgaacgttctcaaggctcaaacaatcacactggaggtcgcagcatcaggaataattcagcgcagaacaagctgatgaacggtgtaa

SEQ ID NO: 89624 - DNA, 429 bp, Zea mays
  unsure (1)..(429): unsure at all n locations
gaaaccctagttcgaacgcgccgccgtcaccgtcgtcgctcgcgctctccgcccggatcggagcgagagtaggggcgtgtcggcggtgaaagcgactgcgtcagccatggcggacgaggagcattcggagaggagagaggaggcctccgagcttgcccccttcgacccgaccaagaagaagaaaaagaagaaggttgtcatccaagaaccttctgatgaagtggacaagcttgcagagaagacagaaacactggcagtcgcagaacccgctgaacttaacttcactggaatgaagaagaaaaagaagaagccggtggatcttgattcaactcttgatgagcttggagatggggaggacactcaagatgatcaagctgtagaggaacaaggngaaggcattgtgctgggaagtgtccctacatacccttg

SEQ ID NO: 89625 - DNA, 422 bp, Zea mays
gcaacatagaaagcacaatagtgtaccaacaatggcagccaaaatattttgcttccgtatgctccttggtctttctgcaagtgttgctaccgcaaccattttcccacaatgctcacaagctcctatagcttcccttcttcccccatacctctcaccagcggtgtcttcaatgtgtgaaaccccaattgttcaaccctacaggatccaacaagcaatcgcaacaggcatcttaccattatcacccttgttcctgcaacaaccgtcagccctattacagcagttacctttggtccatttggtggcacaaaacatcaaggcacaacaactacaacaacttgggctagcaaaccctgctgcatactctcaacaacatcaagttcttccattcaaccaactggctgcattgaactctgcttgctatt

SEQ ID NO: 89626 - DNA, 425 bp, Zea mays
accggttcggaattcccgggtggacccacgcgtccgcccacgcgtccgatcaaagatgagaagcgcgtgctgaccggagaggagctgttcgtgaacaagacccacgggccgtacaagagcgcgaccgaggtgtgggaccacgaggactgagcggagctgccgtgccgccggatccctccactccacctgatgaaaccagaataaaggataccgacgcacctgtcagtcacctccctcccgtgccttgcgagagcggcagcctctcgcacagggaagatgctctgtgtctgagagcatgcagcctcgcacgagaaagatgcagaaggagtgtgtgtggcgcgcaatacactcctgtactgtacgatagactgaataataataaagaagaaaacgcagcagtttgccgttgcgttttcctttgtgct

SEQ ID NO: 89627 - DNA, 403 bp, Zea mays
attttcagcattcaaaaacacaccaagcgaagcgcactagcaacgacctaacagcagtggctaccaagatattagccctccttgcgcttcttgcccttttagtgagcgcaacaaatgcgttcattattccacagtgctcacttgctcctagtgccattattccacagttccttccaccagttacttcaatgggcttcgaacatgcagccgtgcaagcctacaggctacaactagcgcttgcggctagcgccttacaacaaccaattgtccaattgcaacaacaatccttgacacatctaaccctacaaaccattgcaacgcagcatcatcgacaacaacagtttctgccatcactgagccacctagccgtggtgaaccctgtcacctacttgcaacagcagct

SEQ ID NO: 89628 - DNA, 428 bp, Zea mays
caacaagcaacatagaaagtggaatccagtagcaacaacagagcaacaatggcgacgaagatattttccctccttatgctccttgctctttctgcatgtgttgctaacgcgacaattttccctcaatgctcacaagctcctatagcttcccttcttcccccataccttccatcaatgatagcttcagtatgtgaaaacccagctcttcagccctataggctccaacaagcaatcgcagcaagcaacatacctttatcacccttgttgtttcaacaatcgccagccctatctttggtgcagtcattggtacaaaccatcagggcacagcagctgcagcaactcgtgctacctgtgatcaaccaagtagctctggcaaacctttctccctactctcagcaacaacaatttcttccattcaaccaactgtc

SEQ ID NO: 89629 - DNA, 355 bp, Zea mays
tggacgtcagcctagcaattagctcatcgactccagattggagaactcgacaccatgaaggtgctgatcgttgcccttgctctcctggcgctcgctgcgagcgccgcctccagtacaagcggcggctgtggctgccagacaccaccgtttcatctaccgcctccgttctatatgccgcctccgttctatctgccgccgcagcagcagccgcagccatggcaataccccactcaaccaccgcagctaagcccgtgccagcagttcggatcctgcggcgtcggcagcgtcggcagcccgttcctgggccagtgcgtcgagttcctgaggcaccagtgcaagccggcggcgacgccct

SEQ ID NO: 89630 - DNA, 428 bp, Zea mays
  unsure (1)..(428): unsure at all n locations
gcggcgcgcggggtggcggtgctctcgcgatcctcgtgtcgattccagcggcgggggtgccattccctcccctggccgttgcccgcgcctcgcggtcgcgcaccggaaccggagccccgccgcgaatcgagggttgcctccgcctcgccccctcctcccgagactcctagcggcaggaattaggacgagggtaacaggcgacagaggctgcgaaggacgccccttcgtcaaatgcgccggcgaccgatccgtggaggagcagccggagcacgcaggaggtgaagtagcaaagttattttcagacgcgggccttgtatgtattgcaagtttgatatctccatataggagagaccgtgaatcttgccgtgcattgttatcggatggtagctntattgaagttttcttgaatatgtccttggaattatgtg

SEQ ID NO: 89631 - DNA, 422 bp, Zea mays
gcattcagaaacacaccaagcgaagcacattagcaacaacctaacaacaatggctagcaagatattatccctccttgcgcttcttgcgctttttgcgagcgcaacaaatgcgttcattattccacaatgctcacttgctccaagttccattattacacagttcctcccaccagttacttcaatgggcttcgaacacccagctgtgcaagcctataggctacaacaagcaattgcggcgagcgtcttacaacaaccaatttcccagttgcaacaacaatccttggcacatctaacaatacaaaccatcgcaacgcaacagcaacaacaattcctaccagcactgagccacctagccatggtgaaccctgccgtctacttgcaacagcagttgcttgcatcaaacccacttgctctggcaaacg

SEQ ID NO: 89632 - DNA, 423 bp, Zea mays
ctagcaacatagaaagcacaatagtgtaccaacaatggcagccaaaatattttgccgcctgatgctccttggtctttctgcaagtgctgctacggcgaccattttcccacaatgctcacaagctcctatagcttcccttcttcccccgtacctctcaccagcggtgtcttcggtatgtgaaaacccaattcttcaaccctataggatccaacaggcaatcgcagctggcatcttacctttatcacccttgttcctccaacaatcatcagccctattacagcagttacctttggtgcatttattggcacaaaacatcagggcacaacaactacaacaacttgtgctagcaaaccttgctgcctactctcagcaacaacagtttcttccattcaaccaactagctgcattgaactctgcttctta

SEQ ID NO: 89633 - DNA, 423 bp, Zea mays
caaagttgggcttttggacagctgtggtgtgcacggcagctctgtgacttgtgaggaggaagggaggaagaaagcggatccatggcgtcgaagcggatcctcaaggagctcaaggacctgcagaaggatcctcccacctcttgcagcgcaggccctgttgccgaagatatgttctactggcaggcgacgattatggggccatcagatagcccatacgctggtggcgtatttttggtcactattcactttccaccggactacccattcaaaccaccgaaggttgcattcaagacgaaggtttaccatccgaatatcaacagcaacgggagcatctgtcttgatatcttgaaggagcaatggagccctgcactgacagtttctaaggtcctcctctcaatttgttcccttctgacggacccaaac

SEQ ID NO: 89634 - DNA, 425 bp, Zea mays
attgagaccaactagcaacatataaagcacaatagtgtaccaacaatggcaggcaagatattttgcttccttatgctccttggtctttctgcaagtgttgctaccgcaaccattttcccacaattctcacaagctcctatagcttaccttctacccgcatacctatcaccaacggagacttcaatgtgtgaaacctcaactgttcaaccctacaggatccaacaggcattctcatcatgcatcttaccattatcacccttgttccttcaacaaccgtcagccctattacagcagttacctttggtccatttggtggcacaaaacatcatgctacaacgactacaacaacttgtgctagcaaaccatgctgcatactctcatcaacatcaatttcttccattcaaccaactggctgcattgaactc

SEQ ID NO: 89635 - DNA, 425 bp, Zea mays
gcaggcaggtcggcgaggagggcaggaagaccgaagaccgagccgtgcgggggctggggacgggaacgggacaggaccccaaaatctcagatccttcctgcccgcccgcccgtgcccgtcgacgcgtcgttcttgccggccgcgcctcacctccgccctctcctcctccagggggatcggatacgccacaggctgcgcgatggtgctgtgggtcttcggctacggctccctcatctggaaccccggcttcgacttcgacgacaaaatcctcggcttcatcaagggctacaagcgcacctataatctcgcttgcattgaccacagaggcacaccggagcatccggcgaggacctgcacgcttgaaaccgacgacgaggccatatgctggggaattgcatattgtgtcaggggtggtccagaaaaag

SEQ ID NO: 89636 - DNA, 390 bp, Zea mays
tgaccacggaaccacacccccagagaaaccattctacatattctcatatacactcatgagcacatagcgctaggcgccataccaaccatgagcgacctgttatcctacatttccaaggtcatgtgcatcaaggcaagatcggaggcaacacaagccggcgaggacagcggctgcccagcggacgagtgccgcgtctgcctgtccaagattcggctcggcgaggctacccgccgactgccgtgtcgccatgtgttccaccgggactgcgtcgaccggtggctctcgtcctgcaagcgaacctgtccgctgtgccgagtttatgtggccgatgggaacaagcagccggtggcggcaaagcacaccagccgtgaagcacatgcactcgccgac

SEQ ID NO: 89637 - DNA, 467 bp, Zea mays
accggtctcggaattcccgggtggacccacgcgtccgcggacgcgtgggttcaaaaacacaccatagcgaagcgcactagcaacgacctagcgcgatggctaccaagatattagccctccttgcgcttcttgcccttttagtgagcgcaacaaatgcgttcattattccacagtgctcacaagctcctatagcttcccttcttcccccatacctctcaccagcggtgtcttcaatgtgtgaaaacccaattgttcaaccctacaggatccaacaggcaatcgcaacaggcatcttaccattatcacccttgttcctccaacaaccgtcagccctattacagcagttacctttggtccatttggtggcacaaaacatcagggcacaacaactacaacaacttgtgctagcaaaccttgctgcatactctcagcaacatcagtttcttccattcaaccaactggctgca

SEQ ID NO: 89638 - DNA, 382 bp, Zea mays
gtcgtacgaggacaacatcaagaagatcatcgatttcagcacagtcgaatcgtgcggagtttgctactgccaccttgcgcgcccttcttccctgccgagcccacactgaccttcatctcttcaaggatggcatccgtcccctctgggaggatcctgcaaaccagaatggtggcacgtggataattagattcaaaaaggcagtttcaggtcgattttgggaggatacggtgctagtggtagtaggcgaccagcttgagtatagcgatgatgtctgtggtgtcgagcttagtgtccgttacaacgaagacattctgagcgtctggaaccggaacgcatcataccatcacgctgcgatggcatcgaaggatactatcaagaggca

SEQ ID NO: 89639 - DNA, 410 bp, Zea mays
  unsure (1)..(410): unsure at all n locations
gtttatgccagtgctcagtcaactagccatggtgaaccctgccgtctacctagaacggctttcatctagcccgctcgcggtgggcaatgcacctacgtacctacaacaacagttgctgcaacaaattgtaccagctctgactcagctagctgcggcaaaccctgctgcctacttacaacagttgctaccattcaaccaactggctgtgtcaaactctgctgcgtacctacaacagcgacaacagttacttaatccattgccagtggctaacccattggtcgctacctatctgcatcatcaacaacaattgctgccatacaaccaggtctntttgatgaaccctgccttagcacaacccatcgttggacgtgacatctactagatccatatgacatgtactcgacaatggt

SEQ ID NO: 89640 - DNA, 431 bp, Zea mays
agcaattagctcatcgactccagattggagaactcgacaccatgaaggtgctgatcgttgcccttgctctcctggcgctcgctgcgagcgccgcctccagtacaagcggcggctgtggctgccagacaccaccgtttcatctaccgcctccgttctatatgccgcctccgttctatctgccgccgcagcagcagccgcagccatggcaataccccactcaaccaccgcagctaagcccgtgccagcagttcggatcctgcggcgtcggcagcgtcggcagcccgttcctgggccagtgcgtcgagttcctgaggcaccagtgcagcccggcggcgacgccctacggctcgccacagtgccaggcgctgcagcagcagtgctgccaccagatcaggcaggtggagccgctgcaccggtaccaggcgacatac

SEQ ID NO: 89641 - DNA, 429 bp, Zea mays
gggcacagcagctgcagcaactcgtgctacctgtgatcaaccaagtagctctggcagacctttctccctactctcagcaacaacaatttcttccattcaaccaactgtctacactgaaccctgctgcttatttgcagcaacaactattaccattcagccagctagctactgcctactctcagcaacaacaacttcttccatttaaccaattggccgcactgaaccccgctgcttatttgcagcagcaaatactactaccatttagccagctagctgcagcaaaccgtgcttccttcttgacacagcaacagttgctgcctttctaccagcagtttgcggctaaccccgcaaccctcttacaactacaacaattgttgccctttgtccaacttgctttgacagaccgagcggtcttctaccaacaacaca

SEQ ID NO: 89642 - DNA, 433 bp, Zea mays
cacaatagtgtaccaacaatggcagccaaaatattttgcctccttatgctccttgggctttctgcaagtgctgctacggcgaccattttcccacaatgctcacaagctcctatagcttcccttcttcccccgtacctctcaccagcggtgtcttcggtatgtgaaaacccaattcttcaaccctataggatccaacaggcaatcgcagctggcatcttacctttatcacccttgttcctccaacaatcatcagccctattacagcagttacctttggtgcatttattggcacaaaacatcagggcacaacaactacaacaacttgtgctagcaaaccttgctgcctactctcagcaacaacagtttcttccattcaaccaactagctgcattgaactctgcttcttatttgcaacaacaacaactaccattca

SEQ ID NO: 89643 - DNA, 425 bp, Zea mays
cccacgcgtccgcccacgcgtccggtaacgccgtcgccgccctacggctcagagctgggtcgtcatcttctccggcaacgagcacccaaagatggtggtccttcaaccagatcggttcctgagcgagctgacgagcatgtacgagcggagcacggagaagggctccgtctgggtcaccatgaagcgatcaactctcaagggcaaggcacagttgcggaagatggagaataaggggcaggaggtagagcacaggtgcctcgtccgcgccttcaatggcaagaagaacatctccacctcggtttctctaaaggagtacacaaagtttcaagcttcatacgcaacagttcttaaggcccatatgcatgctctgaagaaaagggagaggaaagacaagaagaagactgcagatgctgagaaggcaattg

SEQ ID NO: 89644 - DNA, 398 bp, Zea mays
ctccccgcgtccgctagccctagccgccgtccgccgacttcatcgtcgccgtcgtcgagacctcttcacgcactggaaagcttaaagtccgacatcaatggcgaagcatcatcctgatctcatcatgtgccggaagcagcctggcatcgcgattggccgcctttgcgagaaatgtgatggcaagtgtgttgtctgcgactcgtacgtgcgcccatgtacgcttgtccgggtctgcgacgagtgcaattatggttccttccagggaaggtgtgtgatctgtggaggagtcggcatctcagacgcttactactgcaaggagtgcacccagcaggagaaggaccgggacggttgccccaagatcgtgaatctccgaagcgccaagacggatctcttctatg

SEQ ID NO: 89645 - DNA, 467 bp, Zea mays
accggtctcggaattcccgggcaaagctataagtaaccctcatatgtatttgcactcatgcatcacaaaacatccttctatcagtaccatcaggcatcattcatcttagtagtataggcaccaaatcaaatctgcaacatcaattatctaactccaaaaaccatgaagctggtgcttgtggttcttgctttcattgctttagtatcaagtgtttcttgtacacagacaggcggctgcagctgtggtcaacaacaaagccatgagcagcaacatcatccacaacaacatcatccacaaaaacaacaacatcaaccaccaccacaacatcaccagcagcagcaacaccaacaacaacaagttcacatgcaaccacaaaaacatcagcaacaacaagaagttcatgttcaacatcaacaacaacaaccgcagcaccaccaccaacaacaacaacaactgcaccaacaaca

SEQ ID NO: 89646 - DNA, 424 bp, Zea mays
caagcaacatagaaagtggaatccagtagcaacaatagagcaacaatggcgaccaagatactttccctccttatgctccttgctctttctgcatgtgttgctaacgcgacaattttccctcaatgctcacaagctcctatagcttcccttcttcccccataccttccatcaatgatagcttcagtatgtgaaaacccagctcttcaaccctataggctccaacaagcaatcgcagcaagcaacatacctttatcacccttgtttcaacaatcgccagccctatctttggtgcagtcattggtacaaaccatcaaggcacagcagctgcagcaactcgtgctacctgtgatcaaccaagtagctctggcaaacctttctccctactatcagcaacaacaatttcttccattcaaccaactatcta

SEQ ID NO: 89647 - DNA, 401 bp, Zea mays
ccagatcagcaaagcggcagtgcgtagagaggatcgtcgaacagaacagcatggggagggtcatcgttctcgtcgtgtgcctggctctgtcagctgccagcgcctctgcaatgcagatgccctgcccctgcgcggtgctgcagggcttgtacggcgctggcgccggcctgacgactatgatgggcgccggcgggctgtacccctacgcggagtacctgaggcagccgcagtgcagcccgctggctgcggcgccctactacgccgggtgtgggcagacgagcgccatgttccagccgctccggcaacagtgctgccagcagcagatgaggatgatggacgtgcagtccgtctcgcaacatctgcagatgatgatgcatcttgagcgtgccgctgccgccagc

SEQ ID NO: 89648 - DNA, 419 bp, Zea mays
  unsure (1)..(419): unsure at all n locations
gtccggcagcagagagcgggggtgcagagagatcgagatccggaggccgcgagtgggagcgccaccaccagcgactgcggcaatggcgggcacggtgacggtcccggggtcgtcgaccccctccacgccgctgctcaaggacgagctcgacatcgtgatcccgacgatccgcaacctcgacttcctggagatgtggcggcccttcttccagccctaccacctcatcatcgtgcaggacggcgacccgaccaagaccatcaaggtgcccgagggcttcgactacgagctctacaaccgcaacgacatcaaccgcatcctcgggcccaaggcctnctgcatctcattcaaggactccgcctgccgctgcttcggctacatggtctccaagaagaagtacatctacaccatcgacgacgact

SEQ ID NO: 89649 - DNA, 264 bp, Zea mays
ctctcaccagcgtatgggggaagaattgaagctataggagcttgtgagcattgtgggaagatggttgcggtatcagcgcttccagaatgaccaacgagcatcagctagtatagcttcatttatcagccgatccatctccgagcacaggtcaccaccgtgcagcctagccaccgtctaacaccgagtcttctctgttcttctgcggcgaacaaagtcaatccatagccgtgttgctggtgctgattttttttttccaacaagatt

SEQ ID NO: 89650 - DNA, 429 bp, Zea mays
gtggcaggcacaggcgatggctagaggatccttgacaccatcaatgcagattgtatgagtatcctctagccattgagaggtggcaggcacaggcgatggaggctgataaagaattctacagtcggatacgcatacctgatgaagatgattcaagtagtcagaagcacacatgccgtagttctgcttcacagggtgccgatagcaaacctgcatctgagcggcaatcaagaggtgtggagcatataaaacagggtctcgtgaactttatagcctcgctgctgatgccattatatagaggaaaaaagatcgaccgagaggggtacaaaacaatcatgcgcaaatctgttaacaagatcattgatacatgctcagaaggagagaaatcaatgactactcttgagtttcttgatgataaaaggaaaattaaga

SEQ ID NO: 89651 - DNA, 431 bp, Zea mays
gatttgttgatttgactatggaacatatgggggagatgaaggttgtggtcaggacggttgtttcactcaccaaggaggaggagaaagaactcaaggaaaccttgcaggatatccttggggaaaacaaaactattttggttgaacagaagattgactacagcatcatgggaggattagtgattgaattcgggcagaaggtgcttgatatctcaatcaggaacagggcgaagcaaatggaggcgttcttgaggcaaccacttgacttctaacagccttttggataaaagaagcatcatcggaatgcagaggctgtcctgttgaaggttttcctgtgtctgcaattttaatctggccttttgaataaaatgtttcctctaacaagtgaagggcactgtttttattgtctcgtgggccacagatgcctgctgaac

SEQ ID NO: 89652 - DNA, 422 bp, Zea mays
gctctacgaggccgactcgcgcagctttcacgacctcgccgagcacgacgtgagcgtgttcttcgccaacatcaccgcggggtccatgagcgcgccattgttcaacacccgttcgttcaagatcgcctacgtgcctaacggcaagggctacgccgagatcgtgtgctcgcaccgtcagtctcaagacggcgagagcgagcgcgagcgctacaagcgcaggtggagcgatgtagaacatgtagaatcggctgtcgagcactatatggcctcgctgctgatcgcacatctatcgagcgcggctgatcgaccgcacggcgtacgtggcgatcatgcgcaaatctgttgacaagatcattgatacatgctcagaatgagagatatcaatgactactcttgagtttcttggtgataaaaggaaaatt

SEQ ID NO: 89653 - DNA, 425 bp, Zea mays
gttgtttcaacaatcaccagccctatctttggtgcagtcattggtacaaaccatcagggcacaacagctgcagcaactcgtgctacctgtgatcaaccaagtagctctggcaaacctttctccctactctcagcaacaacaatttcttccattcaaccaactgtctacactgaaccctgctgcttatttgcagcaacaactattaccatttagccagctagctactgcctactctcagcaacaacaacttcttccatttaaccaattggccgcactgaaccccgctgcttatttgcagcagcaaatactactgccatttagcgagctagctgcagcaagtcgtgcttccttcttgacacagcaacagttgctgcctttctacaagcagtttgcggctaaccccgcaaccctcttacaactacaac

SEQ ID NO: 89654 - DNA, 409 bp, Zea mays
gtaccggtccggaattcccggggtaggggaccccatggagtacaatgccatactgaggaggaagctggaggaggacctcgaggccttcaaaatgtggagggcggcctccagtgttgtgacctcagatcaacgttctcaaggctcaaacaatcacactggaggtagcagcatcaggaataatccagtgcagaacaagctgatgaacggcgaagatccaatcaacaataaccacgctcaaaccgcaggccttggcgtgaggcttgctactagctcttcctcgagagatccttcaccatcagacgaagacatggacggagaagtagagattctggggttcaagatgcctaccgaggaaagagtgaggaaaagaaaggaatccaatagagaatcagccagacgctcgagatac

SEQ ID NO: 89655 - DNA, 295 bp, Zea mays
cgacgagctcaacgtcgagctcatcaagagggctgcggtcttccactacggatcaataagcttgattgctgagccttgccggacagcacatctccgtgccatggagattgccaaagaggcaggtgcactgctctcttatgacccaaacctgagggaggcactatggccatcccgtgaggaggcccgcacccagatcttgagcatctgggaccaggcagacattgtcaaggtcagcgaagtcgagctcgagttcttgacaggcatcgactcggtggaagacgatgttgtcatgaag

SEQ ID NO: 89656 - DNA, 418 bp, Zea mays
cgacgagctcaacgtcgagctcatcaagagggctgcggtcttccactacggatcagggagcttgattgctgagccttgccggacagcacatctccgtgccatggagattgccaaagaggcaggtgcactgctctcttatgacccaaacctgagggaggcactatggccatcccgtgaggaggcccgcacccagatcttgaacatctgggaccaggcagacattgtcaaggtcagcgaagtcgagctcgagttcttgacaagcatcgactcggtggaggacgatgttgtcatgaagctgtggcggcctaccatgaagctgctcctagtgactcttggagatcaagggtgcaagtactatgccagggatttccatggcgctgtgccttccttcaaagtacaacaagttgatacaactggc

SEQ ID NO: 89657 - DNA, 422 bp, Zea mays
cttgtattcccactctgtcgcacagcgtcgcccgtcgccgctgagatcctaggaagaaatggagctctctcgcaagctcttcacggccgtcctcctcgtcatgctgctgctgctgtccgcagaggtcgggccggtggcggtggcggaggcgcggacgtgccagtcgcagagccacaggttccggggcccctgcctccgccggtccaactgcgccaacgtctgcaggaccgaggggttccccggcggcaggtgccgcggcttccgccgccgctgcttctgcaccacgcactgccactgattcgctcgcccagcggccggctggcgtcgccgtcgatcgcgtcgcgaccagtccatggctccatgcatgaataacaagggtgtgcgcggtttgtgatgccaaattgtatcgccgtcgtgtgttg

SEQ ID NO: 89658 - DNA, 426 bp, Zea mays
gaccaactagcaacatagaaagcacaatagtgtaccaacaatggcagccaaaatatgttgcctccttatgctccttggtctttctgcaagtgctgctacggcgaccattttcccgcaatgctcgcaagctcctatagcttcccttcttcccccgtacctctcaccagcggtgtcttcggtatgtgaaaacccaattcttcaaccctacaggatccaacaggcaatcgcagctggcatcttacctttatcacccttgttcctccaacaatcatcagccctattacaacagttacctttggtgcatttattggcacaaaacatcaaggcacaacaactacaacaacttgtgctagcaaaccttgctgcctactctcagcaacagcagtttcttccattcaaccaactaggttcattgaactctgcttc

SEQ ID NO: 89659 - DNA, 430 bp, Zea mays
ggaggttgacaggagattgcaagaatatgagcaaggaaggacagagtttgcaccagaagaggatgctcatgttgttggtgactgtgtaaaacatgttctccgggagcttccatcttctcctgttccagcttcctgctgtacagcattattggaagctttccgtctggacatcaaggaatctcggatcaaatctatgcgtgcagcaatatctgaaacatttcctgagcctaataggcggctgctacagagaattttgaaaatgatgcataccgttgcttctcatactgccgagaatagaatgactccatcagcagttgctgcatgtatggccccactcttgttgcgtccccttcttgctggtgaatgcgagctggaagatgattttgacatgagtgatgacagtgctgctcagcttattgctgctgcaaat

SEQ ID NO: 89660 - DNA, 428 bp, Zea mays
ccagcaagcaacatagaaagtagaatccattagcaacaatagagcaacaatggcgacgaagatattttccctccttatgctccttgctctttctacatgtgttgctaacgcgacaattttccctcaatgctcacaagctcctatagcttcccttcttcccccataccttccatcaattatagcttcagtatgtgaaaacccagctcttcaaccatataggcttcaacaagcaatcgcagcaagcaacatacctttatcgcccttgttgtttcaacaatcaccagccctatctttggtgcagtcattggtacaaaccatcagggcacaacagctgcagcaactcgtgctacctgtgatcaaccaagtagctctggcaaacctttctccctactctcagcaacaacaatttcttccattcaaccaactgt

SEQ ID NO: 89661 - DNA, 344 bp, Zea mays
gccacgcgtacgttcacacgtccggatttgtgagggtgatccgcgctgagaaaagatggctaagatcaggcatgtcactgcggcggcactgtgcttaacgaccctggtggccagctccatctgtcaagtctaggtctagctgcagaagcatcatgtacctgcagctgctccagtagactcaagagaatctcgtatgaaatttatgccagcagctatatctgaaacatatcctgagcctaataggcggctgctacagacaattttgaaaatgatgcataccgctgcttctgatactgccgagaatagaatgactccatcagcagttgctgcatgtatggccccac

SEQ ID NO: 89662 - DNA, 400 bp, Zea mays
  unsure (1)..(400): unsure at all n locations
catagtgaagtacactagcaacatcttagcaccaatgggagccaagatttttgccctccttgccctccttgctctttcagcaagcgctgctacctcgacttttattccacaatgctcacaacaatacctctctccggtgacagccgcgggatttcaatacccaactatacaatcctacatggtacaagaggccatccaagcaagcatcttacggtcattagcattaaccctccaacaaccatatgctctattgcaacagccatccttagtgcatctgtatctccaaagaatcgcggcacaacaactacaacaacagttgctaccaacaatcaatcaagtagttgcagcgaaccttgctgcttacctncagcaacaacagtttcttccattcaatcaacta

SEQ ID NO: 89663 - DNA, 439 bp, Zea mays
gaccaacaagcaacatagaaagtggaatccagtagcaacaatagagcaacaatggcgaccaagatattttccctccttatgctccttgctctttctacatgtgttgctaacgcgacaattttccctcaatgctcacaagctcctatagcttcccttcttcccccataccttccatcaattatagcttcaatatgtgaaaacccagctcttcaaccatataggcttcaacaagcaatcgcagcaagcaacatacctttatcgcccttgttgtttcaacaatcgccagccctatctttggtgcagtcattggtacaaaccatcagggcacaacagctgcagcaactcgtgctacctctgatcaaccaagtagctctggcaaacctttctccctactctcagcaacaacaatttcttccattcaaccaactgtctacactga

SEQ ID NO: 89664 - DNA, 446 bp, Zea mays
accaactagcaacatagaaagcacaatagtgtaccaacaatggcagccaaaatatttggcctgcttatgctccttggtctttctgcaagtgctgctacggcgaccattttcccgcaatgctcgcaagctcctatagcttcccttcttcccccgtacctctcaccagcggtgtcttcggtatgtgaaaacccaattcttcaaccctacaggatccaacaggcaatcgcagctggcatcttacctttatcacccttgttcctccaacaatcatcagccctattacaacagttacctttggtgcatttattggcacaaaacatcagggcacaacaactacaacaacttgtgctagcaaaccttgctgcctactctcagcaacagcagtttcttccattcaaccaactaggttcattgaactctgcttcttatttgcaacaacaacaact

SEQ ID NO: 89665 - DNA, 428 bp, Zea mays
taccggttcggaagttccgacccacgcgttcggcgcaagctcgtggtgtgagcggtcactgtctcccatcccatggctccggcgctgagcggggctctgggcgcgtcgtcggtggcggcgctgcggccctgcgcggggaggagggcgccgtccgccgcgagctcggttgcgccgcgcgggagcggggtggtgaggtgctccagagggctcaggtgggacgcccacagaagcagggggaggttgctcagggtgaggtgcgatgcggccgtcgcggagaagcccgccgaggaggaggcggctggggagaagttcgagtaccaggcggaggtgagccgcttaatggacttgatcgtccatagtctgtacagtcataaggaggtatttctccgggagcttgttagcaatgcgagtgatgcgctggataagct

SEQ ID NO: 89666 - DNA, 419 bp, Zea mays
gacagcatccattccacagtcaccagagcactagagcagagcaacaactgacaagagcagagcgagatcgtcgtcagcgagctcagcagagagccagatacgagagagaggatggcggacatcgcgttgctggtggcggagcagttcgagaagacggcaaggcgaggcgcccccggcggggacagcggcagcggcagcgggaccggcggcgagacgaggaacttcggggccgtggccaaggtgtggagctcgtgggtggagtccgcctccgccgccgcgtccggggtcagattcaccgtcgcggtgcagctggagcccaagaccgggctcgcgctggccgtcgtcgacggcctcttctccgcctagcttcctgcctgcatgcttccatgtcttcctcctgagcagtgccagtggtcgag

SEQ ID NO: 89667 - DNA, 413 bp, Zea mays
caacaacttgtgctagcaaaccttgctgcctactctcagcaacagcagtttcgtccattcaaccaactagctgcattgaactctgcttcttatttgcaacaacaacaactaccattcagccagctacctgctgcctacccccagcaatttcttccattcaaccaactggcagcattgaactctcctgcttatttacagcagcaacaactactaccattcagccagctagctggtgtgagccctgctaccttcttgatacaaccacagatcgctgacgttctaccagcacgctgcgcctaacactggcaccctcttacaactgctacaattgctgccattcaaccaacttgctttgacaaacccagtatcgttataccaacaacccatcattggtgctgccctcttttagatac

SEQ ID NO: 89668 - DNA, 424 bp, Zea mays
cagaagaggaagcaccaaagccaaagtcaaagaatcctcttgacttgctgccaccagagcaagatggtccttgatgactggaagaggctatactcaaacacaaagactaacttccgggaggttgccatcaaaggtttctgggacatgtacgacccagagggctactctttgtggttctgtgactacaagtacaatgatgagaacaccgtctcctttgtgaccctgaacaaggttggtggattcctgcagcggatggacctgtgccgcaagtacgcctttgggaagatgctcgtgataggctctgagccacccttcaagctgaagggcctttggctcttccgtggccaggatgttcccaagtttgtaatggacgaggtctatgacatggagctctacgagtggaccaaggtggacatctctgatg

SEQ ID NO: 89669 - DNA, 391 bp, Zea mays
cagcaacaactaccattcagccagctatctgctgcctacccccagcaatttcgggcggtcaaccaactgacagctttgaactctcctgcttatttacagcagcaacaactactaccattcagccagctagctggtgtgagccctgctaccttcttgacacaaccacaattgttgccgttctaccagcacgctgcgcctaacgctggcaccctcttacaactgcaacaattgctgccattcaaccaacttgctttgacaaacccaacagcattctaccaacaacccatcattggtggtgccctcttttagatttcttatgagttatagttcaataataaagttttttgtctgatgtttgtggcttcccagaaataagaaagtacatttctag

SEQ ID NO: 89670 - DNA, 378 bp, Zea mays
taccggtccgaaatcccgggtggacccacgcgtccgcattcaaccaactagcagcattgaactttcctgcttatttacagcagcaacaactactaccattcagccagctagctggtgtgagccctgctaccttcttgacacaaccacagttgttgccgttctaccagcacgttgcgcctaacgctggcaccctcttacaactgcaacaattgctgccattcaaccaacttgctttgacaaacccagcagtgttctaccaacaacccatcattggtggtgccctcttttagatttcttatgagttatagttcaataataaagttttttatctgatgtttggggcttcccagaaattagaaagtacatttctagattctt

SEQ ID NO: 89671 - DNA, 374 bp, Zea mays
ccgacgcgtccgagcttcccttctttcctcgtacctctcaccagcggtgtcttcggtgtgtgaatacccagttcttcaaccctacatgatccaacaggcaatcgcagctggcatcttacctttatcacccttgttccttcaacaatcatcagccctattacagcagttacctttggtgcatttattggcacataacatcaggtcacaacaactacaacaacttttgctatcaaaccttgctgcctactctcatcaacatctgtttcttcattcaaccatctatcttcattgatctctactttttattttttacaacatcttcttccattctattcagctttctttttcttaccttctatcatttttttttattt

SEQ ID NO: 89672 - DNA, 439 bp, Zea mays
tagaaagcacaatagtgtaccaacaatggcagctaaaatattttgcctccttatgcgccttggtctttctgcaagtgctgctacggcgaccattttcccacaatgctcacaagctcctatagcttcccttcttcccccgtacctctcaccaacggtgtcttcggtatgtgaaaacccaattcttcaaccctacaggatccaacaggcaatcgcagctggcatcttacctttatcacccttgttcctccaacaatcatcagccctattacagcagttacctttggtgcatttattggcacaaaacatcagggcacaacaactacaacaacttgtgctagcaaaccttgctgcctactctcagcaacagcagtttcttccattcaaccaactagctgcattgaactctgcttcttatttgcaacaacaacaactaccattc

SEQ ID NO: 89673 - DNA, 470 bp, Zea mays
cggttcggaatcccgctcgagccacgcagtccgaacatagaagcacaatagtgtaccatcaatggcagccaaaatattttgcttgcttaggctccttggtctgtctgcaagtgctgctaccgcaaccattttcccacaatgctcacaagctcctatagcttcctttcttcccccatacctctcaccagcggtgtcttcagtatgtgaaaacccaattcttcaaccctacaggatccaacaggcaatcgcagcatgcatcttacctttatcacccttgttcctccaacaaccgtcagacctattacagcagttacctttgatgcatttgctggcacaaaacatcaacgcacaacaactacaacaactcgtgctaagaaaccttgctgcctactctcagcaacagcagtttcttccattcaaccaactggctgcatcgaactctgctgcttatttgcaacaacaactaccat

SEQ ID NO: 89674 - DNA, 465 bp, Zea mays
  unsure (1)..(465): unsure at all n locations
accggtccggaattcccgggcacaaacgccggcgcaaactctcgcccgagcccgacagatcttcaattccccattccgcccaccgatcgacctgcacgccagtctcggtctcttccgaaggcgtcgcgcgcggttgtttgagaggagaggaggaagatgagggagtgcatctccgtccacatcgggcaggccggcatccaagtcggcaacgcgtgctgggaactttactgcctcgagcacggcatccagcctgatggccaagtgcctggagataagaccgcgggacatcacgatgatgccttcagcaccttcttcagccagactggtgctgggaagcacgttccccgtgcaatcttcgttgatctagaacccactgtgatcgatgaggtgcgcactggcacgtaccgncagctcttccaccctgagcagctcatcagtggcaaggaggatgccgctaacaatttc

SEQ ID NO: 89675 - DNA, 445 bp, Zea mays
tattgagaccagcaagcaacatagaaagtagaatccattagcaacaatagagcggcagatggcgaccaagatattttccctccttatgctccttgctctttctacatgtgttgctaacgcgacaattttccctcaatgctcacaagctcctatagcttcccttcttcccccataccttccatcaattatagcttcagtatgtgaaaacccagctcttcaaccatataggcttcaacaagcaatcgcagcaagcaacatacctttatcgcccttgttgtttcaacaatcaccagccctatctttggtgcagtcattggtacaaaccatcagggcacaacagctgcagcaactcgtgctacctgtgatcaaccaagtagctctggcaaacctttctccctactctcagcaacaacaatttcttccattcaaccaactgtctacactg

SEQ ID NO: 89676 - DNA, 398 bp, Zea mays
cacacagagaaaccaatgccggtattttcggtgcttgcctaaccatagattaaaaaggtgcaactgcatttgggctcatgaaaattgatgaagaagggaggatcattgagtttgctgagaaaccgaaaggagagcagttgaaagcaatgatggttgacaccaccatacttggccttgatgacgtgagggcaaaggaaatgccttatattgctagcatgggtatctatgttttcagcaaagatgtaatgcttcagctcctccgtgaacaatttcctgaagccaatgactttggaagtgaggttattccaggtgcaaccagcattggaaagagggttcaggcttatctgtatgatggttactgagaagatatcggtaccattgcggcattttataatgca

SEQ ID NO: 89677 - DNA, 385 bp, Zea mays
cagaaacacaccaagcgaagcgcactagcaacaacctaacaacaatggctaccaagagattatccctccttgcgcttcttgcgctttttgcgagcgcaacaaatgcgtccattattccacaatgctcacttgctcctagttccattattccacagttcctcccaccagttacttcaatggccttcgaacacccagctgtgcaagcctataggctacaacaagcgattgcggcgagcgtcttacaacaaccaattgcccaattgcaacaacaatccttggcacatctaacaatacaaaccatcgcaacgcaacagcaacaacagttcctaccagcactgagccacctagccatggtgaaccctgtcgcctacttgcaacagcagct

SEQ ID NO: 89678 - DNA, 470 bp, Zea mays
ccggattcccgggtcgacgcacgcgtccgagctcatcgactccagattggagaactcgacaccatgaaggtgctgatcgttgcccgtgcgctcctggcgctcgctgcgagcgccgcctccagtacaagcggcggctgtggctgccagacaccaccgtttcatctaccgcctccgttctatatgccgcctccgttctatctgccgccgcagcagcagccgcagccatggcaataccccactcaaccaccgcagctaagcccgtgccagcagttcggatcctgcggcgtcggcagcgtcggcagcccgttcctgggccagtgcgtcgagttcctgaggcaccagtgcagcccggcggcgacgccctacggctcgccacagtgccaggcgctgcagcagcagtgctgccaccagatcaggcaggtggagccgctgcaccggtaccaggcgacatacggtgtggtcctgcagtc

SEQ ID NO: 89679 - DNA, 445 bp, Zea mays
attttcagcattcaaaaacacaccaagcgaagcgcactagcaacgacctaacaccagtggcgaccaagatattagccctccttgcgcttcttgcccttttagtgagcgcaacaaatgcgttcattattccacagtgctcacttgctcctagtgccattattccacagttcctcccaccagttacttcaatgggcttcgaacatccagccgtgcaagcctacaggctacaactagcgcttgcggcgagcgccttacaacaaccaattgcccaattgcaacaacaatccttggcacatctaaccctacaaaccattgcaacgcaacaacaacaacaacaacagtttctgccatcactgagccacctagccgtggtgaaccctgtcacctacttgcaacagcagctgcttgcatccaacccacttgctctggcgaacgtagctgcata

SEQ ID NO: 89680 - DNA, 444 bp, Zea mays
gaccaactagcaacatagaaagcacaatagtgtaccaacaatggcagccaaaagatgtggcttccttatgctccttggtctttctgcaagtgttgctaccgcaaccattttcccacaatgctcacaagctcctatagcttcccttcttcccccatacctctcaccagcggtgtcttcaatgtgtgaaaacccaattgttcaaccctacaggatccaacaggcaatcgcaacaggcatcttaccattatcacccttgttcctccaacaaccgtcagccctattacagcagttacctttggtccatttggtggcacaaaacatcagggcacaacaactacaacaacttgtgctagcaaaccttgctgcatactctcagcaacatcagtttcttccattcaaccaactggctgcattgaactctgctgcttatttgcaacaacaatt

SEQ ID NO: 89681 - DNA, 81 bp, Zea mays
atgggttatagttcaataataaagttttttgtctgatgtttgtggcttcccagaaataagaaagtacatttctagattctt

SEQ ID NO: 89682 - DNA, 441 bp, Zea mays
tagcaacatagaaagcacaatagtgtaccaacaatggcagccaaaatattttgcttccttatgctccttggtctttctgcaagtgctgctaccgcaaccattttcccacaatgctcacaagctcctatagcttcctttcttcccccatacctctcaccagcggtgtcttcagtatgtgaaaacccaattcttcaaccctacaggatccaacaggcaatcgcagcaggcatcttacctttatcacccttgttcctccaacaaccgtcagccctattacagcagttacctttggtgcatttgttggcacaaaacatcaaggcacaacaactacaacaacttgtgctaggaaaccttgctgcctactctcagcaacagcagtttcttccattcaaccaactggctgcattgaactctgctgcttatttgcaacaacaactacca

SEQ ID NO: 89683 - DNA, 411 bp, Zea mays
aaaatagcaacgtaaaacgcaaagcttgcattgaacgctctcctagctctttgtgggagcgccactagtgcgagccatattccaaggcacttgccaccagtcatgccattgggtaccatgaacccatgcatgcagtactgcatgatgcaacaggggcttgccagcttgatggcgtgtccgtccctgatgctgcagcaactgttggccttaccgcttcagacgatgccagtgatgatgccacagatgatgacgcctaacatgatgtcaccattgatgatgccgagcatgatgtcaccaatggtcttgccgagcatgatgtcgcaaatgatgatgccacaatgtcactgcgacgccgtctcgcagattatgctgcaacagcagttaccattcatgttcaacccaatggccatg

SEQ ID NO: 89684 - DNA, 467 bp, Zea mays
taccggtccggaattcccgggcaactagcaacatagaaagcacaatagtgtaccaacaatggcagccaaaatattttgcctccttatgctccttggtctttctgcaagtgctgctacggcgaccattttcccgcaatgctcgcaagctcctatagcttcccttcttcccccgtacctctcaccagcggtgtcttcggtatgtgaaaacccaattcttcaaccctacaggatccaacaggcaatcacagctggcatcttacctttatcacccttgttcctccaacaatcatcagccctattacatcagttacctttggtgcatttattggcacaaaacatcagggcacaacaactacaacaacttgtgctagcaaaccttgctgcctactctcagcaacagcagtttcttccattcaaccaactagctgcattgaactctgcttcttatttgcaacaacaacaactac

SEQ ID NO: 89685 - DNA, 434 bp, Zea mays
taccggtccggaattcccgggattgagaccaacaagcaacatagaaagtggaatacagtagcaaaaatagagcaacaatggcggccaagatatggtccatccttatgctccttgctctttctgcatgtgttgctaacgcgaccatttttcctcaatactcacaagctcctatagctgcccttcttcccccataccttccatcaatgaccgctttagtatgtgaaaacccagcccttcaaccctacaggatccagcaagcaatcgcaacaagcaacttacctttatcacacctgttctttcaacaatcgccagccctatctttggtgcagtcattggtacaaaccatcagggcagaacagttgcagcaactcgtgctaccagtgatcagccaagtagctctggcaaacctttccccctactctcagcaacaacaa

SEQ ID NO: 89686 - DNA, 427 bp, Zea mays
taccttcagcaacaacaattttttccattcaatcaactaactggggtgaacggctgggcttacttgcaggcacaacagctactaccattcaaccaacttgtcaggagccctgctgccttcttactgcagcaacagttgcttccattccatctacaagttgtggcaaacattgctgctttcttgcaacaacaacaacaattgctgccattttacccacaggttgtgggaaacattaacgccttcttgcaacagcaacagctgctaccattatacccacaggatgtggcaaacaatgtcgccttcttacaacaacaacaattgctgccatttaaccaacttgctttgacgaatcctaccaccttattgcagcagcccaccattggtggtgccatcttgtagatattgttatgctgtatactgtagtaat

SEQ ID NO: 89687 - DNA, 446 bp, Zea mays
caactagcaacatagaaagcacaatagtgtaccaacaatggcagccaaaatattttggctcgttatgctccttggtctttctgcaagtgctgctacggcgaccattttcccacaatgctcacaagctcctatagcttcccttcttcccccgtacctctcaccagcggtgtcttcggtatgtgaaaacccaattcttcaaccctataggatccaacaggcaatcgcagctggcatcttacctttatcacccttgttcctccaacaatcatcagccctattacagcagttacctttggtgcatttattggcacaaaacatcagggcacaacaactacaacaacttgtgctagcaaaccttgctgcctactctcagcaacaacagtttcttccattcaaccaactagctgcattgaactctgcttcttatttgcaacaacaacaactac

SEQ ID NO: 89688 - DNA, 338 bp, Zea mays
atcaattatagcttcagtatgtgaaaacccagctcttcaaccatataggcttcaacgagcagtcgcagcaagcaacatacctttatcgcccttgttgtttcaacaatcaccagccctatctttggtgcagtcattggtacaaaccatcagggcacaacagctgcagcaactcgtgctacctgtgatcaaccaacttgctttgacaaacccagcagcattctaccaacaacccatcattggtggtgccctcttttagatttcttatgagttatagttcaataataaagttttttgtctgatgtttgtggcttcccagaaataagaaagtacatttctag

SEQ ID NO: 89689 - DNA, 443 bp, Zea mays
  unsure (1)..(443): unsure at all n locations
gcacagcagagcccagataatccaaactggtttcagggtactgcagatgctgtaagggagtacttgtggttgtttgaggagcataatgtgatggaatttctaattcttgctggcgatcacctgtaccggatggactatgaaaagttcattcaggcacacagagaaacaaatgctgatattaccgttgctgccctaccgatggatgagaaacgtgcaactgcatttggcctcatgaaaattgatgaagaagggaggatcattgagtttgctgagaaaccgaaaggagagcagttgaaagcaatgatggttgacaccaccatacttggccttgatgacgtgagggcaaaggaaatgccttatattgctagcatgggtatctatgttttcagcaaagatgtaatgcttcagcttctncgtgaacaattttctgaagccaatgactt

SEQ ID NO: 89690 - DNA, 524 bp, Zea mays
ggagaggcctccgtttacgataagacacgtgattgcactgctcgtaccggtccggaattcccgggtcgacgccacgcgtccgtgttttcaacaatcgccagccctatctttggtgcagtcattggtacaaaccatcagggcacagcagctgcagcaactcgtgctacctgtgatcaaccaagtagctctggcaaacctttctccctactctcagcaacaacaatttcttccattcaaccaactgtctacactgaaccctgctgcttatttgcagcaacaactattaccattcagccagctagctactgcctactctcagcaacaacaacttcttccatttaaccaattggccgcactgaaccccgctgcttatttgcagcagcaaatactactaccatttagccagctagctgcagcaaaccgtgcttccttcttgacacagcaacagttgctgcctttctaccagcagtttgcggctaaccccgcaaccctcttacaactacaacaattgttgccctttgtcc

SEQ ID NO: 89691 - DNA, 440 bp, Zea mays
cagcattcaaaaacacaccaagcgaagcgcactagcaacgacctaacaccaatggctgccaagatattagccctccttgcgcttcttgcccttttagtgagcgcaacaaatgcgttcattattccacagtgctcacttgctcctagtgccattattccacagttcctcccaccagttacttcaatgggcttcgaacatccagccgtgcaagcctacaggctacaactagcgcttgcggcgagcgccttacaacaaccaattgcccaattgcaacaacaatccttggcacatctaaccctacaaaccattgcaacgcaacaacaacaacaacaacagtttctgccatcactgagccacctagccgtggtgaaccctgtcacctacttgcaacagcagctgcttgcatccaacccacttgctctggcgaacgtagctgcata

SEQ ID NO: 89692 - DNA, 413 bp, Zea mays
  unsure (1)..(413): unsure at all n locations
cagctagcaacatacatagtgaagtacactagcaacatcttagcaccaatgggagcgaagatttttgccctccttgccctccttgctctttcagcaagcgctgctacctcgacttttattccacaatgctcacaacaatacctctctccggtgacagccgcgggatttcaatacccaactatacaatcctacatggtacaagaggccatccaagcaagcatcttacggtcattagcattaaccctccaacaaccatatgctctattgcaacagccatccttagtgcatctgtatctccaaagaatcgcggcacaacaactacaacaacagttgctaccaacaatcaatcaagtagttgcagcgaaccttgctgcttacctncagcaacaacagtttcttccattcaatcaact

SEQ ID NO: 89693 - DNA, 388 bp, Zea mays
cagaaacacaccaagcgaagcgcactatcaacgacctaacaccaatggctaccaagagattagccctccttgcgcttcttgcccttttagtgagcgcaacaaatgcgttcattattccacagtgctcacttgctcctagtgccagtattccacagttcctcccaccagttacttcaatgggcttcgaacatccagccgtgcaagcctacaggctacaactagcgcttgcggcgagcgccttacaacaaccaattgcccaattgcaacaacaatccttggcacatctaaccctacaaaccattgcaacgcaacaacaacaacaacagtttctgccatcactgagccacctagccgtggtgaaccctgtcacctacttgcaacagcagct

SEQ ID NO: 89694 - DNA, 156 bp, Zea mays
gtccaacttgctttgacagacccagcggcctcctaccaacaacacatcattggtggtgccctcttttagattgcttattagttgtaattcaataataaagttttttggatgatgtatgtggccaaccagaaataagaagttacatttccagattct

SEQ ID NO: 89695 - DNA, 477 bp, Zea mays
gtccggaattcccgggattgagaccaactagcaacatagaaagcacaatagtgtaccaacaatggcagccaaaatattttgcctccttaggcggcttggtctttctgcaagtgctgctacggcgaccattttcccacaatgctcacaagctcctatagcttcccttcttcccccgtacctctcaccagcggtgtcttcggtatgtgaaaacccaattcttcaaccctataggatccaacaggcaatcgcagctggcatcttacctttatcacccttgttcctccaacaatcatcagccctattacagcagttacctttggtgcatttattggcacaaaacatcagggcacaacaactacaacaacttgtgctagcaaaccttgctgcctactctcagcaacaacagtttcttccattcaaccaactagctgcattgaactctgcttcttatttgcaacaacaacaactaccattcag

SEQ ID NO: 89696 - DNA, 365 bp, Zea mays
ttatactcctatacctttctgcgaccggctttacaggaaccatgtccccgcaatgctcgcaagctactatagcttcccttcttcccccctacctctcaccacctgagtcttcggtatgttaaaacccaattcttcaaccctacaagatccaacaggcaatcacagctggcatcttacctttatcaccctttatccctacaacaatcatcaaccctattacatcacttaccttctatgcattaattgtcacaaaacattagcccacaacaactacaacaactttgtctaacataccttgctacctactctcagcaacaacactttctttcattcaaccaactagcttcatttaactctgcttctta

SEQ ID NO: 89697 - DNA, 363 bp, Zea mays
aagaccatcaagcagcatatagagtgcaacccagtagctgcaatatagcaacaatggggacgaacatattttctctccttatgctccttgctattactacatgtgccgctaacgcaacaattgtccctcaatgctcacacgctcctattgctacccttcttgctccatacctttcatgaataatagcttcaacatgtgaaaacccaactcttcaaccatattggcttgaacaatcaatctcatcaggcaacatacctctatcgcactagctgatctaacaattaccagccctatctttggtgcagacatcgctacaaaccatcgagtctcaacagctagctcaactcgtgctacctctgatca

SEQ ID NO: 89698 - DNA, 531 bp, Zea mays
  unsure (1)..(531): unsure at all n locations
gtgaggagaagctctntgtcttttgtaaccgacaagtatagcatngctctaccggtccggaattcccgggtcgacgccacgcgtccgcaacaatggcagccaaaatattttgcctccttatgctccttggtctttctgcaagtgctgctacggcgaccattttcccgcaatgctcgcaagctcctatagcttcccttcttcccccgtacctctcaccagcggtgtcttcggtatgtgaaaacccaattcttcaaccctacaggatccaacaggcaatcacagctggcatcttacctttatcacccttgttcctccaacaatcatcagccctattacatcagttacctttggtgcatttattggcacaaaacatcagggcacaacaactacaacaacttgtgctagcaaaccttgctgcctactctcagcaacagcagtttcttccattcaaccaactagctgcattgaactctgcttcttatttgcaacaacaacaactaccattcagccagctacctgctgcctaccccc

SEQ ID NO: 89699 - DNA, 441 bp, Zea mays
  unsure (1)..(441): unsure at all n locations
gtcatgttgcacgtctgtcaacgaagtcatttgccatggaattccagatgccaggagacttgaggatggtgacattgtaaatgttgatgtaactgtatactataaaggtgttcatggtgatttgaatgagacatattttgttggaaatgttgatgaagcttccaaacaccttgtacgttgtacctatgagtgcttggagaaagctattgcgatagttaaacctggagttcggttccgagaggtcggagaagtcataaacagacatgtttcgatgtcaggtttatctgtggtgaaatcttattgtggccatggcataggggaactgtttcactgtgccccanacattcctcattattcaagaaacaaggccgttggtatcatgaaagctgggcagacatttacaattgaaccaatggtcaatgcangggtttggaatgatcg

SEQ ID NO: 89700 - DNA, 528 bp, Zea mays
  unsure (1)..(528): unsure at all n locations
ggaggaggctctntttcctcgtcatcgaanagtanagccatgctcgtaccggtctcggaattcccgggtcgacgccacgcgtccggcaacatagaaagcacaatagtgtaccaacaatggcagccaaaatattttgccgccgtatgctccttggtctttctgcaagtgctgctacggcgaccattttcccacaatgctcacaagctcctatagcttcccttcttcccccgtacctctcaccagcggtgtcttcggtatgtgaaaacccaattcttcaaccctataggatccaacaggcaatcgcagctggcatcttacctttatcacccttgttcctccaacaatcatcagccctattacagcagttacctttggtgcatttattggcacaaaacatcagggcacaacaactacaacaacttgtgctagcaaaccttgctgcctactctcagcaacaacagtttcttccattcaaccaactagctgcattgaactctgcttcttatttgcaacaacaacaactaccat

SEQ ID NO: 89701 - DNA, 374 bp, Zea mays
gcaacatagaaagcacaatagtgtaccaacaatggcagccaaaatattttgcctcctgatgctccttggtctttctgcaagtgctgctacggcgaccattttcccgcaatgctcgcaagctcctatagcttcccttcttcccccgtacctctcaccagcggtgtcttcggtatgtgaaaacccaattcttcaaccctacaggatccaacaggcaatcacagctggcatcttacctttatcacccttgttcctccaacaatcatcagccctattacatcagttacctttggtgcatttattggcacaaaacatcagggcacaacaactacaacaacttgtgctagcaaaccttgctgcctactctcagcaacagc

SEQ ID NO: 89702 - DNA, 442 bp, Zea mays
attgagaccaactagcaacatagaaagcacaatagtgtaccaacaatggcagccaaaatatgttgcctccttatgctccttggtctttctgcaagtgctgctacggcgaccattttcccgcaatgctcgcaagctcctatagcttcccttcttcccccgtacctctcaccagcggtgtcttcggtatgtgaaaacccaattcttcaaccctacaggatccaacaggcaatcgcagctggcatcttacctttatcacccttgttcctccaacaatcatcagccctattacaacagttacctttggtgcatttattggcacaaaacatcagggcacaacaactacaacaacttgtgctagcaaaccttgctgcctactctcagcaacagcagtttcttccattcaaccaactaggttcattgaactctgcttcttatttgcaac

SEQ ID NO: 89703 - DNA, 444 bp, Zea mays
aactagcaacatagaaagcacaatagtgtaccaacaatggcagccaaaatattttgcgtccgtatgctccttggtctttctgcaagtgctgctacggcgaccattttcccgcaatgctcgcaagctcctatagcttcccttcttcccccgtacctctcaccagcggtgtcttcggtatgtgaaaacccaattcttcaaccctacaggatccaacaggcaatcgcagctggcatcttacctttatcacccttgttcctccaacaatcatcagccctattacaacagttacctttggtgcatttattggcacaaaacatcagggcacaacaactacaacaacttgtgctagcaaaccttgctgcctactctcagcaacagcagtttcttccattcaaccaactaggttcattgaactctgcttcttatttgcaacaacaacaacta

SEQ ID NO: 89704 - DNA, 427 bp, Zea mays
cggattcccgggtcgacgcgcacgcgtccgcccacgcgtccgaagaagggcggcatccggttcaccatcaacggccactcctacttgagcctggtgctggtgaccaacgtgggcggcgccggcgacgtgcacgcggtggccgtgaagggcgaccgttccgcggggtggcaggccctgtcgcgcaactggggccagaactggcagagcaacacgctcctggacgggcaggccctctccttccgcgtcaccaccagcgacggccgctccgtggtctccagcaacgctgccccgcgcggctggggcttcggccagaccttcagcggggcccagttcaactgaacaccctccatcgttcccgcagcgtcgtctcgtccgtcgtcgacgcggtgccacaagtagtagttttccgttggtcgtggtagagtcg

SEQ ID NO: 89705 - DNA, 475 bp, Zea mays
taccgtccggaattcccggtcgacgccacgcgtccggccacataaaaagtgtaattaagtgcctacaacagagctactacgactaacacggtaggctccatcataatgctccttgctctttacgcatgtgctgctaacgccacaatactacctcaatgctcacaagctcctatagctttcataattacaacataccttgcatcaatgatagcttgattatgcgaaaacagagctcttcaaccatatacgcttcaacaagcaatcgcagcatgcaacataccattatcacccttgcagtttcaacaatcgccagccctatctttggtgcagtcattggtacaaaccatcatggcacagcagctgcagcaactcgtgctacctgtgatcaaccaagtagctctggcaaacctttctccctactctcagcaacatcaatttcttccattcaaccaactgtctacactgaaccctgctg

SEQ ID NO: 89706 - DNA, 441 bp, Zea mays
  unsure (1)..(441): unsure at all n locations
ggcaggcaggtcggcgaggagggcaggaagaccgaagaccgagccgtgcgggggctcgggacgggaacgggacaggaccccaaaatctcagatccttcctgcccgcccgcccgtgcccgtcgacgcgtcgttcttgccggccgcgcctcacctccgccctctcctcctccagggggatcggatacgccacaggctgcgcgatggtgctgtgggtcttcggctacggctccctcatctggaaccccggcttcgacttcgacgacaaaatcctcggcttcatcaagggctacaagcgcacctttaatctcgcttgcattgaccacagaggcacaccggagcatccggcgaggacctgcacgcttganaccgacgacgaggccatatgctggggaattgcatattgtgtcaagggtggtccagaaaaagagctaanagcaatgc

SEQ ID NO: 89707 - DNA, 526 bp, Zea mays
ggggggagtgtttgttctcgataagacaatgattgcaacgctcgtaccggtccggaattcccgggtcgacgccacgcgtccgaggcacaacaactacaacaacttgtgctaggaaaccttgctgcctactctcagcaacgagcagtttcttccattcaaccaactggctgcattgaactctgctgcttatttgcaacaacaactaccattcagtcagctagctgctgcctacccccagcaatttcttccattcaaccaactggcagcattgaactctgctgcttatttacaacagcaacagctaccaccattcagccagctagctgatgtgagccctgttgccttcttgacacaacaacagttgttgccgttctacctgcacgctgcgcctaacgctggcaccctcttacaactgcaacaattgctgccattcaaccaacttgctttgacaaacccaacaacgttctaccaacaacccatcattggcggtgccctcttttagattgcttatgagttatagttcaat

SEQ ID NO: 89708 - DNA, 426 bp, Zea mays
cggacgcgtgggatctgcgtacacggtctccctcttcctgtcagtaatagagggagagtgaggcagcgagtaggagacaaggggaaatggggaagggagcgcaagggagcgatgcggcggcggcgggcggcgaggtggaggagaacatggcggcgtggctggttgccaagaacaccctcaagatcatgcccttcaagctcccgcccgtcggcccttatgatgtccgcgtgcgcatgaaagcagtggggatttgcggcagcgatgtgcactacctcagggagatgcgcatcgcgcacttcgtggtgaaggagccgatggtgatcgggcacgagtgcgcgggcgtggtcgaggaggtgggcgccggcgtgacgcacctgtccgtgggcgaccgcgtggcgctggagccgggcgtcagctgctggcgct

SEQ ID NO: 89709 - DNA, 506 bp, Zea mays
  unsure (1)..(506): unsure at all n locations
aggtgtatctgaccaccgaaataatagcatactcgtaccggtccggaattcccgggtcgacgccacgcgtccgccgtacctctcaccagcggtgtcttctgtatgtgaaaacccaattcttcaaccctagaggatccaacaggcaatcgcagctggcatcttacctttatcacccttgttcctccaacaatcatcagccctattacaacagttacctttggtgcatttattggcacaaaacatcagggcacaacaactacaacaacttgtgctagcaaaccttgctgcctactctcagcaacagcagtttcttccattcaaccaactaggttcattgaactctgcttcttatttgcaacaacaacaactaccattcagccagctacctgctgcctacccccagcaatttcttccattcaaccaactagcagcattgaactctcctgcttatttacagcagcaacaactactaccattcaagcagctaagctgtgtgagctctgctn

SEQ ID NO: 89710 - DNA, 401 bp, Zea mays
gccactaccctactcaaccgccccggcctcagcctcatccccagccacacccatgggcgtgccaacagccgcatccaagcccgtgccagctgcagggaacctgcggcgttggcagcaccccgatcctgggccagtgcgtcgagttcctgaggcatcagtgcagcccgacggcgacgccctactgctcgcctcagtgccagtcgttgcggcagcagtgttgccagcagctcaggcaggtggagccgcagcaccggtaccaggcgatcttcggcttggtcctccagtccatcctgcagcagcagccgcaaagcggccaggtcgcggggctgttggcggcgcagatagcgcagcaactgacggcgatgtgcggcctgcagcagccgacttcatgcccctacgct

SEQ ID NO: 89711 - DNA, 473 bp, Zea mays
cggattcccggtcgacgcacgcgtccgcaatttcttccattcaaccaactgtctacactgaaccctgctgcttatttgcagcaagaacgattaccatttagccagctagctactgcctactctcagcaacaacaacttcttccatttaaccaattggccgcactgaaccccgctgcttatttgcagcagcaaatactactaccatttagccagctagctgcagcaaaccgtgcttccttcttgacacagcaacagttgctgcctttctaccagcagtttgcggctaaccccgcaaccctcttacaactacaacaattgttgccctttgtccaacttgctttgacagacccagcggcctcctaccaacaacacatcattggtggtgccctcttttagattgcttattagttgtaattcaataataaagttttttggatgatgtatgtggccaaccagaaataagaagttacatt

SEQ ID NO: 89712 - DNA, 442 bp, Zea mays
ctagcaacatagaaagcacaatagtgtaccaacaatggcagccaaaatattttgcctgcttatgctccttggtctttctgcaagtgctgctacggcgaccattttcccgcaatgctcgcaagctcctatagcttcccttcttcccccgtacctctcaccagcggtgtcttcggtatgtgaaaacccaattcttcaaccctacaggatccaacaggcaatcacagctggcatcttacctttatcacccttgttcctccaacaatcatcagccctattacatcagttacctttggtgcatttattggcacaaaacatcagggcacaacaactacaacaacttgtgctagcaaaccttgctgcctactctcagcaacagcagtttcttccattcaaccaactagctgcattgaactctgcttcttatttgcaacaacaacaacta

SEQ ID NO: 89713 - DNA, 424 bp, Zea mays
cccgctctcctgctactctgctccgtgatctggtctggtgagatcggggatcggacggtcgactcggcgagacatggcggactggggccccgtggtggtgggcgtggtgctgttcgtgctgctctcgccgggcctgctctgcgagctgccgggcacccaccgccacgtcgacttcggcggcttccacaccaacggcaaggccatcttcgtccacaccctcgtcttcttcgccgccttcaccatcctcacgctcgcgctccacatccacatctacaccggctagctagctagtgcggagcatatgttgcgtcggtctggacttgcggaggtctcagatcagaaaggaacgccggccggcggcgcgtcctgtgttgctgctctggttcctctgcagttcgatcgattcgacgaagtgcttgtaact

SEQ ID NO: 89714 - DNA, 443 bp, Zea mays
ggaatacagtagcaacaatagagcaacaatggcggccaagatattttccatccttatgctcgttgctctttctgcatgtgttgctaacgcgaccatttttcctcaatactcacaagctcctatagctgcccttcttcccccataccttccatcaatgaccgcttcagtttgtgaaaacccagcccttcaaccctacaggctccaacaagcaatcgcaacaagcaacttacctttatcacccctgttctttcaacaatcgccagccctatctttggtgcagtcattggtacaaaccatcagggcacaacagctgcaacaactcgtgctaccagtgatcagccaagtagctctggcaaacctttctccctactctcagcaacaacaatttcttccattcaaccaactgtctacactgaaccctgctgcttatttacaacaacaac

SEQ ID NO: 89715 - DNA, 521 bp, Zea mays
  unsure (1)..(521): unsure at all n locations
ggggagaggctttgtccatgactagaaatattgcacgctctaccggttcggaattcccgggtcgacgccacgcgtccgccgacgcactagaccgacccgcgaatcccccgcgcgcgcgccgtgcggtcaccgtccgaggccacggcaccgccggcccccgcccccgccccggccgccaagagcaaaggcaaggccgacgcttcctcctcgtcgtcctcctcctccactccaccgaggttgcgccgcgcgcttgccgtcgtgatggccgcgtcgctgctcgtgctcgccgtggcgttcttggttggctctggctccggggggatcgatgggggcgcagcggctcccgtcgaggtggagggcaccgaggtggcctacggtagtgtgatcaagctgatgcacgagaagacgaagcaccgtctgcactcgcacgatgtgccctacggctcaggcagcggtcagcagtctgtcaccgggtttcctgaaggcgatgactcanatagctactggatcataaggccacn

SEQ ID NO: 89716 - DNA, 529 bp, Zea mays
ggggaggagtggttctgtttatgtacagctagcgtaattgctatgctcgtaccggtccggaattcccgggtcgacgccacgcgtccggttgcaagtaggcgacagcaggtgcttgcatccaacccacttgctctggcaaacgtggctgcataccaacaacaacaacaattgcaacagtttctgccagcgctcagtcaactagccatggtgaaccctgccgcctacctacaacagcaacaactgctttcatctagccctctcgttgtgggtaatgcacctacatacctgcaacaacaattgctgcaacagattgtaccagctctgactcagctagctgtggcaaaccctgctgcctacttgcaacagctgcttccattcaaccaactgactgtgtcgaactctgctgcgtacctacaacagcgacaacagttacttaatccactagcagtgcctaacccattggtcactgccttcctacagcagcaacaattgctaccatacagccagttctctttgatgaaccctgcct

SEQ ID NO: 89717 - DNA, 446 bp, Zea mays
  unsure (1)..(446): unsure at all n locations
attcagaaacacaccaagcgaagcgcactagcaacaacctaacaacaatggctgccgagatattatccctgcttgcgcttcttgcgctttttgcgagcgcaacaaatgcgtccattattccacaatgctcacttgctcctagttccattattccacagttcctcccaccagttacttcaatggccttcgaacacccagctgtgcaagcctataggctacaacaagcgattgcggcgagcgtcttacaacaaccaattgcccaattgcaacaacaatccttggcacatctaacaatacaaaccatcgcaacgcaacagcaacaacagttcctaccagcactgagccacctagccatggtgaaccctgtcgcctacttgcaacagcagctgcttgcatccaacccacttgctctagcanacgtagttgcaaaccagcaacaacaacaa

SEQ ID NO: 89718 - DNA, 434 bp, Zea mays
  unsure (1)..(434): unsure at all n locations
gggtcttcagaccattagctttatctactccagagcgcagaagaacccgatcgacaccatgagggtgttgctcgttgccctcgctctcctggctctcgctgcgagcgccacctccacgcatacaagcggcggctgcggctgccagccaccgccgccggttcatctaccgccgccggtgcatctgccacctccggttcacctgccacctccggtgcatctcccaccgccggtccacctgccgccgccggtccacctgccaccgccggtccatgtgccgccgccggttcatctgccgccgccaccatgccactaccctactcaaccgccccggcctcagcctcatccccagccacacccatgcccgtgccaacagccgcatccaagcccgtgccagctgcagggaacctgcngcgttggcagcaccccgatcctgg

SEQ ID NO: 89719 - DNA, 409 bp, Zea mays
caccagcggtgtcttcaatgtgtgaaatcccaattgttcaaccctacaggatccaacgggcaatcgcaacaggcatcttaccattatcacccttgttcctccaacaaccgtcagccctattacagcagttacctttggtccatttggtggcacaaaacatcagggcacaacaactacaacaacttgtgctagcaaaccttgctgcatactctcagcaacatcagtttcttccattcaaccaactggctgcattgaactctgctgcttatttgcaacaacaattaccattcagccagctagttgctgcctacccccagcaatttcttccattcaaccaactagcagcattgaactctgctgcttatttacagcagcaacaactactaccattcagccagctagctgatgt

SEQ ID NO: 89720 - DNA, 382 bp, Zea mays
cggacgcgtgggcggcgctgatggcggcccaggtagcgcagcagctgacggcgatgtgcggcctgcagctgcagcagccaggtccctgcccttgcaacgcagctgccggcggtgtctactactgaggaaactatgtactgtagtaataatgtaatggagccgctgactagctacctagctcgctagtttactcatttagcggcgatgagtaacgtagtgtcacccatcaccatgggtggcagtgtgagcaatgacctgaatgaaccattgaaatggaaaggaataatatataaggaaaaaagatgattggaaaaaaacaaagaaaaaataaaaaaaaaataaaaaaacaaaaaaataaaaaaaaaatacaaaaaaaacaact

SEQ ID NO: 89721 - DNA, 391 bp, Zea mays
  unsure (1)..(391): unsure at all n locations
gaaacacaccaagcgaagcgcactagcaacgacctaacaacaatggctaccaagatgagtagccctccttgcgcttcttgccctttttgtgagcgcaacaaatgcgttcattattccacaatgctcacttgctcctagtgccattattccacagttcctcccaccagttacttcaatgggcttcgaacacctagctgtgcaagccaacatgcaacaacaagcgcttgcggcgagcgtcttacaacaaccaattgcccaattgcaacaacaatccttgccacatctaacaatacaagccatcacaacgcaacagcaacaacagttcctaccagcactgagccacctagccatggtgaaccctgccgnctacttgcaagagcagctgcttgca

SEQ ID NO: 89722 - DNA, 429 bp, Zea mays
  unsure (1)..(429): unsure at all n locations
cagaccattagctttatctactccagagcgcagaagaacccgatcgacaccatgagggtgttgctcgttgccctcgctctcctggctctcgctgcgagcgccacctccacgcatacaagcggcggctgcggctgccagccaccgccgccggttcatctaccgccgccggtgcatctgccacctccggttcacctgccacctccggtgcatctcccaccgccggtccacctgccgccgccggtccacctgccaccgccggtccatgtgccgncgncggttcatctgccgncgncaccatgccactaccctaactcaaccgcccggcctcagcctcatccccagccacacccatgcccgtgccaacagccgcatccaagcccgtgccagctgcagggaacctgccgcgttggcagcaccccgatcctgggc

SEQ ID NO: 89723 - DNA, 396 bp, Zea mays
agcattcaaaaacacaccaagcgaagcgcactagcaacgacctaacaccaatggctggcaagatattagccctccttgcgcttcttgcccttttagtgagcgcaacaaatgcgttcattattccacagtgctcacttgctcctagtgccattattccacagttccttccaccagttacttcaatgggcttcgaacatccagccgtgcaagcctacaggctacaactagcgcttgcggcgagcgccttacaacaaccaattgcccaattgcaacaacaatccttggcacatctaaccctacaaaccattgcaacgcaacaacaacaacaacaacagtttctgccatcactgagccacctagccgtggtgaaccctgtcacctacttgcaacagtagc

SEQ ID NO: 89724 - DNA, 334 bp, Zea mays
aacaaatgcgttcattattccacaatgctcacttgctccgagtgccattattccacagttgctccctccagttacttcaatgggcttcgaacacccagctgtgcaagcctataggctacaacaagcgcttgcggcgagcgtcttagaacaaccaattgcccaattacaacaacaatccttggcacatctaaccatacaaaccatcgcaacgcagcagcaacaagcactgagccacctagccgtggtgaaccctatcgcctacttgcaacaacagctgcttgcatccaacccacttgctttggcaaacgtagctgcataccaacaacaacaacag

SEQ ID NO: 89725 - DNA, 473 bp, Zea mays
aattcccggctcgacgccacgcgtccgcaactagcaacatagaaagcacaatagtgtaccaacaatggcagccaaaatattttgggtccttatgctccttggtctttctgcaagtgctgctacggcgaccattttcccacaatgctcacaagctcctatagcttcccttcttcccccgtacctctcaccagcggtgtcttcggtatgtgaaaacccaattcttcaaccctatacgatccaacaggcaatcgcagctggcatcttacctttatcacccttgttcctccaacaatcatcagccctattacagcagttacctttggtgcatttattggcacaaaacatcagggcacaacaactacaacaacttgtgctagcaaaccttgctgcctactctcagcaacaacagtttcttccattcaaccaactagctgcattgaactctgcttcttatttgcaacaacaacaactac

SEQ ID NO: 89726 - DNA, 410 bp, Zea mays
gaaagcacatagtgtaccaacaatggcagccaaaatattttgcctccttatgctccgtgggctttctgcaagtgctgctacggcgaccattttcccgcaatgctcgcaagctcctatagcttcccttcttcccccgtacctctcaccagcggtgtcttcggtatgtgaaaacccaattcttcaaccctacaggatccaacaggcaatcgcagctggcatcttacctttatcacccttgttcctccaacaatcatcagccctattacaacagttacctttggtgcatttattggcacaaaacatcagggcacaacaactacaacaacttgtgctagcaaaccttgctgcctactctcagcaacagcagtttcttccattcaaccaactaggttcattgaactctgcttctt

SEQ ID NO: 89727 - DNA, 432 bp, Zea mays
ctggtctggaacacgccctcctgggttctgtagtgactgtagacaggtatgcagctgccgagggtttctataaactagctatggcctatgcacccgttccagatcttcacattatgtggttgcttcatctgtgtgatgcacaccaggagatgcaatcatgggctgaagcagcacaatgtgcagttgctgtagctggcgtgatcatgcaggcacttgttggaaggaatgatgctgtgtggagcaaggagcatgttgcttcgctgcgcaagatttgccctattgtcaacactgatgtgagtgcagaagcatctgcagctgaagtcgagggatatggtgcatcaaaattaacagtggactcagcggtcaaatatcttcaactagccaataaacttttcacacaagctgaactctaccatttttgtgcaagcattc

SEQ ID NO: 89728 - DNA, 432 bp, Zea mays
cagcaacaagcactgagccacctagccgtggtgaaccctatcgcctacttgcgacaacagctgcttgcatccaacccacttgctttggcaaacgtagctgcataccaacaacaacaacagttgcaacagtttctaccagcgctcagtcaactagccatggtgaaccctatcgcctacctacaacagcaacaacttctttcatctagcccgctcgctatgggcaatgcacctacatacctgcaacaacagttgttgcaacaacagttgctgcaacaaattgtaccagctcttactcagctagctgtggcaaaccctgctgcctacttgcaacaactacttccattcaaccaactgactgtgtcgaactctgctgcgtacctacaacagcgacaacagttacttaatccactagcggtggctaacccattggtc

SEQ ID NO: 89729 - DNA, 411 bp, Zea mays
accggtccggaattcccgggattcaaccaactggctgcattgaactctgctgcttatttgcaacaacaattaccattcagccagctagttgctgcctacccccagcaatttcttccattcaaccaactagcagcattgaactctgctgcttatttacagcagcaacaactactaccattcagccagctagctgatgtgagccctgctgccttcttgacacaacaacagttgttgccgttctacctgcacgctatgcctaacgctggcaccctcttacaactgcaacaattgctgccattcaaccaacttgctttgacaaactcaacagtgttctaccaacaacccatcattggtggtgccctcttttagattgcttatgagttatagttcaataatgaagttttttggatg

SEQ ID NO: 89730 - DNA, 141 bp, Zea mays
ctgtgacaaacccaacagtgttctactaacaacccatcattggtggtgccctcttttgtattgcttatgagttatagttcaataatgaagttttttggatgatgtttgtggcgtcccagaaataagaaagtacatttctag

SEQ ID NO: 89731 - DNA, 421 bp, Zea mays
cttagcaccaatggcagccaagatttttgcgctccttgccctccttgctctttcagcgggtgttgctaccgcgactattattccacaatgctcacaacaatacctctctccagtgatagccgcgagatttgaatacccatctatacaatcctacaggctacaagaggccatcacagcaagcatcttacggtcgttagcattgaccgtccaacaaccatatgccctattgcaacaaccatccttagtgaatctgtatctccaaagaatcacagcacaacaactacaacaacggttgcttccaacaattaatcaagtagttgcagcgaaccttgctgcttaccttcagcaacaacaatttcttccattcaatcaactagctggggtgaaccctgctgcttacttgcaggcacaacagctacta

SEQ ID NO: 89732 - DNA, 426 bp, Zea mays
cggacgcgtgggcaagctcctatagcttcccttcttcccccataccttccatcaatgatagcttcagtatgtgaaaacccagctcttcaaccctataggctccaacaagcaatcgcagcaagcaacatacctttatcacccttgtttcaacaatcgccagccctatctttggtgcagtcattggtacaaaccatcaaggcacagcagctgcagcaactcgtgctacctgtgatcaaccaagtagctctggcaaacctttctccctactatcagcaacaacaatttcttccattcaaccaactatctacactgaaccctgctgcttatttgcagcaacaactattaccattcagccagctagctactgcctactctcatcaacaacaacttcttccatttaaccaattggccgcactgaacctcgct

SEQ ID NO: 89733 - DNA, 406 bp, Zea mays
caacaagcaacatagaaagtggaatccagtagcaacaatagagcaacaatggcgaccgggatactttccctccttatgctccttgctctttctgcatgtgttgctaacgcgacaattttccctcaatgctcacaagctcctatagcttcccttcttcccccataccttccatcaatgatagcttcagtatgtgaaaacccagctcttcaaccctataggctccaacaagcaatcgcagcaagcaacatacctttatcacccttgtttcaacaatcgccagccctatctttggtgcagtcattggtacaaaccatcaaggcacagcagctgcagcaactcgtgctacctgtgatcaaccaagtagctctggcaaacctttctccctactatcagcaacaacaatttc

SEQ ID NO: 89734 - DNA, 338 bp, Zea mays
ctgactcagctagctgtggcaaaccctgctgcctacttgcaacagctgcttccattcaaccaactgactgtgtcgaactctgctgcgtacctacaacagcgacaacagttacttaatccactagcagtgcctaacccattggtcactgccttcctacagcagcaacaattgctaccatacagccagttctctttgatgaaccctgccttgtcgtggcagcaacccatcgttggaggtgccatcttttagattacatatgagatgtaatcgataatggtgccctcataccggcatgtgtttcctagaaataatcaatatattgattgacatttatctcg

SEQ ID NO: 89735 - DNA, 446 bp, Zea mays
actagcaacatagaaagcacaatagtgtaccaacaatggcagccaaaatattttgcttccttatgcgcctgggtctttctgcaagtgttgctaccgcaaccattttcccacaatgctcacaagctcctatagcttcccttcttcccccatacctctcaccagcggtgtcttcaatgtgtgaaaccccaattgttcaaccctacaggatccaacaggcaatcgcaacaggcatcttaccattatcacccttgttcctccaacaaccgtcagccctattacagcagttacctttggtccatttggtggcacaaaacatcagggcacaacaactacaacaacttgtgctagcaaaccttgctgcatactctcagcaacatcagtttcttccattcaaccaactggctgcattgaactctgctgcttatattcaacaacaattaccattc

SEQ ID NO: 89736 - DNA, 380 bp, Zea mays
gcgacatagaaagcacaatagtgtaccaacaatggcagccaaaatattttggctccgtatgctccttggtatttctgcaagtgctgctacggcgaccattttcccgcaatgctcacaagctcctatagcttcccttcttcccccgtacctctcaccagcggtgtcttcggtatgtgaaaacccaattcttcaaccctacaggatccaacaggcaatcgcagctggcatcttacctttatcacccttgttcctccaacaatcatcagccctattacagcagttacctttggtgcatttattggcacaaaacatcagggcacaacaactacaacaacttgtgctagcaaaccttgctgcctactctcagcaacagcagtttc

SEQ ID NO: 89737 - DNA, 420 bp, Zea mays
gtggaatccagtagcaacaatagagcatcaatggcgaccaagatactttccctccttatgctccttgctctttctgcatgtgttgctaacgcgacaattttccctcaatgctcacaagctcctatagcttcccttcttcccccataccttccatcaatgatagcttcagtatgtgaaaacccagctcttcaaccctataggctccaacaagcaatcgcagcaagcaacatacctttatcacccttgtttcaacaatcgccagccctatctttggtgcagtcattggtacaaaccatcaaggcacagcagctgcagcaactcgtgctacctgtgatcaaccaagtagctctggcaaacctttctccctactatcagcaacaacaatttcttccattcaaccaactatctacacttaaccct

SEQ ID NO: 89738 - DNA, 423 bp, Zea mays
ccagggaccacagcatctggattggctaaactgaaaccagtttttaaaaaggatgtgactacaactgcaggcaattgcagtcaagtgagtgatggtgctggagctgttcttctcatgaaaagatctgtggctctgaagaaagggctgcccattcttggtgttttcaggagctttgcggctgttggagtggatccagctgttatgggtgttggtcctgctgtggccattcctgctgctgtgaagtctgcaggccttgagattggcgacattgatctgtttgaactgaatgaggccttcgcctctcagtttgtctattgctgcaacaagttggggctggaccgttctaaagtaaatgtaaatggaagcgcgattgcccttggacaccctctgggtgcaacaggtgccccgtgtgtggctacttct

SEQ ID NO: 89739 - DNA, 406 bp, Zea mays
ccaagatattagccctccttgcgcttcttgccctttttgtgagcgcaacaaatgcggtcattattccacaatgctcacttgctcctagtgccattattccacagttcctcccaccagttacttcaatgggcttcgaacacctagctgtgcaagccaacatgcaacaacaagcgcttgcggcgagcgtcttacaacaaccaattgcccaattgcaacaacaatccttgccacatctaacaatacaagccatcacaacgcaacagcaacaacagttcctaccagcactgagccacctagccatggtgaaccctgccgcctacttgcaagagcagctgcttgcatccaacccacttgctctggcgaacgtagttgcaaaccagcaacaaccacagctacaaacagttct

SEQ ID NO: 89740 - DNA, 390 bp, Zea mays
ccgcagtgcaggactgaggatgagtgaagaggataaggctgctgcttctgctgagcggcctaagagggcccctaagctcaatgaaaggatcctctcctctctgtccaggaggtccgtagctgctcatccatggcatgatctcgagatcggtcctggtgctcctgctgtattcaatgttgttgttgagatcacaaagggaagcaaagtcaaatacgagcttgacaagaaaactggactgattaaggttgatcgagtcctttactcatcagttgtataccctcacaattatggtttcattccaaggactctttgtgaagacaatgacccaatggatgtgttggtcctgatgcaggagcctgttgttcctggttcgttcctgagagctagagc

SEQ ID NO: 89741 - DNA, 423 bp, Zea mays
cccacgcgtccgaacatagaaagcacaatagtgtaccaacaatggcagccaaaatatgttgggtccttatgctccttggtctttctgcaagtgctgctaccgcaaccattttcccacaatgctcacaagctcctatagcttcctttcttcccccatacctctcaccagcggtgtcttcagtatgtgaaaacccaattcttcaaccctacaggatccaacaggcaatcgcagcaggcatcttacctttatcacccttgttcctccaacaaccgtcagccctattacagcagttacctttggtgcatttgttggcacaaaacatcaaggcacaacaactacaacaacttgtgctaggaaaccttgctgcctactctcagcaacagcagtttcttccattcaaccaactggctgcattgaactctg

SEQ ID NO: 89742 - DNA, 408 bp, Zea mays
tccttagggttttgtggaggggcgatggcggctgctgatgtggagtaccgttgcttcgtcggcgggcttgcctgggccaccagcaacgagtcgctggagaatgccttcgcctcctacggcgagatcctcgactccaaggtcatcaccgaccgggagacggggaggtctcgcggcttcggcttcgttaccttctcctccgagaactccatgctcgacgctatcgagaacatgaacggcaaggagctcgacggccgtaacatcaccgttaaccaggcccagtcccgtggcggtggcggtggctgcggtggctacggcggctgtcgcggcggcggcggctatggtggcaggcgccgtgacagcggttatggcggcggtggcggctacggcggtcggcgcgagggtggtggc

SEQ ID NO: 89743 - DNA, 427 bp, Zea mays
  unsure (1)..(427): unsure at all n locations
cgcggtgggattctggatccgggagaccggtcaggccctcgatcgcctcggctgccgcctgcagggcaagtacttcttccacgagcagatttcaaggcatcgcaccatcatgaacatctttgacaaaaccccacatgttcatagggatgcatttgttgctccaagtgcatcccttattggtgatgttcaagtcgggcaaggagcttccatttggtatgggtgcgtcttaagaggggacgcaaacaacatacaaattggatctgggaccaatatacaagacaattctcttgtgcatgtggctaaatctaatctaagtgggaaagtctttccaacaatcattggcaataatgtcacaataggtcacagtgctgtgttacaaggatgcacggttgaagatgaagctnttgttggcatgggggccacccta

SEQ ID NO: 89744 - DNA, 429 bp, Zea mays
gaccaactagcaacatagaaagcacaatagtgtaccaacaatggcagccaaaatatgttgcttccttatgctccttggtctttctgcaagtgctgctaccgcaaccattttcccacaatgctcacaagctcctatagcttcctttcttcccccatacctctcaccagcggtgtcttcagtatgtgaaaacccaattcttcaaccctacaggatccaacaggcaatcgcagcaggcatcttacctttatcacccttgttcctccaacaaccgtcagccctattacagcagttacctttggtgcatttgttggcacaaaacatcaaggcacaacaactacaacaacttgtgctaggaaaccttgctgcctactctcagcaacagcagtttcttccattcaaccaactggctgcattgaactctgctgctta

SEQ ID NO: 89745 - DNA, 432 bp, Zea mays
gagcattcagaaacacacctagcgaatcgcactagcaacgacctaacaacaatggcttccaagacattatccctccttgcgcttcttgccctttttgtgagtgcaacaaatgcgttcattattccacaatgctcacttgctccgagtgccattattccacagttcctccctccagttacttcaatgggcttcgaacacccagctgtgcaagcctataggctacaacaagcgcttgcggcgagcgtcttagaacaaccaattgcccaattacaacaacaatccttagcacatctaaccatacaaaccatcgcaacgcagcagcaacaagcactgagccacctagccgtggtgaaccctatcgcctacttgcaacaacagctgcttgcatccaacccacttgctttggcaaacgtagctgcataccaacaacaa

SEQ ID NO: 89746 - DNA, 432 bp, Zea mays
tagcaacatagaaagcacaatagtgtaccaacaatggcagccaaaatattttgcttgcttatgctccttggtctttctgcaagtgttgctaccgcaaccattttcccacaatgctcacaagctcctatagcttcccttcttcccccatacctctcaccagcggtgtcttcaatgtgtgaaaccccaattgttcaaccctacaggatccaacaggcaatcgcaacaggcatcttaccattatcacccttgttcctccaacaaccgtcagccctattacagcagttacctttggtccatttggtggcacaaaacatcagggcacaacaactacaacaacttgtgctagcaaaccttgctgcatactctcagcaacatcagtttcttccattcaaccaactggctgcattgaactctgctgcttatttgcaacaa

SEQ ID NO: 89747 - DNA, 376 bp, Zea mays
aactacacatagaaatcacatagtgtgaccccaatggcagccaagtatttttgcttccttatgctcgttgtctttctgcaagtgctgctaccgcaaccattttcccacaatgctcacaagctcctatagcttcctttcttcccccatacctctcaccagcggtgtcttcagtatgtgaaaacccaattcttcaaccctacaggatccaacaggcaatcgcagcaggcatcttacctttatcacccttgttcctccaacaaccgtcagccctattacagcagttacctttggtgcatttgttggcacacaacatcatggcgcaacaactacaacaacttctgctactaaaacccgttgcttactactatcaacaaca

SEQ ID NO: 89748 - DNA, 371 bp, Zea mays
  unsure (1)..(371): unsure at all n locations
aatagtgtaccaacaatggcagccaaaatattttgcctccttatgctccttggtctgtctgcaagtgctgctacggcgaccattttcccacaatgctcacaagctcctatagcttcccttcttcccccgtacctctcaccagcggtgtcttcggtatgtgaaaacccaattcttcaaccctataggatccaacaggcaatcgcagctggcatcttacctttatcacccttgctcctccaacaatcatcagccctattacagcagttacctttggtgcatttattggcacanaacatcagggcacaacaactacaacaacttgtgctagcaaaccttgctgcctactctcagcaacaacagtttcttccatt

SEQ ID NO: 89749 - DNA, 421 bp, Zea mays
caactagcaacatagaaagcacaatagtgtaccaacaatggcagccaaaatatttggcttccttatgctccttggtctttctgcaagtgctgctaccgcaaccattttcccacaatgctcacaagctcctatagcttcctttcttcccccatacctctcaccagcggtgtcttcagtatgtgaaaacccaattcttcaaccctacaggatccaacaggcaatcgcagcaggcatcttacctttatcacccttgttcctccaacaaccgtcagccctattacagcagttacctttggtgcatttgttggcacaaaacatcaaggcacaacaactacaacaacttgtgctaagaaaccttgctgcctactctcagcaacagcagtttcttccattcaaccaactggctgcattgaactctgct

SEQ ID NO: 89750 - DNA, 395 bp, Zea mays
caactagcaacatagaaagcacaatagtgtaccaacaatggcagccaaaatattttgcgctccttatgctccttggtctttctgcaagtgctgctacggcgaccattttcccgcaatgctcgcaagctcctatagcttcccttcttcccccgtacctctcaccagcggtgtcttcggtatgtgaaaacccaattcttcaaccctacaggatccaacaggcaatcgcagctggcatcttacctttatcacccttgttcctccaacaatcatcagccctattacaacagttacctttggtgcatttattggcacaaaacatcagggcacaacaactacaacaacttgtgctagcaaaccttgctgcctactctcagcaacagcagtttcttccattc

SEQ ID NO: 89751 - DNA, 394 bp, Zea mays
caacaaccaattgcccaattgcaacaacaatccttgccacatctaacaatacaagccgtcaggacgcaacagcaacaacagttcctaccagcactgagccacctagccatggtgaaccctgccgcctacttgcaagagcagctgcttgcatccaacccacttgctctggcgaacgtagttgcaaaccagcaacaacaacagctacaacagtttctgccaacgctcagtcaactagccatggtgaaccctgccgcctacgtacaacaacaacaactgctttcatctagcccgctcgctgtgggcaatgcacctacatacctgcaacaacaattgttgcaacagattgtaccagctctgactcaactagctgtggcaaaacctgttgcctacttgc

SEQ ID NO: 89752 - DNA, 438 bp, Zea mays
  unsure (1)..(438): unsure at all n locations
tgctcacttgctcctagtgccattattccacagttcctcccaccagttacttcaatgggcttcgaacacctagctgtgcaagccaacatgcaacaacaagcgcttgcggcgagcgtcttacaacaaccaattgcccaattgcaacaacaatccttgccacatctaacaatacaagccatcacaacgcaacagcaacaacagttcctaccagcactgagccacctagccatggtgaaccctgccgcctacttgcaagagcagctgcttgcatccaacccacttgctctggcgaacgtagttgcaaaccagcaacaacaacagctacaacagtttctgccaacgctcagtcaactagccatggtgaaccctgccgnctacgtacaacaacaacaactgctttcatctagcccgctcgctgggggcaatgcacctacatac

SEQ ID NO: 89753 - DNA, 424 bp, Zea mays
attcttcaaccctacaggatccaacaggcaatcacagctggcatcttacctttatcggccttgttcctccaacaatcatcagccctattacatcagttacctttggtgcatttattggcacaaaacatcagggcacaacaactacaacaacttgtgctagcaaaccttgctgcctactctcagcaacagcagtttcttccattcaaccaactaactgcattgaactctgcttcttatttgcaacaacaacaactaccattcagccagctacctgctgcctacccccagcaatttcttccattcaaccaactggcagcattgaactctcctgcttatttacagcagcaacaactactaccattcagccagctagctggtgtgagccctgctaccttcttgatacaaccacagttgttgccgttct

SEQ ID NO: 89754 - DNA, 170 bp, Zea mays
accggtccggaattcccgggtttgaccttcgtatgacctatggttctatctcaactaccatctttacaacatctaataatacaatccggcacgtctcatcaccaacaacggttcctaccatctctgaaccatctatccatgaagaaccctgcctactacttacaaagaca

SEQ ID NO: 89755 - DNA, 430 bp, Zea mays
caccagcgcggcggcggcgaccatggctgtcggaaagaacaagaggatctccaagggaaagaagggtggcaagagaaagaccgtcgaccctttctctaagaaggattggtatgacatcaaggcaccgtcggtgttcagtgtgcgcaacatcgggaagactctcgtatccaggacacagggtaccaggattgcttctgagggtctgaagcacagagtctttgaggtttgcctagctgatcttcagggcgacgaggatcaagcttacaggaaaatcaggctccgtgctgaagatgtgcagggcaggaatgtgctcacaaacttttggggtatgaattttaccactgataaactgagatccctagtgaagaagtggcagacattaatcgaagcccatgttgatgtcaagacaaccgacaactacatgttgcgt

SEQ ID NO: 89756 - DNA, 429 bp, Zea mays
aagcaacatagaaagtagaatccattagcaacaatagagcaacaatggcgaccaaggtattttccctccttatgctccttgctctttctacatgtgttgctaacgcgacaattttccctcaatgctcacaagctcctatagcttcccttcttcccccataccttccatcaattatagcttcagtatgtgaaaacccagctcttcaaccatataggcttcaacaagcaatcgcagcaagcaacatacctttatcgcccttgttgtttcaacaatcaccagccctatctttggtgcagtcattggtacaaaccatcatggcacaacagctgcagcaactcgtgctacctgtgatcaaccaagtagctctggcaaacctttctccctactctcagcaacaacaatttcttccattcaaccaactgtctacac

SEQ ID NO: 89757 - DNA, 432 bp, Zea mays
  unsure (1)..(432): unsure at all n locations
cgcaaattgcaccaagaaatccatcgagaggccgtcgacaggggaattaatggcgtcgtcgtctagcagcagccaccgccgcctcatcctcgcagccgccgtcctgctctccgtgctcgcggctgccagcgccagcgccgggacctcctgcgtgccggggtgggccatcccgcacaacccgctcccgagctgccgctggtacgtgaccagccggacctgcggcatcgggccgcgcctcccgtggccggagctgaagaggagatgctgccgggagctggcggacatcccggcgtactgccggtgcacggcgctgagcatcctcatggacggcgcgatcccgccgggcccggacgcgcagctggagggccggctagaggacctgccgggctgcccgcgggaggtgcagaggggattcggcgncaccctcgtcac

SEQ ID NO: 89758 - DNA, 455 bp, Zea mays
cggaattcccgggggagcaacatagaaagcacaatagtgtaccaacaatggcagccaaaatattttgcctccttatgctccttgagctttgtgcaagtgctgctacggcgaccattttcccacaatgctcacaagctcctatagcttcccttcttcccccgtacctctcaccagcggtgtcttcggtatgtgaaaacccaattcttcaaccctataggatccaacaggcaatcgcagctggcatcttacctttatcacccttgttcctccaacaatcatcagccctattacagcagttacctttggtgcatttattggcacaaaacatcagggcacaacaactacaacaacttgtgctagcaaaccttgctgcctactctcagcaacaacagtttcttccattcaaccaactagcttcattgaactctgcttcttatttgcaaccacaacaacta

SEQ ID NO: 89759 - DNA, 434 bp, Zea mays
gaccaactagcaacatagaaagcacaatagtgtaccaacaatggcagccaaaatatggtgcctgcttatgctccttggtctttctgcaagtgctgctacggcgaccattttcccgcaatgctcgcaagctcctatagcttcccttcttcccccgtacctctcaccagcggtgtcttcggtatgtgaaaacccaattcttcaaccctacaggatccaacaggcaatcacagctggcatcttacctttatcacccttgttcctgcaacaatcatcagccctattacatcagttacctttggtgcatttattggcacaaaacatcagggcacaacaactacaacaacttgtgctagcaaaccttgctgcctactctcagcaacagcagtttcttccattcaaccaactagctgcattgaactctgcttcttatttgc

SEQ ID NO: 89760 - DNA, 471 bp, Zea mays
  unsure (1)..(471): unsure at all n locations
gtccggattcccggggtagttgcaaaccagccacaacaacagctgcaacagtttctgccagcgctcagtcaactagccatggtgaacgctgccgcctacctacaacagcaacaactgctttcatctagcccgctcgctgtggccaatgcacctacatacctgcaacaacaattgttgcaacagattgtaccagctctgactcagctagttgtggcaaaccctgctgcctacttgcaacagctgcttccattcaaccaactgactatgtcgaactctgctgcgtacctacaacagcgacaacagttacttaatccactagcagtggctaacccattggtcgctgncttcctacagcagcaacaattgctgccatacaaccagttctctttgataaaccctgtcttgtcgaggcagcaacccatcgttggaggtgccatcttttagattacatatgagatgtactcgataatg

SEQ ID NO: 89761 - DNA, 367 bp, Zea mays
ggcagccaaaatattttgcctcattatgctccttggtctttctgcaagtgctgctacggcgagcattttcccgcaatgctcacaagctcctatagcttcccttcttcccccatacctctcaccagcgatgtcttcagtatgtgaaaatccaattcttctaccctacaggatccaacaggcaatcgcagcaggcatcttacctttatcacccttgttcctccaacaatcatcagccctattacagcagttacctttggtgcatttattggcacaaaacatcagggcacaacaactacaacaactcgtgctagcaaaccttgctgcctactctcagcaacagcagttacctttggtgcatttgttggca

SEQ ID NO: 89762 - DNA, 427 bp, Zea mays
agaaagcacaatagtgtaccaacaatggcagccaaaatattttgcctccttaggctgcttggtctttctgcaagtgctgctacggcgaccattttcccgcaatgctcgcaagctcctatagcttcccttcttcccccgtacctctcaccagcggtgtcttcggtatgtgaaaacccaattcttcaaccctacaggatccaacaggcaatcacagctggcatcttacctttatcacccttgttcctccaacaatcatcagccctattacatcagttacctttggtgcatttattggcacaaaacatcagggcacaacaactacaacaacttgtgctagcaaaccttgctgcctactctcagcaacagcagtttcttccattcaaccaactagctgcattgaactctgcttcttatttgcaacaaccac

SEQ ID NO: 89763 - DNA, 415 bp, Zea mays
tgacaatccaacaacaacgaagaatgttgaagggttccaagttgacaatccttttagagatatgcatgaaatgatgccatctcatctggattttgaggaacagaagactgaagagggtagggctgttgggccagtcatggatgcttcctttaaagacaatgattttgaatacttgcagattataaagaatgaagaccttgaagagcttagagaacttggttcaggcacatttggaactgtataccatggaaaatggaggggcagtgatgtagccattaagagaataaagaaaagttgcttcacaggacggtcttcagagctagaaagactagcacacgaattctggcgagaagctgaaattctttcaaagcttcatcatccaaatgttgtggcattttatggtgttgtgaaagat

SEQ ID NO: 89764 - DNA, 412 bp, Zea mays
cagaccattagctttatctactccagagcgcagaagaacccgatcgacaccatgagggtgttgctcgttgcccgcgctctcctggctctcgctgcgagcgccacctccacgcatacaagcggcggctgcggctgccagccaccgccgccggttcatctaccgccgccggtgcatctgccacctccggttcacctgccacctccggtgcatctcccaccgccggtccacctgccgccgccggtccacctgccaccgccggtccatgtgccgccgccggttcatctgccgccgccaccatgccactaccctactcaaccgccccggcctcagcctcatccccagccacacccatgcccgtgccaacagccgcatccaagcccgtgccagctgcagggaacctgcggcgtttgca

SEQ ID NO: 89765 - DNA, 417 bp, Zea mays
caacgccaaacatgccctgactggccagtctttcaaccgctccttcagcgggagcggggcatccatggacattgtggtgtccagtgtcagagcttacctgagcgccctgaacaagatctgcagtttcgctggcgccgtgaaagccagcagcgatgtagctgagaccgcaagcgtcccgagcacagaatgagctcccgtttggttcagagtgacatgttgttcaaaatttctgctggaaggatcgtcccttgagcttaggacaggcaggaagtcttgggacctatgtagtgtacaatttctgtgtgtcatataccgtgctcgttgccagtttgtactgtaccatatataaaccatagaatctgttgccatttagaagtctggccaaggtcagctgtaatgcttcacatgcttatagcc

SEQ ID NO: 89766 - DNA, 502 bp, Zea mays
  unsure (1)..(502): unsure at all n locations
agtgnagtctgcgattatgaatatattggatactcgtaccggtccggaattcccggggggacccacgcgtccgtatgttcaaaagggggagaaagtagtatttcaaaaatggtatatcaaaaccctctggaacactaagaggtggatctcttttagggggagttttgtttagtcaaaggaaaagcatttgaaacagggggaggaaatttcaaatcttgaaaatgcttttgcaaactcttatttatttaccttgactatttgcaaaagatctatgaaatggatttacaaaaaggttttgcaaaaacaaaacaagtggtgcaaacgtggtccaaaatgttatataagaaagaaacattccttgcatatcttgtaagtagttatattggctaaattccaagcaacctttgcacttattttatgcaaactagttcaattatgcacttctatatttgctttggtttgtgttggcatcaatcaccananagggggagattgaaaggga

SEQ ID NO: 89767 - DNA, 417 bp, Zea mays
cattgaactctgctgcttatttgcaacaacaattaccattcagccagctagttgctggctacccccagcaatttcttccattcaaccaactagcagcattgaactctgctgcttatttacagcagcaacaactactaccattcagccagctagctgatgtgagccctgctgccttcttgacacaacaacagttgttgccgttctacctgcacgctatgcctaacgctggcaccctcttacaactgcaacaattgctgccattcaaccaacttgctttgacaaactcaacagtgttctaccaacaacccatcattggtggtgccctcttttagattgcttatgagttatagttcaataatgaaattttttggatgatgtttgtggcgtcccagaaataagaaagtacatttctagatt

SEQ ID NO: 89768 - DNA, 423 bp, Zea mays
tgagcattcagaaacacaccaagcgaagcacattagcaacaacctaacaacaatggggaccaagatattatccctccttgcgcttcttgcgctttttgcgagcgcaacaaatgcgttcattattccacaatgctcacttgctccaagttccattattacacagttcctcccaccagttacttcaatgggcttcgaacacccagctgtgcaagcctataggctacaacaagcaattgcggcgagcgtcttacaacaaccaatttcccagttgcaacaacaatccttggcacatctaacaatacaaaccatcgcaacgcaacagcaacaacaattcctaccagcactgagccacctagccatggtgaaccctgccggctacttgcaacagcagttgcttgcatcaaacccacttgctctggcaaa

SEQ ID NO: 89769 - DNA, 433 bp, Zea mays
cactagcaacatagaaagcacaatagtgtaccaacaatggcagccaaaatattttggttccttatgctccttggtctttctgcaagtgctgctaccgcaaccattttcccacaatgctcacaagctcctatagcttcctttcttcccccatacctctcaccagcggtgtcttcagtatgtgaaaacccaattcttcaaccctacaggatccaacaggcaatcgcagcaggcatcttacctttatcacccttgttcctccaacaaccgtcagccctattacagcagttacctttggtgcatttgttggcacaaaacatcaaggcacaacaactacaacaacttgtgctaggaaaccttgctgcctactctcagcaacagcagtttcttccattcaaccaactggctgcattgaactctgctgcttatttgcaac

SEQ ID NO: 89770 - DNA, 458 bp, Zea mays
tcggattcccggtcgacctacgcgtccgcaactagcaacatagaaagcacaatagtgtaccaacaatggcagccaaaatatttgagttccttatgctccttggtctttctgcaagtgctgctaccgcaaccattttcccacaatgctcacaagctcctatagcttcctttcttcccccatacctctcaccagcagtgacttcagtatgtgaaaacccaattcttcaaccctacaggatccaacaggcaatcgcagcaggcatcttacctttatcacccttgttcctccaacaaccgtcagccctattacagcatttacctttggtgcatttgatggcacaaaacatcaaggcacatcaactacaacaacttgtgcttggaaacctttctgcctactctcagcaacagcagtttcttccattcaaccaactggctgcattgaactctgctgcttatttg

SEQ ID NO: 89771 - DNA, 427 bp, Zea mays
cttcctttcttcccccatacctctcaccagcggtgtcttcagtatgtgaaaacccagttcttcaaccctacaggatccaacaggcaatcgcagcaggcatcttacctttatcacccttgttcctccaacaaccgtcagccctattacagcagttacctttggtgcatttgttggcacaaaacatcaaggcacaacaactacaacaacttgtgctaggaaaccttgctgcctactctcagcaacagcagtttcttccattcaaccaactggctgcattgaactctgctgcttatttgcaacaacaactaccattcagtcagctagctgctgcctacccccagcaatttcttccattcaaccaactggcagcattgaactctgctgcttatttacaacagcaacagctaccaccattcaaccagctagc

SEQ ID NO: 89772 - DNA, 337 bp, Zea mays
gcaatttcttccattcaaccaactagcagcattgaactctgctgcttatttacagcagcaacaactactaccattcagccagctagctgatgtgagccctgctgccttcttgacacaacaacagttgttgccgttctacctgcacgctatgcctaacgctggcaccctcttacaactgcaacaattgctgccattcaaccaacttgctttgacaaacccaacagtgttctaccaacaacccatcattggtggtgccctcttttagattgcttatgagttatagttcaataatgaagttttttggatgaaaaaaaaaaaagctaagctgatgactacc

SEQ ID NO: 89773 - DNA, 411 bp, Zea mays
cagcctagcaattagctcatcgactccagattggagaactcgacaccatgaaggtgctgatcgttgcccttgctctcctggcgctcgctgcgagcgccgcctccagtacaagcggcggctgtggctgccagacaccaccgtttcatctaccgcctccgttctatatgccgcctccgttctatctgccgccgcagcagcagccgcagccatggcaataccccactcaaccaccgcagctaagcccgtgccagcagttcggatcctgcggcgtcggcagcgtcggcagcccgttcctgggccagtgcgtcgagttcctgaagcaccagtgcagcccggcggcgacgccctacggctcgccacagtgccaggcgctgcagcagcagtgctgccaccagatcaggcaggtggagc

SEQ ID NO: 89774 - DNA, 391 bp, Zea mays
cagcattcaaaaacacaccaagcgaagcgcactagcaacgacctaacaccaatggcgaccaagatattagccctccttgcgcttcttgcccttttagtgagcgcaacaaatgcgttcattattccacagtgctcacttgctcctagtgccattattccacagttcctcccaccagttacttcaatgggcttcgaacatccagccgtgcaagcctacaggctacaactagcgcttgcggcgagcgccttacaacaaccaattgcccaattgcaacaacaatccttggcacatctaaccctacaaaccattgcaacgcaacaacaacaacaacaacagtttctgccatcactgagccacctagccgtggtgaaccctgtcacctacttgcaac

SEQ ID NO: 89775 - DNA, 423 bp, Zea mays
agcgagctttccttcggaactctctcgtgctcacctcatccgtccgacagatccacgcgaatcctctgattcagagcagggtgttggcattgatcagacgcctgccatggcggatcagttcgaggattcggcgaacaatgtgatcattgaggaggtgaacaagggcctgaacccaggaatggtggttctgcttgtggttgcaagcttcctgctgatcttctttgtggggaactatgcgctgtatgtgtatgcgcagaagacgctcccgccaaagaagaagaagccggtgtcgaagaagaagctgaagaaggaaaagctgaagcagggggtctctgcgccgggagagtaaacggccatgctgccgatccttccgtccagagctcctattcacatgattattagagaaaaaaattatatatatat

SEQ ID NO: 89776 - DNA, 398 bp, Zea mays
aactattaccatttagccagctagctactgcctactctcagcaacaacaacttcttgcatttaaccaattggccgcactgaaccccgctgcttatttgcagcagcaaatactactgccatttagcgagctagctgcagcaagtcgtgcttccttcttgacacagcaacagttgctgcctttctacaagcagtttgcggctaaccccgcaaccctcttacaactacaacaattgttgccctttgtccaacttgctttgacaaacccagcagcctcctaccaacaacacatcattggtggtgccctcttttagattgattattagttgtaattcaataataaagttttttggatgatgtatgtggccaaccagaaataagaagttacatttccagattct

SEQ ID NO: 89777 - DNA, 426 bp, Zea mays
attgagaccaacaagcaacatagaaagtggaatacagtagcaacaatagagcaacagtggcggccaagatattttccatccttatgctccttgctctttctgcatgtgttgctaacgcgaccatttttcctcaatactcacaagctcctatagctgcccttcttcccccataccttccatcaatgaccgcttcagtttgtgaaaacccagcccttcaaccctacaggctccaacaagcaatcgcaacaagcaacttacctttatcacccctgttctttcaacaatcgccagccctatctttggtgcagtcattggtacaaaccatcagggcacaacagctgcaacaactcgtgctaccagtgatcagccaagtagctctggcaaacctttctccctactctcagcaacaacaatttctttccattc

SEQ ID NO: 89778 - DNA, 417 bp, Zea mays
cgaacctcgagtgccggatgtatgagcagcggttcccggaggtggatgccgcggtgatgatccaggtgaagcacatcgctgacatgggcgcgtacgtctccctgctcgagtacaacaacatcgagggcatgatcctcttctccgagctctcccgccgtcgtatccgctccatctcctccctcatcaaggttggtcgccaggagcccgccatcgtgctccgtgtcgaccgcgacaagggctacatcgacctttcaaagcgccgcgtctccgaggaggaggcgcacgcatgcgaggacaggtacaacaagtccaagctcgtgcactccatcatgcgccacgtcgccgagacgctcgaggtcgacctcgagccgctctaccagcggattggctggccgctctaccggaagtacggtcacg

SEQ ID NO: 89779 - DNA, 353 bp, Zea mays
tccatcgagaggccgtcgacaggggaattaatggcgtcgtcgtctagcagcggccagcgccgcctcatcctcgcagccgccgtcctgctctccgtgctcgcggctgccagcgccagcgccgggacctcctgcgtgccggggtgggccatcccgcacaacccgctcccgagctgccgctggtacgtgaccagccggacctgcggcatcgggccgcgcctaccgtggccggagctgaagaggagatgctgccgggagctggcggacatcccggcgtactgccggtgcacggcgctgagcattctaatggacggcgcgatcccgccgggcccggacgcgcaactggagggccgtct

SEQ ID NO: 89780 - DNA, 295 bp, Zea mays
cagccgcaaagcggccaggtcgcggggctgttggcggcgcagatagcgcagcaactgacggcgatgtgcggcctgcagcagccgactccatgcccctacgctgctgccggcggtgtcccccactgaagaaactatgtgctgtagtatagccgctggctagctagctagttgagtcatttagcggcgatgattgagtaataatgtgtcacgcatcaccatgggtggcagtgtcagtgtgagcaatgacctgaatgaacaattgaaatgaaaagaaaaaaagtactccatctgttcc

SEQ ID NO: 89781 - DNA, 284 bp, Zea mays
cggacgcgtgggctagcaacatagaatgcacaatagtgtaccaacaatggcagccagaatattttgcctccttatgctccttggtatttctgcaagtgctgctacggcgaccagtactagctaccagggttaaaaaaaaaagagtgagtcggcgcgacgtgcaaggcgcagcatgtgtactgtgcgcgtgcaaatccagaatgacgtagctctgacgtgggctcgcaatattctcgcgtgttcgttacaataatgataataactatgaggaataaaaaaaagaa

SEQ ID NO: 89782 - DNA, 352 bp, Zea mays
tttgagcattcagaaacacaccaagcgaagcgcactagcaacgacctaacaacagtggctaccaagatattagccctccttgcgcttcttgccctttttgtgagcgcaacaaatgcgttcattattccacaatgctcacttgctcctagtgccattattccacagttcctcccaccagttacttcaatgggcttcgaacacctagctgtgcaagccaacatgcaacaacaagcgcttgcggcgagcgtcttacaacaaccaattgcccaattgcaacaacaatccttgccacatctaacaatacaagccatcacaacgcaacagcaacaacagttcctaccaacactgagcc

SEQ ID NO: 89783 - DNA, 392 bp, Zea mays
aaggaattggacgcgaggagactcgagtactcgacagggaaaagtcgaggcctcggggccatcgactcgtgaagatgtcctcgcccgccgagtactacaaatcacttccacctataagcaaggcatatgggacattgtgtttcttcaccactgtgctagttcggctccatatcctgaatccgctgtttctgtacttatattaccctcgggtgttcaagaagtttgaggtatggaggatatttacaagtttcttcttcctgggaccattttccataaactttggtattcgccttctgatgatagcaaggtatggtgtcatgttggaaaagggagcatttgataaacggactgcagatttcttgtggatgatgatatttggtgccatctcacta

SEQ ID NO: 89784 - DNA, 361 bp, Zea mays
attggcacaaaacatcagggcacaacaactacaacaacttgtgctagcaaacctggctgcctactctcagcaacagcagtttcttccattcaaccaactagctgcattgaactctgcttcttatttgcaacaacaacaactaccattcagccagctatctgctgcctacccccagcaatttcttccattcaaccaactgacagcattgaactctcctgcttatttacagcagcaacaactactaccattcagccagctagctggtgtgagccctgctaccttcttgacacaaccacagttgttgccgttctaccagcacgctgcgcctaacgctggcaccctcttacaactgcaacaattg

SEQ ID NO: 89785 - DNA, 433 bp, Zea mays
gcacaatagtgtaccaacaatggcagccaaaatattttgcttccttatgctccttgggctttctgcaagtgctgctaccgcaaccattttcccacaatgctcacaagctcctatagcttcctttcttcccccatacctctcaccagcggtgtcttcagtatgtgaaaacccaattcttcaaccctacaggatccaacaggcaatcgcagcaggcatcttacctttatcacccttgttcctccaacaaccgtcagccctattacagcagttacctttggtgcatttgttggcacaaaacatcaaggcacaacaactacaacaacttgtgctaagaaaccttgctgcctactctcagcaacagcaggttcttccattcaaccaactggctgcattgaactctgctgcttattgcaacaacactaccaatcagtca

SEQ ID NO: 89786 - DNA, 437 bp, Zea mays
caactagcaacatagaaagcacaatagtgtaccaacaatggcagccaaaatattttgcctccttatgctccttggtctttctgcaagtgctgctacggcgaccattttcccgcaatgctcgcaagctcctatagcttcccttcttcccccgtacctctcaccagcggtgtcttcggtatgtgaaaacccaattcttcaaccctacaggatccaacaggcaatcgcagctggcatcttacctttatcacccttgttcctccaacaatcatcagccctattacaacagttacctttggtgcatttattggcacaaaacatcagggcacaacaactacaacaacttgtgctagcaaaccttgctgcctactctcagcaacagcagtttcttccattcaaccaactaggttcattgaactctgcttcttaattgcaacaac

SEQ ID NO: 89787 - DNA, 434 bp, Zea mays
ggccatcggggtcggaggatctcactgttttcttcctgctgcctgctgcatttttcgcagggtgtgggagctgagttgggaggaggactgctgcagccatgaaggccctcattctcgtcggaggcttcggcacccgcctgcgcccgctcacgctcagcgtgcccaagccgctcgtggatttcggcaacaagcccatgatcctgcaccagatcgaggctctgaaggaagttggtgttacagaggttgtcctggccatcaattaccagcctgaggtcatgctcaactttctcaaggacttcgagagcaagcttggcatcaagatcacctgctcgcaggagacggagcccctcgggaccgcatgcccgctggcgctggcccgcgacaagctcggcgacggatccggcgaccctttcttcgtgctcaacagcgacgtg

SEQ ID NO: 89788 - DNA, 427 bp, Zea mays
ctttggtgcatttattggcacaaaacatcagggcacaacaactacaacaacttgtgctagcaaaccttgctgcctactctcagcaacagcagtttcttccattcaaccaactaggttcattgaactctgcttcttatttgcaacaacaacaactaccattcagccagctacctgctgcctacccccagcaatttcttccattcaaccaactagcagcattgaactctcctgcttatttacagcagcaacaactactaccattcagccagctagctggtgtgagccctgctaccttcttgacacaaccacagttgttgccgttctaccagcacgttgcgcctaacgctggcaccctcttacaactgcaacaattgctgccattcaaccaacttgctttgacaaacccagcagtgttctaacaacaacc

SEQ ID NO: 89789 - DNA, 394 bp, Zea mays
ctcatcgactccagattggagaactctacaccatgaaggtgctgatcgttggcctggctctcctggcgctcgctgcgagcgccgactacagtacaagcggcggctgcggctgccagacaccaccgtttcatctaccgcctccgttctatatgccgcctccgagctatctgccgccgcagcagcagccgcatccatggcaataccccactcaaccaccgcagctaagcccgtgccagcagttcggatcctgcggcgtcgacagcgtcggcagcccgttcctgggccagtgcgtcgagttcctgaggcaccagtgcagcccggcggcgacgccctacggctcgccacaatgccaagcgctgcaacagcagtgctgccaccagatcaagcaagtgga

SEQ ID NO: 89790 - DNA, 429 bp, Zea mays
cccacgcgtccgcttcccttcttcccccataccttccatcaattatagcttgagtatgtgaaaacccagctcttcaaccatataggcttcaacaagcaatcgcagcaagcaacatacctttatcgcccttgttgtttcaacaatcaccagccctatctttggtgcagtcattggtacaaaccatcagggcacaacagctgcagcaactcgtgctacctgtgatcaaccaagtagctctggcaaacctttctccctactctcagcaacaacaatttcttccattcaaccaactgtctacactgaaccctgctgcttatttgcagcaacaactattaccatttagccagctagctactgcctactctcagcaacaacaacttcttccatttaaccaattggccgcactgaaccccgctgcttatttgcagc

SEQ ID NO: 89791 - DNA, 412 bp, Zea mays
taccggtccggaattcccgggctggcagcattgaactctcctgcttatttacagcagcaactcgtgctacctctgatcaaccaagtagctctggcaaacctttctccctactctcagcaacaacaatttcttccattcaaccaactgtctacactgaaccctgctgcttatttgcagcaacaactattaccatttagccagctagctactgcctactctcagcaacaacaacttcttccatttaaccaattggccgcactgaaccccgctgcttatttgcagcagcaaatactactaccatttagccagctagctgcagcaaaccgtgcttccttcttgacacagcaacagttgctgcctttctaccagcagtttgcggctaaccccgcaaccctcttacaactacaacaat

SEQ ID NO: 89792 - DNA, 459 bp, Zea mays
  unsure (1)..(459): unsure at all n locations
taccggtccggaattcccgggtcagaccattagctttatctactccagagcgcagaagaacccgatcgacaccatgagggtgttgctcgttgggctcgctctcctggctctcgctgcgagcgccacctccacgcatacaagcggcggctgcggctgccagccaccgccgccggttcatctaccgccgccggtgcatctgccacctccggttcacctgccacctccggtgcatctcccaccgccggtccacctgccgccgccggtccacctgccaccgccggtccatgtgccgccgccggttcatctgccgccgccaccatgccactaccctactcaaccgccccggcctcagcctcatccncagccacacccatgcccgtgccaacagccgcatccaagcccgtgccagctgcagggaacctgcggcgttggcagcaccccgatcctgggccagtgcgt

SEQ ID NO: 89793 - DNA, 401 bp, Zea mays
gcaacatagaaagcacaatagtgtaccaacaatggcagccaaaatattttgcctccgtatgctccttggtctttctgcaagtgctgctacggcgaccattttcccacaatgctcacaagctcctatagcttcccttcttcccccgtacctctcaccagcggtgtcttcggtatgtgaaaacccaattcttcaaccctataggatccaacaggcaatcgcagctggcatcttacctttatcacccttgttcctccaacaatcatcagccctattacagcagttacctttggtgcatttattggcacaaaacatcagggcacaacaactacaacaacttgtgctagcaaaccttgctgcctactctcagcaacaacagtttcttccattcaaccaactagctg

SEQ ID NO: 89794 - DNA, 411 bp, Zea mays
gaccaactagcaacatagaaagcacaatagtgtaccaacaatggcagctaaaatatggtgcctccttatgctccttggtctttctgcaagtgctgctacggcgaccattttcccacaatgctcacaagctcctatagcttcccttcttcccccgtacctctcaccaacggtgtcttcggtatgtgaaaacccaattcttcaaccctacaggatccaacaggcaatcgcagctggcatcttacctttatcacccttgttcctccaacaatcatcagccctattacagcagttacctttggtgcatttattggcacaaaacatcaaggcacaacaactacaacaacttgtgctagcaaaccttgctgcctactctcagcaacagcaagttcttccattcaaccaactagctgc

SEQ ID NO: 89795 - DNA, 425 bp, Zea mays
attgagaccaacaagcaacatagaaagtggaatccagtagcaacaatagagcaacagtggcgaccaagatattttccctccttatgctccttgctctttctacatgtgttgctaacgcgacaattttccctcaatgctcacaagctcctatagcttcccttcttcccccataccttccatcaattatagcttcaatatgtgaaaacccagctcttcaaccatataggcttcaacaagcaatcgcagcaagcaacatacctttatcgcccttgttgtttcaacaatcgccagccctatctttggtgcagtcattggtacaaaccatcagggcacaacagctgcagcaactcgtgctacctctgatcaaccaagtagctctggcaaacctttctccctactctcagcaacaacaatttcttccattc

SEQ ID NO: 89796 - DNA, 375 bp, Zea mays
ccaacaagcaacatagaaagtggaatacagtagcaacaatagagcaacaatggcgggcaagagattttccatccttatgctccttgctctttctgcatgtgttgctaacgcgaccattattcctcaatactcacaagctcctatagctgcccttctttccccataccttccatcaatgaccgcttcagtttgtgaaaacccagcccttcaaccctacaggctgcaacaagcaatcgcaacaagcaacttacctttatcacccctgatctttcaacaatcgccagacctatctttggtgcagtcattggtacaaaccatcagggcacaacagctgctacaactcgtgctaccagtgatcagccaagtagctctggc

SEQ ID NO: 89797 - DNA, 434 bp, Zea mays
gtttgatggtttccgttttgatggtgtgacctccatgatgtacactcatcacggatgacaagtaacatttacggggaacttcaatgagtattttggctttgccaccgatgtagatgcagtggtttacttgatgctggtaaatgatctaattcatggactttatcctgaggctgtaaccattggtgaagatgttagtggaatgcctacatttgcccttcctgttcacgatggtggggtaggttttgactatcggatgcatatggctgtggctgacaaatggattgaccttctcaagcaaagtgatgaaacttggaagatgggtgatattgtgcacacactgacaaataggaagtggttagagaagtgtgtaacttatgctgaaagtcatgatcaagcattagtcggcgacaagactattgcgttttgggtgatgg

SEQ ID NO: 89798 - DNA, 399 bp, Zea mays
cgcgtccgcgaattctcaggcagacgaagaccacacgaggtcgggaagaccgaagaccgagccgtgcgggggctcgggacgggaacgggacaggaccccaaaatctcagatccttcctgcccgcccgcccgtgcccgtcgacgcgtcgttcttgccggccgcgccttacctacgccctctcctactccagggggatcggatacgccacaggctgcgcgatggtgctgtgggtcttcggctacggctccctcatctggaaccccggcttctacttcgacgacaaaatcctcggcttcatcaagggctacaagcgcacctttaatctcgcttgcattgaccacagaagcacactcgaacattcgggcaggacctgcacgcttgaaaccgacgactaggcca

SEQ ID NO: 89799 - DNA, 432 bp, Zea mays
cccacgcgtccgattgagaccaactagcaacatagaaagcacaatagtgtaccaacaatggcagccaaaatattttgcctccttatgctccttggtctttctgcaagtgctgctacggcgaccattttcccgcaatgctcgcaagctcctatagcttcccttcttcccccgtacctctcaccagcggtgtcttcggtatgtgaaaacccaattcttcaaccctacaggatccaacaggcaatcacagctggcatcttacctttatcacccttgttcctccaacaatcatcagccctattacatcagttacctttggtgcatttattggcacaaaacatcagggcacaacaactacaacaacttgtgctagcaaaccttgctgcctactctcagcaacagcagtttcttccattcaaccaactagcttgcatg

SEQ ID NO: 89800 - DNA, 374 bp, Zea mays
caatgccaagcgacatgcaatgataaatggtagaaacccatcacctatgtgggacaagttggtatttaacaaaattaaagctagacttggtggacgaatgaggcttatgacttcaggtgcttctccattgtcaccagatgtcatggaatttttaagaatatgcttcggtgaagttcttgaagggtatggaatgacagagacatcttgtgtcatcagtacaatgaatattggtgacagatcaattggacatgttggatctccaaatccttcttgtgaagttaaacttgtggacgtcccaaaaatgaattatacttccgaagatcaaccctatccttgtggaaagaattgggttaagggacctataataatctggg

SEQ ID NO: 89801 - DNA, 401 bp, Zea mays
ccaagatccaggacaaggagggcattccaccggaccagcagcgcctcatcttcgccgtcaagcagctggaggatggccgcaccctggcggattacaacatccagaaggagagcactctccacctggtgctccgcctcaggggtggcatgcagatttttgtgaagacattgactggcaagactatcaccttggaggtggagagctctgacaccattgacaatgtgaaggccaagatccaggacaaggagggcattcccccagaccagcagcgtctgatctttgcgggcaagcagctggaggatggccgcactctcgcggactacaacatccagaaggagagcacccttcaccttgttctccgcctcaggggtggtatgcagatctttgtgaagaccctgact

SEQ ID NO: 89802 - DNA, 424 bp, Zea mays
cacctgagcttgataaggagaaatcttgtagagtaggtgaggtgatcatacgtccggatcctgagaaccccgagtggcctaagaggatccagacattctttgatggtaaaaatgaagaaaccactatggtaactcaaattgtgtcgataaacaaaactgggatgtattacctctattttatgttctgtgatcctcaacttaagggattgaagattacaggaagaactgtttggagaaatccacagggttaccttcctggtaaaatggctccaatgatgacattttatggtttcatgtcacttgcatatcttgtacttggacttctatggttcattcagtttgtgcgatgctggaaagacattttgcagctgcattaccatataacaggctgtattgctcttggcatgtgtgaaatggctttttg

SEQ ID NO: 89803 - DNA, 398 bp, Zea mays
agacaaaggagctgataaacagacttggtgctggagttaatgcagggcgtgcttccggcgagcagaagaaattggagaagcttgaaaaagaagggttgattgagaaacctttccaaaggaagcagctaaagatcagattccctgagcgtggaagaagtgggagaactgtgttgacgataaacaatcttcaattcggatttgagaataagactttgttcaacaatgctaatctgatagtagagagaggtgaaaagatagctattattgggcccaatggttgtgggaagagcacactgcttaaacttatgttggggatggagaagccacaaggtggtgaggtgcttcttggggagcataatgtgttgccgaactattttgagcagaatcaggcagaagct

SEQ ID NO: 89804 - DNA, 250 bp, Zea mays
ctgtccctccttatactccttgctatttctgcataacttgctaacgctacaattttccctcaatgctcacaagctcctatagcttcccttcttcccccataccttccatcaattatagcttcaatatttgaaaacccacctctttaaccctataagctccaacaagcaatctcatcaagcaacatacctttattacccttgtttcaacaatctccaaccctatctttatttcaatcatttgtacaaacca

SEQ ID NO: 89805 - DNA, 371 bp, Zea mays
gaaagcacaatagtgtaccaacaatggcagccaaaatattttgcctccttatgctccgtggtctttctgcaagtgctgctacggcgaccattttcccgcaatgctcgcaagctcctatagcttcccttcttcccccgtacctctcaccagcggtgtcttcggtatgtgaaaacccaattcttcaaccctacaggatccaacaggcaatcacagctggcatcttacctttatcacccttgttcctccaacaatcatcagccctattacatcagttacctttggcgcatttattggcacaaaacatcagggcacaacaactacaacaacttgtgctagcaaaccttgctgcctactctcagcaacagcagttt

SEQ ID NO: 89806 - DNA, 362 bp, Zea mays
attgagaccaacaagcaacatagaaagtggaatccagtagcaacaatagagcgacagggcgaccaagatactttccctccttatgctccttgctctttctgcatgtgttgctaacgcgacaattttccctcaatgctcacaagctcctatagcttcccttcttcccccataccttccatcaatgatagcttcagtatgtgaaaacccagctcttcaaccctataggctccaacaagcaatcgcagcaagcaacatacctttatcacccttgtttcaacaatcgccagccctatctttggtgcagtcattggtacaaaccatcaaggcacagcagctgcagcaactcgtgctacctgtgatca

SEQ ID NO: 89807 - DNA, 364 bp, Zea mays
gaaacacaccaagcgaagcgcactagcaacaacctaacaacaatggctaccaggatagtatccctccttgcgcttcttgcgctttttgcgagcgcaacaaatgcgtccattattccacaatgctcacttgctcctagttccattattccacagttcctcccaccagttacttcaatggccttcgaacacccagctgtgcaagcctataggctacaacaagcgattgcggcgagcgtcttacaacaaccaattgcccaattgcaacaacaatccttggcacatctaacaatacaaaccatcgcaacgcaacagcaacaacagttcctaccagcactgagccacctagccatggtgaaccctgtcg

SEQ ID NO: 89808 - DNA, 424 bp, Zea mays
gctggggtgaaccctgctatctacttgcaggcacaacagctactaccatttaaccaggttgtcgggagcccttatgccttcttactgcaacaacagcttctgccattccatctgcaagctgtggcaaacattgttgctttcttgagacaacaacatttgttgccattttacccacaagttgtgggaaacattaatgccttcttgcaacagcaacaattgctaccattctacccacagaatgtggcaaacattgttgccttcttacaacaacaacaattgctaccatttagccaacatgctttgacgaatcctaccaccttattgcaaccgcccaccattggtggtgccatcttctagattttttatgatttatactgtaataataaagttctcatgctgatatgtgcgacctctcagtaataaa

SEQ ID NO: 89809 - DNA, 326 bp, Zea mays
cggattcccggtcgacctacgcgtccgctaacccattggtcgccgccttcctacagcagcaacaattgctgccatacaaccagtgctctttgatgaatcctgtcttgtcgaggcatcaacccatcgttggaggtgccatcttttagattacatatgagatgtactcgataatggtgccctcataccgacgtgtgtttcctagaaataatcaatatattgattgagatttatctcgataaaaaacaatactaccaaataaaacatgcaataagaaaaacaagacaaaatataacaataaaacaacaaatgctgactctctactaact

SEQ ID NO: 89810 - DNA, 436 bp, Zea mays
ccggttcggattcgacccacgcgtacgcaacaagcgacatagaaagtggaatacagaagcaacaatagagcaacaatggcggtcgagaagttaccatccttatgctgcttgctctatatgcatagtgttgctaacgccaccatttttactgattactgacaagctattatagctgtccttattcaccaaaacgttgcatgaatgaccgctgcagttcagatgaaaacccagaccttcaaccctacaggcttcatcaagcactcgcaacaagcaacttacctgtatcaccactgtacattcaacaattatcagccatatctttgcagcaaacattgctacaaacgatgactacactgcagttggatcaacttgtgctagcactgatcagacgcatatgtttggcacagcttaatgcctactatcagcagcaacggtc

SEQ ID NO: 89811 - DNA, 455 bp, Zea mays
cggattcccgggtcgactacgcgtccgagaccaactagcaacatagaaagcacaatagtgtaccaacaatggcagccaaaatatgttgcctccttatgctccttggtctttctgcaagtgctgctacggcgaccattttcccgcaatgctcgcaagctcctatagcttcccttcttcccccgtacctctcaccagcggtgtcttcggtatgtgaaaacccaattcttcaaccctacaggatccaacaggcaatcgcagctggcatcttacctttatcacccttgttcctccaacaatcatcagccctattacaacagttacctttggtgcatttattggcacaaaacatcatggcacaacaactacaacaacttgtgctagcaaaccttgctgcctactctcagcaacagcagtttcttccattcaaccaactaggttcattgaactctgctttt

SEQ ID NO: 89812 - DNA, 363 bp, Zea mays
aacatagaaagcacaatagtgtaccaacaatggcagccaaaatattttgcttccttgtgctcgttggtctttctgcaagtgctgctaccgcaaccattttcccacaatgctcacaagctcctatagcttcctttcttcccccatacctctcaccagcggtgtcttcagtatgtgaaaacccaattcttcaaccctacaggatccaacaggcaatcgcagcaggcatcttacctttatcacccttgttcctccaacaaccgtcagccctattacagcagttacctttggtgcatttgttggcacaaaacatcaaggcacaacaactacaacaacttgtgctaagaaaccttgctgcctactctc

SEQ ID NO: 89813 - DNA, 368 bp, Zea mays
gcgagcaacatagaaagtcgaatccattagcatcaatagagcaacaatggcgaccaaggataggtgtccctacttatgctgcttgctctttctacatgtgttgctaacgcgacaattctccctcaatgctcacaagctactatagcttcccttcttcccccataccttccatcaattatagcttcagtatgtgaaaacccagctcttcaaccatataggcttcaacaagcaatcgcagcaagcaacataccttcatcggccttgttgtatcaacaatcaccagccctatctttggtgcagacataggtacaaaccatcacggcacaacagctgcagcaactcgggctacctgtgatcaaccaagtagc

SEQ ID NO: 89814 - DNA, 327 bp, Zea mays
tttctttattccatcttggatccgtgtttctctcttgttttttcttttttgaaaaaacgaggagggcgtcgtcagcggccctcctgctagccttgttggcggtggccctggtctccctggccggcccagccacggccgcggggaacaagaccgggcaggtgaccgtgttctggggccggaacaaggccgagggcacgctgcgcgaggcctgcgactcgggcctctacaccatggtgatcatgtccttcctcgacgtctacggcccgcagcgcggcggctaccaccagtaccacctggacctgtcggggcactccgacggcccggcat

SEQ ID NO: 89815 - DNA, 369 bp, Zea mays
gcaacatagaaagtggaatacagtagctacaatagagcaacaatggcggccaagatagtttgcatccttatgctccttgctctttctgcatgtgttgctaacgcgaccatttttcctcaatactcacaagctcctatagctgcccttcttcccccataccttccatcaatgaccgcttcagtttgtgaaaacccagcccttcaaccctacaggctccaacaagcaatcgcaacaagcaacttacctttatcacccctgttctttcaacaatcgccagccctatctttggtgcagtcattggtacaaaccatcagggcacaacagctgcaacaactcgtgctaccagtgatcagccaagtagctctggca

SEQ ID NO: 89816 - DNA, 364 bp, Zea mays
cggttcggattcccgctcgaccacgcgtccgatttgagcattcagaaacacatcaagtgaagctacctagcaacgacttaacgacaggggctaccaagatattagtccttcttgctcttcttgccctttttgcgagcgcaacaaatgcgtgcattattccacaatgctcacttgctcctagtgccattataccacagctcctacgaccagttacttcaatgggctttgaacacttagctgtgcaagcctacacgctacaacaagcgctcgcggctagcgcctgacaactaccaattcaccaactgctactacaatgcttggcacatttcaccctacaaaccatcgcaacacagcagcaacaaca

SEQ ID NO: 89817 - DNA, 365 bp, Zea mays
gcaataggacgatcgagcaagaagcaagcagcagtaacaagaaaccatcatcgatccgatgtatccaccaatggcggcgctcggaggacggcggaggagggcgtcgtcagcggccctcctgctagccttgttggcggtggccctggtctccctggccggcccagccacggccgcggggaacaagaccgggcaggtgaccgtgttctggggccggaacaaggccgagggcacgctgcgcgaggcctgcgactcgggcctctacaccatggtgatcatgtccttcctcgacgtctacggcccgcagcgcggcggctaccaccagtaccacctggacctgtcggggcacccgaacggccggcatcggg

SEQ ID NO: 89818 - DNA, 337 bp, Zea mays
tagaaagcacaatagtgtaccaacaatggcagccaaaatattttgcttccttatgctgcttggtctttctgcaagtgttgctaccgcaaccattttcccacaatgctcacaagctcctatagcttcccttcttcccccatacctctcaccagcggtgtcttcaatgtgtgaaaccccaattgttcaaccctacaggatccaacaggcaatcgcaacaggcatcttaccattatcacccttgttcctccaacaaccgtcagccctattacagcaattacctttggtccatttgggggcaccaaacaatcaggcacaacaactaccaccaacttgtgct

SEQ ID NO: 89819 - DNA, 430 bp, Zea mays
acccacgcgtacgcctgccaccagttacttcaatgggcttttaacacccagctgtgcaagcctataggctgcaacgagcaattgcggcgagcgtcttacaacaaccaatttcccagttgcaacaacaatccttggcgcatctaacaatacaaaccatcgtatcgcaacagcaacaacaattcctaccagcactgagccacctagccatggtgaaccctgtcgcctacttgcaacagcagttgcttgcatcaaacccacttgctctggcaaacgtagctgcaaaccatccacaacaacagctgcaacagcttatgccagcgctcagtcaactagccatggtgaaccctgacgactacctacaacagctacaactgcttttatctagcccgctcgctgtggccaatgcacctacatacctgcaacaacaatt

SEQ ID NO: 89820 - DNA, 420 bp, Zea mays
gcacaatagtgtaccaacaatggcagccaaaatattttgcctccttatgctccttgggctttcgtgcaagtgctgctacggcgaccattttcccgcaatgctcgcaagctcctatagcttcccttcttcccccgtacctctcaccagcggtgtcttcggtatgtgaaaacccaattcttcaaccctacaggatccaacaggcaatcacagctggcatcttacctttatcacccttgttcctccaacaatcatcagccctattacatcagttacctttggtgcatttattggcacaaaacatcagggcacaacaactacaacaacttgtgctagcaaaccttgctgcctactctcagcaacagcagtttcttccattcaaccaactagctgcattgaactctgcttcttatttgcaacaac

SEQ ID NO: 89821 - DNA, 384 bp, Zea mays
cgaattcccgggtcgacccacgcgtacgaagcaacatagaaagtagaatccattatcaacaatagagcaacaatggcgaccaagatgtttgccctccttatgctccttgctgttcctacatgtgttgctaacgcgacaattttgcctcaatgctcacaagctgctatagctttccttcttcccccataccttacatcaattatagcttcagtatgtgaaaacccagctattcaaccatataagcttcaacacgcaatctcaggatgcaacatacctttatagaccttgctgttgcaacaatgaccagccctatctttggtgcagtcattggtacaaaccatgagggcacaccagctgcagcaactcgtgctacctgtgatcaac

SEQ ID NO: 89822 - DNA, 364 bp, Zea mays
ctccccacctcctatcgcccccctctctctagcaccagcagcggtacgaggatggccgtcgggtagtggccggatgcataccatttaagtatagagctaacaatgatgaaatctctggtgacaaatctaagaaagtcgtggaagttctcatgataaattcccaaagcggacctggtcttttgtttccaaagggaggatgggaaaatgatgaaactgttgaagaggcagcagctcgagaagctatagaagaagccggagttcgaggtgatatagtgcattttctggggtcgtatgacttcaaaagcaagacacatgatgatgcgtgctgcacttagggtatgtgcagggctgcagtgtttgcgct

SEQ ID NO: 89823 - DNA, 368 bp, Zea mays
gaccaactagcaacatagaaagcacaatagtgtaccaacaatggcagccaaaatattgtgcggccttatgctccttggtatttctgcaagtgctgctacggcgaccattttcccgcaatgctcacaagctcctatagcttcccttcttcccccgtacctctcaccagcggtgtcttcggtatgtgaaaacccaattcttcaaccctacaggatccaacaggcaatcgcagctggcatcttacctttatcacccttgttcctccaacaatcatcagccctattacagcagttacctttggtgcatttattggcacaaaacatcagggcacaacaactacaacaacttgtgctagcaaaccttgctgcct

SEQ ID NO: 89824 - DNA, 368 bp, Zea mays
gctccttggtctttctgcaagtgctgctacggcgaccattttcccgcaatgctcgcgagctgctatagcttcccttcttcccccgtacctctcaccagcggtgtcttcggtatgtgaaaacccaattcttcaaccctacaggatccaacaggcaatcacagctggcatcttacctttatcacccttgttcctccaacaatcatcagccctattacatcagttacctttggtgcatttattggcacaaaacatcagggcacaacaactacaacaacttgtgctagcaaaccttgctgcctactctcagcaacagcagtttcttccattcaaccaactagctgcattgaactctgcttcttatttgcaac

SEQ ID NO: 89825 - DNA, 308 bp, Zea mays
agccaagcggcagtgtgtatagaggatcgtcgaacagaacagcatgaacatggtcatggctgctcgcgtgtgcctgggtctggcagctggcagcgcctgtgcaatgcatatgccctgcccctgcacgaggctgcagggcttgcacagcgctggcaccggcctgacgacgatgatgggcgccgccgggctgtacccatacacacagtacctgaggcagccgcaatgcagtccactagcagcggcgcgctactacgccgagtgtgggcagacgagcgccatgtaccagacgatcctgcaacactgctgcc

SEQ ID NO: 89826 - DNA, 363 bp, Zea mays
catccatcgaccgatcgatcgccacagtcaacaccacccgccgaggcgacgcgacaggcgccaggaggaaggaatacactcactgccagccagtgaagggggagaagtgtactgctccggcgaccagtgcgcgcaccgcccggcagggctgctcatctcgtcgacgaccagtggattaatcggcatggcggctctggccacgtcgcagctcgtcgcaacgcgcgccggcctgggcgtaccggacgcgtccacgttccgccgcggcgccgcgcagggcctgaggggggcccggtcgttggcggcggcggacacgctcagcatgcggaccagctcgcgcgctgcgcccaggcaccagcagcaggc

SEQ ID NO: 89827 - DNA, 366 bp, Zea mays
caacaagctgccccgcagcaacgaacacgaaccttggcagaacgaagctgaagtagggcgttgtgaacccagtatggcaaacgcgccgaggatcctggccctcggcctgctgctagcgctcctgtgcgctgccgccggcccggccgccgcgcagaactgcggctgccagcctaacttctgctgcagcaagttcggctactgcggcacgaccgacgactactgcggcgacgggtgccagtcgggcccgtgccgctcgggcggcggcggcggcggcggcggaggcggaggcagtggcggtgcgaacgtggctaacgtggtcagcgacgcgttcttcaacggcatcaagaaccaggccgggagcgggtg

SEQ ID NO: 89828 - DNA, 360 bp, Zea mays
attgagaccaactagcaacatagaaagcacaatagtgtaccaacaatggcagccaaggtattttgcctccttatgctccttggtctttctgcaagtgctgctacggcgaccattttcccacaatgctcacaagctcctatagcttcccttcttcccccgtacctctcaccagcggtgtcttcggtatgtgaaaacccaattcttcaaccctataggatccaacaggcaatcgcagctggcatcttacctttatcacccttgttcctccaacaatcatcagccctattacagcagttacctttggtgcatttattggcacaaaacatcagggcacaacaactacaaacaacttgtgctagc

SEQ ID NO: 89829 - DNA, 426 bp, Zea mays
gtttctgcgaaagagttctttgaagatcctgtatctccaacaattgatgctgcagttcgtttgcagcctagatgcagcgagaaaagtgatttagaatcagctgagcagtcatacacaacacgcttgctggtgtcaacatcacgtattgggtgcctaattggcaaaggtggttcaatcattactgagatacggagaacatccagagcaaatgtacgcattctttcaaaagaaaatgttccaaaggtagcagcagaagatgatgagatggttcagatcactggaggccttgatgttgcaagaaatgctcttgtgcaaatagctacaaggctgaaagccaatttctttgaaagagagggctctttatctgcatttccacctgttatcccttaccatcctttgcctgctggtgtttcggatgaaccaaaa

SEQ ID NO: 89830 - DNA, 443 bp, Zea mays
ccggaattcccgggcgtgccaacagccgcatccaagcccgtgccagctgcagggaacctgcggcgttggcagcaccccgatcctgggccagtgcgtcgagtttctgaggcatcagtgcagcccgacggcgacgccctactgctcgcctcagtgccagtcgttgcggcagcagtgttgccagcagctcaggcaggtggagccgcagcaccggtaccaggcgatcttcggcttggtcctgcagtccatcctgcagcagcagccgcaaagcggccaggtcgcggggctgttggcggcgcagatagcgcagcaactgacggcgatgtgcggcctgcagcagccgactccatgcccctacgctgctgtcggcggtgtcccccactgaagaaactatgtgctgtagtatagccgctggctagctagctagttgagtcatttagcggcga

SEQ ID NO: 89831 - DNA, 413 bp, Zea mays
agctactgactactctcatcaacaacaacttcttccatttaaccaattggccgcactgaacctcgctgcttatttgcagcagcaaatattactaccatttagccagctagctgcagcaagccgtgcttccttcttgacacagcaacagttgctgcctttctaccagcagtttgcggctaaccccgcaaccctcttacaactacaacaattgttgccctttgtccaacttgctttgacaaacccagcagcctgctaccaacaacacatcattggtggtgccctcttttagatagcttattagttgtaattcaataataaagttttttggatgatgtatgtggccaaccagaaataagaagttacattttcaaaaaaaaagtgctgtcccattcaagcaagggtacctcactcac

SEQ ID NO: 89832 - DNA, 369 bp, Zea mays
gacgtgcagtccgtcgcgcagcagctgcagatgatgatgcagcttgagcgtgccgcggccggcagcagcagcctgtacgagccagctctgatgcagcagcagcagcagctgctggcagcccagggtctcaaccccatggccatgatgatggcgcagaacatgccggccatgggtggactctaccagtaccagtaccagctgcccagctaccgcaccaacccctgtggcgtctccgctgccattccgccctactactgattcatgatatttgggaaatctcctctatccatccctctctatctatatatgtaataatgcagtaagacgacacacattatcatgtgtggtatgaccaataatatatgcatc

SEQ ID NO: 89833 - DNA, 393 bp, Zea mays
cggaattcccgggtcgaccacgcgtacgcgtgcgcccaccgggatacaatgcagagagtgcataagctgctgaaattgaagatgaggggaagaggtcggatccaggtgacatgggtactgcatctgcaagtacctcttcaatacctgacaagggacctgaaaaggctaaatcaggcgcagataagaaaaataggccaaaagatgtttctggtcggccattggcaacagaacatgaatttgaagttctcatgaatgctgcaaggttagacacaggtgctcctgcacgggtcaaaccatttggagttgaagttcgtaatgatagatgcttacggtgtggaaactatggtcaccaaagtggtgaccgagaatgtcccttgcaacgatgcaatcatg

SEQ ID NO: 89834 - DNA, 280 bp, Zea mays
ggcagatgaaccggcggcggcacatgttccgtgtggtggcaggtggaccggcagcgggtggtgtatcgtccgtgggagatgcacctgacgttgcagttgtcgatgtcgaatcacttttatatatgaccttactatttcattgatttggtggcacatactctgttatcgtcaaatccatttttattctccttgttacaactattatgattgctgttgactcttcgtgatactataacaggtcaatatacattgatccttattacattatatcacactttat

SEQ ID NO: 89835 - DNA, 362 bp, Zea mays
attcagaaacacaccaagcgaagctacctagcaacgacttaacaacaatggctaccaggatattagccctccttgcgcttcttgccctttttgtgagcgcaacaaatgcgttcattattccacaatgctcacttgctcctagtgccattataccacagttcctccgaccagttacttcaatgggcttcgaacacctagctgtgcaagcctacaggctacaacaagcgcttgcagcgagcgtcttacaacaaccaattaaccaattgcaacaacaatccttggcacatctaaccatacagaccatcgcatcacaacagcagcagcagttcctaccagcactgagccaactagatgtggtgaac

SEQ ID NO: 89836 - DNA, 280 bp, Zea mays
gtggtacgggaacgtccgcacgccgaacccagtcatgtcgcaggcggcgtccatatgcgctagcccgggctaaccacctcagccaatcatgctcttgaaagcgagtcagactccgacagcgaatcactgtatgaggtagagggagttccatacgagcgaggtaacagatccattgagacgaagcgaataagaaggatggtgtccaatagggagtctgcgcggcggtctaggaggaggaaacaggcacagttgtctgaccttgagtcacaagttgaacgac

SEQ ID NO: 89837 - DNA, 453 bp, Zea mays
tcggaattcccggctcgacccacgcgtacgattgagaccaactagcaacatacaaagcacaatagtgtaccaacaatggcagccaagggattgtgcctccttatgctccttgggctttctgcaagtgctgctacggcgaccattttcccgcaatgctcgcaagctcctatagcttcccttcttcccccgtacctctcaccagcggtgtcttcagtatgtgaaaacccaattcttcaaccctacacgatccaacaggcaatcacagctggcatcatacctttatcaccctcgttcctccaacaatcatcagccctattacatcagttacctttggtgcatctattggcacaaaacatcacggcacaacaactacaacaacttgtgctagcatacctcgctgactactatcagcaacagcagtttcttccattcaaccaactagctgcattgaac

SEQ ID NO: 89838 - DNA, 456 bp, Zea mays
cggaattcccgggatttagaccaactagcaacatagaaagcacaatagtgtaccaacaatggcagccaaaatattttgcctccttatgctccttggtatttctgcaagtgctgctacggcgaccattttcccgcaatgctcacaagctcctatagcttcccttcttcccccgtacctctcaccagcggtgtcttcggtatgtgaaaacccaattcttcaaccctacaggatccaacaggcaatcgcagctggcatcttacctttatcacccttgttcctccaacaatcatcagccctattacagcagttacctttggtgcatttattggcacaaaacatcagggcacaacaactacaacaacttgtgctagcaaaccttgctgcctactctcagcaacagcagtttcttccattcaaccaactagctgcattgaactctgcttcttatttgcaaca

SEQ ID NO: 89839 - DNA, 451 bp, Zea mays
cggaattcccgggaggatcctggccctcggcctgctgctagcgctcctgtgcgctgccgccggcccggccgccgcgcagaactgcggctgcgagcctaacttctgctgcagcaagttcggctactgcggcacgaccgacgactactgcggcgacgggtgccagtcgggcccgtgccgctcgggcggcggcggcggcggcggcggatgcggaggcagtggcggtgcgaacgtggctaacgtggtcagcgacgcgttcttcaacggcatcaagaaccaggccgggagcgggtgcgagggcaagaacttctacacccggagcgcgttcctgagcgccgtcaacaagtacccgggcttcgcccatggcgggacggaggtggagggcaagcgcgagatcgccgacttcttcgcgcacgtcacgcacgagaccggacatttctgctacatcagcgag

SEQ ID NO: 89840 - DNA, 455 bp, Zea mays
cggaattcccgggattgagaccaactagcaacatagaaagcacaatagtgtaccaacaatggcagccaaaatattttgcctccttatgctccttggtctttctgcaagtgctgctacggcgaccattttcccacaatgctcacaagctcctatagcttcccttcttcccccgtacctctcaccagcggtgtcttcggtatgtgaaaacccaattcttcaaccctataggatccaacaggcaatcgcagctggcatcttacctttatcacccttgttcctccaacaatcatcagccctattacagcagttacctttggtgcatttattggcacaaaacatcagggcacaacaactacaacaacttgtgctagcaaaccttgctgcctactctcagcaacaacagtttcttccattcaaccaactagctgcattgaactctgcttcttatttgcaac

SEQ ID NO: 89841 - DNA, 212 bp, Zea mays
caaaatattctgcttccttatgcgccttggtctttctgcaagtgttgctaccgcaaccattttcccacaatgctaacaagctcctatagcttccctttttcccccatacctttcaccagcggtgccttcaatgtgagaaaccccaattgttcaaccctacaggatccaacaggcaattgcaacaggcttcttaccattataacccttgtttc

SEQ ID NO: 89842 - DNA, 369 bp, Zea mays
ttcagaaacacacctagcgaagcgcactagcaacgacctaacaacaatggctaccaagatagtatccctctttgcgcttcttgccctttttgtgagcgcaacaaatgcgttcattattccacaatgctcacttgctcctagtgccattattccacagttcctccctccagttacttcaatgggcttcgaacacccagctgtgcaagcctacaggctacaacaagcgcttgcggcgagcgtcttacaacaaccaattgcccaattacaacaacaatccttggcacatctaaccatacaaaccatcgcaacgcaacagcaacaacaatttctaccagcactgagccaactagctgtggtgaaccctgtcgc

SEQ ID NO: 89843 - DNA, 204 bp, Zea mays
agaaagtggaatacagtagccattatagagcaacaatggccgccaagatattggtacgggcttatgctccttgctctttctgcatgtgttgctaacgcgaccattgttcctcaatactcacaagctactatagctgaccttcttcccccataccttccatcaatgatcgatttagtatgggagaacccagcccttctaccctac

SEQ ID NO: 89844 - DNA, 294 bp, Zea mays
gcaacatagaaagcacaatagtgtaccaacaatggcagccaaaatattttgcctcctgatgctccttggtatttctgcaagtgctgctacggcgaccattttcccgcaatgctcacaagctcctatagcttcccttcttcccccgtacctctcaccagcggtgtcttcggtatgtgaaaacccaattcttcaaccctacaggatccaacaggcaatcgcagctggcatcttacctttatcacccttgctcctgcaacaatcatcagccctattacagcagttacctttggcgca

SEQ ID NO: 89845 - DNA, 316 bp, Zea mays
ggacaggtgctgcgcgctgcgatctctgtcaccgcgcaacatggcggggggtgccacgccgccaactggaagcccgggagtgcgccgcatcggcccggcgtctcgagaggaggccaggaagatgttcccgcaggggttcgaaccgccacctgccctccaagagggctacctccgtttaccaaggtttagctagccgacgtacggcacggacatctagctcgtctgtcagtccgcgtcgaccggggtgcgcggatcttttgtgcctgctggtggtttctctgactagtactagtatatatataggctctatgtatgt

SEQ ID NO: 89846 - DNA, 422 bp, Zea mays
ggaattcccgggtcgacccacgcgtacgctgggtcttcagaccattagctatatctactccagagcgcagaagaacccgatcgacgccatgagggtgctgctcgatgccctcgctctcctggctctcgctgcgagcgccacctccacgcatacaagcggcggctgcgggtgccagccaccgtcgccggttcatctaccgccgccggtgcatctgccacctacgggtcacctgccacctacggtgcatctcccaccgccggtccacctgccgtcgccggtccacctgccaccgacggtccatgtgccggcgacggctcatctgccgccgtcaccatgccactaccctactcaaccgacccggcctcaggctcatccccagccacacccatgcacgtgccaacagccgtatccaagcccgtgcc

SEQ ID NO: 89847 - DNA, 413 bp, Zea mays
cacccttgttcctccaacaaccgtcagccctattacagcagttacctttggtccatttggtggcacaaaacatcagggcacaacaactacaacaacttgtgctagcaaaccttgctgcatactctcagcaacatcagtttcttccattcaaccaactggctgcattgaactctgctgcttatttgcaacaacaattaccattcagccagctagttgctgcctacccccagcaatttcttccattcaaccaactagcagcattgaactctgctgcttatttacagcagcaacaactactaccattcagccagctagctgatgtgagccctgctgccttcttgacacaacaacagttgttgccgttctacctgcacgctatgcctaacgctggcaccctcttacaactgcaacaa

SEQ ID NO: 89848 - DNA, 395 bp, Zea mays
ttcccggtcgactcacgcgtccgcgcgacgctggacccgcccttcgacccctacgagaacagcctcaacttcctcgtcgggtcctgacatcatcccctacgtcggcctcaccggctacgtcggcgccaaccccaggctcctcacccctcaggccagaaagctgctggcggggctgctggcggtggagtcggcgcaggacgcggtgatcaggacgctgctgtacgagcgcgggatggcgcgtgtgccgagctacgccggcggggtggcggagatcacggcgcgcatctcggacctccggaactcgctggggaggaggggcgtgaaggacgagggcctggtggtggcgcccgagctggggcccgaggggctgaccgtggggaacatcatcgccggcg

SEQ ID NO: 89849 - DNA, 345 bp, Zea mays
agagcacaatagtgtaccaacaatggcagccaaaatattttgcctccttatgctccttggtagttctgcaagtgctgctacggcgaccattttcccgcaatgctcacaagctcctatagcttcccttcttcccccgtacctctcaccagcggtgtcttcggtatgtgaaaacccaattcttcaaccctacaggatccaacaggcaatcgcagctggcatcttacctttatcacccttgttcctccaacaatcatcagccctattacagcagttacctttggtgcatttattggcacaaaacatcagggcacaacaactactacaacttgtgctagcaaaccttgc

SEQ ID NO: 89850 - DNA, 368 bp, Zea mays
cagaccattagctttatctactccagagcgcagaagaacccgatcgacaccatgagggtgtggctcgttgccctcgctctcctggctctcgctgcgagcgccacctccacgcatacaagcggcggctgcggctgccagccaccgccgccggttcatctaccgccgccggtgcatctgccacctccggttcacctgccacctccggtgcatctcccaccgccggtccacctgccgccgccggtccacctgccaccgccggtccatgtgccgccgccggttcatctgccgccgccaccatgccactaccctactcaaccgccccggcctcagcctcatccccagccacacccatgcccgtgccaacagcc

SEQ ID NO: 89851 - DNA, 319 bp, Zea mays
caactagcaacatacaaagcacaatactgtaccaacaatggcagacacactatgggggttccttatgctccttggcctttctgaaagtgttgctacggtaaccatttactctcaatgctcacatgctcctatacctttaatcattgctccattacctcttaccaacaactgtacttcaatgaagcgatacacgcaccagctaacattaccagatgcaatatgacctattaaaggtatcttacatcatcactcttgtccattaaaactgacctccttgcacagattgaccttaacatcatgggacagcaactacaataac

SEQ ID NO: 89852 - DNA, 386 bp, Zea mays
accggtcggattccggcccaagcgaacgcctagcaacgactacaccaatggctaccaagatattaccctccttgcgctggtgcgctttatgagcgcatcaagcgtcattattccacagtgctcacttgctcctagtgccattatttcacagttccttccaccagttacttcaatgggcttcgaacatccagccgtgcaagcctacaggctacaactagcgcttgcggcgagcgccttacaacaaccaattgcccaattgcaacaacaatccttggcacatctaaccctacaaaccattgcaacgcaacaacaacaacaacaacagtttctgccatcactgagccacctatccgtggtgaaccctgtcacctacttgcaacagcagc

SEQ ID NO: 89853 - DNA, 424 bp, Zea mays
  unsure (1)..(424): unsure at all n locations
ggtcttcagaccattagctttatctactccagagcgcagaagaacccgatcgacaccgtgagggtgttgctcgttgccctcgctctcctggctctcgctgcgagcgccacctccacgcatacaagcggcggctgcggctgccagccaccgccgccggttcatctaccgccgccggtgcatctgccacctccggttcacctgccacctccggtgcatctgccaccgccggtccacctgccgccgccggtccacctgccaccgccggtccatgtgccgccgccggttcatctgccgtcgccaccatgccactaccctactcaaccgccccggcctcagcctcatccccagccacacccatgcccgtgccaacagccgcatncaagcccgtgccagctgcagggaacctgcggcgttggcagcaccc

SEQ ID NO: 89854 - DNA, 378 bp, Zea mays
aattagctcatcgactccagattggagaactcgacaccatgaaggtgctgatcgttggccttgctctcctggcgctcgctgcgagcgccgcctccagtacaagcggcggctgtggctgccagacaccaccgtttcatctaccgcctccgttctatatgccgcctccgttctatctgccgccgcagcagcagccgcagccatggcaataccccactcaaccaccgcagctaagcccgtgccagcagttcggatcctgcggcgtcggcagcgtcggcagcccgttcctgggccagtgcgtcgagttcctgaggcaccagtgcagcccggcggcgacgccctacggctcgccacagtgccaggcgctgcagcagcagtgct

SEQ ID NO: 89855 - DNA, 415 bp, Zea mays
gttgcaaaccatggacatggctttggcgtctaaagcctcccctccgccatggaatgccaccggcgccgagcagccaattccaaagcgtgacaaagccgctgcaaatgattcaacatacctcaatcctcaagctcatgatagtgttcttggaatcattctgggaggtggtgctgggactagattgtaccccttgacaaagaagcgtgccaagcctgcagtgccattgggtgccaactatagactgattgatattcctgtcagcaattgtctcaacagcaacatatccaagatctatgtgctaacgcaatttaactctgcttccctcaaccgtcacctctcaagagcctacgggagcaacattggagggtacaagaatgaagggtttgttgaagtcttagctgcacagcagagccca

SEQ ID NO: 89856 - DNA, 369 bp, Zea mays
ccaacaagcaacatagaaagtggaatccagtagcaacaatagagcaacaatggcgacggaagagactttccctccttatgctccttgctctttctgcatgtgatgctaacgcgacaattttccctcaatgctcacaagctcctatagctctccttcttcccccataccttccatgaacgatagcttcagtatgtgaaaacccagctcttcaaccctataggctccaacaagcaatcgcagcaagcaacatacctttatcacccttgttgcaacaatcgccagccctatctttggcgcagtcattggtacaaaccatcaaggcacagcagctgcagcaactcgtgctacctgtgatcaaccaagtagctc

SEQ ID NO: 89857 - DNA, 366 bp, Zea mays
gaagaccgaagaccgagccgtgcgggggctcgggacgggaacgggacaggacgtcaggatctcagatccttcctgcccgcccgcccgtgcccgtcgacgcgtcgttcttgccggccgcgccccacctccgccctctcctcctccagggggatcggatacgccacaggctgcgcgatggtgctgtgggtcttcggctacggctccctcatctggaaccccggcttcgacttcgacgacaaaatcctcggcttcatcaagggctacaagcgcacctttaatctcgcttgcattgaccacagaggcacaccggagcatccggcgaggacctgcacgcttgaaaccgacgacgaggccatatgctggggg

SEQ ID NO: 89858 - DNA, 255 bp, Zea mays
aaaccctagccctcgcgccgccgactccttcgccacccagcgctcgagctccgggctgcctgcgagcgcgcgccgcaacgccaccatgaagttcaacatcgcgaacccttccaccgggtgccaaaagaagctggaaatcgatgacgaccagaagctacgtgccttttatgaccggaagatatcccaggaggtcagtggtgatgctctggtgaggagttcacggggtatgtcttcaagatcatgggtggatgtgac

SEQ ID NO: 89859 - DNA, 422 bp, Zea mays
ggcagccaaaatattttgcttccttatgctccttggtctttctgcaagtgctgctacggcagcgcattttcccacaatgctcacaagctcctatagcttcctttcttcccccatacctctcaccagcggtgtcttcagtatgtgaaaacccaattcttcaaccctacaggatccaacaggcaatcgcagcaggcatcttacctttatcacccttgttcctccaacaaccgtcagccctattacagcagttacctttggtgcatttgttggcacaaaacatcaaggcacaacaactacaacaacttgtgctaggaaaccttgctgcctactctcagcaacagcagtttcttccattcaaccaactggctgcattgaactctgctgcttatttgcaacaacaactaccattcagtcagctagct

SEQ ID NO: 89860 - DNA, 421 bp, Zea mays
tagcaacatagaaagcacaatagtgtaccaacaatggcagccaaaatattttgcctcgttatgctccttggtctttctgcaagtgctgctacggcgaccattttcccgcaatgctcgcaagctcctatagcttcccttcttcccccgtacctctcaccagcggtgtcttcggtatgtgaaaacccaattcttcaaccctacaggatccaacaggcaatcgcagctggcatcttacctttatcacccttgttcctccaacaatcatcagccctattacaacagttacctttggtgcatttattggcacaaaacatcagggcacaacaactacaacaacttgtgctagcaaaccttgctgcctactctcagcaacagcagtttcttccattcaaccaactaggttcattgaactctgcttctt

SEQ ID NO: 89861 - DNA, 457 bp, Zea mays
cggaattcccgggtcgacccacgcgtacgcagcaacatagaaagcacaatagtgtaccaacaatggcagctaaaatattgtgcctcgttatgctccttggtctttctgcaagtgctgctacggcgaccattttgccacaatgctcacaagcttctatagcttgccttcttcccccgtacctctcaccaacggtgtcttcggtatgtgaaaacccaattcttcaaccctacaggatccaacaggcaatcgcagctggcatgttacctttatcacccttgttcctccaacaatcatcagccctattacagcagttacctttggtgcattcattggcacaaatcatcagggcacatcaactacaacaacttgtgctagcaaaccttgctgactactctcagcatcagcagtttcttacattcagccaactagctgcattgaactctgcttcttatatgca

SEQ ID NO: 89862 - DNA, 417 bp, Zea mays
caacaagcaacatagaaagtggaatccagtagcaacaacagagcaacaatggcgaccaagatattttccctccttatgctccttgctctttctgcatgtgttgctaacgcgacaattttccctcaatgctcacaagctcctatagcttcccttcttcccccataccttccatcaatgatagcttcagtatgtgaaaacccagctcttcagccctataggctccaacaagcaatcgcagcaagcaacatacctttatcacccttgttgtttcaacaatcgccagccctatctttggtgcagtcattggtacaaaccatcagggcacagcagctgcagcaactcgtgctacctgtgatcaaccaagtagctctggcaaacctttctccctactctcagcaacaacaatttcttccattc

SEQ ID NO: 89863 - DNA, 361 bp, Zea mays
gtagaagttcccaggcaaggtgcgcgccgtggtcaagttcaacgcggcgctggcgcaccacggcatggccggcgccgacgtgctcgccgtcaccagccgctttgagccctgcggcctcatccatctgcaggggatgcgatacggaacgccatgcgcatgtgcgtgcatcggatgactgatcgataccataatcggagacaagaccgggtttcacattggcctcctacgcgtatactgtcacgacgatgaaccgttgtgacactagaaggtggacaccacattgctgtgttccgtgcaggggttgggaccgaccatgtacgcacagaagctgcagcaactcatgatacctgagctctaccaa

SEQ ID NO: 89864 - DNA, 364 bp, Zea mays
cttggacagcggcaccagaacctctgcctccgcagggtgcttgctggtatcattacagtctggtagttttagtggttgggcttgacttcctactattcagaaacacagtaccgagaagtctttaggtggggtcaaagatggtgtcgctgaagttgcaaaagcgccttgccgcgagctacctcaagtgtgggaaaggcaaggtgtggcttgacccaaatgaagttagtgagatctccatggcaaactcccgccagaatatccggaagttggttaaggatgggtttatcatcaagaagcctcataagatccactctagatcccgtgcaagaagggcacatgacgccaagcattaagggacgccact

SEQ ID NO: 89865 - DNA, 301 bp, Zea mays
accgaattgccgggtcgtgcttccttcttgacacagcaacagttgctgcctttctacaagcagtttgcggctaaccccgcaaccctgttacagctacaacaattgttgccctttgtccaacttgctttgacaaacccagcagcctcctaccaacaacacatcattggtggtgccctcttttagattgattattagttgtaattcaataataaagttttttggatgatgtatgtggccaaccagaaataagaagttacatttccagattctaatgtgatattggtctccaagggtgttcgat

SEQ ID NO: 89866 - DNA, 357 bp, Zea mays
accggttcggaattcccggcgctggctactcctccccctcttatcaagtcctcctcgggttagggttccttagggttttgtggaggggcgatggcggcggctgatgtggagtaccgttgcttagtcggcggacttgcctgggccaccagcaacgagtcgctggagaatgccttcgccttctacggcgagatcctcgactccaaggtcatcaccgaccgggagacggggaggtcccgcggcttccgcttcgttaccttctacttcgagaactccatgctcgacgctatcgagaacatgaacggcaaggagctcgacggccgtaacatcaccgataaccaggcccattcccgtggcggc

SEQ ID NO: 89867 - DNA, 387 bp, Zea mays
  unsure (1)..(387): unsure at all n locations
cggttccggaattcgccgggtgcgacgccacgtccgtccgcgcgtttaatcaacccttnnngttgtttcaaacccaatcgncgcagcccttatctnnnttggtgccagtgcgattgggtaccaaacncnnatcagtggcacccagcagcntnngcagcaaccctcgtgccctacctgtgnnnatcaaccannagtagnnctctggcanannacctttctcgcctaactctcagncaaccaaccaatnnttcttccatttcaaccccaactggtctacnnactgaacccnntgctgcttaaatttgcagcaaccannactattacncnnattcagccagcttanngctactgcnnctactcnntcagcaacaaccaactnnntcttcc

SEQ ID NO: 89868 - DNA, 293 bp, Zea mays
cagcaagcaacatagaaagtagaatccattagcaacaatagagcaacaatggcgaccgggatattttccctccttatgctccttgctctttctacatgtgttgctaacgcgacaattttccctcaatgctcacaagctcctatagcttcccttcttcccccataccttccatcaattatagcttcagaatgtgaaaacccagctcttcaaccatataggcttcaacatgcaatcgcagcacgcaacataccttaatcgcccttggtgtttcaacaatcaccagccctatcttt

SEQ ID NO: 89869 - DNA, 342 bp, Zea mays
aagccacaccaaacccgcgttcatcgacggacgagctcgccggcgagagagcgactgagatggaggcggcggcagcggcggccggcgtggagctgggctcttcgaagccccagatcgcgacgcaggcggagatggcggaggcccgggtgccgctcgcctaccgcgaccagtgcgcgcacctcctcatcccgctcaacaagtgccgcgtcgccgagttctacctcccctggaagtgcgagcccgagcgccacgcctacgagaagtgccagtacgagctcgtcatggagcggatgctccagatgcagaagatccgcgaggcgcatgagaccaaggtcaagggcg

SEQ ID NO: 89870 - DNA, 420 bp, Zea mays
gcaacatagaaagcacaatagtgtaccaacaatggcagccaaaatattttgcctcctgatgctccttggtctttctgcaagtgctgctacggcgaccattttcccgcaatgctcgcaagctcctatagcttcccttcttcccccgtacctctcaccagcggtgtcttcggtatgtgaaaacccaattcttcaaccctacaggatccaacaggcaatcgcagctggcatcttacctttatcacccttgttcctccaacaatcatcagccctattacaacagttacctttggtgcatttattggcacaaaacatcagggcacaacaactacaacaacttgtgctagcaaaccttgctgcctactctcagcaacagcagtttcttccattcaaccaactaggttcattgaactctgcttctta

SEQ ID NO: 89871 - DNA, 441 bp, Zea mays
cggaattcccgggtcgacccacgcgtacgatcgacaccatgagggtgttgctcgttgccctcgctctcctggctctcgctgcgagcgccacgttcacgcatacaagcggcggctgcggctgccagccaccgccggcggttcatctaccgccgccggtgcatctgccacctccggttcacctgccacctccggtgcatctcccaccgccggtccacctgccgccgccggtccacctgccaccgccggtccatgtgccgccgccggttcatctgccgccgtcaccatgccactaccctactcaaccgccccggcctcagcctcatgcccagccacactcatgcccgtgccaacagccgcatccaagcccgtgccagctgcagggaacctgcggcgttggcagcaccccgatcctgggccagtgcgtcgagttcctgaggcatc

SEQ ID NO: 89872 - DNA, 413 bp, Zea mays
accggtctcggaattcccaccaagcggtccgccagaaccgccggaaaaagagagaccgacccgccggcagatcccaagctcaccggagagggggaagagggcgaccgaaggcggcgatgggtttcatcatggacttcgcggagaatctgatcctccgtctgatggaggacccggacaagcgcgaccaggttcggcgggagcatgtctacaagatgaaggagcggtgcgagcgcactaaggcggcgtggagcctccctctgcgcccctacggcttctggaccttcgaccgcttcaactcgcagctctcctgggatccccagatcagccaggccgccggccgtcgggacccctacgacgacctcatcgcccgccactctggctcgccgccgtcttcctgaacacccgttccgatc

SEQ ID NO: 89873 - DNA, 418 bp, Zea mays
gcaactgtggcttctgtttttgtgcgcatagcggatctgtacaataagtcagggaagctgagggagtcaaaatcttactgtgaaaacgctctcaaaatttaccaaaaacctattccagggacttctctggaagaaattgccactggtttaactgatgtttcagccatatatgagacgatgaatgagcatgagcaagcactcaagttacttcagaaggccttaaaaatgtacaacaattctgctggccaacagagcacaattgctggaattgaggctcagatgggtgtcttgcactatattttgggcaattatggcgagtcatatgattccttcaagagtgcgattgcaaagctccgcacctgtggtgagaaaaagtctgccttcttcggaattgccctgaaccagatgggattggcat

SEQ ID NO: 89874 - DNA, 423 bp, Zea mays
tgagaccaactagcaacatagaaagcacaatagtgtaccaacaatggcagccaaaatgttttgcttccttatgctccttggtctttctgcaagtgctgctaccgcaaccattttcccacaatgctcacaagctcctatagcttcctttcttcccccatacctctcaccagcggtgtcttcagtatgtgaaaacccaattcttcaaccctacaggatccaacaggcaatcgcagcaggcatcttacctttatcacccttgttcctccaacaaccgtcagccctattacagcagttacctttggtgcatttgttggcacaaaacatcaaggcacaacaactacaacaacttgtgctaggaaaccttgctgcctactctcagcaacagcagtttcttccattcaaccaactggctgcattgaactc

SEQ ID NO: 89875 - DNA, 347 bp, Zea mays
  unsure (1)..(347): unsure at all n locations
aacaagcaacatagaaagtggaatccagtagcatcaacagagcaacaatggcgaccaagatagtttccctccttatgctccttgctctttctgcatgtgttgctaacgcgacaattttccctcaatgctcacaagctcctatagcttcccttcttcccccataccttccatcaatgatagcttcagtatgtgaaaacccagctcttcagccctataggctccaacaagcaatcgcagcaagcaacatacctttatcaccnncttgtgttcaacaatcgccagccctatctttggtgcagtcattggtacaaaccatcagggcacagcagctgcagcaactcgtgcta

SEQ ID NO: 89876 - DNA, 435 bp, Zea mays
ggcgatggatcctgtagggttgaacaggcaatctcaacacttatcttaccattatcacccttgatcctccagcaacggtcagccctattacaggagatacctttggtccatttggtggcacaaaacatcagggcacaacaactacaacaacttgtgctagcaaaccttgctgcatactctcagcaacatcagtttcttccattcaaccaactgtctgcattgaactctgctgcttatttgcaacaacaattaccattcagccagctagctgctgtctacccccagcaatttctaccattcaaccaactatcaccattgaactctgctgcttatttacagcaacatcaactactaccattcagccaactagctgatgtgagccctgctgccttcttgacacaacaacagttgttgacgatatacctgcacgctatg

SEQ ID NO: 89877 - DNA, 412 bp, Zea mays
caagatattagccctccttgcgcttcttgcccttttagtgagcgcaacaaatgcgttgattattccacagtgctcacttgctcctagtgccattattccacagttcctcccaccagttacttcaatgggcttcgaacatccagccgtgcaagcctacaggctacaactagcgcttgcggcgagcgccttacaacaaccaattgcccaattgcaacaacaatccttggcacatctaaccctacaaaccattgcaacgcaacaacaacaacaacaacagtttctgccatcactgagccacctagccgtggtgaaccctgtcacctacttgcaacagcagctgcttgcatccaacccacttgctctggcgaacgtagctgcataccagcaacaacaacagctgcaacagtttatg

SEQ ID NO: 89878 - DNA, 403 bp, Zea mays
  unsure (1)..(403): unsure at all n locations
ctcatttgaaatcaacccatcctcgtttcctccgtctagcagcctctcacccgcatggccaagatcaagatcgggatcaatgggtttggcaggatcggaaggctggtggccagggtggccctgcagagcgacgacgtcgagctcgtcgccgtgaacgaccccttcatcagcaccgattacatgacctacatgttcaagtatgacactgtgcacggacagtggaagcaccatgaggtcaaggtgaaggactccaagacccttctctttggtgagaaggaggttgctgtgtttggctgcaggaaccctgaggagatcccatggggttcggttggcgctgaatatgttgctgagtctactggtgttttcactgaccaggagaaggctgcagctcacttgaanggtg

SEQ ID NO: 89879 - DNA, 399 bp, Zea mays
  unsure (1)..(399): unsure at all n locations
gagaaagtaatacaataccagggattgaattccttcaatagcttaacaatacgccaggccacttcccctcacactgcttaagtaaaatcagattttgcattaaaacaggcggcaaaaggctggctgcacgaacataccgcctctccttatgcaacacattggcgccagctcgtgtttggctttccaataatggtcagattctacaccttgaattgcctatggcacaacgaagaatcagaaagagcaaggtttaaacaccatagagccttcgcctatggtccagcggtgggcaataaagtgagcccaagatgccgnctagcatggtctgggatcagcctgttgatgagctccggggaggcatttgctagttcctgtttaaagctgaacagtggaggaaat

SEQ ID NO: 89880 - DNA, 421 bp, Zea mays
ggaatacagtagcaacaatagagcaacaatggcggccaagatattttccatgcttatgctccttgctctttctgcatgtgttgctaacgcgaccatttttcctcaatactcacaagctcctatagctgcccttcttcccccataccttccatcaatgaccgcttcagtttgtgaaaacccagcccttcaaccctacaggctccaacaagcaatcgcaacaagcaacttacctttatcacccctgttctttcaacaatcgccagccctatctttggtgcagtcattggtacaaaccatcagggcacaacagctgcaacaactcgtgttaccagtgatcagccaagtagctctggcaaacctttctccctactctcagcaacaacaatttcttccattcaaccaactgtctacactgaaccct

SEQ ID NO: 89881 - DNA, 393 bp, Zea mays
  unsure (1)..(393): unsure at all n locations
ggaattcccggctcgacccacgcgtacggacgagncggcaacatagaaagtagaattcattagcaacaatagagcaacaatggcggccaagatattttccctccttatgctccttgctctttctacatgtgttgctaacgcgacaattttccctcaatgctcacaagctcctatagcttcccttcttcccccataccttccatcaattatagcttcagtatgtgaaaacccagcttttcaaccatataggcttcaacaagcaatcgcagcaagcaacatacctttatcgcccttgttgtttcaacaatcaccagccctatctttggtgcagtcattggtacaaaccatcagggcacaacagttgcagcaactcgggctacctgtgatcaacca

SEQ ID NO: 89882 - DNA, 314 bp, Zea mays
cacgtctcgtcggaccggcccccgggcgtcaccaggggccggtactggctgggcttgtcggggacgctctgcgccgcggcgctttacggcctcgtcctgccgctggtggagctcgcgtacaggcgcgccgcgggcggtggccgcgccgtgacgtacgcgctggtggtggagatgcagctggtgatggggttcttcgccaccggcttctgcacggtaggcatggtcgtgaacaaagacttgcaggcgatcccgagggaggcgaggcagtacgagcatgcgtaggcccggtactacatggtgctgtcgtgggcggc

SEQ ID NO: 89883 - DNA, 349 bp, Zea mays
  unsure (1)..(349): unsure at all n locations
attgagaccaactagcaacatataaagcacaatagtgtaccaacaatggcaggcaagatattttgcctccttatgctccttggtctttctgcaagtgctgctacggcgaccattttcccgcaatgctcgcaagctcctatagcttcccttcttcccccgtacctctcaccagcggtgtcttcggtatgtgaaaacccaattcttcaaccctacaggatccaacaggcaatcacagctggcatcttacctttatcacccttgttcctccaacaatcatcagccctattacatcagttacctttggtgcatttattggcacanaacatcagggcacaacaactacaacaac

SEQ ID NO: 89884 - DNA, 412 bp, Zea mays
cccacgcgtccgattctacctatgatatgattggaggccttgaccagcaaatgaaagggatcaaagaggtcattgagcttccaatcaaacatccggaactgtttgagagccttggaattgcacaaccaaagggtgtccttctttatggaccttcgggcacaggaaagacattgttggcacgtgcggttgctcatcacactgactgcaccttcatcagggtgtctggttctgagttggttcacaagtatattggtgagggctcccggatggttagggaactctttgttatggccagggaacatgcaccatccattatatttatggatgaaattgactgtatcggatctgctagaatggagtctggaactggcaacggtgacagtgaaattcagcgtactatgcttgaacttct

SEQ ID NO: 89885 - DNA, 325 bp, Zea mays
  unsure (1)..(325): unsure at all n locations
cccacgcggccgacagagcgcacaagaacccgatcgacaccatgagggtgatgctcggggtcctcgctctcctggctctcgctgcgagcgccacctacacgcatacaagcggcggctgcggctgccagccaccgacgtcggctcatctaccgacgncggtgcatctgccaccttcggttcacctgccacctacggcgcatatcccaccggcggtacaactgacgccgacggtgcacctgacaccgacggtccatgtgccgtcgacagttaatatgccgacgtcagcatgccactacgctactcaaccgcaccggactnaagctga

SEQ ID NO: 89886 - DNA, 394 bp, Zea mays
attgagaccaactagcaacatagaaagcacaatactgcaccaacaatggcagccaaaggattgtgcttccttatgctccttggtctttctgcaagtgctgctaccgcaaccattttcccacaatgctgacaagctcatatagcttgctttcttcccccatacctctcaccagcggagtcttcaggatgcgaaaacccaattcttcaaccctacaggatccatcaggctatcgcatccggcattttacctttatcacccttgatcctccaacaacgcgtagacctattccagacattacctttggtgcactacttcggccagagcatgcaggcacagctgcttcctctacttgcgctaagaaaccttgatgcctactactagctgcagcggactc

SEQ ID NO: 89887 - DNA, 333 bp, Zea mays
cggaattcccgggtgcgacccacgcgtcgcgcagcatgtcaaaaacatcaccaagtcgaagctgcactagcaacgactctaacatccaatggctggccaagatattagccgctccttgcgcttcttgcccttttagtgagcgcaacacatgcgttcattattccacagtgctcacttgctcctagtgccattattccacagttcctcccaccagttacttcaatgggcttcgaacatccagccgtgcaagcctacaggctacaactagcgcttgcggcgagcgccttacaacaaccaattgcccaattgcaacaacaatccttggcacatcta

SEQ ID NO: 89888 - DNA, 406 bp, Zea mays
  unsure (1)..(406): unsure at all n locations
gcgatgacgatggcgacgaaggcggcgtgcgtgctggcggtgtgggtgctcgtcgcgtcgggcctgtccgacctgggctcagcgcgcgcgcccctgggcagcaagccgcagcgggagttcgactacttcgcgctctccctccagtggcccggcaccatctgcgcctccacccgccactgctgcgccaccaacggctgctgccgctcggagcctctccagacgttcacgatccacgggctatggccggactacgacgacgggacctggccgtcgtgctgccgccgcacccaattcgagatggacaagatattgccactgaaggaggtgcttgacaagtactggccgtncctctactgctccaaatctggaacatgcttcagcggcaagggactcttctgggctcacg

SEQ ID NO: 89889 - DNA, 309 bp, Zea mays
ctctgctgcttatttacaacagcaacagctaccaccattcagccagctagctgatgtgagccctgttgccttcttgacacaacaacagttgttgccgttctacctgcacgctgcgcctaacgctggcaccctcttacaactgcaacaattgctgccattcaaccaacttgctttgacaaacccaacagcgttctaccaacaacccatcattggtggtgccctcttttagattgcttatgagttatacttcaataatgaagttttttggatgatgtttgtggcttcccagaaataagaaagtacatttct

SEQ ID NO: 89890 - DNA, 420 bp, Zea mays
ttcagaaacacaccaagcgaagcgcactagcaacgacctaacaacaatggctaccaagatattagccctccttgcgcttcttgccctttttgtgagcgcaacaaatgcgttcattattccacaatgctcacttgctcctagtgccattattccacagttcctcccaccagttacttcaatgggcttcgaacacctagctgtgcaagccaacatgcaacaacaagcgcttgcggcgagcgtcttacaacaaccaattgcccaattgcaacaacaatccttgccacatctaacaatacaagccatcacaacgcaacagcaacaacagttcctaccagcactgagccacctagccatggtgaaccctgccgcctacttgcaagagcagctgcttgcatccaacccacttgctctggcgaacgt

SEQ ID NO: 89891 - DNA, 419 bp, Zea mays
attgagaccaacaagcaacatagaaagtggaatccagtagcaacaacagagcaacagtggcgaccaagatattttccctccttatgctccttgctctttctgcatgtgttgctaacgcgacaattttccctcaatgctcacaagctcctatagcttcccttcttcccccataccttccatcaatgatagcttcagtatgtgaaaacccagctcttcagccctataggctccaacaagcaatcgcagcaagcaacatacctttatcacccttgttgtttcaacaatcgccagccctatctttggtgcagtcattggtacaaaccatcagggcacagcagctgcagcaactcgtgctacctgtgatcaaccaagtagctctggcaaacctttctccctactctcagcaacaacaatttctt

SEQ ID NO: 89892 - DNA, 416 bp, Zea mays
  unsure (1)..(416): unsure at all n locations
gcgacaacaagaagttcatgttcaacatcaacaacaacaaccgcagcaccaccaccaagaacggcaacaacagcaccaacaacaacatcaatgtgaaggccaacaacaacatcaccaacaatcacaaggccatgtgcaacaacacgaacagagccatgagcaacaccaaggacagagccatgagcaacaacatcaacaacaattccagggtcatgacaagcagcaacaaccacaacagcctcagcaatatcagcagggccaggaaaaatcacaacagcaacaatgtcattgccaggagcagcaacagactacaaggtgcagctataactactatagcagtagctcaaatctaaaaaattgtcatgaattcctaaggcagcagtgcagccctttggtaatgccttttctncaatcac

SEQ ID NO: 89893 - DNA, 409 bp, Zea mays
gtgcgagaaggcaagccatctagaggtcccagtagctgagggcagccatgaggctctgaagggaggaaagccgcacgttgctgacttcgttcatggacctgatggcctcgggaacgtagatcttcctgatcccactatcaagaaagtggaggaaagtgctaccgacttcttggttgataaggtctcgcgatttcctggagaggtctctgtgctcgccttgggtcctctgacaaacatagcattggccatcaagaaggatccctcattcgtgaaaaacgttaagaagatcgttgtgctgggtggagcgttctttgcggctggaaatgccactccttccgctgaagcaaatatccacagtgatccggaggcagccgacatggttttcacttctggggcggacatctacgtc

SEQ ID NO: 89894 - DNA, 434 bp, Zea mays
ccaccgagacccacccatgcatcgcaacccaacaatcgatcatcaatttcaaccaagatactttacctcctggggctgcgtgctctttatgcatgcggggctaactcgacaattttccctcaatgctcacaagctcctatagcttcccttcttcccccataccttccatcaatgatagcttcactatgtgaaaacccacctcttcaaccctatacgctccaacacgcaatctcagcaagcaacatacctttatcacccttgtttcaacaatcgccagccctatctttggtgcagtccttgctacaaaccatcaaagcacagcagctgcagcaactcctactacctgtgatcaaccaactagctctggcaaacctttcttcatactatcagcaacaacaatctcttccattcaaccaactatatacactgaaccc

SEQ ID NO: 89895 - DNA, 406 bp, Zea mays
gtgctgccagtagagctctcagaactcgggaaaaaaaatgtcagaggccgccgtgcgtgtgatcggcctatggccgagcccgttcgtgatccgcgtcctgatcgccctgaagctgaagggcgtcgagttcgagttcgtggaggaggtggtgggcaggaagagcgagctgctgctgaggtcgaacccggtgcacaagaagatccccgtcctgctccaccacggcaagcccatctccgagtctctgatcatcgtccagtacatcgacgaggtctggtcctccggcgcgccggccttcctccccgccgacgctcacgcccgcgccgtccagcggttctgggcgcagtacgtcgacgacaagctgccttgggcgatccgcatactgaagggaacggacgacgacgggggc

SEQ ID NO: 89896 - DNA, 350 bp, Zea mays
gtgaagccgccgccgctgcagtgtccatagccaccgcaggagactgagatggggggtgggtgtcaagacccacaggaccaatgcgtacttcaagcgtttccaggtgaagctcaagagaaggcgcgctggcaagacagactacagggccaggataaggctgattaaccaagacaaaaacaagtacaatacacccaaatacagatttgttgtgctgatttaccaacaaggacatcacaggacagatcatgtctgctagtatagcacgtgatatggatcttgcttctgcttactcgcatgatgtgccacgatatggacttgaagttggtctgaccaactatgcagctgactac

SEQ ID NO: 89897 - DNA, 419 bp, Zea mays
aacaacaatggctaccaagatattatccctccttgcgcttcttgcgctttttgcgagcgcaacaaatgcgttcattattccacaatgctcacttgctccaagttccattattacacagttcctcccaccagttacttcaatgggcttcgaacacccagctgtgcaagcctataggctacaacaagcaattgcggcgagcgtcttacaacaaccaatttcccagttgcaacaacaatccttggcacatctaacaatacaaaccatcgcaacgcaacagcaacaacaattcctaccagcactgagccacctagccatggtgaaccctgccgcctacttgcaacagcagttgcttgcatcaaacccacttgctctggcaaacgtagttgcaaaccagccacaacaacagctgcaacagtttc

SEQ ID NO: 89898 - DNA, 414 bp, Zea mays
tagcaacatagaaagcacaatagtgtaccaacaatggcagccaaaatattgtgcctccttatgctccttggtctttctgcaagtgctgctacggcgaccattttcccgcaatgctcgcaagctcctatagcttcccttcttgccccgtacctatcaccagcggtgtcttcggtatgtgaaaacccaattcttcaaccctacaggatccaacaggcaatcacagctggcatcttacctttatcacccttgttcctgcaacaatcatcagccctattacatcagttaccttcggtgcatatattggcacataacatcagggcacaacaactacaacaacttgtgctagcaaaccctgctggctactctcaacaacagcagtttcttgcattcaaccaactagctgcattgaactct

SEQ ID NO: 89899 - DNA, 420 bp, Zea mays
gtggaatccagtagcaacaatagagcaacaatggcgaccaagatactttccctccttgggctgcttgctctttctgcatgtgttgctaacgcgacaattttccctcaatgctcacaagctcctatagcttcccttcttcccccataccttccatcaatgatagcttcagtatgtgaaaacccagctcttcaaccctataggctccaacaagcaatcgcagcaagcaacatacctttatcacccttgtttcaacaatcgccagccctatctttggtgcagtcattggtacaaaccatcaaggcacagcagctgcagcaactcgtgctacctgtgatcaaccaagtagctctggcaaacctttctccctactatcagcaacaacaatttcttccattcaaccaactatctacactgaaccct

SEQ ID NO: 89900 - DNA, 424 bp, Zea mays
gcggcatagaaagcacaatagtgtaccatacaatggcagccaaaatattttgcctccggatgcgccttggtctttctgcaagtgctgctacggcgaccattttcccgcaatgctcgcaagctcctatagcttcccttcttcccccgtacctctcaccagcggtgtcttcggtatgtgaaaacccaattcttcaaccctacaggatccaacaggcaatcacagctggcatcttacctttatcacccttgttcctccaacaatcatcagccctattacatcagttacctttggtgcatttattggcacaaaacatcagggcacaacaactacaacaacttgtgctagcaaaccttgctgcctactctcagcaacagcagtttcttccattcaaccaactagctgcattgaactctgcttcttattt

SEQ ID NO: 89901 - DNA, 412 bp, Zea mays
atatgccgcctccgttctatctgccgtcgcagcagcagccgcagccatggcaataccgcactgaaccaccgcagctaagcccgtgccagcagttcggatcctgcggcgtcggcagcgtcggcagcccgttcctgggccagtgcgtcgagttcctgaggcaccagtgcagcccggcggcgacgccctacggctcgccacagtgccaggcgctgcagcagcagtgctgccaccagatcaggcaggtggagccgctgcaccggtaccaggcgacatacggtgtggtcctgcagtccttcctgcagcagcagccgcagggcgagctcgcggcgctgatggcggcccaggtagcgcagcagctgacggcgatgtgcggcctgcagctgcagcagccaggtccctgcccttgcaacgc

SEQ ID NO: 89902 - DNA, 415 bp, Zea mays
gaccaactagcaacatagaaagcacaatagtgtaccaacaatggcagccaaaatattgtgcctccttatgctccttggtctttctgcaagtgctgctacggcgaccattttcccgcaatgctcgcaagctcctatagcttcccttcttcccccgtacctctcaccagcggtgtcttcggtatgtgaaaacccaattcttcaaccctacaggatccaacaggcaatcgcagctggcatcttacctttatcacccttgttcctccaacaatcatcagccctattacaacagttacctttggtgcatttattggcacaaaacatcagggcacaacaactacaacaacttgtgctagcaaaccttgctgcctactctcagcaacagcagtttcttccattcaaccaactaggttcattg

SEQ ID NO: 89903 - DNA, 387 bp, Zea mays
aattcccggctcagacccacgcgtcgcgtaggatattagaccctccttgcgcttcttgcccttattgtgatcgcaacaaatgcgttgattattccacaatgctgacttgctcctactgccattattccacagtgcctaccaccagctacttcaatggtctttgaacacctagctgcataagccatcattcaacaacaagcgcttgcagctagcgaattacatcaaccaattccccaattgcaacaacgctccttgccacatttaacaatgcatgccatcacaacgcaacatcatcaacagctgctaccagcactgacccacctagccatggtgaaccctgccgtctacttgcctgagcatctgctagcatccaacccactagctctg

SEQ ID NO: 89904 - DNA, 417 bp, Zea mays
gagccgcccaagatcccgatccccactccgctggttgccggagctctagccggattggcctcaaccttgtgcacctaccccatggagctgatcaagaccagggtcaccatcgagaaggacgtatacgacaacgtcgcgcacgcgttcgtgaagatcctacgcgacgagggcccgtcggagctgtaccgtgggctgacacccagcctgatcggcgtggtgccgtacgcggcctgtaacttctacgcctacgagacgctgaagcggctctaccgtcgcgcgaccgggcggcgtcccggcgcggacgtgggccccgtggcgacgctgctcatcgggtcggcggcgggcgccatcgccagctcggccacgttcccgctggaggtggcccgcaagcagatgcaagtgggcgctgtgggcggg

SEQ ID NO: 89905 - DNA, 419 bp, Zea mays
ctgatccagcccatttcgaactctctctagacgcttcctcggtctctctgtggaccggtgccccgtaccgtactcctcttcgcgccgtagaaatggcgctgccgaatcagcagggcgtggattaccccagcttcaagctcgtcatcgttggcgacggtggaactggtaaaaccacatttgtgaaaaggcatcttactggcgagtttgagaagaaatatgagcccaccattggtgttgaagttcaccctctggattttagcactaactgtggcaaaattcgcttttattgctgggacactgctgggcaagaaaagttcggtggccttagggatggctactacattcatggtcagtgtgccatcattatgtttgatgtcacttctaggctgacatacaagaatgttccgacatggcacagg

SEQ ID NO: 89906 - DNA, 411 bp, Zea mays
accggtccggaattcccggcaaattcatactttcaatcagagccagtatcctcgcattgttaccgaggacttcttgccacttcccagcaaagggaaatctgggaaggatggctggtatcctcctggtcatggtgatgtgtttccctctttgaataacagcggaaaacttgacatcttattggctcagggcaaagagtatgtctttgttgcaaactcagacaacttgggtgctatagtcgacatcaagatcctaaaccatctgatcaataaccagaacgagtactgcatggaagttactccaaagacgctggctgacgttaaaggtggcactctcatctcttacgaaaggaagagttcagctttttggagattgcccaagtacccgatgagcatgtgaatgaatttaaatca

SEQ ID NO: 89907 - DNA, 405 bp, Zea mays
accggttcggaattacgcggctcgacccacgcgttcgttttacccacaggttgcgctaaacattaacgccttcttgcaacagaaacaggggctaggattctacccacaggatgtggcaaacaatgtctgcttcttacaacaacaacaattgctgccatttaaccaactcgctttcacgaatcctaccaccttattgcagcagcccaccattcgtggtgccatcttgtacaatctttatgaactatactgtaataataaagttctaatgctgctaaaaccaagccgggagcgggtgcgagggcaagaacttctacacccggagcgcgttcctgatcgccgacaacaagtacccggacttaacggatggccgttctgaagaatccagctttcgtcagattgctggct

SEQ ID NO: 89908 - DNA, 390 bp, Zea mays
gcgactttgagattatcaacgactacctcacgaagaaggtgcacgacagggactacagctgcatcgccatcgcggacgccgacctaaacaagaccgagccatgggacctaccgaaagttgcaaagatgggcgagaaggagtggtacttcttctaccagaaggaccgcaagtacccgacggggctgagggcgaaccgggccactgaggcgggttattggaaggcgaccggcaaggacaaggaggtctacaacccctttgcagcggaagggctgctgctggtcggcatgaagaagacgctcgtgttctacaaaggcagggctcccaggggtgacaaaaccaactgggtgatgcacgagtacaggctcgaaggcagcggtagggctcctgcta

SEQ ID NO: 89909 - DNA, 420 bp, Zea mays
gtggaatccagtagcaacaatagagcaacaatggcgaccaagatactttccctccttatgctccttgctctttctgcatgtgttgctaacgcgacaattttccctcaatgctcacaagctcctatagcttcccttcttcccccataccttccatcaatgatagcttcagtatgtgaaaacccagctcttcaaccctataggctccaacaagcaatcgcagcaagcaacatacctttatcacccttgtttcaacaatcgccagccctatctttggtgcagtcattggtacaaaccatcaaggcacagcagctgcagcaactcgtgctacctgtgatcaaccaagtagctctggcaaacctttctccctactatcagcaacaacaatttcttccattcaaccaactatctacactgaaccct

SEQ ID NO: 89910 - DNA, 425 bp, Zea mays
attgagaccaactagcaacatagaaagcacaatagtgtaccaacaatggcagccaaaggattttgcttccttatgctccttggtctttctgcaagtgttgctaccgcaaccattttcccacaatgctcacaagctcctatagcttcccttcttcccccatacctctcaccagcggtgtcttcaatgtgtgaaaacccaattgttcaaccctacaggatccaacaggcaatcgcaacaggcatcttaccattatcacccttgttcctccaacaaccgtcagccctattacagcagttacctttggtccatttggtggcacaaaacatcagggcacaacaactacaacaacttgtgctagcaaaccttgctgcatactctcagcaacatcagtttcttccattcaaccaactggctgcattgaactc

SEQ ID NO: 89911 - DNA, 423 bp, Zea mays
  unsure (1)..(423): unsure at all n locations
gcaaagcggcagtgcgtagagaggatcgtcgaacagaacagcatgaagatggtcatcggtctcgtcgtgtgcctggctctgtcagctgccagcgcctctgcaatgcagatgccctgcccctgcgcggggctgcagggcttgtacggcgctggcgccggcctgacgacgatgatgggcgccggcgggctgtacccctacgcggagtacctgaggcagccgcagtgcagcccgctggcggcggcgccctactacgccgggtgtgggcagccgagcgccatgttccagccgctccggcaacagtgctgccagcagcagatgaggatgatggacgtgcagtccgtcgcgcagcagctgcagatgatgatgcagcttgagcgtgccgctgccgncagcagcagcctgtacgagccagctctgatgcaa

SEQ ID NO: 89912 - DNA, 410 bp, Zea mays
accaactagcaacatagaaagcacaatattgtaccaacaatggcagccaaaatatttggcctgcttatgctccttggtctttctgcaagtgctgctacggcgaccattttcccgcaatgctcgcaagctcctatagcttcccttcttcccccgtacctctcaccagcggtgtcttcggtatgtaaaaacccaattcttcaaccctacaggatccaacaggcaatcacagctggcatcttacctttatcacccttgttcctccaacaatcatcagccctattacatcagttacctttggtgcatttattggcacaaaacatcagggcacaacaactacaacaacttgtgctagcaaaccttgctgcctactctcagcaacagcagtttcttccattcaaccaactagctgc

SEQ ID NO: 89913 - DNA, 416 bp, Zea mays
  unsure (1)..(416): unsure at all n locations
gcgaggagggcaggaagaccgaagaccgtaccgtgcgggggctcgggacgggaacgggacaggaccccaaaatctcagatccttcctgcccgcccgcccgtgcccgtcgacgcgtcgttcttgccggccgcgcctcacctccgccctctcctcctccagggggatcggatacgccacaggctgcgcgatggtgctgtgggtcttcggctacggctccctcatctggaaccccggcttcgacttcgacgacaaaatcctcggcttcatcaagggctacaagcgcacctttaatctcgcttgcattgaccacagaggcacaccggagcatncggcgaggacctgcacgcttgaaaccgacgacgaggccatatgctggggaattgcatattgtgtcaagggtggtccagaaaaagagc

SEQ ID NO: 89914 - DNA, 414 bp, Zea mays
tagcaacatagaaagcacaatagtgtaccaacaatggcagccaaaatattttgcctgggtatgctccttggtctttctgcaagtgctgctacggcgaccattttcccacaatgctcacaagctcctatagcttcccttcttcccccgtacctctcaccagcggtgtcttcggtatgtgaaaacccaattcttcaaccctataggatccaacaggcaatcgcagctggcatcttacctttatcacccttgttccttcaacaatcatcagccctattacagcagttacctttggtgcatttattggcacaaaacatcagggcacaacaactacaacaacttgtgctagcaaaccttgctgcctactctcagcaacaacagtttcttccattcaaccaactagctgcatttgactct

SEQ ID NO: 89915 - DNA, 245 bp, Zea mays
atcgctcacatagctcctataccttgcattcttcacctatacctctcaccagcggctgcttgcatgtgtgaaaacccaatcgatcagacgtaccggatccaacaggcaatcgcatccaggatcctaccatcattaatcttgctcctccaacatgcgtcaaccctattacagcagctaactttgggccatttggagggacaaaaccatgcgggtccacaacgtccaaaacctgggcctgccaaact

SEQ ID NO: 89916 - DNA, 321 bp, Zea mays
ttcccgggatttcgagcatgcacaaacacaccaagcgaagctacctagcatctacttaacaacaatggctaccaagggtggtccctacttgcgcttgtcgccctctttgagagcgcatcatatgcgtgcattattcctcattgctgactggctcctagtgctattataccacactgtctccatctagatactctactggacttcgtccaccgttctcatcatgccagctatttgctacgagcccttgcgccttgcgttcgtcaaccccgctatggatgtttaaatctactgctcacttgtcgactatataaactctgcact

SEQ ID NO: 89917 - DNA, 325 bp, Zea mays
tattttgagcattcagaaacacaccaagcgaagcgcactagcaacgacctaacaacagtggctaccaagatattagccctccttgcgcttcttgccctttttgtgagcgcaacaaatgcgttcattattccacaatgctcacttgctcctagtgccattattccacagttcctcccaccagttacttcaatgggcttcgaacacctagctgtgcaagccaacatgcaacaacaagcgcttgcggcgagcgtcttacaacaaccaattgcccaattgcaacaacaatccttgccacatctaacaatacaagccatcacaacgcaac

SEQ ID NO: 89918 - DNA, 365 bp, Zea mays
caaccacagttgttgccgttctaccagcacgttgcgcctaacgctggcaccgtcttacaactgcaacaattgctgccattcaaccaacttgctttgacaaacccagcagcattctaccaacaacccatcattggtggtgccctcttttagatttcttatgagttatagttcaataataaagttttttgtctgatgtttgtggcttcccagaaataagaaagtacatttctaaaaaaaaaaaaaaaaaaaaaaaaaataaaaaataaaaaaaaaaaaaaaaaaaaaataaaaaaaaaaataaaaataaaataataaaaaaaaaaaaattaaaggaaaaaaaaaaaaaaagggccggccgttttaaa

SEQ ID NO: 89919 - DNA, 419 bp, Zea mays
ccaactagcaacatagaaagcacaatagtgtaccaacaatggcagccaaaatatttgggttccttatgctccttggtctttctgcaagtgctgctaccgcaaccattttcccacaatgctcacaagctcctatagcttcctttcttcccccatacctctcaccagcggtgtcttcagtatgtgaaaacccaattcttcaaccctacaggatccaacaggcaatcgcagcaggcatcttacctttatcacccttgttcctccaacaaccgtcagccctattacagcagttacctttggtgcatttgttggcacaaaacatcaaggcacaacaactacaacaacttgtgctaagaaaccttgctgcctactctcagcaacagcagtttcttccattcaaccaactggctgcattgaactct

SEQ ID NO: 89920 - DNA, 407 bp, Zea mays
cccagccacacccatgcccgtgccaacagccgcatccaagcccgtgccagctgcagggaacctgcggcgttggcagcaccccgatcctgggccagtgcgtcgagtttctgaggcatcagtgcagcccgacggcgacgccctactgctcgcctcagtgccagtcgttgcggcagcagtgttgccagcagctcaggcaggtggagccgcagcaccggtaccaggcgatcttcggcttggtcctccagtccatcctgcagcagcagccgcaaagcggccaggtcgcggggctgttggcggcgcagatagcgcagcaactgacggcgatgtgcggcctgcagcagccgactccatgcccctacgctgctgccggcggtgtcccccactgaagaaactatgtgctgtagtat

SEQ ID NO: 89921 - DNA, 501 bp, Zea mays
  unsure (1)..(501): unsure at all n locations
gagtgggaggtctgtgtactgccaggagggaagagtagtcctgcgttcggaattcccgggtcgacccacgcgtacgatgccgcctccgttctatctgccgccgtagcagcagccgcagccatggcaataccccggtcagaccaccgcagctaagcccgtgccagcagttcggatcctgcggcgtcggcagcgtcggcagcccgttcctgggccagtgcgtcgagttcctgaggcaccagtgcagcccggcggcgacgccctacggctcgccacagtgccaggcgctgcagcagcagtgctgccaccagatcaggcaggtggagccgctgcaccggtaccaggcgacatacggtgtggtcctgcagtccttcctgcagcagcagccgcagggcgagctcgcggcgctgatggcggcccaggtagcgcagcagctgacggcgatgtgcggtctgcagctgcagcagccaggtccctgcccttgcaacgcagctgccggccgtn

SEQ ID NO: 89922 - DNA, 389 bp, Zea mays
tggacgtcagcctagcaattagctcatcgactccagattggagaactcgacaccatgagaggtgctgatcgttgcccttgctctcctggcgctcgctgcgagcgccgcctccagtacaagcggcggctgtggctgccagacaccaccgtttcatctaccgcctccgttctatatgccgcctccgttctatctgccgccgcagcagcagccgcagccatggcaataccccactcaaccaccgcagctaagcccgtgccagcagttcggatcctgcggcgtcggcagcgtcggcagcccgttcctgggccagtgcgtcgagttcctgaggcaccagtgcagcccggcggcgacgccctacggctcgccacagtgccaggcgctgcagcagc

SEQ ID NO: 89923 - DNA, 279 bp, Zea mays
aaaacatcaaggcacaacaactacaacaacttgtgctaggaaaccttgctggcgactgtcagcaacagcagtttcttccattcaaccaactggctgcattgaactctgctgcttatttgcaacaacaactaccattcagtcagctagctgctgcctacccccagcaatttcttccattcaaccaactggcagcattgaactctgctgcttatttacaacagcaacagctaccaccattcagccagctagctgatgtgagccctgttgccttcttgacac

SEQ ID NO: 89924 - DNA, 418 bp, Zea mays
ctaaccatacaaaccatcgcaacgcagcagcaacaagcactgagccacctagcgcgtggtgaaccctatcgcctacttgcaacaacagctgcttgcatccaacccacttgctttggcaaacgtagctgcataccaacaacaacaacagttgcaacagtttctaccagcgctcagtcaactagccatggtgaaccctatcgcctacctacaacagcaacaacttctttcatctagcccgctcgctatgggcaatgcacctacatacctgcaacaacagttgttgcaacaacagttgctgcaacaaattgtaccagctcttactcagctagctgtggcaaaccctgctgcctacttgcaacaactacttccattcaaccaactgactgtgtcgaactctgctgcgtacctacaacagcga

SEQ ID NO: 89925 - DNA, 266 bp, Zea mays
gctggtgtgagccctgctaccttcttgacacaaccacagttgttgtcgttctaccagggcgctgcgcctaacgctggcaccctcttacaactgcaacacttgctgacattcaaccaacttgctttgacaaacccagcagcattctaccaacaacccattactggtggtgccctcttttagatttattatgagttatagtacaataataaagacttctgcctgatgttcgcgtattaccagaaataagaaagtacatttgtaagcac

SEQ ID NO: 89926 - DNA, 413 bp, Zea mays
gttcttcgccaccccgccggtgcacggctcgctggcgaaccaggtggtgcacgccgggggacctgtgcttcaagctccccgacggggtgagcctggaggagggcgccatgtgcgagccgctgagcgtgggcgtgcacgcgtgccgccgtgcggaggtggggcccgagacgggcgtgctcgtggtgggcgccggtcccatcggcctggtgtcgctgctagcggcgcgagccttcggcgcgccgcgcgtggtggtcgtggacgtggacgaccaccgcctggccgtggccaggtcgctgggcgcggacgctgcggtgcgggtgtcgtcccgcgcggaggacctggcggacgaggtggagcgcatacgcgcggccatgggctcggacatcgacgtcaggctggactgagccgggttc

SEQ ID NO: 89927 - DNA, 403 bp, Zea mays
agcattcaaaaacacaccaagcgaagctcactatcaacgacctaacaccaatggctaggcgaagatattagccctccttgcgcttcttgcccttttagtgagcgcaacaaatgcgttcattattccacagtgctcacttgctcctagtgccagtattccacagttcctcccaccagttacttcaatgggcttcgaacatccagccgtgcaagcctacaggctacaactagcgcttgcggcgagcgccttacaacaaccaattgcccaattgcaacaacaatccttggcacatctaaccctacaaaccattgcaacgcaacaacaacaacaacagtttctgccatcactgagccacctagccgtggtgaaccctgtcacctacttgcaacaacaactgcttgca

SEQ ID NO: 89928 - DNA, 421 bp, Zea mays
agaccaactagcaacatagaaagcacaatagtgtaccaacaatggcagccaaaatatggtgcgtccttatgctccttggtctttctgcaagtgttgctaccgcaaccattttcccacaatgctcacaagctcctatagcttcccttcttcccccatacctctcaccagcggcgtcttcaatgtgtgaaaccccaattgttcaaccctacaggatccaacaggcaatcgcaacaggcatcttaccattatcacccttgttcctccaacaaccgtcagccctattacagcagttacctttggtccatatggtggcacaaaacatcagggcacaacaactacaacaacttgtgctagcaaaccttgctgcatactctcagcaacatcagtttcttccattcaaccaactggctgcattgaactc

SEQ ID NO: 89929 - DNA, 347 bp, Zea mays
  unsure (1)..(347): unsure at all n locations
gaactgtgtaataatggaacttggagcacccagctgtgcaagcctatatgctgcaaggagcaattgcggcgagcgtcttacaacaaccaatttcccagttgcaacaacaatccttggcacatctaacaatacaaaccatcgcaacgcaacagcaacaacaattcctaccagcactgagccacctagccatggtgaaccctgccgnctacttgcaacagcagtttgcttgcataaaacccacttgctctggcaaacgtagttgcaaaccagccacaacaacagctgcaacagtttctgccagcgctcagtcaactagccatggtgaaccctgccgcctacctacaaca

SEQ ID NO: 89930 - DNA, 411 bp, Zea mays
ccgaattcccaggctggcaggtcggctaggagggcaggaagaccgaagaccgagccgggccgcggctcgggacgggaactggacaggacctcaaaatctcagatccttgctgcccgcccgaccgtgcccgtcgacgcgtcggtattgccggccgagccccacctccgccctcttctactacacggggatcggatacgccacaggctgagcgatggtgctaggggtcttcggctacggctctctcatctggaaccctggcttcgacttcgacgacgaaatgctcgagttcatcaaaggctacaagctcacctttaatctcgctggcattgaccacagatgcacaccggatcatccgtcgaggacctgcacgcttgataccgacgacgaggccatatgctggagaattgcata

SEQ ID NO: 89931 - DNA, 414 bp, Zea mays
ccgccgccgtcccgtcaccaccaccaaccttggtagcagccgccgtccggtcggcaggaccaccttggtagccgccgccgaagcgcgccgcgggcgcgggcgctcgcgatggctaaccgcacggaccccctcgcgaagagcatccatgggacgaacccacaaaacctggtggagaagatcgtgcgctccaagatctatcagagcacctactggaaggagcaatgcttcggcctcaccgcagagacgctagtcgacaaggccatggagctcgaccacaccggcggaacctacggcggcaaccgcaagcccacccctttcctctgcctcgcgctcaagatgctgcagatccaaccagacaaggacatcgtagtcgagttcatcaagaacgaggattacaagtatgttcgtgttctc

SEQ ID NO: 89932 - DNA, 347 bp, Zea mays
ctagcaacatagaaagcacaatagtgtaccaacaatggcagccaaaatattgtgccggcttatgctccttggtctttctgcaagtgctgctacagctaccattttcccgcaatgctctcaagctcctatagcttcccttctttccccgtacctatcaccagcggtgtcttctgtatgtgaaaacccaatactttaaccctacaagatccaacaggcaattgcagctggcatcttacctttatcacccttgttactacaacaatcattatccctattacaacagttaccttaggtgcatttattggcacacatcatcaaggcacaacaactactacaacttgtgctag

SEQ ID NO: 89933 - DNA, 422 bp, Zea mays
  unsure (1)..(422): unsure at all n locations
gccgcatccaagcccgtgccagctgcagggaacctgcggcgttggcagcaccccgatcctgggccagtgcgtcgagttcctgaggcatcagtgcagcccgacggcgacgccctactgctcgcctcagtgccagtcgttgcggcagcagtgttgccagcagctcaggcaggtggagccgcagcaccggtaccaggcgatcttcggcttggtcctccagtccatcctgcagcagcagccgcaaagcggccaggtcgcggggctgttggcggcgcagatagcgcagcaactgacggcgatgtgcggcctgcagcagccgactccatgcccctacgctgntgccggcggtgtgccccactgaggaaactatgtgctgtagtatagccgctggctagctagctagttgagtcatttagcggcgatga

SEQ ID NO: 89934 - DNA, 415 bp, Zea mays
ggacaacccggcgtccttgtcggggcctgcccgccgcgcgccacaccccgcgcgcgccgcgccctacccaccggccgctcccaaggcccgtgccgccgccgactcgccctacggggtctactccaagcacatcgccgcgatagcgccgcccccgctggccaaagcaaggtcgcttgagacgggaacgaagctgcacatctccaaccttgactccggcgtcaccatcgaggatgtccaggaactcttctcagaagttggggagctcaagcgttattctatgaattatgacaaggatgggagatctaaggggactgtggaagttgtctttgcaaggaaagtggatgctttggatgctatcaagagatacaatggtgttctacttgatgggaagccaatgaatctagagctcattgga

SEQ ID NO: 89935 - DNA, 446 bp, Zea mays
ggaattcccggcgtcccatgtgaaagtcattggtttgaacttggatgagagcaaagtacgtcgtgctggacctgctgagaatgtgcgtggtaaattgtctggagttgaagaggaggatgtaatggctggttttgtactttcaagtgttgctaatcctgttggtgccgttagtgaattcattgctcagttgcagattttagagttgcttgacaatgctattttcactgccggctacaaagctgtgttgcatattcactctgttgtcgaagagtgtgagattgttgagctcatagaggaaattggcatgaagaaaaagaaagaagaagatccaaagaagaaaaagccaaagaggaagcctctttttgtgaagaacggtgcaattgttgtttgccgcattcaggtgaataacttgatatgcatagagaagttctctgatttccctcagc

SEQ ID NO: 89936 - DNA, 405 bp, Zea mays
caaaaagggcaagaagcgcaacaaatgcgttcattattccacaatgctcacttgctcgtagtgccattataccacagttcctccgaccagttacttcaatgggcttcgaacacctagctgtgcaagcctacaggctacaacaagcgcttgcggcgagcgtcttacaacaaccaattaaccaattgcaacaacaatccttggcacatctaaccatacaaaccatcgcaacacaacagcaacaacagttcctaccagcactgagccaactagatgtggtgaaccctgtcgcctacttgcaacagcaggtgcttgcatccaacccacttgctctggcaaacgtagctgcataccaacaacaacaacaattgcaacagtttctgccagcgctcagtcaactagccatgg

SEQ ID NO: 89937 - DNA, 469 bp, Zea mays
  unsure (1)..(469): unsure at all n locations
ctcttatagtcctctaccggttcggaattcccgggtcgacccacgcgtgcgagcagtttcttccattcaaccaactagctgcattgaactctgcttcttattgggaacgacaacaactaccattcagccagctacctgctgcctacccccagcaatttcttccattcaaccaactggcagcattgaactctcctgcttatttacagcagcaacaactactaccattcagccagctagctggtgtgagccctgctaccttcttgatacaaccacagttgttgccgttctaccagcacgctgcgcctaacgctggcaccctcttacaactgcaacaattgctgccattcaaccaacttgctttgacaaacccagcagcgttctaccaacaacccatcattggtggtgccctcttttagatttcttatgagttatagttcaataataaagttttttgtctgatgtttgtggn

SEQ ID NO: 89938 - DNA, 422 bp, Zea mays
acacactcgagaactccatttcgatctcatttgaaatcaacccatcctcgtggcctgggtctagcagcctctcaccctcatggccaagatcaagatcgggatcaatgggtttggcaggatcggaaggctggtggccagggtggccctgcagagcgacgacgtcgagctcgtcgccgtgaacgaccccttcatcagcaccgattacatgacctacatgttcaagtatgacactgtgcacggacagtggaagcaccatgaggtcaaggtgaaggactccaagacccttctctttggtgagaaggaggttgctgtgtttggctgcaggaaccctgaggagatcccatggggttcggttggcgctgaatatgttgttgagtctactggtgttttcactgaccaggagaaggctgcagctcacttga

SEQ ID NO: 89939 - DNA, 153 bp, Zea mays
cctatagcttcccgttcttccccgcatacctgtacatcacattatagacttcagtatgtcgaaaacccctagctcttcgaaccatatagtgcttcaacaaagcaaatcgctagcaagcaaacataccctttatcagccctttgttgtttcaac

SEQ ID NO: 89940 - DNA, 394 bp, Zea mays
cgaccattttcccgcaatgctcacaagctcctatagcttcccttcttccccggtaccgctcaccagcggtgtcttcggtatgtgaaaacccaattcttcaaccctacaggatccaacaggcaatcgcagctggcatcttacctttatcacccttgttcctccaacaatcatcagccctattacagcagttacctttggtgcatttattggcacaaaacatcagggcacaacaactacaacaacttgtgctagcaaaccttgctgcctactctcagcaacagcagtttcttccattcaaccaactagctgcattgaactctgcttcttatttgcaacaacaacaactaccattcagccagctacctgttgcctacccccaacaatttcttgcatt

SEQ ID NO: 89941 - DNA, 420 bp, Zea mays
  unsure (1)..(420): unsure at all n locations
agaacccgatcgacaccatgagggtgttgctcgttgccctcgctctcctggctctggctgcgagcgccacctgcacgcatacaagcggcggctgcggctgccagccaccgccgccggttcatctaccgccgccggtgcatctgccacctccggttcacctgccacctccggtgcatctcccaccgccggtccacctgccgccgccggtccacctgccaccgccggtccatgtgccgccgccggttcatctgccgccgncaccatgccactaccctactcaaccgccccggcctcagcctcatccccagccacacccatgcccgtgccaacagccgcatccaagcccgtgccagctgcagggaacctgcggcgttggcagcaccccgatcctgggccagtgcgtcgagttcctgaagcatc

SEQ ID NO: 89942 - DNA, 441 bp, Zea mays
gcacaagttgttgtagttgttgtgccctgatgttttgtgccaccaaatggaccaaaggtaactgctgtaatagggctgacggttgttggaggaacaattaccattcagccagctagttgctgcctacccccagcaatttcttccattcaaccaactagcagcattgaactctgctgcttatttacagcagcaacaactactaccattcagccagctagctgatgtgagccctgctgccttcttgacacaacaacagttgttgccgttctacctgcacgctatgcctaacgctggcaccctcttacaactgcaacaattgctgccattcaaccaacttgctttgacaaacccaacagtgttctaccaacaacccatcattggtggtgccctcttttagattgcttatgagttatagttcaataatgaagttttttggatgat

SEQ ID NO: 89943 - DNA, 468 bp, Zea mays
  unsure (1)..(468): unsure at all n locations
accggtccggaattcccggcacatatctactatactatactctaggaagcaaggacaccaccgccatggcagccaagatgcttgcattggtcgctctcctagctctttgtgcaagcgccactagtgcgacccatattccagggcacttgccaccagtcatgccattgggtaccatgaacccatgcatgcagtactgcatgatgcaacaggggcttgccagcttgatggcgtgtccgtccctgatgctgcagcaactgttggccttaccgcttcagacgatgccagtgatgatgccacagatgatgacgcctaacatgatgtcaccattgatgatgccgagcatgatgtcaccaatggtcttgccgagcatgatgtcgcanatgatgatgccacaatgtcactgcgacgccgtctcgcagattatgctgcaacagcagttaccattcatgttcaacccaatggccatga

SEQ ID NO: 89944 - DNA, 471 bp, Zea mays
accggaccggaattcccggcacgacccacgcgtacgaacatacatagtgaagtacactagcaacatcttagcaccaatgggagccaagatttttgccctccttgccctccttgctctttcagcaagcgctgctacctcgacttttattccacaatgctcacaacaatacctctctccggtgacagccgcgggatttcaatacccaactatacaatcctacatggtacaagaggccatccaagcaagcatcttacggtcattagcattaaccctccaacaaccatatgctctattgcaacagccatccttagtgcatctgtatctccaaagaatcgcggcacaacaactacaacaacagttgctaccaacaatcaatcaagtagttgcagcgaaccttgctgcttacctccagcaacaacagtttcttccattcaatcaactagctggggtgaaccctgctatctacttgca

SEQ ID NO: 89945 - DNA, 436 bp, Zea mays
  unsure (1)..(436): unsure at all n locations
gaaacacaccaagcgaagcacattagcaacaacctaacaacaatggctaccaagatattatccctccttgcgcttcttgcgctttttgcgagcgcaacaaatgcgttcattattccacaatgctcacttgctccaagttccattattacacagttcctcccaccagttacttcaatgggcttcgaacacccagctgtgcaagcctataggctacaacaagcaattgcggcgagcgtcttacaacaaccaatttcccagttgcaacaacaatccttggcacatctaacaatacaaaccatcgcaacgcaacagcaacaacaattcctaccagcactgagccacctagccatggtgaaccctgccgcctacttgcaacagcagttgcttgcatcaaacccacttgctctggcanacgtagttgcaaaccagccacaac

SEQ ID NO: 89946 - DNA, 116 bp, Zea mays
taccggtccggaattcccgggcttttagatttcttatgagttatagttcaataataaagttttttgtctgatgtttgtggcttcccagaaataagagagtacatttctagattctt

SEQ ID NO: 89947 - DNA, 386 bp, Zea mays
cctacatacctgcaacaacaattgttgcaacagattgtaccagctctgactcaactagctgtggcaaaccctgttgcctacttgcaacagctgcttccattcaaccaactgactctgtcgaactctgctgcgtacctacaacagcgacaacagttacttaatccattggtagtggctaacccattggtcgccgccttcctacagcagcaacaattgctgccatacaaccagttctctttgatgaatcctgtcttgtcgaggcagcaacccatcgttggaggtgccatcttttagattacatatgagatgtactcgataatggtgccctcataccgacgtgtgtttcctagaaataatcaatatattgattgagatttatctcgatt

SEQ ID NO: 89948 - DNA, 398 bp, Zea mays
gccggtgttggtttcagcttgtattcccactctgtcgcacagcgtcgcccgtcgccggtgagatcctaggaagaaatggagctctctcgcaagctcttcacggccgtcctcctcgtcatgctgctgctgctgtccgcagaggtcgggccggtggcggtggcggaggcgcggacgtgccagtcgcagagccacaggttccggggcccctgcctccgccggtccaactgcgccaacgtctgcaggaccgaggggttccccggcggcaggtgccgcggcttccgccgccgctgcttctgcaccacgcactgccactgattcgctcgcccagcggccggctggcgtcgccgtcgatcgcgtcgcgaccagtccatggctccatgcatgaataacaagggtgt

SEQ ID NO: 89949 - DNA, 415 bp, Zea mays
  unsure (1)..(415): unsure at all n locations
cgcagttttcacagacagcttccacagtcaccagagcactagagcagagcaacaaccgacaagagcagagtgagatcgtcgtcagcgagcccagcagatacgagagagaggatggcggacatcgcgttgctggtggcggagcagttcgagaagacggcaaggcgaggcgcccccggcggggacagcggtagcgacagcgggaccggcggcgagacgaggaacttcggggccgtggccaaggtgtggagctcttgggtggagtccgcctccgccgccgcgtccggggtcagattcaccgtcgcggtgcagctggagcccaagaccgggctcgcgctggccgncgncgacggcctcttctccgcctagcgtcctgcttccatgtcttcctcctgagcagtgccagtggtcgagcgag

SEQ ID NO: 89950 - DNA, 440 bp, Zea mays
gacgaactagcaacatagaaagcacaattttgtaccaacaatggcagccaaaatatttgggtgccttatgctccttgggctttctgcaagtggtgctaccggaaccatttttccacaatggttacaagcttctatagctttccttctttccccataccttttaacaacgggggcttcaatgggggaaaacccaattggtcaacccttacaggtcccaccaggcatcggaaccaggcattctaccattataacccttgttcctccaacaaccgtcagccctattacagcagttacctttggtccatttggtggcacaaaacatcagggcacaacaactacaacaacttgtgctagcaaaccttgctgcatactctcagcaacatcagtttcttccattcaaccaactggctgcattgaactctgctgcttatttgcaacaa

SEQ ID NO: 89951 - DNA, 380 bp, Zea mays
agaaagcacaatagtgtaccaacaatggctgccaaaatattttgccttcttatgcttcgtgggatttctgcaagtgctggtaccgggaacatttttccgcaatggttacaagcttctattgctttccttttttccccggaccttttaacaacggggtcttcgggatgtgaaaacccaattcttcaaacctacagggtcccacaggcaatcgcagctggcatcttaactttatcacccttggtccttccacaatcatcagccctattacagcagttacctttggtgcatttattggcacaaaacatcagggcacaacaactacaacaacttgtgctagcaaaccttgctgcctactctcagcaacagcagtttcttccatt

SEQ ID NO: 89952 - DNA, 437 bp, Zea mays
  unsure (1)..(437): unsure at all n locations
ctgggaagaaggatagccacggatgctatcaccacgccggtagtgaacacgtcggcctactggttcaacaactcgcaagagctaatcgactttaaggaggggaggcatgctagcttcgagtatgggaggtatgggaacccgaccacggaggcattagagaagaagatgagcgcactggagaaagcagagtccaccgtgtttgtggcgtcagggatgtatgcagctgtggctatgctcagcgcacttgtccctgctggtgggcacattgtgaccaccacggattgctaccgcaagacaaggatttacatggaaaatgagctccctaagaggggaatttcgatgactgtcattaggcctgctgacatggatgctctccaaaatgcgttggacaacaataatgtatctctnttcttcacggagactcctacaaatccatt

SEQ ID NO: 89953 - DNA, 437 bp, Zea mays
attttgagcattcagaaacacaccaagcgaagcgcactagcaacgacctaacaacaatggctaccaagatattagccctccttgcgcttcttgccctttttgtgagcgcaacaaatgcgttcattattccacaatgctcacttgctcctagtgccattattccacagttcctcccaccagttacttcaatgggcttcgaacacctagctgtgcaagccaacatgcaacaacaagcgcttgcggcgagcgtcttacaacaaccaattgcccaattgcaacaacaatccttgccacatctaacaatacaagccatcacaacgcaacagcaacaacagttcctaccagcactgagccacctagccatggtgaaccctgccgcctacttgcaagagcagctgcttgcatccaacccacttgctctggcgaacgtagttgca

SEQ ID NO: 89954 - DNA, 397 bp, Zea mays
tagctttatctactccagagcgcagaagaacccgatcgacaccatgagggtgttgctcgttgccctcgctctcctggctctcgctgcgagcgccacctccacgcatacaagcggcggctgcggctgccagccaccgccgccggttcatctaccgccgccggtgcatctgccacctccggttcacctgccacctccggtgcatctcccaccgccggtccacctgccgacgccggtccacctgccaccgccggtccatgtgccgacgccggttcatctgccgccgccaccatgccactaccctactcaaccgccccggactcagcctcatccccagccacacccatgcccgtgccaacagccgcatgcaaacccgtgccagctgcagggaacctgcggc

SEQ ID NO: 89955 - DNA, 395 bp, Zea mays
tccggaattcccgggcagctagcagcatacaaagcacactagtgtaccagcactggctgccgggccatattgcctgcatatgctcctcggtctaatctgcaagtgctgctacagcgaccatgttcccgcagtgcatcgcaagctcctatagctgcccttcgtgccccgtacctctcaccagcggagtcgttatctatgtgaaaacccagttgttgaaccctacaggatccatcacgcggtcacagctgtgcatattacctttatcacccttgttgctccgacaatcatcagtcctattacatcagttgcctttggtgcattgattggctcatatcatcaaggcacagcaactacgacatcttgtgctagcaaaccttgctgcctactgtcaagaa

SEQ ID NO: 89956 - DNA, 425 bp, Zea mays
  unsure (1)..(425): unsure at all n locations
ccaactagcaacataaaaaggcccaatattgtcccaccattgccggttaaaaaatttggcctgctaatcctcctgggcctttctgcaagtcctgttacggcaaccattttccaacaatgctaacaagctcctatagcttcccttcttcccccgtacctttcaccaacggtgtcttcggatgtgaaacccattcttaacctcagaccacaggcatccactgcatctaccttatcacccttgttcctccaacaatcatcagccctattacagcagttacctttgtgcatttattggcacaaaacatcanggcacaacaactacaacaacttgtgctagcaaaccttgctgcctactctcagcaacagcaagttcttccattcaaccaactagctgcatngaactctgctttctatttgcaacaacaa

SEQ ID NO: 89957 - DNA, 404 bp, Zea mays
  unsure (1)..(404): unsure at all n locations
ctcggaaaaccaagccgccgccgaatctgcctcccaggtaagcagtaccgtccacccgggccgccgccatgaagcgcaacccccgcgtcacgagctcccgccggaagtgccgcaaggcgcacttcacggccccgtcctccgtccgccgcgtgctcatgtccgcggcgctatcgacggagctccgccacaagtacaatgtgcgttccatcccgatccgcaaggacgacgaggtgcaggtcgtgcgcggcacctacaagggccgtgagggcaaagtggtgcaggtgtaccgncgtcgctgggtcatccacgttgagcggatcacccgcgagaaggtgaacggctccaccgtgaacgtgggcattcacccttccaaggtcatggttacaaagctgaagcttgacaag

SEQ ID NO: 89958 - DNA, 425 bp, Zea mays
cagagttgttgtgttgtccttccgcaatttgctggcaaagggtgcatttgctggccagatgatcgatcttggattgccacaaatggtacaaaacttgaaagctcaagcatggactgatgaggatctgttagatgctctgaatcaactagaggtgggactcaaagaaaaccttaagaagttgagttcctttgataagtacaaacagcaagttcttcttggtcatctggactggtctccaatgcacaaagatccaagtttctggcgtgagaacattaacaattttgaagaaaatgatttccagattctgcgagttctcatgacaatcattgacacatcaagtgacaccaccgctcttgccgtggcctgctacgacctctcacaattccttcagtaccatccatctggccgaatcgtggtggcagacc

SEQ ID NO: 89959 - DNA, 339 bp, Zea mays
ttccattcaaccaactggcagcattgaactctcctgcttatttacagcagcaacgacggctaccattcagccagctagctggtgtgagccctgctaccttcttgacacaaccacagttgttgccgttctaccagcacgctgcgcctaacgctggcaccctcttacaactgcaacaattgctgccattcaaccaacttgctttgacaaacctagcagtgttctaccaacaacccatcattggtggtgccctcttttagatttcttatgagttatagttcaataataaagttttttgtctgatgtttgtggcttcccagaaataagaaagtacatttctag

SEQ ID NO: 89960 - DNA, 438 bp, Zea mays
gacagcacaatagtgttccaacaatggccgccaaaatatttcgcttacttatgcggctggacctatctgcaagtgctgctaccgcaaccatttatccacaatgctcacaagctcctatagctacctttattaccacatacctctcaccagcagcgtattcagcatgcgaaaacccagtgcttcaaccctacaggatccaacaggcacacgcagcaagcatcttacctttatcacccttgttcctccagacaacacgaacgcctattacagcagtacacctcaggtgcatgctgaggcacaaaacatcatggcacaacaactacagcagcttgtgctacgaaaccttgcagcctactatcagcaacagtagcatctcacattcaaccaactggctgcattgaacactgctgactatttgcaacaacaactaccattcag

SEQ ID NO: 89961 - DNA, 399 bp, Zea mays
cggcccacctggaagccggagagaatcgagcatagccaccgatcgctcctctccactgggcagattccagttccactccgcctccgctgccggtcgccgactccgaaactccgacagtccgaccacaatgatccacatatagatgagtggagaggataaggctgctgcttctgctgagcagccgaagagggcccctaagctcaatgaaaggatcctctcttctctgtccaggaggtccgtagctgctcatacgtggcatgatcttgagatcggtcctgatgctcctgctgttttcaatgttgatgttgagatcacaaagggaagcaaagttaaatatgagctcgacaagaaaactggactgattaaggttgatcgagtcctgtactcatcagttgtata

SEQ ID NO: 89962 - DNA, 359 bp, Zea mays
ctgcaacagattgtaccagctctgactcagctagctgtggcaaaccctgctgcctacgtgcggcagctgcttccattcaaccaactgactgtgtcgaactctgctgcgtacctacaacagcgacaacagttacttaatccactagcagtgcctaacccattggtcactgccttcctacagcagcaacaattgctaccatacagccagttctctttgatgaaccctgccttgtcgtggcagcaacccatcgttggaggtgccatcttttagattacatatgagatgtaatcgataatggtgccctcataccggcatgtgtttcctagaaataatcaatatattgattgacatttatctcg

SEQ ID NO: 89963 - DNA, 432 bp, Zea mays
  unsure (1)..(432): unsure at all n locations
agaaccttaggcctgatccgtcgggaggaatttcttttggaatggtcccgttcgaaacgttggttgcccaagaaaccgaggatccaggatgagtttcctgttcgggaagcggaaaacgcccgccgagctgttaacagaaaacaggagaatgctggatcgatccatcaaggaaattgagcgagagaggcaaggatcgcaggcccaggagaaaagctcatcactgagatcaagagaacagctacagaaggccagatgggagctgtcatagtaatggccaaagaccttattcgtacccggcatcagataacaaagttctaccaactcanatctcagcttccaggagtttctcttagagttcagacactaaaatcaactcaagctatgggtgatgccatgaacggcgttacaaaggcaatggctcanatgaacagg

SEQ ID NO: 89964 - DNA, 431 bp, Zea mays
cccggcgttaggctcggcacaacaacatccaaacaagcaggactccgtctctgtcaggagagattggggtatggggtggaggtggagggtcggcgcaggacatcacgacgacggagccaccacagcgtctgcacagcctctccgttcgaactgggtttgccgtcgactccatcgagttcacgtatactgatagaggtggccagaggcgcactgctgggcgatggggtggacttggcggcaaccttcgaacgatcgatcttggcgacgccgaggttgtcagggaggtctcaggaacatacggcatgtttgaaggcgccaccacgctgacctagatcagaattctcaccagcagcagaacctgtgggccatgggggatcgaggacgggacacgtgtctgcatcaccgcgccgatcggcagcagcatcgtgggg

SEQ ID NO: 89965 - DNA, 437 bp, Zea mays
  unsure (1)..(437): unsure at all n locations
attgatacgaactagcaacatacatagtgaagtacactagcaacatcttagcaccaatggcagccaagatttttgccatccttgccctccttgctctttcagcaagcgttgctaccgcgactattattccacaatgctcacaacaatacctctctccggtgacagccgcgagatttgaatacccaactatacaatcctacaggctacaagaggccatcgcagcaagcatcttacggtcgttagcattgaccgtccaacaaccatatgccctatcgcaacaaccatccttaatgaatctatatctgcaaagaatcgcagcacaacaactacaacaacagttgcttccaacaatcaatcaagtagttgcagcgaaccttgctgctgacctncagcaacaacaattctttcattcaatcaactagctggggtgaaccctg

SEQ ID NO: 89966 - DNA, 435 bp, Zea mays
gaggatcctggtcgcgggaacgggtggtggactacgctgtcaaagtgcgcgtgaggccggacgggaggggcgtggagacggccaacgtgaagatgtccatgaatccattctgcgagatcgccgttgaggaggcgctgcggctccgggaggccggcgtcgccgctgaggtcgtcgacgccaccgtatgccctgcccagtccgtcgacacgctccgcaccgcactcgtcatgggcgccgatcgcgccgtccacgtgctccacgacccggaccctgcgcggcccctactacctatcgccgttgccaagatccttcgcgccgtcgcgctccaggagaagcccggcctcgtcatcctcggcaagcaggcaatagatgatgattgcaaccaaactggacacatgttagctggattgctcaagtggctcacaagaacctttg

SEQ ID NO: 89967 - DNA, 435 bp, Zea mays
caacaagcaacatagaaagtggaatacagtagcaacaatagagcaacaatggcggccaggatgttttccatccttatgctccttgctctttctgcatgtgttgctaacgcgaccatttttcctcaatactcacaagctcctatagctgcccttcttcccccataccttccatcaatgaccgcttcagtttgtgaaaacccagcccttcaaccctacaggctccaacaagcaatcgcaacaagcaacttacctttatcacccctgttctttcaacaatcgccagccctatctttggtgcagtcattggtacaaaccatcagggcacaacagctgcaacaactcgtgctaccagtgatcagccaagtagctctggcaaacctttctccctactctcagcaacaacaatttcttccattcaaccaactgtctacactg

SEQ ID NO: 89968 - DNA, 428 bp, Zea mays
  unsure (1)..(428): unsure at all n locations
cggacgcgtgggcggctgccagccaccgccgccggttcatctaccgccgccggtgcatgtgccacctccggttcacctgccacctccggtgcatctcccaccgccggtccacctgccgccgccggtccacctgccaccgccggtccatgtgccgccgccggttcatctgccgccgccaccatgccactaccctactcaaccgccccggcctcagcctcatccccagccacacccatgcccgtgccaacagccgcatccaagcccgtgccagctgcagggaacctgcggcgttggcagcaccccgatcctgggccagtgcgtcgagtttctgaggcatcagtgcagcccgacggcgacgccctactgctcgcctcagtgccagtcgttgcggcagcagtggtgccagcagctcangcangtggagccgc

SEQ ID NO: 89969 - DNA, 427 bp, Zea mays
cccacgcgtccggcgatttcgatctcgcagccacctttttttttgttctgttgtgtatctagtagttggaggagatatgcagtttgcacttgcattggacacgaactcaggtcctcaccagataagatcttgtgagggtgatgggattgacaggttggaaaaattaagtattgggggcagaaagcaggagaaagctttgagaaataggtgctttggtggtagagttgctgcaactacacaatgtattcttacctcagatgcttgtcctgaaactcttcattctcaaacacagtcctctaggaaaaattatgctgatgcaaaccgtgtatctgctatcattttggggcggaggacctggatctaagttttttcctttgacaagcccaaaagctacgcctgctgtacctgttggaggatgttccaggct

SEQ ID NO: 89970 - DNA, 430 bp, Zea mays
  unsure (1)..(430): unsure at all n locations
cccacgcgtccggcaacgagccatggcctccggtgggccgaaacccaaactggcctacgatcatcttgtacgtgagggacgtggagaaggccgcctccttctacgacgccgccttcggctacaccgtccgccgcctcgaccagtcccgcaagtgggcggagctggagagcggggcgacgaccatcgcgttcacgccgctgcaccagcgggagacggacgagctgtcgggggcggtgcagctgccggactcgtcggccgccgggaggggctccgtggaggtctgcttcgcctacgcggacgtcgacgcggcgtacaagcgcgccgtggacagcggggcggtggccgtgagcgcgccggaggacaagccctggggccagaagtncggcttcgtgcgggacatggacggcaacatcgtgcgcatcgcgagcta

SEQ ID NO: 89971 - DNA, 428 bp, Zea mays
ggcatattaactttaataaccttggtccttcaacaaccggcaagcctaataccagagtggccgtttggggcattggtgggccaaaaacatcaagggccaacactacaacacttgtgctaagaaaccttgctgcctactctcagcaacagcagtttcttccattcaaccaactggctgcattgaactctgctgcttatttgcaacaacaactaccattcagtcagctagctgctgcctacccccagcaatttcttccattcaaccaactggcagcattgaactctgctgcttatttacaacagcaacagctaccaccattcagccagctagctgatgtgagccctgttgccttcttgacacaacaacagttgttgccgttctacctgcacgctgcgcctaacgctggcaccctcttacaactgcaacaa

SEQ ID NO: 89972 - DNA, 434 bp, Zea mays
  unsure (1)..(434): unsure at all n locations
gttgctncgaccagttacctcaatgggcttcgaaaaactaacttggccaggcttccgggttccaccaggcccttgcggcaaccgtttaacaccacccaataacccaatggaaccaccattcctggccccatttaccattccaaacatcggaaccccaccacaacaacaggtcctacagcactggaccaactagatgtggtgaaccctgtcggctacttgcaacagcaggtgcttgcatccaacccacttgctctggcaaacgtagctgcataccaacaacaacaacaattgcaacagtttctgccagcgctcagtcaactagccatggtgaaccctgccgcctacctacaacagcaacaactgctttcatctagccctctcgatgtgggtaatgcacctacatacctgcaacaacaactgctgcaacagattgt

SEQ ID NO: 89973 - DNA, 433 bp, Zea mays
agagaggttgcaagctgaagttggattgcctgtggactcgagcatccctgttatagtttttgtcgggcgtcttgaagaacagaaagggtctgacatactcattgcagccattccagagttcgtgggcgagaatgttcagataatcgttcttggcacgggaaagaagaaaatggaggaggaattaatgcagctggaagtgaaatatccaaacattgctagaggcatagcgaaattcaatgttccattggcacatatgatgtttgctgggtctgacttcattattgtcccaagtaggtttgagccatgtggtctcattcagttgcaagggatgagatatggagtgattcccatctgttcatcacctggaggacttgttgacacggttgaggaggggtgtcaccggattccacatgggttctttcaatgtcgagtg

SEQ ID NO: 89974 - DNA, 394 bp, Zea mays
ggtgacgatagcgctggacccgtctctgtacccagagaatccactcatcatctgggagaatgcacgggcagctgcccagcaggaagggtttgaggtaaagaggaaaggggataaggagtttgttgcaaacattcggctggagatgaactacagccctgataagttcaagttatcacagtcgattatggaggtgcttgcggtggaggtggacactcgtgcacgggtgattgctgccctatggcagtatattaaagcaaagaagcttcagaacccaaatgatccttccttcttcatgtgtgacccttaattgacgaatgtgcatgctgaggacaagctcaagcttgcaatgttgtcacacatgatatctcagcatctgtctgcctcaccacccatc

SEQ ID NO: 89975 - DNA, 431 bp, Zea mays
cttcaccttgttattcgttctgatgctgcaagaccagaactgggattttgggctggtgcttcaagatcctacaaacagttaaggtgatgatcaggccaaaatatgacgggaagtacctgcacaaagtgaccagtgatctgctgggtggtaccagagtggaagagacgctgacaaatgtcgtcattcctactttcgatgtcaagtgcgtaaagccaacaatattcagcacattcaaggcaagatctagtgccttgatgaatgctcgtcttgctgatgtgtgcattggcacgtccgcagcaccgacggtcctccctgcgcactactttgaaaccgtggatcaccgcactggcgcatcgcgtagcttcaacgttatcgacgggggcctcgccgcaaacaatccgactctggtggcgatgggtgagataacagaa

SEQ ID NO: 89976 - DNA, 441 bp, Zea mays
gaagagagtgtgagtacgaccagaagatatccattgatttctacaaggaaggagatccgttgaaaccagctgtgacaggcgtcttagtgttcgtttccactccagatccaattggcaacaagtactatcttggccctgctcctttgcaggatatggcaaggcaaattgctacagccaatggccctactggctataatagggattacctgttctcaatggagaaggcattagccagcattagccacgaagatgattcgatcatagagcttgcaaacgaggtgaggaaggtgctcaacagaacaaaggagaccaagatcactggtgccaatgcttccctgaaatcacatgcccctcttgtgcacctgtccgcgcttccagaaggcaccgttgtggactcgagatagcgagagccttggacgttggacctctactcggaatcta

SEQ ID NO: 89977 - DNA, 452 bp, Zea mays
aattaccggctcgacccactcgtccggaggagagtgtgagtacgaccagaagatatccattgatttctacaaggaacgagatcccttggaaccaactgtgacaggcgtcttagtgttcgtttccactccagatccaattggcaacaagtactatcttggccctgctcctttgcaggatatggcaaggcaaattgctacagccaatggccctactggctataatagggattacctgttctcaatggagaaggcattagccagcattagccacgaagatgattcgatcatagagcttgcaaacgaagtgaggaaggtgctcaacagaacaaaggagaccaagatcactggtgccaatgcttccctgaaatcacatgcccctcttgtgcacctgtccgcgcttccagaaggcaccgttgtggactcgagatagcgagagccttggacgttggacc

SEQ ID NO: 89978 - DNA, 443 bp, Zea mays
caaggattgttgttgcaattgggcacatctaaccctacaaaccattgcaacgcaacagcgacaacaacaacagtttctgccatcactgagccacctagccgtggtgaaccctgtcacctacttgcaacagcagctgcttgcatccaacccacttgctctggcgaacgtagctgcataccagcaacaacaacagctgcaacagtttatgccagtgctcagtcaactagccatggtgaaccctgccgtctacctacaactactttcatctagcccgctcgcggtgggcaatgcacctacgtacctacaacaacagttgctgcaacaaattgtaccagctctgactcagctagctgtggcaaaccctgctgcctacttacaacagttgcttccattcaaccaactggctgtgtcaaactctgctgcgtacctacaacagcgacaac

SEQ ID NO: 89979 - DNA, 432 bp, Zea mays
  unsure (1)..(432): unsure at all n locations
tagcaacatacatagtgaagtacactagcaacatcttagcaccaatgggagccaagatgtttgccctccttgccctccttgctctttcagcaagcgctgctacctcgacttttattccacaatgctcacaacaatacctctctccggtgacagccgcgggatttcaatacccaactatacaatcctacatggtacaagaggccatccaagcaagcatcttacggtcattagcattaaccctccaacaaccatatgctctattgcaacagccatccttagtgcatctgtatctccaaagaatcgcggcacaacaactacaacaacagttgctaccaacaatcaatcaagtagttgcagcgaaccttgctgcttacctncagcaacaacagtttcttccattcaatcaactagcttgggtgaaccctgctatct

SEQ ID NO: 89980 - DNA, 431 bp, Zea mays
  unsure (1)..(431): unsure at all n locations
gttacctttggtgcatttattggcacaaaacatcagggcacaacaactacaacgactggtgctagcaaaccttgctgcctactctcagcaacagcagtttcttccattcaaccaactagctgcattgaactctgcttcttatttgcaacaacaacaactaccattcagccagctacctgctgcctacccccagcaatttcttccattcaaccaactggcagcattgaactctcctgcttatttacagcagcaacaactactaccattcagccagctagctggtgtgagccctgctaccttcttgatacaaccacagttgttgccgttctaccagcacgctgcgcctaacgctggcaccctcttacaactgcaacaattgctgccattcaaccaacttgctntgacaaacccagcagcgttctaccaacaac

SEQ ID NO: 89981 - DNA, 422 bp, Zea mays
tgagaccaacaagcaacatagaaagtggaatccagtagcaacaacagagcaacaatggcgaccaagatattttccctccttatgctccttgctctttctgcatgtgttgctaacgcgacaattttccctcaatgctcacaagctcctatagcttcccttcttcccccataccttccatcaatgatagcttcagtatgtgaaaacccagctcttcagccctataggctccaacaagcaatcgcacaagcaacatacctttatcacccttgttgtttcaacaatcgccagccctatctttggtgcagtcattggtacaaaccatcagggcacagcagctgcagcaactcgtgctacctgtgatcaaccaagtagctctggcaaacctttctccctactctcagcaacaacaatttcttccattc

SEQ ID NO: 89982 - DNA, 364 bp, Zea mays
tctcccccttctcccttcccttctcttttcccgaaaccctatctccacctatgtatctttatacacccattcgacataatacatttccttcaatacacctttcttacttcatttaacatcaacacttaatacctttctaccatcaccttttctcctaacacctcatccctcttacaactacaacaattgataacctttgtccaacttacttttacataccaaaccccctcctaccaacaacacatcactttataaaccctcttttacattccttattacttataattcaataataaagtttttctgaccatctatctcaccaaccacaaataataaattacatttccatattttaatgttaata

SEQ ID NO: 89983 - DNA, 485 bp, Zea mays
  unsure (1)..(485): unsure at all n locations
cggaattacccgggtgcgatcccacgtccgtccggtgtggctttctttcctccccctttccggttcggtgttcgtggttcgtggagggttcnttccggggttcggggtttgcgtgggtgtggcccggatcgagaatggcngtngcgtcggatggttgagtacccgcnntgcttcgtcggcggccctcgccttgggtccacggacgaccacttccctcctacaacgccttcagcacctacggcgaggtcctcgagtccaagatcatcctcgatcgggagacgcagaggtcccgcggcttcggcttcgtcaccttctccacggaggaggcgatgcggaacgccatcgagggcatgaacggcaaggagctggacggccgcaacatcaccgtcaacgaggcccagtcccgcggcggccgtggaggcggcggcggcggctacggtggtggccgtggaggcggcggctacggcggtggcgggcgccgtgat

SEQ ID NO: 89984 - DNA, 426 bp, Zea mays
attgagaccaactagcaacatagaaagcacaatagtgtaccaacaatggcagccaaaggattgtgcctccttatgctccttggtctttctgcaagtgctgctacggcgaccattttcccgcaatgctcgcaagctcctatagcttcccttcttcccccgtacctctcaccagcggtgtcttcggtatgtgaaaacccaattcttcaaccctacaggatccaacaggcaatcacagctggcatcttacctttatcacccttgttcctccaacaatcatcagccctattacatcagttacctttggtgcatttattggcacaaaacatcagggcacaacaactacaacaacttgtgctagcaaaccttgctgcctactctcagcaacagcagtttcttccattcaaccaactagctgcattgaactct

SEQ ID NO: 89985 - DNA, 403 bp, Zea mays
  unsure (1)..(403): unsure at all n locations
ggatcgtcgaaccgaacaacatggagaaggtcaatggtcttggccggggccctggtttgggaagttgcaacggcttttgcaaggcaaatgccttgcccttgcccggggctgaagggttggaacggggctggccccggcctgacaacaataatggcccccggcggctgtaccctaacccgagtacctgaggagccggagtgcacccgctggcggggcccctactacgccggtgtggcagccgagcgccatgtccagccgctccgggcacagtgctgccagcagcagatgaagatgatggacgtgcagtccgtcgcgcagcagctgcagatgatgatgcagcttgagcgtgccgctgccgncagcagcagcctgtacgagccagctctgatgcagcagcagcagc

SEQ ID NO: 89986 - DNA, 430 bp, Zea mays
  unsure (1)..(430): unsure at all n locations
ggcgccaaccaccagcagcagagaggaccccgaaccggaagttgcaccgggcggggccgaaccacgcaaggttcaagattatccggtttaaagacatcagaaaaggctgcggcatggatagataccaaagggtagagaagcctcggaatgacacgccaatcagccagaatgagatcagaatcactactcaggggaggatgaggaactatatcagctatgggatgtcgctgcttgaggaaaatggacatgatgagattagtatcaaggccatgggacgggccataaataagacagttatggttgttgaattgatcaagagaagggttggaggtcttcatcagaacactgctactgaatctgntgatatcacagacacatgggaacctttggaagaaggccttctcccactagagacaactcggcatgtgtc

SEQ ID NO: 89987 - DNA, 438 bp, Zea mays
  unsure (1)..(438): unsure at all n locations
cagaaacacaccaagcgaagcgcactagcaacgacctaacaacaatggctaccaagatattagccctccttgcgcttcttgccctttttgtgagcgcaacaaatgcgttcattattccacaatgctcacttgctcctagtgccattattccacagttcctcccaccagttacttcaatgggcttcgaacacctagctgtgcaagccaacatgcaacaacaagcgcttgcggcgagcgtcttacaacaaccaattgcccaattgcaacaacaatccttgccacatctaacaatacaagccatcacaacgcaacagcaacaacagttcctaccagcactgagccacctagccatggtgaaccctgccgnctacttgcaagagcagctgcttgcatccaacccacttgctctggcgaacgtagttgcaaaccagcaacaac

SEQ ID NO: 89988 - DNA, 439 bp, Zea mays
cagaaacacaccaagcgaagcgcactagcaacaacctaacaacaatggctaccaagagtgttatccctccttgcgcttcttgcgctttttgcgagcgcaacaaatgcgtccattattccacaatgctcacttgctcctagttccattattccacagttcctcccaccagttacttcaatggccttcgaacacccagctgtgcaagcctataggctacaacaagcgattgcggcgagcgtcttacaacaaccaattgcccaattgcaacaacaatccttggcacatctaacaatacaaaccatcgcaacgcaacagcaacaacagttcctaccagcactgagccacctagccatggtgaaccctgtcgcctacttgcaacagcagctgcttgcatccaacccacttgctctagcaaacgtagttgcaaaccagcaacaac

SEQ ID NO: 89989 - DNA, 458 bp, Zea mays
tcccggccgacccacgcgtacgccgacgcgtccgcaaaaacacaccaagctaagctcactagcaacgacctaacaccaatggctagcaagatattagccctccttgcgcttcttgcccttttagtgagcgcaacaaatgcgttcattattccacagtgctcacttgctcctagtgccattattccacagttccttccaccagctacttcaatgggcttcgaacatccagccgtgcaagcctacaggctacaactagcgcttgcggcgagcgccttacaacaaccaattgcccaattgcaacaacaatccttggcacatctaaccctacaaaccattgcaacgcaacaacaacaacaacaacagtttctgccatcactgagccacctagccgtggtgaaccctgtcacctacttgcaacagcagctgcttgcatccaacccacttgctctggcgaacgt

SEQ ID NO: 89990 - DNA, 421 bp, Zea mays
ggcgaacgtagctgcataccagcaacaacaacaacaacaacaacaacaacaacagctacaacagtttctgccaacgctcagtcaactagccatggtgaaccctgccgcctacgtacaacaacaacaactgctttcatctagcccgctcgctgtgggcaatgcacctacatacctgcaacaacaattgttgcaacagattgtaccagctctgactcaactagctgtggcaaaccctgttgcctacttgcaacagctgcttccattcaaccaactgactctgtcgaactctgctgcgtacctacaacagcgacaacagttacttaatccattggtagtggctaacccattggtcgccgccttcctacagcagcaacaattgctgccatacaaccagttctctttgatgaatcctgtcttgtcg

SEQ ID NO: 89991 - DNA, 360 bp, Zea mays
gctgcctacccccagcaatttcttccattcaaccaactagcagcattgaactctcctgcgttatgtacagcagcaacaactactaccattcagccagctagctggtgtgagccctgctaccttcttgatacaaccacagttgttgccgttctaccagcacgctgcgcctaacgctggcaccctcttacaactgcaacaattgctgccattcaaccaacttgctttgacaaacccagcagcgttctaccaacaacccatcattggtggtgccctcttttagatttcttatgagttatagttcaataataaagttttttgtctgatgtttgtggcttcccagaaataagaaagtacatttct

SEQ ID NO: 89992 - DNA, 459 bp, Zea mays
  unsure (1)..(459): unsure at all n locations
ggaattcccgggcgcagcaacgaacacgaaccttggcagaacgaagctgaagtagttcgttgtgaacccagtatggcaaacgcgccgaggatcctggccctcggcctgctgctagcgctcctgtgcgctgccgccggcccggccgccgcgcagaactgcggctgccagcctaacttctgctgcagcaagttcggctactgcggcacgaccgacgactactgcggcgacgggtgccagtcgggcccgtgccgctcgggcggcggcggcggcggcggcggaggcggaggcagtggcggtgcgaacgtggctaacgtggtcagcgacgcgttcttcaacggcatcaagaaccaggccgggagcgggtgcgagggcaagaacttctacacccggagcgcgttcctgagcgccgtcaacaagtacccgggcttcgcccatggcgggacggangtggagggcaag

SEQ ID NO: 89993 - DNA, 467 bp, Zea mays
  unsure (1)..(467): unsure at all n locations
ggaattcccgggtggnncaacgcgtccgaacaaaacgacctcctccgcccgcccgtccgcccgcctgcccgtcggcgttgtttcggctccaccgccgctctcctctccagtctcccaccaccgctcgtctccccgtaccgnccgcaacccccctcccctgcgagatccggggcgcgatgtggcgcagctgcgtctcgcgaggcctctccagggccaaggcctccgcctccaggctcctctccacggcgtcgtcgtcctacacggtggtcgaccacacctacgacgcggtggtggtgggggccggcggcgcggggctccgggcggcgatcggcctctccgagcacggcttcaacaccgcgtgcatcaccaagctcttccccacgcgctcgcacaccgtcgcggctcagggaggcataaatgctgcacttggaaacatgagtgaagatgactggaggtggcatatgtat

SEQ ID NO: 89994 - DNA, 374 bp, Zea mays
cttcctaatcctcctgggtctttctgcaagtgttgctaccgcaaccattttcccacaatgctcacaagctcctatagcttcccttcttcccccatacctctcaccagcggtgtcttcaatgtgtgaaaccccaattgttcaaccctacaggatccaacaggcaatcgcaacaggcatcttaccattatcacccttgttcctccaacaaccgtcagccctattacagcagttacctttggtccatttggtggcacaaaacatcagggcacaacaactacaacaacttgtgctagcaaaccttgctgcatactctcagcaacatcagtttcttccattcaaccaactggctgcattgaactctgctgcttatttgc

SEQ ID NO: 89995 - DNA, 450 bp, Zea mays
  unsure (1)..(450): unsure at all n locations
ncgcttagcaacatagnaaagccccattatggtaccaaccattgggcagcaaaaaaattntgctttgccttaggcttcctgggtctttctgcaagtgctgctaccgcaaccattttcccacaatgctcacaagctcctatagcttcctttcttcccccatacctctcaccagcggtgtcttcagtatgtgaaaacccaattcttcaaccctacaggatccaacaggcaatcgcagcaggcatcttacctttatcacccttgttcctccaacaaccgtcagccctattacagcagttacctttggtgcatttgttggcacaaaacatcaaggcacaacaactacaacaacttgtgctaggaaaccttgctgcctactctcagcaacagcagtttcttccattcaaccaactggctgcattgaactctgctgcttatttgcaacaacaacta

SEQ ID NO: 89996 - DNA, 369 bp, Zea mays
caccaacgcaaattgcaccaagaaatccatcgagaggccgtcgacaggggaattaatggcgtcgtcgtctagcagcagccaccgccgcctcatcctcgcagccgccgtcctgctctccgtgctcgcggctgccagcgccagcgccgggacctcctgcgtgccggggtgggccatcccgcacaacccgctcccgagctgccgctggtacgtgaccagccggacctgcggcatcgggccgcgcctcccgtggccggagctgaagaggagatgctgccgggagctggcggacatcccggcgtactgccggtgcacggcgctgagcatcctcatggacggcgcgatcccgccgggcccggacgcgcagctgga

SEQ ID NO: 89997 - DNA, 416 bp, Zea mays
ccgacccactcgacccacacaagtgatcgtactttatgtgcccttttattttgtgccaccaaatggaccaaacgtgacgactctatataatctgacagatgctgaaggaacaattaccattcagccatctagctcctgactacccccattaattacttccattcaaccaactagcaacattgaactctgctgattatttacagcagcaacatctactaccattcactcaactatctgatgtgagccctgctgccttcttgacacaacaacactatttgccgttctacctgcacactatgcctaacgctgacaccctcttacaactgcaacaatttcttccattcaacccactttctattacaaacccaacagtcatctactcaacaacccatcattgctggagcactctcttacat

SEQ ID NO: 89998 - DNA, 433 bp, Zea mays
agcattcagaaacacacctagcgaagcgcactagcaacgacctaacaacaatggctaccaagagattatccctctttgcgcttcttgccctttttgtgagcgcaacaaatgcgttcattattccacaatgctcacttgctcctagtgccattattccacagttcctccctccagttacttcaatgggcttcgaacacccagctgtgcaagcctacaggctacaacaagcgcttgcggcgagcgtcttacaacaaccaattgcccaattacaacaacaatccttggcacatctaaccatacaaaccatcgcaacgcaacagcaacaacaatttctaccagcactgagccaactagctgtggtgaaccctgtcgcctacttgcaacagcagttgcttgcatccaacccacttgctctggcaaacatagttgcata

SEQ ID NO: 89999 - DNA, 331 bp, Zea mays
cacaaatcaagaaccagattgaggctactgaacaagaatatgagagagaaaaactaagcgagaggatagctaaactctctggtggtgttgctgtcattcaggtaggagcacagacagaaactgagctcaaggaaaagaaattgagggttgaggatgccctgaatgctacaaaggcagcagtcgaggaaggtatcgttgtaggtggtggctgtacccttttgaggcttgcatcaaaagttgatgcaattatagagacccttgagaacgatgaacagaaggttggggctgaaattgtaaggaaatccttgagctatccacttaaattgattgc

SEQ ID NO: 90000 - DNA, 428 bp, Zea mays
ccgacgcgtccgctcaccagcggtgtcttcggtatgtgaaaacccaattcttcaaccgtataggatccaacaggcaatcgcagctggcatcttacctttatcacccttgttcctccaacaatcatcagccctattacagcagttacctttggtgcatttattggcacaaaacatcagggcacaacaactacaacaacttgtgctagcaaaccttgctgcctactctcagcaacaacagtttcttccattcaaccaactagctgcattgaactctgcttcttatttgcaacaacaacaactaccattcagccagctatctgctgcctacccccagcaatttcttccattcaaccaactgacagcttttgaactctcctgcttatttacagcagcaacaactactaccattcagccagctagctggtgtg

SEQ ID NO: 90001 - DNA, 443 bp, Zea mays
  unsure (1)..(443): unsure at all n locations
attttgagcattcagaaacacaccaagcgaagcgcactagcaacgacctaacaacagtggctaccaagatattagccctccttgcgcttcttgccctttttgtgagcgcaacaaatgcgttcattattccacaatgctcacttgctcctagtgccattattccacagttcctcccaccagttacttcaatgggcttcgaacacctagctgtgcaagccaacatgcaacaacaagcgcttgcggcgagcgtcttacaacaaccaattgcccaattgcaacaacaatccttgccacatctaacaatacaagccatcacaacgcaacagcaacaacagttcctaccagcactgagccacctagccatggtgaaccctgccgnctacttgcaagagcagctgcttgcatccaacccacttgctctggcgaacgtagttgcaaaccag

SEQ ID NO: 90002 - DNA, 308 bp, Zea mays
ttcataatcacaccatttatttcacactatcaacgacctaacaacaagaagttttaatatattatcccttcttgcactactagccctttttgtgagctcaacaaatgcgttcattattccacaatgctcacttgctcctaattccattattccacaattcctaccaccaattactttaatgatcttaaaacacctaactgtacaagccaacattcatcatcaatcacttgcttatagcatattacaacaactatattaccaattgcaacaactattctttatcaatctaacaatacaatccatcacaa

SEQ ID NO: 90003 - DNA, 251 bp, Zea mays
  unsure (1)..(251): unsure at all n locations
tcggtccggaattacccggcgtcgacgccacgcccgtccgagttgagaaaccaactanngcaacatagtaaagtcacccaatagtcgtacccaacccaatggcagcgcgaaagatattttgacttcctttatnngctccttgcgtctttcgtgcaagtgcctgnnntaccgcaaccannttttcccaccaatggctcnaacaagctcnnctatagcnnttcactttctatttcccccaataccctttctca

SEQ ID NO: 90004 - DNA, 102 bp, Zea mays
caacaacccatcattgtggtagaactttgttgggtttgccaaagcaagttgggggagggtcatcaattgttacacttgtaagacgttgccagcgttatgcat

SEQ ID NO: 90005 - DNA, 435 bp, Zea mays
agaccaactagcaacatagaaagcacattagtgtaccaacaatggcagccaaaatatggtgcctccttatgctccttggtctttctgcaagtgctgctacggcgaccattttcccgcaatgctcgcaagctcctatagcttcccttcttcccccgtacctctcaccagcggtgtcttcggtatgtgaaaacccaattcttcaaccctacaggatccaacaggcaatcgcagctggcatcttacctttatcacccttgttcctccaacaatcatcagccctattacaacagttacctttggtgcatttattggcacaaaacatcagggcacaacaactacaacaacttgtgctagcaaaccttgctgcctactctcagcaacagcagtttcttccattcaaccaactaggttcattgaactctgcttcttaattgc

SEQ ID NO: 90006 - DNA, 427 bp, Zea mays
  unsure (1)..(427): unsure at all n locations
cgacggcgacgccctactgctcgcctcattgccagtcgttgcggcagcagtgttgccagcagcgcatgcaggtggagccgcagcaccggtaccaggcgatcttcggcttggtcctccagtccatcctgcagcagcagccgcaaagcggccaggtcgcggggctgttggcggcgcagatagcgcagcaactgacggcgatgtgcggcctgcagcagccgactccatgcccctacgctgctgccggcggtgtcccccactgaagaaactatgtgctgtagtatagccgctggctagctagctagttgagtcatttagcggcgatgattgagtaataatgtgtcacgcatcaccatgggtggcagtgtcagtgtgagcaatgacctgaatgaacaattgaaatgaanagaaaaaagtattgttccaaaaa

SEQ ID NO: 90007 - DNA, 133 bp, Zea mays
cagcaacccatcgttggtggtgccatcttttagattacatatgagatgtactcgataatggtgccctcatagcggcatgtgtttcctaaaaataatcaatatattgattgagatttatctcgatatatctctg

SEQ ID NO: 90008 - DNA, 439 bp, Zea mays
gagagcacaatagtgtaccaacaatggcagctaaaatattttgcctccttatgctccggggtctttctgcaagtgctgctacggcgaccattttcccacaatgctcacaagctcctatagcttcccttcttcccccgtacctctcaccaacggtgtcttcggtatgtgaaaacccaattcttcaaccctacaggatccaacaggcaatcgcagctggcatcttacctttatcacccttgttcctccaacaatcatcagccctattacagcagttacctttggtgcatttattggcacaaaacatcagggcacaacaactacaacaacttgtgctagcaaaccttgctgcctactctcagcaacagcagtttcttccattcaaccaactagctgcattgaactctgcttcttatttgcaacaacaacaactaccattcag

SEQ ID NO: 90009 - DNA, 444 bp, Zea mays
caactagcaacatagaaagcacaatagtgtaccaacaatggcagccaaaatattttggttgcttatgctccttggtctttctgcaagtgctgctaccgcaaccattttcccacaatgctcacaagctcctatagcttcctttcttcccccatacctctcaccagcggtgtcttcagtatgtgaaaacccaattcttcaaccctacaggatccaacaggcaatcgcagcaggcatcttacctttatcacccttgttcctccaacaaccgtcagccctattacagcagttacctttggtgcatttgttggcacaaaacatcaaggcacaacaactacaacaacttgtgctaggaaaccttgctgcctactctcagcaacagcagtttcttccattcaaccaactggctgcattgaactctgctgcttatttgcaacaacaactacc

SEQ ID NO: 90010 - DNA, 472 bp, Zea mays
ggttcggaattcccggctcgagccacgcgtccgcgacctaacaccaatggctaccaagatattagccctccttgcgcttcttgccctttgagtgagcgcaacaaatgcgttcattattccacagtgctcacttgctcctagtgccagtattccacagttcctcccaccagttacttcaatgggcttcgaacatccagccgtgcaagcctacaggctacaactagcgcttgcggcgagcgccttacaacaaccaattgcccaattgcaacaacaatccttggcacatctaaccctacaaaccattgcaacgcaacaacaacaacaacagtttctgccatcactgagccacctagccgtggtgaaccctgtcacctacttgcaacagcagctgcttgcatccaacccacttgctctggcgaacgtagctgcataccagcaacaacaacagctgcaacagtttatgccagtgctc

SEQ ID NO: 90011 - DNA, 480 bp, Zea mays
gtaccggtccggaattcccgggtttcagcattcaaaaacacaccaagcgaagcgcactagcaactacctaacaccaatggctccaagatatgagccctccttgcgcttcttgcccttttagtgagcgcaacaaatgcgttcattattccacagtgctcacttgctcctagtgccattattccacagttcctcccaccagttacttcaatgggcttcgaacatccagccgtgcaagcctacaggctacaactagcgcttgcggcgagcgccttacaacaaccaattgcccaattgcaacaacaatccttggcacatctaaccctacaaaccattgcaacgcaacaacaacaacaacaacagtttctgccatcactgagccacctagccgtggtgaaccctgtcacctacttgcaacagcagctgcttgcatccaacccacttgctctggcgaacgtagctgcataccagcaacaacaacag

SEQ ID NO: 90012 - DNA, 413 bp, Zea mays
aagcaacatacctttatcacccttgtttcaacaatcgccagccctatctttggtgcggtcattggtacaaaccatcaaggcacagcagctgcagcaactcgtgctacctgtgatcaaccaagtagctctggcaaacctttctccctactatcagcaacaacaatttcttccattcaaccaactatctacactgaaccctgctgcttatttgcagcaacaactattaccattcagccagctagctactgcctactctcatcaacaacaacttcttccatttaaccaattggccgcactgaacctcgctgcttatttgcagcagcaaatattactaccatttagccagctagctgcagcaagccgtgcttccttcttgacacagcaacagttgctgcctttctaccagcagtttg

SEQ ID NO: 90013 - DNA, 436 bp, Zea mays
gtagctgggaggatcatcttgcactggcagagtttgcttataacaatagctaccaggctagcatcaagatggcaccatttgaggctctgtatggcaggcggtgtatctctcctctatgctgggagactttgggagagagatccctggttggtcctgattgggttcagcaaacttttgaaaaggttcgggaaattcgtcagaatattttggcagctcagagtcgtcagaagagttatgctgatgtgaggaggcgggatctggaatttgttgttggtgaccaagtccttctcagggtatcacccactaagggagtggttcgtttcggtgtctctgggaagctcagcccgaggtacattggaccgttcactatcttggcccgagtgggcagcctagcttatcgcttgctactgccggattccatggcaggggtacaccc

SEQ ID NO: 90014 - DNA, 387 bp, Zea mays
tgggtcttcagaccattagctttatcttttccatatcgcacaacaacccgatccacacgatggggctgctgatcgttgctgttgctcatctgtctctcgctgacagcgccaccttcactcatacattccgcgcttgtatctgtcagcctacttccccatctctatcaccgtcatcgcttcatctatccacaaaacccacatcttccaccctataggcttcaacaagcactcgcacctcgcaacatacctttatcaactttgattcaacaatcaccagccctatcttttgagcagtcattggtacacatccctctatgcacatcatctgcaacaacttgtgctacctgtgatcaaccacatatctctggctaaactttcttactacta

SEQ ID NO: 90015 - DNA, 171 bp, Zea mays
aacaattgctgccatacaaccagttctctttgatgaaccctgccttgcagcaacccatcgttggaggtgccatcttttagattacatatgagatgtactcgacaatggtgccctcataccgacatgtgtttcctagaaataatcaatatattgattgagatttatctcgat

SEQ ID NO: 90016 - DNA, 468 bp, Zea mays
ggaattcccggcccgacccaagcgacccatcgggcaccataaaaaggctaacccgtttgcatctcactcatccccaattgcatacagcggatgcccgatgagtccaaggagaaaagtcaaactcaaaagccaccagcacagctctcttccatcaaaagagatgaagaacagtcaaatggtgagagtgcaaagcctcgaaaagttggaagcacgccatcatatggtttcaccttcaagtgtgatgagagatctgaaaaaagacgagagttctattcgaagcttgatgagaagattcatgcatgagagttagaaataagcaatttgcaagccaagtcaaaggaaactgaagaagcagaactcagaatgctgagaaagagtctgaatttcaaggcaacaccaatgccaagcttttataatgaaccaacccctgccaaggttgaattgaaaaagatccccccaaccagagct

SEQ ID NO: 90017 - DNA, 441 bp, Zea mays
cgcacgcgtccgattgagaccaactagcatcatagaaagcacaatagtgtaccaacggtggcagccaaaatattttgcttccttatgctccttggtctttctgcaagtgctgctaccgcaaccattttcccacaatgctcacaagctcctatagcttcctttcttcccccatacctctcaccagcggtgtcttcagtatgtgaaaacccaattcttcaaccctacaggatccaacaggcaatcgcagcaggcatcttacctttatcacccttgttcctccaacaaccgtcagccctattacagcagttacctttggtgcatttgttggcacaaaacatcaaggcacaacaactacaacaacttgtgctaagaaaccttgctgcctactctcagcaacagcagtttcttccatcaaccaactggctgcattgaactctgctg

SEQ ID NO: 90018 - DNA, 436 bp, Zea mays
ccaacaagcaacatagaaagtggaatacagtagcaaaaatagagcaacaatggcggccaagatattttccatccttatgctccttgctctttctgcatgtgttgctaacgcgaccatttttcctcaatactcacaagctcctatagctgcccttcttcccccataccttccatcaatgaccgctttagtatgtgaaaacccagcccttcaaccctacaggatccagcaagcaatcgcaacaagcaacttacctttatcacacctgttctttcaacaatcgccagccctatctttggtgcagtcattggtacaaaccatcaaggcagaacagttgcagcaactcgtgctaccagtgatcagccaagtagctctggcaaacctttccccctactctcagcaacaacaatttcttccattcaaccaactgtctatactg

SEQ ID NO: 90019 - DNA, 440 bp, Zea mays
agcaacatagaaagcacaatagtgtaccaacaatggcagccaaaatattttgcttcgttatgctccttggtctttctgcaagtgctgctaccgcaaccattttcccacaatgctcacaagctcctatagcttcctttcttcccccatacctctcaccagcggtgtcttcagtatgtgaaaacccaattcttcaaccctacaggatccaacaggcaatcgcagcaggcatcttacctttatcacccttgttcctccaacaaccgtcagccctattacagcagttacctttggtgcatttgttggcacaaaacatcaaggcacaacaactacaacaacttgtgctaagaaaccttgctgcctactctcagcaacagcagtttcttccattcaaccaactggctgcattgaactctgctgcttatttgcaacaacaactacca

SEQ ID NO: 90020 - DNA, 524 bp, Zea mays
  unsure (1)..(524): unsure at all n locations
agattatgtgtgggaagtttttcctaccgaaaattgtatncatcgtcccggtccggaattcccgggtcgacgccacgcgtccggagaccaacaagcaacatagaaagtgtaatacagtagcaaaaatagagcaacaatggcggccaagatattttccatccttatgctccttgctctttctgcatgtgttgctaacgcgaccatttttcctcaatactcacaagctcctatagctgcccttcttcccccataccttccatcaatgaccgctttagtatgtgaaaacccagcccttcaaccctacaggatccagcaagcaatcgcaacaagcaacttacctttatcacacctgttctttcaacaatcgccagccctatctttggtgcagtcattggtacaaaccatcagggcagaacagttgcagcaactcgtgctaccagtgatcagccaagtagctctggcaaacctttccccctactctcagcaacaacaatttcttccattcaaccaactgtctatactga

SEQ ID NO: 90021 - DNA, 437 bp, Zea mays
ccgcaatgctcgcaagctcctatagcttcccttcttcccccgtacctctcaccagcggtgtcttcggtatgtgaaaacccaattcttcaaccctacaggatccaacaggcaatcgcagctggcatcttacctttatcacccttgttcctccaacaatcatcagccctattacaacagttacctttggtgcatttattggcacaaaacatcagggcacaacaactacaacaacttgtgctagcaaaccttgctgcctactctcagcaacagcagtttcttccattcaaccaactaggttcattgaactctgcttcttatttgcaacaacaacaactaccattcagccagctacctgctgcctacccccagcaatttcttccattcaaccaactagcagcattgaactctcctgcttatttacagcagcaacaactact

SEQ ID NO: 90022 - DNA, 436 bp, Zea mays
attgagaccaactagcaacatataaagcacaatagtgtaccaacaatggcaggcaagatattttgcttccttatgctccttggtctttctgcaagtgctgctaccgcaaccattttcccacaatgctcacaagctcctatagcttcctttcttcccccatacctctcaccagcggtgtcttcagtatgtgaaaacccaattcttcaaccctacaggatccaacaggcaatcgcagcaggcatcttacctttatcacccttgttcctccaacaaccgtcagccctattacagcagttacctttggtgcatttgttggcacaaaacatcaaggcacaacaactacaacaacttgtgctaggaaaccttgctgcctactctcagcaacagcagtttcttccattcaaccaactggctgcattgaactctgctgcttatt

SEQ ID NO: 90023 - DNA, 438 bp, Zea mays
agcacacctagcgaagcgcactagcatcgacctaacaacaatggcttccaagacatgatccctccttgcgcttcttgccctttttgtgagtgcaacaaatgcgttcattattccacaatgctcacttgctccgagtgccattattccacagttcctccctccagttacttcaatgggcttcgaacacccagctgtgcaagcctataggctacaacaagcgcttgcggcgagcgtcttagaacaaccaattgcccaattacaacaacaatccttggcacatctaaccatacaaaccatcgcaacgcagcagcaacaagcactgagccacctagccgtggtgaaccctatcgcctacttgcaacaacagctgcttgcatccaacccacttgctttggcaaacgtagctgcataccaacaacaacaacagttgcaacagtt

SEQ ID NO: 90024 - DNA, 440 bp, Zea mays
caacatagaaagcacaatattgtaccaataatggcagccaaaatattttgcctcattatgctgcttggtctttctgcaagtgctgctacggcgagcattttcccgcaatgctcacaagctcctatagcttcccttcttcccccatacctctcaccagcgatgtcttcagtatgtgaaaatccaattcttctaccctacaggatccaacaggcaatcgcagcaggcatcttacctttatcacccttgttcctccaacaatcatcagccctattacagcagttacctttggtgcatttattggcacaaaacatcagggcacaacaactacaacaactcgtgctagcaaaccttgctgcctactctcagcaacagcagttacctttggtgcatttgttggcacaaaacatcagggcacaacaactacaacaactcgtgctagc

SEQ ID NO: 90025 - DNA, 438 bp, Zea mays
gcttcccttcttcccccataccttccatcaatgatagcttcagtatgtgaaaacccaggtctggagccctataggctccaacaagcaatcgcagcaagcaacatacctttatcacccttgttgtttcaacaatcgccagccctatctttggtgcagtcattggtacaaaccatcagggcacagcagctgcagcaactcgtgctacctgtgatcaaccaagtagctctggcaaacctttctccctactctcagcaacaacaatttcttccattcaaccaactgtctacactgaaccctgctgcttatttgcagcaacaactattaccattcagccagctagctactgcctactctcagcaacaacaacttcttccatttaaccaattggccgcactgaaccccgctgcttatttgcagcagcaaatactactaccattt

SEQ ID NO: 90026 - DNA, 446 bp, Zea mays
gagaccaacaagcaacatagaaagtggaatccagtagcaacaatagagcaacaatggcgaccgagatactttccctccttatgctccttgctctttctgcatgtgttgctaacgcgacaattttccctcaatgctcacaagctcctatagcttcccttcttcccccataccttccatcaatgatagcttcagtatgtgaaaacccagctcttcaaccctataggctccaacaagcaatcgcagcaagcaacatacctttatcacccttgtttcaacaatcgccagccctatctttggtgcagtcattggtacaaaccatcaaggcacagcagctgcagcaactcgtgctacctgtgatcaaccaagtagctctggcaaacctttctccctactatcagcaacaacaatttcttccattcaaccaactatctacactgaaccctgct

SEQ ID NO: 90027 - DNA, 376 bp, Zea mays
caagcgaagcgcactagcaacgacctatcaccaatggctaccaagatattagccctgcttgcgcttcttgcccttttagtgagcgcaacaaatgcgttcattattccacagtgctcacttgctcctagtgccagtattccacagttcctcccaccagttacttcaatgggcttcgaacatccagccgtgcaagcctacaggctacaactagcgcttgcggcgagcgccttacaacaaccaattgcccaattgcaacaacaatccttggcacatctaaccctacaaaccattgcaacgcaacaacaacaacaacagtttctgccatcactgagccacctagccgtggtgaaccctgtcacctacttgcaacagcagc

SEQ ID NO: 90028 - DNA, 432 bp, Zea mays
  unsure (1)..(432): unsure at all n locations
cggacgcgtgggcgcagctaagcccgtgccagcagttcggatcctgcggcgtcggcggcgtcngcagcccgttcctgggccagtgcgtcgagttcctgaggcaccagtgcagcccggcggcgacgccctacggctcgccacagtgccaggcgctgcagcagcagtgctgccaccagatcaggcaggtggagccgctgcaccggtaccaggcgacatacggtgtggtcctgcagtccttcctgcagcagcagccgcagggcgagctcgcggcgctgatggcggcccaggtagcgcagcagctgacggcgatgtgcggtctgcagctgcagcagccaagtccctgcccttgcaacgcagctgccggcggtgtctactactgaggaaactatgtactgtagtaataatgtaatggagccgctgactagctaccta

SEQ ID NO: 90029 - DNA, 416 bp, Zea mays
agcacccataatattttgagcattcataaacacacctagcgaagcgcactagcaacgacgtaacaacaatggctaccaagatattatccctctttgcgcttcttgccctttttgtgagcgcaacaaatgcgttcattattccacaatgctcacttgctcctagtgccattattccacagttcctccctccagttacttcaatgggcttcgaacacccagctgtgcaagcctacaggctacaacaagcgcttgcggcgagcgtcttacaacaaccaattgcccaattacaacaacaatccttggcacatctaaccatacaaaccatcgcaacgcaacagcaacaacaatttctaccagcactgagccaactagctgtggtgaaccctgtcgcctacttgcaacagcagttgcttgca

SEQ ID NO: 90030 - DNA, 435 bp, Zea mays
ccaactagcaacatagaaagcacaatagtgtaccaacaatggcagccaaaataggtggcctccttatgctccttggtctttctgcaagtgctgctacggcgaccattttcccgcaatgctcgcaagctcctatagcttcccttcttcccccgtacctctcaccagcggtgtcttcggtatgtgaaaacccaattcttcaaccctacaggatccaacaggcaatcacagctggcatcttacctttatcacccttgttcctccaacaatcatcagccctattacatcagttacctttggtgcatttattggcacaaaacatcaaggcacaacaactacaacaacttgtgctagcaaaccttgctgcctactctcagcaacagcagtttcttccattcaaccaactagctgcattgaactctgcttcttatttgcaac

SEQ ID NO: 90031 - DNA, 420 bp, Zea mays
agaagttcatgttcaacaacaacaacttcaaccgcagcaccaccaccaacaacagcagcaacagcaccaacaacaacatcaatgtgaaggccaacaacaacatcaccaacaatcacaaggccatgtgcaacaacacgaacagagccatgagcaacaccaaggacagagccatgagcaacaacatcaacaacaattccagggtcatgacaagcagcaacaaccacaacagcctcagcaatatcagcagggccaggaaaaatcacaacagcaacaatgtcattgccaggagcagcaacagactacaaggtgcagctataactactatagcagtagctcaaatctaaaaaattgtcatgaattcctaaggcagcaatgcagccctttggtaatgccttttctccaatcacgtttgatacaacc

SEQ ID NO: 90032 - DNA, 428 bp, Zea mays
  unsure (1)..(428): unsure at all n locations
cttagaggtgggttggcttctcctcctcctccggttcgggttcgggttcgtgaggtgctccggggttcggtttcgtgggtgagcggatcgagatggcggcgtcggatgttgagtaccgctgcttcgtcggcggcctcgcctgggccacggacgaccactccctccacaacgccttcagcacctacggcgaggtcctcgagtccaagatcatcctcgatcgggagacgcagaggtcccgcggcttcggcttcgtcaccttctccacggaggaggcgatgcggaacgccatcgagggcatgaacggcaaggagctggacggccgcaacatcaccgtcaacgaggcccagtcccgcggcggccgtggaggcggcggcggcggcgggtacggtggtggccgtggaggcggcggctacngcggtggcgggcgc

SEQ ID NO: 90033 - DNA, 446 bp, Zea mays
gcaacatagaaagcacaatagtgtaccaacaatggcagccaaaatattttgcctccttgtgcgggcttggtctttctgcaagtgctgctacggcgaccattttcccacaatgctcacaagctcctatagcttcccttcttcccccgtacctctcaccagcggtgtcttcggtatgtgaaaacccaattcttcaaccctataggatccaacaggcaatcgcagctggcatcttacctttatcacccttgttccttcaacaatcatcagccctattacagcagttacctttggtgcatttattggcacaaaacatcagggcacaacaactacaacaacttgtgctagcaaaccttgctgcctactctcagcaacaacagtttctttcattcaaccaactagctgcattgaactctgcttcttatttgcaacaacaactactaccattc

SEQ ID NO: 90034 - DNA, 446 bp, Zea mays
gcagcatagaaagcacaatagtgtacctacaatggcagccaaaatattttgcctccttgtgctccttggtctttctgcaagtgctgctacggcgaccattttcccgcaatgctcgcaagctcctatagcttcccttcttcccccgtacctctcaccagcggtgtcttcggtatgtgaaaacccaattcttcaaccctacaggatccaacaggcaatcgcagctggcatcttacctttatcacccttgttcctccaacaatcatcagccctattacaacagttacctttggtgcatttattggcacaaaacatcagggcacaacaactacaacaacttgtgctagcaaaccttgctgcctactctcagcaacagcagtttcttccattcaaccaactaggttcattgaactctgcttcttatttgcaacaacaacaactaccattca

SEQ ID NO: 90035 - DNA, 379 bp, Zea mays
tgggtatttacaacaacaacaactactatcattcatccagctagctactgcctactctgagcggcaacaatctcttccatttaaccaattggccgcactgaacccctctgcttatttccagcaacacatactactaccatttggccagctagctacaacaagccccacttcctttttgaaacaacaacaattgcttccgttctaccagcagttagcggctaaccccgcatccctcttacaacttctacaccttctgccctttgtccaactcgctcttacaaacccattaaccttctaccaacaacacatcattggccatgccatctcttagaatgcctattacttgtaattcaattatgaaaccctactgcttacgtat

SEQ ID NO: 90036 - DNA, 426 bp, Zea mays
attggtctaacacgtgcaaatgaatttggtattgttcttgggaaactcagcggaaggcgtgctgtgagatctaagctagtagagcttggatatgaaatcggtgacaaggaatttgaggacttctttaaacgctacaaagaggttgcagagaagaaaaagcgcgtaactgatgaagacttagaagcgttattgtcggatgagatattccagcctaaggttatttggtcccttgctgatgtacaggcaacatgtggtacacttgctttatctacggcaacagtgaaattgatagcaccagatggagaggagaaaatagcatgttcagtcggaacaggtccagtcgatgcagcttacaaggctgttgacaaaataatccagaattcaaccgttcttcgagaatacagcatgacatcagtcacagaaggc

SEQ ID NO: 90037 - DNA, 429 bp, Zea mays
  unsure (1)..(429): unsure at all n locations
tagctgtatctactccagagcgcagaagaacccgatcgacaccatgagggtgttgctgcgggccctcgctctcctggctctcgctgcgagcgccacctccacgcatacaagcggcggctgcggctgccagccaccgccgccggttcatctaccgccgccggtgcatctgccacctccggttcacctgccacctccggtgcatctnccaccgccggtccacctgccgncgccggtccacctgccaccgncggtccatgtgccgccgccggttcatctgccgncgncaccatgccactaccctactcaaccgccccggcctcagcctcatccccagccacacccatgcccgtgccaacagccgcatncaagcccgtgccagctgcagggaacctgcggcgttggcaagaccccgatcctgggccagtgcgt

SEQ ID NO: 90038 - DNA, 343 bp, Zea mays
  unsure (1)..(343): unsure at all n locations
ggtccggaattcccgggcttccagagccccccgccgccgctgcgccctcctctcggtcctgccgtccgtcgaggtaaaaggacagcatggtgagggtcagcgtgctcaatgatgctctcaagtccatgtacaatgctgaaaagatagggaaacgtcaagtcatgatcaagccgtcattcaaagtgatcatcaagttcctgacggtcatgcaacgccatggttacattggccagttccagtacgtggattaccacagagctgggaagatcgtggtggagctgaatggaagactgaataaatgtggtgttattagcccacgttttgatgtangtgttaaagagat

SEQ ID NO: 90039 - DNA, 434 bp, Zea mays
agaaagcacaatagtgtaccaacaatggcagccaaaatattttgcttccttatgctgcgttggtctttctgcaagtgttgctaccgcaaccattttcccacaatgctcacaagctcctatagcttcccttcttcccccatacctctcaccagcggtgtcttcaatgtgtgaaaccccaattgttcaaccctacaggatccaacaggcaatcgcaacaggcatcttaccattatcacccttgttcctccaacaaccgtcagccctattacagcagttacctttggtccatttggtggcacaaaacatcagggcacaacaactacaacaacttgtgctagcaaaccttgctgcatactctcaacaacatcagtttcttccattcaaccaactggctgcattgaactctgctgcttatttgcaacaacaattaccat

SEQ ID NO: 90040 - DNA, 440 bp, Zea mays
gataccaactagcaacatacatagtgtaagtacactagcaacatcttagcaccaatgggagccaagatttttgccctccttgccctccttgctctttcagcaagcgctgctacctcgacttttattccacaatgctcacaacaatacctctctccggtgacagccgcgggatttcaatacccaactatacaatcctacatggtacaagaggccatccaagcaagcatcttacggtcattagcattaaccctccaacaaccatatgctctattgcaacagccatccttagtgcatctgtatctccaaagaatcgcggcacaacaactacaacaacagttgctaccaacaatcaatcaagtagttgcagcgaaccttgctgcttacctccagcaacaacagtttcttccattcaatcaactagctggggtgaaccctgctat

SEQ ID NO: 90041 - DNA, 444 bp, Zea mays
ccaactagcaacatagaaagcacaatagtgtaccaacaatggcagccaaaatattttgggtgcttatgctccttggtctttctgcaagtgctgctacggcgaccattttcccacaatgctcacaagctcctatagcttcccttcttcccccgtacctctcaccagcggtgtcttcggtatgtgaaaacccaattcttcaaccctataggatccaacaggcaatcgcagctggcatcttacctttatcacccttgttcctccaacaatcatcagccctattacagcagttacctttggtgcatttattggcacaaaacatcagggcacaacaactacaacaacttgtgctagcaaaccttgctgcctactctcagcaacaacagtttcttccattcaaccaactagctgcattgaactctgcttcttatttgcaacaacaacaac

SEQ ID NO: 90042 - DNA, 427 bp, Zea mays
gcgcgctatgcctaacgctggcacccttttacaactgcaacaattgctgccattcaacgaacgtgctttgacaaacccaacagtgttctaccaacaacccatcattggtggtgccctcttttagattgcttatgagttatagttcaataatgaagttttttggatgatgtttgtggcgtcccaaaactaagaaagtacatttctagaacaaaaaggcctagcgacatggcatcttacctttatcaaacttgttcatccaacaatgatcaatcctattacagaagttacctttggtgcatttcttggcccacaacatcatgtcacatcacctaccacaacttgcgctaacaaaccttgctgcctactctaagaaacagcagttgcttccattcaaccagctatctgcattgaactctgcttcttattt

SEQ ID NO: 90043 - DNA, 435 bp, Zea mays
gcacaatagtgtaccaacaatggcagccaaaatattttgcctccttatgctccttgggctttctgcaagtgctgctacggcgaccattttcccgcaatgctcgcaagctcctatagcttcccttcttcccccgtacctctcaccagcggtgtcttcggtatgtgaaaacccaattcttcaaccctacaggatccaacaggcaatcgcagctggcatcttacctttatcacccttgttcctccaacaatcatcagccctattacaacagttacctttggtgcatttattggcacaaaacatcaaggcacaacaactacaacaacttgtgctagcaaaccttgctgcctactctcagcaacagcagtttcttccattcaaccaactaggttcattgaactctgcttcttatttgcaacaacaacaactaccattcag

SEQ ID NO: 90044 - DNA, 428 bp, Zea mays
ggtttgagctgcgtacgtacgtacgttcaggttcttgaacaaggcgtgcttgctccgtgcgaccaaggacgacgcgccctgcaacggctcggacgcggcggcggcggcctccgagcggcacggccacgacgggacgaggctgtgcacggtggaccaggtggagcagctcaagtcggcgatccgcgtcctgccgatctggtcctccaccatcttcctcgcccttgccatgaaccagagcttcgccgttaagcaggccgatgctatggaccggcgcgtcggcgcgggcgggttccgcgttcccagcggctccttggccgtcttcaacatggccaccatgtcgctgtggtcggcctgctacgacaggtgggtcgcgccggcactgcagcggtacacgggcaacccgcacgggctcaccatgaagcagcgca

SEQ ID NO: 90045 - DNA, 214 bp, Zea mays
cgttctaccagcacgctgcgcctaacgctggcaccctcttacaactgcaacaattggtgccattcaaccaacttgctttgacaaacccagcagcgttctaccaacaacccatcattggtggtgccctcttttagatttcttatgagttatagttcaataataaagttttttgtctgatgtttgtggcttcccagaaataagaaagtacatttct

SEQ ID NO: 90046 - DNA, 359 bp, Zea mays
agtgagaccaactagcaacatagaatgcacaatagtgtaccaacaatggcagccaggatattttgcctccttatgctccttggtctttctgcaagtgctgctacggcgaccattttcccgcatgctcgcaggctccaatagcttccctttttcccccgtacttttaacaagcgggtcttcggtatgtgaaaacccaattcttcaacccttccagattccaccaggcattaccagttggaatttaactttaataaccttggtccttcaacaattattaagcctattacattagttacctttggtgcatttattggcacaaaacattagggcacaacaactacaacaacttgtgctagcaa

SEQ ID NO: 90047 - DNA, 437 bp, Zea mays
caactagcaacatagaaagcacaatagtgtaccaacaatggcagccaaaatatgcggcctccttatgctccttggtctttctgcatgtgctgctacagcgaccattttcccgcaatgctcgcaagctcctatagcttcccttcttgctgcgtacctctcaccagcggtgtcttcgcgtatgtgaaaacccaattcttcaaccctacaggatccaacaggctatcgcaactgacatcttacctttatcacccttgctcattcaacaatcatcagacctattacaacagttacctttggcgcattgattggctcacaacatcatggcacatcaactactacaacttgcgctagcataccttgctgcctactctcagcaacagcagtttcttgcattcaaccaactaggctcattgaactctgctccttatatgcaacaa

SEQ ID NO: 90048 - DNA, 420 bp, Zea mays
gtcagttcaattctacttcgcttaaccgccatattcatcgtacataccttgaaggcgggatcaactttgctgatggatctgtacaggtattagcggctacacaaatgcctgaagagccagctggatggttccagggtacagcagactctatcagaaaatttatctgggtactcgaggattattacagtcacaaatccattgacaacattgtaatcttgagtggcgatcagctttatcggatgaattacatggaacttgtgcagaaacatgtcgaggacgatgctgatatcactatatcatgtgctcctgttgatgagagccgagcttctaaaaatgggctagtgaagattgatcatactggacgtgtacttcaattctttgaaaaaccaaagggtgctgatttgaattctatgagagttg

SEQ ID NO: 90049 - DNA, 438 bp, Zea mays
cggacgcgtgggcggacgcgtgggctgacgcgtgggatttataccaactaccgcagtcatagtgaagtccactagcaccatcttaccaccaatggcagccaagatttttgcgctccttgccctccttgctctttcagcaagtgttgctaccgcgactattattccacaatgctcacaacaatacctctctccagtgatagccgcgagatttgaatacccatctatacaatcctacaggctacaagaggccatcacagcaagcatcttacggtcgttagcattgaccgtccaacaaccatatgccctattgcaacaaccatccttagtgaatctgtatctccaaagaatcacagcacaacaactacaacaacggttgcttccaacaattaatcaagtagttgcagcgaaccttgctgcttaccttcagcaacaacaatt

SEQ ID NO: 90050 - DNA, 437 bp, Zea mays
gtcgcacatatctactatactatactctatgaagcaaggacaccaccgccatggcaggcaagatgcttgcattgttcgctctcctagctctttgtgcaagcgccactagtgcgacccatattccagggcacttgccaccagtcatgccattgggtaccatgaacccatgcatgcagtactgcatgatgcaacaggggcttgccagcttgatggcgtgtccgtccctgatgctgcagcaactgttggccttaccgcttcagacgatgccagtgatgatgccacagatgatgacgcctaacatgatgtcaccattgatgatgccgagcatgatgtcaccaatggtcttgccgagcatgatgtcgcaaatgatgatgccacaatgtcactgcgacgccgtctcgcagattatgctgcaacagcagttaccattcatgttc

SEQ ID NO: 90051 - DNA, 438 bp, Zea mays
gaaggatacttcaacgagatgtggagatagaggttgaagcagttgataggacaggaacgttcgtaggttctttgtgggagtccaagaccaacatgggctctgtgcttctggaagctggacttgccaagctgagttcatttggcttggataggacctcagatgcttatatcctaacaagagctgaacagtctgcgaagcaacagaagattaagatatgggagaactatgtcgagggtgaaaatgcttccaatggatccacacctgaatctaaacaaaagcaaattctcaaggttgttgtcacggaagttcttggtggtgggaagttttatgttcagacaatgggtgaccagagggtggcttcaattcaacagcagcttgcatctttgaaacttaaagatgcgccggtcattggtgcttttaatcctgtgaagggagaga

SEQ ID NO: 90052 - DNA, 436 bp, Zea mays
caactcgtgctaccagtgatcagccaagtagctctggcaaacctttctccctactgtgagcaacaacaatttcttccattcaaccaactgtctacactgaaccctgctgcttatttacaacaacaacaactactaccattcagccagctagctactgcctactctcagcagcaacaatttcttccatttaaccaattggccgcactgaacccctctgcttatttccagcagcaaatactactaccatttggccagctagctacaacaagccccacttcctttttgaaacaacaacaattgcttccgttctaccagcagtttgtggctaaccccgcaaccctcttacaactgcaacagttgctgccctttgtccaacttgctttgacaaacccagcagccttctaccaacaacacatcattggcggtgccatctttt

SEQ ID NO: 90053 - DNA, 436 bp, Zea mays
cctcgctagctcgctcgctctccttgcaactccagtgctgctcactgccactggcagcagatcgagctgctccgtctcacaaaccctcttgctttgctgctgcacctgcaagtctgcaaccgcgcacacagagatgtcgacgacggtgagccgtgcgtccctcgaccagaagctcgccctcgccaagcgttgctcccgagaggcgaccctcgccggagccaaggcggcagcggtggcgactatcgcctccgcgatccccaccctggccagcgtgcggatgctgccatgggccaaggccaacatcaaccccaccggccaggcgctcatcgtctccacggtggctgggatggcctacttcatcgccgccgacaagaagatcctgtcgctggcgaggcgccactcgttcgagcaagcccctgagcacctcaagaacacc

SEQ ID NO: 90054 - DNA, 331 bp, Zea mays
gacccacgcgtgcgagtttgagcattcagaaacacttcattcgaagcacattagcaacaacctaacaacagtggctaccaagatattatccctccttgctcttcttgcgcttctagcgagcgcatcaaatgcgttcattattccacaatgctcacttgctccaagttccattattacacagtgcctcctatcagttactataattggctgcatatacctagctgaccaagcctatatgctactacatgtctttgctgtgtgcgttctacatcaactaattatatatatgctgcatcactgctacgcacatctatctatctatactattata

SEQ ID NO: 90055 - DNA, 431 bp, Zea mays
cccacgcgtccgtgaaaacccagctcttcaaccatataggcttcaacaagcaatcgcgagcaagcaacatacctttatcgcccttgttgtttcaacaatcgccagccctatctttggtgcagtcattggtacaaaccatcagggcacaacagctgcagcaactcgtgctacctctgatcaaccaagtagctctggcaaacctttctccctactctcagcaacaacaatttcttccattcaaccaactgtctacactgaaccctgctgcttatttgcagcaacaactattaccatttagccagctagctactgcctactctcagcaacaacaacttcttccatttaaccaattggccgcactgaaccccgctgcttatttgcagcagcaaatactactaccatttagccagctagctgcagcaaaccgtgct

SEQ ID NO: 90056 - DNA, 475 bp, Zea mays
ggaattcccgggcaacaagcaacatagaaagtggaatacagtagcaacaatagagcaacaatggcggccaagatattttccatcctgatgctccttgctctttctgcatgtgttgctaacgcgaccatttttcctcaatactcacaagctcctatagctgcccttcttcccccataccttccatcaatgaccgcttcagtttgtgaaaacccagcccttcaaccctacaggctccaacaagcaatcgcaacaagcaacttacctttatcacccctgttctttcaacaatcgccagccctatctttggtgcagtcattggtacaaaccatcagggcacaacagctgcaacaactcgtgctaccagtgatcagccaagtagctctggcaaacctttctccctactctcagcaacaacaatttcttccattcaaccaactgtctacactgaaccctgctgcttatttacaacaacaac

SEQ ID NO: 90057 - DNA, 444 bp, Zea mays
aagcacaatagtgtaccaacaatggcagccaaaatattttgcttccttatgctccttggtcttgctgcaagtgctgctaccgcaaccattttcccacaatgctcacaagctcctatagcttcctttcttcccccatacctctcaccagcggtgtcttcagtatgtgaaaacccaattcttcaaccctacaggatccaacaggcaatcgcagcaggcatcttacctttatcacccttgttcctccaacaaccgtcagccctattacagcagttacctttggtgcatttgttggcacaaaacatcaaggcacaacaactacaacaacttgtgctaggaaaccttgctgcctactctcagcaacagcagtttcttccattcaaccaactggctgcattgaactctgctgcttatttgcaacaacaactaccattcagtcagctagct

SEQ ID NO: 90058 - DNA, 399 bp, Zea mays
attttcagcattcaaaaacacaccaagctaagcgcactatcaacgacctaacaccaatggctgccaagatattagccctccttgcgcttcttgcccttttagtgagcgcaacaaatgcgttcattattccacagtgctcacttgctcctagtgccattattccacagttcctcccaccagttacttcaatgggcttcgaacattcagccgtgcaagcctacaagctacaactagcgcttgcggcgagcgccttacaacaaccaattgcccaattgcaacaacaatccttggcacatctaaccctacaaaccattgcaacgcaacaacaacaacaacaacagtttctgccatcactgagccacctagccgtggtgaaccctgtcacctacttgcaacagc

SEQ ID NO: 90059 - DNA, 447 bp, Zea mays
cccacgcgtccgcaactagcaacatagaaagcacaatagtgtaccaacaatggcagcgtaagatattttgcctccttatgctccttggtctttctgcaagtgctgctacggcgaccattttcccacaatgctcacaagctcctatagcttcccttcttcccccgtacctctcaccaacggtgtcttcggtatgtgaaaacccaattcttcaaccctacaggatccaacaggcaatcgcagctggcatcttacctttatcacccttgttcctccaacaatcatcagccctattacagcagttacctttggtgcatttattggcacaaaacatcagggcacaacaactacaacaacttgtgctagcaaaccttgctgcctactctcagcaacagcagtttcttccattcaaccaactagctgcattgaactctgcttcttatttgcaac

SEQ ID NO: 90060 - DNA, 350 bp, Zea mays
cggaattccgggtcgaccaacgcgtccgcggacgcgtggggcaaatactactaccatttagccagctagctgcagcaaaccgtgcgtccttcttgacacagcaacagttgctgcctttctaccagcagtttgcggctaaccccgcaaccctcttacaactacaacaattgttgccctttgtccaacttgctttgacagaccgagcggcctcctaccaacaacacatcattggtggtgccctcttttagattgcttattagttgtaattcaataataaagttttttggatgatgtatgtggccaaccagaaataagaagttacatttccagattttaaaaaaaaaaagaac

SEQ ID NO: 90061 - DNA, 482 bp, Zea mays
ggtccggaattcccggctcgacgccacgcgtgcgattgagaccaactagcaacatagaaagcacaatagtgtaccaacaatggcagccaagataggttgcctccttatgctccttggtctttctgcaagtgctgctacggcgaccattttcccacaatgctcacaagctcctatagcttcccttcttcccccgtacctctcaccagcggtgtcttcggtatgtgaaaacccaattcttcaaccctataggatccaacaggcaatcgcagctggcatcttacctttatcacccttgttcctccaacaatcatcagccctattacagcagttacctttggtgcatttattggcacaaaacatcagggcacaacaactacaacaacttgtgctagcaaaccttgctgcctactctcagcaacaacagtttcttccattcaaccaactagctgcattgaactctgcttcttatttgcacaaacaca

SEQ ID NO: 90062 - DNA, 438 bp, Zea mays
gaccaactagcaacatagaaagcacaatagtgtaccaacaatggcagccaaaatattgtgcttccttatgctccttggtctttctgcaagtgttgctaccgcaaccattttcccacaatgctcacaagctcctatagcttcccttcttcccccatacctctcaccagcggtgtcttcaatgtgtgaaaccccaattgttcaaccctacaggatccaacaggcaatcgcaacaggcatcttaccattatcacccttgttcctccaacaaccgtcagccctattacagcagttacctttggtccatttggtggcacaaaacatcagggcacaacaactacaacaacttgtgctagcaaaccttgctgcatactctcagcaacatcagtttcttccattcaaccaactggctgcattgaactctgctgcttatttgcaaca

SEQ ID NO: 90063 - DNA, 415 bp, Zea mays
tgacaagtacgtgaacggcgagataattccctgcacgtacccgacgtaccagccgaaggagcggaggacgtccaagtacgagagcaggcggtacgagaggcggagagatgggccaccggcggccagcaggaaaccgaggcagcaggcaccagctcatactcagaccgagtcggcgtcttcgtgacgagctctgcaggcattttgtccacgtacctacctacctagaagtagaacaagagaggaggaacgcctaaattctgtcgccttgggcaccgcgtactgggactggacaggcgggtcgggatccatcatccatcgtcagccagaaaaattgtcgctgtacaagcagcctgggcagcttgtgtgcgtgtgtgctgataagcctgatatcttgagctagctgtggcataaactg

SEQ ID NO: 90064 - DNA, 439 bp, Zea mays
  unsure (1)..(439): unsure at all n locations
cagaccattagctttatctactccagagcgcagaagaacccgatcgacaccatgagggtgttgctcgttgccctcgctctcctggctctcgctgcgagcgccacctccacgcatacaagcggcggctgcggctgccagccaccgccgccggttcatctaccgccgccggtgcatctgccacctccggttcacctgccacctccggtgcatctcccaccgccggtccacctgccgccgccggtccacctgccaccgccggtccatgtgccgccgccggttcatctgccgccgccaccatgccactaccctnactcaaccgcccggcctcagcctcatccccagccacacccatgcccgtgccaacagccgcatccaagcccgtgccagctgcagggaacctgcggcgttggcagcaccccgatcctgggccagtgcgtcg

SEQ ID NO: 90065 - DNA, 434 bp, Zea mays
attgaaccaactagctgcattgaactctgcttcttatttgcaacaacaacaactaccagtcaggcagctatctgctgcctacccccagcaatttcttccattcaaccaactgacagcattgaactctcctgcttatttacagcagcaacaactactaccattcagccagctagctggtgtgagccctgctaccttcttgacacaaccacagttgttgccgttctaccagcacgctgcgcctaacgctggcaccctcttacaactgcaacaattgctgccattcaaccaacttgctttgacaaacccagcagcattctaccaacaacccatcattggtggtgccctcttttagatttcttatgagttatagttcaataataaagttttttgtctgatgtttgtggcttcccagaaataagaaagtacatttctag

SEQ ID NO: 90066 - DNA, 409 bp, Zea mays
  unsure (1)..(409): unsure at all n locations
ccggaattcccgggtcgacccgcgcgtgcgagaaagcacaatagtgtaccaacaatggcagccaaaatattttgcttccttatgctccttggtggttgtgcaagtgttgctaccgcaaccattttcccacaatgctcacaagctcctatagcttcccttcttcccccatacctctcaccagcggtgtcttcaatgtgtgaaaacccaattgttcaaccctacaggatccaacaggcaatcgcaacaggcatcttaccattatcacccttgntcctncaacaaccgtcagccctattacagcagttacctttggtccaattggtggcacaaaacatcaaggcacaacaactacaacaacttgggctagcaaaccttgctgcatactcttagcaacatcagtttcttccat

SEQ ID NO: 90067 - DNA, 180 bp, Zea mays
  unsure (1)..(180): unsure at all n locations
ccaacaagcaacatanaaagtggaatcgagtagcatcaatagagcaacaatggcgaccaatagattggccctccttatgcggcttgctctttctacatgttttgctaacgcgacaattttccctcaatgctcacaagctcctataacatcccttcttcctccatactttccatcatttat

SEQ ID NO: 90068 - DNA, 325 bp, Zea mays
ccggtcctaattcccgggtcgagcaggcgtccgaattcctaccagcactgagccacctagccatggtgaaccctgccgcctacttgcaacagcgagggcttgcatcaaacgcacttgctctggcaaacgtagttgcaaaccagccacaacaacagctgcaacagtttctgccagcgctcagtcaactagccatggtgaaccctgccgcctacctacaacaagcacaactgctttcatctagcccgctcgctgtggccaatgcacctacatacctgcaacaacaattgttgcaacagattgtaccagctctgactcagctagttgt

SEQ ID NO: 90069 - DNA, 415 bp, Zea mays
  unsure (1)..(415): unsure at all n locations
gaccattgcaacgcaccaccaacacgaccaacagtttctgccatcactgagccacctagccntggtgaaccctgtgacctacttgcaacagcagctgcttgcatccaacccacttgctctggcgaacgtagctgcataccagcaacaacaacagctgcaacagtttatgccagtgctcagtcaactagccatggtgaaccctgccgtctacctacaactactttcatctagcccgctcgcggtgggcaatgcacctacgtacctacaacaacagttgctgcaacaaattgtaccagctctgactcagctagctgtggcaaaccctgctgcctacttacaacagttgcttccattcaaccaactggctgtgtcaaactctgctgcgtacctacaacagcgacaacagttacttaat

SEQ ID NO: 90070 - DNA, 431 bp, Zea mays
  unsure (1)..(431): unsure at all n locations
agaaagcacaatagtgtaccaacaatggcagccaaaatattttgcctccttatgctgggtggtctttctgcaagtgctgctacggcgaccattttcccgcaatgctcgcaagctcctatagcttcccttcttcccccgtacctctcaccagcggtgtcttcggtatgtgaaaacccaattcttcaaccctacaggatccaacaggcaatcgcagctggcatcttacctttatcacccttgttcctccaacaatcatcagccctattacaacagttacctttggtgcatttattggcacaaaacatcagggcacaacaactacaacaacttgtgctagcaaaccttgctgcctactctcagcaacagcagtttcttccattcaaccaactangttcattgaactcttgcttctatttgcaacaaacaacact

SEQ ID NO: 90071 - DNA, 249 bp, Zea mays
  unsure (1)..(249): unsure at all n locations
gctcgctctccttgcaactccagtgctgctcactgccactgccagcagatcgagctgctccgtgtgacagaccctcttgctttgctgctgcacctgcaagtctgcaaccgcgcacacagagatgtcgacgacggtgagccgtgcgtccntcgaccagaagctcgccctcgccaagcgtggctcccgagaggcgaccttggccggacccaaggcggcagctgtgcgactatcgcttccgcaatcccaacc

SEQ ID NO: 90072 - DNA, 393 bp, Zea mays
ccggaattcccgggtcgacccagcgcgtccggaccaacaagcaacatagaaagtggaatccagtagcaacaatagagcaacaatggcgaccaagagattgtccctccttatgctccttgctctttctacatgtgttgctaacgcgacaattttccctcaatgctcacaagctcctatagcttcccttcttcccccataccttccatcaattatagcttcaatatgtgaaaacccagctcttcaaccatataggcttcaacaagcaatcgcagcaagcaacatacctttatcgcccttgttgtttcaacaatcgccagccctatctttggtgcaatcattggtacaaaccattagggcacaacagctgcagcaactcgtgctacctctgatcaa

SEQ ID NO: 90073 - DNA, 342 bp, Zea mays
gaccaactagcaacatagaaagcacaagagtgtatcaacaatggcagccaaaatattttgccggctgaggctccttggtctttctgcaagtgctgctacggcgaccattttcccgcaatgctcgcaagctcctatagcttcccttcttcccccgtacctctcaccagcggtgtcttcggtatgtgaaaacccaattcttcaaccctacaggatccaacaggcaatcgcagctggcatcttacctttatcacccttgttcctccaacaatcatcagccctattacaacagttacctttggtgcatttattggcacaaaacatcaaggcaccacaacttccacc

SEQ ID NO: 90074 - DNA, 376 bp, Zea mays
cggaattcccgggtcgacccaggcgtgcgtccagatcagcaaagcggcagtgcgtagagaggatcgtcgaacagaacagcatgaagatggtcgtcgtgctcgtcgtgtgcctggctctgtcagctgccagcgcctctgcaatgcagatgccctgcccctgcgcggagctgcagggcttgtacggcgctggcgccggcctgacgacgatgatgggcgccggcgggctgtacccctacgcggagtacctgaagcagccgcagtgcaacccggtggcggcggcgccctactacgcccggtgtgggcagcccaacgccatgttccaaccggttcggcaacagtgcttccagcaacagatgaagatgatggacctgcaatc

SEQ ID NO: 90075 - DNA, 548 bp, Zea mays
  unsure (1)..(548): unsure at all n locations
ggaggaagcgtnttgtctgatgcttaggcctagacagcatgactcaccggtcctgaattcccgggtcgacccgcgcgtccgaacagttgctgcaacaaattgtaccagctcttactcagctagctgtggcaaaccctgctgcctgcttgcaacaactacttccattcaaccaactgactgtgtcgaactctgctgcgtacctacaacagcgacaacagttacttaatccactagcggtggctaacccattggtcgctgccttcctacagcagcaacaattgctgccatacaaccagttctctttgatgaaccctgccttgtcgtggcagcaacccatcgttggtggtgccatcttttagattacatatgagatgtactcgataatggtgccctcatagcggcatgtgtttcctaaaaataatcaatatattgattgagatttatctcgattaaaaaaaaatagtcaaaaattaaacagaaaaaaaaattcctattaaaatcataaaatggaaaaaaaaacatagtgaaaaaaatttaaggaatatttg

SEQ ID NO: 90076 - DNA, 480 bp, Zea mays
accggaattgaagtgtcgacccgagcgaggcataccaactggcgtcatacatagcacattattgtcccaacaacggcagccgacatattacgtgtgcggatgctctaaggctggtatgctagtgctgctgcagcaaccattgtcatgcaatgattcgagctacaaaccctacagtgttttaccagcacctcataatagcgggtgctctgttttagaaagcccaagagttatactcctacagtgaccatctgcgatggcagttgcattctaaccttaataaccttggttcttccaacattaataagccttattacaacagttacctttggtgcattaattggcacaaaacatcagggcacaacaactacaacaacttgtgctagcaaaccttgctgctactctcagcaacagcagtttcttccattcaaccaactaggttcattgaactctgcttcttatttgcaacaacaacaactacca

SEQ ID NO: 90077 - DNA, 447 bp, Zea mays
cggaattcccgggtcgagcgcacgcgtccgattgagaccaacaagcaacatacagagtggaatccagtagcaacaacagagcaacagtggcgaccaagagattttccctccttatgctccttgctctttctgcatgtgttgctaacgcgacaattttccctcaatgctcacaagctcctatagcttcccttcttcccccataccttccatcaatgatagcttcagtatgtgaaaacccagctcttcagccctataggctccaacaagcaatcgcagcaagcaacatacctttatcacccttgttgtttcaacaatcgccagccctatctttggtgcagtcattggtacaaaccatcagggcacagcagctgcagcaactcgtgctacctgtgatcaaccaagtagctctggcaaacctttctccctactctcagcaacaacaatttc

SEQ ID NO: 90078 - DNA, 419 bp, Zea mays
  unsure (1)..(419): unsure at all n locations
caactagcaacatacatagtgaagtacactagcaacatcttagcaccaatgggagcggagatttttgccctccttgccctccttgctctttcagcaagcgctgctacctcgacttttattccacaatgctcacaacaatacctctctccggtgacagccgcgggatttcaatacccaactatacaatcctacatggtacaagaggccatccaagcaagcatcttacggtcattagcattaaccctccaacaaccatatgctctattgcaacagccatccttagtgcatctgtatctccaaagaatcgcggcacaacaactacaacaacagttgctaccaacaatcaatcaagtagttgcagcgaaccttgctgcttacctncagcacccacagtttctttcattcaatcaactagctgg

SEQ ID NO: 90079 - DNA, 427 bp, Zea mays
cggaattcccggctcgacgcacgcgtccgtgcacctacgtacctacaacaccggttgctgcaacaaattgtaccacctctgactgagctagctgtggcagaccctgctgcctacttacaacagttgcttccattcaaccaactggctgtgtcaaactctgctgcgtacctacaacagcgacaacagttacttaatccattggcagtggctaacccattggtcgctaccttcctgcagcagcaacaacaattgctgccatacaaccagttctctttgatgaaccctgccttgcagcaacccatcgttggaagtgccatcttttagattacatatgagatgtactcgacaatggtgccctcataccgacatgtgtttcctagaaataatcaatatattgattgagatttatctcgatatatctctgaat

SEQ ID NO: 90080 - DNA, 458 bp, Zea mays
gtccggaattcccgggtcgacgcacgcgtcccgcactagcaacatagaaagcacaatagtgtaccaacaatggcagccaaaatattttggctgcttatgctccttggtctttctgcaagtgctgctacggcgaccattttcccgcaatgctcgcaagctcctatagcttcccttcttcccccgtacctctcaccagcggtgtcttcggtatgtgaaaacccaattcttcaaccctacaggatccaacaggcaatcacagctggcatcttacctttatcacccttgttcctccaacaatcatcagccctattacatcagttacctttggtgcatttattggcacaaaacatcagggcacaacaactacaacaacttgtgctagcaaaccttgctgcctactctcagcaacagcagtttcttccattcaaccaactagctgcattgaactctgcttctta

SEQ ID NO: 90081 - DNA, 425 bp, Zea mays
gctctcgctgcgagcgccacctccacgcatacaagcggcggctgcggctgccagccaccgccggcggttcatctaccgccgccggtgcatctgccacctccggttcacctgccacctccggtgcatctcccaccgccggtccacctgccgccgccggtccacctgccaccgccggtccatgtgccgccgccggttcatctgccgccgccaccatgccactaccctactcaaccgccccggcctcagcctcatccccagccacacccatgcccgtgccaacagccgcattcaagcccgtgccagctgcagggaacctgcggcgttggcagcaccccgatcctgggccagtgcgtcgagttcctgaggcatcagtgcagcccgacggcgacgccctactgctcgcctcagtgccagtcgttgcggca

SEQ ID NO: 90082 - DNA, 539 bp, Zea mays
  unsure (1)..(539): unsure at all n locations
ngaatgttatttcatgatagatagattgatcgcctcaccggtccggaattcccgggtcgacccaggcgtccggcaaaaaaaacttcctgaacaggaagaccgaaatgtangtcgaatgcatgcattgctgtaggaggaatagtccactggaggtacatgagcctaaaataatttgtggagtggtggttgacttcagtggtaagtgcctttcagagtgtaccggcatgcccaaaactgaaatttccggtttagatagaattgggggcgcggaagaaggtgccatgtgtgtgtttgtgtgtgttgcctgtggatggaggaattgatgggagtatgtgaactgatgtagctagtctatgtttgttaccattgagggcttgttcggttagctttcaatccatgtggattgaacgggattggattggtttgaattccaaaccgcttaaactttttaaaaaattttttcaaattccattcaatccatgtgtattgggaattaccgaacaagcgcttgataataatgggtttgggcatgtgtttat

SEQ ID NO: 90083 - DNA, 463 bp, Zea mays
  unsure (1)..(463): unsure at all n locations
cggttcggaattcccgggtcgacgcacgcgtccgcacaatgctcacaagctcctatagcttcccttcttcccccgtacctctcaccaacggggtgttcggtatgtgaaaacccaattcttcaaccctacaggatccaacaggcaatcgcagctggcatcttacctttatcacccttgttcctccaacaatcatcagccctattacagcagttacctttggtgcatttattggcacaaaacatcagggcacaacaactacaacaacttgtgctagcaaaccttgctgcctactctcagcaacagcagtttcttccattcaaccaactagctgcattgaactctgcttcttatttgcaacaacaacaactaccattcagccagctatctgctgcctacccccagcaatttcttccattcaaccaactgacagcattgaactctnctgcttatttacagcagcaac

SEQ ID NO: 90084 - DNA, 431 bp, Zea mays
gtccggaattcccgggcgcaagttgcaccaagaaatccatcgagaggccgtcgacaggggaattaatggcgtcgtcgtctagcagcagggacggccgcctcatcctcgcagccgccgtcctgctctccgtgctcgcggctgccagcgccagcgccgggacctcctgcgtgccggggtgggccatcccgcacaacccgctcccgagctgccgctggtacgtgaccagccggacctgcggcatcgggccgcgcctcccgtggccggagctgaagaggagatgctgccgggagctggcggacatcccggcgtactgccggtgcacggcgctgagcatcctcatggacggcgcgatcccgccgggcccggacgcgcagctggagggccgcctagaggacctgccgggctgcccgcgggaggtgcagaggggattc

SEQ ID NO: 90085 - DNA, 341 bp, Zea mays
catccttatgctccttgctctttctgcatgtgttgctaacgcgaccatttttcctcaatactcacaagctcctatagctgcccttcttcccccataccttccatcaatgaccgcttcagtttgtgaaaacccaacccttcaaccctacaggctccaacaagcaatcgcaacaagcaacttacctttatcacccctgttctttcaacaatcgccagccctatctttggtgcagtcattggtacaaaccatcagggcacaacagctgcaacaactcgtgctaccagtgatcagccaagtagctctggcaaacctttctccctactctcagcaacaacaatttc

SEQ ID NO: 90086 - DNA, 487 bp, Zea mays
tccggaattcccgggtcgacccaggcgtccgcaactagcaacatagaaagcacaatagtgtaccaacaatggcagccaaaatattttgcctccggatgctccttggtctttctgcaagtgctgctacggcgaccattttcccgcaatgctcgcaagctcctatagcttcccttcttcccccgtacctctcaccagcggtgtcttcggtatgtgaaaacccaattcttcaaccttacaggatccaacaggcaatcgcagctggcatcttacctttataacccttgttcctacaacaatcatcacccttattacaacagtaacctttgcagcattaattggcacaaaacatcagggcacaacaactacaacaacttgtgctagcaaaccttgctgcctactttcagcatcagcagtttcttccattcaaccaactaggttcatagaactctgcttcttatttgcaacaacaccaattaccattcagcca

SEQ ID NO: 90087 - DNA, 327 bp, Zea mays
gtccggaattcccgggtcgacccgcgcgtccgcccacgcgtacgagtgcttgcgttataccagcagttgtcgttggcccatttggtggcacaaaagatcaggcaacatcagctacaacaactggtgctagcaaaccttgctgcatacttttagcaacatcagtttcttccattaacccaactggctgcattgaactctgctgcttatttgcaacaacaattaccattcagccagctagttgctgcctacccccagcaatttcttccattcaaccaactagcagcattgaactctgctgcttatttacagcagcaacaactactacca

SEQ ID NO: 90088 - DNA, 222 bp, Zea mays
gcgacccgttacaactaccacaaaaggcgcactagggcaccatcactggcgaacacaacccatcacgcttctgtatgctccacatcattggtgcaaccgttgctacacaagccatttacccacaatgctcacatgctgctatagcgtacattcatgcgccatacctataaccagcagtgtctttaatgagtgaaaccccaattgttcaaccctacaggatcc

SEQ ID NO: 90089 - DNA, 438 bp, Zea mays
tcctgaattcccgggtcgacccgcgcgtccgcccacgcgtccgagttgctgcaacaaatggtaccagctctgactcagctagctgtggcaaaccgtgctgcctacttacaacagttgcttccattcaaccaactggctgtgtcaaactctgctgcgtacctacaacagcgacaacagttacttaatccattggcagtggctaacccattggtcgctaccttcctgcagcagcaacaacaattgctgccatacaaccagttctctttgatgaaccctgccttgcaacaacccatccttggaagtgccatcttttaaattacatatgagatgtactcgaccatggtgcccttataacgacatggggttcctaaaaattatcaatatattgattgaaaattatctcgattaaaaaaaaataacctataataaatggaaaaa

SEQ ID NO: 90090 - DNA, 392 bp, Zea mays
accggtccggaattcccggggctagctgctgcctactctcagcaacaacaacttcttccatttaaccaattggccgcactgaaccccgctgcttatttgcagcagcaaatactactaccatttagccagctagctgcagcaaaccgtgcttccttcttgacacagcaacagttgctgcctttctaccagcagtttgcggctaaccccgcaaccctcttacaactacaacaattgttgccctttgtccaacttgctttgacagacccagcggcctcctaccaacaacacatcattggtggtgccctcttttagaatgcttattagttggaattcaataataaaggtttttggatgatgtatgtggccaaccagaaataagaagttacatttcc

SEQ ID NO: 90091 - DNA, 458 bp, Zea mays
  unsure (1)..(458): unsure at all n locations
ggaattcccggctcgacgcacgcgtncggaaaagggcaaagttcagctgttgcgtgactcaaaggacagcattgaaatgactgcggctgaactgcagaagaaccctatcaactacacacaggttgccgtgctcgcggatgacatattgaaaaatgtggaatatgatgctctgagggttattttcaacaagttccaatctgtcatatcgtttaagcccacaatggtaacaatactttcccccgaggttgcagaaaaagaatcagaagctggtgggaagatgggtgacctagattcttatgagattgaaggcggcgagacaaaatcagagattttgcagaatctagctgagttccagttttcttgtgtcctgtacaatggtgccctagagaatgcatgcagtgagcttggagcccgtatgtctgccatggacagctctagcagaaatgctggcgatatgc

SEQ ID NO: 90092 - DNA, 508 bp, Zea mays
  unsure (1)..(508): unsure at all n locations
ngggtaggaggtatcttaattagtgacagagatattgctctctcggtccggaattcccgggtcgacgcacgcgtccggaccaactagcaacatagaaagcacaatagtgtaccaacaatggcagccaaaatatgttggctccttatgctccttggtctttctgcaagtgctgctacggcgaccattttcccacaatgctcacaagctcctatagcttcccttcttcccccgtacctctcaccagcggtgtcttcggtatgtgaaaacccaattcttcaaccctataggatccaacaggcaatcgcagctggcatcttacctttatcacccttgttcctccaacaatcatcagccctattacagcagttacctttggtgcatttattggcacaaaacatcagggcacaacaactacaacaacttgtgctagcaaaccttgctgcctactctcagcaacaacagtttcttccattcaaccaactagctgcattgaactcttgcttttatt

SEQ ID NO: 90093 - DNA, 457 bp, Zea mays
  unsure (1)..(457): unsure at all n locations
gtccggaattcccgggtcgacgcacgcgtccgtgcaagtgctgctactgcgaccatgttcccgcaatgctcgcaagctcctatagcttgcctgcttcccccgtacctctcaccagcggtgtcttcggtatgtgaaaacccaattcttcaaccctacaggatccaacaggcaatcgcagctggcatcttacctttatcacccttgttcctccaacaatcatcagccctattacaacagttacctttggtgcatttattggcacataacatcagggcacaacaactacaacaacttgtgctagcaaaccttgctgcctactctcagcaacagcagtttcttccattcaaccaactaggttcattgaactctgcttcttatttgcaacaacaacaactaccattcagccagctacctgctgcctacccncagcaatttcttccattcaaccaactagcag

SEQ ID NO: 90094 - DNA, 542 bp, Zea mays
ggaggagtgtgtctgacctcagtcctagactgcatgcactcacccgtccggaattcccgggtcgacccaggcgtccgccaactagcaacatagaaagcacaatagtgtaccaacaatggcagccaaaatattttgcctccgtatgctccttggtctttctgcaagtgctgctacggcgaccattttcccgcaatgctcgcaagctcctatagcttcccttcttcccccgtacctctcaccagcggtgtcttcggtatgtgaaaacccaattcttcaaccctacaggatccaacaggcaatcacagctggcatctaaccttaataacccttgttcctccaacaatcatcagccctattacatcagttacctttggtgcattaattggcccaaaccatcagggcccaccacctacaacaacttgggctagcaaaccttgctgcctactttaagcaccagcagttccttccattcaaccaactagctgcatggaactctgcttctaattggcaccaccaccaactaccattcagccagttacttg

SEQ ID NO: 90095 - DNA, 289 bp, Zea mays
tcctgaattcccgggtcgacccaggcgtccgattgagaccaactagcaacatagaaagcacattagtttaccaacaatggcagccaaaatattgtgctgccttatgctccttggtctttctgcaagtgttgctaccgaaaccattttcccacaatcctaacaacctcctataccttcctttcttcccccatacctttaaccaccggtgtcttcaatgcttgaaaccccatttgttcaaccttacaggatccaacagccattcgcaccaggcatctaaccataataaccc

SEQ ID NO: 90096 - DNA, 425 bp, Zea mays
tccggaattcccgggtcgacccagcgcgtccgcccacgcgtccgtagcaacatagaaagcacaatagtgtaccaacaatggcagccaaaatatttggctgccttatgctccttggtctttctgcaagtgttgctaccgcaaccattttcccacaatgctcacaagctcctatagcttcccttcttcccccatacctctcaccagcggtgtcttcaatgtgtgaaaccccaattgttcaaccctacaggatccaacaggcaatcgcaacaggcattttaccataataacccttgttcttcaaccacccgtaagccttataacagcagttaccttgggtcaattgggggccccaaaccttcaggccccaccacctccaccacctgggcctaccaaacttggttgattcctttaagaaccttaagttc

SEQ ID NO: 90097 - DNA, 458 bp, Zea mays
caactagcaacatagaaagcacaatagtgtaccaacaatggcagccaaaatattttgcctgctgatgctccttggtctttctgcaagtgctgctacggcgaccattttcccgcaatgctcgcaagctcctatagcttcccttcttcccccgtacctctcaccagcggtgtcttcggtatgtgaaaacccaattcttcaaccctacaggatccaacaggcaatcacagctggcatcttacctttatcacccttggtccttcaacaatcatcagccctattacatcagttacctttggtgcatttattggcacaaaacatcagggcacaacaactacaacaacttgtgctagcaaaccttgctgcctactctcagcaacagcagtttcttccattcaaccaactagctgcattgaactctgcttcttatttgcaacaacaacaactaccattcagccagc

SEQ ID NO: 90098 - DNA, 393 bp, Zea mays
  unsure (1)..(393): unsure at all n locations
cttgctcctagttccattattccacagtggttaacaccagttacttcaatggccttcgaacagccatctgtacaagcctatatgctacaacatgcgattgcggcgagcgtcttacaacaactaattgcccaactgcaacatcaatccttngcacatctaacaatacataccatcctaacgcaacagcaacaacagtttctaccagcactgaaccacctaaccatggtgaaccctgtcgcctacttgcaacaacaactgcttgcatacaacccacttgctctagcaaacgtacttgcaaaccagcaacaactacaactgcaacagtttctgccaccgcttaatcaactagccatggtgaaccctgccgcctacctacaacagcaacaactgctt

SEQ ID NO: 90099 - DNA, 300 bp, Zea mays
ccggaattcccgggtcgacccagcgcgtccgcaggcaggcaggtcggcgaggagggcaggaagaccgaagaccgagccgtgcgggggctcggggcgggggcgggacaggaccccaaaatctcagatccttcctgcccgcccgcccgtgcccgtcgacgcgtcgttcttgccggccgcgcctcacctccgccctctcctcctccagggggatcggatacgccacaggctgcgcgatggtgctgtgggtcttcggctacggcttccttatctggaaccccggcttcgacttcgacgaccaaa

SEQ ID NO: 90100 - DNA, 453 bp, Zea mays
ggaattcccggctcgacgcacgcgtccggctgcagcaactcgtgctacctgtgatcaaccaagtagctctggcaaacctttctcgctagtctcagcaacaacaatttcttccattcaaccaactgtctacactgaaccctgctgcttatttgcagcaacaactattaccatttagccagctagctactgcctactctcagcaacaacaacttcttccatttaaccaattggccgcactgaaccccgctgcttatttgcagcagcaaatactactgccatttagcgagctagctgcagcaagtcgtgcttccttcttgacacagcaacagttgctgcctttctacaagcagtttgcggctaaccccgcaaccctcttacaactacaacaattgttgccctttgtccaacttgctttgacaaacccagcagccttctaccaacaacacatcattg

SEQ ID NO: 90101 - DNA, 540 bp, Zea mays
  unsure (1)..(540): unsure at all n locations
tagagaagactgtctgttctcacttgaacantgtattgcacacccgtccggaattcccgggtcgacccgcgcgtccgagaccagcaagcaacatagaaagtagaatccattagcaacaatagagcaacaatggcgaccaagatagtttccctccttatgctccttgctctttctacatgtgttgctaacgcgacaattttccctcaatgctcacaagctcctatagcttcccttcttcccccataccttccatcaattatagcttcagtatgtgaaaacccagctcttcaaccatataggcttcaacaagcaatcgcagcaggcaccataccttaatcgcccttgttgtttcaccattcacaagccttatctttggtccagccattgttccaacccatcaggccccaccagttgcagcacctgggcctacttggaaccaaccaattacttttgccaaactttcttcctaactttaagcaccaccatttctttcatattacccaattgctatacttgacccttgttgttatattcaacaac

SEQ ID NO: 90102 - DNA, 370 bp, Zea mays
cggaattcccgggtcgacccgggcgtccgattttgagcattcagaaacacaccaagcgaatcacattagcaacaacctaacaacaatggctggcaagatattatccctccttgcgcttcttgcgctttttgcgagcgcaacaaatgcgttcattattccacaatgctcacttgctccaagttccattattacacagttccttccaccagttacttcaatgggcttcgaacacccagctgtgcaagcctataggctacaacaagcaattgcggcgagcgtcttacaacaaccaatttccaagttgcaacaccaatccttggcccatttaacaatccaaaccatggaaacgcaacagcaccaccaattccta

SEQ ID NO: 90103 - DNA, 392 bp, Zea mays
ggaattcccggggctgcttggcttcagcaacaacaatttcttccattcaatcaactagctggggtgaaccctgctgcttacttgcaggcagaacagctactaccgttcaaccaactggctttgacaaactcaacagtgttctaccaacaacccatcattggtggtgccctctttaagattgcttatgagttatagttcaataatgaagttttttgaatgatgtttggggcgtccaaaaattaagaaggtccatttctaaaaaaaaaatgtaagataatataaataaaaaatattaaaaaaaaaaaaaaagggcgccccttttaagggtcccaagtttacattcccggttatgcaaattaaaaacttttttataggtaccccaaatttaaatt

SEQ ID NO: 90104 - DNA, 357 bp, Zea mays
  unsure (1)..(357): unsure at all n locations
ccggaattcccgggtcgacccgcgcgtccggngaaaatggtcgccgtagcagcacttgcagaaataccaaggagcataaggaggcaatcgcagctggcgatcttacctttatcacccttgttcctccaacaatcatcagccctattacagcagttacctttggtgcatttattggcacaaaacatcagggcacaacaactacaacaacttgtgctagcaaaccttgctgcctactctcagcaacagcagtttcttccattcaaccaactagctgcattgaactcctggctctaattggcaccaccaccacctccaatcaacccgcttacttgtggcttacccccaccaattctttca

SEQ ID NO: 90105 - DNA, 288 bp, Zea mays
ctgaattcccgggtctgcttaggttgagcaacaacaattgcttccattcaatcaactagcttgggttaaccctgctgcttacttgcaagcacgacaggtactaccattcaaccaacttgctttgacaaactcaacagtgttctaccaacaacccatcattggtagagccctctatagattgcttatgagttatagaccaataatgaatgatagctggatgatgtgagaaccgtgctataaatccatatgtgcatttctcaagcaatcgcatcaagcaacataccttta

SEQ ID NO: 90106 - DNA, 200 bp, Zea mays
aattcccgggtcgaccaggcgtccggcgcttgcggcgagcgtcttacaacaaccaattgaccaattgcaacaacaattcttgcgacatgtaacaatacaagccatcacaacgcaacagcaacaacagttcctaccagcactgagccacctagccatggtgaaccctgccgtctacttgcaagagcagctgcttgcattca

SEQ ID NO: 90107 - DNA, 490 bp, Zea mays
gaattcccgggcaacaagcaacataaaaagtggaatccagtcacaacaatagagcatccatggcgaccaagatattcaccctccggatgcgccttgctcttactacatgtgttgctaacgcgacaattttccctaaatgctcacatgctcctatagcttccattgttacaccataccttgcatcaactatagcttcaatatgtgaaaacccacctcttcaaccatatatgcttcaacaagcaatcgcagcacgcaacatacctctatcgcccttgtggtttcaacaatcgacagccttatctttggtgcagtcattggtccaaaccataagggcacaacagctgcagcaactcgtgctacctatgatcaaccaattatctctggcaaaccttcctccatactctaagcatcaacaattttttccattcaaccaactgtttacactgaaccctgctgcttatttgcaggaccaactattaccatttaccca

SEQ ID NO: 90108 - DNA, 119 bp, Zea mays
gccaatgatgggttgtcggtgccctgttttagatctcttatgagttatagttcaataggagggttttttgtctgatgtttgtggcattccagaaataagaaagtacatttctagattct

SEQ ID NO: 90109 - DNA, 451 bp, Zea mays
  unsure (1)..(451): unsure at all n locations
cggaattcccggctcgacgcacgcgtccgctccggggcatctcccaccgccggtccacctgccgccgccggtccacctgccaccggcgggccatgtgccgccgccggttcatctgccgccgccaccatgccactaccctactcaaccgccccggcctcagcctcatccccagccacacccatgcccgtgccaacagccgcatccaagcccgtgccagctgcagggaacctgcggcgttggcagcaccccgatcctgggccagtgcgtcgagtttctgaggcatcagtgcagcccgacggcgacgccctactgctcgcctcagtgccagtcgttgcggcagcagtgttgccagcagctcaggcaggtggagccgcagcaccggtaccaggcgatcttcggcttggtcctncagtccatcctgcagcagcagccgcaaagcggccaggtcgcg

SEQ ID NO: 90110 - DNA, 456 bp, Zea mays
gtttcggaattcccgggtcgacgcacgcgtccgttggcgattccatttctaccccgagactctccagccgtgcgcccctgaaccctcaggcgtggccgtcccgcctcggcactcgacggccgccggcacacaccgcgcagtctcgagacagatcccgatctcgttctgccaaccgccgagggagggttgcgctcgccggatcccgtccgagtcacgtgcggctttgattcgctgcacctgtcgtgcaggaaccggaggaacgaggatggaggatgactctccgctgacgaagacgatgaacggtgcggtgacagtactcgcctcagtgaccatctggggcaccgtcgtcgtcacctggtacgacgtgccccgtgtggagcgccacgtctcgctccatggccttatccggactctcaagatgtgcggcacctacggcgccaccttcgccaccatcgg

SEQ ID NO: 90111 - DNA, 409 bp, Zea mays
cggaattcccggctcgacgcacgcgtccgctcgagccttccatgaggaaattcgtgctggctgggggcttcagcaaggggcagccgcacgtcgccgagaacatcttcaaagggatcgacgcccggttcctgagcgaagccctgggcgtcagcatgcacgtcgccgagaagctgcagagccggcgtgaccagcgaggcgagatcgtccgcgtggagccggagcacggctttcaccagctgaatccgtcgtcgtcgtcgtcgtcgttttcgttcccatcgtcacaagtccagtaccaaacgtgccagcgcgacgtcgacaggcacaacgtctgcgccatggaagtgaagcacagcgtcgaacggctggaccaggccgacgtctacagcccttggggctggaggatcacacg

SEQ ID NO: 90112 - DNA, 427 bp, Zea mays
cggaattcccgggtcgacccagcgcgtgcggtcaccggagaagaaggtcccggagctatggttctacacagagctcaaaactaggaccagctggatggggctcgccatacgcatggacaacctgtacctcgtgggcttcaggaccccgggcggggtgtggtgggagttcggcaaggacggcgacacccacctcctcggcgacaaccccaggtggctcggcttctgcggcaggtaccaggacctcatcggcaacaagggtctggagaccgtcaccatgggccgcgccgaaatgaccagggccgtcaacgacctggcgaagaagaggacgatggcgacactgaaggaggaggaggtgcagatgcaaatgcaaatgccggaggccgttgatctggcggcggcggcagcggttgacccacaggccgacacg

SEQ ID NO: 90113 - DNA, 324 bp, Zea mays
cggaattcccgggtcgacccaggcgtccggttgcaaaccatggacatggctttggcgtgtaaagcctcccctccgccatggaatgccaccgggcgggagcagccaattccaaagcgtgacaaagccgctgcaaatgattcaacatacctcaatcctcatgctcatgatagtgctcttggaatcattctgagaggtggtgctgtgactagattgtaccctttgacaaagaagcgtgccaatgcctgcagtgccattgggtgccaactatagactgattgatatttctgtcaataattgtttgaacagcaacattttccagatcta

SEQ ID NO: 90114 - DNA, 313 bp, Zea mays
cggaattcccgggtcgacccgcgcgtccgcaactagcaacatagaaagcacaatagtgtaccaacaatggcagctaaaatattttgcctccggatgctccttggtctttctgcaagtgctgctacggcgaccattttcccacaatgctcacaagctcctatagcttcccttcttaccccgtacctctcaccaacggtgtcttcggtttgtgaaaacccaattcttcaaccttacaggatccaacaggcaatcgcagctggcatcttacctttatcacccttgttcctacaacagtcatcacccctattacagc

SEQ ID NO: 90115 - DNA, 416 bp, Zea mays
gaccagcaagcaacatagaaagtagaatccattagcaacaatagagcaacaatggcgacgaagagattttccctccttatgctccttgctctttctacatgtgttgctaacgcgacaattttccctcaatgctcacaagctcctatagcttcccttcttcccccataccttccatcaattatagcttcagtatgtgaaaacccagctcttcaaccatataggcttcaacaagcaatcgcagcaagcaacataccttaatcgcccttgttgtttaaccaatcacaacccttatcttggtgccatcattgggtccaaccaataaggcacaaccacttccaccacctcggcctacctgtatccaaccaattacttttgccaaaccttcttcctaatcttaacaaccaccatttctttca

SEQ ID NO: 90116 - DNA, 354 bp, Zea mays
  unsure (1)..(354): unsure at all n locations
accggtcctgaattcccgggctgcacgcagctatagctcgcataattaactcatgggtgcatagagatatgccgccgacgacccatatctatgggtccgtccccttgcactgcatcttcttcttcctcctnctcgacctccttcaattattcctagcgtttgcttctcccttccttgacctttgcttggaaccatcgatagttacttattgggcatggagcacgtcatctcaatgcaggagatcctcgggcccttctgggagctgctgccagcgccagcgccagatccagagccggagcagcctccggtaaccggcatcgtcgtcggcagtgtcatagacgttgctgctgctgg

SEQ ID NO: 90117 - DNA, 455 bp, Zea mays
ggaattcccgggtcgacgcacgcgtccgcccacgcgtccggcgagcgtcttacaacaaccaattgcccaattgcaacaacaatccgtggcacatctaacaatacagaccatcgcaacgcaacagcaacaacagttcctaccagcactgagccacctagccatggtgaaccctgtcgcctacttgcaacagcagctgcttgcatccaacccacttgctctagcaaacgtagttgcaaaccagcatcaacaacaactgcaacagtttctgccagcgcttagtcaactagccatggtgaaccctgccgtctacctacaacagcaacaactgctttcatctagcccgctcgctgtggccaatgcacctacatacctgcaacacgaattgttgcaacagattgtaccagctctaactcagctagctgtggcaaaccctgttgcctacattcaacagctgc

SEQ ID NO: 90118 - DNA, 427 bp, Zea mays
tcccggctcgacgcacgcgtccgcgcttgcggcgagcgtcttacaacagctaattaaccaattgcaacaacaatccttggggcatctaaccatacataccaactggcagcattgaactctcatgcttatgtacaacaacaacaactactaccattcagccagctagctgctgtgagccctgctgccttcttgacacagcaacatttgttgccgttctacctgcacactgcgcctaacgttggcaccctcttacaactgcaacaattgctgccattcgaccaacttgctttgacaaacccagcagtgttctaccaacaacccatcattggtggtgccctctattagattgcttatgagttatagttcaataataaagttctttatctgatgtatgtggctttccagatataagactgtacatttctaa

SEQ ID NO: 90119 - DNA, 368 bp, Zea mays
  unsure (1)..(368): unsure at all n locations
ccggaattcccgggtcgacccgcgcgtgcggccccaactacccncagtctcggaagagaactatccagaagcgcaagactccaaagccgtcgcgttcgtatccattccgttcttggcccggggggtcggctgagatcacatanacaatggtgaaggctgttgctgtgcttggtagcagcgatggtgtcaaggcaccaatctttttcacccaagtggaaaagggccttacaattgcaaccgaaggggcttttgccttaagccttgccttcattggtttcatgggccttcccttggtgaccccacccatggcttcatggtaactggaccacacttccattctgcgaaccagggaccttgagcccccgaag

SEQ ID NO: 90120 - DNA, 447 bp, Zea mays
  unsure (1)..(447): unsure at all n locations
aactagcaacatagaaagcacaatagtgtaccaacaatggcagccaaaatattttgcttgcttgtgctccttggtctttctgcaagtgttgctaccgcaaccattttcccacaatgctcacaagctcctatagcttcccttcttcccccatacctctcaccagcggtgtcttcaatgtgtgaaaacccaattgttcaaccctacaggatccaacaggcaatcgcaacaggcatcttaccattatcacccttgttccttcaacaaccgtcagccctattacagcagttacctttggtccatttggtggcacaaaacattanggcacaacaacttcaacaacttgtgctagcaaaccttgctgcatactctcagcaacatcagtttcttccattcaaccaactggctgcattgaactctgctgcttatttgcaacaacaattaccattc

SEQ ID NO: 90121 - DNA, 351 bp, Zea mays
ttcccgggtcgacccgcgcgtccgttcagctctgcaggcagctgaacaagccggtcatcgtcgcctcccagctcctcgagtcgatgagagagtaccccacgcccaccagggccgaggtcgcggacgtctccgaagccgtccgccagcgcgccgacgccctgatgctttccggcgagtcggcaatggggaggtacccggacaaggccctcagcgttctgaggagcgtcagcctgaggatcgagaagtggtggagggaggagaagcgtcacgaggcccttgaacttccgaacgtcttgtccttcttcttcgaccagatatcggaggagatcttcaactcaacggcttaaatgg

SEQ ID NO: 90122 - DNA, 494 bp, Zea mays
tccggaattcccgggtcgagccgcgcgtccgcggtgacagccgcgggatttcaacacccagctatacaatcctacatgctacatgaggccatcggagcaagcatcttacgggcgttagcattaaccctccaacagccatatgccctattgcaacaaccatccttagtgcatctgtatctccaaagaatcgcgacacaacaactacaacaacagttgctaccaacaatcaatcaagtagttgcagcgaaccttgctgcttatctccagcaacaacaatttcttccattcaatcaactagctggggtgaaccctgctggctacttgcaagcacaacaactactaccatttaaccaacttgtcgggagccctgatgccttcttactgcaacaacagcttctgccattccatctgcaagctgtggaaaacattgcttctttcttgcgacaacaacaattgttgccattttacccacaggttgtgggaaacattaatgc

SEQ ID NO: 90123 - DNA, 398 bp, Zea mays
  unsure (1)..(398): unsure at all n locations
ccggtcctgaatttccgggtcgacccgcgcgtncggaccaccaagcaacatagaaagtggaatgcattaccaacaatagagcaacaatggcggccaggggattttccatccttatgctccttgctctttctgcatgtgttgctaacgcaaccatttttcctcaatactcacaagctcctatagctgcccttcttcccccataccttccatcaatgaccgcttcaatttgtaaaaacccaacccttaaaccttacaggctccaaccagccattcgaaccaggcactttacctttatcacccctgttttttaaacaatcgccacccctatctttggtgcagtcattggcacaaaccatcggggcacaacagttgcaacaacttgcgctaccagttatcac

SEQ ID NO: 90124 - DNA, 355 bp, Zea mays
accggtccggaattcccgcggaaaccttccgcaaccgggtctttcgtattggaaaacccaattttttaacccttccagatccaaccgggcagtccaacttgcattttaaccttaataaccttggttcttccaccatcattaaccctattacagcaagtacctttggtgcatttattggcacaaaacatcagggcacaacaactacaacaacttgtgctagcaaaccttgctgcctactctcagcaacagcagtttcttccattcaaccaactagctgcattgaactctgcttcttatttgcaacaacaacaactaccattcaaccagctaccttgtgcctacccccaacaatttc

SEQ ID NO: 90125 - DNA, 56 bp, Zea mays
cagaccattagctttatctactccagagcgcagaagaacccgatcgacaccatgag

SEQ ID NO: 90126 - DNA, 405 bp, Zea mays
caacaagcaacatagaaagtggaatacagtagcaaaaatagagcaacaatggcgggcaggatattttccatccttatgctccttgctctttctgcatgtgttgctaacgcgaccatttttcctcaatactcacaagctcctatagctgcccttcttcccccataccttccatcaatgaccgctttagtatgtgaaaacccagcccttcaaccctacaggatccagcaagcaatcgcaacaagcaacttacctttatcacacctgttctttcaacaatcgccagccctatctttggtgcagtcattggtacaaaccatcagggcagaacagttgcagcaactcgtgctaccagtgatcagccaagtagctctggcaaacctttccccctactctcagcaacaacaa

SEQ ID NO: 90127 - DNA, 425 bp, Zea mays
ctttctacatgtgttgctaacgcgacaattttccctcaatgctcacaagctcctatagcgtcccttcttcccccataccttccatcaattatagcttcaatatgtgaaaacccagctcttcaaccatataggcttcaacaagcaatcgcagcaagcaacatacctttatcgcccttgttgtttcaacaatcgccagccctatctttggtgcagtcattggtacaaaccatcagggcacaacagctgcagcaactcgtgctacctctgatcaaccaagtagctctggcaaacctttctccctactctcagcaacaacaatttcttccattcaaccaactgtctacactgaaccctgctgcttatttgcagcaacaactattaccatttagccagctagctactgcctactctcagcaacaacaact

SEQ ID NO: 90128 - DNA, 428 bp, Zea mays
cgcatgcgcaggtagcaacatagaaagcacaatagtgtaccaacaatggcagccaaaatagggggcggccttatgctccttgggctttctgcaagtgctgctacggcgaccattttcccgcaatgctcgcaagctcctatagcttcccttcttcccccgtacctctcaccagcggtgtcttcggtatgtgaaaacccaattcttcaaccctacaggatccaacaggcaatcgcagctggcatcttacctttatcacccttggtcctccaacaatcatcagccctattacaacagttacctttggtgcatttattggcacataacatcagggcacaacaactacaacaacttgtgctagcaaaccttgctgcctactctcagcaacagcagtttcttccattcaaccaactaggttcattgaactctgc

SEQ ID NO: 90129 - DNA, 452 bp, Zea mays
gaattcccgggtcgaccgacgcgtccgcagggcaaacaagtagcgacagctcgactaagatttgtgagagtgatccggcgctgaggagagatggctaagatcgccggagccgccgcggcggcggcggcgctgtgcttcgcggccctggtggccgtggccgtctgccaaggcgaggtcgagcggcagaggctcagggacctgcagtgctggcaggaggtccaggagagcccgctcgacgcgtgccgccaggtcctcgaccggcagctaaccggcggcggcgtcggcggcccgttccggtggggcaccgggctccggatgcggtgctggcagcagctccaggacgtgagccgcgagtgccgctgcgccgccatccggagcatggtcaggggctacgaggaggccatgccgcctctggagaaaggctggtggccatgggggcggcagcagcagcc

SEQ ID NO: 90130 - DNA, 396 bp, Zea mays
gaccaactagcaacatagaaagctcaatagtgtaccaacaatggcagccaaaatattgtgcctccttatgctccttggtctttctgcaagtgctgctacggcgaccattttcccgcaatgctcgcaagctcctatagcttcccttcttcccccgtacctctcaccagcggtgtcttcggtatgtgaaaacccaattcttcaaccctacaggatccaacaggcaatcacagctggcatcttacctttatcacccttgtccttcaacaatcattaaccctattacattaagtacctttggtgcatttattggcacataacatcagggcacaacaactacaacaacttgtgctagcaaaccttgctgcctactctcagcaacagcagtttcttccattc

SEQ ID NO: 90131 - DNA, 329 bp, Zea mays
gcaacatagaaagcacaatagtgtaccaacaatggcagccaaaatattttgcttccttgatgctccttggtctttctgcaagtgttgctaccgcaaccattttcccacaatgctcacaagctcctatagcttcccttcttcccccatacctctcaccagcggtgtcttcaatgtgtgaaaccccaattgttcaaccctacaggatccaacaggcaatcgcaacaggcatcttaccattatcacccttgttcctccaacaaccgtcagccctattacagcagttacctttggtccatttggtggcacaaaacatcaaggcacaacaacta

SEQ ID NO: 90132 - DNA, 392 bp, Zea mays
  unsure (1)..(392): unsure at all n locations
ccggtttcggaattcccgggtgcgacccacgcgtnccggtaagacgacacacattatcattgtgtggtatagaccaataatatatagcatcataataagagttctggttgttaaagagaaaaaaaagaaaaaaaaaagaaaaaaaaagaaaacaaaaaataaaaaaacaaaaaataaaataaaaataaattaaaaaataacataaacaacagaggagaaaatcaatgaagaaaaaaaacaatagatcaatccatacaggatccaacaggcaataagcaacaagcatcttaccattatcacccttgttcctacaacaaccgtaacaccttattacagcagttacattaggtacatgggatgagacaaaacatcatggcacaacatctacaaca

SEQ ID NO: 90133 - DNA, 192 bp, Zea mays
attatcactcttgttcctccaacaaccgttagccctattacagcaggtagccttagttcattatgtggcacaaaacatcagggcacaactactacaacaacttgtgctagcaaaccttgctgcatactctcagcaacatcagagctttccattcaaccaactggctgcattgaactctgatacttatttgca

SEQ ID NO: 90134 - DNA, 379 bp, Zea mays
  unsure (1)..(379): unsure at all n locations
cagatcaaacaagtagcgacagctcgacanagattggtgagagtgatccggccctgaggagggatggctaaaatcgccgcagccgccgcggcggcggcggcgctgtgcttcgcggccctggtggccgtggccgtctgccaaggcgaggtcgagcggcagaggctcagggacctgcagtgctggcaggaggtccaggaaagcccgttcgacgcgtgccgccaggtccttgaccggcagctaaccggcggcggcgtctgcggcccgttccggtggggcaccgggctccggatgccgagctgccagcagctccaggacgtgagccgcgagtgccgttgcgccgccatccggagcatggtcaggggctacgaggaggccatgc

SEQ ID NO: 90135 - DNA, 380 bp, Zea mays
gcaattagctcatcgactccagattggagaactcgacaccatgaaggtgctgatcgggggccttgctctcctggcgctcgctgcgagcgccgcctccagtacaagcggcggctgcggctgccagacaccaccgtttcatctaccgcctccgctctatatgccgcctccgttctatctgccgacgcagcagcagccgcagccatggcaataccccactcaaccaccgcagctaagcccgtgccagcagttcggatcctgcggcgtcggcagcgtcggcagcccgttcctgggccagtgcgtcgagttcctgaggcaccagtgcagcccggcggcgacgccctacggctcgccacagtgccaggcgctgcagcagcagtgct

SEQ ID NO: 90136 - DNA, 413 bp, Zea mays
cggaattcccgggtcgaccgacgcgtccgcaccaagcgaagctacctagcaacgacttaacaacaatggctaccaagatattagcccggcgtgcgcttcttgccctttttgtgagcgcaacaaatgcgttcattattccacaatgctcacttgctcctagtgccattataccacagttcctccgaccagttacttcaatgggcttcgaacacctagctgtgcaagcctacaggctacaacaagcgcttgcggcgagcgtcttacaacaaccaattaaccaattgcaacaacaatccttggcacatctaaccatacaaaccatcgcaacacaacagcaacaacagttcctaccagcactgagccaactagatgtggtgaaccctgtcgcctacttgcaacagcaggtgcttgca

SEQ ID NO: 90137 - DNA, 411 bp, Zea mays
  unsure (1)..(411): unsure at all n locations
ccgacggcgacgccctactgctcgcctcagtgccagtcgttgcggcagcagtgtggccagcagctcaggcaggtggagccgcagcaccggtaccaggcgatcttcggcttggtcctccagtccatcctgcagcagcagccgcaaagcggccaggtcgcggggctgttggcggcgcagatagcgcagcaactgacggcgatgtgcggcctgcagcagccgactccatgcccctacgctgctgccggcggtgtcccccactgaagaaactatgtgctgtagtatagccgctggctagctagctagttgagtcatttagcggcgatgattgagtaataatgtgtcacgcatcaccatgggtggcagtgtcagtgtgagcaatgacctgaatgaacaattganatgaaaagaaaa

SEQ ID NO: 90138 - DNA, 433 bp, Zea mays
accggttcggaattcccgggctgccagccaccgccgccggttcatctaccgccgccggtgcatctgccacctccggttcacctgccacctgcggggcatctcccaccgccggtccacctgccgccgccggtccacctgccaccgccggtccatgtgccgccgccggttcatctgccgccgccaccatgccactaccctactcaaccgccccggcctcagcctcatccccagacacacctatgcccgtgccaacagccgcatccaagcccgtgccagctgcagggaacctgcggcgttggcagcaccccgatcctgggccagtgcgtcgagtttctgaggcatcagtgcaacccgacggcgacgccctactgctcgcctcagtgccagtcgttgcggcagcagtgttgccagcagctcaggcaggtgaagccga

SEQ ID NO: 90139 - DNA, 432 bp, Zea mays
cgcacggagcgaagctacctagcaacgacttatcatcaatggctaccaagatattactccggctggctcttattgccgggtgtgtgagcgcaacaaatgcgttcattattccacaatgctcacttgctcctagtgccattataccacagttcctccgaccagttacttcaatgggcttctaacacctagctgtgcaagcctacaggctacaacaagcgcttgcggcgagcgtcttacaacaaccaattaaccaattgcaacaacaatccttggcacatctaaccatacaaaccatcgcaacacaacagcaacaacagttactaccagcactgagccaactagatgtggtgaaccctgtcgcctacttgcaacaacaggtgcttgcatccaacccacttgctctggcaaacgtagctgcataccaacaacaac

SEQ ID NO: 90140 - DNA, 388 bp, Zea mays
tcccgaatcgaccgaaccgactccaccaaccgatactacataacctccactttacataactcgacaccatgaaattactcctgcttgccctatatcacctgtcgctcacctcaacaaatgcctccattacaccacaatgctcactctctcatacaccaattatacctcaactgcttccaccatatactctcaactaccttctatcacctagctcagcaaccctacaaaccataacaagcgcttactgaacaacttcatacaacaaccaactcaccaattccaacaccaatccttggcacatctaaccataccaacactatcaccacaccagcaacaactgatgctaccatcaactgaccaactaaatgtctacaaccctgtacactac

SEQ ID NO: 90141 - DNA, 399 bp, Zea mays
gcaggcaggtcggcgaggagggcaggaagaccgaagaccgagccgtgcgggggctcgggacgggaacgggacaggaccccaaaatctcagatccttcctgcccgcccgcccgtgcccgtcgacgcgtcgttcttgccggccgcgcctcacctccgccctctcctcctccagggggatcggatacgccacaggctgcgcgatggtgctgtgggtcttcggctacggctccctcatctggaaccccggcttcgacttcgacgacaaaatcctcggcttcatcaagggctacaagcgcacctttaatctcgcttgcattgaccacagaggcacaccggagcatccggcgaggacctgcacgcttgaaaccgacgacgaggccatatgctggggaattgcata

SEQ ID NO: 90142 - DNA, 448 bp, Zea mays
ccggcgctttatctactccagagcgcagaagaacccgatcgacaccatgagggtgttgctcgttgccctcgctctcctggctctcgctgcgagcgccacctccacgcatacaagcggcggctgcggctgccagccaccgccgccggttcatctaccgccgccggtgcatctgccacctccggttcacctgccacctccggtgcatctcccaccgccggtccacctgccgtcgccggtccacctgccaccgccggtccatgttgccgccgccggtcatctgccgccgccaccatgccactaccctactcaaccgccccggcctcagcctcatccccagccacacccatgcccgtgccaacagccgcatccaagcccgtgccagctgcagggaacctgcggcgttggcagcaccccgatcctgggccagtgcgtcgagttcctgaggcat

SEQ ID NO: 90143 - DNA, 418 bp, Zea mays
  unsure (1)..(418): unsure at all n locations
caaccaattaaccaattgcaacaacaatccttggcacatctaaccatacaaaccatcggaacacaacagcaacaacagttcctaccagcactgagccaactagatgtggtgaaccctgtcgcctacttgcaacagcaggtgcttgcatccaacccacttgctctggcaaacgtagctgcataccaacaacaacaacaattgcaacagtttctgccagcgctcagtcaactagccatggtgaaccctgccgcctacctacaacagcaacaactgctttcatctagccctctcgttgtgggtaatgcacctacatacctgcaacaacaattgctgcaacagattgtaccagctctgactcagctagctgtggcaaaccctgctgcctacttgcaacagctgcttncattcaaccaactga

SEQ ID NO: 90144 - DNA, 386 bp, Zea mays
ggcaggtggagccgcagcaccggtaccaggcgatcttcggcttggtcctccagtccatgctgcggcagcagccgcaaagcggccaggtcgcggggctgttggcggcgcagatagcgcagcaactgacggcgatgtgcggcctgcagcagccgactccatgcccctacgctgctgccggcggtgtcccccactgaagaaactatgtgctgtagtatagccgctggctagctagctagttgagtcatttagcggcgatgattgagtaataatgtgtcacgcatcaccatgggtggcagcgtcagtgtgagcaatgacctgaatgaacaattgaaatgaaaagaaaaaagtattgttccaaaaaaaaatgctgactactctcaacaaca

SEQ ID NO: 90145 - DNA, 447 bp, Zea mays
  unsure (1)..(447): unsure at all n locations
ggaattcccgggtcgaccgcacgcgtccggaccaactagcaacatagaaagcacaatattgtaccaataatggcagccaaaatatttggccgcattatgctccttggtctttctgcaagtgctgctacggcgagcattttcccgcaatgctcacaagctcctatagcttcccttcttcccccatacctctcaccagcgatgtcttcagtatgtgaaaatccaattcttctaccctacaggatccaacaggcaatcgcagcaggcatcttacctttatcacccttgttcctccaacaatcatcagccctattacagcagttacctttggtgcatttattggcacaaaacatcagggcacaacaactacaacaactcgtgctagcaaaccttgctgcctactctcagcaacagcagttacctttggtgcatntgttggcacaaaacatc

SEQ ID NO: 90146 - DNA, 146 bp, Zea mays
gtgtcaagaaggtagcagggctcacaccagctagctggctgaatggtagtagttgttggtgctgtaaataagcaggagagttcaataataaagttttttgtctgatgtttgtggcttcccagaaataagaaagtacatttctagat

SEQ ID NO: 90147 - DNA, 455 bp, Zea mays
ggaattcccgggtcgaccgacgcgtccgattgtgagcattcagaaacacacctagcgtaacgcactagcaacgacctaacaacaatggctgtcaaaacattatccctgcttgcgcttcttgccctttttgtgagtgcaacaaatgcgttcattattccacaatgctcacttgctccgagtgccattattccacagttcctccctccagttacttcaatgggcttcgaacacccagctgtgcaagcctataggctacaacaagcgcttgcggcgagcgtcttagaacaaccaattgcccaattacaacaacaatccttggcacatctaaccatacaaaccatcgcaacgcagcagcaacaagcactgagccacctagccgtggtgaaccctatcgcctacttgcaacaacagctgcttgcatccaacccacttgctttggcaaacgtagctgcata

SEQ ID NO: 90148 - DNA, 420 bp, Zea mays
attgagaccaactagcaacatagaaagcacaatagtgtaccaacaatggcagccggaagattttgcttccttatgctccttggtctttctgcaagtgctgctaccgcaaccattttcccacaatgctcacaagctcctatagcttcctttcttcccccatacctctcaccagcggtgtcttcagtatgtgaaaacccaattcttcaaccctacaggatccaacaggcaatcgcagcaggcatcttacctttatcacccttgttccttcaacaaccgtcagccctattacagcagttacctttggtgcatttgttggcacaaaacatcaaggcacaacaactacaacaacttgtgctaggaaaccttgctgcctactctcagcaacagcagtttcttccattcaaccaactggctgcattg

SEQ ID NO: 90149 - DNA, 442 bp, Zea mays
accggttcggaattcccgggtgagaccaactagcaacatagaaagcacaatagtgtaccaacaatggcagccaaaatattttgcctccttatgctccttggtctttctgcaagtgctgctacggcgaccattttcccgcaatgctcgcaagctcctatagcttcccttcttcccccgtacctctcaccagcggtgtcttcggtatgtgaaaacccaattcttcaaccctacaggatccaacaggcaatcacagctggcatcttacctttatcacccttgttcctccaacaatcatcagccctattacatcagttacctttggtgcatttatggcacaaaacatcaaggcacaacaactaccacaacttgtgctagcaaaccttgctgcctactctcagcaacagcagtttcttccattcaaccaactagctgcattgaactc

SEQ ID NO: 90150 - DNA, 425 bp, Zea mays
gagaccaacaagcaacatagaaagtggaatacagtagcaacaatagagcaacaatggcggccaagatattttccatccttatgctccttgctctttctgcatgtgttgctaacgcgaccatttttcctcaatactcacaagctcctatagctgcccttcttcccccataccttccatcaagcaatcgcaacaagcaacttacctttatcacccctgttctttcaacaatcgccagccctatctttggtgcagtcattggtacaaaccatcagggcacaacagctgcaacaactcgtgctaccagtgatcagccaagtagctctggcaaacctttctccctactctcagcaacaacaatttcttccattcaaccaactgtctacactgaaccctgctgcttatttacaacaaccacaactactacc

SEQ ID NO: 90151 - DNA, 415 bp, Zea mays
caattaccaccctgagcactggcagccttcatggagtgtccgcacagctttggtagcggtgattgccttcatgccgacgaacccaggtggggcattgggctcactggattacaaaccagaagacagacgagcacttgctataaaatcacgtgaggtgccgccgaaatttggctccccacaacgtcagaaactaattgatgagatccatgagcaaatgctcagtaaggctcctcctatcccccaaacgctgccaaatgtgccaaacgaggagctcgcacctgactcttgtgatgagcatgcagacaaggtagatgaaagtggcaacacatccaagtccatgtcaggctcgtcgagtggccatcctgtgcctgaagctgaatcgctggctgcagaaaacacgggtgaagcatcagca

SEQ ID NO: 90152 - DNA, 422 bp, Zea mays
cgaagctacctagcaacgacttaacaacaatggctaccaagatattagccctccttgcgcttcttgccctttttgtgagcgcaacaaatgcgttcattattccacaatgctcacttgctcctagtgccattataccacagttcctccgaccagttacttcaatgggcttcgaacacctagctgtgcaagcctacaggctacaacaagcgcttgcggcgagcgtcttacaacaaccaattaaccaattgcaacaacaatccttggcacatctaaccatacaaaccatcgcaacacaacagcaacaacagttcctaccagcactgagccaactagatgtggtgaaccctgtcgcctacttgcaacagcaggtgcttgcatccaacccacttgctctggcaaacgtagctgcataccaacaacaa

SEQ ID NO: 90153 - DNA, 270 bp, Zea mays
gccagctagctggtgtgagccctgctaccttcttgacacaaccacagttgttgccggggtaccagcacgctgcgcctaacgctggcaccctcttacaactgcaacaattgctgccattcaaccaacttgctttgacaaacccagcagcattctaccaacaacccatcattggtggtgccctcttttagatttcttatgagttatagttcaataataaagttttttgtctgatgtttgtggcttcccagaaataagaaagtacatttctag

SEQ ID NO: 90154 - DNA, 401 bp, Zea mays
cagcattcaaaaacacaccaagctaagcgcactagcaacgacctaacaccaatggctaggaagatattagccctgcttgcgcttcttgcccttttagtgagcgcaacaaatgcgttcattattccacagtgctcacttgctcctagtgccagtattccacagttcctcccaccagttacttcaatgggcttcgaacatccagccgtgcaagcctacaggctacaactagcgcttgcggcgagcgccttacaacaaccaattgcccaattgcaacaacaatccttggcacatctaaccctacaaaccattgcaacgcaacaacaacaacaacagtttctgccatcactgagccacctagccgtggtgaaccctgtcacctacttgcaacagcagctgcttgc

SEQ ID NO: 90155 - DNA, 363 bp, Zea mays
agcattcagaaacacacctagcgtagcgcactagcaacgacctaacaacaatggctacgagagatattatccctctttgcgcttcttgccctttttgtgagcgcaacaaatgcgttcattattccacaatgctcacttgctcctagtgccattattccacagttcctccctccagttacttcaatgggcttcgaacacccagctgtgcaagcctacaggctacaacaagcgcttgcggcgagcgtcttacaacaaccaattgcccaattacaacaacaatccttggcacatctaacccttccaaacattggaacggaaccggcaccaccatttctaccagcactttgcccaatatatttgggg

SEQ ID NO: 90156 - DNA, 338 bp, Zea mays
  unsure (1)..(338): unsure at all n locations
tgcgctctcttgcaccctttttagtgagcgccaacaaatgcccgttcattaatctccacaatggctcactatgcttcctagttgccattattctcacaagttcctcctctccagttaccttcaatgggncttgcgaacactccatgctgtgcaaagcctacanggctatcaacatagcgcttgcgagcgagccgtcttacaacaactcaatttgcccaattacaacaacaatnccttggcacatctaaccatacaaaccatcgcaacgcaacagcaacaacaatttctaccagcactgagccaactagctgtggtgaaccctgtcgcctacttgcaac

SEQ ID NO: 90157 - DNA, 424 bp, Zea mays
caatagtgtaccaacaatggcagccaaaatattttgcctccttatgctccttggtcttgctgcaagtgctgctacggcgaccattttcccgcaatgctcgcaagctcctatagcttcccttcttcccccgtacctctcaccagcggtgtcttcggtatgtgaaaacccaattcttcaaccctacaggatccaacaggcaatcacagctggcatcttacctttatcacccttgttcctccaacaatcatcagccctattacatcagttacctttggtgcatttattggcacaaaacatcagggcacaacaactacaacaacttgtgctagcaaaccttgctgcctactctcagcaacagcagtttcttccattcaaccaactagctgcattgaactctgcttcttatttgcaacaacaacaacta

SEQ ID NO: 90158 - DNA, 410 bp, Zea mays
ggctaccaagatattagccctccttgcgcttcttgccctttttgtgagcgcaacaaatgcgttcattattccacaatgctcacttgctcctagtgccattattccacagttcctcccaccagttacttcaatgggcttcgaacacctagctgtgcaagccaacatgcaacaacaagcgcttgcggcgagcgtcttacaacaaccaattgcccaattgcaacaacaatccttgccacatctaacaatacaagccatcacaacgcaacagcaacaacagttcctaccagcactgagccacctagccatggtgaaccctgccgcctacttgcaagagcagctgcttgcatccaacccacttgctctggcgaacgtagttgcaaaccagcaacaacaacagctacaacagtttc

SEQ ID NO: 90159 - DNA, 278 bp, Zea mays
cgcagggcgagctcgcggcgctgatggcggcccaggtagcgcagcagctgacggcgatgtgcggcctgcagctgcagcagccaggtccctgcccttgcaacgcagctgccggcggtgtctactactgaggaaactatgactgataataatgtaatggagccgtgactagctactactcgctagttactatacggcagatacgatgtaccatacatggtgcaggtagcatgactgatgaccatgaatgaaaggaatattataggaaaaaagatgaatgg

SEQ ID NO: 90160 - DNA, 450 bp, Zea mays
ggaattcccgggtcgaccgacgcgtccgagcatatggatgggtcgtgtgtactatgtatttgggttcctcttcgtcgtcttgctgcgcctggttattgtctgtgctgaggtttccctggttctaacttacatgcacctgtgtgttgaggattggaagtggtggtggaagtcattcttctcatctggatcggtggcaatctacattttcttgtactccatcaactatcttgtttttgacctcaaaagcttgagtgggccagtgtctgctaccctctacatcggttactcactcttcatggtgattgctatcatgctggcaactggcacagttgggtttatttcttcattctgctttgtccactatcttttctcatcggtgaaagcagattaagtttcttcctgctgaggattcaagtcactcaattgagaggtgagcagaatggacagtga

SEQ ID NO: 90161 - DNA, 511 bp, Zea mays
ggaggaggtcgtcctacgaccaggagatagcaggctctaccggtctcggaattcccgggtcgacgcacgcgtccgggcggcgcagatagcgcagcaactgacggcgatgtgcggcctgcagcagccgacggcaggcccctacgctgctgccggcggcgtcccccactgaagaaactatgcgctgaagtatagccgctggctagctagctagttgagtcatttagcggcgatgattgagtaataatgtgtcacgcatcaccatgggtggcagggtcagcgtgagcaatgacctgaatgaacaattgaaatgaacagaaataataaaccactatacataaagcatacctatggagcataaatagacacaaagcatcaaagacactacaactacaacaacaaggggcggccgatcctagggacccaatcttagctacccgtgcttgcaacgatataccttttatattgcgttacccaaagccaattaactggcccaacttttacaacgattcac

SEQ ID NO: 90162 - DNA, 391 bp, Zea mays
gacgatgccagtgatgatgccacagatgatgacgcctaacatgatgtcaccattgatgaggcggagcatgatgtcaccaatggtcttgccgagcatgatgtcgcaaatgatgatgccacaatgtcactgcgacgccgtctcgcagattatgctgcaacagcagttaccattcatgttcaacccaatggccatgacgattccacccatgttcttacagcaaccctttgttggtgctgcattctagatagaaatatttgtgttgtatcgaataatgagttgacatgccaaaacaaaaacctgatgcctaccaccaacaataacttccattcaaccaactggcagcaattgaactatcctgcttatttacagcagcaacaaactactaccattc

SEQ ID NO: 90163 - DNA, 158 bp, Zea mays
ggaattcccgggatgttcagcattcaaaaacagcaccaagcgaagcgcactatcaacttcctaacaccaatggctaccaagatatgagccctccttgcgcttcttgcccttttagtgagcgcaacaaatgcgttcattattccacagtgctcacttgc

SEQ ID NO: 90164 - DNA, 414 bp, Zea mays
  unsure (1)..(414): unsure at all n locations
gtgaagtacactagcaacatcttagcaccaatgggagccaagattttttccctccttgccctccttgctctttcagcaagcgctgctacctctactattattccacaatgctcacaacaatacctctctccggtgacagccgcgggatttcaacacccaactatacaatcctacatgctacatgaggccatcgtagcaagcatcttacggtcattagcattaaccctccaacagccatatgccctattgcaacaaccatccttagtgcatctgtatctccaaagaatcgcgacacaacaactacaacaacagttgctaccaacaatcaatcaagtagttgcagcgaaccttgctgcttatctncagcaacaacaatntcttccattcaatcaactagctggngtgaaccctgct

SEQ ID NO: 90165 - DNA, 366 bp, Zea mays
cccacgcgtacgggttggcttcttctccccctgcggttcgggttcgggttcgtgaggggcttcggtgttcggtttggtgggtgagcggatcgagatggcggcgtcagatgttgagtaccgatgcttcgtcggcggcctcgcctgggccacggacgaccactctctacacaacgccttcagcacctacggcgaggtcctcgagtccaagatcatcctcgatcgggagacgcagaggttccgcggcttcggcttagtcaccttctccacggaggaggcgatgcggaacgccatcgagggcatgaacggcacggagctggacggccgtaacatcaccgtcaacgaggcccagtcccgctgatgtcgtgg

SEQ ID NO: 90166 - DNA, 419 bp, Zea mays
gtttagtcctatacgctccaacatgctatcacaggaagcaacatacctcaattaccgtggttgattcaacactcgacaaccctatctacgttgcagctcattgttacaaaccatctagtcacaacgcctgcaccaactcgtgctacctgtgaacaaccaagtagatcttgctaacctttctgcttactctgagcagcaacaatctcttctattcaaccaactgtctacactgaaccctgctgcttatttgcatcatcaactattaccattgaatcatctagctactgtatactctcagcaactacaacttcttccatgtaaccaattggtcacactgaaccccactgcttatttgcagcatcaaatactactaccatgtagccagctagctgcagcaaaccgtgcttccttctttacac

SEQ ID NO: 90167 - DNA, 379 bp, Zea mays
  unsure (1)..(379): unsure at all n locations
gcctagcaattagctcatcgactccagattggagaactcgacaccatgaaggtgctgagcggtgcccttgctctcctggcgctcgctgcgagcgccgcctccagtacaagcggcggctgtggctgccagacaccaccgtttcatctaccgcctccgttctatatgccgnctncgttctatctgccgncgcagcagcagccgcagccatggcaataccccactcaaccaccgcagctaagcccgtgccagcagttcggatcctgcggcgtcggcagcgtcggcagcccgttcctgggccaatgcgtcgagttcctgaggcaccagtgcaacccggcggcgacgccctacggctcgccacagtgccaggcgctgcagcagc

SEQ ID NO: 90168 - DNA, 409 bp, Zea mays
aggtgctgggcgacaaggtggagaaggtggtggtctccgaccgcgtggtggactgcccgtgctgcctggtgaccggcgagtacggttggaccgccaacatggagcggatcatgaaagcccaggcgctgagggactccagcatgtctgggtacatgtcctccaagaagacgatggagatcaaccccgagaacgccatcatggaggagctccgcaagcgtgccgaggctgacaagaacgacaagtccgttaaggaccttgtcatgctgctgttcgagacggcgctgctcacttctggctttagcctcgacgatcccaacacctttggcagccgcatccaccgcatgctcaagctgggcctgagcatcgacgaggacgaggaagctccggaggctgacaccgacatgccccc

SEQ ID NO: 90169 - DNA, 311 bp, Zea mays
gagaccaacaagcaacatagaaagtggaatccagtagcaacaacagagcaacaatggcgaccaggatattttccctccttatgctccttgctctttctgcatgtgttgctaacgcgacaattttccctcaatgctcacaagctcctatagcttcccttcttcccccataccttccatcaatgatagcttcagtatgtgaaaacccagctcttcagccctataggctccaacaagcaatcgcagcaagcaacatacctttatcacccttgttgtttcaacaatcgccagccctatctttggtgcagtcattg

SEQ ID NO: 90170 - DNA, 427 bp, Zea mays
tagcaacatagaaagcacaatagtgtaccaacaatggcagccaaaatattttgcttccgtatgctccttggtctttctgcaagtgttgctaccgcaaccattttcccacaatgctcacaagctcctatagcttcccttcttcccccatacctctcaccagcggtgtcttcaatgtgtgaaaccccaattgttcaaccctacaggatccaacaggcaatcgcaacaggcatcttaccattatcacccttgttcctccaacaaccgtcagccctattacagcagttacctttggtccatttggtggcacaaaacatcagggcacaacaactacaacaacttgtgctagcaaaccttgctgcatactctcagcaacatcagtttcttccattcaaccaactggctgcattgaactctgctgcttatttgc

SEQ ID NO: 90171 - DNA, 404 bp, Zea mays
  unsure (1)..(404): unsure at all n locations
attagctcatcgactccagattggagaactcgacaccatgaaggtgctgatcgttgccgttgctctcctggcgctcgctgcgagcgccgnctncagtacaagcggcggctgtggctgccagacaccaccgtttcatctaccgccttcgttctatatgccgcctccgttctatctgccgccgcagcagcagccgcagccatggcaataccccactcaaccaccgcagctaagcccgtgccagcagttcggatcctgcggcgtcggcagcgtcggcagcccgttccttgggccagtgcgtcgagttcctgaggcaccagtgcagcccggcggcgacgccccaacggttggccacagtgccaggcgctgcagcagcagtgctggcaccagatcaggcaggtggagcc

SEQ ID NO: 90172 - DNA, 432 bp, Zea mays
attttgagcattcagaaacacaccaagcgaagcacattagcaacaacctaacaacaatggctaccaagatattatccctccttgcgcttcttgcgctttttgcgagcgcaacaaatgcgttcattattccacaatgctcacttgctccaagttccattattacacagttcctcccaccagttacttcaatgggcttcgaacacccagctgtgcaagcctataggctacaacaagcaattgcggcgagcgtcttacaacaaccaatttcccagttgcaacaacaatccttggcacatctaacaatacaaaccatcgcaacgcaacagcaacaacaattcctaccagcactgagccacctagccatggtgaaccctgccgcctacttgcaacagcagttgcttgcatcaaacccacttgctctggcaaacgtaa

SEQ ID NO: 90173 - DNA, 433 bp, Zea mays
gaaagcacaatagtgtaccaacaatggcagccaaaatattttgcttccttatgctcctgggtctttctgcaagtgttgctaccgcaaccattttcccacaatgctcacaagctcctatagcttcccttcttcccccatacctctcaccagcggtgtcttcaatgtgtgaaaccccaattgttcaaccctacaggatccaacaggcaatcgcaacaggcatcttaccattatcacccttgttcctccaacaaccgtcagccctattacagcagttacctttggtccatttggtggcacaaaacatcaaggcacaacaactacaacaacttgtgctagcaaaccttgctgcatactctcagcaacatcagtttcttccattcaaccaactggctgcattgaactctgctgcttatttgcaacaacaattaccatt

SEQ ID NO: 90174 - DNA, 428 bp, Zea mays
gcaacatagaaagcacaatagcgtaccaacaatggcagccaaaatattttgcctcctggtgctccttggtctttctgcaagtgctgctacggcgaccattttcccgcaatgctcgcaagctcctatagcttcccttcttcccccgtacctctcaccagcggtgtcttcggtatgtgaaaacccaattcttcaaccctacaggatccaacaggcaatcacagctggcatcttacctttatcacccttgttcctccaacaatcatcagccctattacatcagttacctttggtgcattcattggcacaaaacatcagggcacaacaactacaacaacttgtgctagcaaaccttgctgcctactctcagcaacagcagtttcttccattcaaccaactagctgcattgaactctgcttcttatttgcaac

SEQ ID NO: 90175 - DNA, 432 bp, Zea mays
  unsure (1)..(432): unsure at all n locations
cggaattcccgggtcggacccacgcgtcccggcaacattagaaagcacaatagtgtaccaacaatggcagccaaaatattttgcttccttatgctccttggtctttctgcaagtgttgctaccgcaaccattttcccacaatgctcacaagctcctatagcttcccttcttcccccatacctctcaccagcggtgtcttcaatgtgtgaaaccccaattgttcaaccctacaggatccaacaggcaatcgcaacaggcatcttaccattatcacccttgttcctccaacaaccgtcagccctattacagcagttacctttggtccatttggtggcacaaaacatcanggcacaacaactacaacaactngtgctagcanaccttgctgcatactctcagcaacatcaagttcttccattcaaccaaactgct

SEQ ID NO: 90176 - DNA, 426 bp, Zea mays
gtcaaaagtgttgggtcatctattgcgatgcatattgttgcggcaaagccattattctgatcggaagaactggtttctgcttcggctttagaaaatgagcgtgaaatacttcgaactcaggcccaaagttcagggaaatcccaaatggctatggataagatggtggaaggacgattgaggaagtactttgaggaagttgtgctcatggagcaaaaatatgttttaaatgacagcactaacattaagaccgtgctgaatgacttgtcgaaagaagttggttctaaagtaacaatcggtaacttcatcagaatggaagttggcgaaaggattgagagaactgaagccgctgatggtttaaaagttgctggtggcgctatgtagattccaagcagagatggttcgaacgagatcattaggatctatatg

SEQ ID NO: 90177 - DNA, 426 bp, Zea mays
cagaaacacacctagcgaagcgcactatcaacgacctaacaacaatggcttccaggacgtgtatccctccttgcgcttcttgccctttttgtgagtgcaacaaatgcgttcattattccacaatgctcacttgctccgagtgccattattccacagttcctccctccagttacttcaatgggcttcgaacacccagctgtgcaagcctataggctacaacaagcgcttgcggcgagcgtcttagaacaaccaattgcccaattacaacaacaatccttggcacatgtaaccatacaaaccatcgcaacgcatcagcaacaagcactgagccacctagccgtggtgaaccctatcagctacttgcaacaacagctgcttgcatccaacccacttgctttggcaaacgtagctgcataccatcaacaa

SEQ ID NO: 90178 - DNA, 288 bp, Zea mays
tagaaagcacaatagtgtaccaacaatggcagccaagatattttgcttccttatgctccgtggtctttctgcaagtgttgctaccgcaaccattttcccacaatgctcacaagctcctatagcttcccttcttcccccatacctctcaccagcggtgtcttcaatgtgtgaaaccccaattgttcaaccctacaggatccaacaggcaatcgcaacaggcatcttaccattatcacccttgttccttcaacaaccgtcagccctattacagcagttacctttggtcca

SEQ ID NO: 90179 - DNA, 429 bp, Zea mays
  unsure (1)..(429): unsure at all n locations
acagtttctgccatcactgagccacctagccgtggtgaaccctgtcacctacttgcacggcagctgcttgcatccaacccacttgctctggcgaacgtagctgcataccagcaacaacaacagctgcaacaggttatgccagtgctcagtcaactagccatggtgaaccctgacggctacctacaactactgtcatctagcccgctcgcggtgggcaatgcacctacgtacctactacaacagttgctgcaacaaattgtaccagctctgactcagctagctgtggcaaaccctgctgcctacttacaacagttgcttccattcaaccaactggctgtgtcaaactctgctgcgtacctacaacagcgacaacagttacttaatccattggcagtggctaacccattggtcgctaccttnctgcagcag

SEQ ID NO: 90180 - DNA, 411 bp, Zea mays
caactagcaacatagaaagcacaatagtgtaccaacaatggcagccaaaatattgtgcggtccttatgctccttggtctttctgcaagtgctgctacggcgaccattttcccgcaatgctcgcaagctcctatagcttcccttcttcccccgtacctctcaccagcggtgtcttcggtatgtgaaaacccaattcttcaaccctacaggatccaacaggcaatcacagctggcatcttacctttatcacccttgttcctccaacaatcatcagccctattacatcagttacctttggtgcatttattggcacaaaacatcaaggcacaacaactacaacaacttgtgctagcaaaccttgctgcctactctcagcaacagcagtttcttccattcaaccaactagctgcat

SEQ ID NO: 90181 - DNA, 445 bp, Zea mays
  unsure (1)..(445): unsure at all n locations
actggtccggaattcccgggatctcctcgcatttcttcccatccgatccccccttcgcaaccaaaaccccaactcgcccgccgggaagaagccgaaggcggagaagcgggtccccgctggcaagtccgctgccaaggaaggcggcgagggcaagaggggcaagaagaagggcaagaagagcgtggagacctacaagatctacatcttcaaggtgctgaagcaggtgcacccggacattggcatctcctccaaggccatgtccatcatgaactccttcattaacgatatcttcgagaagctcgctgctgaggccgccaagctcgcgcgctataacaagaagcctaccatcnacctccgtgagatccagacctccgtgcgcctcgtccttcccggggagctcgccaagcacgccgtctccgagggcaccaaggccgtcaccaagttc

SEQ ID NO: 90182 - DNA, 418 bp, Zea mays
gaccattagctttatctactccagagcgcagaagaacccgatcgacaccatgagggtggtgctcgttgccctcgctctcctggctctcgctgcgagcgccacctccacgcatacaagcggcggctgcggctgccagccaccgccgccggttcatctaccgccgccggtgcatctgccacctccggttcacctgccacctccggtgcatctcccaccgccggtccacctgccgccgccggtccacctgccaccgccggtccatgtgccgccgccggttcatctgccgccgccaccatgccactaccctactcaaccgccccggcctcagcctcatccccagccacacccatgcccgtgccaacagccgcatccaagcccgtgccagctgcagggaacctgcggcgttggcagcaccccg

SEQ ID NO: 90183 - DNA, 466 bp, Zea mays
  unsure (1)..(466): unsure at all n locations
accggtccggaattcccgggattttgagcattcagaaacacacctagcgaagcgcactagcaacgacctaacaacaatggctaccaagatattatccctctttgcgcttcttgccctttttgtgagcgcaacaaatgcgttcattattccacaatgctcacttgctcctagtgccattattccacagttcctccctccagttacttcaatgggcttcgaacacccagctgtgcaagcctacaggctacaacaagcgcttgcggcgagcgtcttacaacaaccaattgcccaattacaacaacaatccttggcacatctaaccatacaaaccatcgcaacgcaacagcaacaacaatttctaccagcactgagccaactagctgtggtgaaccctgtcgcctacttgcaacagcagttgcttgcatccaacccacttggtctggcnacatagttgcataccaacaac

SEQ ID NO: 90184 - DNA, 420 bp, Zea mays
attttgcctccttatgctccttggtctttctgcaagtgctgctacggcgaccatttgtgccgcaatgctcgcaagctcctatagcttcccttcttcccccgtacctctcaccagcggtgtcttcggtatgtgaaaacccaattcttcaaccctacaggatccaacaggcaatcacagctggcatcttacctttatcacccttgttcctccaacaatcatcagccctattacatcagttacctttggtgcatttattggcacaaaacatcagggcacaacaactaccacaacttgtgctagcaaaccttgctgcctactctcagcaacagcagtttcttccattcaaccaactagctgcattgaactgctgttcttaattgcaacaacatctactaccattcagccagctacctgctgcct

SEQ ID NO: 90185 - DNA, 124 bp, Zea mays
cggttcggaattcccgggctgggtttgtcaaagcaagttggttgaatggcagcaacccatcattggtggtgccctcttttagatttctgatgggttatagttcaatgataaagttttttatctg

SEQ ID NO: 90186 - DNA, 404 bp, Zea mays
cttgtatcagtaccatcaatcatcattcatcttagtagtataggcaccaaatcaaatcgtcggcatcaattatctaactgcaaaaaccatgaagctggtgcttgtggttcttgctttcattgctttagtatcaagtgtttcttgtacacagacaggcggctgcagctgtggtcaacaacaaagccatgagcagcaacatcatccacaacaacatcatccacaaaaacaacaacatcaaccactaccacaacatcaccagcagcagcaacaccaacaacaacaagttcacatgcaaccacaaaaacatcagcaacaacaaggagttcatgttcaacaacaacaactacaaccgcagcaccaacaacaacaacaacaacaacagcaccaacaacaacatcaatgtg

SEQ ID NO: 90187 - DNA, 185 bp, Zea mays
ccgacccaagcgacgcgtactagctgcattgaactctgcttcttatttgcaacaacaacaactaccattcagccggctgcctgctgcctacccccagcaatttcttccattcaaccaactggcagcattgaactctcctgcttatttacagcagcaacaactactaccattcagccagctagctg

SEQ ID NO: 90188 - DNA, 423 bp, Zea mays
  unsure (1)..(423): unsure at all n locations
cgacatcgtcccttcgtccccacgagcaaccgataatccgccggcgttgagatgttgggttatcaggatctcctatctggcgacgagctcctgtcggattcattcacctacaaggagctcgagaacggcgtcctgtgggaggtcgagggaaagtgggtcacccaaggtcctgttgatgtggacattggtgccaatccatccgccgagggtggtgaggacgaaagcgttgatgacacagctgtgaaggtggttgatattgttgacacattccgtctacaggagcaacctccttttgacaagaaatcatttgtgtcttacatcaaaaaatacatcaagaatctcactgctgtgttggagccagagaaagcggatgagttcaaaaagggtgtcgagggtgcaaccaagtttctncttagcaagctg

SEQ ID NO: 90189 - DNA, 428 bp, Zea mays
ggaagaccgaagaccgagccgtgcgggggctcgggacgggaacgggacaggaccccaggtctcagatccttcctgcccgcccgcccgtgcccgtcgacgcgtcgttcttgccggccgcgcctcacctccgccctctcctactccagggggatcggatacgccacaggctgcgcgatggtgctgtgggtcttcggctacggctccctcatctggaaccccggcttcgacttcgacgacaaaatcctcggcttcatcaagggctacaagcgcacctttaatctcgcttgcattgaccacagaggcacaccggagcatccggcgaggacctgcacgcttgaaaccgacgacgaggccatatgctggggaattgcatattgtgtcaagggtggtccagaaaaagagctaaaagcaatgcagtacttggagag

SEQ ID NO: 90190 - DNA, 432 bp, Zea mays
acccacgcgtccgcttaccaagcaggtgatctgcaagtgagccaagtgccatgtactcataaaccaggagccgttgatctccatctgcacaatagcccaccaaattgactaagtttggatggtgcaataagctgagcatcaggacctcaactaggaactctctgttgccttgatacccattcaggtctagttgcttgacagcaacaagctgttcacgcaaaccggaaacaagtcagccactaatgactgtagatgaattagcaagcttgtgtatacgtagaacgtttgaatgttttttttctgtgtggtgtgtacctgtccgttttcaagcctgcccttgtataccctgccgaatcccccttctccgagaaggcagtcagagcggaagtttttcgtggccgtggctagctcacggaacgtgaatgcttttgc

SEQ ID NO: 90191 - DNA, 391 bp, Zea mays
cgtgatcagagagggatatatagctagctagctagcatagcatggcgcttgtagccgacgacgacgccgagctcaaggccaaggccaaggccaaggccgaggtctactacggcgacgaggcctgtcagctgtgcgcgcagctcctgctgagggaagcaggcctccccaacggcctgctgccgctggaggacctgacggagtgcggctacgtccaggagaccgggtacgtgtggctgaagcagggcaggagggtcgaccacgtcttccggagcctcggacgcctcgtctcctacggcgccgagatcaccgggtacgccgagaagggccggatcaggaaggtgaaggggataaagaccagggagctcatgctgtgggtgcccgtcgaggagat

SEQ ID NO: 90192 - DNA, 398 bp, Zea mays
tttcagcattcaaaaacacaccaagcgaagcgcactagcaacgacctaacaccaatggctaccaagatattagccctccttgcgcttcttgcccttttagtgagcgcaacaaatgcgttcattattccacagtgctcacttgctcctagtgccagtattccacagttcctcccaccagttacttcaatgggcttcgaacatccagccgtgcaagcctacaggctacaactagcgcttgcggcgagcgccttacaacaaccaattgcccaattgcaacaacaatccttggcacatctaaccctacaaaccattgcaacgcaacaacaacaacaacagtttctgccatcactgagccacctagccgtggtgaaccctgtcacctacttgcaacagcagct

SEQ ID NO: 90193 - DNA, 424 bp, Zea mays
cctggtttagttgatcgcattgttgtttcaaataaatcagtagcgaaggtctacatcaggaattcacctcatccaaagagccaaggccaagatagtgatatccatattactaccactgatgctccaggcaagcctgctcccagcagatgcaagtattacttcaatattggtagtgttgatttgtttgaagagaagttagaggaagcccaggaagctttgggaatagatccacatgattttgtcccagtaacttatgttgctgaagtaaattggttccaagaagttatgaggtttgccccaacagcattgattattggtctattatatttcacgggaaaaaggatgcagagtggtttcaatattggaggtggtgctggcaaaggaagaggaggtattttcaacattggaaaagctacagtgatga

SEQ ID NO: 90194 - DNA, 426 bp, Zea mays
  unsure (1)..(426): unsure at all n locations
ttttgagcattcagaaacacaccaagctaagcacattagcaacaacctaacaacaatggctaccaagatattatccctccttgcgcttcttgcgctttttgcgagcgcaacaaatgcgttcattattccacaatgctcacttgctccaagttccattattacacagttcctcccaccagttacttcaatgggcttcgaacacccagctgtgcaagcctataggctacaacaagcaattgcggcgagcgtcttacaacaaccaatttcccagttgcaacaacaatccttggcacatctaacaatacaaaccatcgcaacgcaacagcaacaacaattcctaccagcactgagccacctagccatggtgaaccctgccgnctacttgcaacagcagttgcttgcatcaaacccacttgctctggcaaa

SEQ ID NO: 90195 - DNA, 435 bp, Zea mays
ctcacgtgtcagctctggatgtgaactcaaggactccgtgatgatgggagcggacatctatgaaactgaagaagaagcttcaaagctactgttagctgggaaggtcccagttggaataggaaggaacacaaagataaggaactgtatcattgacatgaatgctaggattgggaagaacgtggtgatcacaaacagtaagggcatccaagaggctgatcacccggaagaagggtactacataaggtctggaatcgtggtgatcctgaagaatgcaaccatcaacgatgggtctgtcatatagatcggctgcgtttgcgtctacaaaacaagaacctacaatggtattgcatcgatggatcgtgtaaccttggtatggtaagagccgcttgacaggaagtcgagcgttcgggcgcaagatgcgtaatctggcatgct

SEQ ID NO: 90196 - DNA, 406 bp, Zea mays
ctggacgtcagcctagcaattagctcatcgactccagattggagaactcgacaccatgaaggtgctgatcgttgcccttgctctcctggcgctcgctgcgagcgccgcctccagtacaagcggcggctgtggctgccagacaccaccgtttcatctaccgcctccgttctatatgccgcctccgttctatctgccgccgcagcagcagccgcagccatggcaataccccactcaaccaccgcagctaagcccgtgccagcagttcggatcctgcggcgtcggcagcgtcggcagcccgttcctgggccagtgcgtcgagttcctgaggcaccagtgcagcccggcggcgacgccctacggctcgccacagtgccaggcgctgcagcagcagtgctgccaccagatc

SEQ ID NO: 90197 - DNA, 447 bp, Zea mays
attgtgagcattcagaaacacaccaagcgaagctacctagcaacgacttaacaacaatggctaccaagatattagccctccttgcgcttcttgccctttttgtgagcgcaacaaatgcgttcattattccacaatgctcacttgctcctagtgccattataccacagttcctccgaccagttacttcaatgggcttcgaacacctagctgtgcaagcctacaagctacaacaagcgcttgcggcgagcgtcttacaacaaccaattaaccaattgcaacaacaatccttggcacatctaaccatacaaaccatcgcaacacaacagcaacaacagttcctaccagcactgagccaactagatgtggtgaaccctgtcgcctacttgcaacagcaggtgcttgcatccaacccacttgctctggcaaacgtagctgcataccaacaac

SEQ ID NO: 90198 - DNA, 445 bp, Zea mays
caggcaatcacagctggcatcttacctttatcacccttgttcctccaacaatcatcaggcctattacatcagttacctttggtgcatttattggcacaaaacatcagggcacaacaactacaacaacttgtgctagcaaaccttgctgcctactctcagcaacagcagtttcttccattcaaccaactagctgcattgaactctgcttcttatttgcaacaacaacaactaccattcagccagctacctgctgcctacccccagcaatttcttccattcaaccaactggcagcattgaactctcctgcttatttacagcagcaacaactactaccattcagccagctagctggtgtgagccctgctaccttcttgatacaaccacagttgttgccgttctaccagcacgctgcgcctaacgctggcaccctcttacaactgcaac

SEQ ID NO: 90199 - DNA, 360 bp, Zea mays
cccacgcgtccgcccacgcgtccttaatcacacctagcgaagcgcactagcaacgacgtaacaacaatggcttccaagacattatccctccttgcgcttcttgccctttttgtgagtgcaacaaatgcgttcattattgcactttgctcacttgctccgagtgccattattccacagttcctccctccagttacttcaatgggcttcgaacacctagctgtgcaagcctataggctactacatgcgcttgcggcaagcgtcttataacttccaattgtccagttacaacaacaattcttggcactatgtatctatacataccatcgcaacgcagcagcaacaagcactttgcctcctatt

SEQ ID NO: 90200 - DNA, 360 bp, Zea mays
gaccaacaagcaacatagaaagtggaatccagtagcatcaacagagcatcaatggcgagcaagatattatccctccttatgctccttgctctttctgcatgtgttgctaacgcgacaattttacctcaatgctcacaagcttctatagcttcccttcttcccccatacctttcatcaatgatagcttcagtatgtgaaaacccagctcttcagccctatacgctccaacaagcaatcgcagcaagcaacatacctttatcacccttgttgattcaacaatcgccagccctatctatggtgcagtcattgctacaaaccatcagggcacagcagctgcagcaactcgggctacctgtgatc

SEQ ID NO: 90201 - DNA, 447 bp, Zea mays
  unsure (1)..(447): unsure at all n locations
atcgctcgtaaccgcaagacaggaaagtccaagcactatggattcattgagtttgagaaccctgctgtggcaaaggtcgtagcagatgagatgaataactatctcttgtttgagcgcaccttgcaagttgcacttgttgagccagagaaagttcatcctaaattatggaaaggggtgcgaaggggatttatacctgttgatcgagtagcaattgaacggaagagacacaacaaggataagactgtagcagagcacaaaaagatggttgaaggaattgtaaagcgggatggaaagcgtcgcaaaagaatcaaggcagctggtattgactatgagtgtccagctcttatagggagcattcaaccatcagcgaaaaagatcaagttcgatgaggcatagtattttattctaatgggctgttggatccttagtagacgaggcngtggaatg

SEQ ID NO: 90202 - DNA, 417 bp, Zea mays
ggttcgggttcgggttcgtgaggttctccggggttcggtttcgtgggtgagcggatcgagatggcggcgtcggatgttgagtaccgctgcttcgtcggcggcctcgcctgggccacggacgaccactccctccacaacgccttcagcacctacggcgaggtcctcgagtccaagatcatcctcgatcgggagacgcagaggtcccgcggcttcggcttcgtcaccttctccacggaggaggcgatgcggaacgccatcgagggcatgaacggcaaggagctggacggccgcaacatcaccgtcaacgaggcccagtcccgcggcggccgtggaggcggcggcggcggcgggtacggtggtggccgtggaggcggcggctacggcggtggcgggcgccgtgatggcggcggcggctac

SEQ ID NO: 90203 - DNA, 443 bp, Zea mays
  unsure (1)..(443): unsure at all n locations
aaggcagtgaacatcttattaccttgacactgcaaacattgactgaagattcaaatccctcagctgacctagttgctgctgttaaacaattatataataccaagctgaaggatgcatctattctgattcccttactgccttcatttccaaaggaggaggtattgcctatatttcctaggctagttgatctcccgcttgagagattccaagacgtacttgctcggatattgcagggaactgctcatactggtccagcattgactcctgctgaagttctcattgcaattcatgatattaaccctgaaaaagataaagttgccctaaaaaaggtcacggatgcttgcacggcttgctttgagcaacgcacggtatttactcagcangttttggagaagtcacttaatcaattggttgacagaataccaattcctcttctttttatg

SEQ ID NO: 90204 - DNA, 404 bp, Zea mays
attttgagcattcagaaacacaccaagcgaagcgcactagcaacgacctaacaacaatggctaccaagatattagccctccttgcgcttcttgccctttttgtgagcgcaacaaatgcgttcattattccacaatgctcacttgctcctagtgccattattccacagttcctcccaccagttacttcaatgggcttcgaacacctagctgtgcaagccaacatgcaacaacaagcgcttgcggcgagcgtcttacaacaaccaattgcccaattgcaacaacaatccttgccacatctaacaatacaagccatcacaacgcaacagcaacaacagttcctaccagcactgagccacctagccatggtgaaccctgccgcctacttgcaagagcagctgcttgca

SEQ ID NO: 90205 - DNA, 451 bp, Zea mays
caacaacaacaacaacaacaacagcaccaacaacaacatcaatgtgaaggccaacaacaacatcaccaacaatcacaaggccatgtgcaacaacacgaacagagccatgagcaacaccaaggacagagccatgagcaacaacatcaacaacaattccagggtcatgacaagcagcaacaaccacaacagcctcagcaatatcagcagggccaggaaaaatcacaacagcaacaatgtcattgccaggagcagcaacagactacaaggtgcagctataactactatagcagtagctcaaatctaaaaaattgtcatgaattcctaaggcagcagtgcagacctttggtaatgccttttctccaatcacgtttgatacaaccaagtagctgccaggtattgcagcaacaatgttgtcatgatcttaggcagattgagccacaatacatttacc

SEQ ID NO: 90206 - DNA, 494 bp, Zea mays
cgctctaccggttcggaattcccgggcagggcacaacaactacaacaacttgtgctagcaaaccttgctgcctactctcagcaacagcagtttcttccatgcaaccaactagctgcattgaactctgcttcttatttgcaacaacaacaactaccattcagccagctacctgttgcctacccccaacaatttcttccattcaaccaactggcagcattgaactctcctgcttatttacagcagcaacaactactaccattcagccagctagctggtgtgagccctgctaccttcttgacacaaccacagttgttgccgttctaccagcacgctgcgcctaacgctggcaccctcttacaactgcaacaattgctgccattcaaccaacttgctttgacaaacctagcagtgttctaccaacaacccatcattggtggtgccctcttttagatttcttatgagttatagttcaataataaagttttttggctgat

SEQ ID NO: 90207 - DNA, 446 bp, Zea mays
cccatacctctcaccagcggtgtcttcagtatgtgaaaacccaattcttcaaccctacaggatccaacaggcaatcgcagcaggcatcttacctttatcacccttgttcctccaacaaccgtcagccctattacagcagttacctttggtgcatttgttggcacaaaacatcaaggcacaacaactacaacaacttgtgctaggaaaccttgctgcctactctcagcaacagcagtttcttccattcaaccaactggctgcattgaactctgctgcttatttgcaacaacaactaccattcagtcagctagctgctgcctacccccagcaatttcttccattcaaccaactggcagcattgaactctgctgcttatttacaacagcaacagctaccaccattcagccagctagctgatgtgagccctggtgccttcttgacacaac

SEQ ID NO: 90208 - DNA, 425 bp, Zea mays
taccaacatacatagtgaagtacactagcaacatcttagcaccaatggcagccaagatttttgcgctccttgccctccttgctctttcagcaagtgttgctaccgcgactattattccacaatgctcacaacaatacctctctccagtgatagccgcgagatttgaatacccatctatacaatcctacaggctacaagaggccatcacagcaagcatcttacggtcgttagcattgaccgtccaacaaccatatgccctattgcaacaaccatccttagtgaatctgtatctccaaagaatcacagcacaacaactacaacaacggttgcttccaacaattaatcaagtagttgcagcgaaccttgctgcttaccttcagcaacaacaatttcttccattcaatcaactagctggggtgaaccct

SEQ ID NO: 90209 - DNA, 466 bp, Zea mays
accggtccggaattcccgggattgagaccaacaagcaacatagaaagtggaatccagtagcaacaatagagcaacaatggcgaccaagatacttgccctccttatgctccttgctctttctgcatgtgttgctaacgcgacaattttccctcaatgctcacaagctcctatagcttcccttcttcccccataccttccatcaatgatagcttcagtatgtgaaaacccagctcttcaaccctataggctccaacaagcaatcgcagcaagcaacatacctttatcacccttgtttcaacaatcgccagccctatctttggtgcagtcattggtacaaaccatcaaggcacagcagctgcagcaactcgtgctacctgtgatcaaccaagtagctctggcaaacctttctccctactatcagcaacaacaatttcttccattcaaccaactatctacactgaaccct

SEQ ID NO: 90210 - DNA, 223 bp, Zea mays
cgaactagcaacatacatagtgaagtacactagcaacatcttagcaccaatggcagccaagatttttgccatccttgccctccttgctctttcagcaagcgttgctaccgcgactattattccacaatgctcacaacaatacctctctccggtgacagccgcgagatttgaatacccaactatacaatcctacaggctacaagaggccatcgcagcaagcatc

SEQ ID NO: 90211 - DNA, 442 bp, Zea mays
  unsure (1)..(442): unsure at all n locations
agcaaagcggcagtgcgtagagaggatcgtcgaacagaacagcatgaagatggtcatcgttctcgtcgtgtgcctggctctgtcagctgccagcgcctctgcaatgcagatgccctgcccctgcgcggggctgcagggcttgtacggcgctggcgccggcctgacgacgatgatgggcgccggcgggctgtacccctacgcggagtacctgaggcagccgcagtgcagcccgctggcggcggcgccctactacgccgggtgtgggcagccgagcgccatgttccagccgctccggcaacagtgctgccagcagcagatgaggatgatggacgtgcagtccgtcgcgcagcagctgcagatgatgatgcagcttgagcgtgccgctgccgncagcagcagcctgtacgagccagctctgatgcagcagcagcagcagctgctg

SEQ ID NO: 90212 - DNA, 289 bp, Zea mays
  unsure (1)..(289): unsure at all n locations
cggcagtaataaagctggcaagaatgagtctcactcatccncaattgatgcagcattgcccgataagcccaaggagaaagggaaacctcaaaagcaaccaccccactctcttccatcaaaagagatgaagaacagtcaaatggtgagagtgcaaagcctcgaaaaggtggaagcacgccatcatatgggttcaccttcaagtgtgatgagagatctgaaaaaagaccagagttctattcgaagcttgaagagaagattcatgcaagaaagttagaaataagcaatttgc

SEQ ID NO: 90213 - DNA, 470 bp, Zea mays
  unsure (1)..(470): unsure at all n locations
ggattcccgggtcgacnacgcgtccgtccagatcagcaaagcggcagtgcgtatagaggatcgtcgaacagaacagcatgaagatggtcatcgttctcgtcgtgtgcctggctctgtcagctgccagcgcctctgcaatgcagatgccctgcccctgcgcggggctgcagggcttgtacggcgctggcgccggcctgacgacgatgatgggcgccggcgggctgtacccctacgcggagtacctgaggcagccgcagtgcagcccgctggcggcgggccctactacgccgggtgtgggcagccgagcgccatgttccagccgctccggcaacagtgctgccagcagcagatgaggatgatggacgtgcagtccgtcgcgcagcagctgcagatgatgatgcagcttgagcgtgccgctgccggcagcagcagcctgtacgagccagctctgatgcagcagcagcagcagc

SEQ ID NO: 90214 - DNA, 233 bp, Zea mays
gcagcaactgctccaggacttcttcaactgctaggagctgtgcaagaacatcaaccccgatgaggctgtctccttatggtgctgttgtccatgctgccattctgagcggtgaggtctattagaaggtgctggacctgcttgctgtgtacattaatcctctgttcatgtgtatacagacttattcaatagtactggctgcaataagccatcagaacaagcattttaccatcatt

SEQ ID NO: 90215 - DNA, 441 bp, Zea mays
cttcccttcttcccccgtacctctcaccagcggtgtcttcggtatgtgaaaacccaaggcttcaaccctataggatccaacaggcaatcgcagctggcatcttacctttatcacccttgttcctccaacaatcatcagccctattacagcagttacctttggtgcatttattggcacaaaacatcagggcacaacaactacaacaacttgtgctagcaaaccttgctgcctactctcagcaacaacagtttcttccattcaaccaactagctgcattgaactctgcttcttatttgcaacaacaacaactaccattcagccagctatctgctgcctacccccagcaatttcttccattcaaccaactgacagctttgaactctcctgcttatttacagcagcaacaactactaccattcagccagctagctggtgtgagcc

SEQ ID NO: 90216 - DNA, 460 bp, Zea mays
  unsure (1)..(460): unsure at all n locations
accggtccggaattcccgggtgtgtgtgtgtgggtgcagcgctgaggaggatcggagtgaagggggtggaggtgcgcaagccggagcagctccggggcatcgactcgctcatcatccccggtggcgagagcaccaccatggccaagctcgccaactaccacaacctgttccctgcacttcgagagttcgttggaggtggaaagcctgtctggggaacctgtgctgggctcatctttcttgcaaacaaagcagtagggcaaaaaacaggggggcaggaacttgttggaggattagattgtacagtccaccgaaacttttttgggagtcagcttcaaagctttgagacagagctttcggtgccaaagctttcggagaaggaaggagggaatgatacatgccgcggtgtatntatacgggcacctgctatattggaagtaggtccagatgttgaaatattggc

SEQ ID NO: 90217 - DNA, 449 bp, Zea mays
gaccaacaagcaacatagaaagtggaatccagtagcaacaacagagcaacaatggcgagcaagatattttccctccttatgctccttgctctttctgcatgtgttgctaacgcgacaattttccctcaatgctcacaagctcctatagcttcccttcttcccccataccttccatcaatgatagcttcagtatgtgaaaacccagctcttcagccctataggctccaacaagcaatcgcagcaagcaacatacctttatcacccttgttgtttcaacaatcgccagccctatctttggtgcagtcattggtacaaaccatcaaggcacagcagctgcagcaactcgtgctacctgtgatcaaccaagtagctctggcaaacctttctccctactctcagcaacaacaatttcttccattcaaccaactgtctacactgaaccctgctgt

SEQ ID NO: 90218 - DNA, 432 bp, Zea mays
cgcaaattgcaccaagaaatccatcgagaggccgtcgacaggggaattaatggcgtcggcgtctagcagcagccaccgccgcctcatcctcgcagccgccgtcctgctctccgtgctcgcggctgccagcgccagcgccgggacctcctgcgtgccggggtgggccatcccgcacaacccgctcccgagctgccgctggtacgtgaccagccggacctgcggcatcgggccgcgcctcccgtggccggagctgaagaggagatgctgccgggagctggcggacatcccggcgtactgccggtgcacggcgctgagcatcctcatggacggcgcgatcccgccgggcccggacgcgcagctggagggccgcctagaggacctgccgggctgcccgcgggaggtgcagaggggattcgccgtcaccctcgtcac

SEQ ID NO: 90219 - DNA, 442 bp, Zea mays
attgagaccaactagcaacatagaaagcacaatagtgtaccaacaatggcagccaaaagattttgcctccttatgctccttggtctttctgcaagtgctgctacggcgaccattttcccgcaatgctcgcaagctcctatagcttcccttcttcccccgtacctctcaccagcggtgtcttcggtatgtgaaaacccaattcttcaaccctacaggatccaacaggcaatcgcagctggcatcttacctttatcacccttgttcctccaacaatcatcagccctattacaacagttacctttggtgcatttattggcacaaaacatcagggcacaacaactacaacaacttgtgctagcaaaccttgctgcctactctcagcaacagcagtttcttccattcaaccaactaggttcattgaactctgcttcttatttgcaac

SEQ ID NO: 90220 - DNA, 428 bp, Zea mays
aacatagaaagcacaatagtgtaccaacaatggcagccaaaatattttgcttccttatgctccttggtctttctgcaagtgttgctaccgcaaccattttcccacaatgctcacaagctcctatagcttcccttcttcccccatacctctcaccagcggtgtcttcaatgtgtgaaaccccaattgttcaaccctacaggatccaacaggcaatcgcaacaggcatcttaccattatcacccttgttcctccaacaaccgtcagccctattacagcagttacctttggtccatttggtggcacaaaacatcagggcacaacaactacaacaacttgtgctagcaaaccttgctgcatactctcagcaacatcagtttcttccattcaaccaactggctgcattgaactctgctgcttatttgcaacac

SEQ ID NO: 90221 - DNA, 435 bp, Zea mays
aatattttgagcattcagaaacacaccaagcgaagcgcactagcaacgacctaagaacaatggctaccaagatattagccctccttgcgcttcttgccctttttgtgagcgcaacaaatgcgttcattattccacaatgctcacttgctcctagtgccattattccacagttcctcccaccagttacttcaatgggcttcgaacacctagctgtgcaagccaacatgcaacaacaagcgcttgcggcgagcgtcttacaacaaccaattgcccaattgcaacaacaatccttgccacatctaacaatacaagccatcacaacgcaacagcaacaacagttcctaccagcactgagccacctagccatggtgaaccctgccgcctacttgcaagagcagctgcttgcatccaacccacttgctctggcgaacgtag

SEQ ID NO: 90222 - DNA, 447 bp, Zea mays
ctcagcaacaacagtttcttccattcaaccaactagctgcattgaactctgcttcttagttgcaacaacaacaactaccattcagccagctatctgctgcctacccccagcaatttcttccattcaaccaactgacagctttgaactctcctgcttatttacagcagcaacaactactaccattcagccagctagctggtgtgagccctgctaccttcttgacacaaccacaattgttgccgttctaccagcacgctgcgcctaacgctggcaccctcttacaactgcaacaattgctgccattcaaccaacttgctttgacaaacccaacagcattctaccaacaacccatcattggtggtgccctcttttagatttcttatgagttatagttcaataataaagttttttgtctgatgtttgtggcttcccagaaataagaaagta

SEQ ID NO: 90223 - DNA, 408 bp, Zea mays
aagatgtacagcctcatcgacgagtacaagttgaagggccatatccggtggatctcggcgcagatgaaccgcgtccgcaacggggagctgtaccgctacatttgcgatacgaagggcgcattcgtgcagcctgcgttctacgaagcgttcggcctgactgtgatcgagtccatgacgtgcggtctgccaacgatcgcgacctgccatggtggccctgctgagatcatcgtggacggggtatctggcctgcacattgacccttaccacagcgacaaggccgcggatatcctggtcaacttctttgacaaatgcaaggcagatccgagctactgggacaagatctcacagggcggcctgcagagaatctatgagaagtacacctggaagctctactccgagaggctgatg

SEQ ID NO: 90224 - DNA, 414 bp, Zea mays
gcagcaagcaacatacctttatcgcccttgttgtttcaacaatcgccagccctatctggggtgcagtcattggtacaaaccatcagggcacaacagctgcagcaactcgtgctacctctgatcaaccaagtagctctggcaaacctttctccctactctcagcaacaacaatttcttccattcaaccaactgtctacactgaaccctgctgcttatttgcagcaacaactattaccatttagccagctagctactgcctactctcagcaacaacaacttcttccatttaaccaattggccgcactgaaccccgctgcttatttgcagcagcaaatactactaccatttagccagctagctgcatcaaaccgagcttacttcttgacacagcaacagttgctgcctttctaccag

SEQ ID NO: 90225 - DNA, 444 bp, Zea mays
cccacgcgtccgcacaaatgcattgacaacattgtaatcttgagtggcgatcagctttatcggatgaattacatggaacttgtgcagaaacatgtcgaggacgatgctgatatcactatatcatgtgctcctgttgatgagagccgagcttctaaaaatgggctagtgaagattgatcatactggacgtgtacttcaattctttgaaaaaccaaagggtgctgatttgaattctatgagagttgagaccaacttcctgagctatgctatagatgatgcacagaaatatccataccttgcatcaatgggcatttatgtcttcaagaaagatgcacttttagaccttctcaagtcaaaatatattcaattacatgactttggatctgaaatcctcccaagagctgtactagatcatagtgtgcaggcatgcatttttacgggctat

SEQ ID NO: 90226 - DNA, 435 bp, Zea mays
  unsure (1)..(435): unsure at all n locations
gctcacttgctccaagttccattattacacagttcctcccaccagttacttcaatgggcttcgaacacccagctgtgcaagcctataggctacaacaagcaattgcggcgagcgtcttacaacaaccaatttcccagttgcaacaacaatccttggcacatctaacaatacaaaccatcgcaacgcaacagcaacaacaattcctaccagcactgagccacctagccatggtgaaccctgccgcctacttgcaacagcagttgcttgcatcaaacccacttgctctggcaaacgtagttgcaaaccagccacaacaacagctgcaacagtttctgccagcgctcagtcaactagccatggtgaaccctgccgnctacctacaacagcaacaactgctttcatctagcccgctcgctgtggccaatgcacctacat

SEQ ID NO: 90227 - DNA, 442 bp, Zea mays
cagaaacacaccaagcgaagcacattatcaacaacctaacaacaatggctaccaagatgttatccctccttgcgcttcttgcgctttttgcgagcgcaacaaatgcgttcattattccacaatgctcacttgctccaagttccattattacacagttcctcccaccagttacttcaatgggcttcgaacacccagctgtgcaagcctataggctacaacaagcaattgcggcgagcgtcttacaacaaccaatttcccagttgcaacaacaatccttggcacatctaacaatacaaaccatcgcaacgcaacagcaacaacaattcctaccagcactgagccacctagccatggtgaaccctgccgcctacttgcaacagcagttgcttgcatcaaacccacttgctctggcaaacgtagttgcaaaccagccacaacaaca

SEQ ID NO: 90228 - DNA, 407 bp, Zea mays
  unsure (1)..(407): unsure at all n locations
tgcacactgaaccttctactcaagaacctgaggctcaatccattgggtggggacaaggtgttgaccatgctggcgagtcagctgcgcaagggaacggtcatggatggcaatggctcaaagatcctcggttggactaccttggttacagaggaatttttccagctgacacgataccacccctagttgagtctgacaaagaagcagatgaacgccattatcaactttggcggatagaaaatggagtcgcagaaggttcgactgagatcccaaaaggcgaagcaatcccgctggagtacaatcttgctggcttgaacgccatttcgttcgagaagggctgctacatcgggcaggagcttatcgctcggacgcaccatcgcggtgtcatncggaagcgcctaatgccaatg

SEQ ID NO: 90229 - DNA, 442 bp, Zea mays
gagaccaactagcaacatagaaagcacaatagtgtaccaacaatggcagccaaagtaggttgcttccttatgctccttggtctttctgcaagtgttgctaccgcaaccattttcccacaatgctcacaagctcctatagcttcccttcttcccccatacctctcaccagcggtgtcttcaatgtgtgaaaccccaattgttcaaccctacaggatccaacaggcaatcgcaacaggcatcttaccattatcacccttgttcctccaacaaccgtcagccctattacagcagttacctttggtccatttggtggcacaaaacatcagggcacaacaactacaacaacttgtgctagcaaaccttgctgcatactctcagcaacatcagtttcttccattcaaccaactggctgcattgaactctgctgcttatttgcaacaac

SEQ ID NO: 90230 - DNA, 166 bp, Zea mays
tgagcattcatatacacaccaagttattttcactatcaacaacctaacaacaatggctgccaatatattatctctgcttgctcttctttcgcttatcgcgagctcaataaatgcgctcattatttcacaatctacactaactcttagtttcattattccatatttc

SEQ ID NO: 90231 - DNA, 448 bp, Zea mays
aacaattcctaccagcactgagccacctagccatggtgaaccctgccgcctacttgcaacagcagttgcttgcatcaaacccacttgctctggcaaacgtagttgcaaaccagccacaacaacagctgcaacagtttctgccagcgctcagtcaactagccatggtgaaccctgccgcctacctacaacagcaacaactgctttcatctagcccgctcgctgtggccaatgcacctacatacctgcaacaacaattgttgcaacagattgtaccagctctgactcagctagttgtggcaaaccctgctgcctacttgcaacagctgcttccattcaaccaactgactatgtcgaactctgctgcgtacctacaacagcgacaacagttacttaatccactagcagtggctaacccattggtcgctgccttcctacagcagcaacaatt

SEQ ID NO: 90232 - DNA, 451 bp, Zea mays
cccacgcgtccgcaactagcaacatagaaagcacaatagtgtaccaacaatggcagccaaagtattttgcctccttatgctccttggtctttctgcaagtgctgctacggcgaccattttcccgcaatgctcgcaagctcctatagcttcccttcttcccccgtacctctcaccagcggtgtcttcggtatgtgaaaacccaattcttcaaccctacaggatccaacaggcaatcacagctggcatcttacctttatcacccttgttcctccaacaatcatcagccctattacatcagttacctttggtgcatttattggcacaaaacatcagggcacaacaactacaacaacttgtgctagcaaaccttgctgcctactctcagcaacagcagtttcttccattcaaccaactagctgcattgaactctgcttcttatttgcaacaacaa

SEQ ID NO: 90233 - DNA, 421 bp, Zea mays
cggaattcccggagttacctttggtgcatttattggcacaaaacatcagggcacatcaactacaacaacttgtgctagcaaaccttgctgcctactctcagcaacagcagtttcttccattcaaccaactagctgcattgaactctgcttcttatttgcaacaacaaatactactaccatttagccagctagctgcagcaaaccgtgcttccttcttgacacagcaacagttgctgcctttctaccagcagtttgcggctaaccccgcaaccctcttacaactacaacaattgttgccctttgtccaacttgctttgacagacccagcgggcttctaccaacaacacatcattggtggtgccctctttaaattgcttattagttgtaattcattaataaaggttttttggatgatgtatgt

SEQ ID NO: 90234 - DNA, 440 bp, Zea mays
cttgtgctcctgttgatgagagccgagcttctaaaaatgggctagtgaagattgatcatactggacgtgtacttcaattctttgaaaaaccaaagggtgctgatttgaattctatgagagttgagaccaacttcctgagctatgctatagatgatgcacagaaatatccataccttgcatcaatgggcatttatgtcttcaagaaagatgcacttttagaccttctcaagtcaaaatatattcaattacatgactttggatctgaaatcctcccaagagctgtactagatcatagtgtgcaggcatgcatttttacgggctattgggaggatgttggaacaatcaaatcattctttgatgcaaacttggccctcactgagcagccttccaagtttgatttttatgatccaaaaacacctttcttcactgcaccccgatgc

SEQ ID NO: 90235 - DNA, 449 bp, Zea mays
gttggtacactattacagcagttacctttggtgcatttgttggcacaaaacatcaaggcacaacaactacaacaacttgtgctaggaaaccttgctgcctactctcagcaacagcagtttcttccattcaaccaactggctgcattgaactctgctgcttatttgcaacaacaactaccattcagtcagctagctgctgcctacccccagcaatttcttccattcaaccaactggcagcattgaactctgctgcttatttacaacagcaacagctaccaccattcagccagctagctgatgtgagccctgttgccttcttgacacaacaacagttgttgccgttctacctgcacgctgcgcctaacgctggcaccctcttacaactgcaacaattgctgccattcaaccaacttgctttgacaaacccaacaacgttctaccaacaacc

SEQ ID NO: 90236 - DNA, 444 bp, Zea mays
gcaacatagaaagcacaatagtgtaccaacaatggcagccaaaatattttgcctgctgatgctccttggtatttctgcaagtgctgctacggcgaccattttcccgcaatgctcacaagctcctatagcttcccttcttcccccgtacctctcaccagcggtgtcttcggtatgtgaaaacccaattcttcaaccctacaggatccaacaggcaatcgcagctggcatcttacctttatcacccttgttcctccaacaatcatcagccctattacagcagttacctttggtgcatttattggcacaaaacatcagggcacaacaactacaacaacttgtgctagcaaaccttgctgcctactctcagcaacagcagtttcttccattcaaccaactagctgcattgaactctgcttcttatttgcaacaacaacaactaccatt

SEQ ID NO: 90237 - DNA, 441 bp, Zea mays
caactagcaacatagaaagcacaatagtgtaccaacaatggcagccaaaatattgtgcgtgcttatgctccttggtctttctgcaagtgctgctacggcgaccattttcccgcaatgctcgcaagctcctatagcttcccttcttcccccgtacctctcaccagcggtgtcttcggtatgtgaaaacccaattcttcaaccctacaggatccaacaggcaatcacagctggcatcttacctttatcacccttgttcctccaacaatcatcagccctattacatcagttacctttggtgcatttattggcacaaaacatcagggcacaacaactacaacaacttgtgctagcaaaccttgctgcctactctcagcaacagcagtttcttccattcaaccaactagctgcattgaactctgcttcttatttgcaacaacaaca

SEQ ID NO: 90238 - DNA, 466 bp, Zea mays
tcggaacggaattcccgacccaagccacgcgtgcaacgcactgacactacgtaccaacaatggctaccaagatattaggcctccttaggctgcttggcctttcagcgagcgctgctactgcgaccattattccacaatgctcactagctcctatagccattattctacagttgcacctatcaccaactgtaacgtgcttatgacataacccaattcatgaactactacatgatccaacaggcaagcgcagatggcatactacctctataacgctagttgctacaacaatcattaggcactattacaacatacaaactatggcgcatgcacagccacaacacatccaggcacatcaactactgcaacatgtactagcagacaacgctgtctactattagcaacagcagctgcttgcattcaaccaactatgctcatcgaactgtgcttcataccagcaacaacaaca

SEQ ID NO: 90239 - DNA, 441 bp, Zea mays
gcaacatagaaagtagaatccattagcaacaatagagcaacaatggcgaccaagatatgttccctccttatgctccttgctctttctacatgtgttgctaacgcgacaattttccctcaatgctcacaagctcctatagcttcccttcttcccccataccttccatcaattatagcttcagtatgtgaaaacccagctcttcaaccatataggcttcaacaagcaatcgcagcaagcaacatacctttatcgcccttgttgtttcaacaatcaccagccctatctttggtgcagtcattggtacaaaccatcagggcacaacagctgcagcaactcgtgctacctgtgatcaaccaagtagctctggcaaacctttctccctactctcagcaacaacaatttcttccattcaaccaactgtctacactgaaccctgctgct

SEQ ID NO: 90240 - DNA, 331 bp, Zea mays
atatgttggcacaaaacatgaggggggcaacatctacaacaacttgtgctacgaaacctcgctaactactgtcagcaacaacagtttcttacattcaaccaactaactatattgaactctgctgcttatttgcaacaacaactaccatttaatcagatagctgctgactacccccatcaattactagcattcaaacaactggcagacactgaactctgctgcttatttacaacagccacatctaccaccatttaaccatctaactgatgtgagccctagtgccttcttgacacatcaacagttgttgccagtctaccttcacgcttctcct

SEQ ID NO: 90241 - DNA, 443 bp, Zea mays
ggtcttcagaccattagctttatctactccagagcgcagaagaacccgatcgacaccgtgagggtgttgctcgttgccctcgctctcctggctctcgctgcgagcgccacctccacgcatacaagcggcggctgcggctgccagccaccgccgccggttcatctaccgccgccggtgcatctgccacctccggttcacctgccacctccggtgcatctcccaccgccggtccacctgccgccgccggtccacctgccaccgccggtccatgtgccgccgccggttcatctgccgccgccaccatgccactaccctactcaaccgccccggcctcagcctcatccccagccacacccatgcccgtgccaacagccgcatccaagcccgtgccagctgcagggaacctgcggcgttggcagcaccccgatcctgggccagtgcgt

SEQ ID NO: 90242 - DNA, 465 bp, Zea mays
ggttcggaattcccgggctacaacaacttgtgctagcaaaccttgctgcctactctcagcaacagcagtttcttccattcaaccaactagctgcattgaactctgcttcttatttgcaacaacaacaactaccattcagccagctacctgctgcctacccccagcaatttcttccattcaaccaactggcagcattgaactctcctgcttatttacagcagcaacaactactaccattcagccagctagctggtgtgagccctgctaccttcttgatacaaccacagttgttgccgttctaccagcacgctgcgcctaacgctggcaccctcttacaactgcaacaattgctgccattcaaccaacttgctttgacaaacccagcagcgttctaccaacaacccatcattggtggtgccctcttttagatttcttatgagttatagttcaataataaagtttttt

SEQ ID NO: 90243 - DNA, 445 bp, Zea mays
  unsure (1)..(445): unsure at all n locations
taccaactagcaacatacatagtgaagtacactagcaacatcttagcaccaatgggagccaagatttttgccctccttgccctccttgctctttcagcaagcgctgctacctcgacttttattccacaatgctcacaacaatacctctctccggtgacagccgcgggatttcaatacccaactatacaatcctacatggtacaagaggccatccaagcaagcatcttacggtcattagcattaaccctccaacaaccatatgctctattgcaacagccatccttagtgcatctgtatctccaaagaatcgcggcacaacaactacaacaacagttgctaccaacaatcaatcaagtagttgcagcgaaccttgctgcttacctncagcaacaacagtttcttccattcaatcaactagctggggtgaaccctgctatctacttgc

SEQ ID NO: 90244 - DNA, 540 bp, Zea mays
  unsure (1)..(540): unsure at all n locations
gtagaggaaggtctattcccctcagtctncgtangcacgccgtaccgttcggaattcccgggtcgactcacgcgtccgggagccgatgactagctacctatctcgctagtttactcatttagcggcaattagtaacggaatgtcacccatcaacatgcatggcagtgtgagcaatgacctgaacgaaccattgaaatggatcggaataatatatgaagctaacagatgattggaaaataaggtcaacaacaaatccaagagcagcaacataatacactacaacataatccacaataacaacaacatcaaccaccagcataacatcaaccatcggcaacatcaccaacaacaacaaagttcacatgcaaccacaataacattaacagcaactaagagggtcatgttcaacaacaactatgtcaaccgcatcactcattccaacaacaacaactacagcacgaactacatcatcaatgtgaaggccaacatcaacataaccatcagttataaagccattgtgctttaaccaaaataaagact

SEQ ID NO: 90245 - DNA, 398 bp, Zea mays
attttgcctccttatgctccttggtctttctgcaagtgctgctacggcgaccattttgccgcaatgctcgcaagctcctatagcttcccttcttcccccgtacctctcaccagcggtgtcttcggtatgtgaaaacccaattcttcaaccctacaggatccaacaggcaatcacagctggcatcttacctttatcacccttgttccttcaacaatcatcagccctattacatcagttacctttggtgcatttattggcacaaaacatcagggcacaacaactacaacaacttgtgctagcaaaccttgctggctactctcagcaacagcagtttcttccattcaaccaactagctgcattgaactctgctttttatttgcaacaacaacaactaccat

SEQ ID NO: 90246 - DNA, 442 bp, Zea mays
attgagaccaactagcaacatagaaagcacaatattgtaccaataatggcagccaaaggattttgcctcattatgctccttggtctttctgcaagtgctgctacggcgagcattttcccgcaatgctcacaagctcctatagcttcccttcttcccccatacctctcaccagcgatgtcttcagtatgtgaaaatccaattcttctaccctacaggatccaacaggcaatcgcagcaggcatcttacctttatcacccttgttcctccaacaatcatcagccctattacagcagttacctttggtgcatttattggcacaaaacatcagggcacaacaactacaacaactcgtgctagcaaaccttgctgcctactctcagcaacagcagttacctttggtgcatttgttggcacaaaacatcagggcacaacaactacaac

SEQ ID NO: 90247 - DNA, 439 bp, Zea mays
atcaaatccatgcgtgcagcaatatctgaaacatttcctgagcctaataggcggctgggacagagacttttgaaaatgatgcataccattgcttctcatactgccgagaatagaatgactccatcagcagttgctgcatgtatggccccgctcttgttgcgtccccttcttgctggtgaatgcgagatggaagatgacttagacatgaatggtgacagtgctgctcagcttattgccgctgcaaatgctgctaacagtgctcaaggcattgtaactactctattagaggaatacgagagtatattcaatgatgagcactttaggtgctccttatcacctgattctcaaacaggagatagtggaagtgaagaatcaactgatgacgaaactgtggataccaagggtaatggatttcatgatgcggaaaatgatgtagatc

SEQ ID NO: 90248 - DNA, 445 bp, Zea mays
gcacaatagtgtaccaacaatggcagccaaaatattttgcctccttatgctccttggtgtttctgcaagtgctgctacggcgaccattttcccacaatgctcacaagctcctatagcttcccttcttcccccgtacctctcaccagcggtgtcttcggtatgtgaaaacccaattcttcaaccctataggatccaacaggcaatcgcagctggcatcttacctttatcacccttgttcctccaacaatcatcagccctattacagcagttacctttggtgcatttattggcacaaaacatcagggcacaacaactacaacaacttgtgctagcaaaccttgctgcctactctcagcaacaacagtttcttccattcaaccaactagctgcattgaactctgcttcttatttgcaacaacaacaactaccattcagccagctatct

SEQ ID NO: 90249 - DNA, 427 bp, Zea mays
  unsure (1)..(427): unsure at all n locations
gaacgaagctgaagtagttcgttgtgaacccagtatggcaaacgcgccgaggatcctggccctcggcctgctgctagcgctcctgtgcgctgccgccggcccggccgccgcgcagaactgcggctgccagcctaacttctgctgcagcaagttcggctactgcggcacgaccgacgactactgcggcgacgggtgccagtcgggcccgtgccgctcgggcggcggcggcggcggcggcggaggcggaggcagtggcggtgcgaacgtggctaacgtggtcagcgacgcgttcttcaacggcatcaagaaccaggccgggagcgggtgcgagggcaagaacttctacacccggagcgcgttcctgagcgccgtcaacaagtacccgggcttcgcccatggcgggacggangtggagggcaagcgcgag

SEQ ID NO: 90250 - DNA, 417 bp, Zea mays
gtgtaccaacaatggcagctaaaatattttgcctccttatgctccttggtctttctgcaagtgctgctacggcgaccattttcccacaatgctcacaagctcctatagcttcccttcttcccccgtacctctcaccaacggtgtcttcggtatgtgaaaacccaattcttcaaccctacaggatccaacaggcaatcgcagctggcatcttacctttatcacccttgttcctccaacaatcatcagccctattacagcaggtacctttggtgcatttattggcacaaaacatcagggcacaacaactacaacaacttgtgctagcaaaccttgctgcctactctcagcaacagcagtttcttccattcaaccaactagctgcattgaactctgcttcttatttggcacaacaacaac

SEQ ID NO: 90251 - DNA, 400 bp, Zea mays
ctcgaaggttccagcgagcgactgtgtcgagcaggagagagcgcgatggggaagatgcggcagctgatctgcctcgtggccgccgtcgccgccgcggccatcctcctgacagcgtcggccaagaagtccggcgacgtcaccgagcttcagatcggcgtcaagtacaagcctgagtcatgtacgctgcaagcacacaaaggagacaaaattaaggttcactatcgtgggacactcactgatggatcagttttcgattctagctatgacagaggtgacccgtttgaattcactcttggaaatggccaagtgataaaaggttgggaccaaggattgctcggtatgtgccgtggtgaaaagaggaagctaaagatacctgcaaagatgggttatggtgagcgag

SEQ ID NO: 90252 - DNA, 451 bp, Zea mays
cccgtacctctcaccagcggtgtcttcggtatgtgaaaacccaattcttcaaccctacaggatccaacaggcaatcgcagctggcatcttacctttatcacccttgttcctccaacaatcatcagccctattacaacagttacctttggtgcatttattggcacaaaacatcagggcacaacaactacaacaacttgtgctagcaaaccttgctgcctactctcagcaacagcagtttcttccattcaaccaactaggttcattgaactctgcttcttatttgcaacaacaacaactaccattcagccagctacctgctgcctacccccagcaatttcttccattcaaccaactagcagcattgaactctcctgcttatttacagcagcaacaactactaccattcagccagctagctggtgtgagccctgctaccttcttgacacaacca

SEQ ID NO: 90253 - DNA, 483 bp, Zea mays
accgtccggaattcccggtcgaccacgcgtccgcggacgcgtgggctagcaacatagaaagcacaatagtgtaccaacaatggcagccaaaatattttgcttccttatgctccttggtctttctgcaagtgctgctaccgcaaccattttcccacaatgctcacaagctcctatagcttcctttcttcccccatacctctcaccagcggtgtcttcagtatgtgaaaacccaattcttcaaccctacaggatccaacaggcaatcgcagcaggcatcttacctttatcacccttgttcctccaacaaccgtcagccctattacagcagttacctttggtgcatttgttggcacaaaacatcaaggcacaacaactacaacaacttgtgctaggaaaccttgctgcctactctcagcaacagcagtttcttccattcaaccaactggctgcattggactctgctggttatttcaacaacaacta

SEQ ID NO: 90254 - DNA, 527 bp, Zea mays
gagatatagggttctttttatagaaaatgatgtacgctcgtaccggttcggaattcccgggtcgacctacgcgtccggttcctttgttcattgatactgatcaaggaactagtgggaaatggggcctgtggattgtccacaaacttgtgcttactggagtctatgggctgattgttttcatgcatcattcaagatggagagacaggctgcctgcaaaaccagcatactacaactatgtatgtgtgatgttgctactgaatggcatatcactgtttggatgtttccttattgcaagtggagctggatttggtttatggttatataatctcacaaccgtatgctatcattctctttaccttcccctcctatatgtgactttcttagcagacttcttccaggaggaagacatgctcctagagaacgtctactattctgaaatgaaggatgctgggttcttcgatgctgactgggattaatccgtggctactgtgctgtatgacccatcccatatgaagtacgctgtattt

SEQ ID NO: 90255 - DNA, 521 bp, Zea mays
gaagcgtttcttttataagacgaggagatagttatcgctctaccggttcggaattcccgggtcgacccacgcgtgcggcttcaacaagcaatcgcagcaagcaacatacctttatcgcccttgttgtttcaagaatgaccagccctatctttggtgcagtcattggtacaaaccatcagggcacaacagctgcagcaactcgtgctacctgtgatcaaccaagtagctctggcaaacctttctccctactctcagcaacaacaatttcttccattcaaccaactgtctacactgaaccctgctgcttatttgcagcaacaactattaccatttagccagctagctactgcctactctcagcaacaacaacttcttccatttaaccaattggccgcactgaaccccgctgcttatttgcagcagcaaatactactgccatttagcgagctagctgcagcaagtcgtgcttccttcttgacacagcaacagttgctgcctttctacaagcagtttgcggctaa

SEQ ID NO: 90256 - DNA, 445 bp, Zea mays
tgagcattcagaaacacacctagcgaagcgcactagcaacgacctaacaacaatggctgccaagacattatccctccttgcgcttcttgccctttttgtgagtgcaacaaatgcgttcattattccacaatgctcacttgctccgagtgccattattccacagttcctccctccagttacttcaatgggcttcgaacacccagctgtgcaagcctataggctacaacaagcgcttgcggcgagcgtcttagaacaaccaattgcccaattacaacaacaatccttagcacatctaaccatacaaaccatcgcaacgcagcagcaacaagcactgagccacctagccgtggtgaaccctatcgcctacttgcaacaacagctgcttgcatccaacccacttgctttggcaaacgtagctgcataccaacaacaacaacagttgcaa

SEQ ID NO: 90257 - DNA, 444 bp, Zea mays
gcacaatagtgtaccaacaatggcagctaaaatattttgcctccttatgctccttggtgtttctgcaagtgctgctacggcgaccattttcccacaatgctcacaagctcctatagcttcccttcttcccccgtacctctcaccaacggtgtcttcggtatgtgaaaacccaattcttcaaccctacaggatccaacaggcaatcgcagctggcatcttacctttatcacccttgttcctccaacaatcatcagccctattacagcagttacctttggtgcatttattggcacaaaacatcagggcacaacaactacaacaacttgtgctagcaaaccttgctgcctactctcagcaacagcagtttcttccattcaaccaactagctgcattgaactctgcttcttatttgcaacaacaacaactaccattcagccagctatc

SEQ ID NO: 90258 - DNA, 474 bp, Zea mays
accggtccggaattcccgggatagaaagcacaatattgtaccaataatggcagccaaaatattttgcctcattatgctccttggtctttgtgcaggtgctgctacggcgagcattttcccgcaatgctcacaagctcctatagcttcccttcttcccccatacctctcaccagcgatgtcttcagtatgtgaaaatccaattcttctaccctacaggatccaacaggcaatcgcagcaggcatcttacctttatcacccttgttcctccaacaatcatcagccctattacagcagttacctttggtgcatttattggcacaaaacatcagggcacaacaactacaacaactcgtgctagcaaaccttgctgcctactctcagcaacagcagttacctttggtgcatttgttggcacaaaacatcaaggcacaacaactacaacaactcgtgctagcaaaccttgctgcctactc

SEQ ID NO: 90259 - DNA, 480 bp, Zea mays
ggaattcccgggctacaacaacttgtgctagcaaaccttgctgcctactctcagcaacagcagtttcttccattcaaccaactagctgcattgaactctgcttcttatttgcaacaacaacaactaccattcagccagctacctgctgcctacccccagcaatttcttccattcaaccaactggcagcattgaactctcctgcttatttacagcagcaacaactactaccattcagccagctagctggtgtgagccctgctaccttcttgatacaaccacagttgttgccgttctaccagcacgctgcgcctaacgctggcaccctcttacaactgcaacaattgctgccattcaaccaacttgctttgacaaacccagcagcgttctaccaacaacccatcattggtggtgccctcttttagatttcttatgaggtatagttcaataataaaagtttttggctgaagttggggccttcc

SEQ ID NO: 90260 - DNA, 423 bp, Zea mays
caacaacaacaacagtttctgccatcactgagccacctagccgtggtgaaccctgtcagctacttgcaacagcagctgcttgcatccaacccacttgctctggcgaacgtagctgcataccagcaacaacaacagctgcaacagtttatgccagtgctcagtcaactagccatggtgaaccctgccgtctacctacaactactttcatctagcccgctcgcggtgggcaatgcacctacgtacctacaacaacagttgctgcaacaaattgtaccagctctgactcagctagctgtggcaaaccctgctgcctacttacaacagttgcttccattcaaccaactggctgtgtcaaactctgctgcgtacctacaacagcgacaacagttacttaatccattggcagtggctaacccattggtc

SEQ ID NO: 90261 - DNA, 431 bp, Zea mays
attgagaccaactagcaacatagaaagcacaatagtgtaccaacaatggcagccaaaagatggtgcctccttatgctccttggtctttctgcaagtgctgctacggcgaccattttcccgcaatgctcgcaagctcctatagcttcccttcttcccccgtacctctcaccagcggtgtcttcggtatgtgaaaacccaattcttcaaccctacaggatccaacaggcaatcgcagctggcatcttacctttatcacccttgttcctccaacaatcatcagccctattacaacagttacctttggtgcatttattggcacaaaacatcagggcacaacaactacaacaacttgtgctagcaaaccttgctgcctactctcagcaacagcagtttcttccattcaaccaactaagttcattgaactctgcttc

SEQ ID NO: 90262 - DNA, 442 bp, Zea mays
attgagaccaacaagcaacatagaaagtggaatccagtagcaacaacagagcaacaatggcgaccaagatattttccctccttatgctccttgctctttctgcatgtgttgctaacgcgacaattttccctcaatgctcacaagctcctatagcttcccttcttcccccataccttccatcaatgatagcttcagtatgtgaaaacccagctcttcagccctataggctccaacaagcaatcgcagcaagcaacatacctttatcacccttgttgtttcaacaatcgccagccctatctttggtgcagtcattggtacaaaccatcagggcacagcagctgcagcaactcgtgctacctgtgatcaaccaagtagctctggcaaacctttctccctactctcagcaacaacaatttcttccattcaaccaactgtctacact

SEQ ID NO: 90263 - DNA, 482 bp, Zea mays
ccggtcggaattaccggtcgacccacgcgtacgagcaacatagaaagcacaatagtgtaccaacaatggcagccaaaatattttgcgtccgtatgctccttggtctttctgcaagtgctgctacggcgaccattttcccgcaatgctcgcaagctcctatagcttcccttcttgcaccgtacctctcaccagcggtgtcttcggtatgtgaaaacccaattcttcaactctacaggatccaacaggtaatcgcagctggcatcttacctttatcacccttgctcctccaacaatcatcagccctattacaacagttacctttggtgcattaattggcacactacatcagggcacagcatctacaacaactcgtgctagcaaaccttgctgcctactctcagcaacagcagcttcttccattcaaccaactaggttcattgaactctgcttgttatatgcagcaacaacaactaccattcagg

SEQ ID NO: 90264 - DNA, 242 bp, Zea mays
ggaattaccggctcgacccacgcgttcgggagccgctgactagctacctagctcgctagtttactcatttagcggcgatgagtaacgtagtgtcacccatcaccatgggtggcagtgtgagcaatgacctgaatgaaccattgaaatggaaaggaataatatataaggaaaaaagatgattggaaaaaaaaaaaaaaaaaaaaaaaaaaaaaaaaaaaagaaaaacaataaaaatagacaaa

SEQ ID NO: 90265 - DNA, 402 bp, Zea mays
cggacgcgtgggcggacgcgtggtcggacgcgtgggcggacgcgtggggccgtcgtcggtgcagtgtccatagccaccgcaggagactgaaatggggggttttgtcaagacccacaagagcaatgcatacttcaagcgtttccaggtgaagttcaagagaaggcgcgctggcaagacagactacagggccaggataaggctgattaaccaagacaaaaacaagtacaatacacccaaatacagatttgttgtgcgaattaccaacaaggacatcacagcacatatcatatctgctagtatagcatgtgatatggttcttgcttctgcttactcgcatgagttgccacgatatggtctcgaagttggtctgaccaactatgcagctggctactgcactggcct

SEQ ID NO: 90266 - DNA, 431 bp, Zea mays
gacggggctgagggcgaaccgggccactgaggcgggttattggaaggcgaccggcaaggacaaggaggtctacaacccctttgcagcggaagggctgctgctggtcggcatgaagaagacgctcgtgttctacaaaggcagggctcccaggggtgacaaaaccaactgggtgatgcacgagtacaggctcgaaggcagcggtaggctccctgctagtcctgcatccgcatccggctcagccaccaacatcgctgcggccatgatgaaagcttcagcttcggcttgcaaggatgagtgggtggtctgtcgtgtgttcaacaagaccaccgggatcaagaagacggctgcgccggcataccaggtggccatggccggtgctgagatggatcagaatcagaacaacattccggccatccccatccccatgccgc

SEQ ID NO: 90267 - DNA, 476 bp, Zea mays
taccggtcggattcccggtcgatccacgcgtccgatcgcaacaggcatcttaccattatcacccttgttcctccaacaaccgtcagcggtagtacagcagttacctttggtccatttggtggcacaaaacatcagggcacaacaactacaacaacttgtgctagcaaaccttgctgcatactctcagcaacatcagtttcttccattcaaccaactggctgcattgaactctgctgcttatttgcaacaacaattaccattcagccagctagttgctgcctacctccagcaatttcttccattcaaccaactagcagcattgaactctgctgcttatttacagcagcaacaactactaccattcagccagctagctgatgtgagccctgctgccttcttgacacaacaacagttgttgccgttctacctgcacgctatgcctaacgctggcaccctcttacaactgcaacaattgc

SEQ ID NO: 90268 - DNA, 401 bp, Zea mays
ggaattcccggcagcaacatagaaagcacaatagtgtaccaacaatggcagccaaaatattttgcttccttatgctccttggtctttctgcaagtgttgctaccgcaaccattttcccacaatgctcacaagctcctatagcttcccttcttcccccatacctctcaccagcggtgtcttcaatgtgtgaaaacccaattgttcaaccctacaggatccaacaggcaatcgcaacaggcatcttaccattatcacccttgttcctccaacaaccgtcagccctattacagcagttacctttggtccatttggtggcacaaaacatcagggcacaacaactacaacaacttgtgctagcaaaccttgctgcatactctcagcaacatcagtttcttccattc

SEQ ID NO: 90269 - DNA, 379 bp, Zea mays
ctgggtcttcagaccattagctttatctactccagagcgcagaagaacccgatcgacaccatgagggtgttgctcgttgccctcgctctcctggctctcgctgcgagcgccacctccacgcatacaagcggcggctgcggctgccagccaccgccgccggttcatctaccgccgccggtgcatctgccacctccggttcacctgccacctccggtgcatctcccaccgccggtccacctgccgccgccggtccacctgccaccgccggtccatgtgccgccgccggttcatctgccgccgccaccatgccactaccctactcaaccgccccggcctcagcctcatccccagccacacccatgcccgtgccaacagccgc

SEQ ID NO: 90270 - DNA, 378 bp, Zea mays
gcgaggacatgaagttcttcgccaccccgccggtgcacggctcgctggcgaaccaggtggtgcacccggccgacctgtgcttcaagctccccgacggggtgagcctggaggagggcgccatgtgcgagccgctgagcgtgggcgtgcacgcgtgccgccgcgcgggggtggggcccgagacgggcgtgctcgtggtgggcgccggccccatcggcctggtgtcgctgctggcggcgcgggccttcggcgcgccgcgcgtggtggtcgtggacgtggacgagcaccgcctggccgtggccaggtcgctgggcgcggacgcggcggtgcgggtgtcgccccgcgcggaggacctggcggacgaggtggagcgcatccgcg

SEQ ID NO: 90271 - DNA, 404 bp, Zea mays
  unsure (1)..(404): unsure at all n locations
caatgatcaggttcgctttgagcttacattctatgctttaaatcctgaacttaaagtggtggcaccttggagggagtgggatatcacaggacgtgaagatgctattgaatatgcaaagaaacataatgtacctgttccagtttcaaagaaatcaatatacagccgagaccgaaacttgtggcaccttagccatgagggtgacatcctggaagacccagcaaatgagccaaaggaagatatgtatatgatgtcgattgctccagaaaatgcgcnctcgaaacctgagtaattggagaatggtatcatnngctgtgtncctgtttcaatcaatggccgagacctgtaaccagcatccctcttngcggagctcaatgaaaatcgtggaaagcccaaattgggggggg

SEQ ID NO: 90272 - DNA, 170 bp, Zea mays
ctggcttctcctccccctcttaccaagtcctcttcgggttagggttacttagggttttgtggaggggcgatggcggcggctgatgtggagtaccgttgcttcgtcggcgggcttgcctgggccaccagcaacgagtcgctggagaatgccttcgccttctacggcgagat

SEQ ID NO: 90273 - DNA, 428 bp, Zea mays
aattcccgggtgaatcctcgctctgccgagcgcttaacagcacatgaagttctatgccatccatggattcgtgaccatggagtagcttctgaccgtccactggatccagctgtcttatctcgcattaagcaattctctgcaatgaataagttgaagaaaatggctttgagagtaatagctgagagcctatcagaagaggaaattgcggggttgaaggaaatgttccaaccatggacactgacaacaggggcgcaattacctacaatgaactaaagaaaggatggaaaaaatttggttccacactgaagacacttaaaatcgtgaacttaatggatccacttgatttcaccaccatgggaccattggcctccttggaatcaatggttgcaactttgattttaattagcctgaaccccaaaaacattttg

SEQ ID NO: 90274 - DNA, 385 bp, Zea mays
cccacgcgtccggcaacatagaaagcacaatagtgtaccaacaatggcagccaaaataggttgcctccttatgctccttggtctttctgcaagtgctgctacggcgaccattttcccgcaatgctcgcaagctcctatagcttcccttcttcccccgtacctctcaccagcggtgtcttcggtatgtgaaaacccaattcttcaaccctacaggatccaacaggcaatcgcagctggcatcttacctttatcacccttgttcctccaacaatggcagccaaaatattttgcctccttatgctccttggtctttctgcaagtgctgctacggcgaccattttcccgcaatgctcgcaagctcctatagcttcccttcttcccccgt

SEQ ID NO: 90275 - DNA, 379 bp, Zea mays
  unsure (1)..(379): unsure at all n locations
ctgtatcgcccttgttgtttcaacaatcgccagtcctatctttggtgcagtcattggggcaaaccatcagggcacaacagctgcagcaactcgtgctacctctgatcaaccaagtagctctggcaaacctttctccctactctcagcaacaacaatttcttccattcaaccaactgtctacactgaaccctgctgcttatttgcagcaacaactattaccatttagccagctagctactgcctactctcagcaacaacaacttcttccatttaaccaattggccgcactgaaccccgctgcttatttgcagcagcaaatactactaccatttagccagctagctgcagcaaaccgtgcttncttcttgacacagcaaca

SEQ ID NO: 90276 - DNA, 383 bp, Zea mays
ggtgtttttgattttagccgccgccgctgctcatctcacatccctcgagaagacgcctgctcctcgccgatcgatacgatggccgtcttctccgacctccacaccgccgacggcctcaagtccctcgaggctcacctcgccggcaaaacctatgtgtctggtgactccattactaaggatgacattaaggtcttcgccgcggtgccgtcgaagcctggcgctgagtttcctaatgccgcccgctggtacgagaccgtctctgcggctgtagcctcaagattccctggtaaggctgttggtgtaaatctgcctgcgggatcagctcctgcggcagctgctcctgcggatgaggctgaagatgatgatgaccttgatctttttgg

SEQ ID NO: 90277 - DNA, 369 bp, Zea mays
  unsure (1)..(369): unsure at all n locations
ctggctgaagtgcgtgccttcttcgatgtgcatgaccaagaaggaagccaccctgggggcgtccaccttgaaatgactgggcagaacgtgaccgagtgcatcggtggatcacggaccgtgaccttcgacgatctgagcgaccgctaccacacccactgcgacccaaggctgaatgcctcccagtccctggagctcgcctttatcatcgcagagaggctgaggaagaggaggatgcgatcggggctcaacagcagcctgccactgccgncactggctttctgagtagccggagccaaacacaaagggaggtaggaatagctgtggtgacctcggaggagaagagacagtcgacgccttgtttggtgatgc

SEQ ID NO: 90278 - DNA, 304 bp, Zea mays
ccatggccgacgtccgcgcgcagaacgcgctcgcggagatccaggagttcacctccttcctcagggtgctcgggagctaccccatggacatgacgccgtgggacgccgcgctctgctctcgcgccagccagtactagtgattgggcgaacaatggtcaagccgccaaaggataacggcaattcattggtttttaatcagtccggcattaccagaaaccgtgctttgggtctttttatccattctcttttctggatggcttttcttaaaaaaaaaaacggagaggagcgagggtcgattgggggg

SEQ ID NO: 90279 - DNA, 384 bp, Zea mays
ccgacgcgtccggattgggttcaaagttgggcttttggacagctgtggtgtgcacggcagctctgtgacttgtgaggaggaagggaggaagaaagcggatccatggcgtcgaagcggatcctcaaggagctcaaggacctgcagaaggatcctcccacctcttgcagcgcaggccctgttgccgaagatatgttctactggcaggcgacgattatggggccatcagatagcccatacgctggtggcgtatttttggtcactattcactttccaccggactacccattcaaaccaccgaaggttgcattcaagacgaaggtttaccatccgaatatcaacagcaacgggagcatctgtcttgatatcttgaaggagcaatggagc

SEQ ID NO: 90280 - DNA, 384 bp, Zea mays
gaattcccaggcaggcaggtcggcgaggagggcaggaagaccgaagaccgagccgtgcgggggctcgggacgggaacgggacaggaccccaaaatctcagatccttcctgcccgcccgcccgtgcccgtcgacgcgtcgttcttgccggccgcgcctcacctccgccctctcctcctccagggggatcggatacgccacaggctgcgcgatggtgctgtgggtcttcggctacggctccctcatctggaaccccggcttcgacttcgacgacaaaatcctcggcttcatcaagggctacaagcgcacctttaatctcgcttgcattgaccacagaggcacaccggagcatccggcgaggacctgcacgcttgaaaccgacgacg

SEQ ID NO: 90281 - DNA, 498 bp, Zea mays
ggcaaaagggttaattattgataagcaagtattgtatagctctaccggttcggaattcccgggtcgacccacgcgtgcgattagcaacaatagagcaacaatggcgaccaagatattttccctccttatgctccttgctctttctacatgtgttgctaacgcgacaattttccctcaatgctcacaagctcctatagcttcccttcttcccccataccttccatcaattatagcttcagtatgtgaaaacccagctcttcaaccatataggcttcaacaagcaatcgcagcaagcaacatacctttatcgcccttgttgtttcaacaatcaccagccctatctttggtgcagtcattggtacaaaccatcagggcacaacagctgcagcaactcgtgctacctgtgatcaaccaagtagctctggcaaacctttctccctactctcagcaacaacaatttcttccattcaaaaccccccccaaaaaaaaaaactcttt

SEQ ID NO: 90282 - DNA, 357 bp, Zea mays
gacgatcagccaacaagggatatatcgtacgcacttttagctcccatgtactgcttccagctatctggatacgtcagcattaaaaagcagtacatgcgtacgtctccaccatctcagttgctcagacacatacatatcagtgacaatcaataactcaacaatcatcctatatcattaacttcttatcccataccttccatcaattataacttcattatgtgaaaacccagctcttcaaccatatatgcttcaacaagcaatctcatcaagcaacatacctttatcgcccttgttgtttcaacaatcaccagccctatctttggtgcaatcattgtttcaaaccatcatgtcacaaca

SEQ ID NO: 90283 - DNA, 294 bp, Zea mays
tccgggtcgaccacgcgtccggcgagaggcgaggagagagaaagttctcgagctagacgagcgccgtgcgaggagagaagcgaggtgagcggtgaagcggcggccgtgggcggaggccaaggagaggcgaatggcatcccgccgaacgtcaccatctatatcaacaaccttaacgagaagatcaagctcgaagaacttaagaagtccctaacagccggttttttccagtttgggaaaattcttgatgggcttgctttcaagactttggagcataaaggtcaagcttgggttggc

SEQ ID NO: 90284 - DNA, 356 bp, Zea mays
cagcaagcaacatagaaagtagaatccattagcaacaatagagcaacaatggcgaccaagatattttccctccttatgctccttgctctttctacatgtgttgctaacgcgacaattttccctcaatgctcacaagctcctatagcttcccttcttcccccataccttccatcaattatagcttcagtatgtgaaaacccagctcttcaaccatataggcttcaacaagcaatcgcagcaagcaacatacctttatcgcccttgttgtttcaacaatcaccagccctatctttggtgcagtcattggtacaaaccatcagggcacaacagctgcagcaactcgtgctacctgtgat

SEQ ID NO: 90285 - DNA, 384 bp, Zea mays
caagcaacatagaaagtagaatccattatcaacaatagagcaacaatggcgaccaagatgttttccctccttatgctccttgctctttctacatgtgttgctaacgcgacaattttccctcaatgctcacaagctcctatagcttcccttcttcccccataccttccatcaattatagcttcagtatgtgaaaacccagctcttcaaccatataggcttcaacaagcaatcgcagcaagcaacatacctttatcgcccttgttgtttcaacaatcaccagccctatctttggtgcagtcattggtacaaaccatcagggcacaacagctgcagcaactcgtgctacctgtgatcaaccaagtagctctggcaaacctttctccc

SEQ ID NO: 90286 - DNA, 425 bp, Zea mays
caacaagcaacatagaaagtggaatccagtagcaacaatagagcaacaatggcgaccaggatacgttccctccttatgctccttgctctttctgcatgtgttgctaacgcgacaattttccctcaatgctcacaagctcctatagcttcccttcttcccccataccttccatcaatgatagcttcagtatgtgaaaacccagctcttcaaccctataggctccaacaagcaatcgcagcaagcaacatacctttatcacccttgtttcaacaatcgccagccctatctttggtgcagtcattggtacaaaccatcaaggcacagcagctgcagcaactcgtgctacctgtgatcaaccaagtagctctggcaaacctttctccctactatcagcaaccaaaaaccccctaaaaaaattttttttt

SEQ ID NO: 90287 - DNA, 384 bp, Zea mays
ctttcagcaagcgctgctacctcgacttttattccacaatgctcacaacaatacctctgtccggtgacagccgcgggatttcaatacccaactatacaatcctacatggtacaagaggccatccaagcaagcatcttacggtcattagcattaaccctccaacaaccatatgctctattgcaacagccatccttagtgcatctgtatctccaaagaatcgcggcacaacaactacaacaacagttgctaccaacaatcaatcaagtagttgcagcgaaccttgctgcttacctccagcaacaacagtttcttccattcaatcaactagctggggtgaaccctgctatctacttgcaggcacaacagctactaccatttaaccaa

SEQ ID NO: 90288 - DNA, 322 bp, Zea mays
cccaattggttggtataatcctttagcttcaatagagcaacaatggcgaccaggatatgttccctccttatgctgcttgctctttctacatgtgttgctaacgcgacaattttccctcaatgctcacaagctcctatagcttcccttcttcccccataccttccatcaattatagcttcagtatgtgaaaacccagctcttcaaccatataagcttcaacaagcaatcgcagcaagcaacatacctttatcgcccttgttgtttcaacaatcaccaaccctatctttggtgcagtcattggtacataccattaaggcacaac

SEQ ID NO: 90289 - DNA, 491 bp, Zea mays
  unsure (1)..(491): unsure at all n locations
ngagttaaagtgttcgtatgaaggggggtatagtatgctctaccggttcggaattcccgggtcgacccacgcgtgcgcccacgcgtccgctggcttaattttgcatttgattacttccatacgtaggctggacaagaacgtggaagattacatgtaaatccagaagaagatgagcaaccgaagaagaaagttcgacttggaagcccagcaaatcagtggatttcagtttataatgctagaaggcccatgaagcagagataccattacaatgtagcagatgccaggcttcatcaacacatagagaagggtaatgaagatggattgttcattagttcagtagcatcttcagccaatctttgggctctcattatggatgcagggactggtttcacatcccaagtatatgaactgtcacccatattccttcataaggattggattatggagcagtgggaaaataacttaacccttttaaaacccccaaaaatttt

SEQ ID NO: 90290 - DNA, 422 bp, Zea mays
ctggactacgcgagaacaaggttggctaatgacgcgaaggctgccaagggaggaggtgaaaggcggttcaatgggcttgtcgatgtctaccgcaagacactcaagtctgatggtattgctgggctttaccgtggatttaacatctcctgtgttggaatcattgtttatcgtggtctgtactttgggctctatgattccatcaagccagttgtccttactggcaacctccaggacaatttctttgccagtttcgctctgggttggctgatcactaatggtgctggtcttgcatcttaacccatcgataccgtccccaaaaggatgatgatgacctctggtgaaggtgtcaagtaccagaacttcttggaccccttccagcagattcttaaaaagggaagggccaagttcctgtgtaagggtgc

SEQ ID NO: 90291 - DNA, 194 bp, Zea mays
gtcggatgtggcattggtggtagctcaaggtacttggcgaagaaatacggagcgcagtgcactgggatcacgttgagccctgttcaagccgagagaggaaatgctctcgctgcaacgcaggggttgtcggatcaagttactctgcaagttgctgatgctctggagcaaccgtttcctgacgggcagttcgatct

SEQ ID NO: 90292 - DNA, 323 bp, Zea mays
gtcagctagctgctgcctacccccagctttttctttcattcaaccaactggcagcattgaactcggctgcttatttacaacagcaacagctaccaccattcagccagctagctgatgtgagccctgttgccttcttgacacaacaacatttgttgccgttatacttgcacgctgatcctaacgctatcacactacttacgactgcaacaattgctgccattcaacctacttgctttgacagaccctacattgttctaccatcaactcataactggtggcacccttttttatattgctcatgatgcatacaccgattttgaatc

SEQ ID NO: 90293 - DNA, 417 bp, Zea mays
ggaattcccgggctagcaacatagaaagcacaatagtgtaccaacaatggcagccaaaatattttgcctccttatgctccttggtcgttctgcaagtgctgctacggcgaccattttcccgcaatgctcgcaagctcctatagcttcccttcttcccccgtacctctcaccagcggtgtcttcggtatgtgaaaacccaattcttcaaccctacaggatccaacaggcaatcacagctggcatcttacctttatcacccttgttcctccaacaatcatcagccctattacatcagttacctttggtgcatttattggcacaaaacatcagggcacaacaactacaacaacttgtgctagcaaaccttgctgcctactctcagcaacagcagtttcttccattcaaccaactagctgc

SEQ ID NO: 90294 - DNA, 386 bp, Zea mays
aaagaagaagggcccccttcaacagacagatcctccatcaatacctgttgatgagcttgtcccctcaggagaatttccagagggcgaaatccaacaatacaaggatgacaatctgtggagaacaactagtgaggaaaagagggacctggaacgactgcaaaagccaatatacaactctgttcgccaagcagcagaagttcatagacaggtgcggaaatatatgaggagcatcataaaacctggaatgttaatggttgatctatgtgagacattggaaaacatggtccggaaacttatcaaggagaatggactgcaagctggcattgcttttccgactggatgctccttgaattgggttgcagctcactggactccaaatgcgggcg

SEQ ID NO: 90295 - DNA, 230 bp, Zea mays
agttgctgcctttctaccagcagtttgcggctaaccccgcaaccctcttacaactacagcaattgttgccctttgtccaacttgctttgacaaacccagcagcctcctaccaacaacacatcattggtggtgccctcttttagattgcttattagttgtaattcaataataaagttttttggatgatgtatgtggccaaccagaaataagaagttacatttccagattct

SEQ ID NO: 90296 - DNA, 384 bp, Zea mays
gattcttgctccatctcaggagctgagcaagcaagggtgtatcctggaggctgttattgaagcaagtgctactgaaattatcaatctcatggatagcctaaatgaatgggacagtaaagtgggcgatggtgactgtggaagcacaatgtatagaggtgcaacagctattcttgaagatatgaaaaagcgttaccctatgaatgatgcagcgggaacaataaatgaaattggggcaacaatccgaagggtgatgggtggaacaagtggaatcttgtatgccatactctgcaaggctgcgtatgcaagcttaaagcagagctcaactgtcactgcgaataaatgggctgatgctttagaggcctccattgctgctgttagcaaata

SEQ ID NO: 90297 - DNA, 313 bp, Zea mays
attgagatttatctcgatcaatatattgattatttctaggaaacacacgtcgggatgggggcaccattatcgagtacatgtcatatgtaatctaaaagatggcacctccaacgatgggttgctgcctcgacaagacaggattcatcaaagagaactggttgtatggcagcaattgttgctgctgtaggaaggcggcgaccaatgggttagccactaccaatggattaagtaactgttgtcgctgttgtaggtacgcagcagagttcgacagagtcagtcgattgaatggaagcagctgttgcaagtaagcaac

SEQ ID NO: 90298 - DNA, 412 bp, Zea mays
gcttctttggtttgtacaaaacaagaaggtcgaagattggacagacccacgttttcccactgtgcaaggcatagtacgtcggggcttgaaggttgaagcattgatacagtttatactccaacagggtgcttcaaaaaatctgaatctcatggagtgggataaactctggacaatcaacaagaagataattgatccagtgtgcgcaaggcatactgctgtgctaaaagaccagcgtgtcatcttcacttttaccaaatggccaaaagaaccctttggtcgaaatttaaccaggccttagaaattttaaggtgcctgaaagaaaggttccacccttggcaaccgaatttggcttgaatattcctaagccggaactatttaccaaggtgaaggaattacccttatgggatggggg

SEQ ID NO: 90299 - DNA, 417 bp, Zea mays
ggcaatcacagctggcatcttacctttatcacccttgttcctccaacaatcatcagccgtattacatcagttacctttggtgcatttattggcacaaaacatcagggcacaacaactacaacaacttgtgctagcaaaccttgctgcctactctcagcaacagcagtttcttccattcaaccaactagctgcattgaactctgcttcttatttgcaacaacaacaactaccattcagccagctacctgctgcctacccccagcaatttcttccattcaaccaactggcagcattgaactctcctgcttatttacagcagcaacaactactaccattcagccagctagctggtgtgagccctgctaccttcttgatacaaccacagttgttgcccccgggttttttttcccccttttt

SEQ ID NO: 90300 - DNA, 226 bp, Zea mays
  unsure (1)..(226): unsure at all n locations
aattccggtcgacnacgcgtccggttgccctcgctctcctggctctcgctgcgagcgccacctccacgcatacaagcggcgggtgcggctgccagccaccgccgccggttcatctaccgccgccggtgcatctgccacctccggttcacctgccacctccggtgcatctcccaccgccggtccacctgccgccgccggtccacctgccaccgncggtccatgtgcc

SEQ ID NO: 90301 - DNA, 389 bp, Zea mays
  unsure (1)..(389): unsure at all n locations
caggcaccaccgtttcatctaccgccttcgttctatatgccgcctccgttctatctgcgcgccgcagcagcagccgcagccatggcaataccccactcaaccaccgcagctaagcccgtgccagcagttcggatcctgcggcgtcggcagcgtcggcagcccgttcctgggccagtgcgtcgagttcctgaggcaccagtgcagcccggcggcgacgccctacggctcgccacagtgccaggcgctgcagcagcagtgctgccaccagatcaggcaggtggagccgctgcaccggtaccaggcgacatacggtgtggtcctgcagtcctttctgcagcagcagccgcagggcgagctcgcggcgctgatggcggcccangtagcgcagc

SEQ ID NO: 90302 - DNA, 400 bp, Zea mays
attgaactctcctgcttatttacagcagtaacaactactaccattcagccagctagctggtgtgagccctgctaccttcttgatacaaccacagttgttgccgttctaccagcacgctgcgcctaacgctggcaccctcttacaactgcaacaattgctgccattcaaccaacttgctttgacaaacccagcagcgttctaccaacaacccatcattggtggagccctcttttagatatcttatgagttatagttcaataataaatcattcaaccaactggcagcattgaactctcctgcttatttacagcagcaacaactactaccattcagccagctagctggtgtgagccctgctaccttcttgattcaaccacagataaaaaaggggtggttcccc

SEQ ID NO: 90303 - DNA, 171 bp, Zea mays
gctaaggcgaataagggaaggatgagtcatttgcaccatgtttgaccaccaattgttaggtggtgcatatattttgtactaattgtgagactttgtgctatggatctcaactgtataccttgctggtgcatggctttgggtttacatggttgaaaatgagattggtgtact

SEQ ID NO: 90304 - DNA, 302 bp, Zea mays
attgagaccagcaagcaacatagaaagtagaatccattagcaacaatagagcaacaatggcgaccaagatattttccctccttatgctccttgctctttctacatgtgttgctaacgcgacaattttccctcaatgctcacaagctcctatagcttcccttcttcccccataccttccatcaattatagcttcagtatgtgaaaacccagctcttcaaccatataggcttcaacaagcaatcgcagcaagcaacatacctttatcgcccttgttggttcaacaatcaccagccctatctttg

SEQ ID NO: 90305 - DNA, 287 bp, Zea mays
cccacgcgtccggggtgattgaagagatgaaacgggatggccgtgttgctcctgattggacaagatacagcaacctggcttccatatatgttgaggctggaatgtttgagaaggcagaggctgctcttaaggagcttgagaagcggaacaccagcaatgacatcgaagcctaccagttccttattacattgtatgggcgtacacagaacttagtggaagttcaccgtgtctggcgatcgctgaagcgggataaccctagaatggcaaacatgagctaccttaacatg

SEQ ID NO: 90306 - DNA, 359 bp, Zea mays
  unsure (1)..(359): unsure at all n locations
tattttcagcattcaaaaacacaccaagcgaagcgcactagcaacgacctaacaccaatggctaccaagatattagccctccttgcgcttcttgcccttttagtgagcgcaacaaatgcgttcattattccacagtgctcacttgctcctagtgccattattccacagttcctcccaccagttacttcaatgggcttcgaacatccagccgtgcaagcctacaggctacaactagcgcttgcggcgagcgccttacaacaaccaattgcccaattgcaacaacaatccttggcacatctaaccctacaaaccattgcaacgcancaacaacaacaacaacagtttctgccatcactgag

SEQ ID NO: 90307 - DNA, 386 bp, Zea mays
gaaagcacaatagtgtaccaacaatggctgccaaaatattttgcctccttatgctcctgggtctttctgcaagtgctgctacggcgaccattttcccacaatgctcacaagctcctatagcttcccttcttcccccgtacctctcaccagcggtgtcttcggtatgtgaaaacccaattcttcaaccctataggatccaacaggcaatcgcagctggcatcttacctttatcacccttgttcctccaacaatcatcagccctattacagcagttacctttggtgcatttattggcacaaaacatcagggcacaacaactacaacaacttgtgctagcaaaccttgctgcctactctcagcaacaacagtttcttccattcaaccaa

SEQ ID NO: 90308 - DNA, 406 bp, Zea mays
atgctatgcagtatggcacagttcctgttgtccatgcaactgggggccttagagataccgtggagaacttcaaccctttcggtgagaatggagagcagggtacagggtgggcattcgcacccctaaccacagaaaacatgttgtggacattgcgaactgcaatatctacatacagggaacacaagtcctcctgggaagggctaatgaagcgaggcatgtcaaaagacttcacgtgggaccatgccgctgaacaatacgaacaaatcttccagtgggccttcatcgatcgaccctatgtcatgtaaaaaaggaccaaagtggtggttccttggaagatcatcagttcatcatcctatagtaagctgaatgatgaaagaaaacccctgtacatttacaatttgggggg

SEQ ID NO: 90309 - DNA, 287 bp, Zea mays
  unsure (1)..(287): unsure at all n locations
ccggaattcccgggatctacattaacagttctccttcaacgatcattcaaaactactaggacggcaatctcaactccacaaaggagaagattttgatcggagaggatctttcatggaaatcaaacttcaaatgctgggcttgcttatctcagtggtcaatcagttgttgggtctgctggactgccccaagttgaagcaaaatatcctgctttgctattcaaacagcagctcgtggatctaanttgaaaggtttatggcatgataagtgacagcgtgaaaaaggagct

SEQ ID NO: 90310 - DNA, 312 bp, Zea mays
cagaaacacaccaagcgaagctacctagcaacgacttaacaacaatggctaccaagatgttagcgctccttgcgcttcttgccctttttgtgagcgcaacaaatgcgttcattattccacaatgctcacttgctcctagtgccattataccacagttcctccgaccagttacttcaatgggcttcgaacacctagctgtgcaagcctacaggctacaacaagcgcttgcggcgagcgtcttacaacaaccaattaaccaattgcaacaacaatccttggcacatctaaccatacaaaccaatcgaacacaac

SEQ ID NO: 90311 - DNA, 289 bp, Zea mays
  unsure (1)..(289): unsure at all n locations
cggacgcgtggggcagttgtgacagcatatcgaatcgtgactgtcagtaagggttattcatgggaggtcacaactgctgaaggtggacagggcctcaatgagctcttaagctccagaaagagtgtattaaacggaattgtaaatggaattgacattaatgattggaaccctgccacagacaaatgtatcccctgtcattattctgttgatgacctctctggaaaggccaaatgtaaaggtgcattgcagaaggagctgggtttacctataaggcctgatgtntctctga

SEQ ID NO: 90312 - DNA, 365 bp, Zea mays
cccacgcgtccgaagcaacatacctttatcgcccttgttgtttcaacaatcgccagcccgatcggtggtgcagtcattggtacaaaccatcagggcacaacagctgcagcaactcgtgctacctctgatcaaccaagtagctctggcaaacctttctccctactctcagcaacatagaaagtggaatccagtagcaacaatagagcaacaatggcgaccaagatattttccctccttatgctccttgctctttctacatgtgttgctaacgcgacaattttccctcaatgctcacaagctcctatagcttcccttcttcccccataccttccatcaattatagcttcaatatgtgaaaacccagc

SEQ ID NO: 90313 - DNA, 410 bp, Zea mays
  unsure (1)..(410): unsure at all n locations
ccgttatcacccttgttcctccaacaaccgtcagccctattacagcagttacctttggggcatttgttggcacaaaacatcaaggcacaacaactacaacaacttgtgctaggaaaccttgctgcctactctcagcaacagcagtttcttccattcaaccaactggctgcattgaactctgctgcttatttgcaacaacaactaccattcagtcagctagctgctgcctacccccagcaatttcttccattcaaccaactggcagcattgaactctgctgcttatttacaacagcaacagctaccaccattcagccagctagctgatgtgagccctgttgccttcttgacacaacaacagttgttgccgttctacctgcacgctgncgcctttaaaaaacccgggggggc

SEQ ID NO: 90314 - DNA, 176 bp, Zea mays
ccactcccaagccagtaccgagtcctacgagcagtcgcacgcaagtgtcaagagacgaaacggtcgacatggctcgcacgcaatctgccgtagcggtcgccgtggtggccgcggtgctgctgctggcagcggcggcgacgacctcggaggccgccatcacctgcgggcaagtgagc

SEQ ID NO: 90315 - DNA, 330 bp, Zea mays
atagaaagcacaatagtgtaccaacaatggcagccaaaatattttgcctccttatgctccgtggtctttctgcaagtgctgctacggcgaccattttcccgcaatgctcgcaagctcctatagcttcccttcttcccccgtacctctcaccagcggtgtcttcggtatgtgaaaacccaattcttcaaccctacaggatccaacaggcaatcacagctggcatcttacctttatcacccttgatcctacaacaatcatcagccctattacatcagttacctttggtgcatttattggcacaaaacatcagggcacaacaactacaacaac

SEQ ID NO: 90316 - DNA, 298 bp, Zea mays
ggttggtggaagcaccaggattcccaaggtccagcagctcctgcgggactacttcgacggcaaggagcccaacaagggtgtcaaccctgatgaggctgttgcctttggtgccgctgtgcagggaagcatcttgagcggcgagggtggtgacgagaccaaagatatcctcctccttgatgtggctcccctcaccctgggtatcgagaccgtcggtggagtcatgaccaagttgatcccgaggaacactgtcatcccgaccaagaagtcccaggtggtcaccacctaccaggaccagcag

SEQ ID NO: 90317 - DNA, 334 bp, Zea mays
gaaacacaccaagcgaagcacattagcaacaacctaacaacaatggctaccaagatgttatccctccttgcgcttcttgcgctttttgcgagcgcaacaaatgcgttcattattccacaatgctcacttgctccaagttccattattacacagttcctcccaccagttacttcaatgggcttcgaacacccagctgtgcaagcctataggctacaacaagcaattgcggcgagcgtcttacaacaaccaatttcccagttgcaacaacaatccttggcacatctaacaatacaaaccatcgcaacgcaacagcaacaacaattcctaaccagca

SEQ ID NO: 90318 - DNA, 295 bp, Zea mays
gggacacaccaagcgaagcacattagtttcaacctaacaacaatggctaccaaggaggtatccctccttgcgcgtcttgcgctttttgcgagcgcaacatatgcgttcattattccacaatgctcacttgctccaagttccattattacacagttcctaccaccagctacttcaatgggcttcgaacacccagctgtgcaagcctataggctacaacaagcaattgcggcgagcgtcttacaacaaccaatttcccagttgcaacaacaatccttggcacatctaacaatacaaa

SEQ ID NO: 90319 - DNA, 330 bp, Zea mays
gctgatttggcacgcggtgtactaggcctacacaccagggggatattgatcctaaatatgaaaccttgcaattttctcatagacgaaaatgattgtgctgtgctgggggattttgggattccatccctgctgtttggcctttcattacctaatccggaccttatccagaggcttggaactccaaattacatggctcctgaacaatggcaaccaaacatcagaggtccgattagttatgaaactgattcgtggggttttgcgtgcagcgtccttgagatgttgactggcattcagccatggcgtggaaagtcagcagatgagatatatcag

SEQ ID NO: 90320 - DNA, 434 bp, Zea mays
caacatagaaagcacaatagtgtaccaacaatggcagccaaaatattttgcttgcttatgctccttggtctttctgcaagtgctgctaccgcaaccattttcccacaatgctcacaagctcctatagcttcctttcttcccccatacctctcaccagcggtgtcttcagtatgtgaaaacccaattcttcaaccctacaggatccaacaggcaatcgcagcaggcatcttacctttatcacccttgttcctccaacaaccgtcagccctattacagcagttacctttggtgcatttgttggcacaaaacatcaaggcacaacaactacaacaacttgtgctaggaaaccttgctgcctactctcagcaacagcagtttcttccattcaaccaactggctgcattgaactctgctgcttatttgcaacaacaact

SEQ ID NO: 90321 - DNA, 428 bp, Zea mays
attcagaaacacaccaagcgaagctacctagcaacgacttaacaacaatggctgccaagatattatccctccttgcgcttcttgccctttttgtgagcgcaacaaatgcgttcattattccacaatgctcacttgctcctagtgccattataccacagttcctccgaccagttacttcaatgggcttcgaacacctacctgtgcaagcctacaagctacaacaagcgcttgcggcgagcgtcttacaacaaccaattaaccaattgcaacaacaatccttggcacatctaaccatacaaaccatcgcaacacaacagccacaacagttcctaccagcactgagccaactagatgtggtgaaccctgtcgcctacttgcaacagcaggtgcttgcatccaacccacttgctctggcatacgtagctgca

SEQ ID NO: 90322 - DNA, 120 bp, Zea mays
ctttgacaaacccagcagcattctaccaacaacccatcattggtggtgccctcttttagatttcttatgagttatagttcaataataaagttttttgtctgatgtttgtggcttcccaga

SEQ ID NO: 90323 - DNA, 308 bp, Zea mays
gtttcgctgccccgattcgccacgaagccgcactgtgagagagggacgcggtccgttgtcctcggcttgtacgcaatccttccgtcgctgcgaagctgatccctcgtgttcgccatggcccccagcgtcgccgtggaaaacctcaaccccaaggtcttgaaatgtgagtatgcagtccgtggcgagattgtcatccatgctcagcgcttgcagcaacaactacaaacacaaccagggtctcttccttttgatgagatcctgttctgcaacattgggaatcctcaatcccttggtcagcaacctgtgac

SEQ ID NO: 90324 - DNA, 364 bp, Zea mays
aattcccggttggaccaaggcgtccggcaccttagaagggggaatccataaccaccattgaaccaccattgccgaccaaaatagtggccttcctaatgctcctggctctttctacatgggtggctaacgcgacaattttccttcaatgctaacaagctcctatagcttcccttcttccccaataccttccatcaattatagcttcaatatgtgaaaacccagctcttcaaccatataggcttcaacaagcaatcgcagcaagcaacatacctttatcgcccttgctgtttcaacaatcgccagccctatctttggtgcagtcattggtacaaaccatcagggcacaacagctgcagcaaacttc

SEQ ID NO: 90325 - DNA, 303 bp, Zea mays
ttcgtcgaccacgcgtcgagtacacagtctgcaacgctcatcaactagccatgggaaccctgcggtactcaacaacacactgcttcatctacccgtcgtgggcaatgcacctacatacctgacaacaatgtgcaacagattgaccagcttgactactagctgggcaaaccctgtgctacttgcacagtgcttcattaacaatgacttgcgaactctgtggtcctacaacacgacaacagtacttaatcattggtagggctaaccatgtcgccgacttctacagcagcaacaattgctgccata

SEQ ID NO: 90326 - DNA, 326 bp, Zea mays
cgaactagcaacatacatagtgaagtacactagcaacatcttagcaccaatggcaggcaagatttttgccatccttgccctccttgctctttcagcaagcgttgctaccgcgactattattccacaatgctcacaacaatacctctctccggtgacagccgcgagatttgaatacccaactatacaatcctacaggctacaagaggccatcgcagcaagcatcttacggtcgttagcattgaccgtccaacaaccatatgccctattgcaacaaccatccttaatgaatctatatctccaaagaatcgcagcacaacaactacaac

SEQ ID NO: 90327 - DNA, 329 bp, Zea mays
caactagcaacatagaaagcacaatagtgtaccaacaatggcagccaaaatattttgcttccttatgctccttggtctttctgcaagtgttgctaccgcaaccattttcccacaatgctcacaagctcctatagcttcccttcttcccccatacctctcaccagcggtgtcttcaatgtgtgaaaacccaattgttcaaccctacaggatccaacaggcaatcgcaacaggcatcttaccattatcacccttgttcctacaacaaccgtcagccctattacagcagttacctttggtccattaggtggcacaaaacatcagggcacaac

SEQ ID NO: 90328 - DNA, 337 bp, Zea mays
caggcaatcgcagctggcatcttacctttatcacccttgttcctccaacaatcatcagccctattacaacagttacctttggtgcatttattggcacaaaacatcagggcacaacaactacaacaacttgtgctagcaaaccttgctgcctactctcagcaacagcagtttcttacattcaaccaactaggttcattgaactctgcttcttatttgcaacaacaacaactaccattcagccagctacctgctgcctacccccagcaatttcttccattcaaccaactagcagcattgaactctcctgcttatttacagcagcaacaactatctacca

SEQ ID NO: 90329 - DNA, 419 bp, Zea mays
  unsure (1)..(419): unsure at all n locations
ttgagaccaacaagcaacatagaaagtggaatacagtagcaaaaatagagcaacgaatggcggccaagatattttccatccttatgctccttgctctttctgcatgtgttgctaacgcgaccatttttcctcaatactcacaagctcctatagctgcccttcttcccccataccttccatcaatgaccgctttagtatgtgaaaacccagcccttcaaccctacaggatccagcaagcaatcgcaacaagcaacttacctttatcacacctgttctttcaacaatcgccagccctatctttggtgcagtcattggtacaaaccatcagggcagaacagttgcagcaactcgtgctaccagtgatcagtcaagtagctctggccaacctttcccnctactcttcagccacacaatttctt

SEQ ID NO: 90330 - DNA, 432 bp, Zea mays
caacatagaaagcacaatagtgtaccaacaatggcagccaaaatattttgcctgcttatgctccttggtctttctgcaagtgctgctacggcgaccattttcccacaatgctcacaagctcctatagcttcccttcttcccccgtacctctcaccagcggtgtcttcggtatgtgaaaacccaattcttcaaccctataggatccaacaggcaatcgcagctggcatcttacctttatcacccttgttcctccaacaatcatcagccctattacagcagttacctttggtgcatttattggcacaaaacatcagggcacaacaactacaacaacttgtgctagcaaaccttgctgcctactctcagcaacaacagtttcttccattcaaccaactagctgcattgaactctgcttcttatttgcaacaacaa

SEQ ID NO: 90331 - DNA, 87 bp, Zea mays
caccaatgatgggttatagttcaataataaagttctttgtctgatgtttgtggcttcccagaaataagaaagtacatttctagattc

SEQ ID NO: 90332 - DNA, 338 bp, Zea mays
agcattcaaaaacacaccaagcgaagcgcactagcaacgacctaacaccaatggctaccaagatattagccctccttgcgcttcttgcccttttagtgagcgcaacaaatgcgttcattattccacagtgctcacttgctcctagtgccattattccacagttcctcccaccagttacttcaatgggcttcgaacatccagccgtgcaagcctacaggctacaactagcgcttgcggcgagcgccttacaacaaccaattgcccaattgcaacaacaatccttggcacatctaaccctacaaaccattgcaacgcaacaacaacaacaacaaccagtt

SEQ ID NO: 90333 - DNA, 343 bp, Zea mays
  unsure (1)..(343): unsure at all n locations
accaattgttcaaccctacaggatccaacaggcaatcgcaacaggcatcttaccatgatcacccttgatccttcaacaaccgtcaggcctattacagcagctacctttggtccattaggaggcacaaaacatcagggcacaacaactacaacaacttgtgctagcaaaccttgctgcatactctgagcaacatcagtttcttccattcaaccaactggctgcattgaactctgctgcttatttgcaacaacaattaccattcagccagctagttgctgcctacccccagcaatttcttacattcaaccaactagcagcattgaactctgnctgcattatttac

SEQ ID NO: 90334 - DNA, 339 bp, Zea mays
  unsure (1)..(339): unsure at all n locations
attcccggctggagcaacgcgtccgcctcgctctcctggctctcgctgcgagcgctacctccacgcatacaagcggcggttgcgggtgccagccaccgccggcggttcatctaccgccgccggtgcatctgccacctccggttcacctgccacctccggtgcatctcccaccgccggtccacctgccgccgccggtccacctgccaccgncggtccatgtgccgacgncggttcatctagccgcgccaccatgccactaccctactcaaccgacccggcctcagcctcatccccaggcacacccatgcccgtgccaacagccgcattcaagcccgtgcc

SEQ ID NO: 90335 - DNA, 328 bp, Zea mays
  unsure (1)..(328): unsure at all n locations
gagaccaacaagcaacatagaaagtggaatccagtagcaacaatagagcaacaatggcgaccaagatactttccctccttatgctccttgctctttctgcatgtgttgctaacgcgacaattttccctcaatgctcacaagctcctatagcttcccttcttcccccataccttccatcaatgatagcttcagtatgtgaaaacccagctcttcaaccctataggctccaacaagcaatcgcagcaagcaacatacctttatcacccttgtttcaacaatcgccagccctatctatggtgcagtcattggtacanaccatcaaggcaca

SEQ ID NO: 90336 - DNA, 329 bp, Zea mays
ggtggcccttatccgtcaagtcgctaacaaagttttcaccagtatgggtaaaactatggggtacaagatcgggacgatgattgagattcccagggcagctctagtggctgacgagatcgcggagcaggctgaattcttctcctttggaacgaacgacctcacgcagatgacctttggctacagcagggatgatgtggggaagttcatccccatttatctggctcagggcatcctccagcatgaccccttcgaggttctcgaccagagaggagtgggcgagctggttaagcttgctacagagaggggccgcaaagctaggcctaacttga

SEQ ID NO: 90337 - DNA, 353 bp, Zea mays
gccgatcgcgcaggtgtgctgcaactgcggcgtctgcatgggggagtacttctgcgcagcctgcaacttcttggacgatgacgttgacaaggagcagttccattgcgacgattgcggcatctgcagagtaggaggaaaggagaacttcttccactgccaaaagtgtggatcctgctactcgacgacccttcgcgacaggcactgctgcatcgagaactcgatgaagaacaactgccccatctgctacgagtacctgttcgattcgctgagggagacgtcggtgctccgctgcggccacaccatgcacctgcagtgcttgcacgagatgtttgaagcaacgaccaaagggtttt

SEQ ID NO: 90338 - DNA, 330 bp, Zea mays
aagcaacatagaaagtggaatacagtagcaaaaatagagcaacaatggcggccaagatattttccatccttatgctccttgctctttctgcatgtgttgctaacgcgaccatttttcctcaatactcacaagctcctatagctgcccttcttcccccataccttccatcaatgaccgctttagtatgtgaaaacccagcccttcaaccctacaggatccagcaagcaatcgcaacaagcaacttacctttatcacacctgttctttcaacaatcgccagccctatctttggtgcagtcattggtacaaaccatcagggcagaacagttgc

SEQ ID NO: 90339 - DNA, 345 bp, Zea mays
actagcaacatagaaagcacaatagtgtaccaacaatggcagccaaaatattttgcctccttatgctccttggtctttctgcaagtgctgctacggcgaccattttcccgcaatgctcgcaagctcctatagcttcccttcttcccccgtacctctcaccagcggtgtcttcggtatgtgaaaacccaattcttcaaccctacaggatccaacaggcaatcgcagctggcatcttacctttatcacccttgttcctccaacaatcatcagccctattacaacagttacctttggtgcatttattggcacaaaacatcagggcacaacaactaccaacaaaccttt

SEQ ID NO: 90340 - DNA, 424 bp, Zea mays
cttgaaaccgacgacgaggccatatgctggggaattgcatattgtgtcaagggtggtgcagaaaaagagctaaaagcaatgcagtacttggagagaagagagtgtgagtacgaccagaagatatccattgatttctacaaggaaggagatcccttgaaaccagctgtgacaggcgtcttagtgttcgtttccactccagatccaattggcaacaagtactatcttggccctgctcctttgcaggatatggcaaggcaaattgctacagccaatggccctactggctataatagggattacctgttctcaatggagaaggcattagccagcattagccacgaagatgattcgatcatagagcttgcaaacgaggtgaggaaggtgctcaacagaacataggagaccaagatcactggtgccaatg

SEQ ID NO: 90341 - DNA, 383 bp, Zea mays
caaactggtttcagggtactgcagatgctgtaaggcagtacttgtggttgtttgaggagcataatgtgatggaatttctaattcttgctggcgatcacctgtaccggatggactatgaaaagttcattcaggcacacagagaaacaaatgctgatattaccgttgctgccctaccgatggatgagaaacgtgcaactgcatttggcctcatgaaaattgatgaagaagggaggatcattgagtttgctgagaaaccgaaaggagagcagttgaaagcaatgatggttgacaccaccatacttggccttgatgacgtgagggcaaaggaaatgccttatattgctagcatgggtatctatgttttcagcaaagatgtaatgctt

SEQ ID NO: 90342 - DNA, 427 bp, Zea mays
gtcatggcgatggagaagcagaatgacaccagcatcttggtcctgctgcaggagtgtttcggcgaggggctcataaccatcaaccagatgaccaaaggctttgcccgtgtcaaggaaggccttgatgatctgatcctcgacatcccaaatgcccaggagaagtttggagagtatgtggagctggcaacagagcgcggctggctgctgccgaccttcgcctccgttccctgagcatccaccactggcgataccttccttatgtgtacatttgtgcccatgatgtcattagctccgtaccaaagttttcctattcctagtttacttatgttaccgtatactggaggattgtaggatggatgtggtgtcggttgttgagatagtgtcctattggtctagtctgggagggtacttttgagagttaaaagaa

SEQ ID NO: 90343 - DNA, 429 bp, Zea mays
cgcctcgatcttcatccctggttggcaaacaatgagctacttctccgacctcggcggcatctgttggttcctggagcctggattcgagcgcgaggtgcggcgtctccacaggctcgtggggaatgccgttgtagacgggtaccatgtgctcgtcgggacaggctccactcagctctttcaggccgtgctgtacgcgctctcacctgcaagtgacggcacacccatgaacgtcgtctcaccggcaccgtactactcgtcttacccatctgtgaccaactatctaaactctgcgctctaccgttgggctggtgatgccaatacatttgatggcgacacatgtattgagctcgtctgctccccaaacaaccctgatggtggcctccggaagcctgtcatcaaatccaagtctagcaagcctgtatatgactt

SEQ ID NO: 90344 - DNA, 342 bp, Zea mays
aagcaacatagaaagtggaatacagtagcaaaaatagagcaacaatggcggccaagagattgtccatccttatgctccttgctctttctgcatgtgttgctaacgcgaccatttttcctcaatactcacaagctcctatagctgcccttcttcccccataccttccatcaatgaccgctttagtatgtgaaaacccagcccttcaaccctacaggatccagcaagcaatcgcaacaagcaacttacctttatcacacctgttctttcaacaatcgccagccctatctttggtgcagtcattggtacaaaccatcagggcagaacagttgcaagcaacttcgt

SEQ ID NO: 90345 - DNA, 359 bp, Zea mays
ggaattcccggcgagaccaactagcaccatagaaagcacaatagtgtaccaacaatggcagccaaaatattttgcttccttatgctccttggtctttctgcaagtgctgctaccgcaaccattttcccacaatgctcacaagctcctatagcttcctttcttcccccatacctctcaccagcggtgtcttcagtatgtgaaaacccaattcttcaaccctacaggatccaacaggcaatcgcagcaggcatcttacctttatcacccttgttacttcaacaaccgtcagccctattacagcagttacctttggtgcatttgctggcacagaacatcaaggcacaacaactacaacaact

SEQ ID NO: 90346 - DNA, 338 bp, Zea mays
  unsure (1)..(338): unsure at all n locations
gcaagcaacatagaaagtagaatccattagcaacaatagagcaacaatggcgaccaagatattttccctccttatgctccttgctctttctacatgtgttgctaacgcgacaattttccctcaatgctcacaagctcctatagcttcccttcttcccccataccttccatcaattatagcttcagtatgtgaaaacccagctcttcaaccatataggcttcaacaagcaatcgcagcaagcaacatacctttatcgcccttgttgtttcaacaatcaccagccctatctttggtgcagtcattggtacaaaccatcagggcacaacagctnngcagca

SEQ ID NO: 90347 - DNA, 338 bp, Zea mays
  unsure (1)..(338): unsure at all n locations
ctgtctgcaagtgctgctacggcgaccattttcccgcaatgctcgcaagctcctatagcttcccttcttcccccgtacctctcaccagcggtgtcttcggtatgtgaaaacccaattcttcaaccctacaggatccaacaggcaatcgcagctggcatcttacctttatcacccttgttcctccaacaatcatcagccctattacaacagttacctttggtgcatttattggcacaaaacatcagggcacaacaactacaacaacttgtgctagcaaaccttgctgcctactctcagcaacagcagtttcttccattcaaccannactaggttcattg

SEQ ID NO: 90348 - DNA, 329 bp, Zea mays
ggagagtttaccatgttggagctagcacaggttgtgaaggaaacaattgacccaatggcaaccattgaattcaaacccaacacagctgatgatccccatatgagaaagccagatatcaccaaggctaagcaactgctacattgggagccaaaggtctctctcaaagaaggccttccgctaatggttcaagatttccgtcaaaggatctcggatgagtaatcaaagcaattcttttttccccgaatgtgccatgcacgtgtttgtaatcagagcaatcgtatgatactggtgaccggtttgattctgaacgatgctgcaactacagtcag

SEQ ID NO: 90349 - DNA, 423 bp, Zea mays
gagaccaactagcaacatagaaagcacaatagtgtaccaacaatggcagccaaagtatgttgcctccttatgctccttggtctttctgcaagtgctgctacggcgaccattttcccacaatgctcacaagctcctatagcttcccttcttcccccgtacctctcaccagcggtgtcttcggtatgtgaaaacccaattcttcaaccctataggatccaacaggcaatcgcagctggcatcttacctttatcacccttgttcctccaacaatcatcagccctattacagcagttacctttggtgcatttattggcacaaaacatcagggcacaacaactacaacaacttgtgctagcaaaccttgctgcctactctcagcaacaacagtttcttccattcaaccaactagctgcattgaactct

SEQ ID NO: 90350 - DNA, 416 bp, Zea mays
  unsure (1)..(416): unsure at all n locations
ctcgactcgtggggaagtttcgctctcgcccgcgtcgacttcctagggttcgaggaacgtccgtccgtccgtccggggaaggagcaggagggaggcggagatgatcgaggtggtgctcaacgaccgcctggggaagaaggtgcgggtcaagtgcaacgaggacgacaccatcggcgacctcaagaagctggtggcggcgcagacggggacgcgccccgagaagatccgcatccagaagtggtacaacatctacaaggaccacatcaccctcaaggactacgaggtccacgacggcatgggcctcgagctctactacaactgagccgnncgccctctctccctctcgtcaggttggtctgaattctgaagtcatgggtgcaattcgcttcgcggtgatctcttaagctcatcacata

SEQ ID NO: 90351 - DNA, 360 bp, Zea mays
ctcccaccgccggtccacctgccgccgccggtccacctgccaccgccggtccatgtgccgccgccggttcatctgccgccgccaccatgccactaccctactcaaccgccccggcctcagcctcatccccagccacacccatgcccgtgccaacagccgcatccaagcccgtgccagctgcagggaacctgcggcgttggcagcaccccgatcctgggccagtgcgtcgagtttctgaggcatcagtgcagcccgacggcgacgccctactgctcgcctcagtgccagtcgttgcggcagcagtgttgccagcagctcaggcaggtggagccgcagcaccggtaccaggcgatcttcggc

SEQ ID NO: 90352 - DNA, 341 bp, Zea mays
  unsure (1)..(341): unsure at all n locations
tattattgagaccaacaagcaacatagaaagtggaatacagtagcaaaaatagagcagcaatggcggccaagatattttccatccttatgctccttgctctttctgcatgtgttgctaacgcgaccatttttcctcaatactcacaagctcctatagctgcccttcttcccccataccttccatcaatgaccgctttagtatgtgaaaacccagcccttcaaccctacaggatccagcaagcaatcgcaacaagcaacttacctttatcacacctgttctttcaacaatcgccagccctatctttggtgcagtcattggtacaaaccatcagnggcagaac

SEQ ID NO: 90353 - DNA, 355 bp, Zea mays
  unsure (1)..(355): unsure at all n locations
aagggtttgttgaagtcttagctgcacagcatagcccagataatccaaactggtttcagggtactgcaaatgctgtaaggcagtacttgtggttgtttgaggagcataatgtgatggaatttctaattcttgctggcgatcacctgtaccggatggactatgaaaagttcattcaggcacacagagaaacaaatgctgatattaccgttgctgccctaccgatggatgagaaacgtgcaactgcatttggcctcatgaaaattgatgaagaagggaggatcattgagtttgctgagaaaccgaaaggagagcagttgaaagcaatgatnggttgacnnaccaccaattaaccttt

SEQ ID NO: 90354 - DNA, 419 bp, Zea mays
  unsure (1)..(419): unsure at all n locations
gtggaatacagtagcaaaaatagagcatcaatggcggccaagatattttccatcctgatgctccttgctctttctgcatgtgttgctaacgcgaccatttttcctcaatactcacaagctcctatagctgcccttcttcccccataccttccatcaatgaccgctttagtatgtgaaaacccagcccttcaaccctacaggatccagcaagcaatcgcaacaagcaacttacctttatcacacctgttctttcaacaatcgccagccctatctttggtgcagtcattggtacaaaccatcagggcagaacagttgcagcaactcgtgctaccaagtgattcaagcccanaggttaaaggcctttcctttgggggcccaaaaaaaaaacccccccctttttttttttttccccccccccc

SEQ ID NO: 90355 - DNA, 207 bp, Zea mays
taccaactagcaacatacatagtgaagtacactagcaacatcttagcaccaatgggagccaagatttttgccctccttgccctccttgctctttcagcaagcgctgctacctcgacttttattccacaatgctcacaacaatacctctctccggtgacagccgcgggatttcaatacccaactgtaccatgtaggattgtatagttg

SEQ ID NO: 90356 - DNA, 207 bp, Zea mays
tagcaactagcaacatacatagtgaattacactagcaacatcttagcaccaatgggagccaagatttttgccctgcttgccctccttgctctttcagcaagcgctgctacctcgacttttattccacaatgctcacaacaatacctctctccggtgacagccgcgggatttcaatacccaactgtaccatgtaggattgtatagttg

SEQ ID NO: 90357 - DNA, 339 bp, Zea mays
aatttggtggagggatccatgactgtgtcgacgaccagaaagacaagggatccctgggctattatcaaggccagggaactaattaagcttttgtccaggagcgtccctgcacctcaggcaatcaaaattcttgatgatgagatgaactgcgatattattaagattggtggtcttgtgagaaataaggagcggtttgttaaaaggagggaacggcttttaggccctaacttgtctacactcaaggctattgagattttgactggctgctacatcttagtgcagggaaatactgttgcagccatgggcaactataggggaaggggactggaaaccaagtga

SEQ ID NO: 90358 - DNA, 411 bp, Zea mays
accgaacaagccctaacagtgtgcgttttcgcaccccaactgcctttctctctataagggaaactcctcatcgatcaccaccaaagaacacagtaactagctagcagatcaaacaagtagcgacagctcgacaaagatttgtgagagtgatccggcgctgagaagagatggctaagatcgccgcagccgccgcggcggcggcggcgctgtgcttcgcggccctggtggccgtggccgtctgccaaggcgaggtcgagcggcagaggctcagggacctgcagtgctggcaggaggtccaggagagcccgctcgacgcgtgccgccaggtcctcgaccggcagctaaccggcggcggcgtcggcggcccgttccggtggggcaccgggctccggatgcggtgctgccagcagc

SEQ ID NO: 90359 - DNA, 428 bp, Zea mays
gcaacatagaaagcacaatagtgtaccaacaatggcagccaaaatattttgcttcctgatgctccttggtctttctgcaagtgctgctaccgcaaccattttcccacaatgctcacaagctcctatagcttcctttcttcccccatacctctcaccagcggtgtcttcagtatgtgaaaacccaattcttcaaccctacaggatccaacaggcaatcgcagcaggcatcttacctttatcacccttgttcctccaacaaccgtcagccctattacagcagttacctttggtgcatttgttggcacaaaacatcaaggcacaacaactacaacaacttgtgctaggaaaccttgctgcctactctcagcaacagcagtttcttccattcaaccaactggctgcattgaactctgctgcttatttgcaac

SEQ ID NO: 90360 - DNA, 422 bp, Zea mays
cacagttcctccgaccagttacttcaatgggcttcgaacacctagctgtgcaagcctagaggctacaacaagcgcttgcggcgagcgtcttacaacaaccaattaaccaattgcaacaacaatccttggcacatctaaccatacaaaccatcgcaacacaacagcaacaacagttcctaccagcactgagccaactagatgtggtgaaccctgtcgcctacttgcaacagcaggtgcttgcatccaacccacttgctctggcaaacgtagctgcataccaacaacaacaacaattgcaacagtttctgccagcgctcagtcaactagccatggtgaaccctgccgcctacctacaacagcaacaactgctttcatctagccctctcgttgagggtaatgcacctacatacctgcaacaacaa

SEQ ID NO: 90361 - DNA, 363 bp, Zea mays
cccacgcgtccgcttccatttaaccaattggccgcactgaaccccgctgcttagttgcagcagcaaatactactaccatttagccagctagctgcagcaaaccgtgcttccttcttgacacagcaacagttgctgcctttctaccagcagtttgcggctaaccccgcaaccctcttacaactacaacaattgttgccctttgtccaacttgctttgacagaccgagcggcctcctaccaacaacacatcattggtggtgccctcttttagattgcttattagttgtaattcaataataaagttttttggatgatgtatgtggccaaccagaaataagaagttacatttccagattttaatgtg

SEQ ID NO: 90362 - DNA, 347 bp, Zea mays
ccaactagcaacatagaaagcacaatagtgtaccaacaatggcagccaaaatatttggcctccttatgctccttggtctttctgcaagtgctgctacggcgaccattttcccgcaatgctcgcaagctcctatagcttcccttcttcccccgtacctctcaccagcggtgtcttcggtatgtgaaaacccaattcttcaaccctacaggatccaacaggcaatcgcagctggcatcttacctttatcacccttgttcctccaacaatcatcagccctattacaacagttacctttggtgcatttattggcacaaaacatcaaggcaccaacaactacccaacaactt

SEQ ID NO: 90363 - DNA, 258 bp, Zea mays
cagctagcaacatagaaagcacaatattgttccaacaatggcagccaaaatattttggctgcttatgctccttggtagttctgcaagtgctgctacggcgaccatttttccgcaatgcttacaagcttctatagctttccttctttccccgtaccttttaccagcggtgtcttcggtatttgaaaacccaattttttaacccttccgggttcaaccggcaattgcaacttgcaatctacccttaataaccttggttct

SEQ ID NO: 90364 - DNA, 334 bp, Zea mays
agcaacaactactaccattcagccagctagctggtgtgagccctgctaccttcttgacacaaccacagttgttgccgttctaccagcacgttgcgcctaacgctggcaccctcttacaactgcaacaattgctgccattcaaccaacttgctttgacaaacccagcagtgttctaccaacaacccatcattggtggtgccctcttttagatttcttatgagttatagttcaataataaagttttttatctgatgtttgtggcttcccagaaataagaaagtacatttctaaaaaaaaaaaaaaaaaaaaaaaaaaaaaaaaaaaacacacaaaa

SEQ ID NO: 90365 - DNA, 342 bp, Zea mays
cccacgcgtccggcaacatagaaagcacaatagtgtaccaacaatggcagccaagaagattttgcctccttatgctccttggtctttctgcaagtgctgctacggcgaccattttcccgcaatgctcgcaagctcctatagcttcccttcttcccccgtacctctcaccagcggtgtcttcggtatgtgaaaacccaattcttcaaccctacaggatccaacaggcaatcacagctggcatcttacctttatcacccttgttcctccaacaatcatcagccctattacatcagttacctttggtgcatttattggcacaaaacatcagggcacaaccaacct

SEQ ID NO: 90366 - DNA, 340 bp, Zea mays
atagaaagcacaatagtgtaccaacaatggcagccaaaatattttgcctccttatgctccttggtctttctgcaagtgctgctacggcgaccattttcccgcaatgctcgcaagctcctatagcttcccttcttcccccgtacctctcaccagcggtgtcttcggtatgtgaaaacccaattcttcaaccctacaggatccaacaggcaatcgcagctggcatcttacctttatcacccttgttcctccaacaatcatcagccctattacaacagttacctttggtgcatttattggcacaaaacatcagggcacaacaactacaacaacttggtggcta

SEQ ID NO: 90367 - DNA, 335 bp, Zea mays
  unsure (1)..(335): unsure at all n locations
agcaacatagaaagcacaatagtgtaccaacaatggcagccaaaatattttgcctgcttatgctccttggtctttctgcaagtgctgctacggcgaccattttcccacaatgctcacaagctcctatagcttcccttcttcccccgtacctctcaccagcggtgtcttcggtatgtgaaaacccaattcttcaaccctataggatccaacaggcaatcgcagctggcatcttacctttatcacccttgttcctccaacaatcatcagccctattacagcagttacctttggtgcatttattggcacanaacatcagggcacaacaactaccaaca

SEQ ID NO: 90368 - DNA, 432 bp, Zea mays
caacaagcaacatagaaagtggaatccagtagcaacaatagagcaacaatggcgaccaagatactttccctccttatgctccttgctctttctgcatgtgttgctaacgcgacaattttccctcaatgctcacaagctcctatagcttcccttcttcccccataccttccatcaatgatagcttcagtatgtgaaaacccagctcttcaaccctataggctccaacaagcaatcgcagcaagcaacatacctttatcacccttgtttcaacaatcgccagccctatctttggtgcagtcattggtacaaaccatcaaggcacagcagctgcagcaactcgtgctacctgtgatcaaccaagtagctctggcaaacctttctccctactatcagcaacaacaatttcttccattcaaccaactatctacactg

SEQ ID NO: 90369 - DNA, 429 bp, Zea mays
cggacgcgtgggttcaaaaacacaccaagcgaagcgcactagcaacgacctaagaccagatggctaccaagatattagccctccttgcgcttcttgcccttttagtgagcgcaacaaatgcgttcattattccacagtgctcacttgctcctagtgccattattccacagttcctcccaccagttacttcaatgggcttcgaacatccagccgtgcaagcctacaggctacaactagcgcttgcggcgagcgccttacaacaaccaattgcccaattgcaacaacaatccttggcacatctaaccctacaaaccattgcaacgcaacaacaacaacaacaacagtttctgccatcactgagccacctagccgtggtgaaccctgtcacctacttgcaacagcagctgcttgcatccaacccacttgctc

SEQ ID NO: 90370 - DNA, 319 bp, Zea mays
gtcgccattgttgctctattgttgctaatggcgaccaagatattttccctccttatgctccttgctctttctacatgtgttgctaacgcgacaattttccctcaatgctcacaagctcctatagcttcccttcttcccccataccttccatcaattatagcttcagtatgtgaaaacccagctcttcaaccatataggcttcaacaagcaatcgcagcaagcaacatacctttatcgcccttgttgtttcaacaatcaccagccctatctttggtgcagtcattggtacaaaccatcagggcacaacagctgcagcaac

SEQ ID NO: 90371 - DNA, 338 bp, Zea mays
ccacgcattcgtccagaagctgcaagcaacatagaaagtagtatccattagcaacaatagatcatcaagggggaacattaatatgcacgtgcggataacccgatactgttaccatattgccacaatgctcacatgctcctatagcttcccttcttcccccgtacctatcaccagcggtgtcttcggtatgtgaaaacccaattctttaaccctataagatccaacaggcaatcgcagcttgcatcttaccttcatcacccttgatccttcaacaatcatcagccctattacagcatttacctttggtgcatttattggcacaaaacattcaggcacaa

SEQ ID NO: 90372 - DNA, 346 bp, Zea mays
ccaactagcaacatagaaagcacaatagtgtaccaacaatggcagccaaaatattttgcctccttatgctccttggtctttctgcaagtgctgctacggcgaccattttcccgcaatgctcgcaagctcctatagcttcccttcttcccccgtacctctcaccagcggtgtcttcggtatgtgaaaacccaattcttcaaccctacaggatccaacaggcaatcgcagctggcatcttacctttatcacccttgttcctccaacaatcatcagccctattacaacagttacctttggtgcatttattggcacaaaacatcagggcacaacaacctacccaacaaac

SEQ ID NO: 90373 - DNA, 339 bp, Zea mays
agaccagcaagcaacatagaaagtagaatccattagcaacaatagagcaacaatggcgaccaagatattttccctccttatgctccttgctctttctacatgtgttgctaacgcgacaattttccctcaatgctcacaagctcctatagcttcccttcttcccccataccttccatcaattatagcttcagtatgtgaaaacccagctcttcaaccatataggcttcaacaagcaatcgcagcaagcaacatacctttatcgcccttgttgtttcaacaatcaccagccctatctttggtgcagtcattggtacaaaccatcagggcaccaaccagctg

SEQ ID NO: 90374 - DNA, 335 bp, Zea mays
attcagaaacacaccaagcgaagcgcactagcaacgacctaacaacaatggctaccaagatattagccctccttgcgcttcttgccctttttgtgagcgcaacaaatgcgttcattattccacaatgctcacttgctcctagtgccattattccacagttcctcccaccagttacttcaatgggcttcgaacacctagctgtgcaagccaacatgcaacaacaagcgcttgcggcgagcgtcttacaacaaccaattgcccaattgcaacaacaatccttgccacatctaacaatacaagccatcacaacgcaacagcaacaacagttccttacc

SEQ ID NO: 90375 - DNA, 417 bp, Zea mays
atcgcccataatattttgagcattcaataacacacaaagggaagtgcactagcagactggctaacaacaatggctaccaagatattagccctccttgcgctcctttccctttcagtgagcgcaacaactgcattcattattccacaatgctcacttgctcctaatgccattattccacagttcctcccatcagttacatcaatgggcatcgaacaccctattgtgcaagcctataggctacaacaagcgcttgcggcgagcgtcttacaacaaccgtttgcccaattacaacaacaatccttggcacatctaaccatacaaaccatcgcaacacaactagagcaacagtttgtgcccgcattgagccaactagccgcggtgaaccctgtctcctacttgcaacagcaactgcttgca

SEQ ID NO: 90376 - DNA, 418 bp, Zea mays
  unsure (1)..(418): unsure at all n locations
cgctagcaaacgtagttgcnaaaccagcaacaacaacaactgcaacagtttctgccagcgggtagtcaactagccatggtgacccctgccgcctacctacaacagcaacaactgctttcatctagcccgctcgctgtggccaatgcacctacatacctgcaacaagaattgttgcaacagattgtaccagctctaactcagctagctgtggcaaaccctgttgcctacttgcaacagctgcttccattcaaccaactaactatgtcgaactctgttgcgtacctacaacagcgacaacagttacttaatccattggcagtggctaacccattggtcgctgccttcctacagcagcaacaattgctgccatacaaccggttctctttgatgaatcctgtcttgtcgaggcagcaaccca

SEQ ID NO: 90377 - DNA, 431 bp, Zea mays
gcattcaaaaacacaccaagcgaagcgcactagcaacgacctaacaccaatggctaccgaggatattagccctccttgcgcttcttgcccttttagtgagcgcaacaaatgcgttcattattccacagtgctcacttgctcctagtgccagtattccacagttcctcccaccagttacttcaatgggcttcgaacatccagccgtgcaagcctacaggctacaactagcgcttgcggcgagcgccttacaacaaccaattgcccaattgcaacaacaatccttggcacatctaaccctacaaaccattgcaacgcaacaacaacaacaacagtttctgccatcactgagccacctagccgtggtgaaccctgtcacctacttgcaacagcagctgcttgcatccaacccacttgctctggcgaacgtagct

SEQ ID NO: 90378 - DNA, 322 bp, Zea mays
  unsure (1)..(322): unsure at all n locations
tagcaacatagaaagcacaatagtgtaccaacaatggcagccaaaatattttgcttcgttatgctccttggtctttctgcaagtgttgctaccgcaaccattttcccacaatgctcacaagctcctatagcttcccttcttcccccatacctctcaccagcggtgtcttcaatgtgtgaaaacccaattgttcaaccctacaggatccaacaggcaatcgcaacaggcatcttaccattatcacccttgttcctccaacaaccgtcagccctattacagcagttacctttggtccatttggtggcacanaacatcagggcac

SEQ ID NO: 90379 - DNA, 364 bp, Zea mays
gtcagcctagcaattagctcatcgactccagattggagaactcgacaccatgaaggtgctgatcgttgcccttgctctcctggcgctcgctgcgagcgccgcctccagtacaagcggcggctgtggctgccagacaccaccgtttcatctaccgcctccgttctatatgccgcctccgttctatctgccgccgcagcagcagccgcagccatggcaataccccactcaaccaccgcagctaagcccgtgccagcagttcggatcctgcggcgtcggcagcgtcggcagcccgttcctgggccagtgcgtcgagttcctgaggcaccagtgcaagccccgggccggggccggaaaccggcccccc

SEQ ID NO: 90380 - DNA, 346 bp, Zea mays
tcccgcgttcaggaggtccttaagttctgctgccatttctcattctacttgttcatgcgtcccattgcagcaccgggggaattcattctcatcacatgagattaggaatcatcagcccggatcacgctttcgtcctcctgccaccctccccggatcatctaccgccgcctgtgcatctgccacctccggttcacctgccacctccggtgcatctcccaccgccatagcttcaagggaaggaggcagaccaatgtcagagatccgcaatgtcttcgatcagattcgtcaagggagaaatgcacgattggaggatttgcttctcattgacccgtcacttattatgaca

SEQ ID NO: 90381 - DNA, 317 bp, Zea mays
caattacctcatctactttagtttggagaactcaacaccatgaatgggctgggctttgcccttgcgtctgctggcgctcgctgcgagcgccgtctacagtacaagcggcggatgtggctgccaaacatcactgcttcatctaccgccttcattctatatgccgtctccgaactatctgccgccgcagcatccaccacagacatggcaataccccactcaaccaccgcaactaaacccatgctagtagttcaaatcctggggcgattacagcgactacaacccgtaccttggccagtgcgaaaagttcctgaggcacc

SEQ ID NO: 90382 - DNA, 341 bp, Zea mays
  unsure (1)..(341): unsure at all n locations
ctccagagcgcagaagaacccgatcgacaccatgagggtgttgctcgttgccctcgctctcctggctctcgctgcgagcgccacctccacgcatacaagcggcggctgcggctgccagccaccgccgccggttcatctaccgccgccggtgcatctgccacctccggttcacctgccacctccggtgcatctcccaccgccggtccacctgccgccgccggtccacctgccaccgccggtccatgtgccgccgccggttcatctgccgccgccaccatgccactaccctactcaaccgccccggcctcagcctcatccccagccacancccatnngcccgt

SEQ ID NO: 90383 - DNA, 98 bp, Zea mays
caccaccttttcatctacctccttctttctatatgccgcctcctatctatctgccttctcatcaacatctctcaaccatttcaataccccactcaacc

SEQ ID NO: 90384 - DNA, 427 bp, Zea mays
ggaagattatgggttcccaagggctatagcatttgctgcttctgcaatccgcagttcagcagttgttgctgtgacatgtgacaaagagataattactggtggccacgttgatggttcattgaagttgatatccctagatggagcgaagacaattgaaactgcttctgggcatattgctccagtgacatgccttgcgctgtcacctgatagcaactaccttgtgacagggtctagagataccacagttatactctggaggattcatcagacaggctcctcacataagaaaaatgctcaagaacctccaccgactacaccaacgacaccacgcagtcctctctctggcagcactagcaccatgagcagcctctcagaaacaaagagacgtcgcgttgaaggtccaatgcatgtaatgagaggacatctt

SEQ ID NO: 90385 - DNA, 471 bp, Zea mays
ttccggtccggaattcccggctcgacccacgcgtgcggcaacatagaaagtagaatccattagcaacaatagagcaacaatggcgaccagtataggttccctccttatgctccttgctctttctacatgtgttgctaacgcgacaattttccctcaatgctcacaagctcctatagcttcccttcttgccccataccttccatcaattatagcttcagtatgtgaaaacccagctcttcaaccatatacgcttcaacaagcaatcgcagcaggcaacatacctttatcgcccttgatgtttcaacaatcaccagccctatctttggtgcagtcattggtacaaaccatcatggcacaacagctgcagcaactcgtgctacctgtgatcaaccaactagctctggcaaacctttctccctactctcagcatcagcactttcttgcattcaaccaactggatacactgaaccc

SEQ ID NO: 90386 - DNA, 431 bp, Zea mays
cagcaagcaacatagaaagtagaatccattagcaacaatagagcaacaatggcgaccaggatattttccctccttatgctccttgctctttctacatgtgttgctaacgcgacaattttccctcaatgctcacaagctcctatagcttcccttcttcccccataccttccatcaattatagcttcagtatgtgaaaacccagctcttcaaccatataggcttcaacaagcaatcgcagcaagcaacatacctttatcgcccttgttgtttcaacaatcaccagccctatctttggtgcagtcattggtacaaaccatcagggcacaacagctgcagcaactcgtgctacctgtgatcaaccaagtagctctggcaaacctttctccctactctcagcaacaacaatttcttccattcaaccaactgtctac

SEQ ID NO: 90387 - DNA, 434 bp, Zea mays
ggtggaggtagcgcctccgcaggccatggaggtgcgcgtcaagatcctcttcagctcgctctgccacaccgacgtctacttctgggaggccaaggggcagactcccgtgttccctcggatctttggccacgaggctggaggtatcatagagagtgttggagagggtgtgactgacgtagctccgggcgaccatgtccttcctgtgttcactggggagtgcaaggagtgtgcccactgcaagtcggcagagagcaacatgtgtgatctgctcaggatcaacaccgaccgcggtgtgatgattgccgatggcaagtcgcggttttcaatcaatgggaagcctatctaccactttgttgggacttccaccttcagcgagtacaccgtcatgcatgtgggttgtgttgcatagatcaaccctcaggctccccttgata

SEQ ID NO: 90388 - DNA, 417 bp, Zea mays
  unsure (1)..(417): unsure at all n locations
cgacgcacgcgtccggagatagagtcctttttactttctatcgatgatgagataaactctcttttgaacaaaggactgctctgagatgccgaactagcaactcaacgagaacgtatcttgaggatcagtgctgattttgacaatttcaggaaaaggacagaaaatgagaagcttaacatgatggaaaatgtgcaaggggaacttatagagagctttttgcctgttctcgacaactttgaaagagcgaaagtgcaaataaaggtggaaacagagggagaggagaaaataaataatagctaccagagcatntaatagcaattcatcgagattttgaattcattgggcgttgaagatgttgaaaacggtcggaanaccatttgatcccatgcttcatgaggctattatgagagaggaatc

SEQ ID NO: 90389 - DNA, 392 bp, Zea mays
ttatccctccttgcgcttcttgcgctgtttgcgagcgcagcaaatgcgtccattattccacaatgctcacttgctcctagttccattattccacagttcctcccaccagttacttcaatggccttcgaacacccagctgtgcaagcctataggctacaacaagcgattgcggcgagcgtcttacaacaaccaattgcccaattgcaacaacaatccttggcacatctaacattacaaaccatcgcaacgcaacagcaacaacaggtcctaccagcactgagccaactaaccatggtgaaccctggtcgctacttgcaacagcagctggttgcatccaacccacttgctctagcaaacgtagttgcaaaccagcaacaacaacaactgcaaca

SEQ ID NO: 90390 - DNA, 291 bp, Zea mays
tcccgggtcgacgcacgcgtccggcaacaacctaacaacaatggctaccaagatattatccctccttgcgcttcttgcgctgtttgcgagcgcaacaaatgcgtccattattccacaatgctcacttgctcctagttccattattccacagttcctcccaccagttacttcaatggccttcgaacacccagctgtgcaagcctataggctacaacaagcgattgcggcgagcgtcttacaacaaccaattgcccaattgcaacaacaatccttggcacatctaacaataca

SEQ ID NO: 90391 - DNA, 566 bp, Zea mays
  unsure (1)..(566): unsure at all n locations
atatttatgtatagtagtatagattaatatgataatgatgtgatnntaaatataaaagtgtgtctgatagaagggatactccatactcctcccgtccggaattcccgggtcgagccacgcgtccggagaccaacaagcaacatagaaagtggaatccagtagcaacaacagagcaacaatggcgagcaagatattgtccctccttatgctccttgctctttctgcatgtgttgctaacgcgacaattttccctcaatgctcacaagctcctatagcttcccttcttcccccataccttccatcaatgatagcttcagtatgtgaaaacccagctcttcagccctataggctccaacaagcaatcgcagcaagcaacatacctttatcacccttgttgtttcaacaatcgccagccctatctttggtgcagtcattggtacaaaccatcanggcacagcagctgcagcaactcgtgctacctgtgatcaaccaagtagctctggcaaacctttctccctactcttagcaacaacaatttcttccatttaaccaactggctaaactga

SEQ ID NO: 90392 - DNA, 452 bp, Zea mays
  unsure (1)..(452): unsure at all n locations
ggtccggaattcccgggtcgagccacgcgtccgcttcgtattgattgacgatttcaaagaggaaatatgcaaatctctgaaggactacaagaggcagattgagcagctcaagcaggagatggatgatgccacacgtggggcagataatatcagaagtgatattggtgccctcgctcagagatatacagtaattgaccgtgagcaggattgtggggtttgccggcgcanaatattgactgttggagggttgcaccaggtaggaagaagctatacatctggtggacacatggcccccttttatgtgtttccctgtggacatgccttccatgcaaattgcttgattggacatgtgactcgttgcagtaaccaagtgcaagctgagagaatattggaccttcagaaacggcttagcttgatggacaggaaagcagcanaagacaatggggcaagtg

SEQ ID NO: 90393 - DNA, 372 bp, Zea mays
  unsure (1)..(372): unsure at all n locations
ggcccgacgcacgcgtccgcgtgagcctagcaattagctcatcgacttcagattggagaactcgacaccatgaaggtgctgatcgttgcccttgctctgctggcgctcgctgcgagcgccgcctccagtacaagcggcggctgtggctgccagacaccaccgtttcatctaccgcctccgttctatatgccgnctccgttctatctgccgccgcagcagcagccgcagccatggcaataccccactcaaccaccgcagctaagcccgtgccagcagttcggatcctgcggcgtcggcaagcgtcgcagcccgttcctgggccaatgcgtcgagttcctgaggcaccagtgcaacccggcggcgacgccctac

SEQ ID NO: 90394 - DNA, 176 bp, Zea mays
ccggttcggaattcccggcctgtagtatagccgctggctagctagctagttgagtcatttagcggcgatgattgagtaataatgtgtcacgcagcaccatgggtggcagtgtcagtgtgagcaatgacctgaatgaacaattgaaatgaaaagaaaaaaagtactccatctgttcc

SEQ ID NO: 90395 - DNA, 317 bp, Zea mays
ctctgctgcttatttacagcagcaacaactactaccattcagccagctagctgatgtgagccctgctgccttcttgacacaacaacagttgttgccgttctacctgcacgctatgcctaacgctggcaccctcttacaactgcaacaattgctgccattcaaccaacttgctttgacaaactcaacagtgttctaccaacaacccatcattggtggtgccctcttttagattgcttatgagttatagttcaataatgaagttttttggatgatgtttgtggcgtcccagaaataagaaagtacatttctagattctt

SEQ ID NO: 90396 - DNA, 572 bp, Zea mays
  unsure (1)..(572): unsure at all n locations
tatgggagaatgaggagtgaggagtagagcgtgaggagaaaggagatgcagtgaaanggaaagtctcgttgtgcctatggggggggaaggaggcatcctccggttcggaattcccgggtcgagccacgcgtccggctccttggtctttctgcaagtgctgctacggcgaccattttcccgcaatgctcgcgagctcctatagctgcccttcttcccccgtacctctcaccagcggtgtcttcggtatgtgaaaacccaattcttcaaccctacaggatccaacaggcaatcacagctggcatcttacctttatcacccttgttcctccaacaatcatcagccctattacatcagttacctttggtgcatttattggcacaaaacatcagggcacaacaactacaacaacttgtgctagcaaaccttgctgcctactctcagcaacagcagtttcttccattcaaccaactagctgcattgaactctgcttcttatttgcaacaccaacaactaccattcagccaactacctgctgcctacccccagcaatttcttccattcaaacaaatggc

SEQ ID NO: 90397 - DNA, 252 bp, Zea mays
aattcccgggtcgacgcacgcgtccgcttcgatattttcgctgccgggagtgagacttcatcgacggtgctagcgtgggccatgtcagagctcgtcaggaacccacgggtgctgcacaaggcgcagtcagaggtgagggagacgttcaagggccaggaaaggctaaccgaaaacgacatgcccaggctgagctacctgaacctggtgatcaaggaggccctacggttgcacccgccggtgccactgttgttg

SEQ ID NO: 90398 - DNA, 168 bp, Zea mays
acgcgtccgctgcgacaaacccagcagcgttctacctacaacccatcattggtggtgccctcttttagatttcttatgagttatagttcgataataaagttttttgtctgatgtttgtggcttcccagaaataagaaagtacatttctaatacaacaaccaaatacat

SEQ ID NO: 90399 - DNA, 382 bp, Zea mays
  unsure (1)..(382): unsure at all n locations
tcccgggtcgacgcacgcgtccgttcaagggtctgcctggggtgctgtgggtgctccctgattcctacatcgacgtgaagagcaangactacngaggtgacaagtacgtgaacggcgagataatcccctgcacgtacccgacgtaccagccgaaggagcggaggacgtccaagtacgagagcaggcggtacgagaggcggagagatgggccaccggcggccagcaggaaaccgaggcagcaggcaccagctcagactcagaccgagtcggcgtcttcgtgacgagctctgcaggcattttgtccacgtacctacctacctagaagtagaacaagagaagaagacgcctaaaattctgtcgcattgggcaccgggtactggac

SEQ ID NO: 90400 - DNA, 463 bp, Zea mays
accggtccggaattgccgggccaactagcaacatagaaagcacaatagtgtaccaacaatggcagccaaaatattttgcttccttgggctccttggtctttctgcaagtgttgctaccgcaaccattttcccacaatgctcacaagctcctatagcttacctacttaccccatacctctcaccagcggtgtcttcaatgtgtgaaaacccaattgttcaaccctacaggatccaacaggcaatcgcaacaggcatcttaccattatcacccttgttcctccaacaaccgtcagccctattacagcagttacctttggtccatttggtggcacaaaacatcagggcacaacaactacaacaacttgtgctagcaaaccttgctgcatactctcagcaacatcaggttcttccattcaaccaactggctgcattgaactctgcttgctatttgcaacaacaatta

SEQ ID NO: 90401 - DNA, 459 bp, Zea mays
cggtccggaatgcccgctcgagccacgcgtacgcgcaatgctcgcaagctcctatagcttaccttcgtccgccgtacctctgaccagcggtgtcttcggtatgtgaaaacccaattcttcaaccctacaggatccaacaggcaatcgcagctggcatcttacctttatcacccttgttcctccaacaatcatcagccctattacaacagttacctttggtgcatttattggcacaaaacatcagggcacaacaactacaacaacttgtgctagcaaaccttgctgcctactctcagcaacagcagtttcttccattcaaccaactaggttcattgaactctgcttcttatttgcaacaacaacaactaccattcagccagctacctgctgcctacccccagcaatttcttccattcaaccaactagcagcattgaactctcctgcttatttacagcagc

SEQ ID NO: 90402 - DNA, 579 bp, Zea mays
  unsure (1)..(579): unsure at all n locations
tatgggatatatgtgtatanattgatgtttgggtgtgtattatgatgagnnntatnnagtgatgaagtctcgtagttcatagaaggagagatttggtagtgatcgccccggtccggaattcccgggtcgagccacgcgtccggaatggcaaaatggttggaagcaagcccctttatgtagctcttgcgcagcgtaaagaggacagaaaggcaaagctacaggcacaattttcacaaatgcgtcctgttgcaatggcgccttcagtaggtcctcgcatgcccatgtttccacctggtgtccctggagttggtcagcagctgttctatggtcagccaccaccagccttcatcaaccctcaggctggatttgctttccagcaacctctgatgcctggtatgaggcctggtggtccaatgccgaactttatgatgcctatggttcagcaaggacagcaaccacagcgtcctgctggtagacgtgctggtggaatgcagcagcccatgccaatgggtggtcagcaacaggtgttccctagaggtggtcgtggctattggtatcctactggactggaatggctga

SEQ ID NO: 90403 - DNA, 452 bp, Zea mays
ccggtccggaattcccgggctatgacaacagttacctttggtgcatttattggcacaaaacatcagggcacaacaactacaacaacttgtgctagcaaaccttgctgcctactctcagcaacagcagtttcttccattcaaccaactaggttcattgaactctgcttcttatttgcaacaacaacaactaccattcagccagctacctgctgcctacccccagcaatttcttccattcaaccaactagcagcattgaactctcctgcttatttacagcagcaacaactactaccattcagccagctagctggtgtgagccctgctaccttcttgacacaaccacagttgttgccgttctaccagcacgttgcgcctaacgctggcaccctcttacaactgcaacaattgctgccattcaaccaacttgctttgacaaacccaacaatgttct

SEQ ID NO: 90404 - DNA, 571 bp, Zea mays
  unsure (1)..(571): unsure at all n locations
taggggagtaggggatggggttggttggtgggtgtaaatggagnnnagnaggtnagaaggtngtctgaataaagacaagtactgtaatgctcgcaccggtccggaattcccgggtcgagccacgcgtccggtggagccgcagcaccggtaccaggcgatcttcggcttggtcctccagtccatcctgcagcagcagccgcaaagcggccaggtcgcggggctgttggcggcgcagatagcgcagcaactgacggcgatgtgcggcctgcagcagccgactccatgcccctacgctgctgccggcggtgtcccccactgaagaaactatgtgctgtagtatagccgctggctagctagctagttgagtcatttagcggcgatgattgagtaataatgtgtcacgcatcaccatgggtggcagtgtcagtgtgagcaatgacctgaatgaacaattgaaatgaaaagaaaaaaagtactccatctgttccaaattaaaaaaaaaaaaaaagggcggccgctctagaggatccaagcttacgtacgcgtgcatgcgacgtcataactcttctat

SEQ ID NO: 90405 - DNA, 404 bp, Zea mays
  unsure (1)..(404): unsure at all n locations
tcccggctcgacgcacgcgtccggcaacatagaaagcacaatagtgtaccaacaatggcagccaaaatattttgcctccttatgctccttggtctttctgcaagtgctgctacggcgaccattttcccgcaatgctcgcaagctcctatagcttcccttcttcccccgtacctctcaccagcggtgtcttcggtatgtgaaaacccaattcttcaaccctacaggatccaacaggcaatcacagctggcatcttacctttatcacccttgttcctccaacaatcatcagccctattacatcagttacctttggtgcatttattggcacanaacatcagggcacaacaactacaacaacttgtgctagcaaaacctgctggctactctcagcaacagcaggttct

SEQ ID NO: 90406 - DNA, 276 bp, Zea mays
tcccggtcgacgacgcgtccgctgtttgtccgtcgggctggcccaggcagcacggagctgaccgtggagggaaggccatgcgaccagctgggcaggagaaacctcactgacagccccgtatttgacggccgtggccctgacgccagcctcgtggctcgcgtacagggagtcgctacccagatgggcgacgtgcgccagttgtacaccgtcgtgttccaggagaggccgctcaagggctccacgctcgtcaccgaaaggcccaatgacagaagggtc

SEQ ID NO: 90407 - DNA, 425 bp, Zea mays
  unsure (1)..(425): unsure at all n locations
atagaaagtggaatgcagtagcaacaacagagcaacaatggcgaccaggatattttgcgctgttatgctgcttgctctttctgcatgtgttgctaacgcgacaattttccctcaatgctcacaagctcctatagcttcccttcttcccccataccttccatcaatgatagcttcagtatgtgaaaacccagctcttcagccctataggctccaacaagcaatcgcagcaagcaacatacctttatcacccttgttgtttcaacaatcgccagccctatctttggtgcagtcattggtacaaaccatcaaggcacagcagctgcagcaactcgtgctacctgtgatcaaccaagtagctctggcanaccttttctcctactctcagcaacaacaaattcttccattcaaccaactgtctacactga

SEQ ID NO: 90408 - DNA, 518 bp, Zea mays
  unsure (1)..(518): unsure at all n locations
agggcnagggannaagggaggtatgagctcttaagacacttactgcacgctctaccggtccggaattcccgggtcgagccacgcgtccggaccaactagcaacatagaaagcacaatagtgtaccaacaatggcagccaaaatattttgcttccttatgctccttggtctttctgcaagtgttgctaccgcaaccattttcccacaatgctcacaagctcctatagcttcccttcttcccccatacctctcaccagcggtgtcttcaatgtgtgaaaccccaattgttcaaccctacaggatccaacaggcaatcgcaacaggcatcttaccattatcacccttgttcctccaacaaccgtcagccctattacagcagttacctttggtccatttggtggcacaaaacatcagggcacaacaactacaacaacttgtgctagcaaaccttgctgcatactctcagcaacatcagtttcttccattcaaccaactggctgcattgaactctgctgcttn

SEQ ID NO: 90409 - DNA, 461 bp, Zea mays
cggtccggaatgcccgggtcgagccacgcgtccgccagcaagcaacatagaaagtagaatccattagcaacaatagagcaagggtggcgaccgagagattttccctgcttatgctccttgctctttctacatgtgttgctaacgcgacaattttccctcaatgctcacaagctcctatagcttcccttcttcccccataccttccatcaattatagcttcagtatgtgaaaacccagctcttcaaccatataggcttcaacaagcaatcgcagcaagcaacatacctttatcgcccttgttgtttcaacaatcaccagccctatctttggtgcagtcattggtacaaaccatcagggcacaacagctgcagcaactcgtgctacctgtgatcaaccaagtagctctggcaaacctttctccctactctcagcaacaacaatttcttccattcaaccaactg

SEQ ID NO: 90410 - DNA, 552 bp, Zea mays
gaggagtaggaggggggagtgggggggagaggtgtatagagtgggggggttctgctaggagcagttctccatgatctcccggtccggaattcccgggtcgagccacgcgtccgcccacgcgtccgaaccgctccacgccctccccctccgcgcagagccagccaagccagccggccagtcagaagaggaaccggggagcggcagctgcagcggccgagggcggagcacgcgaggcatggatagataccaaagggtagagaagcctcggaatgacacgccaatcagccagaatgagatcagaatcactactcaggggaggatgaggaactatatcagctatgggatgtcgctgcttgaggaaaatggacatgatgagattagtatcaaggccatgggacgggccataaataagacagttatggttgttgaattgatcaagagaagggttggaggtcttcatcagaacactgctactgaatctgttgatatcacagacacatgggaacctttgggaagaagccttcttcccactaagacaacttggcatgtgtc

SEQ ID NO: 90411 - DNA, 561 bp, Zea mays
  unsure (1)..(561): unsure at all n locations
gtaaattggagtagtgagtggtagaggtggtgggtaggttgatatttggaaagggctctgattaagaaagtactcaatactgtcccggtccggaattcccgggtcgagccacgcgtccgtcaccatcgagaaggacgtatacgacaacgtcgcgcacgcgttcgtgaagatcctacgcgacgagggcccgtcggagctgtaccgtgggctgacacccagcctgatcggcgtggtgccgtacgcggcctgtaacttctacgcctacgagacgctgaagcggctctaccgtcgcgcgaccgggcggcgtcccggcgcggacgtgggccccgtggcgacgctgctcatcgggtcggcggcgggcgccatcgccagctcggccacgttcccgctggaggtggcccgcaagcagatgcaggtgggcgctgtgggcgggaggcaggtgtaccagaacgtcctncacgctatctactgcatcctcaagaaggagggcgccggcggcctgtaccgaggtctcggccctagctgcatcaagctaatgcccggcggcggcattggctttat

SEQ ID NO: 90412 - DNA, 423 bp, Zea mays
tgcaacgcaacaacaacaacaacaacagtttctgccatcactgagccacctagccgtggtgaaccctgtcacctacttgcaacagcagctgcttgcatccaacccacttgctctggcgaacgtagctgcataccagcaacaacaacagctgcaacagtttatgccagtgctcagtcaactagccatggtgaaccctgccgtctacctacaactactttcatctagcccgctcgcggtgggcaatgcacctacgtacctacaacaacagttgctgcaacaaattgtaccagctctgactcagctagctgtggcaaaccctgctgcctacttacaacagttgctttcattcaaccaaatggctgggtcaaactctgctgcgtacctacaacagcgacaacagttacttaatccattggcagtggc

SEQ ID NO: 90413 - DNA, 431 bp, Zea mays
cgcgtgcggtattacatcagttacctttggtgcatttattggcacagaacatcagggcacaacaacgacaacaactggtgctagcaaacgttgctgcctactctcagcaacagcagtttcttccattcaaccaactagctgcattgaactctgcttcttatttgcaacaacaacaactaccattcagccagctacctgctgcctacccccagcaatttcttccattcaaccaaattggcagcattgaactctcctgcttatttacagcagcaacaactactaacaattaacccactaacttgtggtaaccctggtaacttcttgatacaaccaccagtggtggccgtctaacaacacccttggcctaacgcttgcacccttttacaactggaacaattggtggcattcaaccaacttgctttgacaaaccc

SEQ ID NO: 90414 - DNA, 465 bp, Zea mays
tctaccggtccggaattcccgggctcacgagctcctatagctgcccttcttcccccataccttccatcaatgaccgcttcagtttgtgaaaacccaggccttcaaccctacaggctccaacaagcaatcgcaacaagcaacttacctttatcacccctgttctttcaacaatcgccagccctatctttggtgcagtcattggtacaaaccatcagggcacaacagctgcaacaactcgtgctaccagtgatcagccaagtagctctggcaaacctttctccctactctcagcaacaacaatttcttccattcaaccaactgtctacactgaaccctgctgcttatttaacacaacaacaactactaccattcagccagctagctactgcctactctcagcagcaacaatttcttccatttaaccaattggccgcactgaacccctctgcttatttccagcagcaa

SEQ ID NO: 90415 - DNA, 517 bp, Zea mays
  unsure (1)..(517): unsure at all n locations
agaggggtnnnnnataggtgatgatctctaaaaggagaaaaggtatgctccaccggtccggaattcccgggtcgacgccacgcgtccggagaccaactagcaacatagaaagcacaatagtgtaccaacaatggcagccaaaataggttgcctccttatgctccttggtctttctgcaagtgctgctacggcgaccattttcccgcaatgctcgcaagctcctatagcttcccttcttcccccgtacctctcaccagcggtgtcttcggtatgtgaaaacccaattcttcaaccctacaggatccaacaggcaatcgcagctggcatcttacctttatcacccttgttcctccaacaatcatcagccctattacaacagttacctttggtgcatttattggcacaaaacatcagggcacaacaactacaacaacttgtgctagcaaaccttgctgcctactctcagcaacagcagtttcttccattcaaccaactaggttcattgaactctgcttct

SEQ ID NO: 90416 - DNA, 316 bp, Zea mays
ttcccgggtcgaccgacgcgtccggctgtggtgaaccctgtcgcctacttgcaacagcagttgcttgcatccaacccacttgctctggcaaacatagttgcatacgaacaacaacaacaattgcaacagtttctaccagcgctcagtcaactagccatggtgaaccctgccgcctacctacaacagcaacaactgatttcatctagccctctcgctgtggttaatgcacctacatacctgcaacaacagttgctgcaacagattgtaccagctctgactcagctagctgtggcaaaccctgctgcctacttgcaac

SEQ ID NO: 90417 - DNA, 568 bp, Zea mays
  unsure (1)..(568): unsure at all n locations
gagggattatgggtttaganataatagggggagttggagtgaaatgtagagagaaagtgtgtctgaataagaagaatatgtaatactctcccggtccggaattcccgggtcgagccacgcgtccgataggagcttgtgagcaacatacctttatcgcccttgttgtttcaacaatcgccagcggtatctttggtgcagtcattggtacaaaccatcagggcacaacagctgcagcaactcgtgctacctctgatcaaccaagtagctctggcaaacctttctccctactctcagcaacaacaatttcttccattcaaccaactgtctacactgaaccctgctgcttatttgcagcaacaactattaccatttagccagctagctactgcctactctcagcaacaacaacttcttccatttaaccaattgcccgaactgacccccgctgcttatttgcagcaacaaattactactaccattttaccagctagctgcagcaaaaccgtgctttcttcttggacacaacaacagttgctggccttctaccagcagtttgcggctaaccccc

SEQ ID NO: 90418 - DNA, 580 bp, Zea mays
  unsure (1)..(580): unsure at all n locations
gagtaattatgtatgatggatgaagagttggtgattttataatattatttgggggtgcgtgtgcattactgacaagtacgttactgactgcaccggtccggaattcccgggtcggcccacgcgtccgcttacaactacaacaattgttgccctttgtaagaggggctttgacaaacccagcaggcggctaccaacaacacatgattggtggtgccctcttttagattgattattagttgaaattcaataataaagttttatggatgatgtatgtggccaaccagaaataagaaggtacatttccagattctaatgtgaaacagcattatacacaaaaacataatcaataactgtaattatgtgttctcaagttgcatatgcatcgtcaatctactatgttcgtgtaagtcctaatattancggttatctacgtgtggctgagtatgaactgcatcttcgtctaacagaaaaagggacttcttcttttatagtatagaagttgattcagctcctctgcgaaatggtcaattaacttattttgggcagcttaaatatgattgtgggctgacatttttatcaa

SEQ ID NO: 90419 - DNA, 558 bp, Zea mays
  unsure (1)..(558): unsure at all n locations
gatttataatagagtttgataagtttatttggtaatatnntatattgggagtgtttctaatagaggaatacgtcatactcgtccggtccggaattcccgggtcgagccacgcgtccgcccacgcgtccgcaccaacgcaaattgcaccaagaaatccatcgagaggccgtcgacaggggaattaatggcgtcgtcgtctagcagcagccaccgccgcctcatcctcgcagccgccgtcctgctctccgtgctcgcggctgccagcgccagcgccgggacctcctgcgtgccggggtgggccatcccgcacaacccgctcccgagctgccgctggtacgtgaccagccggacctgcggcatcgggccgcgcctcccgtggccggagcttaaaaagagatgctgccgggagctggcggacatcccggcgtaactgcggtgcaacgcgctgaacattctcattgaccgcgcgatcccggccgggcccggacgcgcaactggagggcccgctaaaggacctgccgggctggccgcgggaagtgcataggggattcgcccgcc

SEQ ID NO: 90420 - DNA, 380 bp, Zea mays
ccggtccggaattcccgggtcgggccacgcgtccgcaccaacgcaaattgcaccaagaaatccatcgagaggccgtcgacaggggaattaatggcgtcgtcgtctagcagcagccaccgccgcctcatcctcgcagccgccgtcctgctctccgtgctcgcggctgccagcgccagcgccgggacctcctgcgtgccggggtgggccatcccgcacaacccgctcccgagctgccgctggtacgtgaccagccggacctgcggcatcgggccgcgcctcccgtggccggagctgaagaggagatgctgccgggagctggcggacatcccggcgtactgccggtgcacggcgctgagcatcctcatggacggcgcgatccc

SEQ ID NO: 90421 - DNA, 430 bp, Zea mays
taccggtccggaagtcccggctcgagccacgcgtccgcaacatgcaacatagaatgtggaagacagtagcaacaatagagcaacggtggcggccgagatgttttccatgcttatgctccttgctctttctgcatgtgttgctaacgcgaccatttttcctcaatactcacaagctcctatagctgcccttcttcccccataccttgcatcaatgaccgcttcagtttgtgaaaacccagccgttcaaccctacaggctccaacaagcaatcgcagcaagcaacttacctttatcacccgtgcactttcaacaatcgccagtcctatctttggtgcagtcattgctacaaaccatcagggcacagcagctgtatcaactcgtgctaccagtgatcagtcaagtagctctggcaaaccttgctccctactct

SEQ ID NO: 90422 - DNA, 402 bp, Zea mays
caacaatggcagccaaaatagtttgcctccttatgctccttgggctttctgcaagtgctgctacggcgaccattttcccgcaatgctcgcaagctcctatagcttcccttcttcccccgtacctctcaccagcggtgtcttcggtatgtgaaaacccaattcttcaaccctacaggatccaacaggcaatcgcagctggcatcttacctttatcacccttgttcctccaacaatcatcagccctattacaacagttacctttggtgcatttattggcacaaaacatcagggcacaacaactacaacaacttgtgctagcaaaccttgctgtctactctcagcaacagcagcttcttccattcaaccaactatgttcattgaactctgcttcttatttgcaac

SEQ ID NO: 90423 - DNA, 464 bp, Zea mays
cggtccggaatgcccggatcgagccacgcgtgcgcccacgcgtccacggactcgcgggcataaacacacctgacgaagcgcagtatcaacgagctagcaacaatgggctgacgcgacattatgcgtccatgcgctcacagcgctcactgggagtgcagcacatgcattcatcagtccacaatgctaactacgttccaagtgctattatcacacagctgctcaatccaattacttacatgaggtgctaacacccagctgtgcaagcctatccgctgcaacaagcgctcgccgatagcgtgttagaacaaccattcgccccattacaacagcaatgcttggcacatctaaccatacaaaccatgggaacgcaatagcatcatgcgctgagccacctagccgatgcgaaccctatggcctacttgcaacaacagctgatcgcatacaacccacttgctttggcaaac

SEQ ID NO: 90424 - DNA, 417 bp, Zea mays
ccggtccggaattcccgggcagcgagcaacatagaaagtagaatccattagcaacaatagagcaacaatggcgaccaagatattttccctccgtatgctccttgctctttctacatgtgttgctaacgcgacaattttccctcaatgctcacaagctcctatagcttcccttcttcccccataccttccatcaattatagcttcagtatgtgaaaacccagctcttcaaccatataggcttcaacaagcaatcgcagcaagcaacatacctttatcgcccttgttgtttcaacaatcaccagccctatctttggtgcagtcattggtacaaaccatcagggcacaacagctgcagcaactcgtgctacctgtgatcaaccaagtagctctggcaaaacctttctccctactctcagc

SEQ ID NO: 90425 - DNA, 566 bp, Zea mays
tgtgtatgatttgatggtgttgaagaggataaggattagtgctagctgttaaagtgggtctgatacagatagtacgttactactgcaccggtccggaattcccgggtcggcccacgcgtccggctagctgcacgcagccgggcaggcttcatcacacacattcacgacacgcctgtgcgggggcaatgtgcagccatcaacgcgcccgctgtacacctactacagagattgcccctgggccacactctgatacacacccagctcctatagcaacaaccctcatgagtggatccctctatagactgcttattagatccaacaccattacatagggaatagaatgatgtataagaccaaccatagatatgacccttgcttaacatgaaccaacgggttgaatgctcttcaaggaatttcgattcaagacggttagaaggaactgtaagtaaccggccctatatctacccggaagtagataatccggcagttggtggaataccttgtggcaaatacaattggttgagaactttgtaatggggctgcattgacgagcttgtgttcaatca

SEQ ID NO: 90426 - DNA, 583 bp, Zea mays
  unsure (1)..(583): unsure at all n locations
tgaggggagagatggaggaggtgtgagataggaggtgagagngaatgtgaggnagaagttgttgaaagtggcgttgtgcagtatatgaaatgtantgatacgactgcaccggtccggaattcccgggtcgagccacgcgtccgcgttctcgtcgtgtgcctggctccgtcagctgccagcgcctctgcaatgcagatgcgctgcccctgcgcggggctgcagggcttgtacggcgctggcgccggcctgacgacgatgatgggcgccggcgggctgtacccctacgcggagtacctgaggcagccgcagtgcagcccgctggcggcggcgccctactacgccgggtgtgggcagacgagcgccatgtaccagccgctccggcaacagtgctgccagcagcagatgaggatgatggacgtgcagtccgtcgcgcagcagctgcagatgatgatgcagcttgagcgtgccggttgcggcaggaagaacctgtacgagccaactctgatgcagcaacacaacaacttgttggcagccagggtctaaaccccatggccatgataatgcccaaaaaattccgggcatg

SEQ ID NO: 90427 - DNA, 517 bp, Zea mays
  unsure (1)..(517): unsure at all n locations
agtagggctttnttagatggcttatgaactctacaagaatatacagcatgctctaccggtccggaattcccgggtcgacgcacgcgtccgattttgagcattcagaaacacaccaagcgaagcacattagcaacaacgtaacaacaatggctaccaagatatgatccctccttgcgcttcttgcgctttttgcgagcgcaacanatgcgttcattattccacaatgctcacttgctccaagttccattattacacagntnctnccaccagttacttcaatgggcttcgaacacccagctgggcaaggctatatgcttcaacaagcaaatgctgctagcgtgttacaaccacccattttcccatgtggaacaccaaagcttggggcatttaacaactacaaccactggtgctgcccacgatcaaccaattctatcacaagtatgtcacctattcactgtgaacactgccgcctacttgctacaacagatgcttgtatcaaacccacttgctctggcag

SEQ ID NO: 90428 - DNA, 460 bp, Zea mays
ccgggagccacgcgtccggctgcattgaactctgcttcttatttgcaacaacaacatctaccattcagccagctacgtgctgactgggcgcagcaatctgttgcattgaaccaactggcagcattgaactctcctgcttatttacagcagcaacaactactaccattcagccagctagctggtgtgagccctgctaccttcttgatacaaccacagttgttgccgttctaccagcacgctgcgcctaacgctggcaccctcttacaactgcaacaattgctgacattcaaccaacttgctttgacaaacccagcagcgtgctaccaacaacccatcattggtggtgccctctattagatatcttatgagttatagctcaataataaagttttcagtctgaaaaaaaaaatcgacgaaccaccctgaaacaaagggcggacgttctagaggatccaagctt

SEQ ID NO: 90429 - DNA, 419 bp, Zea mays
  unsure (1)..(419): unsure at all n locations
cgcgtccaggaacatacatagtgaagtacactagcaacatcttagcaccaatgggagccaagatttgtgccctccgtgccgtccttgctctttcagcaagcgctgctacctcgacttttattccacaatgctcacaacaatacctctctccggtgacagccgcgggatttcaatacccaactatacaatcctacatggtacaagaggccatccaagcaagcatcttacggtcattagcattaaccctncaacaaccatatgctctattgcaacagccatccttagtgcatctgtatctccaaagaatcgcggcacaacaactacaacaacagttgctaccaacaatcaatcaagtagttgcagcgaaccttgctgcttacctncagcaacaacagtttcttccattcaatcaactagct

SEQ ID NO: 90430 - DNA, 459 bp, Zea mays
ccggtccggaagtcccgggtcgagccacgcgtccgcgcgccgccgacgccgacgacgtgacggaaggaagaggaggagcaaggagcacgacgcgatgggccactccgacgagtggaactcgcaccctaagaactacggtcctggctcccgcgtctgccggctctgcgcgaaccctaacggtctgatcaggaagtacggtctcatgtgctgcatgcagtgcttgcgcagcaacgcctaggacatcgctttcatcaagtaccgttgaagaggccactgtgctgctgtggagaacttcctacatcaaagaaatggctccttcattagaaggcctaatttatgcgctatagctttttgctcagaacttgagactcatgtgttaaactcgacttgttaaagttttgatggctactttgtgcttgttggaccagctataatcagaagattgaaattttctcactc

SEQ ID NO: 90431 - DNA, 475 bp, Zea mays
ccggtccggaagacccggggtggaatccagtagcaacaatagagcaacaatggcgaccaagatactgcacctccttatgctcgctgctctctaggcatgtgttgctaacgcgtcaattcaccctcaatgctcacacgctcctattgcattccttctatcccccataccttacatcaatgatagctacagtatgtgaaaactgatctcttcaaccctataggctacaacatgcaatcgtagcaagcagcatacctttatcactcctagtttcatcaatcggcagccctatctttggtgcagacatagttacataccatcaaggcacagcagctgcagcaactcgagctacctgtgatcaaccaagtagctctggcaaaccttactccctactatcagcaacaacaatctcttccattcaaccaactatctacactgaaccctgctgcttatttgcagcaacaactattaccattca

SEQ ID NO: 90432 - DNA, 564 bp, Zea mays
  unsure (1)..(564): unsure at all n locations
gagtaagtagatatgtgtttagtaggtggttgtgatatatgntaggatttaagatgtgggtctgataatgaatatatgtcacgctcgtcccggtccggaattcccgggtcgagccacgcgtccgattagctttatctactccagagcgcataagaacccgatcgacaccatgagggtgttgctcgttgccctcgctctcctggctctcgctgcgagcgccacctccacgcatacaagcggcggctgcggctgccagccaccgccgccggttcatctaccggcgccggtgcatctgccaacttcggttcacctgccacctccggtgcatctcccaccggcggtccaactgccggcggcggtccaactgccaccggcggtccatgtgccggcggcgggtcatctgccggcggcaccatgccactaccctacttaaccggcccggcctcaaccttattcccagccacacccatgcccgggcccaacagcggattcaaaacccggccaactttagggaacctggggcgttgggaacaccccgattctgggccaatgcctcgagttccc

SEQ ID NO: 90433 - DNA, 300 bp, Zea mays
ggcggggggggcggcgctgtgctttgcgggcctgttggccccggccgtctgccaaagcgaggtctagcggcagaagctcatggacccgcagtgctgtcagcaggtccaccagagcccgctcgacgcgtgccgccagctcctcgaccggcagctaaccagcggcggcggcggcggcggcgttggcccgctcctgtggggcacccagctccctatgcagtgctgccagcagctccatgacgtgagccgccagtgccgctgcgccgccatccggagcatggtcaggggatacgaggaggccat

SEQ ID NO: 90434 - DNA, 405 bp, Zea mays
  unsure (1)..(405): unsure at all n locations
cggtcctgaattcccgggtcgagccacgcgtccgcaactagcaacatagaaagcacaatagtgtaccaacaatggcagccaaaatattttgcggccttatgctccttggtatttctgcaagtgctgctacggcgaccattttcccgcaatgctcacaagctcctatagcttcccttcttcccccgtacctctcaccagcggtgtcttcggtatgtgaaaacccaattcttcaaccctacaggatccaacaggcaatcgcagctggcatcttacctttatcacccttgttcctccaacaatcatcagccctattacagcagttacctttggtgcatttattggcacanaacatcagggcacaacaactacaacaacttgtgctagcaaaccttgctgnctactctc

SEQ ID NO: 90435 - DNA, 356 bp, Zea mays
ggcccgcggggccggatcgtgatggagctgtacgccaacgaggtgcccaagaccgcggagaacttccgcgcgctgtgcacgggcgagaagggcgtgtgcaagtacgggaagccgcttcctacaagggctccaccttcacggttatccagggcaatgtgcaaggccggcaacttaaccggcggaaccggacccgcgggcagtccatctacggcgagaagttccccgacgagaagttcgtgcgcaagcacaaccgccccggtgtgctctccatggccaacgccgggcccaacaccaacggcttccagttcttcatctgcaccgtcgcgaccccttggctcgacggcaagcacgtcgtc

SEQ ID NO: 90436 - DNA, 480 bp, Zea mays
ttcccgggctctgatctcgggttcaccgcagcgcacagagcaccctcgactcccgtcccgatccgcgctcttctctacgacgctgcactcatggcaggaatggcacacgcggcttctcagcctgatgctaaacactatgatactacataatgcatgatctgctataccactgatgagactgagctgcactatgctaaaaccgatctattcaaccatagaggctacaacatgcactttcagcaggctacatacctagatcaccctgcattcagcaatcgccagccctatctttggtgcagtcattggtacaaaccatcaaggcacagcacctgcagcaactcgtgctacctgtgatcaaccgagtagctctggcaaacctttctcggtactatcagcaacaacaatttcttccattcaaccaactatctacactgaaccctgctgcttatttgcagtagcaactattaccattcagccagc

SEQ ID NO: 90437 - DNA, 418 bp, Zea mays
aagcacaatagtgtaccaacaatggcagccaaaatattttgcctccttatgctccttggtcttgctgcaagtgctgctacggcgaccattttcccgcaatgctcgcaagctcctatagcttcccttcttcccccgtacctctcaccagcggtgtcttcggtatgtgaaaacccaattcttcaaccctacaggatccaacaggcaatcgcagctggcatcttacctttatcacccttgttcctccaacaatcatcagccctattacaacagttacctttggtgcatttattggccccaaaccttaaggcaccaccacctccaccacctgggcctaccaaacttggttgctaattttaacaaccacaagttctttcattcaacccactaaggtcaatggactctgcttcttaattgcaac

SEQ ID NO: 90438 - DNA, 284 bp, Zea mays
cgggtcgagccacgcgtccgattttgagcattcagaaacacacctagcgaagcgcactagcaacgagctaacatcagtgggtaccaagatattatccctctttgcgcttattgccctttttgtgagcgcaacatatgcgttcattattccacaatgctcacttgctcctagtgccattattccacagttcctccctgcaaatacttcaatgggcttcgaacacccaactgtgcaagcctacaggctacaacaagcgctagcagccagcgtgttacaacaaccaa

SEQ ID NO: 90439 - DNA, 512 bp, Zea mays
  unsure (1)..(512): unsure at all n locations
agggggctcnntatggcttatgaactctagggagattattgcatgctctaccggtccggaattcccgggtcgacgcacgcgtccggaactagcaacatacatagtgaagtacactagcatcatcttagcaccaatggcagccaagacttttgccatccttgccctccttgctctttcaggaagcgttgctaccgcgactattattccacaatgctcacaacaatacctctctccggtgacagccgcgagatttgaatacccaactatacaatcctacaggctacaagaggccatcgcagcaagcatcttacggtcgttagcattgaccgtccaacaaccatatgccctattgcaacaaccatccttaatgaatctatatctccaaagaatcgcagcacaacaactacaacaacagttgcttccaacaatcaatcaagtagttgcagcgaaccttgctgcttacctncagcaacaacaatttcttccattcaatcaactagctggggtgaacc

SEQ ID NO: 90440 - DNA, 396 bp, Zea mays
  unsure (1)..(396): unsure at all n locations
gaattcccgggtcgacgcacgcgtccgcaacatagaaagcacaatagtgtaccaacaatggcagcacaaactataacggatcatcagggtccacggggatattgcaagtgcttatactgcttactatttttgcatgtggcgctaacgctactatagttcctcaatgctcacaagctcctatagctacccttcttcccccataccttccatcaatgatagcttcagtatgtgaaaacccagctcttcagccctataggctccaacaagcaatcgcagcaagcaacatacctttatcacccttggtggttcaaccattggccagccctatctttggtgcagtcattggtacaaaccatcanggcacatcagctgcagcaactcgtgctacctgtgatc

SEQ ID NO: 90441 - DNA, 346 bp, Zea mays
tgggcatttgtggagaacacggtggagagccttcctctgtggccttcttcgcgaaggctggcctgggtccgttcctggttcccttttcagggttccgattgctaggctagctgcagctcaggtccttgccttaggctgcctcctaattggcaaccggtttgcctgcttctggggaattgggggtccacccgtttttttcccagaccctccctttgaacccttctctggtcccagctcttttaagctttccatccctatgcctttttttccccaacctgtttaactttctcactctgctccacggtttcaaatctgttctttaaaacaccatctcctatcaccgttt

SEQ ID NO: 90442 - DNA, 333 bp, Zea mays
gcagttacctttggtgcatttgttggcacaaaacatcaaggcacaacaactacaacgacttgtgctaggaaaccttgctgcctactctcagcaacagcagtttcttccattcaaccaactggctgcattgaactctgctgcttatttgcaacaacaactaccattcagtcagctagctgctgcctacccccagcaatttcttccattcaaccaactggcagcattgaactctgctgcttatttacaacagcaacagctaccaccattcagccagctagctgatgtgagccctgttgccttcttgacacaacaacagttgttgccgttctacct

SEQ ID NO: 90443 - DNA, 436 bp, Zea mays
  unsure (1)..(436): unsure at all n locations
attgagaccaactagcaacatagaaagcacaatattgtaccaataatggcagccaaaggattttgcctcattatgctccttggtctttctgcaagtgctgctacggcgagcattttcccgcaatgctcacaagctcctatagcttcccttcttcccccatacctctcaccagcgatgtcttcagtatgtgaaaatccaattcttctaccctacaggatccaacaggcaatcgcagcaggcatcttacctttatcacccttgttcctccaacaatcatcagccctattacagcagttacctttggtgcatttattggcacataacatcagggcacaacaactacaacaactcgtgctagcaaaccttgctgcctactctcagcaacagcagttacctttggtgcatttgttggcacaaaacatcnaggcacaacaac

SEQ ID NO: 90444 - DNA, 278 bp, Zea mays
ggattcccgggtcgacgcacgcgtccggagtcaccatcgagaaggacgtatacgacaacgttgcgcacgcgttcgtgaagatacggggcgaggagggcccgtcggagctgtaccgtgggctgacacccagcctgatcggcgtggtgccgtacgcggtctgtaacttgtacgcctacgagacgctgaagcggctctaccgttgcgcgaccgggcggcgttccggcgcggacgtgggccccgtggcgacgctgctcatcgggtccgcggcgggcgccatc

SEQ ID NO: 90445 - DNA, 385 bp, Zea mays
ttcccggtcgaccccgcgtccggttctgagtacttggcattcaaggaacagctggtggatggacaatccaacaacaactgtgtgcttgagcttgattaggagcccttcaatgcctactttcctcgtccttacatgtcgaagtccatcggacatggaatgcaattccttaaccgacacctgtcgtccaagttgttccaggacaaggagagttcgtaccccttgctgaacttcctcaaggctcataactacaaaggccacgacgatgatgttggatgacagaattccaagccttcgtggtctccaatcatccctgaaaaaggcagaagagtatctactgagtgttccttaagacactccctactcggagttcaaccataggttccaa

SEQ ID NO: 90446 - DNA, 363 bp, Zea mays
attgagaccaactagccacatagagagcacaatagtgtaccaacaatggcagccaagatgttttgcctacatatgcgccttggactttctgcaagtgctgctacagcgaccatttcaccgcaatgctcgcaagctcctatagcttccgttattccacctaacctctcaccagcggtgtcttcggtatgtgaaaacccaattctcaaacaatacacgatccaacaggcaatcacagctggaatctcacctttatcagcttagtccatccaacaatcatcatccttataacatcagttacctgtggtgcatatatcggcacaaaacatcggggcacaacatctacaacaacttgtgctagcaaac

SEQ ID NO: 90447 - DNA, 477 bp, Zea mays
cggttcggaattcccgggtggacgcacgcgtccgatttagaccaactagcaacatagaaagcacaatagtgtaccaacaatggcagccaaaatattttgcctccttatgctccttggtatttctgcaagtgctgctacggcgaccattttcccgcaatgctcacaagctcctatagcttcccttcttcccccgtacctctcaccagcggtgtcttcggtatgtgaaaacccaattcttcaaccctacaggatccaacaggcaatcgcagctggcatcttacctttatcacccttgttcctccaacaatcatcagccctattacagcagttacctttggtgcatttattggcacaaaacatcagggcacaacaactacaacaacttgtgctagcaaaccttgctgcctactctcagcaacagcagtttcttccattcaaccaactagctgcattgaactctgcttcttatttgcaaca

SEQ ID NO: 90448 - DNA, 292 bp, Zea mays
caacaagcaacatagaaagtggaatacagtagcaaaaatagagcaacaatggcggccaggatattttccatcctgatgctccttgctctttctgcatgtgttgctaacgccaccatttttccttaatactcacaagcttctatagctgcccttcttcccccataccttccatcaatgaccgctttaatattgtgaaaccccagcctttaacccttccagatccaacaagccatcgcaaccagcaacttacctttattacaactggtcttttaacaattgccaggccctatct

SEQ ID NO: 90449 - DNA, 272 bp, Zea mays
cccacgcgtccggagaccaacaagcaacatagaaagtggaatccagtagcaacagcggagcaacaatggcgaccaagatattttccctccttatgctccttgctctttctgcatgtgttgctaacgcgacaattttcccttaatgctcacaagctcctatagctttccttctttccccataccttccatcaatgatagcttcagtatgtgaaaacccagctcttcagacctataggcttcaacaagcgattgcagcaagcgacataccttta

SEQ ID NO: 90450 - DNA, 440 bp, Zea mays
cttcttcccccgtacctctcaccaacggtgtcttcggtatgtgaaaacccaattgttgaaccctacaggatccaagaggcaatcgcagctggcatcttacctttatcacccttgttcctccaacaatcatcagccctattacagcagttacctttggtgcatttattggcacaaaacatcagggcacaacaactacaacaacttgtgctagcaaaccttgctgcctactctcagcaacagcagtttcttccattcaaccaactagctgcattgaactctgcttcttatttgcaacaacaacaactaccattcagccagctatctgctgcctacccccagcaatttcttccattcaaccaactgacagcattgaactctcctgcttatttacagcagcaacaactactaccattcagccagctagctggtgtgagccctgc

SEQ ID NO: 90451 - DNA, 416 bp, Zea mays
cagccgtgcaagcctacaggctacaactagcgcttgcggcgagcgccttaacacgaccgaatgccccaattgaacggccatcccttgcaccatttaaccttccaaccaatggaacccaaccaccaccaccaccagttcttgcattaattaaccaacttacccttgtgaacccttgcaactaatttcaacaacaacttgttgcattcaacccaattgctcttgccaacctaactgtataccagcaacaacaacagctgcaacagtttatgccagtgctcagtcaactatccatggtgaaccctgccgtctacctacaactactttcatctagcccgctcgcggtgggcaatgcacctacgtacctacaacaacagttgctgcaacaaattgtaccagctctgactcaactagctgtg

SEQ ID NO: 90452 - DNA, 313 bp, Zea mays
  unsure (1)..(313): unsure at all n locations
ggaattcccggntggacccacgcgtccgcagacagcttccacagtcaccagagcactagagcagagcaacaaccgacaagagcagagggagagcgtcgtcagcgagcccagcagatacgagagagaggatggcggacatcgcgttgctggtggcggagcagttcgagaagacggcaaggcgaggcgcccccggcggggacagcggtagcgacagcgggaccggcggcgagacgaggaacttcggggccgtggccaaggtgtggagctcttgggtggagtccgccttcgccgccgcgtccggggtcagattcac

SEQ ID NO: 90453 - DNA, 386 bp, Zea mays
cggaattcccgggcaacatagaaagcacaatagtgtaccaacaatggcagccaaaatattttgcttccttatgctccttggtctttctgcaagtgttgctaccgcaaccattttcccacaatgctcacaagctcctatagcttcccttcttcccccatacctctcaccagcggtgtcttcaatgtgtgaaaccccaattgttcaaccctacaggatccaacaggcaatcgcaacaggcatcttaccattatcacccttgttcctccaacaaccgtcagccctattacagcagttacctttggtccatttggtggcacaaaacatcaaggcacaacaactacaacaacttgtgctaacaaaccttgcttcatactctcagcaacatc

SEQ ID NO: 90454 - DNA, 320 bp, Zea mays
gagaccaactagcaacatagaaagcacaatagtgtaccaacaatggcagccaaaatatggggctggcttatgctccttggtctttctgcaagtgctgctaccgcaaccattttcccacaatgctcacaagctcctatagcttcctttcttcccccatacctctcaccagcggtgtcttcagtatgtgaaaacccaattcttcaaccctacaggatccaacaggcaatcgcagcaggcatcttacctttatcaaccttgttccttcaacaacccgcaggcctattacagcagttacctttggtgccattggtgggacaaaa

SEQ ID NO: 90455 - DNA, 321 bp, Zea mays
tgagaccaactagcaacatagaaagcacaatagtgtaccaacaatggcagccaaaatagtttgcctccttatgctgcttggtctttctgcaagtgctgctacggcgaccattttcccgcaatgctcgcaagctcctatagcttcccttcttcccccgtacctctcaccagcggtgtcttcggtatgtgaaaacccaattcttcaaccctacaggatccaacaggcaatcgcagctggcatcttacctttatcacccttgttcctccaacaatcatcagccctattacaacagttacctttggtgcatttattggcaccaaa

SEQ ID NO: 90456 - DNA, 347 bp, Zea mays
  unsure (1)..(347): unsure at all n locations
gggccttcaagagaatcttttgagaggcatttatgcatatggttttgagaaaccatctgcggttcagcagagaggaattgttcccttctgcaaggggcttgatgtcattcagcaagcacaatctggtacaggaaagacagcaaccttctgttctgggatcttgcagcagcttgactatggtctggttgaatgccaggccctggttcttgctcccacccgtgagcttgcacagcanattgagaaagttatgcgcgcacttggtgactaccttggtgttaaagtccatgcatgcgttggaggaacatctgttcgtgaggcccaaaggattctcgccagtggtgtgcatg

SEQ ID NO: 90457 - DNA, 514 bp, Zea mays
aagtgttttgactacgaatataagcatgctctaccggtccggaattcccgggtcgacgcacgcgtccggaacaggcgacgaagaagatgagcacgctggacacgcggacgctcaaggacgagctgacgagcatggacaggaagtgcctcgtggacctcggccacccgctgctcaaccgcgtcgccgacagcttcatccgcgccgctggggtcggggcggccagggccgtctccagggaggcctacgtcgtcaccgtcgaagggctttcaggagactcgtccgggctagacgccgacggcggcaagcggagccatttctccagcatcagaggtgacgacggccagaggtcgctcgacgcagtggtaaaaacggccggcaaggaggccttccagtgggggttggcagccggagtctactcagggctcacgtacgcgctgcgggaggccaggggatgccacgactggaaaaacagcgccatcgcaagcgccatcgctggggcggcggtggcgctcac

SEQ ID NO: 90458 - DNA, 221 bp, Zea mays
aaggcaaaggagaaggtgatgtacaagaagaaggaaggtgttccggatggtctctgcgtgtagccaatctatgtcagtgatgccgaacaagttacccgattgtgtgtgtactagcacatctcttcatcatgggagatatgttaccacattacttgttgcatactgtcctaattggtcagaaaaccctggaataattaaataatccttcaatggcttaaaat

SEQ ID NO: 90459 - DNA, 430 bp, Zea mays
ggcagttatggatgcttgacatttatttccgtgaagggcatatattatcaggctgaagttcaaggacaaaagatcacctggctaactccgcatgctcttcagcaagtattaactgatgatgttgatttcaatgtgatgctttcttttctagaattctatgagactcttctaggatttgtgaacttcaaaatctatcattcaataaatgtaaattatcctcctattctggatccacgtctggaagctttagctgttgagctctatgcattgtgccgatacatgtctgctggttccagaagaatgattgggaattcacaaactgacgaagtaatggaagataaggatgagaaaagtaaagctgatgaagtaattgaggaagagaaggttgtgaagaataaagcaagctcaaaagcagatgaatctgagttca

SEQ ID NO: 90460 - DNA, 435 bp, Zea mays
caaatagcaacatagaaagcacaatagtgtaccaacaatgtctgtcatcatactggggttccttatgctccttgggctttctgcaagtgctgctaccgtaaccatttttccacaatgctcacaagctcctatagcttcctttcttatccccatacctctcaccaactgtgtcttcagtatgtgaaaacccaattcttcaaccctacatgatccaacatgcaatcgcagcaggcatcttacctttatcaccctcgttcctgcaacatccgtcagccctattacagcatttaccttcgatgcatatgttggcacaaaccatcaaggcacaacatctactacgacttgtgctaggaaaccttgcttcatactctcagcaacagcaggttctttcattcaaccaactcgctgcattgaactctgctgcttatttgcaac

SEQ ID NO: 90461 - DNA, 435 bp, Zea mays
caaacacacaccgagcgaagcgcactatcaacgacctaacaccaatggctaccaagatgattatccctgcttgcgctgcttgccctgttactgagcgcatcacatgcgttcattattacacagcgctcacttgctcctagtgccattattccacagttcctcccaccagttacttcaatgggctacgaacatccagccacgcaagcctacaggctacaactagcgcttgcggcgagcgacttacatcaaccaattgcccaatagcaacaacaatacttgacacatctaaccctacaaaccattgcaacgcaacaacaacaacagcaccagttcctgtcatcgactgagccacctagccgtggagaaccatgtcagctacttgcaacagcagctgcttgcatccaatccacttgctctggcgaacgtagctggcta

SEQ ID NO: 90462 - DNA, 403 bp, Zea mays
  unsure (1)..(403): unsure at all n locations
gagcattcagaaacacacctagcgaagcgcactatcaacgacctaacaacaatggcttggaanagattatccctccgtgcgcttcttgccctttttgtgagtgcaacaaatgcgttcattattccacaatgctcacttgctccgagtgccattattccacagttcctccctccagttacttcaatgggcttcgaacacccagctgtgcaagcctataggctacaacaagcgcttgcggcgagcgttttataacaaccaattgcccaattaacacaacaatcctttgcacatctaaccatacaaaccatcgcaacgcaacaacaacaagcacttgaccacctaaccgatgtgaaccctatcgactacttgcatcaacagctgcttgcatacaacccacttgctt

SEQ ID NO: 90463 - DNA, 248 bp, Zea mays
ccaagatattatccctccttgcgcttcttgcgctttttgcgagcgcaacaaatgcgttcgttatgccacaatgctcgcttgctccaagttccattattacacagttcctcccaccagttacttcaatgggcttcgaacacccagctgtgcaagcctataagctacaacaagcaattgcggcgagcgtcttacaacaaccaatttcccagttgcaacaacaatccttggcacatctaacaatacaaacc

SEQ ID NO: 90464 - DNA, 445 bp, Zea mays
gcaacatagaaagcacaatagtgtaccaacaatggcagccaaaatattttgcctccttatgctccttggtctttctgcaagtgctgctacggcgaccattttcccgcaatgctcgcaagctcctatagcttcccttcttcccccgtacctctcaccagcggtgtcttcggtatgtgaaaacccaattcttcaaccctacaggatccaacaggcaatcacagctggcatcttacctttatcacccttgttcctccaacaatcatcagccctattacatcagttacctttggtgcatttattggcacaaaacatcaaggcacaacaactacaacaacttgtgctagcaaaccttgctgcctactctcaacaacagcagtttcttccattcaaccaactaactgcattgaactctgcttcttatttgcaaccacaacaactaccattc

SEQ ID NO: 90465 - DNA, 382 bp, Zea mays
tagcaacatataaagcacaatagtgaaccaacaatggcagccaaaatattatgcctggggatgctccttgatctgggtgcaagtgcttctactgcgaccattttatcacaatgctcacaagcttctatagcttcccttattccctcgtatatctcaccagcggtgtcttcggtatgtgaaaacccaattcttcaaccctatacgatccaacaggcaatcgcagctggcatcttacctttatcacccatgttcctacaacaatcatcagccctattacagcacttaccattggtgcatttattggcacaaaacatcacaccacatctactaccacaacttgtgctagcaaaccttgctacctactctcatcatcaacagtctc

SEQ ID NO: 90466 - DNA, 428 bp, Zea mays
cgtttttcctttttcctggacagccactgcaactcctcccaaatcctcccacccggttgagccggctccgctgccaccggcgcgactccacctctgtcgccaccatggtcaagtccaaggccatcagggtccacgagctgggcggccccgaggtgctgcggtgggaggaggtggaggtcggggagcccggtgaaggggagatccgcatcaggaccaccgccgtcggcgtcaacttcatcgacatctactttcggaagggggtctacgccgcgcccaccatgcccttcaccccaggaatggaagccgttggcgtcgtcaccgctgttgggcctggcctcactggcaggaaggtgggcgatgttgttgcatatgccggcaaccccatgggctcctatgctcaggagcagatccttccagcggctgtcgct

SEQ ID NO: 90467 - DNA, 421 bp, Zea mays
cagaaataataaagcacatatatgggattccactccacatcaattctcaacaactacagcggcttgtgctatcagacctgtgctgactactctcagcaacagcaccatacttcacattcaaccaactagctgcatcaaactctgcttcttatttacaacatcaacatctaccattcagacatctacctgctgcctacccacagcaacttcttacattcaaccaactgacacatttgaactatgatctttatttacagcaagcaccacttactacaattcaccaagctacttgttgtaagccttgcaacctttttgatccacccacatttgttgccatcctacaataacactaagcctaacgctgccccccttttacaattcaaccaattgttgccatttacccaacttccttttacaaacc

SEQ ID NO: 90468 - DNA, 519 bp, Zea mays
  unsure (1)..(519): unsure at all n locations
gttagtgtgtcttgacccctgaccgctagncatgacgtcncggttcggaattcccgggtcgacgcacgcgtccgattcagaaacacaccaagctaatcgcactatcaacgacctaacaacaatggctaccaggagattatccctccttgcgggtcttgccctttttgtgagcgcatcaaatgcgttcattattccacaatgctcacttgctcctagtgccattattccacagttcctcccaccagttacttcaatgggcttcgaacacctagctgtgcaagccaacatgcaacaacaagcgcttgctgcgagcgtcttacaacaaccaattgcccaattgcaacaacaatccttgccacatctaacattacaagccatcacaactcatcatcaacatcagtttctaccagcattgagccatctagccatggttaaccctgccttttactttctagagcagctgtttgcattcaacccacttgcttctgttaacttattttcataccattatcatctact

SEQ ID NO: 90469 - DNA, 436 bp, Zea mays
  unsure (1)..(436): unsure at all n locations
caaatcccagacccatcccagccctagcgacaccaaccagctcgccagcgaccatggggaacccggagaagctgaggaatcagatcttcgacctcaagttcacctccaagtcgctgcagcggcaggcgcgcaagtgcgagaaggaggagaaggagcagaagctcaaggtcaagaaggcgatcgagaagggcaacatggacggcgcccgcatctacgccgagaacgccatccgcaagcgcaccgagcacatgaactacctccgcctcgcctctcgcctcgacgccgtcgtggcccgcctcgacacgcaggccaagatgcaggtcatcggcaagtccatgcagtccatcgtcaagtcgctcgactccgcgctcgccaccgggaacctncagaagatgtccgagaccatggacaatttcgagcgccagttcgtcaacat

SEQ ID NO: 90470 - DNA, 431 bp, Zea mays
caaacattatccaaaatgccaacccggagcagtacctgaattggtgatgggactgaggcattctagacgtgttggcttcaatatgtgaacctgaccatcctcagctaatgcagttggccgtgattgtgcgtggacaatatttctatcaatggtctgatcctgtttacatttattctgcagatgggggagaaaagagacaaggctctcaaggagctcatggaccaggtggccatgaagcagcccaacagcatgtgccatggaaacaaggataatttctgggagagccagggcttcaggttcattgcctctatgtcgatgctggcgctagtgatcctcgcaaagcgttgaagcggcatagtttaagcagatgtgaatgtagcgtttacattagcttgtaagctcgggcagttgtgcatactgcatgccaaaat

SEQ ID NO: 90471 - DNA, 289 bp, Zea mays
  unsure (1)..(289): unsure at all n locations
cattcagaaacacacctagcgaagcgcactagcaacgacctaacaacaatggctgccgagatattatccctgtttgcgcttcttgccctttttgtgagcgcaacanatgcgttcattattccacaatgctcacttgctcctagtgccattattccacagttccttccttccagttacttcaatgggcttcgaacaaccaacttttccagcctaacagctacaaccagccccttgcggcgagcgtcttacaacaaccaattgcccaattaccacaacaatccttggcaca

SEQ ID NO: 90472 - DNA, 256 bp, Zea mays
cggccaggtcgcggggctgttggcggcgcagatagcgcagcaactgacggcgatgtgcggcctgcggcagccgactgcatgcccctacgctgctgccggcggtgtcccccactgaagaaactatgtgctgtagtatagccgctggctagctagctagttgagtcatttagcggcgatgattgagtaataatgtgtcacgcatcaccatgggtggcagtgtcagtgtgagcaatgacctgaatgaacaatggaaatg

SEQ ID NO: 90473 - DNA, 447 bp, Zea mays
gcaacatagaaagcacaatagtgtaccaacaatggcagccaaaatattttgcttccttgtgctccttggtctttctgcaagtgctgctaccgcaaccattttcccacaatgctcacaagctcctatagcttcctttcttcccccatacctctcaccagcggtgtcttcagtatgtgaaaacccaattcttcaaccctacaggatccaacaggcaatcgcagcaggcatcttacctttatcacccttgttcctccaacaaccgtcagccctattacagcagttacctttggtgcatttgttggcacaaaacatcaaagcacaacaactacaacaacttgggctaggaaaccttgctgcctactctcagcaacagcagtttctttcattcaaccaactggctgcattgaactttgctgcttatttgcaacaacaactaccattcagtca

SEQ ID NO: 90474 - DNA, 283 bp, Zea mays
  unsure (1)..(283): unsure at all n locations
cccacgcgtccgcaacaagcaacatagaaagtggaatccagtagcaacaatagaacaacgatanggaccaagatacgggccctccttatgctccttgctctttctgcatgtgttgctaacgcgacaatattccctcaatgctcacaagctcctatagcttcccttcttcccccataccttccatcaatgatagcttcagtatgtgaaaacccagctcttcaaccctataggctccaacaagcaatcgcagcaaggaacatacctttatcacccttggttcaac

SEQ ID NO: 90475 - DNA, 465 bp, Zea mays
cggaattcccgggatgttgagcattcagaaacacacctagcgaagcgcactagcaacgacctaacaacaatggcttccaagacattatgcctccttgcgcttcttgccctttttgtgagtgcaacaaatgcgttcattattccacaatgctcacttgctccgagtgccattattccacagttcctccctccagttacttcaatgggcttcgaacacccagctgtgcaagcctataggctacaacaagcgcttgcggcgagcgtcttagaacaaccaattgcccaattacaacaacaatccttggcacatctaaccatacaaaccatcgcaacgcagcagcaacaagcactgagccacctagccgtggtgaaccctatcgcctacttgcaacaacagctgcttgcattcaacccacttgctttggcaaacgtagctgcataccaacaacaacaacagttgcaacag

SEQ ID NO: 90476 - DNA, 446 bp, Zea mays
atttagaccaactagcaacatagaaagcacaatagtgtaccaacaatggcagccaaagtattttgcctccttatgctccttggtatttctgcaagtgctgctacggcgaccattttcccgcaatgctcacaagctcctatagcttcccttcttcccccgtacctctcaccagcggtgtcttcggtatgtgaaaacccaattcttcaaccctacaggatccaacaggcaatcgcagctggcatcttacctttatcacccttgttcctccaacaatcatcagccctattacagcagttacctttggtgcatttattggcacaaaacatcagggcacaacaactacaacaacttgtgctagcaaaccttgctgcctactctcagcaacagcagtttcttccattcaaccaactagctgcattgaactctgcttcttatttgcaacaacc

SEQ ID NO: 90477 - DNA, 444 bp, Zea mays
cggacgcgtgggcttcgggaggcaagtgcgatttcgatctcgcagccaccttttttgtgttctgttgtgtatctagtagttggaggagatatgcagtttgcacttgcattggacacgaactcaggtcctcaccagataagatcttgtgagggtgatgggattgacaggttggaaaaattaagtattgggggcagaaagcaggagaaagctttgagaaataggtgctttggtggtagagttgctgcaactacacaatgtattcttacctcagatgcttgtcctgaaactcttcattctcaaacacagtcctctaggaaaaattatgctgatgcaaaccgtgtatctgctatcattttgggcggaggcactggatctcagctctttcctctgacaagcacaagagctacgcctgctgtacctgttggaggatgttacaggcttatt

SEQ ID NO: 90478 - DNA, 443 bp, Zea mays
  unsure (1)..(443): unsure at all n locations
cggacgcgtggggcaacatagaaagtggaatacagtagcaaaaatagagcaacagtggcggccaagatattgtccatccttatgctccttgctctttctgcatgtgttgctaacgcgaccatttttcctcaatactcacaagctcctatagctgcccttcttcccccataccttccatcaatgaccgctttagtatgtgaaaacccagcccttcaaccctacaggatccagcaagcaatcgcaacaagcaacttacctttatcacacctgttctttcaacaatcgccagccctatctttggtgcagtcattggtacaaaccatcagggcagaacagttgcagcaactcgtgctaccagtgatcagccaagtagctctggcaaacctttccccctactctcagcaacaacaatntcttccattcaaccaactgtctatactgaa

SEQ ID NO: 90479 - DNA, 435 bp, Zea mays
gagcattggtcgatactggccaacaaatctggctccacagagcggttgcgtcaggtgttgcaactatagaggagcctacagttcaagcaaatgcctcaagaagtgtggccagccatcacagactttgtaccatgttccccgttcgtttctccaaccaggcagcaatgatctagtccttttcgagcattttggtggtgacccaagcaagatatcctttgtgatgaggcagacaggaagtgtgtgcgcacaagtatcagaggcacatccagcccaaattgatagttggagttctcaacagccgatgcatagatatggacctgcacttcgcctggaatgcccaaaagaaggccaggtcatcagcagcatcaagtttgcaagctttgggacaccgagtggcacatgtggaagctacagccatggcgaatgcaacagcac

SEQ ID NO: 90480 - DNA, 118 bp, Zea mays
ggcgatgattgagtaataatgtgtcacgcatcaccatgggtggcagtgtcagtgtgagcaatgacctgaatgaacaattgaaatgaaaagaaaaaaagtactccatctgttccaaatt

SEQ ID NO: 90481 - DNA, 445 bp, Zea mays
gcagtttcttccattcaaccaactggctgcattgaactctgctgcttatttgcaacaacggctacgattcagtcagctagctgctgcctacccccagcaatttcttccattcaaccaactggcagcattgaactctgctgcttatttacaacagcaacagctaccaccattcagccagctagctgatgtgagccctgttgccttcttgacacaacaacagttgttgccgttctacctgcacgctgcgcctaacgctgggaccctcttacaactgcaacaattggctgcattcaaccaacttggtttgacaaacccaaccagggtctaaccacaacccatcattggtggtgccctcttttagattggttatgagttatacttcaataatgaattttttggaatgatgttggggctttccagaaataagaaagtacatttcttaaaa

SEQ ID NO: 90482 - DNA, 446 bp, Zea mays
ggaatccagtagcaacaacagagcaacaatggcgaccaagatattttccctccttatgcgccttgctctttctgcatgtgttgctaacgcgacaattttccctcaatgctcacaagctcctatagcttcccttcttcccccataccttccatcaatgatagcttcagtatgtgaaaacccagctcttcagccctataggctccaacaagcaatcgcagcaagcaacatacctttatcacccttgttgtttcaacaatcgccagccctatctttggtgcagtcattggtacaaaccatcaaggcacagcagctgcagcaactcgtgctacctgtgatcaaccaagtagctctggcaaacctttctccctactctcagcaacaacaatttcttccattcaaccaactgtctacactgaaccctgctgcttatttgcagcaacaactat

SEQ ID NO: 90483 - DNA, 353 bp, Zea mays
tgagcattcagaaacacaccaagcgaagcgcactagcaacgacctaacaacaatggctagcaagggattagccctccttgcgcttcttgccctttttgtgagcgcaacaaatgcgttcattattccacaatgctcacttgctcctagtgccattattccacagttcctcccaccagttacttcaatgggcttcgaacacctagctgtgcaagccaacatgcaacaacaagcgcttgcggcgagcgttttacaacaaccaattgcccaattgcacaacaatccttgccacatctaacaatacaagccatcacaacgcaacagcaacaacaggtcctaccagcacttgaccacct

SEQ ID NO: 90484 - DNA, 422 bp, Zea mays
caacaatttcttccattcaaccaactgtctacactgaaccctgctgcttatttgcagcagcaacgattaccatttagccagctagctactgcctactctcagcaacaacaacttcttccatttaaccaattggccgcactgaaccccgctgcttatttgcagcagcaaatactactgccatttagcgagctagctgcagcaagtcgtgcttccttcttgacacagcaacagttgctgcctttctacaagcagtttggggctaaccccgcaacccttttacaactacaacaattggtgccctttgtccaacttgctttgacaaacccagcagccttctaccaacaacacatcattggtggtgccctcttttagattgattattagttgtaattcaataataaagttttttggatgatgtatgt

SEQ ID NO: 90485 - DNA, 435 bp, Zea mays
  unsure (1)..(435): unsure at all n locations
tatagaccacagccagtcagccacatcactagctatctgtgcagaggcaatggcgtcgaaggttgagctggtggtggaggtcaagtccccggctgacaagctgtgggcggcgctgcgtgactcgacggagctgttccccaagatcttccccgagcagtacaagagcatcgagaccgtcgagggcgacggcaagtcggccggcaccgtccgcctcctcaagtacaccgaggcggtgccgatgctgacgttcgccaaggagaagcttgagacggcggacgacgagaacaaggtggtgtcgtacagcgtggtggacggcgagctggcggacttctacaagaacttcaagatcacgctgaaggttgactccgccaangcgganggcgagggcggcgccgtcgtcagctgggccatggagttcgacaaggccaacgacca

SEQ ID NO: 90486 - DNA, 394 bp, Zea mays
  unsure (1)..(394): unsure at all n locations
aaacaagtagcgacagctcgacaaagatttgtgagagtgatccggcgctgagaagagggggctaagatcgccgcagccgccgcggcggcggcggcgctgtgcttcgcggccctggtggccgtggccgtctgccaaggcgaggtcgagcggcagaggctcagggacctgcagtgctggcaggaggtccaggagagcccgctcgacgcgtgccgccaggtcctcgaccggcagctaaccggcggcggcgtcggcggcccgttccggtggggcaccgggctccggatgcggtgctgccagcagcttcaggacgtgagccgcgagtgccgctgcgccgncatccggagcatggtcaggggctacgaggaggccatgccgnctctggagaaaggctggt

SEQ ID NO: 90487 - DNA, 370 bp, Zea mays
gcggcggctgcggctgccagccaccgtcgccggttcatctaccgccgccggtgcatgggcgacctccggttcacgggcgacctccggtgcatctcccaccgccggtccacctgccgccgccggtccacctgccaccgccggtccatgtgccgccgccggttcatctgccgccgccaccatgccactaccctactcaaccgccccggcctgagtcttatccagagccacacatatgcccgtgccaacagccgtatccaagcccgtgccatctgcaggaaacctgcggcgttggcagcaccccgatcctgcgccagtgcgtcgagtttctgaggcatcagtgcaccccgacggcgacgccctactgctcgcc

SEQ ID NO: 90488 - DNA, 514 bp, Zea mays
agtgtgtcgtacataaaatagacctcaggctctcccggtccggaattcccgggtggacccacgcgtccggcagttgcttgcatccaacccacttgctctggcaaacatagttgcataccaacaacagcgaacaattgcaacagtggctaccagcgctcagtcaactagccatggtgaaccctgccgcctacctacaacagcaacaactgatttcatctagccctctcgctgtggttaatgcacctacatacctgcaacaacagttgctgcaacagattgtaccagctctgactcagctagctgtggcaaaccctgctgcctacttgcaacagctgcttccattcaaccaactgactgtgtcgaactctgctgcgtacctacaacagcgacaacagttacttaatccactagcggtggctaacccattggtcgctgccttcctacagcagcaacaattgctgccatacaaccagttctctttgatgaaccctgccttgttgtggcagcaacccat

SEQ ID NO: 90489 - DNA, 513 bp, Zea mays
aagctctgtccatcgcaccgacttagtacgccgtaccggtccggaattcccgggtggacccacgcgtccggcaacatagaaagcacaatagtgtaccaacaatggcagccaaaatattttgcctgctgatgctccttggtctttgtgcaagtgctgctacggcgaccattttcccacaatgctcacaagctcctatagcttcccttcttcccccgtacctctcaccagcggtgtcttcggtatgtgaaaacccaattcttcaaccctataggatccaacaggcaatcgcagctggcatcttacctttaataaccctggttcttcaacaattatcaaccctattacaagagtttcctttggggccattaatggccccaaacattagggccaaacaacttccacaacttgggcttacaaaccttggtggcaaactttaagaacaaacggttttttcatttaaccaatttattggattaaaactgggttttaattggaaaaaacaacctctcctag

SEQ ID NO: 90490 - DNA, 441 bp, Zea mays
aacaattccagggtcatgacaagcagcaacaaccacaacagcctcagcaatatcagcggggccaggaaaaatcacaacagcaacaatgtcattgccaggagcagcaacagactacaaggtgcagctataactactatagcagtagctcaaatctaaaaaattgtcatgaattcctaaggcagcagtgcagccctttggtaatgccttttctccaatcacgtttgatacaaccaagtagctgccaggtattgcagcaacaatgttgtcatgatcttaggcagattgagccacaatacattcaccaagcaatctacaacatggttcaatccataatccaggaggagcaacaacaacaaccatgtgagttatgtggatctcaacaagctactcaaagtgcggtggcaatcttgacagcagcacaatacctaccatcaatgtgcg

SEQ ID NO: 90491 - DNA, 389 bp, Zea mays
gggaggaaaagtgccatagcataatccaaaacttgacagtacagaacagcatccaggacaaaacagaacccaaaatcgactccggcagttcttagctataatatagataccgcatttagacaagcacccgacgagtagagctctccactcaaaccatcctaagcctttactgtctcagttggggcctcgagcacaaggcccttggtgggctttgccagcaggtcggtgtactgctggaacggggccatggagaacttggtctggctccagaattcaggagtgaggaagccgtaggtcttcatcaggcagtcgaaggttgccttgacgaagttgccaagggtcttagtggagccacgggacgaggtgaagacatcctcaatgccagcgaa

SEQ ID NO: 90492 - DNA, 475 bp, Zea mays
taccggtccggattcccggtcgaccaacgcgtccgcactagcaacatagaaagcacaatagtgtaccaacaatggcagccaaaatattgggcttccttatgctccttggtctttctgcaagtgctgctaccgcaaccattttcccacaatgctcacaagctcctatagcttcctttcttcccccatacctctcaccagcggtgtcttcagtatgtgaaaacccaattcttcaaccctacaggatccaacaggcaatcgcagcaggcatcttacctttatcacccttgttcctccaacaaccgtcagccctattacagcagttacctttggtgcatttgttggcacaaaacatcaaggcacaacaactacaacaacttgtgctaggaaaccttgctgcctactctcagcaacagcagtttcttccattcaaccaactggctgcattgaactctgctgcttatttgcaacaacaact

SEQ ID NO: 90493 - DNA, 232 bp, Zea mays
caactacaacaactcgtgctagcaaaccttgctgcctactctcagcaacagcagttaccgttagggcatttgttggcacagaacatcatggcacaacaactacaacaactcgtgctagcaaaccttgctgcctactctcagcaacaacagtttctgccattcaaccaactagctgcattgaactctgctgcttatttgcagcaacaacaactactaccattcagccagctag

SEQ ID NO: 90494 - DNA, 409 bp, Zea mays
gaattcccaggcaggcaggtcggcgaggagggcaggaagaccgaagaccgagccgtgcgggggcgcgggacgggaacgggacaggaccccaaaatctcagatccttcctgcccgcccgcccgtgcccgtcgacgcgtcgttcttgccggccgcgcctcacctccgccctctcctcctccagggggatcggatacgccacaggctgcgcgatggtgctgtgggtcttcggctacggctccctcatctggaaccccggcttcgacttcgacgacaaaatcctcggcttcatcaagggctacaagcgcacctttaatctcgcttgcattgaccacagaggcacaccggagcattcggcgaggacctgcacgcttgaaaccgacgacgaggccatatgctggggaattgcata

SEQ ID NO: 90495 - DNA, 453 bp, Zea mays
attgagaccaacaagcaacatagaaagtggaatacagtagcaaaaatagagcaacaatggcggccgagatattttccatccttatgctccttgctctttctgcatgtgttgctaacgcgaccatttttcctcaatactcacaagctcctatagctgcccttcttcccccataccttccatcaatgaccgctttagtatgtgaaaacccagcccttcaaccctacaggatccagcaagcaatcgcaacaagcaacttacctttatcacacctgttctttcaacaatcgccagccctatctttggtgcagtcattggtacaaaccatcaaggcagaacaggtgcagcaactcgtgctaccagtgatcagcccagtagctctggcaaacctttccccctactcttaacaacaacaaatttcttgcatttcaccaactgtctatactgaaccctgct

SEQ ID NO: 90496 - DNA, 464 bp, Zea mays
cggtccggaattcccgggcgcaagtcctaagagaagtgcgcgggaggggtttgctgaacgcagtggatctaaacaacgacgcgctatctccgtgcttctgcatatgacatgtgcatcaagttgaaggagagaggcattttagcgaaacccacacatgacactataatccgacttgctcctcccctcacaatcagtcctgaggagcttgcagaagcatccaaggcgcttagtgacgtgctggaacatgacttgccacagctgcagctgcagaagcagataaaaaagccagaatctgaggcagagaagccagtctgtgacagatgcggccgggacttgtacggatgaatgaagcctccgaacagagataacttcattttcgtacgcacccatctcgccccagaagaaataataacagagcagaggatgccagctgcctagctacttgggttacggtaatgttatgc

SEQ ID NO: 90497 - DNA, 442 bp, Zea mays
attgagaccaactagcaacatagaaagcacaatagtgtaccaacaatggcagccaaaggattttgcttccttatgctccttggtctttctgcaagtgttgctaccgcaaccattttcccacaatgctcacaagctcctatagcttcccttcttcccccatacctctcaccagcggtgtcttcaatgtgtgaaaccccaattgttcaaccctacaggatccaacaggcaatcgcaacaggcatcttaccattatcacccttgttcctccaacaaccgtcagccctattacagcagttacctttggtccatttggtggcacaaaacatcagggcacaacaactacaacaacttgtgctagcaaaccttgctgcatactctcagcaacatcagtttcttccattcaaccaactggctgcattgaactctgctgcttatttgcaac

SEQ ID NO: 90498 - DNA, 519 bp, Zea mays
  unsure (1)..(519): unsure at all n locations
nggagtgtgtcttatataaagaaagatatcaggctctcncggtccggaattcccgggtcgacgcacgcgtccggctctcgcccccataaataaagcagctcctccgggggcggcgaactactcctcgtcggcagaaccctagccctgcttcgttgccatggcgagcagcgctagccaggcgagcctcctgctccagaagcagctcaaggatcttgcgaagaaccccgtggatgggttctccgccgggcttgtagacgacagcaacatcttcgagtggcaggtcaccatcatcggaccgcctgacaccctatatgatggaggctacttcaatgcaataatgaccttcccccagaactatcccaacagcccgccatcagtaagatttacttctgagatgtggcatccgaatgtttatcctgatggacgtgtttgcatttctattcttcatccacctggtgaagatcccaatggttatgagcttgcaagcgaacgatggacaccagtgcacacggttgaaag

SEQ ID NO: 90499 - DNA, 368 bp, Zea mays
cggtccggaattcccgggcttccgtttaaccaattggccgcactgaaccccgctgcttatttgcagcagcaaatactactaccatttagccggctagctgcagcaaaccgtgcttccttcttgacacagcaacagttgctgcctttctaccagcagtttgcggctaaccccgcaaccctcttacaactacaacaattgttgccctttgtccaacttgctttgaagaccgagcggcctcctaccaacaacacatcattggtggtgccctcttttagattgcttattagttgtaattcaataataaagttttttggatgatgtatgtggccaaccagaaataagaagttacatttccagattttaatgtg

SEQ ID NO: 90500 - DNA, 515 bp, Zea mays
aggctctgtcttatgaagaaatgatgcacgctctaccggtccggaattcccgggtggacccacgcgtccgtctgctgcttatttgcaacaacaattaccattcagccagctagttgctgcctacgccgagcaatttcttccatgcggccaactagcagcattgaactctgctgcttatttacagcagcaacaactactaccattcagccagctagctgatgtgagccctgctgccttcttgacacaacaacagttgttgccgttctacctgcacgctatgcctaacgctggcaccctcttacaactgcaacaattgctgccattcaaccaacttgctttgacaaacccaacagtgttctaccaacaacccatcattggtggtgccctcttttagattgcttatgagttatagctcaataatgaagttttttggatgatgtttgtggcgtcccagaaataagaaagtacatttctaaaaaaacaaaaaaaaaaagggcggccgctctagaggatcc

SEQ ID NO: 90501 - DNA, 376 bp, Zea mays
agaaagcacaatagtgtaccaacaatggcagccaaaatattttgcctccttatgctcgttggtatttctgcaagggctgctacggcgaccattttcccgcattgctcacaagctcctatagcttcccttcttcccccgtacctctcaccagcggtgtcttcggtatgtgaaacccaattttttaacccctacggtgcccaacgggtattcgcaggtgtcttatcactattacccccgttgctcctacaatcatcatccccattatagcagttacccctggtgcacatattgtcgcaaaaaatcatggcgcaacaactactacaacttgtgctagcaaaccatgctgcctactcttatcaacaaccagtttttttca

SEQ ID NO: 90502 - DNA, 449 bp, Zea mays
gcaattagctcatcgactccagattggagaactcgacaccatgaaggtgctgatcgttggccttgctctcctggcgctcgctgcgagcgccgcctccagtacaagcggcggctgtggctgccagacaccaccgtttcatctaccgcctccgttctatatgccgcctccgttctatctgccgccgcagcagcagccgcagccatggcaataccccactcaaccaccgcagctaagcccgtgccagcagttcggatcctgcggcgtcggcagcgtcggcagcccgttcctgggccagtgcgtcgagttcctgaggcaccagtgcagcccggcggcgacgccctacggctcgccacagtgccaggcgctgcagcagcagtgctgccaccagatcaggcaggtggagccgctgcaccggtaccaggcgacatacggggtggtcctgcaatcct

SEQ ID NO: 90503 - DNA, 456 bp, Zea mays
gcaacatagaaagtggaatccagtagcaacaatagagcaacaatggcgaccaagatacggtcccggcttatgctccttgctctttctgcatgtgttgctaacgcgacaattttccctcaatactcacaagctcctatagcttcccttcttcccccataccttccatcaatgatagcttcagtatgtgaaaacccagctcttcaaccctataggctccaacaagcaatcgcagcaagcaacatacctttatcacccttggttcaacaatcgccagccctatctttggtgcagtcattggtacaaaccatcaaggcacagcagctgcagcaactcgtgctacctgtgatcaaccaagtagctctggcaaacctttcttcctactatcagcaacaaccaattctttcatgcaaccaactatctacactgaacccctgctgcttatttgcagcaacaact

SEQ ID NO: 90504 - DNA, 332 bp, Zea mays
ctcagagtgggttggcttctcctcccccaccggttcgtgttcaggttctggttcgtgggcgagagggaagagatggcggcgtcagacgttgagtaccgttgcttcgttggcggcctctcctgggccaccgacgaccactccctcaacaacgccttcagcacctacggcgaggtcctcgagtcgaagatcatcctggatcgggagacgcagaggtcccgcggcttcggcttcgtcaccttctacacggaggacgcgatgcgcaacgccattcgaggcatgaacggcaaggaactcgacggccgcaacatcaccgttaacgaggcccactcccg

SEQ ID NO: 90505 - DNA, 413 bp, Zea mays
ggaattcccgggattttgagcattcagaaacacacctagcgaagcgcactagcaacgacctaacaacaatggctaccaagatattaggcctcgttgcgcttcttgccctttttgtgagcgcaacaaatgcgttcattattccacaatgctcacttgctcctagtgccattattccacagttcctccctccagttacttcaatgggcttcgaacacccagctgtgcaagcctacaggctacaacaagcgcttgcggcgagcgtcttacaacaaccaattgcccaattacaacaacaatccttggcacatctaaccatacaaaccatcgcaacgcaacagcaacaacaatttctaccagcactgagccaactagctgtggtgaaccctgtcgcctacttgcaacagcagttgctt

SEQ ID NO: 90506 - DNA, 445 bp, Zea mays
  unsure (1)..(445): unsure at all n locations
ccgcaacctcctcaccttgctcctccccagcatggtacctggcctcgaggtcgcctagaggggcgactggatccgggtggagcctgtgcccggcgccttcgtcgtcaacttcggatgccagcttgaggttgtgacgaacgggatcttgaagagcatcgagcaccgggtgatgaccaacctgggagtggcgcggacaacggtggccacgttcatcatgcccaccacggactgcctcatcggccccgccgccgagttcctcagcgacgacaacccgccgtgctaccgcaccctcaccttcggcgacttcaagcgcatctacagcgttgtcaagctgggctcgtcgctcaacctcaccacaaatctcaagaccgttcagaaggagctctgattatccatcaaactttgtagcctncctcgaattggcggcgaggaactagctagctag

SEQ ID NO: 90507 - DNA, 441 bp, Zea mays
  unsure (1)..(441): unsure at all n locations
cccacgcgtccggcgaagcgcactagcaacgacctaacaccaatggctaccaagaaatgagggcttcttgggcctcttggccttttaatgaacgccacaaatgccgtcattatttcacaatgcttaattggttctaatggcattatttcacagattcttccaccacatactctaatgggcttgaaacattcgnaccgcgcaagctatacaggttacatctagcgcttgcggagagcgctttacaacaaccaatggcccaattgcaacaacaatccttggcacatctaaccatacaaaccattgcaacgcaacaacaacaacaacaacagtttctgccatcactgagccacctagccgtggtgaaccctgtcacctacttgcaacagcagctgcttgcatccaacccacttgctctggcgaacgtagctgcataccagcaac

SEQ ID NO: 90508 - DNA, 480 bp, Zea mays
cggttcggaattcccgggctcaccagcggtgtcttcaatgtgtgaaaccccaattgttcaaccctacaggatccaacaggcaatcgcaacaggcatcttaccattatcacccttgttcctccaacaaccgtcagccctattacagcagttacctttggtccatttggtggcacaaaacatcagggcacaacaactacaacaacttgtgctagcaaaccttgctgcatactctcagcaacatcagtttcttccattcaaccaactggctgcattgaactctgctgcttatttgcaacaacaattaccattcagccagctagttgctgcctacccccagcaatttcttccattcaaccaactagcagcattgaactctgctgcttatttacagcagcaacaactactaccattcagccagctagctgatgtgagccctgctgccttcttgacacaacaacagttgttgccgttctacctgca

SEQ ID NO: 90509 - DNA, 435 bp, Zea mays
cacatcagtagtcgaccaagcacaagcagcagagccggccggaatatgtggacgatgaggaaggtggcgacgccgcaggtggccgtcctcctgctgctcctcatcgtcgttgcgcaggaggcggctccgttggcggaggcgcgcgtgtgccggcgccggagcgcgggcttcaagggggtctgcatgtccgaccacaactgcacgcacgtgtgcttgcatgaggtctacagcggcggcaactgcgacggcatcatgcgccagtgcaagtgcatcatggagtgctagctagctaggctctaggatctagcaagctagctatatcggcctttaattaaattaataaggatcgacgtcgtggccggtcgctaaatatgtactactatacgtttacactacatgcaataatgcaccacatgtacgcgtacgcgcgccgag

SEQ ID NO: 90510 - DNA, 443 bp, Zea mays
agaaagcacaatagtgtaccaacaatggcagccaaaatattttgcttccttatgctcgttggtctttctgcaagtgttgctaccgcaaccattttcccacaatgctcacaagctcctatagcttcccttcttcccccatacctctcaccagcggtgtcttcaatgtgtgaaaccccaattgttcaaccctacaggatccaacaggcaatcgcaacaggcatcttaccattatcacccttgttcctccaacaaccgtcagccctattacagcagttacctttggtccatttggtggcacaaaacatcagggcacaacaactacaacaacttgtgctagcaaaccttgctgcatactctcagcaacatcagtttcttccattcaaccaactggctgcattgaactctgctgcttatttgcaacaacaattaccattcagccagct

SEQ ID NO: 90511 - DNA, 430 bp, Zea mays
  unsure (1)..(430): unsure at all n locations
gataatgtgaaggccaaaatccaggacaaggagggtatccccccggaccagcagcgggtgatcttcgccggcaagcagctggaggatggtcgcaccttggctgactacaacatccagaaggagagcaccctccatctggtgctccgcctgaggggtggtatgcagatctttgtgaagaccttgactggcaagaccataaccctggaggttgagagctctgacaccatcgacaacgtgaaggctaagatccaggacaaggaggggattcccccagaccagcagcgtctgatcttcgccggcaagcagctggaggatggtcgcacccttgcagactacaatatccagaaggagagcaccctncacctggtgctccgtcttcgcggtggttattaagccatcagtcgttgaaacttgtgctgtatctgggtat

SEQ ID NO: 90512 - DNA, 451 bp, Zea mays
gaaagtggaatccagtagcaacaatagagcaacaatggcgaccaagatactttccctccgtatgcgccttgctctttctgcatgtgttgctaacgcgacaattttccctcaatgctcacaagctcctatagcttcccttcttcccccataccttccatcaatgatagcttcagtatgtgaaaacccagctcttcaaccctataggctccaacaagcaatcgcagcaagcaacatacctttatcacccttgtttcaacaatcgccagccctatctttggtgcagtcattggtacaaaccatcaaagcacagcagctgcagcaactcgtgctacctgtgatcaaccaagtagctctggcaaacctttctccctactatcagcaacaacaatttcttccattcaaccaactatctacactgaaccctgctgcttatttgcagcaacaactatta

SEQ ID NO: 90513 - DNA, 446 bp, Zea mays
gtaacacaaggctgaatttttgttcggtctagccgacccgacgatggcgtccagcgacgggaaagcactgccaaccgcggcctctgtgggcggcggcggcggcagcagcaccgcgccgcccgggcagccgaccacggtagcgtccaaggtgctggacatgggcgcggcggcgatgcagtcgttgcgccccgtgaagcaggcgaagcagcacatgtgcacgttcgcgctgtacgcgcacgacccgaagcggcaggtggagaccgcaccactacgtctccgcctcaaccaggacttcctccagtgcgccgtctatgactccgacaaagccgacgcgcgtctcatcggcgtggagtacatcgtgtcgagggagatctttgactcgctgccggcggaggagcagcggctgtggcactcgcacgcgcacgagatcaagtcaagcctgtgga

SEQ ID NO: 90514 - DNA, 339 bp, Zea mays
attttcagcattcaaaaacacaccaagcgaagcgcactagcaacgacctaacaccaatggctaccgagatattagccctccttgcgcttcttgcccttttagtgagcgcaacaaatgcgttcattattccacagtgctcacttgctcctagtgccattattccacagttcctaccaccagttacttcaatgggcttcgaacatccagccgtgcaagcctacaggctacaactagcgcttgcggcgagcgccttacaacaaccaattgcccaattgcaacaacaatccttggcacatctaaccctacaaaccattgcaacgcaacaacaacaacaacaac

SEQ ID NO: 90515 - DNA, 380 bp, Zea mays
agcaaagcggcagtgcgtagagaggatcgtcgaacagaacagcatgaagatggtcatcggtctcgtcgtgtgcctggctctgtcagctgccagcgcctctgcaatgcagatgccctgcccctgcgcggggctgcagggcttgtacggcgctggcgccggcctgacgacgatgatgggcgccggcgggctgtacccctacgcggagtacctgaggcagccgcagtgcagcccgctggcggcggcgccctactacgccgggtgtgggcagccgagcgccatgttccagccgctccggcaacagtgctgccagcagcagatgaggatgatggacgtgcaagccgtcgcgcagcagctgcagatgatgatgcagcttgagcgtg

SEQ ID NO: 90516 - DNA, 363 bp, Zea mays
cccactcgttcgcaactagcagcattgaactctcctgcttatttacagcagcatcaactgctaccattcatccagctagctggtgtgagccctgctaccttcttgacacaaccacagttgttgccgttctaccagcacgttgcgcctaacgctggcacccttttacaactgcaacaattgctgccattcaaccaacttgctttgacaaacccatcagtgttctaccaacaacccatcattggtggtgccctcttttagatctcttatgagttatagttcaataatatagctttgtatctgatgttggtggcttccaagaaataagaaagtacatttctaatagagctacctgtgatcaagggc

SEQ ID NO: 90517 - DNA, 396 bp, Zea mays
cacgggacaggcatggcgagccgcgagcggcagcacacccgcagctacgactacgactgcgagcacctcgtgctcgacccggcgtctctgggcgtgccgtgggccgacccggccgccgtggagatcccgccgcagctcctcgccgcgctcggggagtacctctccggctccgcggcccgcggggacgtcgaggcggaggcggacgacgagttcatgatgcacgagttcaaggtgcggcggtgcgcgcgcgcgcggagccacgactggacggcgtgcccctacgcgcacccgggcgaggccgcgcggcgccgggacccgcgccgcgtcgcctacgcgggggagccgtgcccggacttccggctgccgccgggcgccgtcaccggcgcgtgcccgcgc

SEQ ID NO: 90518 - DNA, 409 bp, Zea mays
ccaggcgtgacgccacgcgttcgcaactagcaacatagaaagcacaatagtgtaccaacaatggcagccaaaatattttgcctccttatgctccttggtatttctgcaagtgctgctacggcgaccattttcccgcaatgctcacaagctcctatagcttcccttcttcccccgtacctctcaccagcggtgtcttcggtatgtgaaaacccaattcttcaaccctacaggatccaacaggcaatcgcagctggcatcttacctttatcacccttgttcctccaacaatcatcagccctattacagcagttacctttggtgcatttattggcacaaaacatcagggcacaacaactacaacaacttgtgctagcaaaccttgctgcctactctcagcaacagcagtttc

SEQ ID NO: 90519 - DNA, 418 bp, Zea mays
attttgagcattcagaaacacacctagcgaagcgcactagcaacgacctaacaacaatggcttccaagacattatccctccttgcgcttcttgccctttttgtgagtgcaacaaatgcgttcattattccacaatgctcacttgctccgagtgccattattccacagttcctcccttcagttacttcaatgggcttcgaacacccagctgtgcaagcctataggctacaacaagcgcttgcggcgagcgtcttagaacaaccaattgcccaattacaacaacaatccttggcacatctaaccatacaaaccatcgcaacgcagcagcaacaagcactgagccacctagccgtggtgaaccctatcgcctacttgcaacaacagctgcttgcattcaacccacttgctttggcaaacgt

SEQ ID NO: 90520 - DNA, 272 bp, Zea mays
ctagcatcatttttctatcctgtttaaatacagcagcttcaacggctaccttggaaccttctaactcttgtgagccctactaccttcttgacacaaccacagctgttgccattctaccatcacgttccgcctaacgctgtcaccctattacaactgcaacaattgctgacattcaaccaacttgctttgacaaacccatcactgttctaccaacaacccatcattagtagtaccctcttttagatttcttatgagttataattcaataataa

SEQ ID NO: 90521 - DNA, 408 bp, Zea mays
  unsure (1)..(408): unsure at all n locations
accggtccggaattccaggcgcgacgccacgacctgcagtgcgtcgagaggatcggcgcacagaacagcatgaagatggtcatcggtctcgtcgtgtgcctggctctgtcagctgccagcgcctctgcaatgcagatgccctgcccctgcgcggggctgcagggcttgtacggcgctggcgccggcctgacgacgatgatgggcgccggcgggctgtacccctacgcggagtacctgaggcagccgcagtgcagcccgctggcggcggcgccctactacgccgggtgtgggcagccgagcgccatgttccagccgctccggcaacagtgctgccagcagcagatgaggatgatggacgtgcagtccgtcgcgcagcagctgcagatgatgatgcaactngagcgtgcc

SEQ ID NO: 90522 - DNA, 330 bp, Zea mays
aattcccgggtcgacccacgcgttcggcaacatagaaagcacaatagtgtaccaacaatggcagccaaaatattttgcttccttatgctccttggtctttctgcaagtgttgctaccgcaaccattttcccacaatgctcacaagctcctatagcttcccttcttcccccatacctctcaccagcggtgtcttcaatgtgtgaaaccccaattgttcaaccctacaggatccaacaggcaatcgcaacaggcatcttaccattatcacccttgttcctccaacaaccgtcagccctattacagcagttacctttggtccatttggtggca

SEQ ID NO: 90523 - DNA, 429 bp, Zea mays
ggcaaacctttctccctactctcagcatcaacaatttcttccattcaaccaactgtggacactgaaccctgctgcttatttgcagcaacaactattaccatttagccagctagctactgcctactctcagcaacaacaacttcttccatttaaccaattggccgcactgaaccccgctgcttatttgcagcagcaaatactactgccatttagcgagctagctgcagcaagtcgtgcttccttcttgacacagcaacagttgctgcctttctacaagcagtttgcggctaaccccgcaaccctcttacaactacaacaattgttgccctttgtccaacttgctttgacaaacccagcagccttctaccaacaacacatcattggtggtgccctcttttaaattgattattagttgtaattcaataataa

SEQ ID NO: 90524 - DNA, 416 bp, Zea mays
gtccggaattcccgggcttatttgcaacaacaacaactaccattcagccagctacctgctggctacccccagcaatttctttcattcaacgaactggcagcattgaaactctctgcttatttacagcagcaacaactactaccattcagccagctagctggtgtgagccctgctaccttcttgatacaaccacagttgttgccgttctaccagcacgctgcgcctaacgctggcaccctcttacaactgcaacaattgctgccattcaaccaacttgctttgacaaacccagcagcgttctaccaacaacccatcattggtggtgccctcttttagatttcttatgagttatagttcaataataaagttttttgtctgatgtttgtggcttcccagaaataagaaagtacatttct

SEQ ID NO: 90525 - DNA, 449 bp, Zea mays
aattcccgggtcgacccactcgtccggaccaactagcaacatagaaagcacaatagtgtaccaacaatggcagccaaaatattgtgcttccttatgctccttggtctttctgcaagtgctgctaccgcaaccattttcccacaatgctcacaagctcctatagcttcctttcttcccccatacctctcaccagcggtgtcttcagtatgtgaaaacccaattcttcaaccctacaggatccaacaggcaatcgcagcaggcatcttacctttatcacccttgttcctccaacaaccgtcagccctattacagcagttacctttggtgcatttgttggcacaaaacatcaaggcacaacaactacaacaacttgtgctaggaaaccttgctgcctactctcagcaacagcagtttcttccattcaaccaactggctgcattgaactctgc

SEQ ID NO: 90526 - DNA, 235 bp, Zea mays
  unsure (1)..(235): unsure at all n locations
tagaaagtggaatccaatagcaacaatagaacaacaatggcgaccaaagatctttcccggcttatgctccttgctctntctgcatgtgttgctaacgcgacaattttccctcaatgctcacaagctcctatagcttcccttcttcccccataccttccatcaatgatagcttcagtatgtgaaaacccagctcttcaaccctatangctccaacangcaatcgcagcaagcaaca

SEQ ID NO: 90527 - DNA, 444 bp, Zea mays
gaattcccggcgggagccacgcgtccgccgacgcgtccgctcggcctctaccgccccctcgatcggtcggccggtcagctatgaggccgggaagctcggccgccggatccggcgtcgtcgttcctcggaacttcaggctcctagaagagcttgaacgtggagagaagggcattggagatgggacagtgagctatggaatggatgacgcagatgacatctacatgcgatcatggactggcactattattggccctcataataccgtccatgagggtcgcatctaccagctgaagttgttctgcgacaaggactaccctgagaagccaccatcagttcgatttcattcaagaataaacttaacatgcgttaatcatgaaactggagtggttgacccgaagaagttcagcgttctgggtaactggcaacgtgattactcaatggaat

SEQ ID NO: 90528 - DNA, 443 bp, Zea mays
cacatctaaccatacaaaccatcgcaacgcaacagcaacaacaatttctaccagcactgagccaactagctgtggtgaaccctgtcgcctacttgcaacagcagttgcttgcatccaacccacttgctctggcaaacatagttgcataccaacaacaacaacaattgcaacagtttctaccagcgctcagtcaactagccatggtgaaccctgccgcctacctacaacagcaacaactgatttcatctagccctctcgctgtggttaatgcacctacatacctgcaacaacagttgctgcaacagattgtaccagctctgactcagctagctgtggcaaaccctgctgcctacttgcaacagctgcttccattcaaccaactgactgtgtcgaactctgctgcgtacctacaacagcgacaacaggtacttaatccactagcg

SEQ ID NO: 90529 - DNA, 367 bp, Zea mays
cgactccagattggagaactcgacaccatgaaggtgctgatcgttgcccttgctctcctggcgctcgctgcgagcgccgcctccagtacaagcggcggctgtggctgccagacaccaccgtttcatctaccgcctccgttctatatgccgcctccgttctatctgccgccgcagcagcagccgcagccatggcaataccccactcaaccaccgcagctaagcccgtgccagcagttcggatcctgcggcgtcggcagcgtcggcagcccgttcctgggccagtgcgtcgagttcctgaggcaccagtgcagcccggcggcgacgccctacggctcgccacagtgccaggcgctgcagcagcagtgct

SEQ ID NO: 90530 - DNA, 437 bp, Zea mays
  unsure (1)..(437): unsure at all n locations
cgcgcctctacatttcttctctctctgctcctccgccttcgccttcgcctgatccatccaagacagggatcgccatgtcggactcggaggagcaccacttcgaatcgaaggccgacgctggggcgtccaagacctacccgcagcaggctggcaccgtccgtaagaacggcttcatcgtcatcaagaaccgtccctgcaaggttgtggaggtttctacctccaagactggtaagcatggccacgccaaatgccactttgtcgccatagacatattcaatgggaaaaagcttgaagatattgttccttcatcacacaactgtgacattccgcatgtgaaccgtactgagtatcagctgattgatatttctgaggatggatttgtgagccttcttacttcagatggcaacactaaggatgatnctagactcccaactgat

SEQ ID NO: 90531 - DNA, 397 bp, Zea mays
aagcaacatagaaagtggaatccagtatcaacaatagagcaacaatggcgaccaagatgctttccctccttatgctccttgctctttctgcatgtgttgctaacgcgacaattttccctcaatgctcacaagctcctatagcttcccttcttcccccataccttccatcaatgatagcttcagtatgtgaaaacccagctcttcaaccctataggctccaacaagcaatcgcagcaagcaacatacctttatcacccttgtttcaacaatcgccagccctatctttggtgcagtcattggtacaaaccatcaaggcacagcagctgcagcaactcgtgctacctgtgatcaaccaagtagctctggcaaacctttctccctactatcagcaacaaca

SEQ ID NO: 90532 - DNA, 394 bp, Zea mays
catgccactaccctactcaaccgccccggcctcagcctcatccccagccacacccatgcccgtgccaacagccgcatccaagcccgtgccagctgcagggaacctgcggcgttggcagcaccccgatcctgggccagtgcgtcgagttcctgaggcatcagtgcagcccgacggcgacgccctactgctcgcctcagtgccagtcgttgcggcagcagtgttgccagcagctcaggcaggtggagccgcagcaccggtaccaggcgatcttcggcttggtcctccagtccatcctgcagcagcagccgcaaagcggccaggtcgcggggctgttggcggcgcagatagcgcagcaactgacggcgatgtgcggcctgcagcagccgactccatg

SEQ ID NO: 90533 - DNA, 257 bp, Zea mays
gtcgacccacgcgttcgagaagtagaatccattgcaacaatagagcaacaatggcgaccaagatattttcccggcttatgctggctggtctttctacatggggtggtaacgcgacaattttccctcaatgctcacaagctcctatagcttcccttctttccccataccttccatcaattatagcttcagtatgtgaaaacccagctcttcaaccatataagcttcaacaagcaatcgcagcaagcaacataccttta

SEQ ID NO: 90534 - DNA, 366 bp, Zea mays
gttgcaacagtttctaccagcgctcagtcaactagccatggtgaaccctatcgcctagctacaacagcaacaacttctttcatctagcccgctcgctatgggcaatgcacctacatacctgcaacaacagttgttgcaacaacagttgctgcaacaaattgtaccagctcttactcagctagctgtggcaaaccctgctgcctacttgcaacaactacttccattcaaccaactgactgtgtcgaactctgctgcgtacctacaacagcgacaacagttacttaatccactagcggtggctaacccattggtcgctgccttcctacagcagccacaatggctgccatacaaccagttctctttgat

SEQ ID NO: 90535 - DNA, 416 bp, Zea mays
  unsure (1)..(416): unsure at all n locations
tccacgcctccggtcgttcctgtcgcgcaaccaccgacttcaatttcacattttccccggcggtggcgcggtcaggtgaaccatggcggactccaaagccacctcggcggtcaccctccgcacccgcaagttcatgaccaaccgcctnctggcccgcaagcaattcgtgcttgaggtgatccaccccggccgcgccaacgtctccaaggcggagttgaaggagaggcttgccaaggcgtacgaggtgaaggaccccaacaccatctttgtcttcaagttccgcacccacttcggaggaggaaagtccactggtttcggcctcatctacgacaacctcgaggctgccaagaagttcgagccgaaataccgnctcatcaggaatggtcttgctactaaggttgagaagtcccgcaagc

SEQ ID NO: 90536 - DNA, 546 bp, Zea mays
  unsure (1)..(546): unsure at all n locations
aggagttnnccttnnnaaagggctttacgtagncttaagaagggtatataagaaatgcttctaccggtccggaattcccgggtcgacccactcgtccgaccaactagcaacatagaaagcacaatagtgtaccaacaatggcagctaaaatatttggcctccttatgctccttggtctttctgcaagtgctgctacggcgaccattttcccacaatgctcacaagctcctatagcttccctttcttcccccgtacctctcaccaacggtgtcttcggtatgtgaaaacccaattcttcaaccctacaggatccaacaggcaatcgcagctggcatcttacctttatcacccttgttcctccaacaatcatcagccctattacagcagttacctttggtgcatttattggcacaaaacatcagggcacaacaactacaacaacttgtgctagcaaaccttgctgcctactctcagcaacagcagtttcttccattcaaccaactagctgcattgaactctggttcttatttgcaacaacaacaactt

SEQ ID NO: 90537 - DNA, 445 bp, Zea mays
  unsure (1)..(445): unsure at all n locations
cccgagccagccgtctcgctagggtttctccgccgccgccgccgccgccatgcctcgccgcagctcaggaaggtctgccccacgcccagctccccgtgctgctccagtgaggaacccgccacagccagcacgccaggctcctcctccagctcctgttcgagatggtggtggctccatgtttggaggaattgggtccaccattgctcaaggtatggcgtttggcacgggtagtgccatggcacacagggctgttgatgctgtattaggtccccggaccattcagcatgagactgttgcctcagaagctgctgctgctgcccctgcccctccagtgatgaatgctgatgcttgcagcatccattctaaggctttncaagattgtctcaacaactatggcagcgagatcagcaattgccagttctacctagacatgctgaacgagtgc

SEQ ID NO: 90538 - DNA, 363 bp, Zea mays
gaccaacaagcatcatagaaagtggaatccagtagcaacagtagagcaacaatggcgagcaagataggctccctccttatgctccttgctctttctacatgtgttgctaacgcgacaattttccctcaatgctcacaagctcctatagcttcccttcttaccccataccttccatcaattatagcttcaatatgtgaaaacccagctcttcaaccatataggcttcaacaagcaatcgcagcatgcaacatacctttatcgcccttgttgtttcaacaatcgccagccctatctttggtgcagtcattggtacaaaccatcagggcacaacagctgcagcaactcgtgctacctatgatcaac

SEQ ID NO: 90539 - DNA, 460 bp, Zea mays
tccgggtcgacctacgcgtccggtttcttccattcaaccaactagctgcattgaactctgcttcttatttgcaacaacaacaactaccagtcagccagctatctgctgcctacccccagcaatttcttccattcaaccaactgacagcattgaactctcctgcttatttacagcagcaacaactactaccattcagccagctagctggtgtgagccctgctaccttcttgacacaaccacagttgttgccgttctaccagcacgctgcgcctaacgctggcaccctcttacaactgcaacaattgctgccattcaaccaacttgctttgacaaacccagcagcattctaccaacaacccatcattggtggtgccctcttttagatttcttatgagttatagttcaataataaagtttttgtctgatgttgtggcttcccagaaataagaagtacatttct

SEQ ID NO: 90540 - DNA, 373 bp, Zea mays
ccaacaagcaacatagaaagtggaatacagtagcaaaaatagagcaacaatggcggccaagatatttgccatccttatgctccttgctctttctgcatgtgttgctaacgcgaccatttttcctcaatactcacaagctcctatagctgcccttcttcccccataccttccatcaatgaccgctttagtatgtgaaaacccagcccttcaaccctacaggatccagcaagcaatcgcaacaagcaacttacctttatcacacctgttctttcaacaatcgccagccctatctttggtgcagtcattggtacaaaccatcagggcagaacagttgcagcaactcgtgctaccagtgatcagccaagtagctctg

SEQ ID NO: 90541 - DNA, 346 bp, Zea mays
ggcagccaaaatattttgcctccttatgctccttggtctttctgcaagtgctgctacggcgaccattgtcccgcaatgctcgcaagctcctatagcttcccttcttcccccgtacctctcaccagcggtgtcttcggtatgtgaaaacccaattcttcaaccctacaggatccaacaggcaatcgcagctggcatcttacctttatcacccttgttcctccaacaatcatcagccctattacaacagttacctttggtgcatttattggcacataacatcagggcacaacaactacaacaacttgtgctagcaaaccttgctgcctactctcagcaacagcagttt

SEQ ID NO: 90542 - DNA, 418 bp, Zea mays
gaagcagtcatcgttgctccttcgagagaattaggaatgcaaattgggcgagaagtgggagagattgtgggtcctaatgacaaaagactggtccagcaacttgttggcggagctaatcgttccaggcaggaagaagcattgaagaagaacaaaccaatcattgttgtcggaacacctggccgtatttctgaaatttctgcagcaggtaagctacacactcatggctgccgttttcttgtactggatgaagtcgaccagcttctgtcttttaattaccgtgaagatatgcatagaattttggagcatgttggaaggagacctggaggcacatctagggatattcttggcccacttgcgagacgatctgagcgtcagactatcctggtttctgcaacaataccattttcagttatacgag

SEQ ID NO: 90543 - DNA, 423 bp, Zea mays
gaccaactagcaacatagaaagcacaatagtgtaccaacaatggcagccaaaatattgggcctccggatgctccttggtctttctgcaagtgctgctacggcgaccattttcccgcaatgctcgcaagctcctatagcttcccttcttcccccgtacctctcaccagcggtgtcttcggtatgtgaaaacccaattcttcaaccctacaggatccaacaggcaatcacagctggcatcttacctttatcacccttgttcctccaacaatcatcagccctattacatcagttacctttggtgcatttattggcacaaaacatcagggcacaacaactacaacaacttgtgctagcaaaccttgctgcctactctcagcaacagcagtttcttccattcaaccaactagctgcattgaactctgc

SEQ ID NO: 90544 - DNA, 404 bp, Zea mays
gagatcggaggagaaaaccgaaacgtgacaagcgatcaacagaaatttctcttgttatgggacagagaatggaggcaagcatattaacacatttaatgccacactcacagattgatatatatgtccaagttcttcaagctgatggtggaacaaggtcagcttgcataaatgctgcaacactagctcttgcagatgctgggattccaatgcgagacattgccacatcatgtagtgctggttatctgtgttctactcctttgctcgatctgaattacctcgaagacagtgctgggggttctgatgtcactgttggcattcttgcaaagatggacaaagtgactttgcttcagatggatgcaaaattaccaattgatacatttgaaaatgtaatgggacttgcaata

SEQ ID NO: 90545 - DNA, 399 bp, Zea mays
cccacgcgtccgccaactagcaacatagaaagcacaatagtgtaccaacaatggcagcgaaaatattttgcttccttatgctccttggtctttctgcaagtgttgctaccgcaaccattttcccacaatgctcacaagctcctatagcttcccttcttcccccatacctctcaccagcggtgtcttcaatgtgtgaaaccccaattgttcaaccctacaggatccaacaggcaatcgcaacaggcatcttaccattatcacccttgttccttcaacaaccgtcagccctattacagcagttacctttggtccatttggtggcacaaaacatcagggcacaacaactacaacaacttgtgctagcaaaccttgctgcatactctcagcaacatcagtttc

SEQ ID NO: 90546 - DNA, 398 bp, Zea mays
ctcggcctcgtgtacgccgtcgttaccccgcttctcctgccgtttataatcgtcttcggcgcctttgctttcctcgtctacagacaccagatcatcaacgtgtacaatcaggagtacgagagtgctgctgcgttctggcctcaggtgcactcccggataatagctagcctactcatctctcatgtaactctgtttgggttgatgagcacaaaggaagctgcgtactccacccctctgctcatcttcctgcctctgctgacgatctggttccacaaatactgcaagagccggttcgaaccagctttcagaaagtatcctcttgaggaagcaatggcgaaggacaccatggagcacgcatcggagcctaacctgaacctggaatccttcctggctaacgc

SEQ ID NO: 90547 - DNA, 400 bp, Zea mays
tttcagcattcaaaaacacaccaagcgaagcgcactagcaacgacctaacaccaatgggtaccaagatattagccctccttgcgcttcttgcccttttagtgagcgcaacaaatgcgttcattattccacagtgctcacttgctcctagtgccattattccacagttcctcccaccagttacttcaatgggcttcgaacatccagccgtgcaagcctacaggctacaactagcgcttgcggcgagcgccttacaacaaccaattgcccaattgcaacaacaatccttggcacatctaaccctacaaaccattgcaacgcatcaacaacatcaacaacagtttctgccatcactgagccacctagccgtggtgaaccctgtcacctacttgcaacagcagc

SEQ ID NO: 90548 - DNA, 334 bp, Zea mays
tagcaacatcttagcaccaatggcagccaagatttttgcgctccttgccctccttgctgtttcagcaagtgttgctaccgcgactattattccacaatgctcacaacaatacctctctccagtgatagccgcgagatttgaatacccatctatacaatcctacaggctacaagaggccatcacagcaagcatcttacggtcgttagcattgaccgtccaacaaccatatgccctattgcaacaaccatccttagtgaatctgtatctccaaagaatcacagcacaacaactacaacaacggttgcttccaacaattaatcaagtagttgcagcg

SEQ ID NO: 90549 - DNA, 394 bp, Zea mays
cactcgtccgtagcaacatcttagcaccaatggcagctttgattttttcgctccttgccctccttgctgtttcatcagatatttctaccgcgactattattccacaatgctcacaacaatacctctctccagtgatagccgctagatttgaatacccatctatacaatcctacaggctacaagaggccatcacagcaagcatcttacggtcgttagcattgaccgtccaacaaccatatgccctattgcaacaaccatccttagtgaatctgtatctccaaagaatcacagcacaacaactacaacaactgttgctttcaacaattaatcaattatttgcagcgaaccttgctgcttaccttcagcatcaacaatttcttccatttaatcaact

SEQ ID NO: 90550 - DNA, 345 bp, Zea mays
cctctccctcctccaacccaagctaagctaaacagcttacacagcttgctccgccatcaccgtatcgagagagacagagacaggctagcgagggaatggagaggatgctggccaggctgatgcggcggcggagctccgtccccctgtccggcctcctccaccacggaggagcgcccgccccgctgcaggccgccggcgccactggggcctccccgctgatcttgtcgcaccagcagcagcagcagcacacggccgccttcgccgtcctgccggtgctcaagatcagggactccgcgtcccagctgatcgggaggaccccgatggtgtacctgaacaaggtgaccg

SEQ ID NO: 90551 - DNA, 420 bp, Zea mays
attgagaccaactagcaacatagaaagcacaatagtgtaccaacaatggcagccaaaagattttgggtccttatgctccttggtctttctgcaagtgctgctaccgcaaccattttcccacaatgctcacaagctcctatagcttcctttcttcccccatacctctcaccagcggtgtcttcagtatgtgaaaacccaattcttcaaccctacaggatccaacaggcaatcgcagcaggcatcttacctttatcacccttgttcctccaacaaccgtcagccctattacagcagttacctttggtgcatttgttggcacaaaacatcaaagcacaacaactacaacaacttgtgctaagaaaccttgctgcctactctcagcaacagcagtttcttccattcaaccaactggctgcattg

SEQ ID NO: 90552 - DNA, 420 bp, Zea mays
  unsure (1)..(420): unsure at all n locations
attgtgagcattcagaaacacacctagcgaaacgcactaaccaccaacctaccaccattggcttccaagacattatccctccttgcgcttcttgccctttttgtgagtgcaacaaatgcgttcattattccacaatgctcactngctccgagtgccattattccacagttcctccctgcagttacttcaatgggcttcgaacacccagctgtgcaagcctataggctacaacaagcgcttgcggcgagcgtcttagaacaaccaattgcccaattacaacaacaatccttggcacatctaaccatacaaaccatcgcaacgcagcatcaacaagcactgagccacctagccgtggtgaaccctatcgcctacttgcaacaacagctgcttgcatccaacccacttgctttggcaaacgta

SEQ ID NO: 90553 - DNA, 415 bp, Zea mays
ctagcaacatagaaagcacaatagtgtaccaacaatggcagccaaaatattttgcctggttatgctccttggtatttctgcaagtgctgctacggcgaccattttcccgcaatgctcacaagctcctatagcttcccttcttcccccgtacctctcaccagcggcgtcttcggtatgtgaaaacccaattcttcaaccctacaggatccaacaggcaatcgcagctggcatcttacctttatcacccttgttcctccaacaatcatcagccctattacagcagttacctttggtgcatttattggcacaaaacatcaaggcacaacaactacaacaacttgtgctagcaaaccttgctgcctactctcagcaacagcagtttcttgcattcaaccaactagctgcattgaactct

SEQ ID NO: 90554 - DNA, 412 bp, Zea mays
cggacgcgtgggtttcaacattcaaaaacacaccaagcgaagcgcactaacaacgacctgacaccagtggctaccaagatattaacccttcttgggcttcttggccttttagtgagcgcaacaaatgcgttcattattccacagtgctcacttgctcctaatgccattattccacagttccttccaccagttacttcaatgggcttcgaacatccagccgtgcaagcctacaggctacaactagcgcttgcggcgagcgccttacaacaaccaattgcccaattgcaacaacaatccttggcacatctaaccctacaaaccattgcaacgcaacaacaacaacaacaacagtttctgccatcactgagccacctagccgtggtgaaccctgtcacctacttgcaacagcagc

SEQ ID NO: 90555 - DNA, 531 bp, Zea mays
  unsure (1)..(531): unsure at all n locations
agagtaacctcnntagttgtacagagctgaagaagcttactgtaggctctaccggtccggaattcccgggtttttttgctgatatttgtggcttcccagaaataagaaagtacatttctagattaaaattaataagaaaaaaagggaagggcggccgctctagaggatccaagcttacgtacgcgtgcatgcgacgtcatagctcttctatagtgtcacctaaattcaattcactggccgtcgttttacaacgtcgtgactgggaaaaccctggcgttacccaacttaatcgccttgcagcacatccccctttcgccagctggcgtaatagcgaagaggcccgcaccgatcgcccttcccaacagttgcgcagcctgaatggcgaatgggacgcgccctgtagcggcgcattaagcgcggcggatgtggtggttacgcgcagcgtgaccgctacacttgccagcgccctagcgcccgctactttcgctttcttaccttactttctcgccacgttcgacggcttttcccgtc

SEQ ID NO: 90556 - DNA, 534 bp, Zea mays
  unsure (1)..(534): unsure at all n locations
agagttnccttnaagtgcctacgtacgctaaagagcttattgtattgctcgtaccggtccggaattcccgggtcgacccactcgtccgcaactagcagcattgaactctgctgcttatttacagcagcaacaactactaccattcggccagctagctgatgtgagccctgctgccttcttgacacaacaacagttgttgccgttctacctgcacgctatgcctaacgctggcaccctcttacaactgcaacaattgctgccattcaaccaacttgctttgacaaactcaacagtgttctaccaacaacccatcattggtggtgccctcttttagattgcttatgagttatagttcaataatgaagttttttggatgatgtttgtggcgtcccagaaataagaaagtacatttctagattcaaaaaanaaaaaaaaaaaaagggcggccgctctagaggatccaagcttacgtacgcgtgcatgcgacgtcatagctcttctatagtgtcacctaaattcaattcactggccgtc

SEQ ID NO: 90557 - DNA, 439 bp, Zea mays
  unsure (1)..(439): unsure at all n locations
gccaaaccctacttgccaccgccaaacttccgccttcgtccgcgccggcgccgctctatcgctctaaaataacctttccagttccaccgggactagctgaaaggagagggaacggagggggatggcgtcgccggacgacgagataagccggctcttccgcatccgccgcacggtgtatgagatgctgcgcgaccgcggatacggtgtccgcgacgaacaaatcaagctcgaaaggcacaagttcatcgaacgctacggcaaccccgtccgccgtgacgagctcaccttcaacgccacaaagttgaacggcccatcggaccagatctacgtgttctttcctaatgaggcaaagcccggngtgaagacaatcaggaactacgtcgagaagatgaagaacgagaacgtcttcggccgcatactcgtcgtgcaacaggcgctc

SEQ ID NO: 90558 - DNA, 418 bp, Zea mays
  unsure (1)..(418): unsure at all n locations
attcccgggtcgacccactcgtccgattgagaccaactagcatcatagaaagcacaatattgtaccaataatggcagccaaaagattttgcctcattatgctccttggtctttctgcaagtgctgctacggcgagcattttcccgcaatgctcacaagctcctatagcttcccttcttcccccatacctctcaccagcgatgtcttcagtatgtgaaaatccaattcttctaccctacaggatccaacaggcaatcgcagcaggcatcttacctttatcacccttgttcctccaacaatcatcagccctattacagcagttacctttggtgcatttattggcacanaacatcatggcacatcaactacaacatctcgtgctagcaaaccttgctgcctactctcagcatcagcagtta

SEQ ID NO: 90559 - DNA, 438 bp, Zea mays
gaccaacaagcaacatagaaagtggaatccagtagcaacaacagagcaacaatggcgaccaagatatgttccctccttatgctccttgctctttctgcatgtgttgctaacgcgacaattttccctcaatgctcacaagctcctatagcttcccttcttcccccataccttccatcaatgatagcttcagtatgtgaaaacccagctcttcagccctataggctccaacaagcaatcgcagcaagcaacatacctttatcacccttgttgtttcaacaatcgccagccctatctttggtgcagtcattggtacaaaccatcagggcacagcagctgcagcaactcgtgctacctgtgatcaaccaagtagctctggcaaaaccttctccctactctcagcaacaacaatttcttccattcaaccaactgtctacactg

SEQ ID NO: 90560 - DNA, 408 bp, Zea mays
gcaggagatgcgcatcgcgcacttcgtggtgaaggagccgatggtgatcgggcacgagtgcgcgggcgtggtcgaggaggtgggcgccggcgtgacgcacctgtccgtgggcgaccgcgtggcgctggagccgggcgtcagctgctggcgctgccgccactgcaagggcgggcggtacaacctgtgcgaggacatgaagttcttcgccaccccgccggtgcacggctcgctggcgaaccaggtggtgcacccggccgacctgtgcttcaagctccccgacggggtgagcctggaggagggcgccatgtgcgagccgctgagcgtgggcgtgcacgcgtgccgtcgcgctggggtggggcccgagacgggcgtgctcgtggtgggcgccggccccatcggcctggtgtc

SEQ ID NO: 90561 - DNA, 412 bp, Zea mays
gaaagcacaatagtgtaccaacaatggcagccaaaatattttgcttccttatgctccttggtctttctgcaagtgttgctaccgcaaccattttcccacaatgctcacaagctcctatagcttcccttcttcccccatacctctcaccagcggtgtcttcaatgtgtgaaaccccaattgttcaaccctacaggatccaacaggcaatcgcaacaggcatcttaccattatcacccttgttcctccaacaaccgtcagccctattacagcagttacctttggtccatttggtggcacaaaacatcagggcacaacaactacaacaacttgtgctagcaaaccttgctgcatactctcagccacatcagtttcttccattcaaccaactggctgcattgaactctgctgctta

SEQ ID NO: 90562 - DNA, 412 bp, Zea mays
gctgcctactctcagcaacagcagtttcttccattcaaccaactagctgcattgaacgctgcttcttatttgcaacaacaacaactaccattcagccagctacctgctgcctacccccagcaatttcttccattcaaccaactggcagcattgaactctcctgcttatttacagcagcaacaactactaccattcagccagctagctggtgtgagccctgctaccttcttgatacaaccacagttgttgccgttctaccagcacgctgcgcctaacgctggcaccctcttacaactgcgacaattgctgccattcaaccaacttgctctgacaaacccagcagcgttctaccaacaacccatcattgggggtgccctcttttagatatcttatgagttatagatcaataata

SEQ ID NO: 90563 - DNA, 417 bp, Zea mays
  unsure (1)..(417): unsure at all n locations
attgataccaactagcaacatacatagtgaagtacactagcaacatcttagcaccaatgggagccaagatttttgccctccttgccctccttgctctttcagcaagcgctgctacctcgacttttattccacaatgctcacaacaatacctctctccggtgacagccgcgggatttcaatacccaactatacaatcctacatggtacaagaggccatccaagcaagcatcttacggtcattagcattaacccttcaacaaccatatgctctattgcaacagccatccttagtgcatctgtatctccaaagaatcgcggcacaacaactacaacaacagttgctaccaacaatcaatcaagtagttgcagcgaaccttgctgcttacctncagcaacaacagtttcttccattcaatc

SEQ ID NO: 90564 - DNA, 534 bp, Zea mays
  unsure (1)..(534): unsure at all n locations
agagggtnctcnntaggctgatgaaacttaaagaatctcactgtactgctctaccggtccggaattcccgggtcgacccactcgtccgattttgagcattcagaaacacaccaagcgaagcacattagcaacaacctaacaacaagggctaccaagatattatccctacttgcgcttcttgcgctttttgcgagcgcaacaaatgcgttcattattccacaatgctcacttgctccaagttccattattacacagttcctcccaccagttacttcaatgggcttcgaacacccagctgtgcaagcctataggctacaacaagcaattgcggcgagcgtcttacaacaaccaatttcccagttgcaacaacaatccttggcacatctaacaatacaaaccatcgcaacgcaacagcaacaacaattcctaccagcactgagccacctagccatggtgaaccctgccgcctacttgcaacagcagttgctagcatcaaacccacttgctctggcaaacgtaatttgcaaacaagca

SEQ ID NO: 90565 - DNA, 446 bp, Zea mays
caacaagcaacatagaaagtggaatacagtagcaaaaatagagcaacaatggcggccaagatattttccatccttatgctccttgctctttctgcatgtgttgctaacgcgaccatttttcctcaatactcacaagctcctatagctgcccttcttcccccataccttccatcaatgaccgctttagtatgtgaaaacccagcccttcaaccctacaggatccagcaagcaatcgcaacaagcaacttacctttatcacacctgttctttcaacaatcgccagccctatctttggtgcagtcattggtacaaaccatcagggcagaacagttgcagcaactcgtgctaccagtgatcagccaagtagctctggcaaacctttccccctactctcagcaacaacaatttcttccattcaaccaactgtctatactgaaccctgctgt

SEQ ID NO: 90566 - DNA, 395 bp, Zea mays
cccactcgtccgtccacgcgtccggaccaacaagcaacatagaaagtggaatccagtagcaacaatagagcaacaatggcgaccaagatattttccctccttatgctccttgctctttctacatgtgttgctaacgcgacaattttccctcaatgctcacaagctcctatagcttcccttcttcccccataccttccatcaattatagcttcaatatgtgaaaacccagctcttcaaccatataggcttcaacaagcaatcgcagcaagcaacatacctttatcgcccttgttgtttcaacaatcgccagccctatctttggtgcagtcattggtacaaaccatcagggcacaacagctgcagcaactcgtgctacctctgatcaaccaagtagc

SEQ ID NO: 90567 - DNA, 338 bp, Zea mays
cagctacctacatataaagcacaatagtgtaccaacaatggcagcccaaatatctagggttcttatgctccttggtatatctgcaagtgctgctaccgcgaccattttcccgcaatgctcacaagctcctatagcttcccttattcctcagtacctcttaccagcggtgtcttagatatgtgaaaacccaattcttcaaccctacaggatccaacaggcaatcgcagctgccatcttacctttatgacccttgttagtgcaacactcatcagacctattacagcacttacctttggtgcatttattgtcacaatacataagggcacaacaactacaac

SEQ ID NO: 90568 - DNA, 403 bp, Zea mays
gaaatgctagtaaatctgaaatcaagagcgcctatcggaagcttgctaggagctatcatccagatgtaaacaaagatcctggtgctgaacaaaagttcaaggatatcagtaatgcttatgaggttctgtctgatgatgagaagcgatcgatctatgataaatatggagaagcaggtctgaagggtgctggcatgggcacaggagattactcaaacccgtttgatctctttgagtccctgtttgaagggtttggtggaatgggtggaattggggtggccgtgctgctcggaacagaccaatgcaaggtgatgatgagagctacaatctggtactcaatttcaagggaagctgtgtttggtgtgggagaaagagattgagataaccagattggaaagctgtaaca

SEQ ID NO: 90569 - DNA, 419 bp, Zea mays
  unsure (1)..(419): unsure at all n locations
tagccctccttgcgcttcttgcccttttagtgagcgcaacaaatgcgttcattattcgacagtgcgcacttgctcctagtgccattattccacagttcctcccaccagttacttcaatgggcttcgaacatccagccgtgcaagcctacaggctacaactagcgcttgcggcgagcgccttacaacaaccaattgcccaattgcaacaacaatccttggcacatctaaccctacanaccattgcaacgcatcatcaacaacaacaacagtttctgccatcactgagccacctagccgtggtgaaccctgtcacctacttgcaacagcagctgcttgcatccaacccacttgctctggcgaacgtagctgcataccagcaacaacaacagctgcaacagtttatgccagtgctcagtcaa

SEQ ID NO: 90570 - DNA, 385 bp, Zea mays
ctccactcccacgcgaaccctagcagtggttctcccttggggccccggtaaacagctgggttccaggctgtataagcatctccgatcccatccgcggcgggttgaagccatcagctccggtttctgcagccggatttgggatccgcgagatgtcttggtccgcgcccgacgacatcctcctatacacctccctcgccggcttcttggacacaaatgttgttcttcagggtgcttgtgaacgagtgattgtgggggaacaatattgtgatgttcctcttgggctgtacgtaatccggggagagaacgttgttttaatcggagaattggatcgcgaaaaggatgaactccctgctcacatgacctgtgtttcagaagcagaaataag

SEQ ID NO: 90571 - DNA, 408 bp, Zea mays
  unsure (1)..(408): unsure at all n locations
aaatattntgctgtcttagcctctggtcttttgcaatgctggttcccgaaccaggttccacgatgctcacaagctcctatagcttcctttcttcccccatacctctcaccagcggtgtcttcagtatgtgaaaacccaattcttcaaccctacaggatccaacaggcaatcgcagcaggcatcttacctttatcacccttgttcctccaacaaccgtcagccctattacagcagttacctttggtgcatttgttggcacaaaacatcaaggcacaacaactacaacaacttgtgctaggaaaccttgctgcctactctcagcaacagcagtttcttccattcaaccaactggctgcattgaactctgctgcttatttgcaacaacaactaccattcagtcagctagct

SEQ ID NO: 90572 - DNA, 524 bp, Zea mays
  unsure (1)..(524): unsure at all n locations
agttccaactgaanctctaccgaacatcttagtatagctctaccggtctcggaattcccgggtcgacccactcgtccgcaacaacccatcattggtggtgccctcttttagatttcttatgagttatagttcaatagtaaagttttttatctgatgtttgtggcttcccagaaataagaaagtacatttctagattcttaaaaaaaaaaaaaagggcggccgctctagaggatccaagcttacgtacgcgtgcatgcgacgtcatagctcttctatagtgtcacctaaattcaattcactggccgtcgttttacaacgtcgtgactgggaaaaccctggcgttacccaacttaatcgccttgcagcacatccccctttcgccagctggcgtaatagcgaagaggcccgcaccgatcgcccttcccaacagttgcgcagcctgaatggcgaatgggacgcgccctgtagcggcgcattaagcgcggcggttgtggtggttacgcgcatcgtgaccggtacacttg

SEQ ID NO: 90573 - DNA, 429 bp, Zea mays
  unsure (1)..(429): unsure at all n locations
gttttgggaccccatggaatgcagctatcatataccctttcttgcaacaactggaggacaacttgatggacaaggactgcaaggacaaagggtggtctgctgctgccgccgccggcggcggcggcggtcggaagcttgttgccgaagatgacagggaggatgagtgtggcatttgcctggagacctgcaccaagatggtccttccgaattgcaaccatgccatgtgcatcaactgttaccgagactggtacacaaggtcccagtcatgcccgttctgccgcgggagcctgaagagggtccggtccagagacctgtgggtgctcaccggcgacgacgacgtgatcgacacggtgacgctggagaaggagaacgtgaagcacttnctcagcttcatcgacagcctgcccctgatcgtccccgacaacatgc

SEQ ID NO: 90574 - DNA, 389 bp, Zea mays
cccacgcgtccggcaaagcggcagtgcgtagagaggatcgtcgaacagaacagcatgaagatggtcatcgttctcgtcgtgtgcctggctctgtcagctgccagcgcctctgcaatgcagatgccctgcccctgcgcggggctgcagggcttgtacggcgctggcgccggcctgacgacgatgatgggcgccggcgggctgtacccctacgcggagtacctgaggcagccgcagtgcagcccgctggcggcggcgccctactacgccgggtgtgggcagccgagcgccatgttccagccgctccggcaacagtgctgccagcagcagatgaggatgatggacgtgcagtccgtcgcgcagcagctgcagatgatgatgcagcttgagcg

SEQ ID NO: 90575 - DNA, 342 bp, Zea mays
gcattcagaaacacaccaagcgaagcgcactatcaacgacctaacaacaatggctaccgggatattagccctccttgcgcttcttgccctttctgtgagcgcaacaaatgcgttcattattccacaatgctcacttgctcctagtgccattattccacagttcctcccaccagttacttcaatgggcttcgaacacctagctgtgcaagccaacatgcaacaacaagcgcttgcggcgagcgtcttacaacaaccaattgcccaattgcaacagcaatccttgccacatctaacaatacaagccatcacaacgcaacagcaacaacagtttctaccagcact

SEQ ID NO: 90576 - DNA, 283 bp, Zea mays
tgttactgtggtgaaggggcttgaattgtttggtgtaaagcttagtgatgcttcgaagaagcttgggaagaagtttgcaaccggagcttctgttgttaagggccctacggagaaggagcaaatcgacgtacaaggggacatctcatatgatattgtggagttcattacagatacatggcctgatgtacctgagtcggccattttcttcattgaagatggaaggaaggttcctgctgcttgatgccatatgttttataaggcacgagaccaatggatttacaaa

SEQ ID NO: 90577 - DNA, 135 bp, Zea mays
  unsure (1)..(135): unsure at all n locations
cccacgcgtccgatttgcaacaacaacaactaccattcagccagctacctgctgcctacgccccagcaatttcttccattcaaccaaatggtagtaagttgttgnntgctgtnnataagcaggagagtgcagtgc

SEQ ID NO: 90578 - DNA, 389 bp, Zea mays
  unsure (1)..(389): unsure at all n locations
gaccattagctttatctactccagagcgcagaagaacccgatcgacaccatgagggtggtgctcgttgccctcgctctcctggctctcgctgcgagcgccacctccacgcatacaagcggcggctgcggctgccagccaccgccgccggttcatctaccgccgccggtgcatctgccacctccggttcacctgccacctccggtgcatctcccaccgccggtccacctgccgccgccggtccacctgccaccgccggtccatgtgccgtcgccggttcatctgccgtcgtcaccatgccactaccctactcaaccgccccggcctcagcctcatccccagccacacccatgcncgtgccaacagccgcatccaagcccgtgccagctgc

SEQ ID NO: 90579 - DNA, 417 bp, Zea mays
gctctttctgcatgtgttgctaacgcgacaattttccctcaatgctcacaagctcctatagcttgcgttcttcccccataccttccatcaatgatagcttcagtatgtgaaaacccagctcttcagccctataggctccaacaagcaatcgcagcaagcaacatacctttatcacccttgttgtttcaacaatcgccagccctatctttggtgcagtcattggtacaaaccatcagggcacagcagctgcagcaactcgtgctacctgtgatcaaccaagtagctctggcaaacctttctccctactctcagcaacaacaatttcttccattcaaccaactgtctacactgaaccctgctgcttatttgcagcaacaactattaccattcagccagctagctactgcctactctcag

SEQ ID NO: 90580 - DNA, 419 bp, Zea mays
gttacttcaatgtgccttcgaaacacccagctgtgcaagcctataggctacaacaagcgattgcggcgagcgtcttacaacaaccaattgcccaattgcaacaacaatccttggcacatctaacaatacaaaccatcgcaacgcatcagcaacaacagttcctaccagcactgagccacctagccatggtgaaccctgtcgcctacttgcaacagcagctgcttgcatccaacccacttgctctagcaaacgtagttgcaaaccagcatcaacaacaactgcaacagtttctgccagcgcttagtcaactagccatggtgaaccctgccgcctacctacaacagcaacaactgctttcatctagcccgctcgctgtggccaatgcacctacatacctgcaacaagaattgttgcaacag

SEQ ID NO: 90581 - DNA, 420 bp, Zea mays
caaccaattgcccaattacaacaacaatccttggcacatctaaccatacaaaccatcggaacgcagcagcaacaacaatttctaccagcactgagccaactagctgtggtgaaccctgtcgcctacttgcaacagcagttgcttgcatccaacccacttgctctggcaaacatagttgcataccaacaacaacaacaattgcaacagtttctaccagcgctcagtcaactagccatggtgaaccctgccgcctacctacaacagcaacaactgatttcatctagccctctcgctgtggttaatgcacctacatacctgcaacaacagttgctgcaacagattgtaccagctctgactcagctagctgtggcaaaccctgctgcctacttgcaacagctgcttccattcaaccaactgact

SEQ ID NO: 90582 - DNA, 443 bp, Zea mays
caactagcaacatagaaagcacaatagtgtaccaacaatggcagccaaaatattttgcctccttatgctccttggtctttctgcaagtgctgctacggcgaccattttcccgcaatgctcgcaagctcctatagcttcccttcttcccccgtacctctcaccagcggtgtcttcggtatgtgaaaacccaattcttcaaccctacaggatccaacaggcaatcgcagctggcatcttacctttatcacccttgttcctccaacaatcatcagccctattacaacagttacctttggtgcatttattggcacataacatcagggcacaacaactacaacaacttgtgctagcaaaccttgctgcctactctcagcaacagcagtttcttccattcaaccaactaggttcattgaactctgcttcttatttgcaacaacaacaac

SEQ ID NO: 90583 - DNA, 432 bp, Zea mays
ctttggtgcagtcattggtacaaaccatcagggcacaacagctgcagcaactcgtgctacctctgatcaaccaagtagctctggcaaacctttctccctactctcagcaacaacaatttcttccattcaaccaactgtctacactgaaccctgctgcttatttgcagcaacaactattaccatttagccagctagctactgcctactctcagcaacaacaacttcttccatttaaccaattggccgcactgaaccccgctgcttatttgcagcagcaaatactactaccatttagccagctagctgcagcaaaccgtgcttccttcttgacacagcaacagttgctgcctttctaccagcagtttgcggctaaccccgcaaccctcttacaactacaacaattgttgccctttgtccaacttgctttgacag

SEQ ID NO: 90584 - DNA, 443 bp, Zea mays
attttgagcattcagaaacacacctagcgaagcgcactagcaacgacctaacaacaatggcttccaagacattatgcctccttgcgcttcttgccctttttgtgagtgcaacaaatgcgttcattattccacaatgctcacttgctccgagtgccattattccacagttcctccctccagttacttcaatgggcttcgaacacccagctgtgcaagcctataggctacaacaagcgcttgcggcgagcgtcttagaacaaccaattgcccaattacaacaacaatccttagcacatctaaccatacaaaccatcgcaacgcagcagcaacaagcactgagccacctagccgtggtgaaccctatcgcctacttgcaacaacagctgcttgcatccaacccacttgctttggcaaacgtagctgcataccaacaacaacaacag

SEQ ID NO: 90585 - DNA, 392 bp, Zea mays
  unsure (1)..(392): unsure at all n locations
aattcccgggctttttgttgagtacatacatatatggtatgttgatttgatatagtgatggacacatgctttgaccatgaatatgtcaaatcagttgtacttgcacgaagcaaaacataatataagtttaggagtaaacttataactgtgtccaaacatgctcacacaaattcataccacattataattttttggtaaatattccacacatgtattttttacaagaaactaaattttgcacacaaatgtagcattgtagacatgtataattctatgaacccgtgaacttaacaacaccaaggtcattaaatcaactggaccctatgagtaacaatttcgatatggcanacaccaaattattgaaactattggctgaaaatatgaccaacgta

SEQ ID NO: 90586 - DNA, 424 bp, Zea mays
gtttgctgagaaaccgaaaggagagcagttgaaagcaatgatggttgacaccaccatacttggccttgatgacgtgagggcaaaggaaatgccttatattgctagcatgggtatctatgttttcagcaaagatgtaatgcttcagctcctccgtgaacaatttcctgaagccaatgactttggaagtgaggttattccaggtgcaaccagcattggaaagagggttcaggcttatctgtatgatggttactgggaagatatcggtaccattgcggcattttataatgcaaacttgggaataaccaagaagccaataccagatttcagcttctatgaccgttttgctccaatttatacacaacctcgacacctgccacctttcaaggttcttgatgctgatgtgacagacagtgttaatggtgaa

SEQ ID NO: 90587 - DNA, 446 bp, Zea mays
gcgaccattttcccacaatgctcacaagctcctatagcttcccttcttgccccgtacgtctcaccagcggtgtcttcggtatgtgaaaacccaattcttcaaccctataggatccaacaggcaatcgcagctggcatcttacctttatcacccttgttcctccaacaatcatcagccctattacagcagttacctttggtgcatttattggcacaaaacatcagggcacaacaactacaacaacttgtgctagcaaaccttgctgcctactctcagcaacaacagtttcttccattcaaccaactagctgcattgaactctgcttcttatttgcaacaacaacaactaccattcagccagctatctgctgcctacccccagcaatttcttccatttaaccaactgacagctttggaactcttctgcttatttacagcagcaacaac

SEQ ID NO: 90588 - DNA, 419 bp, Zea mays
  unsure (1)..(419): unsure at all n locations
agcattcagaaacacaccaagcgaagctcattagcatcaacctaacaacaatggctacgaagatatgatccctccttgcgcttcttgcgctttttgcgagcgcaacaaatgcgttcattattccacaatgctcacttgctccaagttccattattacacagttcctcccaccagttacttcaatgggcttcgaacacccagctgtgcaagcctataggctacaacaagcaattgcggcgagcgtcttacaacaaccaatttcccagttgcaacaacaatccttggcacatctaacaatacaaaccatcgcaacgcaacagcaacaacaattcctaccagcactgagccacctagccatggtgaaccctgccgnctacttgcaacagcagttgcttgcatcaaacccacttgctctggca

SEQ ID NO: 90589 - DNA, 412 bp, Zea mays
cgcaaattgcaccaagatatccatcgagagggcgtcgacgggggaataatggcgtcgtcgtctagcagcagccaccgtcgcctcatcctcgcagccgtcgtcctgctctccgtgctcgcggctgccagcgccagcgccgggacctcctgcgtgccggggtgggccatcccgcacaacccgctcccgagctgccgctggtacgtgaccagccggacctgcggcatcgggccgcgcctcccgtggccggagctgaagaggagatgctgccgggagctggcggacatcccggcgtactgccggtgcacggcgctgagcatcctcatggacggcgcgatcccgccgggcccggacgcgcagctggagggccgcctagaggacctgccgggctgcccgcgggaggtgcagaggggat

SEQ ID NO: 90590 - DNA, 431 bp, Zea mays
attggagcgctttcttcagatgagtgatgacaacccttatgttatacctgagatggatccaacactgcggaagcaaatccagcagtgcaattggcaagtcgttaatgtaacaactcctgcaaattatttccatgttctgcgtcgccagatacaccgggactttaggaaacctttgattgtgatgtccccaaagaacctccttcgccacaaggactgcaagtcgaacttatctgaatttgatgatcttgcgggccaccctggattcgacaagcaagggacacgcttcaagcggctcattaaagaccagaataatcacaaggacctcgaggagggaattaaccgtctagttctttgctctggaaaggtgtactacgaactggatgaagaaagaaggaagacggagcgcactgatgttgctatatgtagagttg

SEQ ID NO: 90591 - DNA, 452 bp, Zea mays
  unsure (1)..(452): unsure at all n locations
caacaagcaacatagaaagtggaatccagtagcaacaacagagcaacaatggcgaccgagatattttccctccttatgctccttgctctttctgcatgtgttgctaacgcgacaattttccctcaatgctcacaagctcctatagcttcccttcttcccccataccttccatcaatgatagcttcagtatgtgaaaacccagctcttcagccctataggctccaacaagcaatcgcagcaagcaacatacctttatcacccttgttgtttcaacaatcgccagccctatctttggtgcagtcattggtacaaaccatcagggcacagcagctgcagcaactcgtgctacctgtgatcaaccaagtagctcttggcaacctttnctcctactctcaggcaccacattttcttccattcaaccaactgtctacactgaaccctgctgcttattt

SEQ ID NO: 90592 - DNA, 454 bp, Zea mays
  unsure (1)..(454): unsure at all n locations
ggtccggattcccgggctattattgtaggtgatcgtttgcttgttgcaaatgttggagattctagagctgttatttctaaaggaggacgggcgattgcggtttcaagggatcacaaacctgatcagacagatgagaggcaaagaattgaggatgcagggggctttgttatgtgggctgggacatggagagtgggtggcgttctcgctgtctctcgagcatttggtgataaactcttgaagccgtatgttgttgctgaccctgaaatcaaggaggaggtggtcgacagctccctcgaattcctcatccttgctagcgacggactctgggatgttgtcactaatgaggaagctgttgccatggtcaagcctatccaggacccccaggaagcagcaaacaagcttctcgaagaagcttcccgaaggggaagctccgataacatcacagntatcatcg

SEQ ID NO: 90593 - DNA, 429 bp, Zea mays
cagaaacacaccaagcgaagcacattagcaacaacctaacaacaatggctaccaagagattatccctccttgcgcttcttgcgctttttgcgagcgcaacaaatgcgttcattattccacaatgctcacttgctccaagttccattattacacagttcctcccaccagttacttcaatgggcttcgaacacccagctgtgcaagcctataggctacaacaagcaattgcggcgagcgtcttacaacaaccaatttcccagttgcaacaacaatccttggcacatctaacaatacaaaccatcgcaacgcaacagcaacaacaattcctaccagcactgagccacctagccatggtgaaccctgccgcctacttgcaacagcagttgcttgcatcaaacccacttgctctggcaaacgtagttgcaaacc

SEQ ID NO: 90594 - DNA, 437 bp, Zea mays
atcgatcggtgcttttaatctctgagcaagcgatcgagctcaccaacggccaccgcgctcaagagtagcagccggccggagccgaaaacgacgaggcggtggcatggggaggccgccgtgctgcgacaaggtgggagtgaagaaagggccgtggacccccgaggaggacctcatgctcgtctcctatgtccaggagcacggccccgggaactggcgcgccgtgccgaccaacaccgggctgatgcgctgcagcaagagctgcaggttgcggtggacaaactacctccggccgggaatcaagcgcggcaactttaccgaccaggaggagaagctcatcatccaccttcaggctctccttggcaaccggtgggcggcgatagcgtcctactttgccgagaggacggacaacgatatcaagaactactggaacacgcacc

SEQ ID NO: 90595 - DNA, 442 bp, Zea mays
ggttcggaattccaggctcgacccacgcgttcggagaccaactagcaacatagaaagcacaatagtgtaccaacaatggctgccataatagtttgccttcttatgctccttggtctttctgcaagtgctgctactgcgaccattctactgtaatgctcgcaagctcctataacttaacttattgccccgtacctatcaccatcggtgtcttcagtatgtgaaaactacaattcttcaaccgatacaggatccaacaggcaatcgcagctggcatcttacctttatcaccctggttcctccaacaatcatcagccctattacaacagttacctttggtgcacttattgtcacaaaacatgatggcacagcatctacaacaacttgtgctagctaaccttgctgcctactctcagcaacagcagtttatttcattcatccaact

SEQ ID NO: 90596 - DNA, 391 bp, Zea mays
cctgtatcgattcccatcgctgcaacgtactgcttcatcaaaaagtggtaggagcagggaatatgtgggtaccaaatggtctgcaatgtttagcggagttgaaaagtacttagaggagaaaccgtggaaattcagtaaagcgaatgcaacagagaaggcgatggttgctggtttgggaggactcaatctctttggtgtcatcattcttggaaacttgttgaagcatatgacagtgacacctggtggactaatctcatttgccgcacagttatatcctttgcttcagatatacgctggctccttttttgcaatacctttgtttagatggtttctgctacgcaagaccatcaatggcattaaaaagaggaataaggccagagaacagagagct

SEQ ID NO: 90597 - DNA, 396 bp, Zea mays
gcaacaactactaccattcatccagctatctggtgtgagccctgctaccttcttgatggaaccacagttgttgccgttctaccagcacgctgcgcctaacgctggcaccctcttacaactgcaacaattgctgccattcaaccaacttgctttgacaaacccagcagcgttctaccaacaacccatcattggtggtgccctcttttagatttcttatgagttatagttcaataataaagttttttgtctgatgtttgtggcttcccagaaataagaaagtacatttctaaaaaaaaaataaaatataaaaatacatatggaaaaaaaaaaaaaagatacacaaaaacaacaataaaattaaaaaaaaataataaagacaaaaaacaaaagagctca

SEQ ID NO: 90598 - DNA, 438 bp, Zea mays
ccaacaagcaacatagaaagtggaatccagtagcaacaatagagcaacaatggcgacgaagatattgtccctccttatgctccttgctctttctacatgtgttgctaacgcgacaattttccctcaatgctcacaagctcctatagcttcccttcttcccccataccttccatcaattatagcttcaatatgtgaaaacccagctcttcaaccatataggcttcaacaagcaatcgcagcaagcaacatacctttatcgcccttgttgtttcaacaatcgccagccctatctttggtgcagtcattggtacaaaccatcagggcacaacagctgcagcaactcgtgctacctctgatcaaccaagtagctctggcaaacctttctccctactctcagcaacaacaatttcttccattcaaccaactgtctacactgaa

SEQ ID NO: 90599 - DNA, 403 bp, Zea mays
ctgccacctccggttcacctgccacctccggtgcatctcccaccgccggtccacctggcgccgccggtccacctgccaccgccggtccatgtgccgccgccggttcatctgccgccgccaccatgccactaccctactcaaccgccccggcctcagcctcatccccagccacacccatgcccgtgccaacagccgcatccaagcccgtgccagctgcagggaacctgcggcgttggcagcaccccgatcctgggccagtgcgtcgagttcctgaggcatcagtgcagcccgacggcgacgccctactgctcgcctcagtgccagtcgttgcggcagcagtgttgccagcagctcaggcaggtggagccgcagcaccggtaccaggcgatcttcggcttggtcc

SEQ ID NO: 90600 - DNA, 446 bp, Zea mays
  unsure (1)..(446): unsure at all n locations
cgaagtcattccctcttcaagagggcatcatcagattgggcttattattccttattactccaggcgaggatcggagttgctctgaattgactgaaccatggcggcgacaatggcagtgacgacgatggtgaccaggagcaaggagagctggtcgtcattgcaggtcccggcggtggcattcccttggaagccacgaggcggtggcaagaccggcggcctcgagttccctcgccgggcgatgttcgccagcgtcggcctcaacgtgtgcccgggcgtcccggcggggcgcgacccgcgggagcccgatcccaaggtcgtacgggcccgncgacaactgcgacatcgcgcgccagcttggcgccgncgttcccgggcagcaggccgnctgggaggcggaggaagaggcagcgaagaggaggaagcagaaaggcggcggcagcaagaag

SEQ ID NO: 90601 - DNA, 433 bp, Zea mays
  unsure (1)..(433): unsure at all n locations
cccacgcgtccgattttgagcattcagaaacacaccaagcgaagcacagtagcaacagcctaacaacaatggctaccaagatattatccctccttgcgcttcttgcgctttttgcgagcgcaacaaatgcgttcattattccacaatgctcacttgctccaagttccattattacacagttcctcccaccagttacttcaatgggcttcgaacacccagctgtgcaagcctataggctacaacaagcaattgcggcgagcgtcttacaacaaccaatttcccagttgcaacaacaatccttggcacatctaacaatacaaaccatcgcaacgcaacagcaacaacaattcctaccagcactgagccacctagccatggtgaaccctgccgnctacttgcaacagcagttgcttgcatcaaacccacttgctct

SEQ ID NO: 90602 - DNA, 434 bp, Zea mays
aacctttctccctactatcagcaacaacaatttcttccattcaaccaactatctacactgaaccctgctgcttatttgcagcaacaactattaccattcagccagctagctactgcctactctcatcaacaacaacttcttccatttaaccaattggccgcactgaacctcgctgcttatttgcagcagcaaatattactaccatttagccagctagctgcagcaagccgtgcttccttcttgacacagcaacagttgctgcctttctaccagcagtttgcggctaaccccgcaaccctcttacaactacaacaattgttgccctttgtccaacttgctttgacaaacccagcagcctcctaccaacaacacatcattggtggtgccctcttttagattgcttattagttgtaattcaataataaagttttttg

SEQ ID NO: 90603 - DNA, 409 bp, Zea mays
aatccattagcaacaatttagcatcaatgtcgaccaagatattttccggtgttatgcgccttgctctttctacatgagttgctaacgcgacatttttccctcaatgctcacacgctcctataactacccttgtttccccataccttacaccaattatagcttcagtatgtgaaaacccagctcttcaaccatataggctacaccaagcaatctcagcacgcaacatacctttatcgctcttgctgtttcaacattcaccagccctatcttcggagcactcattggcacaaaccatcagggcacaacagctgcaacaactcgtgctacctgtgaacaaccaagtatctctggcaaacctttctcactactctcagcaacaacaattttttacatacaaccaactgtctac

SEQ ID NO: 90604 - DNA, 421 bp, Zea mays
gcgagtggttcgagaccgacgcggtgctcagggtcagcctcggcaacttcctcttctgcaccatcgtcgccgtcatcatggccgggataaaggaccagaaggacccccgtgacaaggtccaccacggcggatggatggccaagatcttctgctgggtcgtcattgtcttcctcatgttcttcgtgcccaacggcgtcgtcagcttctatgaatctatatccaagtttggctctgggctgttccttctcgttcaggttgttctgctgttggattttgtgcacggatggaatgagaactgggtcgccaaggatgagcagttctggtacatggctctgttggttgtctcggttgtctgttacattgccacgttctgtttctcgggtcttctatttcactgggtcactccatctggacatgactg

SEQ ID NO: 90605 - DNA, 433 bp, Zea mays
gcaagttcactgcagcaacttttgcaaggaccttttctggtttacatgctagaggaatcgagcctggtgttctttatccagctgtctctgttgagcagtttcacgaaccccatgcttataagtaacttcatgcttgcatatctccttacatttaggttgaatttcctatcaatcaaccggtttgagaggaaaaagaatcttgatcttgccatttcagcatttgctttgctccgttctgctgcttggactatacctggtgatgctctacaagaagcaacattaacagtggcaggtggctatgataagcgtctcaaggaaaatgttgaataccttgaggaactcaaaagactcgcattgacggaaggggtttctggacaggttaaatttgttacatcttgctcaacatctgaaagaaacgagcttctctccaact

SEQ ID NO: 90606 - DNA, 432 bp, Zea mays
gggtcttcagaccattagctttatctactccagagcgcagaagaacccgatcgacaccatgagggtgttgctcgttgccctcgctctcctggctctcgctgcgagcgccacctccacgcatacaagcggcggctgcggctgccagccaccgccgccggttcatctaccgccgccggtgcatctgccacctccggttcacctgccacctccggtgcatctcccaccgccggtccacctgccgccgccggtccacctgccaccgccggtccatgtgccgccgccggttcatctgccgccgccaccatgccactaccctactcaaccgccccggcctcagcctcatccccagccacacccatgcccgtgccaacagccgcatccaagcccgtgccagctgcagggaacctgcggcgttggcagcaccccgatcct

SEQ ID NO: 90607 - DNA, 435 bp, Zea mays
gcccgtgccagctgcagggaacctgcggcgttggcagcaccccgatcctgggccagtgcgtcgagtttctgaggcatcagtgcagcccgacggcgacgccctactgctcgcctcagtgccagtcgttgcggcagcagtgttgccagcagctcaggcaggtggagccgcagcaccggtaccaggcgatcttcggcttggtcctccagtccatcctgcagcagcagccgcaaagcggccaggtcgcggggctgttggcggcgcagatagcgcagcaactgacggcgatgtgcggcctgcagcagccgactccatgcccctacgctgctgccggcggtgtcccccactgaagaaactatgtgctgtagtatagccgctggctagctagctagttgagtcatttagcggcgatgattgagtaataatgtgtcacgcatc

SEQ ID NO: 90608 - DNA, 401 bp, Zea mays
aagaaatccatcgagaggccgtcgacaggggaattaatggcgtcgtcgtctagcaggggccaccgccgcctcatcctcgcagccgccgtcctgctctccgtgctcgcggctgccagcgccagcgccgggacctcctgcgtgccggggtgggccatcccgcacaacccgctcccgagctgccgctggtacgtgaccagccggacctgcggcatcgggccgcgccttcccgtggccggagctgaagaggagatgctgccgggagctggcggacatcccggcgtactgccggtgcacggcgctgagcatcctcatggacggcgcgatcccgccgggcccggacgcgcagctggagggccgcctagaggacctgccgggctgcccgcgggaggtgcagaggggat

SEQ ID NO: 90609 - DNA, 418 bp, Zea mays
cccacgcgtccggcaacatagaaagcacaatagtgtaccaacaatggcggccaaaagagtttgcctgcttatgctccttggtatttctgcaagtgctgctacggcgaccattttcccgcaatgctcacaagctcctatagcttcccttcttcccccgtacctctcaccagcggtgtcttcggtatgtgaaaacccaattcttcaaccctacaggatccaacaggcaatcgcagctggcatcttacctttatcacccttgttcctccaacaatcatcagccctattacagcagttacctttggtgcatttattggcacaaaacatcagggcacaacaactacaacaacttgtgctagcaaaccttgctgcctactctcagcaacagcagtttcttccattcaaccaactagctgcattg

SEQ ID NO: 90610 - DNA, 414 bp, Zea mays
ggcatgcatttttacgggctattgggaggatgttggaacaatcaaatcattctttgatgcaaacttggccctcactgagcagccttccaagtttgatttttatgatccaaaaacacctttcttcactgcaccccgatgcttgcctccgacgcaattggacaagtgcaagatgaaagatgcatttatctcagatggttgcttactgagagaatgcaacatcgagcattctgtgattggagtctgctcacgtgtcagctctggatgtgaactcaaggactccgtgatgatgggagcggacacctatgaaactgaagaagaagcttcaaagctactgttagctgggaaggtcccagttggaataggaaggaacacaaagataaggaactgtatcattgacatgaatgctaagattgg

SEQ ID NO: 90611 - DNA, 415 bp, Zea mays
caacatagaaagcacaatagtgtaccaacaatggcagccaaaatattttgcttccttgtgctccttggtctttctgcaagtgctgctaccgcaaccattttcccacaatgctcacaagctcctatagcttcctttcttcccccatacctctcaccagcggtgtcttcagtatgtgaaaacccaattcttcaaccctacaggatccaacaggcaatcgcagcaggcatcttacctttatcacccttgttcctccaacaaccgtcagccctattacagcagttacctttggtgcatttgttggcacaaaacatcaaggcacaacaactacaacaacttgtgctaggaaaccttgctgcctactctcagcaacagcagtttcttccattcaaccaactggctgcattgaactctgctg

SEQ ID NO: 90612 - DNA, 437 bp, Zea mays
  unsure (1)..(437): unsure at all n locations
gcaaagcggcagtgcgtagagaggatcgtcgaacagaacagcatgaagatggtcatcggtctcgtcgtgtgcctggctctgtcagctgccagcgcctctgcaatgcagatgccctgcccctgcgcggggctgcagggcttgtacggcgctggcgccggcctgacgacgatgatgggcgccggcgggctgtacccctacgcggagtacctgaggcagccgcagtgcagcccgctggcggcggcgccctactacgccgggtgtgggcagacgagcgccatgtaccagccgctccggcaacagtgctgccagcagcagatgaggatgatggacgtgcagtccgtcgcgcagcagctgcagatgatgatgcagcttgagcgtgccgctgccgncagcagcagcctgtacgagccagctctgatgcagcagcagcagcagct

SEQ ID NO: 90613 - DNA, 433 bp, Zea mays
ggttcgtgaggttctccggggttcggtttcgtgggtgagcggatcgagatggcggcgtcggatgttgagtaccgctgcttcgtcggcggcctcgcctgggccacggacgaccactccctccacaacgccttcagcacctacggcgaggtcctcgagtccaagatcatcctcgatcgggagacgcagaggtcccgcggcttcggcttcgtcaccttctccacggaggaggcgatgcggaacgccatcgagggcatgaacggcaaggagctggacggccgcaacatcaccgtcaacgaggcccagtcccgcggcggccgtggaggcggcggcggcggcgggtacggtggtggccgtggaggcggcggctacggcggtggcgggcgccgtgatggcggcggcggctacggcggtggcggcggctacccgtggtggc

SEQ ID NO: 90614 - DNA, 434 bp, Zea mays
gcaacatagaaagcacaatagtgtaccaacaatggcagccaaaatattttgcctccggatgctccttggtctttctgcaagtgctgctacggcgaccattttcccgcaatgctcgcaagctcctatagcttcccttcttcccccgtacctctcaccagcggtgtcttcggtatgtgaaaacccaattcttcaaccctacaggatccaacaggcaatcgcagctggcatcttacctttatcacccttgttcctccaacaatcatcagccctattacaacagttacctttggtgcatttattggcacaaaacatcagggcacaacaactacaacaacttgtgctagcaaaccttgctgcctactctcagcaacagcagtttcttccattcaaccaactaggttcattgaactctgcttcttatttgcaacaacaac

SEQ ID NO: 90615 - DNA, 442 bp, Zea mays
cagaaagaccaaggagcataaggaagcaaccattttcccacaatgctcacaagctcctatagcttcctttcttcccccatacctctcaccagcggtgtcttcagtatgtgaaaacccaattcttcaaccctacaggatccaacaggcaatcgcagcaggcatcttacctttatcacccttgttcctccaacaaccgtcagccctattacagcagttacctttggtgcatttgttggcacaaaacatcaaggcacaacaactacaacaacttgtgctaggaaaccttgctgcctactctcagcaacagcagtttcttccattcaaccaactggctgcattgaactctgctgcttatttgcaacaccaactaccattcagtcagctagctgctgcctacccccagcaatttcttccattcaaccaactggcagcattgaactct

SEQ ID NO: 90616 - DNA, 409 bp, Zea mays
aaccttgctgcctactctcagcatcaacagtttctgccattcaaccaactagctgcagggaactctgctgcttatttgcagcagcaacaactactaccattcagccagctagctgctgactaccaccggcaatatcttacattcaaccaactggcagcattgaactctcatgcttatgtacaacaacaacaactactaccattcagccagctagctgctgtgagccctgctgccttcttgacacagcaacatttgttgccgttctacctgcacactgcgcctaacgttggcaccctcttacaactgcaacaattgctgccattcgaccaacttgctttgacaaacccagcagtgttctaccaacaacccatcattggtggtgccatcttttagattgcttatgagttat

SEQ ID NO: 90617 - DNA, 285 bp, Zea mays
gtaccggtccggaattcccgggttgagaccaactagcaacatagaaagcacaatagtgtaccaacaatggcagccaaaatattttgcgtccttatgctccttggtctttctgcaagtgttgctaccgcaaccattttcccacaatgctcacaagctcctatagcttcccttcttcccccatacctctcaccagcggtgtcttcaatgtgtgaaaacccaattgttcaaccctacaggatccaacaggcaatcgcaacaggcatcttaccattatcacccttgttc

SEQ ID NO: 90618 - DNA, 437 bp, Zea mays
accaactagcaacatagaaagcacaatagtgtaccaacaatggcagccaaaatattttgcctcctgatgctccttggtctttctgcaagtgctgctacggcgaccattttcccgcaatgctcgcaagctcctatagcttcccttcttcccccgtacctctcaccagcggtgtcttcggtatgtgaaaacccaattcttcaaccctacaggatccaacaggcaatcgcagctggcatcttacctttatcacccttgttcctccaacaatcatcagccctattacaacagttacctttggtgcatttattggcacaaaacatcagggcacaacaactacaacaacttgtgctagcaaaccttgctgcctactctcagcaacagcagtttcttccattcaaccaactaggttcattgaactctgcttcttatttgcaaca

SEQ ID NO: 90619 - DNA, 353 bp, Zea mays
  unsure (1)..(353): unsure at all n locations
aattcccggggcgagccacgcgtccggtaacttgcgtggttctcttgctgcgacggaagcaaacactgcccgagacatagacggcgggacggcgagatggccgacggggaggacgccgtcgtcgcgcgccgtcgggccgtcatcacagactaccgcaagaagctgctcaactgcagggagctagagtcgcgcgtcggcaccgtgagagaaagccttaaaactgcaaagaaggattttaccaagactgaggacgacttaaagtctctgcagagtgtggggcaaataattggagaagtactccgacctcttgataatgaacgctntatcgtgaaggccagcagtggtccccgata

SEQ ID NO: 90620 - DNA, 443 bp, Zea mays
tagcaacatagaaagcacaatagtgtaccaacaatggcagctaaaatattttgcctcgttatgctgcttggtctttctgcaagtgctgctacggcgaccattttcccacaatgctcacaagctcctatagcttcccttcttcccccgtacctctcaccaacggtgtcttcggtatgtgaaaacccaattcttcaaccctacaggatccaacaggcaatcgcagctggcatcttacctttatcacccttgttcctccaacaatcatcagccctattacagcagttacctttggtgcatttattggcacaaaacatcagggcacaacaactacaacaacttgtgctagcaaaccttgctgcctactctcagcaacagcagtttcttccattcaaccaactagctgcattgaactctgcttcttattgcaacaacaacaactacca

SEQ ID NO: 90621 - DNA, 450 bp, Zea mays
ttctgctgcagcgcctccgccgccgccgccgcatctaacgcagttccctccgccgcagcccgaggcaagatggttctccagaacgacattgatctgctcaacccgccggcagaactcgagaagctcaagcacaagaaaaagagactcgtccagtcgcccaactccttcttcatggatgttaagtgccaggggtgcttcagcataaccactgttttcagccactcccagactgttgttgtgtgccctggctgccaaactgtcctctgccaacccacaggaggaaaggcaaggctcactgagggctgctctttccgcaggaagggagactagagcggatgtggtcttcaagttttgctctatgccagatactagcgtcatgaactgcctttagctaagattttccataagttgttctcgagcagctatgtgttgcatgttggctacttccaa

SEQ ID NO: 90622 - DNA, 428 bp, Zea mays
gaaatgctgaactcccagaggcgatggaccttttatacaagggaactatgcgagttgtgcttgtactactgcatgactttcctgaatttctttgtgattatcacttcagtttctgcgatgtgattccttcaagttgcattcaaatgcgcaatgtcattcttagtgcttttccacgtaacatgagactgccagacccttctacccctaatctaaagattgatttgttggctgaaatttcaatagcaccacgaatcatgtcggatgttgatggtgcccttaaatcaaagcagttgaagactgaggttgatgaatatctcaagaggccggaaggctcttcctttttaagtgacctgaaccaaaaattgctgctgcctcagaatgaagcaagtgttgctgggacacgctacaacgtgcctctgatcaattca

SEQ ID NO: 90623 - DNA, 416 bp, Zea mays
attgagaccaactagcaacatagaaagcacaatagtgtaccaacaatggcagccaagatattttgcttccttatgctccttggtctttctgcaagtgttgctaccgcaaccattttcccacaatgctcacaagctcctatagcttcccttcttcccccatacctctcaccagcggtgtcttcaatgtgtgaaaccccaattgttcaaccctacaggatccaacaggcaatcgcaacaggcatcttaccattatcacccttgttcctccaacaaccgtcagccctattacagcagttacctttggtcccatttggtggcacaaaacatcagggcacaacaactacaacaacttgtgctagcaaaccttgctgcatactctcagcaacatcagtttcttccattcaaccaactggctg

SEQ ID NO: 90624 - DNA, 425 bp, Zea mays
ctataatccttccctagcagctgctcttggcccgagccagccaaatccggatctcaagcttgctgctgttggcttaacacctggctctgctggaggattagaaggtccagaccggatctttgtaggtggtctaccatattatttcactgaggctcaagtgcgggagttgctcgagtccttcggacctctgcgtggattcgatcttgtgaaggatagagaaactggtaactcgaagggatatgccttctgtgtttaccaggatcttaatgtcactgacattgcctgtgctgcccttaatggcatcaagatgggggacaagactcttactgttaggagggcaaaccaaggagcttctcagcctaggccagagcaagaaagcatcctgctgcaggcacagcagcaggtgcaaatgcagaaactcgtat

SEQ ID NO: 90625 - DNA, 448 bp, Zea mays
caactagcaacatagaaagcacaatagtgtaccaacaatggcagccaaaatattttgcttccttatgctccttggtctttctgcaagtgctgctaccgcaaccattttcccacaatgctcacaagctcctatagcttcctttcttcccccatacctctcaccagcggtgtcttcagtatgtgaaaacccaattcttcaaccctacaggatccaacaggcaatcgcagcaggcatcttacctttatcacccttgttcctccaacaaccgtcagccctattacagcagttacctttggtgcatttgttggcacaaaacatcaaggcacaacaactaccacaacttgtgctaggaaaccttgctgcctactctcagccacagcagtttcttccattcaaccaactggctgcattgaactctgctgcttatttgcaacaacaactaccattc

SEQ ID NO: 90626 - DNA, 412 bp, Zea mays
gcaacatagaaagtggaatccagtagcaacaatagagcaacaatggcgaccaagatacgtttccctccttatgctccttgctctttctgcatgtgttgctaacgcgacaattttccctcaatgctcacaagctcctatagcttcccttcttcccccataccttccatcaatgatagcttcagtatgtgaaaacccagctcttcaaccctataggctccaacaagcaatcgcagcaagcaacatacctttatcacccttgtttcaacaatcgccagccctatctttggtgcagtcattggtacaaaccatcaaggcacagcagctgcagcaactcgtgctacctgtgatcaaccaagtagctctggcaaacctttctccctactatcagcaacaacaatttcttccattcaac

SEQ ID NO: 90627 - DNA, 431 bp, Zea mays
  unsure (1)..(431): unsure at all n locations
caaggccgtcgccgtccccgccgccgcggccaccagctcggaggagttcggcagcatgtcgtcgaagaagccgaggaatgccagccccagactcgcgcccgtatcaccaaaggagaagaaggacaagatcggcgagagggtcgcagcgctccagcagctcgtgtcaccgttcggaaagaccgacacggcttctgtcctgcaggaggcgtcggggtacatcaagttcctgcaccagcagctggaggtcctgagctccccttacatgcgcgctcctccggccgctggcgctgcgcctgaggacccccagcgctacagcctncggagccgcgggctgtgcctggtgccggtggacctgacgctgcagctgacccagagcaacggggcccgacctgtgggcgccggcgcacacggncaggcgaaagtgaggactg

SEQ ID NO: 90628 - DNA, 364 bp, Zea mays
aatgcaagtctggaattcccgggtggacccacgcgtccggcctcatccccagccacacccatgcccgtgccaacagccgcatccaagcccgtgccagctgcagggaacctgcggcgttggcagcaccccgatcctgggccagtgcgtcgagttcctgaggcatcagtgcagcccgacggcgacgccctactgctcgcctcagtgccagtcgttgcggcagcagtgttgccagcagctcaggcaggtggagccgcagcaccggtaccaggcgatcttcggcttggtccttcagtccattctgcagcagcagccgcaaagcggtcaggtcgcggggctgttggcggcgcaaatagcgcagcaactg

SEQ ID NO: 90629 - DNA, 369 bp, Zea mays
  unsure (1)..(369): unsure at all n locations
ctagcagatcaaacaagtagcgacagctcgacaaagatttgtgagagtgatccggcgctgagaagagatggctaagatcgccgcagccgccgcggcggcggcggcgctgtgcttcgcggccctggtggccgtggccgtctgccaaggcgaggtcgagcggcagaggctcagggacctgcagtgctggcaggaggtccaggagagcccgctcgacgcgtgccgccaggtcctcgaccggcagctaaccggcggcggcgtcggcggcccgttccggtggggcaccgggctccggatgcggtgctgccagcagctccaggacgtgagccgcgagtgccgctgcgccgncatccggagcatggtcaggggcta

SEQ ID NO: 90630 - DNA, 456 bp, Zea mays
  unsure (1)..(456): unsure at all n locations
tagcaacatagaaagcacaatagtgtaccaacaatggcagccaaaatattttgcttgcttatgctgcttggtctttctgcaagtgctgctaccgcaaccattttcccacaatgctcacaagctcctatagcttcctttcttcccccatacctctcaccagcggtgtcttcagtatgtgaaaacccaattcttcaaccctacaggatccaacaggcaatcgcagcaggcatcttacctttatcacccttgttcctccaacaaccgtcagccctattacagcagttacctttggtgcatttgttggcacanaacatcaaggcacaacaactacaacaacttgtgctaggaaaccttgctgcctactctcagcaacagcagtttcttccattcaaccaactggctgcattgaactctgctgcttatttgcaacaacaactaccattcagtcagctagct

SEQ ID NO: 90631 - DNA, 262 bp, Zea mays
gggcacaacagctgcagcaactcgtgctacctgtgatcaaccaagtagctctggcagacctttctccctactctcagcaacaacaatttcttccattcaaccaactgtctacactgaaccctgctggttatttacaggcaccaccaattacaaccattcagccagctagctactgcctactctcagcaacaacaacttcttccatttaaccaattgcccgcactgaaccccgctgcttatttgcagcagaaaatactactgc

SEQ ID NO: 90632 - DNA, 353 bp, Zea mays
agcgaaccttgctgcttacctccagcaacaacaatttcttccattcaatcaactagctggggtgaaccctgctgcttacttgcaggcacaacagctactaccattcaaccaacttgtcaggagccctgctgccttcttactgcagcaacagttgcttccattccatttacaagttgtggcaaacattgctgctttcttgcaacaacaacaacaattgctgccattttacccacaggttgtgggaaacattaacgccttcttgcaacagcaacagttgctaccattctacccacaggatgtggcaaacaatgtcgccttcttacaacaacaacaattgctgccatttaaccaac

SEQ ID NO: 90633 - DNA, 416 bp, Zea mays
attgagaccaactagcaacatagaaagcacaatagtgtaccaacaatggcagccaaaagattttgcttccttatgctccttggtctttctgcaagtgttgctaccgcaaccattttcccacaatgctcacaagctcctatagcttcccttcttcccccatacctctcaccagcggtgtcttcaatgtgtgaaaacccaattgttcaaccctacaggatccaacaggcaatcgcaacaggcatcttaccattatcacccttgttcctccaacaaccgtcagccctattacagcagttacctttggtccatttggtggcacaaaacatcagggcacaacaactacaacaacttgtgctagcaaaccttgctgcatactctcagcaacatcagtttcttccattcaaccaactggctgc

SEQ ID NO: 90634 - DNA, 407 bp, Zea mays
aactgcttcaacagtggtataaataagatatttgtgatgagtcagttcaattctactgcgcttaaccgccatattcatcgtacataccttgaaggcgggatcaactttgctgatggatctgtacaggtattagcggctacacaaatgcctgaagagccagctggatggttccagggtacagcagactctatcagaaaatttatctgggtactcgaggattattacagtcacaaatccattgacaacattgtaatcttgagtggcgatcagctttatcggatgaattacatggaacttgtgcagaaacatgtcgaggacgatgctgatatcactatatcatgtgctcctgttgatgagagccgagcttctaaaaatgggctagtgaagattgatcatactggacgtgt

SEQ ID NO: 90635 - DNA, 270 bp, Zea mays
attcaaccaactggctggattggactctggtgcttatttgcaacaaccattaccattgagccagcgggttgctgcctacccccagcaatttcttccattcaaccaactagcagcattgaactctgctgcttatttacagcagcaacaactactaccattcagccagctagctgatgtgagccctgctgccttcttgacacaacaacagttgttgccgttctacctgcacgctatgcctaacgctggcaccctcttacaactgcaacaatt

SEQ ID NO: 90636 - DNA, 446 bp, Zea mays
gagaccaactagcaacatagaaagcacaatagtgtaccaacaatggcagccaaaatattttgcttgcttatgctccttggtctttctgcaagtgttgctaccgcaaccattttcccacaatgctcacaagctcctatagcttcccttcttcccccatacctctcaccagcggtgtcttcaatgtgtgaaaccccaattgttcaaccctacaggatccaacaggcaatcgcaacaggcatcttaccattatcacccttgttcctccaacaaccgtcagccctattacagcagttacctttggtccatttggtggcacaaaacatcagggcacaacaactacaacaacttgtgctagcaaaccttgctgcatactctcagcaacatcagtttcttccattcaaccaactggctgcattgaactctgctgcttatttgcaacaacaatt

SEQ ID NO: 90637 - DNA, 353 bp, Zea mays
aacacaccaagcgaagcgcactagcaacgacctaacaacaatggctaccaagatatgagccctccttgcgcttcttgccctttttgtgagcgcaacaaatgcgttcattattccacaatgctcacttgctcctagtgccattattccacagttcctcccaccagttacttcaatgggcttcgaacacctagctgtgcaagccaacatgcaacaacaagcgcttgcggcgagcgtcttacaacaaccaattgcccaattgcaacaacaatccttgccacatctaacaatacaagccatcacaacgcaacagcaacaacagttcctaccagcactgagccacctagccatggtga

SEQ ID NO: 90638 - DNA, 478 bp, Zea mays
  unsure (1)..(478): unsure at all n locations
tgtaccggtccggaattcccgggcagcaagcaacatagaaagtagaatccattagcaacaatagagcaacaatggcgaccaagatattttccctccgtatgctccttgctctttctacatgtgttgctaacgcgacaattttccctcaatgctcacaagctcctatagcttcccttcttcccccataccttccatcaattatagcttcagtatgtgaaaacccagctcttcaaccatataggcttcaacaagcaatcgcagcaagcaacatacctttatcgcccttgttgtttcaacaatcaccagccctatctttggtgcagtcattggtacaaaccatcagggcacaacagctgcagcaacttgtgctacctgggatcaacccagtaactcttgccaaacctttctccctactctcagcaccaacaattncttccattcaaccaactgtctacactggaccctgctgcttatttgc

SEQ ID NO: 90639 - DNA, 154 bp, Zea mays
accaccaatgatgggttgttggtgccctcttttagatttcttatgagttatagttcggtaataaagttgtttatctgatgtttgtggcttcccagaaataagaaagtacatttctagaaaaaaaaaaaaaaaaaaaaaaaacaaaaaacctaac

SEQ ID NO: 90640 - DNA, 438 bp, Zea mays
gaaaacccagctcttcaaccatataggcttcaacaagcaatcgcagcaagcaacatacctttatcgcccttgttgtttcaacaatcaccagccctatctttggtgcagtcattggtacaaaccatcagggcacaacagctgcagcaactcgtgctacctgtgatcaaccaagtagctctggcaaacctttctccctactctcagcaacaacaatttcttccattcaaccaactgtctacactgaaccctgctgcttatttgcagcaacaactattaccatttagccagctagctactgcctactctcagcaacaacaacttcttccatttaaccaattggccgcactgaaccccgctgcttatttgcagcagcaaatactactgccatttagcgagctaactgcaacaagtcgtgctttcctcttgacacagcaacag

SEQ ID NO: 90641 - DNA, 449 bp, Zea mays
accggttcggaattcccggctggacgcactcgtccgcaactagcaacatacaaagctcaatagtttaccaacaatggcagacaaaagattctgagtccttatgctccttgggcttgctgcaagtgctcgtacagtgaccattctcccgcaatgctcgcaagctcctatagctctccttcttaccccgtacctatcaccaacagtgtctgcgatatgtgaaaacccaattcttcaaccctacaacatccaacaagcaattgcaacttgcatcttaaccttaataaccttggttcttcaacaataatcaagcctaatacaacaagtacctttagttcaattaatggcaccaaaccaccaggccccaccaactacaacacctgttcctagcaaaccttgctgcctactctaagaaccacaactttcttccattcaaccacttcggtcaattg

SEQ ID NO: 90642 - DNA, 418 bp, Zea mays
ctaccggtgcatctacccaccgccggtccacctgccgccgccggtccacctgccaccggcggtccatgtgccgccgccggttcatctgccgccgccaccatgccactaccctactcaaccgccccggcctcagcctcatccccagccacacccatgcccgtgccaacagccgcatccaagcccgtgccagctgcagggaacctgcggcgttggcagcaccccgatcctgggccagtgcgtcgagttcctgaggcatcagtgcagcccgacggcgacgccctactgctcgcctcagtgccagtcgttgcggcagcagtgttgccagcagctcaggcaagtggagccgcagcaccggtaccaggcgatcttcggcttggtccttcagtccatcctgcagcagcagccgcaaagcggccag

SEQ ID NO: 90643 - DNA, 415 bp, Zea mays
ctcacttgctccgagtgccattattccacagttcctccctccagttacttcaatgggcttcgaacacccagctgtgcaagcctataggctacaacaagcgcttgcggcgagcgtcttagaacaaccaattgcccaattacaacaacaatccttggcacatctaaccatacaaaccatcgcaacgcagcagcaacaagcactgagccacctagccgtggtgaaccctatcgcctacttgcaacaacagctgcttgcatccaacccacttgctttggcaaacgtagctgcataccaacaacaacaacagttgcaacagtttctaccagcgctcagtcaactagccatggtgaaccctatcgcctacctacaacagcaacaacttctttcatctagcccgctcgctatgggcaatgca

SEQ ID NO: 90644 - DNA, 356 bp, Zea mays
gtaccggtccggaattcagcatgcaaaaacacaccaagcgaagcgcactagcaacgacctaacaccaatggctaccaagatatgagccctccgtgcgcttcttgcccttttagtgagcgcaacaaatgcgttcattattccacagtgctcacttgctcctagtgccattattccacagttcctcccaccagttacttcaatgggcttcgaacattcagccgtgcaagcctacaagctacaactagcgcttgcggcgagcgccttaacacaaccaattgcccaattgcaacaacaatccttggcacatctaaccctacaaaccattgcaacgcaacaacaacaacaacaacagtttc

SEQ ID NO: 90645 - DNA, 210 bp, Zea mays
cagcacgctgcgcctaacgctggcagaatcttacaactgcaacaattgctgccattgggccaacttgctttgacaaacccagcagcattctaccaacaacccatcattggtggtgccctcttttagatttcttatgagttatagttcaataataaagttttttgtctgatgtttgtggcttcccagaaataagaaagtacatttctaaaa

SEQ ID NO: 90646 - DNA, 514 bp, Zea mays
agactacgagctacagcactacagtaggctcgtaccggtttcggaattcccgggtcgactcacgcgtccgctgatttcatctagccctctcgatgtggttaatgcacctacatacctgagacaacaggtgctgcaacagagtgtaccagctttgactcacctagctgtggcaaaccctgctacctacttgcaacagctgcttacattcaaccaactgactgtagtccaactctgctgcgtacctacaacagcgacaacagatacttaatccactagcggtggctaacccattgctcgctgcctttctacagcagcagcaattgctgtcatacaaccagttgtctttgatgaaccctgccttggtgaggcagcaccctatcgacggaggtgccatctcttcgactacatctgagatgtactcgattgtggcgccctcatagcgtcatgcgtgtcctagacttgctcaatatattgattgagatctatctacatgatatggcgaacgtagctgcag

SEQ ID NO: 90647 - DNA, 434 bp, Zea mays
gcagggagttgatttatccgctgcagccatgagtaagttgcagtctgagtctgtcagggatgccatctcccagattgttggggatgccaaggagaagaataggaagttcactgagactgtggaacttcagattggtctgaagaattatgatccacagaaggacaagcgtttcagtggctctgttaagttgccccatatccctcgtcccaagatgaaggtgtgcatgcttggtgatgcccagcatgttgaggaggccgagaagatgggacttgactacatggatgttgaggctctcaagaaaatgaacaagaacaagaagcttgttaagaggcttgccaagaagtaccatgctttcttggcatcagaggccatcatcaagcagattccccgtctccttgtcctggtctcaacaaggcaggcaagttcccgaccct

SEQ ID NO: 90648 - DNA, 442 bp, Zea mays
gtggaatacagtagcaaaaatagagcaacaatggcggccaagatatttgccatccttatgctccttgctctttctgcatgtgttgctaacgcgaccatttttcctcaatactcacaagctcctatagctgcccttcttcccccataccttccatcaatgaccgctttagtatgtgaaaacccagcccttcaaccctacaggatccagcaagcaatcgcaacaagcaacttacctttatcacacctgttctttcaacaatcgccagccctatctttggtgcagtcattggtacaaaccatcagggcagaacagttgcagcaactcgtgctaccagtgatcagccaagtagctctggcaaacctttccccctactctcagcaacaacaatttcttccattcaaccaactgtctatactgaaccctgctgcttatttgcagcaac

SEQ ID NO: 90649 - DNA, 398 bp, Zea mays
  unsure (1)..(398): unsure at all n locations
caacaacaacaaccgcagcaccaccaccaacaacaacaacaacagcaccaacaacagcatcaatgtgaaggccaacaacaacatcaccaacaatcacaaggccatgtgcaacaacacgaacagagccatgagcaacaccaaggacagagccatgagcaacaacatcaacaacaattccagggtcatgacaagcagcaacaaccacaacagcctcagcaatatcagcagggccaggaaaaatcacaacagcaacaatgtcattgccaggagcagcaacagactacaaggtgcagctataactactatagcagtagctcaaatctaaaaaattgtcatgaattcctaaggcagcagtgcagccctttggtaatgccttttctncaatcacgtttgataca

SEQ ID NO: 90650 - DNA, 415 bp, Zea mays
tgagaccaactagcaacatagaaagcacaatagtgtaccaacaatggcagccaaaatattttgcttccttatgctccttggtctttctgcaagtgctgctaccgcaaccattttcccacaatgctcacaagctcctatagcttcctttcttcccccatacctctcaccagcggtgtcttcagtatgtgaaaacccaattcttcaaccctacaggatccaacaggcaatcgcagcaggcatcttacctttatcacccttgttcctccaacaaccgtcagccctattacagcagttacctttggtgcatttgttggcacaaaacatcaaggcacaacaactacaacaacttgtgctaggaaaccttgctgcctactctcagcaacagcagtttcttccattcaaccaactggctgca

SEQ ID NO: 90651 - DNA, 411 bp, Zea mays
gcaacatagaaagtggaatccagtagcaacaacagagcaacaatggcgaccaagataggttccctccttatgctccttgctctttctgcatgtgttgctaacgcgacaattttccctcaatgctcacaagctcctatagcttcccttcttcccccataccttccatcaatgatagcttcagtatgtgaaaacccagctcttcagccctataggctccaacaagcaatcgcagcaagcaacatacctttatcacccttgttgtttcaacaatcgccagccctatctttggtgcagtcattggtacaaaccatcagggcacagcagctgcagcaactcgtgctacctgtgatcaaccaagtagctctggcaaacctttctccctactctcagcaacaacaatttcttccattc

SEQ ID NO: 90652 - DNA, 415 bp, Zea mays
cttgcttcatcttcttcagcttgcagtgggctgctgggttttggaccttttggtaccgcggtggatcaagaagtggccgtgcatttttgcttccctggcatgtcttctttggtatattcatctatgttcttgctatcgccacaagtgtgactggactcctggagaagtcaatctttatgcagagcgccaaaatgattgagcgcttctccacagaagccatgtttatgaactccctgggaatgctgctggtgttgttgagcagccttgttattcttgcactcgttagtcctggacccagcatgatcgacacatacagaggctcttctgagtgagaggaaatgattacagcctagtttcttaagctacatttttaatcagtagctgagcaatttttgtgtacatgtacccagaatta

SEQ ID NO: 90653 - DNA, 402 bp, Zea mays
  unsure (1)..(402): unsure at all n locations
aaaagattcgcggcggtggagtcggagctcaactcatcaatagggtttgatcagcgctgcgctcgtgctagccacccagcccccccgcgcccacttgcgacggcgatggcttcgccgtactcgctcagctgggccgacgcgccgccctaccactaccacgggagaccccagccagcgcccgactcacccgcatcctccgacggggccgggccccgctcgctctggatcggcggcctgctgccatggatggacgaggactacctctacggctgcttcaccacctcgcgcgagcttctttcccttgtcatcaaacggaacaagcagactggccaatcagagggctttggcttcctcaaattttctgaccataccgncgctgctcatattctcaagtcttacaat

SEQ ID NO: 90654 - DNA, 407 bp, Zea mays
tgcttatttacaacaacaacaactactaccattcagccagctagctactgcctactggcagcaggggcaatttcttccatttaaccaattggccgcactgaacccctctgcttatttccagcagcaaatactactaccatttggccagctagctacaacaagccccacttcctttttgaaacaacaacaattgcttccgttctaccagcagtttgtggctaaccccgcaaccctcttacaactgcaacagttgctgccctttgtccaacttgctttgacaaacccagcagccttctaccaacaacacatcattggcggtgccatcttttagattgcttattagttgtaattcaataatgaagttttttggctgatgtatgtggcctcctagaaataagaagttacat

SEQ ID NO: 90655 - DNA, 385 bp, Zea mays
  unsure (1)..(385): unsure at all n locations
gcattcagaaacacaccaagcgaagctacctagcaacgacttaacaacaatggctacgagagatattagccctccttgcgcttcttgccctttttgtgagcgcaacaaatgcgttcattattccacaatgctcacttgctcctagtgccattataccacagttcctccgaccagttacttcaatgggcttcgaacacctagctgtgcaagcctacaggctacaacaagcgcttgcggcgagcgtcttacaacaaccaattaaccaattgcaacaacaatccttggcacatctaaccatacaaaccatcgcaacacaacagcaacaacagttcctaccagcactgagccaactagatgtggtgaaccctgtcgnctacttgcaaca

SEQ ID NO: 90656 - DNA, 538 bp, Zea mays
  unsure (1)..(538): unsure at all n locations
aggtaggggnnctgagtgtcnaactacgataccctcngatactcatcgctacnactcntaccggtccggaattcccgggtgcgacccacgcgtttcaaaaacacaccaagcgaagcgcactagcaacgacctaacaccaatggctgccaagagattagccctgcttgcgcttcttgcccttttagtgagcgcaacaaatgcgttcattattccacagtgctcacttgctcctagtgccagtattccacagttcctgccaccagttacttcaatgggcttcgaacatccagccgtgcaagcctacaggctacaactagcgcttgcggcgagcgccttacaacaaccaattgcccaattgcaacaacaatccttggcacatctaaccctacaaaccattgcaacgcaacaacaacaacaacagtttctgccatcactgagccacctagccgtggtgaaccctgtcacctacttgcaacagcagctgcttgcatccaacccacttgctctggcgaacgtagctgcataccagcaacaacaa

SEQ ID NO: 90657 - DNA, 449 bp, Zea mays
ccaagcgttcgctcctaccccacacagaagcggcggcggcggagcaaacgcaggcgaaggcgagggtgtgagggaaggagcaccagccatggtgcacgtcaacttctaccgcaactatggtaagacgttcaagaaaccaaggcgtccttatgagaaggagcgtcttgatgctgaactgaagctggttggtgagtatgggctgaggtgcaagcgtgagctttggagggtccagtatgcactgagcaggatccgtaatgctgcaaggcacttgctcacccttgacgagaagaacccccgtcgtatctttgagggtgaggcactttttcgccgcatgaaccgctatgggctgcttgctgagggtcagaacaagcttgattatgttcttgccctcaccgctgagaacttcctcgcaaggcggcttcaaacacttgtcttcaagctggcatggc

SEQ ID NO: 90658 - DNA, 382 bp, Zea mays
ccggaatggacgcatgcatccacgcgtccagaactacaccaatcgaaagtacctaactgcgacttaactgcaatgcctaccgtgatgtcagcttatgctggcgcgttcttgctctatgtgctagcgcaacaaatgcgttcattatttgacaatgctcacttgctcctagtgtcattataccacacttcttacgaccagttacttcaatgtgctaaaaacacctagttgagcaagcctacatgctacaacaagcgcttgcggcgagcgtcttacatcaaccaagtaactaattgcatcatcaatcctagtaacatctaaccatacagaccatctgttcacaccagccacaacagtacctaccataactgagccaactatatgt

SEQ ID NO: 90659 - DNA, 359 bp, Zea mays
cagctctgactcagctagctgtggcaaaccctgctgcctacttacaacaggtgcttggattcaaccaactggctgtgtcaaactctgctgcgtacctacaacagcgacaacagttacttaatccattggcagtggctaacccattggtcgctaccttcctgcagcagcaacaacaattgctgccatacaaccagttctctttgatgaaccctgccttgcagcaacccatcgttggaggtgccatcttttagattacatatgagatgtactcgacaatggtgccctcataccgacatgtgtttcctagaaataatcaatatattgattgagatttatctcgataaaaaaaaaaaaacaag

SEQ ID NO: 90660 - DNA, 440 bp, Zea mays
  unsure (1)..(440): unsure at all n locations
gaccaactagcaacatagaaagcacaatagtgtaccaacaatggcagccagaatattgtgcctacttatgctccttggtctttctgcaagtgctgctacggcgaccattttcccgcaatgctcgcaagctcctatagcttcccttcttcccccgtacctctcaccagcggtgtcttcggtatgtgaaaacccaattcttcaaccctacaggatccaacaggcaatcacagctggcatcttacctttatcacccttgttcctacaacaatcatcagccctattacatcagctacctttggtgcatttattggcacaaaacatcatggcacaacaactacaacaacttgtgctagcaaaccttgctgcctactctcagcaacagcagnttcttccattcaaccaactagctgcattgaactctgcttcttatttgcaacaac

SEQ ID NO: 90661 - DNA, 371 bp, Zea mays
gaccaactagcaacatagaaagcacaatagtgtaccaacaatggcagccaaaatattgtgcctccttatgctccttggtctttctgcaagtgctgctacggcgaccattttcccgcaatgctcgcaagctcctatagcttcccttcttcccccgtacctctcaccagcggtgtcttcggtatgtgaaaacccaattcttcaaccctacaggatccaacaggcaatcgcagctggcatcttacctttatcacccttgttcctccaacaatcatcagccctattacaacagttacctttggtgcatttattggcacaaaacatcagggcacaacaactaccacaacctgggcctaccaaaccttgctgcctac

SEQ ID NO: 90662 - DNA, 436 bp, Zea mays
agaagctcaaatactgatctcactgatccagtatggctatggcaaaggcaggcgcgccgagggtctcggcggcccagctggtgactctcgggctatcactcctctgcgctgtcgccggcccggccgccgcgcagaactgcggctgccagccaaacgtatgctgcagcaagtttggctactgcggcacgaccgacgagtactgcggcgacgggtgccagtcgggcccgtgccgctcgggcggcggcggcagcagtggcggcggtggtgcgaacgtggctagcgtcgtcaccggctccttcttcaacggcatcaagagccaggccgggagcgggtgcgagggcaagaacttctacacccggagcgcgttcctgagcgccgtcaaggcgtacccaggcttcgcccatggcgggtcgcaggtgcagggcaagcgcgagat

SEQ ID NO: 90663 - DNA, 325 bp, Zea mays
aactagcaacatacatagtgaaatacactagcaacatcttaacaccaatgggaaccaagaattttgccctccttgccctccttgctctttcagcaagcgctgctacctcgacttttattccacaatgctcacaacaatacctctctccggtgacagccgcgggatttcaatacccaactatacaatcctacatggtacaagaagccatccaagcaagcatcttacggtcattaacattaacccttcaacaaccatatgctctattgcaacagccatccttagtgcatctgtatcttcaaaggaatcgcggcacaacaactacaac

SEQ ID NO: 90664 - DNA, 441 bp, Zea mays
ctcgtaccggtccggaattaccgacgcgtccgcagctactaccattcagccagctagctactgcctactctcagcagcaacaatttcttgcatttagccaattggccgcactgaacccctctgcttatttccagcagcaaatactactaccatttggccagctagctacaacaagccccactttctttttgaaacaacaacaattgcttccgttctaccagcagtttgtggctaaccccgcaaccctcttacaactgcaacagttgctgccctttgtccaacttgctttgacaaacccagcagccttctaccaacaacacatcattggcggtgccatcttttagattgcttattagttgtaattcaataatgaagttttttggctgatgtatgtggcctcctagaaataagaagttacatttccaaattctaatgtgctat

SEQ ID NO: 90665 - DNA, 365 bp, Zea mays
  unsure (1)..(365): unsure at all n locations
ggtctttgctttgtggtggatggctttccaccactcgctgaattcactgaggtgcttgctaagagctatgagaaactcaaagaagtgggagagaaatttgaagttgtagctgtatccttggacagtgaagagtcatcatttaatgagagttttgccaaagatgccttggcttgcaattcctcaaggtgacattaagtgtcagacgctggttcgttactttgagcttagttctcttccaacactagttctgattggccctgatgggaagacactgaacaacaatgtcgncgacttaattgacgaccatggttttgaggcatgggagggcttncccttcagtgctgagaagctggaaattcttgctg

SEQ ID NO: 90666 - DNA, 409 bp, Zea mays
cccacgcgtccgcaagcaacatagaaagtggaatccagtagcaacaacagagcaacagtggcgagcaagatattttccctccttatgctccttgctctttctgcatgtgttgctaacgcgacaattttccctcaatgctcacaagctcctatagcttcccttcttcccccataccttccatcaatgatagcttcagtatgtgaaaacccagctcttcagccctataggctccaacaagcaatcgcagcaagcaacatacctttatcacccttgttgtttcaacaatcgccagccctatctttggtgcagtcattggtacaaaccatcagggcacagcagctgcagcaactcgtgctacctgtgatcaaccaagtagctcttgcaaacctttctccctactctcagcaac

SEQ ID NO: 90667 - DNA, 444 bp, Zea mays
gccacgcgtccgcggacgcgtccgaaagaagatgaaggactggatgcgcttcagtgttgcgttctggcagacgttccgtggtactggcgccgatccttttggtgcgcctacaaaggtttggccttgggaggacggcacaaattcgttggccatggctaagagaagaatgagagctcactttgagttcatggagaagctgggggttgacaaatggtgcttccatgatagggatattgcccctgatgggaaaactctcgaagaaacaaatgctaacttggatgagatagttgagctggcaaagcagctccagggtgagaccaatataaagccattgtggggtactgcacagctctttatgcatcctcgttacatgcacggagctgctactagcccagaggttaaagtatatgcatatgcggctgcacaaagtaagaaagctttgga

SEQ ID NO: 90668 - DNA, 439 bp, Zea mays
caactagcaacatagaaagcacaatagtgtaccaacaatggcagctaaaatattttggctccttatgctccttggtctttctgcaagtgctgctacggcgaccattttcccacaatgctcacaagctcctatagcttcccttcttcccccgtacctctcaccaacggtgtcttcggtatgtgaaaacccaattcttcaaccctacaggatccaacaggcaatcgcagctggcatcttacctttatcacccttgttcctccaacaatcatcagccctattacagcagttacctttggtgcatttattggcacataacatcatggcacaacaactacaacaacttgtgctagcaaaccttgctgcctactctcagcaacagcagtttctttcattcaaccaactagctgcattgaactctgcttcttatttgcaacaacaa

SEQ ID NO: 90669 - DNA, 450 bp, Zea mays
cacgcatccgcagctaccaacatagaaagcacaatattttaccaacaatggcagctaagggatttcggctccttatgctccttggtctgtctgcaagtgctgctactgcgaccattttcccacaatgctcacaagctcctatagcttcccttcttcccacgtacctctcaccaacagtgtcttcggtatgtgaaaacccaattcttcaaccctacatgatccaacaggcaatctcagctggcatctaacctttatcacccttcttcctccaacaatcatcagccctattacatcacttacctttggtgcatttattggcacataacatcatggcacaacaactacaacaacttgtgctatcaaaccttgctgcctactctcagtaacagcagttactttcattcaaccaactatctgcattgaactctgcttcttatttgcaacaacaac

SEQ ID NO: 90670 - DNA, 390 bp, Zea mays
gataaatgtcaatcaatatattgattatttctaggaaacacatgccggtgtgagggcgccattatcgattacatctcatatgtaatctaaaagatggcacctccaacgatgggttgctgccacgacaaggcagggttcatcaaagagaactggctgtatggtagcaattgttgctgctgtaggaaggcagtgaccaatgggtaatgcacctacatacctgcaacaacaattgctgcaacagattgtaccagctctgactcagctagctgtggcaaaccctgctgcctacttgcaacagctgcttccattcaaccaactgactgtgtcgaactctgctgcgtacctacaacagcgacaacagctacttaatccactaccaatgcctaaccc

SEQ ID NO: 90671 - DNA, 422 bp, Zea mays
gtgttcggctcaccgcagcagccgccaaaggacgacgaggatggctccgccggcacggagattggactatggggtgggccgggaggatcggcacaggacatcacgacgacagaggcaccaaggcgtctgaacagcgtcaccattcgcgccggtattgccgacgactcgatcgagttcacttacactggcaaggacaggcagaggcgcacagctgggcgatgggatggacttggcggcaatgttcgaacgatcgatcttggcgacaacgaacacatcacggaggtgtcaggaacgtacggcacatttgaaggtgctactaccctaacctcgctcaggttcatcaccagcaccagagcctgaggcccatggggcaccgagaacgggacacgcttgtgcatcaccgcgcacatcggcagcagcgt

SEQ ID NO: 90672 - DNA, 380 bp, Zea mays
gaaacctcactgacagccccgtatttgacggccgtggccctgacgccagcctcgtgggtcgcgtacagggagtcgctacccagatgggcgacgtgcgccagttgtacaccgtcgtgttccaggagaggccgctcaagggctccacgctcgtcaccgaaggcgcgatgacagaagggtcagacgagtgggcgatctacggtggaactggagtgttcgcgatggcgagaggcgtcataaggagaacgtttcttgccgacacgagcggcgggaactccgacgagcttgccgtggaggttctctgcccggtgttccgcccggcggcgtttggctcatcgtcgtcacagccagcagcaaaggacatcagctccaccgtcgtcgtc

SEQ ID NO: 90673 - DNA, 446 bp, Zea mays
tagcaacatagaaagcacaatagtgtaccaacaatggcagccaaaatattttgcctcgttatgcgccttggtctttctgcaagtgctgctacggcgaccattttcccgcaatgctcgcaagctcctatagcttcccttcttcccccgtacctctcaccagcggtgtcttcggtatgtgaaaacccaattcttcaaccctacaggatccaacaggcaatcacagctggcatcttacctttatcacccttggtccttcaacaatcatcagccctattacatcaggtacctttggtgcatttattggcaccaaacattaaggcacaacaacttccaccacctgggctagccaaaccttgctgcctactttcaggcacagcagtttcttccattcaaccaactagctgcattgaactctgcttcttatttgcaacaacaacaactaccat

SEQ ID NO: 90674 - DNA, 435 bp, Zea mays
gcaacagcagtttcttccattcaaccaactagctgcattgaactctgctgcttattggcaacaacaacaactaccattcagccagctacctgctgcctacccccagcaatttcttccattcaaccaactggcagcattgaactctcctgcttatttacagcagcaacaactactaccattcagccagctagctggtgtgagccctgctaccttcttgatacaaccacagttgttgccgttctaccagcacgctgcgcctaacgctggcaccctcttacaactgcaacaattgctgccattcaaccaacttgctttgacaaacccagcagcgttctaccaacaacccatcattggtggtgccctcttttagatttcttatgagttatagttcaataataaagttttttgactgatgtttgtggcttcccagaaata

SEQ ID NO: 90675 - DNA, 318 bp, Zea mays
ggcgatgagattcccccctaattctcataaggaaaaggagagcgctgagaagcgccgggagaggcttcaacaggaggaagaactggctaagcacatggctgaggaggaggatgacgacttctaaattagctgccttttgagcaaccacttgcaattgtggacttgttcgaacgcctggttaaaccctgcctctagctactcgagtcatgcaaaaacactgaactttgaaattcatccactgtaatgttttgttgatcaggggtttctttaaattcaatacttgagttttaaaaaaaaatacaaccaacaagctaagac

SEQ ID NO: 90676 - DNA, 422 bp, Zea mays
gttttccgcatccacggtgccaggcgaccgccgccgcttccctactcacccttggccggcgacgacgagcgcccactacggcaggatgacgacgctcaggaacctcaagatcaagacgtcgacgtgcaagaggatcgtgaaggagctgcgctcgtacgagaaggaggtggagaaggaggctgccaagaccgccgacatgaaggagaagggcgccgatccctacgacctcaaacagcaggagaatgttttggctgagtcaaggatgatggtcccagactgccacaaacgacttgaaactgcactggctgacttgaaagcaacactggctgaactgaaggagtcaaatgagcaaggtgccgagattggagaagctgagagtacaatcgcagaagttgaagcagttgtcaagccagcaggagatt

SEQ ID NO: 90677 - DNA, 435 bp, Zea mays
attgagaccaactagcaacatagaaagcacaatagtgtaccaacaatggcagctaagatattttgcctccttatgctccttggtctttctgcaagtgctgctacggcgaccattttcccacaatgctcacaagctcctatagcttcccttcttcccccgtacctctcaccaacggtgtcttcggtatgtgaaaacccaattcttcaaccctacaggatccaacaggcaatcgcagctggcatcttacctttatcacccttgttcctccaacaatcatcagccctattacagcagttacctttggtgcatttattggcacaaaacatcagggcacaacaactacaacaacttgtgctagcaaaccttgctgcctactctcagcaacagcagtttcttccattcaaccaactagctgcattgaactctgcttcttat

SEQ ID NO: 90678 - DNA, 345 bp, Zea mays
tgagcattcagaaacacacctagcgaagcgcactagcaacgacctaacaacaatggctaccaggatattatccctctttgcgcttcttgccctttttgtgagcgcaacaaatgcgttcattattccacaatgctcacttgctcctagtgccattattccacagttcctcccttcagttacttcaatgggcttcgaacacccagctgtgcaagcctacaggctacaacaagcgcttggcggcgagcgtcttacaacaaccaattgcccaattacaacaacaatccttggcacatctaaccatacaaaccatcgcaacgcaacagcaacaacaatttctaccagcac

SEQ ID NO: 90679 - DNA, 438 bp, Zea mays
catatgccctattgcaacaaccatccttagtgaatctgtatctccaaagaatgacaggacaacaactacaacaacggttgcttccaacaattaatcaagtagttgcagcgaaccttgctgcttaccttcagcaacaacaatttcttccattcaatcaactagctggggtgaaccctgctgcttacttgcaggcacaacagctactaccattcaaccaacttgtcgggagccctgctgccatcttattgcagcaacagttgctgccattccgtctacaagttgttgcaaacattgctgctttcttgcaacaacaacaattgctgccattttacccacaggttgtgggaaacattaacgccttcttgcaacaacaacaattgctgccattctacccacaggatgtggcaaacattgtcgccttcttacaacaacagcaat

SEQ ID NO: 90680 - DNA, 443 bp, Zea mays
caacaagcaacatagaaagtggaatccagtagcaacaacagagcaacaatggcgaccgggatatgttccctccttatgctccttgctctttctgcatgtgttgctaacgcgacaattttccctcaatgctcacaagctcctatagcttcccttcttcccccataccttccatcaatgatagcttcagtatgtgaaaacccagctcttcagccctataggctccaacaagcaatcgcagcaagcaacatacctttatcacccttggtggttcaacaatcggcagccctatctttggtgcaatcattggtaccaaccattagggcacagcaacttgaacaacttgggctacccggtgatcaaccaagtagcttctgccaaaccttcttccctactctcagcaacaacaatttcttccattcaacccactgtctacacttgaccct

SEQ ID NO: 90681 - DNA, 367 bp, Zea mays
  unsure (1)..(367): unsure at all n locations
cagcctcagtcacccattcacatctctaccctagtgcgcttcccttataaaacctaggtcctcagagctccagacgcagtcggccgccgcagaccgggagtagccgacgcgccgtcactgaatcctcagatcacggctagccgtaatcacgacactctggtgactcccggcgagcagtgtaacatttttcttcaaccatgggccaagagaaaaactcacatcaacattgtggtcattggacatgtcgactctggcaagtcgaccaccactggncacctgatctacaagctcggcggtattgacaagcgtgtgattgagaggttcgagaaagaggccgcggagatgaacaagcggtcattcaagtatg

SEQ ID NO: 90682 - DNA, 289 bp, Zea mays
aagcaacatagaaaggggaatccagtagcaacaacagagcaacaatggcgaccaagagattttcggttcttatgctccttgctctttctgcatgtgttgctaacgcgacaattttccctcaatgctcacaagctcctatagcttcccttctttccccatacctttcatcaatgatagcttcagtatgtgaaaacccaacttttcagccctataggcttcaaccagcaatcgcaacaagccacatacctttattaaccttggtggttcaaccatcggcaggcctattttt

SEQ ID NO: 90683 - DNA, 461 bp, Zea mays
  unsure (1)..(461): unsure at all n locations
cgctccggaattcccgggccatcgcaacgcaacagcaacaacagttcctaccagcactgagccacctagccatggtgaaccctgtcgcctagttgcaagagcagctgcttgcatccaacccacttgctctagcaaacgtagttgcaaaccagcaacaacaacaactgcaacagtttctgccagcgcttagtcaactagccatggtgaaccctgccgcctacctacaacagcaacaactgctttcatctagcccgctcgctgtggccaatgcacctacataccttgcacangaattgttgcaacagattgtaccagctctaactcagctagctgtggcaaaccctgttgcctacttgcaacagctgcttccattcaaccaactaactatgtcgaactctgttgcgtacctacaacagcgacaacagttacttaatccattggcagtggctaacccattggtc

SEQ ID NO: 90684 - DNA, 305 bp, Zea mays
gttgcgcctaacgctggcaccctcttacaactgcaacaattgctgccatggaaccaacttgctttgacaaacccagcagtgttctaccaacaacccatcattggtggtgccctcttttagatttcttatgagttatagttcaataataaagttttttatctgatgtttgtggcttcccagaaataagaaagtacatttctagaaaaaaaaataaacaaagaaaaaattgaacatgtagactctggcaagtcgaccaccactggacacctgatctacaagctaggcttaattgacaagcgtgtgat

SEQ ID NO: 90685 - DNA, 438 bp, Zea mays
  unsure (1)..(438): unsure at all n locations
attattgagaccaactagcaacatagaaagcacaatagtgtaccaacaatggcagcgaaaatattttgcctccttatgctccttggtctttctgcaagtgctgctacggcgaccattttcccgcaatgctcgcaagctcctatagcttcccttcttcccccgtacctctcaccagcggtgtcttcggtatgtgaaaacccaattcttcaaccctacaggatccaacaggcaatcacagctggcatcttacctttatcacccttgttcctccaacaatcatcagccctattacatcagttacctttgggtgcatttattggcacanaacatcagggcacaacaactacaacaacttgtgctagcaaaccttgctgcctactctcagcaacagcagtttcttccattcaaccaactagctgcattgaactctgcttctta

SEQ ID NO: 90686 - DNA, 419 bp, Zea mays
aacggttgcttccaacaattaatcaagtagttgcagcgaaccttgctgctgaccttgagcaacaacaatttcttccattcaatcaactagctggggtgaaccctgctgcttacttgcaggcacaacagctactaccattcaaccaacttgtcgggagccctgctgccatcttattgcagcaacagttgctgccattccgtctacaagttgttgcaaacattgctgctttcttgcaacaacaacaattgctgccattttacccacaggttgtgggaaacattaacgccttcttgcaacaacaacaattgctgccattctacccacaggatgtggcaaacattgtcgccttcttacaacaacagcaattgctgccatttagccaactcgctttgacgaatcctaccaccttattgcatcag

SEQ ID NO: 90687 - DNA, 436 bp, Zea mays
  unsure (1)..(436): unsure at all n locations
gatctatgaaagaatgcatgtaacaagatctccagtctggtactgatgaagagacaggaagagaacacatagccaccatcaatcaagacaaagggaaaactaccattacctcaattggatttctggtttttgggctatcattggatttttggttaactgaaatgtgtaccttgcagtagctctatgtctctatatggcattatggtgtctgaaactggatcattatattttcatttgagtgaaattcttatcaaatgttgaaccttcaggctccagcttgatctgattcatgtttttttctagattaccatagttgatgaagcaaagaaattatacatgttatttgtccttggggctaatgtttccattatcttttctgggctacaatgaagtatttctcaaatttgcgcaagacattgngtcctggaattgatgg

SEQ ID NO: 90688 - DNA, 463 bp, Zea mays
cccgtccggaattcccgggatcacagctggcatcttacgcttatcaaccctggtccttccacaatcatcagccctattacatcagttaccttgggtgcatttattggcacaaaacatcaaggcacaacaactacaacaacttgtgctagcaaaccttgctgcctactctcagcaacagcagtttcttccattcaaccaactagctgcattgaactctgcttcttatttgcaacaacaacaactaccattcagccagctacctgctgcctacccccagcaatttcttccattcaaccaactggcagcattgaaactctcctgcttatttacagcagcaacaactactaccattcagccagctagctggtgtgagccctgctaccttcttgatacaaccacagttgttgccgttctaccagcacgctgcgcctaacgctggcaccctcttacaactgcaacaatt

SEQ ID NO: 90689 - DNA, 435 bp, Zea mays
caagtagcgacagctcgacaaagatttgtgagagtgatccggcgctgagaagagatggctaagatcgccgcagccgccgcggcggcggcggcgctgtgcttcgcggccctggtggccgtggccgtctgccaaggcgaggtcgagcggcagaggctcagggacctgcagtgctggcaggaggtccaggagagcccgctcgacgcgtgccgccaggtcctcgaccggcagctaaccggcggcggcgtcggcggcccgttccggtggggcaccgggctccggatgcggtgctgccagcagctccaggacgtgagccgcgagtgccgctgcgccgccatccggagcatggtcaggggctacgaggaggccatgccgcctctggagaaaggctggtggccacatgggcggcagcagcagccgccgccgcagggaggagga

SEQ ID NO: 90690 - DNA, 312 bp, Zea mays
cggacgcgtgggcgaagtcattccctcttcaagagggcatcatcagattgggcttattgattccggattacttcaggcaaggatcggagttgctctgaattgactgaaccatggcggcgacaatggcagtgaccaccatggtgaccaagaaccaggagagctggtcgtcattgcaagtcccggccgtggcattcccttggaagccaccaagccgtggcaagaaccgcgggcttgaatttccttggcgggccaaggtcggcaacgttcggcttaaccgggggcccggcgttcccggcgggccccaacccgcgg

SEQ ID NO: 90691 - DNA, 242 bp, Zea mays
cccacacgtacgtccagcgacatatacagtagaatccattagccaccattgagcaacagtatccgccaacatatttttcctccttatgcttcttgctctttctacatgtgttgctaacgcgacaaatgttcatcaatgcttacaagctcctatagcttcccatatttccccatacctttcatcaattattggctaaatatgtgaaaaccccactttttaaccctataagctttaacaagcaa

SEQ ID NO: 90692 - DNA, 423 bp, Zea mays
tgggcttcgaacacccagctgtgcaagcctataggctacaacaagcgcttgcggcgagcgtcttagaacaaccaattgcccaattacaacaacaatccttggcacatctaaccatacaaaccatcgcaacgcagcagcaacaagcactgagccacctagccgtggtgaaccctatcgcctacttgcaacaacagctgcttgcatccaacccacttgctttggcaaacgtagctgcataccaacaacaacaacagttgcaacagtttctaccagcgctcagtcaactagccatggtgaaccctatcgcctacctacaacagcaacaacttctttcatctagcccgctcgctatgggcaatgcacctacatacctgcaacaacagttgttgcaacaacagttgctgcaacaaattgtaccagctc

SEQ ID NO: 90693 - DNA, 434 bp, Zea mays
  unsure (1)..(434): unsure at all n locations
gaagagcaccctgatttttgtatcatggacccatttaaaaacatttacccgttgctggaccgtcttcaaatccaaaaaatccttgtccggttgcaagaacttggcactgaaggaaagccaaaacttcgagcaccgtattcttgcaaggttgacagttttcataatggtgaattggataagcatctagtagaagctaatttatccttcccactcattgtgaagccacaagtcgcttgtggagtcgctgatgcccacaatatggcactggtttttcagattgaagaatttagcaacctcagtgtgccccttcctgctgtgctacaggaatacgtggatcacggatccaagattttcaagttctatgtgatcggagacaaggttttctacgccgttagagactcaatgcccaacgcgcgcttnctgaagccgtcgtc

SEQ ID NO: 90694 - DNA, 430 bp, Zea mays
gcaacatagaaagtggaatacagtagcaacaatagagcaacaatggcgggcaagatggtgttccatccttatgctccttgctctttctgcatgtgttgctaacgcgaccatttttcctcaatactcacaagctcctatagctgcccttcttcccccataccttccatcaatgaccgcttcagtttgtgaaaacccagcccttcaaccctacaggctccaacaagcaatcgcaacaagcaacttacctttatcacccctgttctttcaacaatcgccagccctatctttggtgcagtcattggtacaaaccatcagggcacaacagctgcaacaactcgtgctaccagtgatcagccaagtagctctggcaaacctttctccctactctcagcaacaacaatttcttccattcaaccaactgtctacactg

SEQ ID NO: 90695 - DNA, 443 bp, Zea mays
ggaattcccgcagccagccacacatccgacaacatacaatgttgaattcagcattttcaatatagcaacaatgaccgcgaaaatgttctccatcctaatgctgctggctctttctacatctgttgctaacccgaccatttttcctcaatactcacattctcctatatctgtcctacttcccccataccttccatcaatgacctctacagatttcgaaaacccatccctacaaccctacattctccaacaatcaatcgcaacatgcatcttacctttatcacccctgatatctcaacatttcacaaccctatctttaatgcaatcattggtacaaaccatcacggcacatcagcttcaacaacttgatctaccattgatcagccaacttatctatacaaacctttctccctactctcaacaacatcaatttacttcattcaacc

SEQ ID NO: 90696 - DNA, 524 bp, Zea mays
  unsure (1)..(524): unsure at all n locations
ggaggaggaaggctgntgtcagtaaaccgacatatagcatagctctaccggtccggaattcccgggtcgacgccacgcgtccggaagctggtgcttgtggttcttgctttcattgctttagtatcaagtgtttcgggtaggcagacaggcggctgcagctgtggtcaacaacaaagccatgagcagcaacatcatccacaacaacatcatccacaaaaacaacaacatcaaccaccaccacaacatcaccagcagcagcaacaccaacaacaacaagttcacatgcaaccacaaaaacatcagcaacaacaagaagttcatgttcaacaacaacaacaacaaccgcagcaccaacaacaacaacaacaacaacagcaccaacaacaacatcaatgtgaaggccaacaacaacatcaccaacaatcacaaggccatgtgcaacaacacgaacagagccatgagcaacaccaaggacagagccatgagcaacaacatcaacaacaattccagggtcatgacaagcn

SEQ ID NO: 90697 - DNA, 389 bp, Zea mays
  unsure (1)..(389): unsure at all n locations
tgaaagtgctgatcgttgcccttgctctcctggcgctcgctgcgagcgccgcctacagtacaggcggcggctgtggctgccagacaccaccgtttcatctaccgcctccgttctatatgccgcctccgttctatctgccgccgcagcagcagccgcagccatggcaataccccactcaaccaccgcagctaagcccgtgccagcagttcggatcctgccggcgtcggcagcgtcggcagcccgttcctgggccagtgcgtcgagttcctgaggcaccagtgcagcccggcggcgacgccctacggctcgccacagtgccaggcgctgcagcagcagtgctgccaccagatcangcaagtggagccgctgcaccggtaccaggcgacata

SEQ ID NO: 90698 - DNA, 336 bp, Zea mays
tccggaattcccgggcttagcaccaatggcagccaagattttggccatcctggccctcctggctctttcagcaagcgttgctaccgcgagtatgattccacaatgctcacaacaatacctctctccggtgacagccgcgagatttgaatacccaactatacaatcctacaggctacaagaggccatcgcagcaagcatcttacggtcgttagcattgaccgtccaacaaccatatgccctattgcaacaaccattcctattgaatctatatctccaaagaatcgcagcacaacaactacaacaacagttgctttcaacaatcaatcaagtagttgc

SEQ ID NO: 90699 - DNA, 396 bp, Zea mays
  unsure (1)..(396): unsure at all n locations
gggtcttcagaccattagctttatctactccagagcgcagaagaacccgatcgacacgatgagggtgttgctcgttgccctcgctctcctggctctcgctgcgagcgccacctccacgcatacaagcggcggctgcggctgccagccaccgccgccggttcatctaccgccgccggtgcatctgccacctccggttcacctgccacctccggtgcatctcccaccgccggtccacctgccgncgccggtccacctgccaccgccggtccatgtgccgncgccggttcatctgccgncgncaccatgccactnaccctactcaaccgcccggcctcagcctcatccncagccacacccatgcccgtgccaacagccgcatccaagcccgtgccagct

SEQ ID NO: 90700 - DNA, 332 bp, Zea mays
  unsure (1)..(332): unsure at all n locations
ccgggtcgacccaagcgttcggaacttgcaacctttaaagccccattgtttacccaccattgccggccaaattttttgcctccgatcctcctggccttcttcaattctgctacggcaccattttcccgaatgctcgcaagctcctatagccttccttcttcccccgtacctctcaccagcggtgtcttcggtatgtgaaaacccaattcttcaaccctacaggatccaacaggcaatcgcagctggcatcttacctttatcacccttgttcctacaacaatcatcagccctattacaacagntacctttggtgcatttattggcacaaaaca

SEQ ID NO: 90701 - DNA, 293 bp, Zea mays
cagcaagcaacatagaaagtagaatccattagcaacaatagagcaacaatggcgaccaggatatgttccctccttatgctccttgctctttctacatgtgttgctaacgcgacaattttccctcaatgctcacaagctcctatagcttcccttcttcccccataccttccatcaattatagcttcagtatgtgaaaacccagctcttcaaccatataggcttcaacaagcaatcgcagcaagcaacatacctttatcgcccttggtgtttcaacaatcaccagccctatcttt

SEQ ID NO: 90702 - DNA, 425 bp, Zea mays
gttggcttctcctccccctccggttcgggttcgggttcgtgaggttctccggggttgggtttcgggggtgggcggatcgagatggcggcgtcggatgttgagtaccgctgcttcgtcggcggcctcgcctgggccacggacgaccactccctccacaacgccttcagcacctacggcgaggtcctcgagtccaagatcatcctcgatcgggagacgcagaggtcccgcggcttcggcttcgtcaccttctccacggaggaggcgatgcggaacgccatcgagggcatgaacggcaaggagctggacggccggaacatcaccgtcaacgaggcccagtcccgcggccgccgttgaagcggcggctgcggctaccgtggtggccgtggaggcggcggctacggcggtggctggcgccgtgatggcgg

SEQ ID NO: 90703 - DNA, 429 bp, Zea mays
gctcctatagcttcccttcttcccccgtacctctcaccaacggtgtcttcggtatgggaaaacccaattcttcaaccctacaggatccaacaggcaatcgcagctggcatcttacctttatcacccttgttcctccaacaatcatcagccctattacagcagttacctttggtgcatttattggcacaaaacatcagggcacaacaactacaacaacttgtgctagcaaaccttgctgcctactctcagcaacagcagtttcttccattcaaccaactagctgcattgaactctgcttcttatttgcaacaacaacaactaccattcagccagctatctgctgcctacccccagcaatttcttccattcaaccaactgacagcattgaactctcctgcttatttacagcagcaacaactactaccattc

SEQ ID NO: 90704 - DNA, 411 bp, Zea mays
caacaagcaacatagaaagtggaatccagtagcaacaacacagcaacaatggcgaccgagatattttccctccttatgctccttgctctttctgcatgtgttgctaacgcgacaattttccctcaatgctcacaagctcctatagcttcccttcttcccccataccttccatcaatgatagcttcagtatgtgaaaacccagctcttcagccctataggctccaacaagcaatcgcagcaagcaacatacctttatcacccttgttgtttcaacaatcgccagccctatctttggtgcagtcattggtacaaaccatcagggcacagcagctgcagcaactcgtgctacctgtgatcaaccaagtagctctggcaaacctttctccctactctcagcaacaacaatttctt

SEQ ID NO: 90705 - DNA, 437 bp, Zea mays
  unsure (1)..(437): unsure at all n locations
gagaccaacaagcaacatagaaagtggaatccagtagcaacaatagagcagcaatggggaccaagatactttccctccttatgctccttgctctttctgcatgtgttgctaacgcgacaattttccctcaatgctcacaagctcctatagcttcccttcttcccccataccttccatcaatgatagcttcagtatgtgaaaacccagctcttcaaccctataggctccaacaagcaatcgcagcaagcaacatacctttatcacccttgtttcaacaatcgccagccctatctttggtgcagtcattggtacaaaccatcaaggcacagcagctgcagcaactcgtgctacctgtgatcaaccaagtagctctggcaaacctttctccctactatcagcaacaacaatntcttccattcaaccaactatctacactg

SEQ ID NO: 90706 - DNA, 426 bp, Zea mays
cagaccattagctttatctactccagagcgcagaagaacccgatcgacaccatgagggtgttgctcgttgccctcgctctcctggctctcgctgcgagcgccacctccacgcatacaagcggcggctgcggctgccagccaccgccgccggttcatctaccgccgccggtgcatctgccaccttcggttcacctgccacctgcggtgcatctgccaccgccggtccacctgccgccgccagtccacctgccaccgccggtccatgtgccgccgccggttcatctgccgccgccaccatgccactaccctactcaaccgccccggcctcagcctcatccccagccacacccatgcccgtgccaacagccgcatccaagcccgagccagctgcagggaacctgcggcgttggcagcaccccgatcctg

SEQ ID NO: 90707 - DNA, 423 bp, Zea mays
atccctcctgcgcttctggccctttttgcaagcgcaacaaatgcgtccattattccgcaatgctcacttgctcctagttccattattccacagttcctcccaccagttacttcaatggccttcgaacacccagctgtgcaagcctataggctacaacaagcgattgcggcgagcgtcttacaacaaccaattgcccaattgcaacaacaatccttggcacatctaacaatacaaaccatcgcaacgcaacagcaacaacagttcctaccagcactgagccacctagccatggtgaaccctgtcgcctacttgcaacagcagctgcttgcatccaacccacttgctctaaccaacgtaagttgcaaccaagcaccacaacaactgcaacagtttctgccagcgcttagtcaactagccatggtg

SEQ ID NO: 90708 - DNA, 386 bp, Zea mays
ccggaattcccgggtcgacccacgcgtacgctaccgcagccattttcccacaatgctcacaagctcctatagcttcccttcttccccgatacgtctcaccagcggtgtcttcaatgtgtgaaaccccaattgttcaaccctacaggatccaacaggcaatcacaacacgcatcttaccattatcacccttgttcctccaacaaccgtcagccctattacagcagttacctttggtccatttggtggcacaaaacatcagggcacaacaactacaacaactcgtgctagcaaacctcgctgcatactctcagcaacatcagatgcttacattcaaccaactggctgcctggaactctgctgctcatttgcagcatcaattaccattc

SEQ ID NO: 90709 - DNA, 509 bp, Zea mays
  unsure (1)..(509): unsure at all n locations
gtagaaaggctgggctacgcaaagatgtaatgtcaacncgtccggaattcccgggctagatcgcgacggccgtcctcttttagatttcttatgagttatagttcaataataaagttttttgtctgatggtagtggcttcccagaaataagaaagtacatttctagattcttaaaaaaaaaaaaaaaaaaaaaaaaaaaaaaaaaaaaaaagggcggacgatctagaggatccaagcttacgtacccgtgcatgcgacgacatagctcttctatagtgtcacctaaattcaattcactggccgtcagattaaaacgtactgactgggaaaaccctgacgttacccaacttaatcaaacttgcagcacatccccatttcgccagctggcgtaataaccaatagtcctcaaccgatcgacctatccaacaggtgccacatctgaaatgtcaatgggaagcgccctgtaccagtgcattaagcacagccggtgtagtcggtacctcacacaca

SEQ ID NO: 90710 - DNA, 454 bp, Zea mays
  unsure (1)..(454): unsure at all n locations
cggaattcccggggcgaagcgcactagcaacgacctaacaccaatggctaccaagatattagccctccttgcgcttcttgccctttgagtgagcgcaacaaatgcgttcattattccacagtgctcacttgctcctagtgccagtattccacagttcctcccaccagttacttcaatgggcttcgaacatccagccgtgcaagcctacaggctacaactagcgcttgcggcgagcgccttacaacaaccaattgcccaattgcaacaacaatccttggcacatctaaccctacaaaccattgcaacgcaacaacaacaacaacagtttctgccatcactgagccacctagccgtggtgaacccttgtaactacttgcaacagcagctgcttgcattcaacccacttgctcntgcgaacgtagctgcataccagcaacaacaacagctgcaacag

SEQ ID NO: 90711 - DNA, 429 bp, Zea mays
cggacgcgtgggcggacgcgtgggcgcgcgcaagcagaggcgccgcatcgctcgtcagaagaaggctgtgaagatattcccacggccaactgctggccctcttcgccccattgtgcaatgccagactctcaagtacaacatgaagtcgagggctgggagaggatttacccttgaggagctgaaggctgccggcattccaaagaagcttgccccaaccattggcatttctgtggatcaccaccgcaagaacaaatatctcgagggactgcaggccaatgtccagaggcttaagacgtacaaggccaagctggttatcttcccaaggcgtgctcgcaaggccaatgccggcgactctactccggaggagcttgccacggccacccaggtccagggcgactacatgcctattactcgtggtgagaagcgctc

SEQ ID NO: 90712 - DNA, 355 bp, Zea mays
agcaagcaacatagaaagtagaatccattagcaacaatagagcaacaatggcgaccaggatattttccctccttatgctccttgctctttctacatgtgttgctaacgcgacaattttccctcaatgctcacaagctcctatagcttcccttcttcccccataccttccatcaattatagcttcagtatgtgaaaacccagctcttcaaccatataggcttcaacaagcaatcgcagcaagcaacatacctttatcgcccttgttgtttcaacaatcaccagccctatctttggtgcagtcattggtacaaaccatcagggcacaacagctgcagcaactcgtgctacctgtgat

SEQ ID NO: 90713 - DNA, 427 bp, Zea mays
cttcttttaacaacatccgaaactggattcggaacattgaacagcacgcctgtgatggcgtcaacaagattttggttggcaacaaggccgatatggacgaaagcaagagggctgtacctactgcaaaaggacaagcacttgctgatgagtacgggatcaagttttttgaaacgagtgccaagacaaacctgaatgtggagcaagtgtttttctccatcgcacgtgacatcaagcagaggcttgcggagactgattcaaagccagaggacaaggcaatcaaaattaacaagccagaccagggttccgaggcaccagctgcccagcgatctgcttgctgcggctcataagcagatgcacgatggccatagcctttggttatttgacattatttatttctcgcttggctgttataggaaggatttgaaag

SEQ ID NO: 90714 - DNA, 315 bp, Zea mays
cccacgcgtccgggaaaatggtcgccgtagcagcacttgcagaaataccaaggagcggaaggaggcaaaatattttcccgcaatgctcacaagctcctatagcttcccttcttcccccgtacctctcaccagcggtgtcttcggtatgtgaaaacccaattcttcaaccctacaggatccaacaggcaatcgcagctggcatcttacctttatcacccttgttcctccaacaatcatcagccctattacagcagttacctttggtgcatttattggcacaaaacattcagcacaacaactacaacaacttgtgct

SEQ ID NO: 90715 - DNA, 357 bp, Zea mays
aatccctcgtccaagagaagtgtgcatgcttggatcccacatgtgaggggccggaaaaatgggacttgactacatggatgttgaagctctcaagaaaatgaacaagaacaagaagcttgttaagaggcttgccaagaaagtccatgctttcttgggatcagaggccatcatcaagcagattccccgtctccttggtcctggtctcaacaagggcaggcaagttcccgaccctggttactcaccaggaaatccctcgagtccaaagtggaacgagactaaggcaaccgtcaagttccagctcaagaagggcctttgcatgggtgttcgccgtcgcaacttggcgatggaggagaagca

SEQ ID NO: 90716 - DNA, 412 bp, Zea mays
  unsure (1)..(412): unsure at all n locations
gtctcgccaagtcgccatgatgcagcaacccccgccgcagcagccgcagccgggcatggcgccgnctncgcctccgcaggctgctggcgggcagccaccgcagtggggtgggatcccgccgccgatggcgcagcagtacggcgcaccgnctccgcagcagcctccggcgatgtggggccagcctccgccgcaggcgcactacgggcaggcaccaacccctcagcagtactacgccgcgccgccggtgccgggtgcaggcgccagccgcccccgctgcggcggacgaggtcaggacgctctggatcggggacctgcaatactggatggacgagaactacgtcttcgggtgcttttcgaacactggggaggttcaaaatgtgaagctcatccgtgacaagaattcanggcagct

SEQ ID NO: 90717 - DNA, 329 bp, Zea mays
  unsure (1)..(329): unsure at all n locations
agaaagcacaatagtggaccaacaatggcagctaaaatattttgccttcctaagctcgggggggtttctgcaagtgctggtacggcgaccattttcccacaatgctcacaagctcctatagcttaccttcttcccccgtacctctcaccaacggtgtcttccgtatgtgaaaacccaattctttaaccctacaggatccaacaggcaatcgcaactggcatcttaactttatcacccttggtccctccaacaatcattcagccctattacagcagttacctttggtgcatctattggcacanaacatcanggcacaacaactacaacaa

SEQ ID NO: 90718 - DNA, 470 bp, Zea mays
taccggtccggaatgaccgacgcgtccggcaattagctcatcgactccagattggagaactcgacaccatgaaggtgctgatcgtggccctggctctcctggcgctcgctgcgagcgccgcctccagtacaagcggcggctgtggctgccagacaccaccgtttcatctaccgcctccgttctatatgccgcctccgttctatctgccgccgcagcagcagccgcagccatggcaataccccactcaaccaccgcagctaagcccgtgccagcagttcggatcctgcggcgtcggcagcgtcggcagcccgttcctgggccagtgcgtcgagttcctgaggcaccagtgcagcccggcggcgacgccctacggctcgccacagtgccaggcgctgcagcagcagtgctgccaccagatcaggcaggtggagccgctgcaccggtaccaggcgacatacggtgtggtcctg

SEQ ID NO: 90719 - DNA, 441 bp, Zea mays
ccaactagcaacatagaaagcacaatagtgtaccaacaatggcagccaaaatattgtgcttccttatgctccttggtctttctgcaagtgctgctaccgcaaccattttcccacaatgctcacaagctcctatagcttcctttcttcccccatacctctcaccagcggtgtcttcagtatgtgaaaacccaattcttcaaccctacaggatccaacaggcaatcgcagcaggcatcttacctttatcacccttgttcctccaacaaccgtcagccctattacagcagttacctttggtgcatttgttggcacaaaacatcaaggcacaacaactacaacaacttgtgctaggaaaccttgctgcctactctcagcaacagcagtttcttccattcaaccaactggctgcattgaactctgctgcttatttgcaacaacaac

SEQ ID NO: 90720 - DNA, 445 bp, Zea mays
ccacgcgtccgagcacacctagcgaagcgcactagcaacgacctaacaacaatggcttccaagacattatccctccttgcgcttcttgccctttttgtgagtgcaacaaatgcgttcattattccacaatgctcacttgctccgagtgccattattccacagttcctccctccagttacttcaatgggcttcgaacacccagctgtgcaagcctataggctacaacaagcgcttgcggcgagcgtcttagaacaaccaattgcccaattacaacaacaatccttggcacatctaaccatacaaaccatcgcaacgcagcagcaacaagcactgagccacctagccgtggtgaaccctatcgcctacttgcaacaacagctgcttgcatccaacccacttgctttggcaaacgtagctgcataccaacaacaacaacagttgcaac

SEQ ID NO: 90721 - DNA, 442 bp, Zea mays
caactagcaacatagaaagcacaatagtgtaccaacaatggcagccaaaaggttatgcttccttatgctccttggtctttctgcaagtgctgctaccgcaaccattttcccacaatgctcacaagctcctatagcttcctttcttcccccatacctctcaccagcggcgtcttcagtatgtgaaaacccaattcttcaaccctacaggatccaacaggcaatcgcagcaagcatcttacctttatcacccttgttcctacaacaaccgtcagccctattacagcagatacctttggtgcattcgttggcacaaaacatcaaggcacaacaactacaacaacttgtgctaggaaaccttgctgactactctcagcaacagcagttacttgcattcaaccaactggctgcattgaactctgctgcttatttgcaacaacaacta

SEQ ID NO: 90722 - DNA, 437 bp, Zea mays
  unsure (1)..(437): unsure at all n locations
caacgggtcaccttcttgtttgagaggtattcgttgcttctttgtatcggcatcgtgtgggcctttgcagctatccttactgctgcgggtgcatatgaccatgcttcacctaagacacaacagcactgtcgcactgataagtctttcctcatgtcatcggcaccatggattaaaattccattaccattcgaatggggtccttcaatattcactgctggtcattcatttggaatgatgggtgctgtacttgttgcagtcttcgagtcaactggagcacactttgctactgctcgtctagcgggtgctacaccacctacagcttatgtccttagtcggagcgttggcttgcaaggtattggaatgtacttggaggggatctttagtgttccagcaggttcatctgtatcagttgaaaacattggcctncttgggctgac

SEQ ID NO: 90723 - DNA, 354 bp, Zea mays
gaccaactagcaacatagaaagcacaatagtgtaccaacaatggcagccaaaatatttggctgccttatgctccttggtctttctgcaagtgctgctaccgcaaccattttcccacaatgctcacaagctcctatagcttcctttcttcccccatacctctcaccagcggtgtcttcagtatgtgaaaacccaattcttcaaccctacaggatccaacaggcaatcgcagcaggcatcttacctttatcaacccttgttcctccaacaaccgtcagcccctattacagcagttacctttggtgcatttggttggcacaaaacatcaaagcacaacaactacaacaacttgtgct

SEQ ID NO: 90724 - DNA, 302 bp, Zea mays
gcttatttacagcagcaacaactactaccattcagccagctagctggtgtgagccctgctacgttcttgacacaaccacaattgttgccgttctaccagcacgctgcgcctaacgctggcaccctcttacaactgcaacaattgctgccattcaaccaacttgctttgacaaacccaacagcattctaccaacaacccatcattggtggtgccctcttttagatttcttatgagttatagttcaataataaagttttttgtctgatgtttgtggcttcccagaaataagaaagtacatttct

SEQ ID NO: 90725 - DNA, 347 bp, Zea mays
cagctagcaacatagaaagcacaatagtgtaccaacaatggcagctaaaatattttggctccttatgctccttggtctttctgcaagtgctgctacggcgaccattttcccacaatgctcacaagctcctatagcttcccttcttcccccgtacctctcaccaacggtgtcttcggtatgtgaaaacccaattcttcaaccctacaggatccaacaggcaatcgcagctggcatcttacctttatcacccttgttcctccaacaatcatcagccctattacagcagttacctttggtgcatttattggcacaaaacatcagggcacaacaactacaacaacttgtgc

SEQ ID NO: 90726 - DNA, 322 bp, Zea mays
cttccttatgctccttggtctttctgcaagtgttgcttaccgcaaccattttcccacaatgctcacaagctcctatagcttcccttcttcccccatacctctcaccagcggtgtcttcaatgtgtgaaaccccaattgttcaaccctacaggatccaacaggcaatcgcaacaggcatcttaccattatcacccttgttccttcaacaaccgtcagccctattacagcaattacctttggtccatttggtggcacaaaaccataaggcacaacaactacaacaacttgtgctagcaaaccttgctgcatactctcagcaaca

SEQ ID NO: 90727 - DNA, 409 bp, Zea mays
ctttctgcaagtgctgctacggcgaccattttcccgcaatgctcgcaagctcctatagcttcccttcttcccccgtacctctcaccagcggtgtcttcggtatgtgaaaacccaattcttcaaccctacaggatccaacaggcaatcacagctggcatcttacctttatcacccttgttcctccaacaatcatcagccctattacatcagttacctttggtgcatttattggcacaaaacatcagggcacaacaactacaacaacttgtgctagcaaaccttgctgcctactctcagcaacagcagtttcttccattcaaccaactagctgcattgaactctgcttcttatttgcaacaacaacaactaccattcagccagctacctgctgcctacccccagcaatttc

SEQ ID NO: 90728 - DNA, 383 bp, Zea mays
caatatggtacctaatcttacctcaaatgttgctgataataatatatcagcgtttccctctggatcaacatatctgcaaagtccaatgtatggttgtctggatgactcttctggtttattgcaaaatacaggagagaatgatccgacaactagaacttttgttaaggtttacaagtcaggatcagtggggagatccttggacatcacccggttctctaattatgctgaacttcgagaggaactgggtcagatgttcggcattaagggtcagttggacgaccctgatagatcaggctggcagcttgtatttgtcgacagggagaacgatgtgcttctccttggagacgacccgtgggagtcatttgtgaatagtgtatggtaca

SEQ ID NO: 90729 - DNA, 410 bp, Zea mays
attgtcagcattcaaaaacacaccaagcgaagcgcactagcaacgacctaacaccaatggctaccaagatattagccctccttgcgcttcttgcccttttagtgagcgcaacaaatgcgttcattattccacagtgctcacttgctcctagtgccattattccacagttcctcccaccagttacttcaatgggcttcgaacatccagccgtgcaagcctacaggctacaactagcgcttgcggcgagcgccttacaacaaccaattgcccaattgcaacaacaatccttggcacatctaaccctacaaaccattgcaacgcaacaacaacaacaacaacagtttctgccatcactgagccacctagccgtggtgaaccctgtcacctacttgcaacagcagctgcttgca

SEQ ID NO: 90730 - DNA, 438 bp, Zea mays
caagcaacatagaaagtagaatccattagcaacaatagagcaacaatggcgaccaagagattttccctccttatgctccttgctctttctacatgtgttgctaacgcgacaattttccctcaatgctcacaagctcctatagcttcccttcttcccccataccttccatcaattatagcttcagtatgtgaaaacccagctcttcaaccatataggcttcaacaagcaatcgcagcaagcaacatacctttatcgcccttgttgtttcaacaatcaccagccctatctttggtgcagtcattggtacaaaccatcagggcacaacagctgcagcaactcgtgctacctgtgatcaaccaagtagctctggcaaacctttctccctactctcagcaacaacaatttcttccattcaaccaactgtctacactgaaccct

SEQ ID NO: 90731 - DNA, 255 bp, Zea mays
ctttggtccatttggtggcacaaaacatcagggcacaacaactacaacaacttgtgctagcaaaccttgctgcatactctcagcaacatcagtttcttccattcaaccaactggctgcattgaactctgctgcttatttgcaacaacaattaccattcagccagctagttgctgactacccccagcaatttcttccattcaaccaactagcagcattgaactctgctgcttatttacagcagcaacaactactac

SEQ ID NO: 90732 - DNA, 431 bp, Zea mays
gcagcatagaaagcacaatagtgtaccatcaatggcagccaaaatattttgcctacttatgctccttggtctttctgcaagtgctgctacggcgaccattttcccgcaatgctcgcaagctcctatagcttcccttcttcccccgtacctctcaccagcggtgtcttcggtatgtgaaaacccaattcttcaaccctacaggatccaacaggcaatcgcagctggcatcttacctttatcacccttgttcctccaacaatcatcagccctattacaacagttacctttggtgcatttattggcacaaaacatcagggcacaacaactacaacatcttgtgctagcaaaccttgctgcctactctcagcaacagcagcttcttccattcaaccaactaggctcattgaactctgcttcttatttgcaacaac

SEQ ID NO: 90733 - DNA, 413 bp, Zea mays
tatcgtcccggaattcccggggcaacaacaattaccattcagccagctagttgctgcctacccccagcaatttcttccattcaaccaactagcagcagtgaactctgctgcttatttacagcagcaacaactactaccattcagccagctagctgatgtgagccctgctgccttcttgacacaacaacagttgttgccgttctacctgcacgctatgcctaacgctggcaccctcttacaactgcaacaattgctgccattcaaccaacttgctttgacaaactcaacagtgttctaccaacaacccatcattggtggtgccctcttttagattgcttatgagttatagttcaataatgaagttttttggatgatgtttgtggcgtcccagaaataagaaagtacatttctaa

SEQ ID NO: 90734 - DNA, 438 bp, Zea mays
cggtccggaattgacggatggcactccacgcagactgttcagaagagcaagattctcttcattgcctggtccccatcgacattccgtatgcgtggtgagatgctgtactgcacgtcgaaggaccgcatcaagtacgagctcgacgggtttcactacgaaatccatgcgaccgacccattgtaggtggacatggatgttctccgggagcgggctcactgaagctggttctgcttttgaagggacctgtggagggccgtgaaccttcaatcagatgcgaatctaattgtcaacgatgaagcatccgccgtggtgcctgttaataagttcctgtaagcgtatcatttagtcgctatgcttgatactagctggcgaagcgctatctaagctgaaaacgaagcacgatttgcaaactcgttatatcgcggtattgatgatact

SEQ ID NO: 90735 - DNA, 431 bp, Zea mays
  unsure (1)..(431): unsure at all n locations
cccgactgttgaagattcttatcctgagcgaccaggggaaccagattgtccttatttattgaatagtagatgtaagtttaaatctaaatgcaagttcaaccatccgaaggatatggtgaatgcattaggaacaggaacaaacaatgaatctctaattgctgatagcgctgtcttaccagtgaggccttctgaacccatttgtgtgttctatgcaaaaacaggcaaatgcaaatttggtgccatttgcaagttcaatcatccaaaagatattaagacatcacctttgattgcaaaggaaaccatatatacagcaacaactgatgcagcagatgccccgaccgaggcgtgtaacgcanaggggcttcctataagacaaggtgaagtggattgctcgttttatatgaagacaggcagctgcaaatatggttcta

SEQ ID NO: 90736 - DNA, 418 bp, Zea mays
ccattttcccacaatgctcacaagctcctatagcttcccttcttcccccgtacctctcacgcagcggtgtcttcggtatgtgaaaacccaattcttcaaccctataggatccaacaggcaatcgcagctggcatcttacctttatcacccttgttcctccaacaatcatcagccctattacagcagttacctttggtgcatttattggcacaaaacatcagggcacaacaactacaacaacttgtgctagcaaaccttgctgcctactctcagcaacaacagtttcttccattcaaccaactagctgcattgaactctgcttcttatttgcaacaacaacaactaccattcagccagctatctgctgcctacccccagcaatttcttccattcaaccaactgacagctttgaactctt

SEQ ID NO: 90737 - DNA, 432 bp, Zea mays
ggaattcccgggctgagccacctagccgtggtgaaccctgtcacctacttgcaacagcagctgcttgcatccaacccacttgctctggcgaacgtagctgcataccagcaacaacaacagctgcaacagtttatgccagtgctcagtcaactagccatggtgaaccctgccgtctacctacaactactttcatctagcccgctcgcggtgggcaatgcacctacgtacctacaacaacagttgctgcaacaaattgtaccagctctgactcagctagctgtggcaaaccctgctgcctacttacaacagttgcttccattcaaccaactggctgtgtcaaactctgctgcgtacctacaacagcgacaacagttacttaatccattggcagtggctaacccattggtcgctacctttctgcagcagcaacaa

SEQ ID NO: 90738 - DNA, 442 bp, Zea mays
tagagggttcattttcggtcctcctatcgctttagccatcggcgcaaaatttgtgcctttgaggaagccgaagaagttgccaggcgaggtgatctccgaagagtattctttggaatatggaactgacaagatagaaatgcatgttggagctgtacaggccaacgaccgggctcttgtagtcgatgatcttattgctaccggtggaacactctgtgcagctgtcaaacttattgaacgtgttggagcaaaggttgttgagtgtgcttgtgtcattgaattgccagaactgaagggtcgagacaagcttggggacaggccagtttttgtccttgtggaagcagacgcctgagcggaatttgggaattctcagagagtttggtgccgtcgatgctccctctctggagacaacacagtttcccatgttaccatgttggctaatttc

SEQ ID NO: 90739 - DNA, 425 bp, Zea mays
aaagcacaatagtgtaccaacaatggcagccaaaatattttgcttccttatgctccttggtctttctgcaagtgttgctaccgcaaccattttcccacaatgctcacaagctcctatagcttcccttcttcccccatacctctcaccagcggtgtcttcaatgtgtgaaaacccaattgttcaaccctacaggatccaacaggcaatcgcaacaggcatcttaccattatcacccttgttcctccaacaaccgtcagccctattacagcagttacctttggtccatttggtggcacaaaacatcagggcacaacaactacaacaacttgtgctagcaaaccttgctgcatactctcagcaacatcagtttcttccattcaaccaactggctgcattgaactctgctgcttatttgcaacaacaat

SEQ ID NO: 90740 - DNA, 432 bp, Zea mays
accggtccggaattcccggggttgcggtagcaacacttgcagaaagaccaaggagcataaggaagcaaaatattttggctgccattgttggtacactattgtgctttctatgttgctaccgcaaccattttcccacaatgctcacaagctcctatagcttcccttcttcccccatacctctcaccagcggtgtcttcaatgtgtgaaaccccaattgttcaaccctacaggatccaacaggcaatcgcaacaggcatcttaccattatcacccttgttcctccaacaaccgtcagccctattacagcagttacctttggtccatttggtggcacaaaacatcagggcacaacaactacaacaacttgtgctagcaaaccttgctgcatactctcagcaacatcagtttcttccattcaaccaactggctgca

SEQ ID NO: 90741 - DNA, 458 bp, Zea mays
aaaacacaccaagcgaagcgcactagcaacaacctaacaccaatggctaccaagatatgagccctccttgcgcttcttgcccttttagtgagcgcaacaaatgcgttcattattccacagtgctcacttgctcctagtgccattattccacagttcctcccaccagttacttcaatgggcttcgaacatccagccgtgcaagcctacaggctacaactagcgcttgcggcgagcgccttacaacaaccaattgcccaattgcaacaacaatccttggcacatctaaccctacaaaccattgcaacgcaacaacaacaacaacaacagtttctgccatcactgagccacctagccgtggtgaaccctgtcacctacttgcaacagcagctgcttgcatccaacccacttgctctggcgaacgtagctgcataccagcaacaacaacagctgcaacagtt

SEQ ID NO: 90742 - DNA, 425 bp, Zea mays
gaagtcctgtgaagtacgacaagaaaattttggagacaatcgggaagaagctgaaaaagagcaatggcgctcttgacattgttgactttggtgaatccgatgatgaaaagcctgagaaactggaagcattgatcgctgctgttaacagcagtgatagcagtcacattgttcatgtccctcctggtgaaaatgctctctctgatgtcctcctaagcactcctatatttactggtgaagaaggtggaagtggttttgctgcttacgcagcagctgccgtagctactggagcatctggatttgaatttggtgtggacccaaatgtagatccagagttggcactcgccctgcggttgtctatggaagaagaacgagcaaggcaagaggctattgcaaaaaaggctgcataagatacatctaataccgaa

SEQ ID NO: 90743 - DNA, 428 bp, Zea mays
gtggaatccagtagcaacaatagagcaacaatggcgaccaagatactttccctccttatgctccttgctctttctgcatgtgttgctaacgcgacaattttccctcaatgctcacaagctcctatagcttcccttcttcccccataccttccatcaatgatagcttcagtatgtgaaaacccagctcttcaaccctataggctccaacaagcaatcgcagcaagcaacatacctttatcacccttgtttcaacaatcgccagccctatctttggtgcagtcattggtacaaaccatcaaggcacagcagctgcagcaactcgtgctacctgtgatcaaccaagtagctctggcaaacctttctccctactatcagcaacaacaatttcttccattcaaccaactatctacactgaaccctgctgctta

SEQ ID NO: 90744 - DNA, 428 bp, Zea mays
gcagcatagagagcacaatagtgtaccatcaatggcagccaaaatatattgcttccttaggctccgtggtctttctgcaagtgttgctaccggaaccattttcccacaatgctcacaagctcctatagcttcccttctttccccatacctctcaccagcggtgccttcaatgtgtgaaaccccaattgttcaaccctacaggatccaacaggcaatcgcatcaggcatcttaccattatcacccttgttcctccaacaaccgtcagccctattacagcagctacctttggtccatttggtggcacaaaacatcacggcacagcagctacaacaacttgtgctagcaaaccttgctgcatactctcagcaacatcagttgcttacattcaaccaactggctgcattgaactctgctgcttatttgcaac

SEQ ID NO: 90745 - DNA, 429 bp, Zea mays
cgggagggggagaaggagccccaggcgccccccgtcgccaagtgggagccctccgtcgaggggtacctccgattcctcgtcgacagcaagctcgtcttccagacgctcgaagccatcgtcgagcgcgccgccgtcccgtggttggtgtgtgtttcagatgcagagtttcggaatactgggctggagagatcagaggcgctgaaaaatgatctggaatggttcaggcaacagggccacacagttccagaaccatcggcccctggcaccacatacgcttctctactggaagagctgtctgaggaggacccccaggcctttatctgccatttctataacgtgtactttgctcatactgctggaggccgaatgattggcaaaaaggtttccgagaagattctgaacatcgaagagctggagttctacaagtgg

SEQ ID NO: 90746 - DNA, 428 bp, Zea mays
caattagctcatcgactccagattggagaactcgacaccatgaaggtgctgatcgttgcccttgctctcctggcgctcgctgcgagcgccgcctccagtacaagcggcggctgtggctgccagacaccaccgtttcatctaccgcctccgttctatatgccgcctccgttctatctgccgccgcagcagcagccgcagccatggcaataccccactcaaccaccgcagctaagcccgtgccagcagttcggatcctgcggcgtcggcagcgtcggcagcccgttcctgggccagtgcgtcgagttcctgaggcaccagtgcagcccggcggcgacgccctacggctcgccacagtgccaggcgctgcagcagcagtgctgccaccagatcaggcaggtggagccgctgcaccggtaccaggcgacata

SEQ ID NO: 90747 - DNA, 397 bp, Zea mays
acaatagtgtaccaacaatggcaaccaaaatattttgcttccttatgctccttggtctttctgcaagtgctgctaccgcgaccattttcccgcaatgctcacaagctcctatagcttcccttcttcccccatacctctcaccagcggtgtcttcagtatgtgaaaacccaattcttcaaccctacaggatccaacaggcaatcgcagcaggcatcttacctttatcacccttgttcctccaacaaccgtcagccctattacagcagttacctttggtgcatttgttggcacaaaacatcagggcacaacaactacaacaacttgtgctagcaaaccttgctgcctactctcagcaacagcagtttcttccattcaaccaactggctgcattgaactc

SEQ ID NO: 90748 - DNA, 446 bp, Zea mays
gagaccaacaagcaacatagaaagtggaatccagtagcaacaatagagcaacaatggcgaccaagatactttccctccttatgctccttgctctttctgcatgtgttgctaacgcgacaattttccctcaatgctcacaagctcctatagcttcccttcttcccccataccttccatcaatgatagcttcagtatgtgaaaacccagctcttcaaccctataggctccaacaagcaatcgcagcaagcaacatacctttatcacccttgtttcaacaatcgccagccctatctttggtgcagtcattggtacaaaccatcaaggcacagcagctgcagcaactcgtgctacctgtgatcaaccaagtagctctggcaaacctttctccctactatcagcaacaacaatgtcttccattcaaccaactatctacactgaaccctgct

SEQ ID NO: 90749 - DNA, 400 bp, Zea mays
tttcagcattcaaaaacacaccaagcgaagcgcactagcaacgacctaacaccaatgggtaccaagatattagccctccttgcgcttcttgcccttttagtgagcgcaacaaatgcgttcattattccacagtgctcacttgctcctagtgccattattccacagttcctcccaccagttacttcaatgggcttcgaacatccagccgtgcaagcctacaggctacaactagcgcttgcggcgagcgccttacaacaaccaattgcccaattgcaacaacaatccttggcacatctaaccctacaaaccattgcaacgcaacaacaacaacaacaacagtttctgccatcactgagccacctagccgtggtgaaccctgtcacctacttgcaacagcagc

SEQ ID NO: 90750 - DNA, 417 bp, Zea mays
  unsure (1)..(417): unsure at all n locations
gagatcaaaggcctttgcatgaagttatatttgcatgtgacgataagccaaagcttctgagtcagttaacctctctcctcggggagcttggtcttaatatccaagaagcacatgcatattcgacgagtgatggctattccttggacatctttgttgttgatggctgggagtatgaggctgacattctccaaagtgcattgagggaaggcgttgataaaataaagtacagagcatggccgttggtaccgtcgatgtctgctaggatggatcaccaaccattggaggtttctccttcatctgactttgtccagataccagctgatgcagctgatgtttgggaagtcgatctcaggcttctcaaatttgaacaaaaattagcgtctggatcatntggtgatctataccatgggacgtact

SEQ ID NO: 90751 - DNA, 412 bp, Zea mays
cgaccggccacctcttcccaattgcatcgcatccccaggacttgccggccggtccagagacgtacggcgataatgggggcttctgaggtgtggtcatcggtgccagcctggctggcgatcgccgtcggcttggcggccgtggtttcctcgtcggaggctcacgtattctacgccggtggccacgacggctgggtccttgaccccaccgagagctacaaccattgggccgggcgcagccggttccaagtgaacgacaccatcgtgttcacgcacgaggagggcgtcgactctgtgctgctggtgaccgagcaggacttcgacacgtgcaacacgcgcatacccggtccggcggctccaagccgtcggcagcagcggcagttcggagcgttcggtgttcaagctcgaccggtcc

SEQ ID NO: 90752 - DNA, 412 bp, Zea mays
gcagtgttgacagcagctcaagcaggtggagccgcagcaccggtaccaggcgatcttaggcttggggctacaatccatcctgcagcagcagccgcatagcggccaggtcgcggggctgttggcggcgcatatagcgcagcaactgacggcgatgtgcggcctgcagcagacgactgcatgcccctacgctgctgccggcggtgtcccccactgaagaaactatgggctgtagtatagccgctggctagctagctagttgagtcatttagcggcgaagattgagtaataatgtgtgacgcatgaccatgggtggcagtgtcagcgtgagcaatgacctgaatgaacaattgaaatgaaaagaaaaaagtattgctccaaatcaaaacgttcggtggtcaaactaaaaagggcg

SEQ ID NO: 90753 - DNA, 431 bp, Zea mays
atttataccaactagcaacatagaaagcacaatagtgtaccaacaatggcaggcaaaaggttttgcctccttatgctccttggtatttctgcaagtgctgctacggcgaccattttcccgcaatgctcacaagctcctatagcttcccttcttcccccgtacctctcaccagcggtgtcttctgtatgtgaaaacccaattcttcaaccctacaggatccaacaggcaatcgcagctggcatcttacctttatcacccttgttcctccaacaatcatcagccctattacagcagttacctttggagcatttattggcacaaaacatcagggcacaacaactacaacaacttgtgctagcaaaccttgctgcctactctcagcaacagcagtttcttccattcaaccaactagctgcattgaactctgcttc

SEQ ID NO: 90754 - DNA, 430 bp, Zea mays
aacaacaacaacaattgcaacagtttctaccagcgctcagtcaactagccatggtgaaccctgccgcctacctacaacagcaacaactgatttcatctagccctctcgctgtggttaatgcacctacatacctgcaacaacagttgctgcaacagattgtaccagctctgactcagctagctgtggcaaaccctgctgcctacttgcaacagctgcttccattcaaccaactgactgtgtcgaactctgctgcgtacctacaacagcgacaacagttacttaatccactagcggtggctaacccattggtcgctgccttcctacagcagcaacaattgctgccatacaaccagttctctttgatgaaccctgccttgttgtggcagcaacccatcgttggaggtgccatcttttagattacatatgagat

SEQ ID NO: 90755 - DNA, 457 bp, Zea mays
gcaacatagaaagtggaatccagtagcaacaatagagcaacaatggcgaccaagatattttccctgcttatgctccttgctctttctacatgtgttgctaacgcgacaattttccctcaatgctcacaagctcctatagcttcccttcttcccccataccttccatcaattatagcttcaatatgtgaaaacccagctcttcaaccatataggcttcaacaagcaatcgcagcaagcaacatacctttatcgcccttgttgtttcaacaatcgccagccctatctttggtgcagtcattggtacaaaccatcagggcacaacagctgcagcaactcgtgctacctctgatcaaccaagtagctctggcaaacctttctccctactctcagcaacaacaatttcttccattcaaccaactgtctacactgaaccctgctgcttaattgcagcaacaac

SEQ ID NO: 90756 - DNA, 391 bp, Zea mays
aagaaatccatcgagaggccgtcgacaggggaattaatggcgtcgtcgtctagcagcaggcaccggcgcctcatcctcgcagccgccgtcctgctctccgtgctcgcggctgccagcgccagcgccgggacctcctgcgtgccggggtgggccatcccgcacaacccgctcccgagctgccgctggtacgtgaccagccggacctgcggcatcgggccgcgcctaccgtggccggagctgaagaggagatgctgccgggagctggcggacatcccggcgtactgccggtgcacggcgctgagcatcctcatggacggcgcgatcccgccgggcccggacgcgcagctggagggccgcctagaggacctgccgggctgcccgcgggaggtgc

SEQ ID NO: 90757 - DNA, 417 bp, Zea mays
gtcagaagctcagatactgatctcactgatccagtatggctatggcaaaggcaggcgcgccgagggtctcggcggcccagctggtgactctcgggctatcactcctctgcgctgtcgccggcccggccgacgcgcagaactgcggctgccagccaaacgtatgctgcagcaagtatggctactgcggcacgaccgacgagtactgcggcgacgggtgccagtcgggcccgtgccgctcgggcggcggcggcagcagtggcggcggtggtgcgaacgtggctagcgtcgtcaccggctccttcttcaacggcatcaagagccaggccgggagcggctgcgagggcaagaacttctacacccggagcgcgttcctgagcgccgtcaaggcgtacccaggcttcggccatggcgggtcgc

SEQ ID NO: 90758 - DNA, 452 bp, Zea mays
cccaactatacaatcctacatgctacatgaggccatcgtagcaagcatcttacggtcaggagcattaaccctccaacagccatatgccctattgcaacaaccatccttagtgcatctgtatctccaaagaatcgcgacacaacaactacaacaacagttgctaccaacaatcaatcaagtagttgcagcgaaccttgctgcttatctccagcaacaacaatttcttccattcaatcaactagctggggtgaaccctgctgtctacttgcaggcacaacaactactaccatttaaccaacttgtcgggagccctgatgccttcttactgcaacaacagcttctgccattccatctgcaagctgtggaaaacattgcttctttcttgcgacaacaacaattggtgccattttacccacaggttgtgggaaacattaatgccttcttgcaacagc

SEQ ID NO: 90759 - DNA, 431 bp, Zea mays
gcgctcagtcaactagccatggtgaaccctgccgcctacctacaacagcaacaactgatgtcatctagccctctcgctgaggttaatgcacctacatacctgcaacaacagttgctgcaacagattgtaccagctctgactcagctagctgtggcaaaccctgctgcctacttgcaacagctgcttccattcaaccaactgactgtgtcgaactctgctgcgtacctacaacagcgacaacagttacttaatccactagcggtggctaacccattggtcgctgccttcctacagcagcaacaattgctgccatacaaccagttctctttgatgaaccctgccttgttgtggcagcaacccatcgttggaggtgccatcttttagattacatatgagatgtactcgataatggtgccctcatagcggcatgt

SEQ ID NO: 90760 - DNA, 443 bp, Zea mays
  unsure (1)..(443): unsure at all n locations
cccacgcgtccgcaccaagcgaagcacattagcaacaacctaacaacaatggctaccaagatattatccctccttgcgcttcttgcgctttttgcgagcgcaacaaatgcgttcattattccacaatgctcacttgctccaagttccattattacacagttcctcccaccagttacttcaatgggcttcgaacacccagctgtgcaagcctataggctacaacaagcaattgcggcgagcgtcttacaacaaccaatttcccagttgcaacaacaatccttggcacatctaacaatacaaaccatcgcaacgcaacagcaacaacaattcctaccagcactgagccacctagccatggtgaaccctgccgcctacttgcaacagcagttgcttgcatcanacccacttgctctggcaaacgtagttgcaaaccagccacaaca

SEQ ID NO: 90761 - DNA, 428 bp, Zea mays
gcaacatagaaagcacaatagtgtaccaacaatggcagccaaaatattttgcctccttatgctcctgggtatttctgcaagtgctgctacggcgaccattttcccgcaatgctcacaagctcctatagcttcccttcttcccccgtacctctcaccagcggtgtcttcggtatgtgaaaacccaattcttcaaccctacaggatccaacaggcaatcgcagctggcatcttacctttatcacccttgatcctccaacaatcatcagccctattacagcagttacctttggtgcatttattggcacaaaacatcagggcacaacaactacaacaacttgtgctagcaaaccttgctgcctactctcagcaacagcagtttcttccattcaaccaactagctgcattgaactctgcttcttaattgcaac

SEQ ID NO: 90762 - DNA, 465 bp, Zea mays
accggtccggaattcccgggagaccaactaccaacatagaaagcacaatagtgtaccaacaatggcagccaaaatattttgcctccttatgctccgtggtctttctgcaagtgctgctacggcgaccatttttccgcaatgctcgcaagctcctatagcttcccttcttaccccgtacctctcaccagcggtgtcttcggtatgtgaaaacccaattcttcaaccctacaggatccaacaggcaatcacagctggcatcttacctttatcacccttgttcctccaacaatcatcagccctattacatcagttacctttggtgcatttattggcacaaaacatcagggcacaacaactacaacaacttgtgctagcaaaccttgctgcctactctcagcaacagcagtttcttccattcaaccaactagctgcattgaactctgcttcttatttgcaacaacaaca

SEQ ID NO: 90763 - DNA, 384 bp, Zea mays
gctggtgtgagccctgctacttcttgatacaaccacagctgttgccgttctaccagcaggctgcgcgctaacgctggcaccctcttacaactgcaacaattgctgccattcaaccaacttgcttcgacaaacccagcagcgttctaccaacaacccatcattggtggtgccctcttttagatctcttatgagccatagttcaatcatacagttttttgactgatgtttgtggcttcccagaaataagaaagtccatgcttaaaaaaaaaagataccactattaccattcatccagacaaatactgactactctaaggctcaacaaatctcgtgcattcaaccaattggtcgctactatcacaagctgcttatttgcagcattca

SEQ ID NO: 90764 - DNA, 425 bp, Zea mays
aatcgcagcaagcaacatacctttatcgcccttgttgtttcaacaatcaccagccctatgtttggtgcagtcattggtacaaaccatcagggcacaacagctgcagcaactcgtgctacctgtgatcaaccaagtagctctggcaaacctttctccctactctcagcaacaacaatttcttccattcaaccaactgtctatactgaaccctgctgcttatttgcagcaacaactattaccatttagccagctagctactgcctactctcagcaacaacaacttcttccatttaaccaattggccgcactgaaccccgctgcttatttgcagcagcaaatactactgccatttagcgagctagctgcagcaagtcgtgcttccttcttgacacagcaacagttgctgcctttctacaagcagtttg

SEQ ID NO: 90765 - DNA, 443 bp, Zea mays
ccggaattcccgggcaacaacaactgctttcatctagcccgctcgctgtgggcaatgcacctacatacctgcaacaacaattgttgcaacagattgtaccagctctgactcaactagctgtggcaaaccctgttgcctacttgcaacagctgcttccattcaaccaactgactctgtcgaactctgctgcgtacctacaacagcgacaacagttacttaatccattggtagtggctaacccattggtcgccgccttcctacagcagcaacaattgctgccatacaaccagttctctttgatgaatcctgtcttgtcgaggcagcaacccatcgttggaggtgccatcttttagattacatatgagatgtactcgataatggtgccctcataccgacgtgtgtttcctagaaataatcaatatattgaatgaagattatctccg

SEQ ID NO: 90766 - DNA, 465 bp, Zea mays
  unsure (1)..(465): unsure at all n locations
cggaattcccgggattttgagcattcagaaacacacctagcgaagcgcactagcaacgacctaacaacaatggcttccaagacattatccctccttgcgcttcttgccctttttgtgagtgcaacaaatgcgttcattattccacaatgctcacttgctccgagtgccattattccacagttcctccctccagttacttcaatgggcttcgaacacccagctgtgcaagcctataggctacaacaagcgcttgcggcgagcgtcttagaacaaccaattgcccaattacaacaacaatccttggcacatctaaccatacaaaccatcgcaacgcagcagcaacaagcactgagccacctagccgtggtgaaccctatcgcctacttgcaacaacagctgcttgcattcaacccacttgcnttggcaaacgtagctgcataccaacaacaacaacagttgcaacag

SEQ ID NO: 90767 - DNA, 532 bp, Zea mays
gagtttagggagagttgattcacgaacccgcctagtagtatcctcctcggattcccgggtcgacccacgcgttcggcgccgctggagacgatccggacgcacttgatggtcggcagcatcggcgtcgactccagggccggggtgttccagtggatcatgcagaacgaagggtggaccggcctgtttcgcggcaacgccgtcaacgtactgcgcgtcgttccgagcaaggctatcgagcatttcacctatgacacgggcaacaagttcctaacccccaagggcgacgagccgtccaagatcccgatccccactacgatggttgccggagctctagccggattcgcctgaaccttgtgcacctaccccatggagctgatcaagaccagggtcaccatcgagaaggacgtatacgacaacgtctcgcacgcgttcgagaagatcctacgcgacgagggcccgtcggagctgtaccgtgggctgacacccaacctggatcgcgttgtgccctacgcgggctgtaacttctacggct

SEQ ID NO: 90768 - DNA, 452 bp, Zea mays
attgagaccaactagcaacatagaaagcacaatagtgtaccaacaatggcagctaaaatgttttgcctccttatgctccttggtctttctgcaagtgctgctacggcgaccattttcccacaatgctcacaagctcctatagcttcccttcttcccccgtacctctcaccaacggtgtcttcggtatgtgaaaacccaattcttcaaccctacaggatccaacaggcaatcgcagctggcatcttacctttatcacccttgttcctccaacaatcatcagccctattacagcagttacctttggtgcatttattggcacaaaacatcagggcacaacaactacaacaacttgtgctagcaaaccttgctgcctactctcagcaacagcagtttcttccattcaaccaactagctgcattgaactctgcttcttatttgcaacaacaacaact

SEQ ID NO: 90769 - DNA, 193 bp, Zea mays
gcaacatttgttgccgttctacctgcacactgcgcctaacgttggcaccctcgtacaactgcaacaattgctgccattcgaccaacttgctttgacaaacccagcagtgttctaccaacaacccatcattggtggtgccctcttttagattgcttatgagttatagttcaataataaagttttttttgctgat

SEQ ID NO: 90770 - DNA, 402 bp, Zea mays
gcaacatacaaagcacaatagtgtaccaacaatggcagccaaaatattttgcctacttatgctccttggtctatctgcaagtgctgctacggcgaccattttaccgcaacgctcgcaagctcctatagcttcccttctttccccgtacctctcaccagcggcgtcttcggtatgtgaaaacccaattcttcaaccctacaggatccaacaggcaataacagatggcatcttacatctatcacccttgatccttcaacaatcatcatccctattacatcagttacctttggtgcatttattggcacacaacatcagggcacaaccactacaacaactcgtgctagcaaaccttgctgcctactctcagcatcagcagtttcttccattcaaccaactagctgc

SEQ ID NO: 90771 - DNA, 433 bp, Zea mays
caagtgcgcaacctcgggagcacaaaatgggatgaccacgaagtggttaaggttattctggagagcccttattttccttaaccctactcaagtacaattgattcgtggcaatcctagatatacacaaatgacccccgaggaagtcatcgggaattttgttagttttgaatgcatgattaagggctccaagaagatcatcgagcttgatgagccttccacatccgaggcgcaacccgtggccttcaaggcaacggaggaggagtctacaccaagtagacaaccaattgacgcctccaagctcgacaacgaggagatggccctaatcatcaaaagcttccggcaaatcctcaagcaacggaaggggaaggactacaaatcccgttccaagaaggtttgctacaagtgtggtaagcccggtcactttattgctaaa

SEQ ID NO: 90772 - DNA, 433 bp, Zea mays
ctagcaacatagaaagcacaatcgtgtaccgacaatggcagctaaaacatttggcctcggtatgctccttggtcttactgcaagtgctgctacggcgaccattttcccacaatgctcacaagctcctatagcttaccttcttaccccgtacctttcaccaacggtgccttcagtatgtgaaaacccaattcttgaaccctacaggatccaacaggcaatcgcagctggcatcttacctttatcacccttgatcctccaacaatcatcagccctattacagcagttacctttggtgcatttattggcacaaaacatcagggcacaacaactacaacaacttgtgctagcaaaccttgctgcctactctcagcaacagcaagttcttccattcaaccaactagctgcattgaactctgcttcttatttgcaacac

SEQ ID NO: 90773 - DNA, 391 bp, Zea mays
cccaactatacaatcctacatgctacatgaggccatcgtagcaagcatcttacggtcatgagcattaaccctccaacagccatatgccctattgcaacaaccatccttagtgcatctgtatctccaaagaatcgcgacacaacaactacaacaacagttgctaccaacaatcaatcaagtagttgcagcgaaccttgctgcttatctccagcaacaacaatttcttccattcaatcaactagctggggtgaaccctgctgtctacttgcaggcacaacaactactaccatttaaccaacttgtcgggagccctgatgccttcttactgcaacaacagcttctgccattccatctgcaagctgtggaaaacattgcttctttcttgcgacaa

SEQ ID NO: 90774 - DNA, 408 bp, Zea mays
tagcaacatagaaagcacaatagtgtaccaacaatggcagccaaaatattttgcctcctgatgctgcttggtctttctgcaagtgctgctacggcgaccattttcccgcaatgctcgcaagctcctatagcttcccttcttcccccgtacctctcaccagcggtgtcttcggtatgtgaaaacccaattcttcaaccctacaggatccaacaggcaatcacagctggcatcttacctttatcacccttgttcctccaacaatcatcagccctattacatcagttacctttggtgcatttattggcacagaacatcagggcacaacaactacaacaacttgtgctagcaaaccttgctgcctactctcagcaacagcagtttctttcattcaaccaactagctgcattg

SEQ ID NO: 90775 - DNA, 447 bp, Zea mays
attgagaccaactagcaacatataaagcacaatagtgtaccaacaatggcagccaaaatattttgcttccttatgctccttggtctttctgcaagtgttgctaccgcaaccattttcccacaatgctcacaagctcctatagcttcccttcttcccccatacctctcaccagcggtgtcttcaatgtgtgaaaccccaattgttcaaccctacaggatccaacaggcaatcgcaacaggcatcttaccattatcacccttgttcctccaacaaccgtcagccctattacagcagttacctttggtccatttggtggcacaaaacatcagggcacaacaactacaacaacttgggctagcaaaccttgctgcatactctcagcaacatcaagttcttccattcaaccaactggctggcatggactcttgtgcttaattgcaaccacca

SEQ ID NO: 90776 - DNA, 438 bp, Zea mays
cacgaatcgccgacactccaacccggaagagccaacgaggtgactccgcgccccggtcatgggtgacagccaatactccttctctcttaccactttcagcccgtcgggaaagcttgtgcagatagagcacgcgctcacggctgtcggatccgggcagacctccctagggatcaaagctgccaacggtgtagtgattgccaccgagaagaaactgccttctattttagtggatgaaacatctgtgcaaaagattcaggcactaacaccaaatattggagttgtctatagtgggatgggtccagattttcgtgttctggtgagaaaaagtcgaaagcaggcacagcagtattatcggttgtacaaggagcatatacctgtaacacagcttgtgcgggagactgctgctgtgatgcaggagttcacacagtcaggtggtgc

SEQ ID NO: 90777 - DNA, 389 bp, Zea mays
agcaacatagaaagcacaatagtgtaccaacaatggcagccaaaatattttgcctccttatgctccttggtctttctgcaagtgctgctacggcgaccattttcccgcaatgctcgcaagctcctatagcttcccttcttcccccgtacctctcaccagcggtgtcttcggtatgtgaaaacccaattcttcaaccctacaggatccaacaggcaatcgcagctggcatcttacctttatcacccttgttcctccaacaatcatcagccctattacaacagttacctttggtgcatttattggcacaaaacatcagggcacaacaactacaacaacttgtgctagcaaaccttgctgcctactctcagcaacagcagtttcttccattc

SEQ ID NO: 90778 - DNA, 497 bp, Zea mays
accggttcggaattcccgggcagaaacacaccaagcgacgctacctagcgacgacttaacaacaatggctaccaagatattagccctgcgtgcgcttgttgccctttctgtgagcgcaacatatgcgtgcattattccacaatgctcacttgctcgtagtgccattataccacagttcctccgaccagttacttcaatgggcttcgaacacctagctgtgcaagcctacaggctacaacaagcgcttgcggcgagcgtcttacaacatccaattaaccaattgcaacaacaatccttggcacatctaaccatacaaaccatcgcaacacaacagcaacaacagttcctaccagcactgagccaactagatgtcgtgaaccctgtcgcctacttgcaacagcaggtgcttgcatgcaacccacttgctctggcaaacgtagctgcataccaacaacaacaacaattgcaacagtatctgccagcgctcagtcaactag

SEQ ID NO: 90779 - DNA, 342 bp, Zea mays
ccaactagcaacatagaaagcacaatagtgtaccaacaatggcagccaaaatattttgcgtccttatgctccttggtctttctgcaagtgctgctacggcgaccattttcccgcaatgctcgcaagctcctatagcttcccttctttccccgtacctctcaccagcggtgtcttcggcatgtgaaaacccaattcttcaaccctacaggatccaacaggcaatcgcagctggcatcttacctttatcacccttgcttctgcaacaatcatcagccctattacaacacgtacctttggtgcatttattggcacaaaacatcatggcacaacaactaccacaac

SEQ ID NO: 90780 - DNA, 387 bp, Zea mays
tgaagattgtcatcaagacctgtggcactaccaagctcctgctcacaattccaaggatcgtagagcttgctgaagagctgtctatgcctcttgctgctgtgaagtactcccgcgggacgttcatctttcctggcgcacagccagccccccaccggagcttctccgaggaagttgctgtacttaaccgatactttgggggcctgaagtctggtggcaatgcttatgtgattggagatgcagcaagaccaggacagaagtggcacatctactacgccactgagtacccagagcaaccaatggtcaaccttgagatgtgcatgactggtctggacacgaagaaagcttcagtcttcttcaagactaatgctgatggcaacacaacatgtg

SEQ ID NO: 90781 - DNA, 451 bp, Zea mays
ccaactagcaacatagaaagcacaatagtgtaccaacaatggcagccaaaatattttgcgctccttatgctccttggtctttctgcaagtgctgctacggcgaccattttcccgcaatgctcgcaagctcctatagcttcccttcttcccccgtacctctcaccagcggtgtcttcggtatgtgaaaacccaattcttcaaccctacaggatccaacaggcaatcacagctggcatcttacctttatcacccttgttcctccaacaatcatcagccctattacatcagttacctttggtgcatttattggcacaaaacatcagggcacaacaactacaacaacttgtgctagcaaaccttgctgcctactctcagcaacagcagtttcttccattcaaccaactagctgcattgaactctgcttcttatttgcaacaacaacaacttccat

SEQ ID NO: 90782 - DNA, 242 bp, Zea mays
ggtggaccagcagctaaggcccttcggcccaaattcaacgtgtttgtcaaaaatgtatgtgctcatctgggagtagctgtgccacacattgagttgaagcatgtgattgctgctacaattggtcttaagggtcttggaagcctcctttttattttgagcagctctctcggtgcttatctcctgctgctgtaccttgctttgatcactcctatcatccatgacttctacaactacgatatgga

SEQ ID NO: 90783 - DNA, 358 bp, Zea mays
attagctttatctactccagagcgcagaagaacccgatcgacaccatgagggtgttgctcgttgccctcgctctcctggctctcgctgcgagcgccacctccacgcatacaagcggcggctgcggctgccagccaccgccgccggttcatctaccgccgccggtgcatctgccacctccggttcacctgccacctccggtgcatctcccaccgccggtccacctgccgccgccggtccacctgccaccgccggtccatgtgccgccgccggttcatctgccgccgccaccatgccactaccctactcaaccgccccggcctcagcctcatccccagccacacccatgcccgtgccaac

SEQ ID NO: 90784 - DNA, 101 bp, Zea mays
attggtggtgccctcttttagatttcttatgagttatagttcaataataaagttttttgtctgatgtttgtggcttcccagaaataagaaagtacatttct

SEQ ID NO: 90785 - DNA, 459 bp, Zea mays
  unsure (1)..(459): unsure at all n locations
tgctgatcgttgcccttgctctcctggcgctcgctgcgagcgccgcctccagtacaagcggcggctgtggctgccagacaccaccgtttcatctaccgcctccgttctatatgccgcctccgttctatctgccgccgcagcagcagccgcagccatggcaataccccactcaaccaccgcagctaagcccgtgccagcagttcggatcctgcggcgtcggcagcgtcggcagcccgttcctgggccagtgcgtcgagttcctgaggcaccagtgcagcccggcggcgacgccctacggctcgccacagtgccaggcgctgcagcagcagtgctgccaccagatcaggcaggtggagccgctgcaccggtaccaggcgacatacggtgtggtcctgcagtccttcctgcagcagcagccgcagggcgagctcgcggcgctgatggcggnccaagtagcgc

SEQ ID NO: 90786 - DNA, 389 bp, Zea mays
gaagatcctcgtgatgctgaggaggcaattgctggacgggatggatacaactttgatggacaccgtctaagagtggaggctgctcatggtggtagaggtaatgcttactcgcatgatcgttcaagtggctctggtggcggtggtggagcacgtcgtggtgtgtcgagacactcagagtatcgtgttcttgtcactggactgccttcttatgcatcatggcaggatttaaaggatcatatgcggaaggctggtgatgttcgtttctctgaagtgtatcgcgaaggcggcggcaccgtaggaattgtggactacacaaattatgatgatatgaaatatgctataaagaagctggatgatactgaattcacgaacgcctttgggcgaaccta

SEQ ID NO: 90787 - DNA, 421 bp, Zea mays
caactagcatcatagaaagcacaatagtgtaccaacaatggcagccaaaatattttgctgccttatgctccttggtctttctgcaagtgttgctaccgcaaccattttcccacaatgctcacaagctcctatagcttcccttcttcccccatacctctcaccagcggtgtcttcaatgtgtgaaaccccaattgttcaaccctacaggatccaacaggcaatcgcaacaggcatcttaccattatcacccttgttccttcaacaaccgtcagccctattacagcagttacctttggtccatttggtggcacaaaacatcagggcacaacaactacaacaacttgtgctagcaaaccttgctgcatactctcagcaacatcagtttcttccattcaaccaactggctgcattgaactctgct

SEQ ID NO: 90788 - DNA, 424 bp, Zea mays
  unsure (1)..(424): unsure at all n locations
attgataccaactagcaacatacatagtgaagtacactagcaacatcttagcaccaatgggagccaagatttttgccctccttgccctccttgctctttcagcaagcgctgctacctcgacttttattccacaatgctcacaacaatacctctctccggtgacagccgcgggatttcaatacccaactatacaatcctacatggtacaagaggccatccaagcaagcatcttacggtcattagcattaaccctccaacaaccatatgctctattgcaacagccatccttagtgcatctgtatctccaaagaatcgcggcacaacaactacaacaacagttgctaccaacaatcaatcaagtagttgcagcgaaccttgctgcttacctncagcaacaacagtttcttccattcaatcaactaac

SEQ ID NO: 90789 - DNA, 205 bp, Zea mays
atccaatccagatcagcagaccgacactgcgtacagcggatcgctgaacagaacagcaggaagatggtcatcgttctcttcgtgtgcctggctctgtcagctgccagcgcctctgcaatgcagatgccctgcccctgtgcggcgctgcagggcttgcacggacctggcgccggcctgacgacgatgatgtgcgccggtgcgctgt

SEQ ID NO: 90790 - DNA, 426 bp, Zea mays
ctgaggttgccaaagaggcgtctgacatggtgttggctgacgacaattttagcaccatggtttctgcagtcggtgaaggaagatcgatctacaacaacatgtaagctttcataagatacatgatttcgtcaaacattggtgaagtcgcttctatattcctaacttccgccctgggcattcatgagggtttgattcccgtccaacttctatgggtcaatctagttaccgacaggcccaccgcaactgctctaggtttcaatccgcctgacaaggacatcatgaacaagccacctatgacgagcgacgactcactgatcactccctggatcttgttccactacctggtgattggcctttacgttgggatggcgaccgatggcatcttcggcatatggtacacacatgggtctttcatgggccatgacc

SEQ ID NO: 90791 - DNA, 427 bp, Zea mays
accggttcggaattcccggggtgccacatgtgcaaccggaggaacgatttctggtgggtcgcattggtccaaaagagtataggctatacagggtgattgtcagatatggttatcgcgatgtgcagaatgatgacctgtagttcgagaaggagctagtcagcaacattgcagagttcatccgcagcagtggggaatatgacaagaatggcttcgtcgaggacgcacataagcccttcgagaagctgtccaccatcagtactggaatcaatatgttggaagaggatggagaagttgatgcacatgtatcccctcataaggagatagacccacacaatgcggcacccaagcgaaagaaagccaggttcatgataccaaagagtgctcatgtggacagtgaggtgcgccgcgagctgcaggagctcatgga

SEQ ID NO: 90792 - DNA, 292 bp, Zea mays
ttcccggtcgacccacgcgtacgctcggcacgcaggcagaggcagcatagctgcagccaactccatccatcctcggtcccctcctcgctgcgcttgctcggcggattcctcctccctctaccgtccccgttcccgtgcacttgcggcgcgcgtgctcgcccgagatggcatacgccagatctggtgtcgctgtgaatgacgagagcatgctcaagttcgtcgagctgcactcgaagaggctgcaccggttcctaactttcaagattgacgacaagttcatggtgatcgttgt

SEQ ID NO: 90793 - DNA, 363 bp, Zea mays
cgcaaattgcaccaagaaatccatcgagaggccgtcgacaggggaattaatggcgtcggcgtctagcagcagccaccgccgcctcatcctcgcagccgccgtcctgctctccgtgctcgcggctgccagcgccagcgccgggacctcctgcgtgccggggtgggccatcccgcacaacccgctcccgagctgccgctggtacgtgaccagccggacctgcggcatcgggccgcgcctcccgtggccggagctgaagaggagatgctgccgggagctggcggacatcccggcgtactgccggtgcacggcgctgagcatcctcatggacggcgcgatcccgccgggcccggacgcgcagctgga

SEQ ID NO: 90794 - DNA, 440 bp, Zea mays
aaaatattttgcctccttatgctccttggtctttctgcaagtgctgctacggggaccattttcccgcaatgctcgcaagctcctatagcttcccttcttcccccgtacctctcaccagcggtgtcttcggtatgtgaaaacccaattcttcaaccctacaggatccaacaggcaatcacagctggcatcttacctttatcacccttgttcctccaacaatcatcagccctattacatcagttacctttggtgcatttattggcacaaaacatcagggcacaacaactacaacaacttgtgctagcaaaccttgctgcctactctcagcaacagcagtttcttccattcaaccaactagctgcattgaactctgcttcttatttgcaacaacaacaactaccattcagccaggtacctgctgcctacccccagcaatttct

SEQ ID NO: 90795 - DNA, 442 bp, Zea mays
atatcttggtagccattggtgttagccctccttgcgcttcttgcccttttagtgagcgcaacaaatgcgttcattattccacagtgctcacttgctcctagtgccagtattccacagttcctcccaccagttacttcaatgggcttcgaacatccagccgtgcaagcctacaggctacaactagcgcttgcggcgagcgccttacaacaaccaattgcccaattgcaacaacaatccttggcacatctaaccctacaaaccattgcaacgcaacaacaacaacaacagtttctgccatcactgagccacctagccgtggtgaaccctgtcacctacttgcaacagcagctgcttgcatccaacccacttgctctggcgaacgtagctgcataccagcaacaacaacagctgcaacagtttatgccagtgctcagtcaactag

SEQ ID NO: 90796 - DNA, 468 bp, Zea mays
tcggaattcccgggcagaaacacaccaagcgaagcgcactagcaacaacctaacaacaatggctaccaagatattatccctccttgcgcgtcttgcgctttttgcgagcgcaacaaatgcgtccattattccacaatgctcacttgctcctagttccattattccacagttcctcccaccagttacttcaatggccttcgaacacccagctgtgcaagcctataggctacaacaagcgattgcggcgagcgtcttacaacaaccaattgcccaattgcaacaacaatccttggcacatctaacaatacaaaccatcgcaacgcaacagcaacaacagttcctaccagcactgagccacctagccatggtgaaccctgtcgcctacttgcaacagcagctgcttgcatccaacccacttgctctagcaaacgtagttgcaaaccagcaacatcaacaactgcaacagtt

SEQ ID NO: 90797 - DNA, 472 bp, Zea mays
taccgttccggaattcgacggcacgcatcagacgacaacgcaacagcaacaacagttcctaccagcactgagccacctagccatggtgaaccctgccgcctacttgcaagagcagctgcttgcatccaacccacttgctctggcgaacgtagttgcaaaccagcaacaacaacagctacaacagtttctgccaacgctcagtcaactagccatggtgaaccctgccgcctacgtacaacaacaacaactgctttcatctagcccgctcgctgtgggcaatgcacctacatacctgcaacaacaattgttgcaacagattgtaccagctctgactcaactagctgtggcaaaccctgttgcctacttgcaacagctgcttccattcaaccaactgactctgtcgaactctgctgcgtacctacaacagcgacaacagttacttaatccattggtagtggctaacccattggtc

SEQ ID NO: 90798 - DNA, 452 bp, Zea mays
cactcgtccggccggcgcctccacttcgcgttctcgcctcatctcctcccgctcaggatccggcggcgaaggtaaggcaagatgtacaccgcgaggaagaagatccagaaggataagggccttgagccctccgagttcgaggactccgtcgcccaggctttcttcgacctggagaacggtaaccaggagctcaagagcgacctcaaggacctttacatcaacggtgctatccagctggatgttgccgggagcaggaaggctgttgtgatccacgtcccataccgcttgcgtaaggccttcaggaagatccatgtcaggatcgtcagggagctggagaagaaattcagcggcaaggatgtggtaattgttgccacaaggaggatcgtgaggccgcccaagaagggttcagctgttcagcgccctcgcaccaggactctgactgctgtccatga

SEQ ID NO: 90799 - DNA, 453 bp, Zea mays
cacgcggccgacagtgctcacttgctcctagtgccattattccacagttcctcccaccagttacttcaatgggcttcgaacacctagctgtgcaagccaacatgcaacaacaagcgcttgtggcgagcgtcttacaacaaccaattgcccaattgcaacaacaatccttgccacatctaacaatacaagccatcacaacgcaacagcaacaacagttcctaccagcactgatccacctatccatggtgaaccctgccgcctacttgcaagagcagctgcttgcatccaacccacttgctctggcgaacgtagttgcaaaccagcaacaacaacagctacaacagtttctgccaacgctcagtcaactagccatggtgaaccctgccgtctacgtacaacatcatcaactgctttcatctagcccgctcgctgtgggcaatgcacctacatacc

SEQ ID NO: 90800 - DNA, 428 bp, Zea mays
  unsure (1)..(428): unsure at all n locations
cttagcaccaatggcagccaagatttttgccatccttgccctccttgctctttcagcaagcgttgctaccgcgactattattccacaatgctcacaacaatacctgtctgcggtgacagccgcgagatttgaatacccaactatacaatcctacaggctacaagaggccatcgcagcaagcatcttacggtcgttagcattgaccgtccaacaaccatatgccctattgcaacaaccatccttaatgaatctatatctccaaagaatcgcagcacaacaactacaacaacagttgcttccaacaatcaatcaagtagttgcagcgaaccttgctgcttacctncagcaacaacaatttcttccattcaatcaactagctggngtgaaccctgctgcttacttgcaggcacaacagctactaccattca

SEQ ID NO: 90801 - DNA, 355 bp, Zea mays
catagaaagcacaatagtgtaccaacaatggcagctaaaatattttgcctccttatgctgcttggtctttctgcaagtgctgctacggcgaccattttaccacaatgctcacaagctcctatagctacccttattcccccgtacctatcaccaacggtgtcttcagtatgtgaaaacccaattcttaaaccctacaggatccaacaggcaatcgcagctggcatcttacctttatcacccttgttcctccaacaatcatcagccctattacagcagttacctttggtgcatttattggcacaaaacatcagggcacatcaactacaacaacttgggctagcaaaccttgctgcct

SEQ ID NO: 90802 - DNA, 422 bp, Zea mays
gaagtacactagcaacatcttagcaccaatgggagccaagatttttgccctccttgcccgccttgctctttcagcaagcgctgctacctcgacttttattccacaatgctcacaacaatacctctctccggtgacagccgcgggatttcaatacccaactatacaatcctacatggtacaagaggccatccaagcaagcatcttacggtcattagcattaaccctccaacaaccatatgctctattgcaacagccatccttagtgcatctgtatctccaaagaatcgcggcacaacaactacaacaacagttgctaccaacaatcaatcaagtagttgcagcgaaccttgctgcttacctccagcaacaacagtttcttccattcaatcaactagctggggtgaaccctgctatctacttgc

SEQ ID NO: 90803 - DNA, 422 bp, Zea mays
caactagcatcatacatagtgaagtacactagcaacatcttagcaccaatgggagccaagatttttgccctccttgccctccttgctctttcagcaagcgctgctacctcgacttttattccacaatgctcacaacaatacctctctccggtgacagccgcgggatttcaatacccaactatacaatcctacatggtacaagaggccatccaagcaagcatcttacggtcattagcattaaccctccaacaaccatatgctctattgcaacagccatccttagtgcatctgtatctccaaagaatcgcggcacatcaactacaacaacagttgctaccaacaatcaatcaagtagttgcagcgaaccttgctgcttacctccagcaacaacagtttcttccattcaatcaactagctggggt

SEQ ID NO: 90804 - DNA, 446 bp, Zea mays
attcagaaacacaccaagcgaagctcactagcaacgacctaacaacaatggctaccaagatattagccctccttgcgcttcttgccctttttgtgagcgcaacaaatgcgttcattattccacaatgctcacttgctcctagtgccattattccacagttcctcccaccagttacttcaatgggcttcgaacacctagctgtgcaagcctacatgctacaacaagcgcttgcggcgagcgtcttacaacaaccaattgaccaattgcaacaacaatccttggcacatctaaccatacaaaccatcgcaacgcaacagcaacaacagttcctaccagcactgagccaactagctgtggtgaaccctatcgcctacttgcaatagcagatgcttgcatccaacccacttgctctggcaaatgtagctacataccaacaacaacaattg

SEQ ID NO: 90805 - DNA, 438 bp, Zea mays
  unsure (1)..(438): unsure at all n locations
tacctgttgatgagcttttcccctcaggagaatttccagagggcgaaatccaacaatacaaggatgacaatctgtggagaacaactagtgaggaaaagagggacctggaacgactgcaaaagccaatatacaactctgttcgccaagcagcagaagttcatagacaggtgcggaaatatatgaggagcatcataaaacctggaatgttaatggttgatctatgtgagacattggaaaacatggtccggaaacttatcaaggagaatggactgcaagctggcattgcttttccgactggatgctccttgaattgggttgcagctcactggactccaaatgcgggcgacaaaactgtgctacaatatgatgatgtgatgaagcttgattntggaacacatatagatggttacattgttgattgtgcatttactggtgcat

SEQ ID NO: 90806 - DNA, 469 bp, Zea mays
ctctaccggtccggaattcccggggaccaactagcatcatagaaagcacaatagtgtaccaacaatggcagccaaaatattttgcctccttatgctccttggtctttctgcaagtgctgctacggcgaccattttcccacaatgctcacaagctcctatagcttcccttcttcccccgtacctctcaccagcggtgtcttcggtatgtgaaaacccaattcttcaaccctataggatccaacaggcaatcgcagctggcatcttacctttatcacccttgttcctccaacaatcatcagccctattacagcagttacctttggtgcatttattggcacaaaacatcagggcacaacaactacaacaacttgtgctagcaaaccttgctgcctactctcagcaacaacagtttcttccattcaaccaactagctgcattgaactctgcttcttatttgcaacaacaacaa

SEQ ID NO: 90807 - DNA, 424 bp, Zea mays
attttgagcattcagaaacacaccaagcgaagcacattagcaacaacctaacaacaatgggtaccaagatattatccctccttgcgcttcttgcgctttttgcgagcgcaacaaatgcgttcattattccacaatgctcacttgctccaagttccattattacacagttcctcccaccagttacttcaatgggcttcgaacacccagctgtgcaagcctataggctacaacaagcaattgcggcgagcgtcttacaacaaccaatttcccagttgcaacaacaatccttggcacatctaacaatacaaaccatcgcaacgcaacagcaacaacaattcctaccagcactgagccacctagccatggtgaaccctgccgcctacttgcaacagcagttgcttgcatcatacccacttgctctggc

SEQ ID NO: 90808 - DNA, 364 bp, Zea mays
  unsure (1)..(364): unsure at all n locations
cccacgcgtccgcagaaacacaccaagcgaagcacattagcaacaacctaacagcaatggctaccaagatattatccctccttgcgcttcttgcgctntttgcgagcgcaacaaatgcgttcattattccacaatgctcacttgctccaaggtccattattacacagttccttccaccagttacttcaatgggcttcgaacacccagctgtgcaagcctataggctacaacaagcaattgcggcgagcgtcttacaacaaccaatttcccagttgcaacaacaatccttggcacatctaacaatacaaaccatcgcaacgcaacagcaacaacaattcctaccagcactgagccacctatccat

SEQ ID NO: 90809 - DNA, 294 bp, Zea mays
aacaactactaccattcagccagctagctggtgtgagccctgctaccttcttgatacagccacagttgttgccgttctaccagcacgctgcgcctaacgctggcaccctcttacaactgcaacaattgctgccattcaaccaacttgctttgacaaacccagcagcgttctaccaacaacccatcattggtggtgccctcttttagatttcttatgagttatagttcaataataaagttttttgtctgatgtttgtggcttcccagaaataagaaagtacatttctagattctt

SEQ ID NO: 90810 - DNA, 473 bp, Zea mays
  unsure (1)..(473): unsure at all n locations
gctccggaattcccgggtgctgcagcgcctccgccgccgccgccgcatctaacgcagttccctccgccgcagcccgaggcaagatggttctcgagaacgacattgatctgctcaacccgccggcagaactcgagaagctcaagcacaagaaaaagagactcgtccagtcgcccaactccttcttcatggatgttaagtgccaggggtgcttcagcataaccactgttttcagccactcccagactgttgttgtgtgccctggctgccaaactgtcctctgccaacccacaggaggaaaggcaaggctcactgagggctgctctttccgcaggaagggagactagagcggatgtggtcttcaagttttgctctatgccagatactagcgtcatgaactgcctttagctaagattttccataagttggtctcgagcagctatgtgttgcatgttggctacttncaaacttatatc

SEQ ID NO: 90811 - DNA, 443 bp, Zea mays
attgagaccaactagcaacatagaaagcacaatagtgtaccaacaatggcagccaaaatattttgcttccttatgctccttggtctttctgcaagtgttgctaccgcaaccattttcccacaatgctcacaagctcctatagcttcccttcttcccccatacctctcaccagcggtgtcttcaatgtgtgaaaccccaattgttcaaccctacaggatccaacaggcaatcgcaacaggcatcttaccattatcacccttgttcctccaacaaccgtcagccctattacagcagttacctttggtccatttggtggcacaaaacatcagggcacaacatctacaacaacttgtgctagcaaaccttgctgcatactctcagcaacatcagtttcttccattcaaccaactggctgcattgaactctgctgcttatttgcaaca

SEQ ID NO: 90812 - DNA, 408 bp, Zea mays
ccggcggacccactcgtccggagatcaaaggcctttgcatgaagttatatttgcatgtgacgataagccaaaggttatgggacagttaacctgtgtcctgggggagcttggtcttaatatccaagaagcacatgcatattcgacgagtgatggctattccttggacatgtttgttgttgacggctgtgagtatgaggctgacattctccaaagcgcattgacagaaggcgttgataaaataaagtacagagcatggccgttggtaccgtcgatgactgctaagatggatcaccaaccattggaggtttatccttcatctagactttggccagataccagctgatgcagctgatgttcgggaagtcgatctcaggattgtcaaattcgaacaatatttatcggctggat

SEQ ID NO: 90813 - DNA, 432 bp, Zea mays
gcaacatagaaagtggaatacagtagcaacaatagagcaacaatggcggccaagatatggtccatccttatgctccttgctctttctgcatgtgttgctaacgcgaccatttttcctcaatactcacaagctcctatagctgcccttcttcccccataccttccatcaatgaccgcttcagtttgtgaaaacccagcccttcaaccctacaggctccaacaagcaatcgcaacaagcaacttacctttatcacccctgttctttcaacaatcgccagccctatctttggtgcagtcattggtacaaaccatcatggcacaacagctgcaacaactcgtgctaccagtgatcagccaagtagctctggcaaacctttctccctactctcagcaacaacaatttcttccattcaaccaactgtctacactgaac

SEQ ID NO: 90814 - DNA, 404 bp, Zea mays
aacatagaaagcgcaatagtgtaccaacactggcagccaacatattttgcctgcttatgctccatggtatttctgcaagcgctgctacggcgaccattttaccgcaatgctcacaagctcctatagcttgccttcatccctcgtacctctcaccagcggtgtctatggtatgcgaaaacccaattcttcaaccctacaggatccaactggcaattgcagctggcatcttacctttatcaccctcgttcatccaacaatcatcagccctattacagcagttacctttggtgcatttattggcacaaaacattaaggcacaacaactacaacaacttgtgctagcaaaccttgatgcctactctcagcaacagcagtttcttccattcaaccaactagctgcattg

SEQ ID NO: 90815 - DNA, 429 bp, Zea mays
cccacgcgtccgcaacaagcaacatagaaagtggaatacagtagcaacaatagagcaacggtggcggccaagatattttccatccttatgctccttgctctttctgcatgtgttgctaacgcgaccatttttcctcaatactcacaagctcctatagctgcccttcttcccccataccttccatcaatgaccgcttcagtttgtgaaaacccagcccttcaaccctacaggctccaacaagcaatcgcaacaagcaacttacctttatcacccctgttctttcaacaatcgccagccctatctttggtgcagtcattggtacaaaccatcagggcacaacagctgcaacaactcgtgctaccagtgatcagccaagtagctctggcaaacctttctccctactctcagcaacaacaatttcttccattc

SEQ ID NO: 90816 - DNA, 431 bp, Zea mays
ccgcagctcccatcctctcgctcgccaggagaagcagccgccgttgctgctgccgcgtcgacagaatggggggtttcgtgaagacccataagaccaatgcgtatttcaaacgtttccaagtgaaattcaagagaaggcgggctggcaagacagactacagggccaggataaggctgattaaccaagacaaaaacaagtacaacacacccaaatacagatttgttgtgcgatttaccaacaaggacatcactgcacaaatcatatctgctagtatagcgggtgatatggttcttgcttctgcctactctcatgagttgccacgatatggtcttgaagttggtctgaccaactatgcagctgcctactgcactggacttctgttggctcgccgtgtgctaaagatccgtggtttggataaggagtatgacggc

SEQ ID NO: 90817 - DNA, 426 bp, Zea mays
gtccatcactggatgtgggattctcgcctatttaactatgggaactgggaagtgctaagagttcttctctccaatgctagatggtggctcgaggaatataagtttgatggtttccgttttgatggtgtgacctccatgatgtacactcatcacggattacaagtaacatttacggggaacttcaatgagtattttggctttgccaccgatgtagatgcagtggtttacttgatgctggtaaatgatctaattcatggactttatcctgaggctgtaaccattggtgaagatgttagtggaatgcctacatttgcccttcctgttcacgatggtggggtaggtcttgactatcggatgcatatggctgtggctgacaatatgactgaccctcttaaaccaaagtgatgaaacttggaagatgggtga

SEQ ID NO: 90818 - DNA, 434 bp, Zea mays
gaaagcacaatagtgtaccaacaatggcagccaaaatattttgcctccttatgctccttggtctttctgcaagtgctgctacggcgaccattttcccgcaatgctcgcaagctcctatagcttcccttcttcccccgtacctctcaccagcggtgtcttcggtatgtgaaaacccaattcttcaaccctacaggatccaacaggcaatcacagctggcatcttacctttatcacccttgttcctccaacaatcatcagccctattacatcagttacctttggtgcatttattggcacaaaacatcagggcacaacaactacaacaacttgtgctagcaaaccttgctgcctactctcagcaacagcagtttcttccattcaaccaactagctgcattgaactctgcttcttatttgcaacaacaacaactacca

SEQ ID NO: 90819 - DNA, 445 bp, Zea mays
attgagaccaactagcaacatagaaagcacaatagtgtaccaacaatggcagccaaaagagttttggttccttatgctccttggtctttctgcaagtgttgctaccgcaaccattttcccacaatgctcacaagctcctatagcttcccttcttcccccatacctctcaccagcggtgtcttcaatgtgtgaaaccccaattgttcaaccctacaggatccaacaggcaatcgcaacaggcatcttaccattatcacccttgttcctccaacaaccgtcagccctattacagcagttacctttggtccatttggtggcacaaaacatcagggcacaacaactacaacaacttgtgctagcaaaccttgctgcatactctcagcaacatcagtttcttccattcaaccaactggctgcattgaactctgctgcttatttgcaacaa

SEQ ID NO: 90820 - DNA, 447 bp, Zea mays
attgagaccaactagcatcatagaaagcacaatagtgtaccaacaatggcagccaaaagattttggttccttatgctccttggtctttctgcaagtgttgctaccgcaaccattttcccacaatgctcacaagctcctatagcttcccttcttcccccatacctctcaccagcggtgtcttcaatgtgtgaaaccccaattgttcaaccctacaggatccaacaggcaatcgcaacaggcatcttaccattatcacccttgttcctccaacaaccgtcagccctattacagcagttacctttggtccatttggtggcacaaaacatcagggcacaacaactacaacaacttgtgctagcaaaccttgctgcatactctcagcaacatcagtttcttccattcaaccaactggctgcattgaactctgctgcttatttgcaacaacaa

SEQ ID NO: 90821 - DNA, 447 bp, Zea mays
catgaatcatcattcatcttagtagtatatgcaccaaatcaaatctgcaacatcaattagctaactgcaaaaaccatgaagctggtgcttgtggttcttgctttcattgctttagtatcaagtgtttcttgtacacagacaggcggctgcagctgtggtcaacaacaaagccatgagcagcaacatcatccacaacaacatcatccacaaaaacaacaacatcaaccaccaccacaacatcaccagcagcagcaacaccaacaacatcaagttcacatgcaaccacaaaaacatcagcaacaacaagaagttcatgttcaacaacatcaacaacaaccgcagcaccaccaccaacaacaacaacaacagcaccaacaacaacatcaatgtgaaggccaacatcaacatcaccaacaatcacaaggccatgtgcaacatcacgaacag

SEQ ID NO: 90822 - DNA, 408 bp, Zea mays
  unsure (1)..(408): unsure at all n locations
ggaaattaaggtggacgagtacattacgcacaacatgaacctggctgacatcaacgacgccttccacctgctgcacgaaggtggctgtctgcgttgtgtgctggcgatgcagatctgaaattcctaagctaagcagtttttggatgtgtcggcatagactgtcttttgttttggaactagaattcctttttgcctcgttaggcctggacccactgtataatgctatgttgctttggatggctgacgatggttaccgctgtgttgctagccatgtggtacttgatctgtatcacggttgcaaataagtgctgtttctaaaaaaaaaaacnncaacaacataaacaacaatagcttcaacaacaacaactcctactacaacatcactgtataagcccacatcatcataac

SEQ ID NO: 90823 - DNA, 437 bp, Zea mays
gaccaactagcaacatagaaagcacaatattgtaccaacaatggcagccaaaatatttggcttccttatgctccttggtctttctgcaagtgctgctaccgcaaccattttcccacaatgctcacaagctcctatagctctctttcttcccccatacctctcaccagcggagtcttcagtatgtgaaaacccaattcttcaaccctacaggatccaacaggcaatcgcagcacgcatcttacctttatcacccttgttcctccaacaaccgtcagccctattacagcagttacctttggtgcatttgttggcacacaacatcaaggctcaacaactacaacaacttgtgctacgaaaccttgctgcctactctcagcaacagcagattcttccattcaaccaactggctgcattgaactctgctgcttatttgcaac

SEQ ID NO: 90824 - DNA, 315 bp, Zea mays
accggtctcggaattcccgggatacacgctgcagttactcaactgaaatgaggatagtatcgcagctttcgtgaataaaacctgaatcacccacaagaatgttctaagtactcagccagtggtatttactggttgacctactgtagtttgcgtcggaatagatatgtttttttactcttcgtggggcagttttgtactggtggattcataaggactctgattatggtgcgttcggaacttataataataagcacatgaaattttgcttcaaaaaaaaactatatcaccctcaatactacaacaacagtcagccac

SEQ ID NO: 90825 - DNA, 422 bp, Zea mays
gtggggtgacgtaaggaggtgctcgggatgatccgttcgcgcccgtaggaccgggatcgggcgcctcgtcgtcctcgacgcccatgtcgggccacctcgatcgattcgcgcgggcatgttttgaagggtgctcatgtcacgatgaacgtacagaccataagtcagactttgatgtctctgatgatgataagacgacaagaataagctctttgaagaaaaaagcaatagatgcatcaacgaagattaggcactcattaaaaaagactagacggaagagcggtagtagggtcctttctgcgtctattgaggatgtgcgcgatctacaggagctgcaagctgttgaagcatttatacaagcattactcttggatgagctgttgcctgcaaggcatgacgactatcatatgacgctgagatttctg

SEQ ID NO: 90826 - DNA, 414 bp, Zea mays
ctgctgcgtacctacaacagcgacaacagttacttaatccattggcagtggctaacccggtggtcgctaccttcctgcagcagcaacaacaattgctgccatacaaccagttctctttgatgaaccctgccttgcagcaacccatcgttggaggtgccatcttttagattacatatgagatgtactcgacaatggtgccctcataccgacatgtgtttcctagaaataatcaatatattgattgagattcatctcgaaaaactaatacagcaattaccttagaaggataaattggcacaaaacaataaggcacaacaactacaacaacttgtgctagcaaaccttgctgactactctcaagaaacagcaaattaataaatggggggcccttttaaggaatcaaactttacttcc

SEQ ID NO: 90827 - DNA, 418 bp, Zea mays
cagaaacacaccaagcgaagcgcactagcaacaacctaacaacaatggctaccaagataggatcccgccttgcgcttcttgcgctttttgcgagcgcaacaaatgcgtccattattccacaatgctcacttgctcctagttccattattccacagttcctcccaccagttacttcaatggccttcgaacacccagctgtgcaagcctataggctacaacaagcgattgcggcgagcgtcttacaacaaccaattgcccaattgcaacaacaatccttggcacatctaacaatacaaaccatcgcaacgcaacagcaacaacagttcctaccagcactgagccacctagccatggtgaaccctgtcgcctacttgcaacagcagctgcttgcatgcaacccacttgctctagcaaacgt

SEQ ID NO: 90828 - DNA, 425 bp, Zea mays
gtgaaaacccagctcttcagccctataggctccaacaagcaatcgcagcaagcggcatagctttatcacccttgttgtttcaacaatcgccagccctatctttggtgcagtcattggtacaaaccatcagggcacagcatctgcagcaactcgtgctacctgtgatcaaccaagtagctctggcaaacctttctccctactctcagcaacaacaatttcttccattcaaccaactgtctacactgaaccctgctgcttatttgcagcaacaactattaccattcagccagctagctactgcctactctcagcaacaacaacttcttacatttaaccaattggccgcactgaaccccgctgcttatttgcagcagcaaatactactaccatttagccagctagctgcagcaaaccgtgcttccttc

SEQ ID NO: 90829 - DNA, 436 bp, Zea mays
ggcgaacgtagctgcataccagcaacaacaacagctgcaacagtttatgccagtgctcagtcaacgagccatggtgaaccctgccgtctacctacaactactttcatctagcccgctcgcggtgggcaatgcacctacgtacctacaacaacagctgctgcaacaaattgtaccagctctgactcaactagctggggcaaaccctgctgcctacttacaacagttgctttcattcaaccaactggctgtgtcaaactctgctgcgtacctacgacatgcgacacagttacttaatccattggcagcggctaacccattgatcgctaccttcctgcagcagcaacatcaattgctgccatacaaccagttctctttgatgaaccctgccgtgcagcaacccatcgttggaggtgccatcttttagattacatatgag

SEQ ID NO: 90830 - DNA, 442 bp, Zea mays
attgagaccaactagcaacatagaaagcacaatagtgtaccaacaatggcagccaaaatgttttgcttccttatgctccttggtctttctgcaagtgctgctaccgcaaccattttcccacaatgctcacaagctcctatagcttcctttcttcccccatacctctcaccagcggtgtcttcagtatgtgaaaacccaattcttcaaccctacaggatccaacaggcaatcgcagcaggcatcttacctttatcacccttgttcctacaacaaccgtcagccctattacagcagttacctttggtgcatttgttggcacaaaacatcaaagcacaacaactacaacaacttgtgctaggaaaccttgctgcctactctcagcaacagcagtttcttccattcaaccaactggctgcattgaactctgctgcttatttgcaac

SEQ ID NO: 90831 - DNA, 445 bp, Zea mays
caaaaacacaccaagcgaagcgcactagcaacgacctaacaccaatggctaccaagatagtgagccctccttgcgcttcttgcccttttagtgagcgcaacaaatgcgttcattattccacagtgctcacttgctcctagtgccattattccacagttcctcccaccagttacttcaatgggcttcgaacatccagccgtgcaagcctacaggctacaactagcgcttgcggcgagcgccttacaacaaccaattgcccaattgcaacaacaatccttggcacatctaaccctacaaaccattgcaacgcaacaacaacaacaacaacagtttctgccatcactgagccacctagccgtggtgaaccctgtcacctacttgcaacagcagctgcttgcatccaacccacttgctctggcgaacgtagctgcataccagcaacaac

SEQ ID NO: 90832 - DNA, 442 bp, Zea mays
gtcgctagcctatggtgaagggctgaaatatgagccttctaatccagtgctatactgcggccgggcagcttgctggtcaaagctgggtcggtgggcaaaagctgttgaggactgcagcgaggccctaagagtccagcctaactacacaaaggctctgctaaggcgtgcggcgtcatatgcaaagcttgagcgctgggcggactgtgtgcgggactacgaggtgcttcgcaaggatcttcctggtgacactgaggttgcagagtccttgttccatgcccaagttgcattaaagacagcccgtggagaggtggtatctaatatgaagtttggaggggtagttgaagaaattatcagcttagagcaactccaagatgttatccgttcacctggtgtatccgttctttacttcatggctacaatgaacaagcaatgtgcacaaatt

SEQ ID NO: 90833 - DNA, 446 bp, Zea mays
ggtccggaattgccggagttttagaaaaaatcgctgtctatcagcgggcaaacaaagaggttgccatcatctgtaaccatcagcgtagtgtgtggaaatcacatgagtgccagatgactagaatgaacgaaaagattgatgagttgaagtcccagatggaggagctgaaagcagacttgaacaaagcaaagaaagggaagcctctatgctatgattcataggggaagccaaagaggaacttggctcctgaagcgattcaaaagaaggttgcaacacttgaaggcaagatagagaagatggagatggataagaggataaaagaggatctgaagacagttgcgctgggaacgtcaaagatcaactatcttgatcctagaataaccgtggcatggtgcaaacgccatgaagtccctattgagaagattttcaacatatctgtcctcgcg

SEQ ID NO: 90834 - DNA, 441 bp, Zea mays
aagcacaatagtgtaccaacaatggcagataaaatattacgcctccttatgcgccttgggctttatgcaagtgctgctacggggaccattttcccacaatgctcacaagctcctatagcttgccttcttcccccgtacctctcaccaacggtgtcttgggtatgtgaaaacccaattctgcaaccctacaggatccaacaggcaatcgcagatggcatactacctttatcacccttgttcctgcaacaatcatgatgcctattacagcaattacctttggtgcatttattggcacataacatcagggcacatcagctacatcaacttgtgctagcaaaccttgctgcctactctcagcaacagcaagctcttccattcaaccaactagctgcattgaactctgctgcttatttgcaacaacagcaactaccattcagtcag

SEQ ID NO: 90835 - DNA, 406 bp, Zea mays
aacatagaaagtggaatccagtagcaacaatagagcaacaatggcgaccaagagactttgcctccttatgctccttgctctttctgcatgtgttgctaacgcgacaattttccctcaatgctcacaagctcctatagcttcccttcttcccccataccttccatcaatgatagcttcagtatgtgaaaacccagctcttcaaccctataggctccaacaagcaatcgcagcaagcaacatacctttatcaccctagtttcaacaatcgccagccctatctttggtgcagtcattggtacaaaccatcaaggcacagcagctgcagcaactcgtgctacctgtgatcaaccaagtagctctggcaaacctttctccttactatcagcaacaacaatttcttccattc

SEQ ID NO: 90836 - DNA, 408 bp, Zea mays
gatgtgagcaactgaacacaccaagcgaaacgaactagaaacgacttacatcattggataccagatttagcccttctggctaattgcactttatgcgagcccatcatagcgtacacttattgaacaatgctgaattgtcctaaagccagattgccaaatgcttgaccagggacttaaggatatgaagacctattgccaagccatcatgcagcaaaagcgcttgtgagagcgtcttacaacaacaattgcccaattgacacacaatgattgccacatataacaatacaaaggataacgacgtaacaataacaacctttcgtacatcattgagccacctaggcatggtgaaccctgatccctactcgcgagagctgctgctagcatgcaacgcacttgctctggagaacg

SEQ ID NO: 90837 - DNA, 321 bp, Zea mays
cggacgcgtgggcaactagcaacatagatagcacaatagtgtaccaacaatggcggccgagatattttgcctccttatgctccttggtctttctgaaagtgctgctacggtgaccattttcccacaatgctcacatgcttctatagcttcccttattaccccgttcctctcaccagcggtgtcttcggtatgtgaaatcccaattcttcaaccctataggatccaacatggtaactacacaagcattgaaccttattcaatcctgcaggctatcacatctggcatcttacctccataactcgtgttgctgcatcaatcgtc

SEQ ID NO: 90838 - DNA, 467 bp, Zea mays
cggaattcccgggattttgagcattcagaaacacaccaagcgaagctacctagcaacgacttaacaacaatggctaccaagatattaggcctccttgcgcttcttgccctttttgtgagcgcaacaaatgcgttcattattccacaatgctcacttgctcctagtgccattataccacagttcctccgaccagttacttcaatgggcttcgaacacctagctgtgcaagcctacaggctacaacaagcgcttgcggcgagcgtcttacaacaaccaattaaccaattgcaacaacaatccttggcacatctaaccatacaaaccatcgcaacacaacagcaacaacagttcctaccagcactgagccaactagatgtggtgaaccctgtcgcctacttgcaacagcaggtgcttgcattcaacccacttgctctggcaaacgtagctgcataccaacaacaacaaca

SEQ ID NO: 90839 - DNA, 448 bp, Zea mays
cccacgcgtccgcttcccttcttcccccatacctctcaccagcggtgtcttcaatgtgtgaaaccgcaattgttcaaccctacaggatccaacaggcaatcgcaacaggcatcttaccattatcacccttgttcctccaacaaccgtcagccctattacagcagttacctttggtccatttggtggcacaaaacatcagggcacaacaactacaacaacttgtgctagcaaaccttgctgcatactctcagcaacatcagtttcttccattcaaccaactggctgcattgaactctgctgcttatttgcaacaacaattaccattcagccagctagttgctgcctacccccagcaatttcttccattcaaccaactagcagcattgaactctgctgcttatttacagcagcaacaactactaccattcagccagctagctgatgtgag

SEQ ID NO: 90840 - DNA, 444 bp, Zea mays
gttggcttctcctccccctccggttcgggttcgggttcgtgaggttctccggggttcgggttcgtgggtgagcggatcgagatggcggcgtcggatgttgagtaccgctgcttcgtcggcggcctcgcctgggccacggacgaccactccctccacaacgccttcagcacctacggcgaggtcctcgagtccaagatcatcctcgatcgtgagacgcagaggtcccgcggcttcggcttcgtcaccttctccacggaggaggcgatgcggaacgccatcgagggcatgaacggcaaggagctggacggccgcaacatcaccgtcaacgaggcccagtcccgcggcggccgtggaggcggcggctgctgcgggtacggtggtggccgtggaggcggcggctacggcggtggcgggcgccgtgatggcggcggcggctactgcggt

SEQ ID NO: 90841 - DNA, 444 bp, Zea mays
  unsure (1)..(444): unsure at all n locations
gccacctccggttcacctgccacctccggtgcatctcccaccgccggtccacctgccggcgccggtccacctgccaccgccggtccatgtgccgccgccggttcatctgccgccgccaccatgccactaccctactcaaccgccccggcctcagcctcatccccagccacacccatgcccgtgccaacagccgcatccaagcccgtgccagctgcagggaacctgcggcgttggcagcaccccgatcctgggccagtgcgtcgagttcctgaggcatcagtgcagcccgacggcgacgccctactgctcgcctcagtgccagtcgttgcggcagcagtgttgccagcagctcaggcaggtggagccgcagcaccggtaccaggcgatcttcggcttggtcctncagtccatcctgcagcagcagccgcaaagcggccaggtcgc

SEQ ID NO: 90842 - DNA, 441 bp, Zea mays
cccacgcgtccgcatagaaagcacaatagtgtaccaacaatggcagccaaaatattttggctccttatgctccttggtctttctgcaagtgctgctacggcgaccattttcccgcaatgctcgcaagctcctatagcttcccttcttcccccgtacctctcaccagcggtgtcttcggtatgtgaaaacccaattcttcaaccctacaggatccaacaggcaatcacagctggcatcttacctttatcacccttgttcctccaacaatcatcagccctattacatcagttacctttggtgcatttattggcacaaaacatcagggcacaacaactacaacaacttgtgctagcaaaccttgctgcctactctcagcaacagcagtttcttccattcaaccaactagctgcattgaactctgcttcttatttgcaacaacac

SEQ ID NO: 90843 - DNA, 442 bp, Zea mays
gcgcgctgatcgccggccggatctgcctcgtccgctccctcatctactgggccgcgcaggtgctcggcgccgtcgccgccgcgctcgtgctcaggctcgccaccggagggatgcatctgccggagtacgcgctggccgggggcgtgagcggatggaacgcggcggtgctggaggcggccatggcgttcgggctcatgtacgcctactttgcgacggtgatggacaaagcgcggagggtccgcgccggcgccggagcgctggcggcgccgctcgccgtggggctcctggcgggggccaacgtgctggcctgcggcgcgctggagggcgccgtgatgaatccggcgcgcgcgttcgggcccgccgtcgtgggctcccgtcgctggagacaccaatgggtgtactgggtggggcccatggtcggcgccggcctctccggcatcgt

SEQ ID NO: 90844 - DNA, 448 bp, Zea mays
cggaattcccgggggaaataaacttgcctgctgaagaggtccctcctgaactgccagagccagctcttggaattaattctgctcgtgaggggatggatgaaaaagattggctatcacttgttgcagtccatagtgatcctgggctaaggtctgttgcatttaattttgaaccaaggttggaatccaataaagattccaggaaccgtcttttaaccatgaccattaaccttcccagcttatatgaggttgtcacaggaacagccaagaaagagcccaaagaaaaaactcctaaaagcaacattaagactaacaaatctggctcaaagccctcgcgccatgcggaacccaactcaagggtcccaaagatgccacctccaaaggacgaggagagtgaagaggaggaaggggaaccacaggaagaccaggagagtgcgctgtgtggcgcatg

SEQ ID NO: 90845 - DNA, 417 bp, Zea mays
gctcatatactacagcaccatctactaccactcagccagatagctactgcctagtctcaggagcaaccatgccttccattgaaccaatggggcgcactgtaccgatctgcttatttacagtagcagatactactaccatttggccagatagctacgtcatgcaccacttccactatgaaacaacaacattcgattacgttctaccatcagtctgtggctaacaccgcaacagtattacaactgctacaactgctgccctttgtccaacttgctttgacatagcccgcatgcttgtaccaacatcacatgatcgtcggcgtcatctttcaaatggattataacctggaattcaataatgaaggagctcggctgctgaatgtggcctacttaaaataacaactatcagatgcatatgct

SEQ ID NO: 90846 - DNA, 435 bp, Zea mays
gaccaacaagcaacatagaaagtggaatccagtagcaacaatagagcaacaatggcgaccaagatattttccctccttatgctccttgctctttctacatgtgttgctaacgcgacaattttccctcaatgctcacaagctcctatagcttcccttcttcccccataccttccatcaattatagcttcaatatgtgaaaacccagctcttcaaccatataggcttcaacaagcaatcgcagcaagcaacatacctttatcgcccttgttgtttcaacaatcgccagccctatctttggtgcagtcattggtacaaaccatcagggcacaacagctgcagcaactcgtgctacctctgatcaaccaagtagctctggcaaacctttcttcctactctcagcaacaacaatttcttccattcaaccaactgtctaca

SEQ ID NO: 90847 - DNA, 209 bp, Zea mays
gtcgacccactcgtcctgttgtaattcaataataagcaatctaaaagtaggcaccaccaatgatgtgttgttgatgggatggggctcgttctgtcaaagcaagttgtacaaagggcatcaattgttgtagttgtaagagggttgcggtgttagccataaactgcttttttaaaggcagcaactgttaatgtgttaacattgaagctctg

SEQ ID NO: 90848 - DNA, 426 bp, Zea mays
ggagaaagctttgagaaataggtgctttggtggtagagttgctgcaactacacaatgtattcttacctcagatgcttgtcctgaaactcttcattctcaaacacagtcctctaggaaaaattatgctgatgcaaaccgtgtatctgctatcattttgggcggaggcactggatctcagctctttcctctgacaagcacaagagctacgcctgctgtacctgttggaggatgttacaggcttattgatatccctatgagtaactgcttcaacagtggtataaataagatatttgtgatgagtcagttcaattctacttcgcttaaccgccatattcatcgtacataccttgaaggcgggatcaactttgctgatggatctgtacaggtattagcggctacacaaatgcctgaagagccagctggatg

SEQ ID NO: 90849 - DNA, 298 bp, Zea mays
aacagctgcttccattcaaccaactgactgtgtcgaactctgctgcgtacctacaacagcgacaacagttacttaatccactagcagtgcctaacccattggtcactgccttcctacagcagcaacaattgctaccatacagccagttctctttgatgaaccctgccttgtcgtggcagcaacccatcgttggaggtgccatcttttagattacatatgagatgtaatcgataatggtgccctcataccggcatgtgtttcctagaaataatcaatatattgattgacatttatctcg

SEQ ID NO: 90850 - DNA, 381 bp, Zea mays
ctgccttcttactgcagcaacagttgcttccattccatctacaagttgtggcaaacattgctgctttcttgcaacaacaacaacaattgctgccattttacccacaggttgtgggaaacattaacgccttcttgcaacagcaacagttgctaccattctacccacaggatgtggcaaacaatgtcgccttcttacaacaacaacaattgctgccatttaaccaacttgctttgacgaatcctaccaccttattgcagcagcccaccattggtggtgccatcttctagatttttttatgctttatactgtaataataaagttctcatactgatatgtgcaacttctcagtaataaaagattagagatctatattttaagttc

SEQ ID NO: 90851 - DNA, 432 bp, Zea mays
tgctgatcgttgcccttgctctcctggctctcgctgcgagcgccgcctccagggcaaggggcggctgtggctgccagacaccaccgtttcatctaccgcctccgttctatatgccgcctccgttctatctgccgccgcagcagcagccgcagccatggcaataccccactcaaccaccgcagctaagcccgtgccagcagttcggatcctgcggcgtcggcagcgtcggcagcccgttcctgggccagtgcgtcgagttcctgaggcaccagtgcagcccggcggcgactccctacggctcgccacagtgccaggcgctgcagcagcagtgctgccaccagatcaggcaggtggagccgctgcaccggtaccaggcgacatacggcgtggtcctgcagtccttcctgcaacagcaaccgcaaggcgagctcg

SEQ ID NO: 90852 - DNA, 402 bp, Zea mays
caattagctcatcgactccagattggagaactcgacaccatgaaggtgctgatcgttgcccttgctctcctggcgctagctgcgagcgccgtctacagtacaagcggcagctgtggctgccagacaccaccgtttcatctaccgactccgttctatatgccgactccgctctatctgccgacgtaacagcagccgcagccatggcaataccccactcaaccaccgcagctaagcccgtgccagcagttcggatcctgcggcgtcggcagcgtcggcagcccgttcctgggccagtgcgttgagttcctgaggcaccagtgcagcccggcggctacgccctaaggatcgacacagtgccaggcgctgcatcagcagtgctgtcaccagatcaagcacgtggag

SEQ ID NO: 90853 - DNA, 284 bp, Zea mays
agagaacgaaagaaggaaggtacaagggaaggaagttcagttcagtatgtcatttctgtggatatcaggctcgaggatctacaccatcaaatttcgactgcgactatgcttatgctcttggacgtatctccctgcatatgattacagttggattgactggctacatggcaactgcggctaatctgaaagaccctgttgagaaatggagatgtgctgctgctcctttaactgcgatgatgagtgtgaagaggcatttacgtggccctggagcaatccctataggg

SEQ ID NO: 90854 - DNA, 408 bp, Zea mays
cggacgcgtgggcgctagcgccttccctccggaaacggaaggctctcgtgaccaccgggatgtccgccatggagaccgacatcaacgcgccgtcgccgtccgccccagctggcgagggatcctctgcggccggtccgttctcctcccgcaagcccaacaagcgcttcgagatcaagaagtggaacgccgacgcgctctgggcatgggatatcgtcgtcgacaactgcgctatctgccgcaaccacatcatggatctatgcatcgagtgccaggcgaaccatgccagcgcgaccagcgaggagtgcactgatgcttggggagtctgtaatcatgcttttcacttgcactgcatcagcaggtggcttaagactcgtcaagtgtgcccattagataacagtgagtgggagt

SEQ ID NO: 90855 - DNA, 426 bp, Zea mays
gcccaagttgccccagagcttgtagtttactcggagctacttagtacaaagaggctatacatgcacggtgtaacgaccgtaaagccagggtggcttttgaagtatgccagttccctctgcaccttctctgcgcctctggaagatccgaaaccgtactatgacccactgaacgaccaagtctactgctacgttagcccggtcttctctcgtcataactggcagcttccgttgcacagtttacctatcaaagacggtgcgagccggctgcaggtgtttgcatgcgcgttgcttaaaggggacgtcctgccatgtctacgggacgccaaggatttcctcgcgctgtcaccatccgctgtgttggggcctggcatgccacgtaaagtgggagaccttcttagcaggatgaagatcggtccgaagttagtc

SEQ ID NO: 90856 - DNA, 391 bp, Zea mays
acccgatcgacaccatgagggcgttgctcgacgccctcggtctcctggctctcgctgcgagcgccgcctccacggcatacaagcgggggctgctgctgccagccaccgccgacggttcatataccgtcgtaggtgcatctgtcacctccggtacacctgcacacctgcggtgcatcttgcaccgacggtccaactgccgacgcctgcacgactgacaacgccggtgcatgtgccgtcgcacggatcatctgccgtcgtcaccatgccactaccatacttaacacggccggcctcagtctgatacccagccacacacatgctcatgccaacagacgtataccaacccgtgccagctgcacggaacctgcagtgtcagcagcaccccgatcct

SEQ ID NO: 90857 - DNA, 425 bp, Zea mays
gcaacatataaagcacaatagtgtaccaacaatggcagccaaaatattttgcctccttatgctccttggtctttctgcaagtgctgctacggcgaccattttcccgcaatgctcgcaagctcctatagcttcccttcttcccccgtacctctcaccagcggtgtcttcagtatgtgaaaacccaattcttcaaccctacaggatccaacaggcaatcgcagctggcatcttacctttatcacccttgttcctccaacaatcatcagccctattacaacagttacctttggtgcatttattggcacaaaacatcagggcacatcaactacaacaacttgtgctagcaaaccttgctgcctactctcagcaacagcagtttcttccattcaaccaactaggttcattgaactctgcttcttatttgc

SEQ ID NO: 90858 - DNA, 402 bp, Zea mays
cccacgcgtccgatccagatcagcaaagcggcagtgcgtagagaggatcgtccaacagagcagcgtgaagatggccatcgttctcgtcgtgtgcctggctctgtcagctgccagcgcctctgcaatgcagatgccctgcccctgcgcggggctgcagggcttgtacggcgctggcgccggcctgacgacgatgatgggcgccggcgggctgtacccctacgcggagtacctgaggcagccgcagtgcagcccgctggcggcggcgccctactacgccgggtgtgggcagacgagcgccatgtaccagccgctccggcaacagtgctgccagcagcagatgaagatgatggacgtgcagtccgtcgcgcagcagctgcagatgatgatgcagcttgagcgtgc

SEQ ID NO: 90859 - DNA, 442 bp, Zea mays
ggacgtcagcctagcaattagctcatcgactccagattggagaactcgacaccatgaaggtgctgatcgttgcccttgctctcctggcgctcgctgcgagcgccgcctccagtacaagcggcggctgtggctgccagacaccaccgtttcatctaccgcctccgttctatatgccgcctccgttctatctgccgccgcagcagcagccgcagccatggcaataccccactcaaccaccgcagctaagcccgtgccagcagttcggatcctgcggcgtcggcagcgtcggcagcccgttcctgggccagtgcgtcgagttcctgaagcaccagtgcagcccggcggcgacgccctacggctcgccacagtgccaggcgctgcagcagcagtgctgccaccagatcaggcaggtggagccgctgcaccggtaccaggcgacata

SEQ ID NO: 90860 - DNA, 443 bp, Zea mays
gcaacatagaaagcacaatagtgtaccaacaatggcagctaaaatattttgcctccttatgctccttggtctttctgcaagtgctgctaccgcgaccattttcccacaatgctcacaagctcctatagcttcccttcttcccccgtacctctcaccaacggtgtcttcggtatgtgaaaacccaattcttcaaccctacaggatccaacaggcaatcgcagctggcatcttacctttatcacccttgttccttcaacaatcatcagccctattacagcagttacctttggtgcatttattggcacaaaacatcagggcacaacaactacaacaacttgtgctagcaaaccttgctgcctactctcagcaacagcagtttcttccattcaaccaactagctgcattgaactctgcttcttatttgcaacaacaacaactaccat

SEQ ID NO: 90861 - DNA, 440 bp, Zea mays
gagaccagcaagcaacatagaaagtagaatccattagcaacaatagagcaacaatggcgagcaagatattttccctccttatgctccttgctctttctacatgtgttgctaacgcgacaattttccctcaatgctcacaagctcctatagcttcccttcttcccccataccttccatcaattatagcttcagtatgtgaaaacccagctcttcaaccatataggcttcaacaagcaatcgcagcaagcaacatacctttatcgcccttgttgtttcaacaatcaccagccctatctttggtgcagtcattggtacaaaccatcaaggcacaacagctgcagcaactcgtgctacctgtgatcaaccaagtagctctggcaaacctttctccctactctcagcatcaacaatttcttccattcaaccaactgtctacactg

SEQ ID NO: 90862 - DNA, 452 bp, Zea mays
cagaaacacaccaagcgaagcgcactatcaacgacctaacaacaatggctaccaagatattagccgtccttgcgcttcttgccctttttgtgagcgcaacaaatgcgttcattattccacaatgctcacttgctcctagtgccattattccacagttcctcccaccagttacttcaatgggcttcgaacacctagctgtgcaagccaacatgcaacaacaagcgcttgcggcgagcgtcttacaacaaccaattgcccaattgcaacaacaatccttgccacatctaacaatacaagccatcacaacgcaacagcaacaacagttcctaccagcactgagccacctagccatggtgaaccctgccgcctacttgcaagagcagctgcttgcatacaacccacttgctctggcgaacgtagttgcaaaccagcatcaactacagctacaacag

SEQ ID NO: 90863 - DNA, 438 bp, Zea mays
ctcatggtgtcaaggagttttcgattacaagcatgaaaggtggttaccgtcgagtgttccagcggcctattggttttgagtgggaactcataacttacacagatgatacttcatctttagcagaaactgatttggatgttctgtccagaaccaagcctaaagaagcaaacgagcttatttctaagcaggaatcgcaggataagttggaaaaggctcctgatacctctgtgccaactaatgggaatagctcccaagaaaagcttattggcagcccagatatactaccaaagaaattggccttaaaattagcatttactttaccaacatcatgctacgctacaatggctatccgggagcttctgaagacttccacctcagttgcatatcagaaaacactcagctgctagattctgtttggaagacattccttcataagag

SEQ ID NO: 90864 - DNA, 412 bp, Zea mays
ctagttctagcccggtcgctgtggccaatgcacctacatacctgcaacaacaattgttgcaacagattgtaccagctctgactcaactagttgcggcaaaccctgctgcctacttgcaacagctgcttgcattcaaccaactgactatgtcgaactctgctgcgtacctacaacagcgacaacagttacttaatccactagcagtggctaacccattggtcgctgccttgctacagcagcaacaattgctgccatacaaccagatctctttgataaaccctgtattgtcgaggcagcaacccatcgttggaggtgccatcttttagattacatatgagatgtactcgataatggtgccctcattccggcatgtgtttcctagaaataatcaatatattgattgagatttatc

SEQ ID NO: 90865 - DNA, 280 bp, Zea mays
gtcactcataaacatgagtggcagtgtcagagtgagcaatgacctgaatgaacaatcgggatgaaaagaataaagaacataataaataaaaataaaaaaatagataaaacaaataaaataacataaaagataaaaaaactgactaaagcttacgtagttactaaatacctataataaaattatagattcaatatataaaaaaggcggaccattaaacatatatcaattatacgtgcgttcgcatgcaacttcatacgtctataattggtgaagcaaaatc

SEQ ID NO: 90866 - DNA, 456 bp, Zea mays
tcagcattcaaaaacacaccaagcgaagcgcactagcaacgacctaacaccaatggctaccaagatattagccctccttgcgcttcttgcccttttagtgagcgcaacaaatgcgttcattattccacagtgctcacttgctcctagtgccattattccacagttcctcccaccagttacttcaatgggcttcgaacatccagccgtgcaagcctacaggctacaactagcgcttgcggcgagcgccttacaacaaccaattgcccaattgcaacaacaatccttggcacatctaaccctacaaaccattgcaacgcaacaacaacaacaacaacagtttctgccatcactgagccacctagccgtggtgaaccctgtcacctacttgcaacagcagctgcttgcatccaacccacttgctctggcgaacgtagctgcataccagcaacaacaaca

SEQ ID NO: 90867 - DNA, 325 bp, Zea mays
ctactccagagcgcagaagaacccgatcgacaccatgagggtgttgctcgttgccctcgctctcctggctctcgctgcgagcgccacctccacgcatacaagcggcggctgcggctgccagccaccgacggcggatcatctaccgacgccggtgcatctgccaccttcggttcacctgccacctccggtgcatctcccaccgccggtccacctgccgacgccggtccacctgccagcgccggtccatgtgccgccgccggttcatctgccgccgccaccatgccactaccctactaaaccgccccggactaagcctaatccccag

SEQ ID NO: 90868 - DNA, 451 bp, Zea mays
caactagcaacatagaaagcacaatagtgtaccaacaatggcagccaaaatatttcgcttcctgatgctgcttggtcttactgcaagtgctgctaccgcaaccattttcccacaatgctcacaagctcctatagcttacttacttcccccatacctctcaccagcggtgtcttcagtatgtgaaaacccaattcttcaaccctacaggatccaacaggcaatcgcagcaggcatcttacctttatcacccttgttgcgcaacaaccgtcagccctattacagcagttacctttggtgcatttgttggcacaaaacattcaggcacaacaactacaacaacttgtgctaagaaaccctgcttgctactctcagcaacagcagtttcttccattcaaccaactggctgcatcgaactctgctgcttatttgcaacatcaactaccattcagtc

SEQ ID NO: 90869 - DNA, 332 bp, Zea mays
agcggatcgagatggcggcgtcggatgttgagtaccgctgcttcgtcggcggcctcgcctgggcgcacggacgaccactccctccacaacgccttcagcacctacggcgaggtcctcgagtccaagatcatcctcgatcgggagacgcagaggtcccgcggcttcggcttcgtcaccttctccacggaggaggcgatgcggaacgccatcgagggcatgaacggcaaggagctggacggccgcaacatcaccgtcaacgaggcccagtcccgcggcggccgtggaggcggctgcggcggcgggtacggtggtggccgtggaggcggcggcta

SEQ ID NO: 90870 - DNA, 359 bp, Zea mays
ccgagccctgcgctacacgcccgcgccgcctactcccgagcgtcgtctcctcccgagccccgcgatacacgcccgcgccgtcttctcccgagcgtagtaagcccgcctgcgtcgagcgccggccgagcgcctgcctgcgtctagcgcctgcctgcggtggacggatgagctgtacccgcgatatgatagactgtacgtgcagtaatggtatacggagaggagaccatgagagactggagactacagagaatgtggtggactgctaggtttttgtttattggaaaaatcagaaccctaatgggtacagacacaagacagtgtaatatggggactcgatcaacttggggttcgtaaaggat

SEQ ID NO: 90871 - DNA, 348 bp, Zea mays
aacatagaaagcacaatagtgtaccaacaatggcagccaaaatattttgcttccttatgctccggggtctttctgcacgtgttgctaccgaaaccattatgccacaatgctcacaagctcctataacttcccttcttcctccatacctttcaccagcggtgtctacaatgtgtgaaaccccaattgttcaatcctacagcatccatcaggcaatcacaacaggcattttaccattataaacttcgatcctgcaacaacagtgagtcctattacagcaatgacctttggtccattcgttggcacacagaatcaggacacaccaacttcagcacttggtcatatcaaact

SEQ ID NO: 90872 - DNA, 453 bp, Zea mays
tagcaacatagaaagcacaatagtgtaccaacaatggcagccaaaatattttgcttccttatgcgccttggtctttctgcaagtgttgctaccgcaaccattttcccacaatgctcacaagctcctatagcttcccttcttcccccatacctctcaccagcggtgtcttcaatgtgtgaaaccccaattgttcaaccctacaggatccaacaagcaattgcaacaagcattttaaccatattaaccttggttcttccaacaaccgtaagccttattacagcagttaccttgggtccatttggtggcacaaaacatcagggcacaacaactacaacaacttgtgctagcaaaccttgctgcatactctcagcaacatcagtttcttccattcaaccaactggctgcattgaactctgctgcttatttgcaacaacaattaccattcagccagct

SEQ ID NO: 90873 - DNA, 417 bp, Zea mays
  unsure (1)..(417): unsure at all n locations
ggtcttcagaccattagctttatctactccagagcgcagaagaacccgatcgacaccatgagggtgttgctcgttgccctcgctctcctggctctcgctgcgagcgccacctccacgcatacaagcggcggctgcggctgccagccaccgccgccggttcatctaccgccgccggtgcatctgccacctccggttcacctgccacctccggtgcatctcccaccgccggtccacctgccgncgccggtccacctgccaccgccggtccatgtgccagccgccgttcatctgccgccgccaccatgccactaccctactcaaaccgcccggcctcagcctcatccccagccacacccatgcccgtgccaacagccgcatncaagcccgtgccagctgcagggaacctgcggcgttggc

SEQ ID NO: 90874 - DNA, 402 bp, Zea mays
agaaagtggaatccagtagcaacaatagagcatcaatggcgaccaagatactttccctccttatgctccttgctctttctgcatgtgttgctaacgcgacaattttccctcaatgctcacaagctcctatagcttcccttcttcccccataccttccatcaatgatagcttcagtatgtgaaaacccagctcttcaaccctataggctccaacaagcaatcgcagcaagcaacatacctttatcacccttgtttcaacaatcgccagccctatctttggtgcagtcattggtacaaaccatcaaggcacagcagctgcagcaactcgtgctacctgtgatcaaccaagtagctctggcaaacctttctccctactatcagcaacaacaatttcttccattca

SEQ ID NO: 90875 - DNA, 419 bp, Zea mays
acctagcgaagcgcactagcaacgacctaacaacaatggcttccaagacattatccctccttgcgcttcttgccctttttgtgagtgcaacaaatgcgttcattattccacaatgctcacttgctccgagtgccattattccacagttcctccctccagttacttcaatgggcttcgaacacccagctgtgcaagcctataggctacaacaagcgcttggggcgagcgtcttaaaacaaccaattgcccaattacaacaacaatccttagcacatctaaccatacaaaccatcggaacgcaacagcaacaagcactgagccacctaacccgggtgaaccctatcggctacttggaacaaccggtggttgcattcaacccaattgctttggcaaacctaacttgataccaaccaccacca

SEQ ID NO: 90876 - DNA, 455 bp, Zea mays
cggttttggacaacgaagatgaccaacatgtgcttgtgcctcttgtaattggaaatatagaatgcagtgttgtggaagaaggaaagttcaggtactacaaattttcagttgaaggaaatgtgagtgagaaagtagcttctgggcatgcaaatatcgagattaaaatagatacggacgcgagcggtggtgacactgatatctatgtttcaagacatcctttagtatttccaactcagcaccgacatgagtggtcttctcatgaaatgggatcgaaggttcttatactcaaaccacgggatgctacattggtcagtggtgtttacagtattggagtttatggtttcaaagggacttttaagtaccagctctctgtagctatcaaggatgttagtggccaaaggattggtgaatatgctagtgcctcgggaagtgttgattttgattctgtgctgtgt

SEQ ID NO: 90877 - DNA, 354 bp, Zea mays
caaccaagtagctgccaggtattgcagcaacaatgttgtcatgatcttaggcagattgagccagaatacattcaccaagcaatctacaacatggttcaatccataatccaggaggagcaacaacaacaaccatgtgagttatgtggatctcaacaagctactcaaagtgcggtggcaatcttgacagcagcacaatacctaccatcaatgtgcggcttgtaccactcatactaccaaaataatccatgcagcagcaatgacattagtggtgtttgcaattgaagaattgtgtctacctagccgttatactcctataacggtgttaagcaataaagtaccatacattatgatgtt

SEQ ID NO: 90878 - DNA, 457 bp, Zea mays
cggacgcgtgggtgagaccaactagcaacatagaaagcacaatagtgtaccaacaatggcagccaaaatattttgcttccttatgctccttggtctttctgcaagtgttgctaccgcaaccattttcccacaatgctcacaagctcctatagcttcccttcttcccccatacctctcaccagcggtgtcttcaatgtgtgaaaccccaattgttcaaccctacaggatccaacaggcaatcgcaacaggcatcttaccattatcacccttgttcctccaacaaccgtcagccctattacagcagttacctttggtccatttggtggcacaaaacatcagggcacaacaactacaacaacttgtgctagcaaaccttgctgcatactctcagcaacatcaggttcttccattcaaccaactggctgcattgaactctgctgcttatttgcaacaacaa

SEQ ID NO: 90879 - DNA, 460 bp, Zea mays
gaattcccgggtcgacccacgcgttcgaacaggcaatcgcaacaggcatcttaccattatcacccttgttgctacaacaaccgtcagccctgggacggcagttacctttggtccatttggtggcacaaaacatcagggcacaacaactacaacaacttgtgctagcaaaccttgctgcatactctcagcaacatcagtttcttccattcaaccaactggctgcattgaactctgctgcttatttgcaacaacaattaccattcagccagctagttgctgcctacccccagcaatttcttccattcaaccaactagcagcattgaactctgctgcttatttacagcagcaacaactactaccattcagccagctagctgatgtgagccctgctgccttcttgacacaacaacagttgttgccgttctacctgcacgctatgcctaacgctggcaccctctt

SEQ ID NO: 90880 - DNA, 328 bp, Zea mays
gcagcagccgcaaagcgggcaggtcgcggggctgatggcggcgcatatagcgcaccaactgacggggatgtgcggcctgcagcagccgactccatgcccatacgctgctgccggcggtgttccccactgaagaaactatgtgctgtagtatatccgctggctagctagctagttgagccatctagcggcgatgatcgagtaataatgcgtcacgcatgaccatgggtggcacatgtcagtgtgagcaatgacctgaatgaacaattgaaatgaaatgaaaccaactagcaacaattgaactctgctgcttatttacagcagctacaac

SEQ ID NO: 90881 - DNA, 317 bp, Zea mays
ccggaattcccgggtgcttatttacagcagcaacaactactaccattcagccagctagctggtgtgagccctgctaccttcttgacacatccacagttgttgccgttctaccagcacgttgcgcctaacgctggcaccctcttacaactgcaacaattgctgccattcaaccaacttgctttgacaaacccagcagtgttctaccaacaacccatcattggtggtgccctcttttagatttcttatgagttatagttcaataataaagttttttatctgatgtttgtggcttcccagaaataagaaagtacatttct

SEQ ID NO: 90882 - DNA, 455 bp, Zea mays
ctagcaacatagaaagcacaatagtgtaccaacaatggcagccaaaatattttgcctccttatgctccggggtctttctgcaagtgctgctacggcgaccattttcccgcaatgctcgcaagctcctatagcttcccttcttcccccgtacctctcaccagcggtgtcttcggtatgtgaaaacccaattcttcaaccctacaggatccaacaggcaatcgcagctggcatcttacctttatcacccttgttcctccaacaatcatcagccctattacaacagttacctttggtgcatttattggcacaaaacatcagggcacaacaactacaacaacttgtgctagcaaaccttgctgcctactctcagcaacagcagtttcttccattcaaccaactaggttcattgaactctgcttcttatttgcaacaacaacaactaccattcagccagc

SEQ ID NO: 90883 - DNA, 351 bp, Zea mays
cccacgcgtccggaccaactagcaacatagaaagcacaatagtgtaccaacaatggcagctaaggtatgttgcctccttatgctccttggtctttctgcaagtgctgctacggcgaccattttcccacaatgctcacaagctcctatagcttcccttcttcccccgtacctctcaccaacggtgtcttcggtatgtgaaaacccaattcttcaaccctacaggatccaacaggcaatcgcagctggcatcttacctttatcacccttgttcctccaacaatcatcagccctattacagcagttacctttggtgcatttattggcacaaaacatcagggcacaacaactaca

SEQ ID NO: 90884 - DNA, 360 bp, Zea mays
gctgtggcaaaccctgctgcctacttacaacaggtgcttccattcaaccaactggctgggtcgggctctgctgcgtacctacaacagcgacaacagttacttaatccattggcagtggctaacccattggtcgctaccttcctgcagcagcaacaacaattgctgccatacaaccagttctctttgatgaaccctgccttgcagcaacccatcgttgaaggtgccatcttttagattacatatgagatgtactcgacaatggtgcccttataccgacatgtgtttcctagaaataatcaatatatcgattgagatttatctcgatataatacacacaccgataaacttaaatgcccttaa

SEQ ID NO: 90885 - DNA, 453 bp, Zea mays
agaagctgatcacaagatcccatcaacagaagtaaaacttgcctcagagtactacttctacatggaaacacagacagcactagcagttccagatgaagataacactttggtagtctacagttcgtcacagtaccctgaacttgcacaaagtgtcatagcaaggtgcttaggtattccattcagcaacgtgcgtgtcattacaagaagggttggaggaggctttcgtggaaaggcattcagatcattccaagttgcaacggcagctgcactttgtgcgtacaagttacggcgtcctgttcgaatgtaccttaatcgcaccaccgatatggtcatggttggtggtaggcacccagtgaaagctaattatactgtcggattcaagaacgatgggaacgttacggccttgcatctagatttattgattaacgctgggatatctccagatgcgagccc

SEQ ID NO: 90886 - DNA, 453 bp, Zea mays
tgagcattcagaaacacacctagcgaagcgcactagcaacgacctaacaacaatggctaccaagatattatccctctttgcgcttcttgccctttttgtgagcgcaacaaatgcgttcattattccacaatgctcacttgctcctagtgccattattccacagttcctacctccagttacttcaatgggcttcgaacacccagctgtgcaagcctacaggctacaacaagcgcttgcggcgagcgtcttacaacaaccaattgcccaattacaacaacaatccttggcacatctaaccatacaaaccatcgcaacgcaacagcaacaacaatttctaccagcactgagccaactagctgtggtgaaccctgtcgcctacttgcaacagcagttgcttgcatccaacccacttgctctggcaaacatagttgcataccaacaacaacaacaatt

SEQ ID NO: 90887 - DNA, 419 bp, Zea mays
cacctcctcgcttgcactccgctcgtctgacatctcgtcccgtcctttcgtttcgaagggtcgggagccccgacgatggccaccaccgcggtgtcggtcgacgagaagctcgataagcttcgcgccgaggtcgccaagctcgaccagatcagcgagaacgagaagtccgggttcatcagcctcgtgtcacggtacctcagtggggaggcggagcagatcgagtggagcaagatccagacccctacggatgaagtggtggtgccctacgataccgtcgcgtcgcctcccgaagatctcgaggagacgaagaagctgctggataagctcgttgtgctcaagcttaacggagggctcgggacgaccatgggctgcactgggcccaagtctgtcattgaagtccgcaatgggttcacattcct

SEQ ID NO: 90888 - DNA, 390 bp, Zea mays
agaccaactagcaacatagaaagcacaatagtgtaccaacaatggcagccaaaatattttgcctggttatgctccttggtctttctgcaagtgctgctactgcgaccattttcccgcaatgctcgcaagctcctatagcttcccttcttcccccgtacctctcaccagcggcgtcttcggtatgtgaaaacccaattcttcaaccctacaggatccaacaggcaatcgcagctggcatcttacctttatcacccttgttactacaacaatcatcagccctattacaacagttacctttggtgcatttattggcacaaaacatcagggcacaacaactacaacaacttgtgctagcaaaccttgctgcctactctcagcaacagcagtttc

SEQ ID NO: 90889 - DNA, 398 bp, Zea mays
ctccccgttccccagtccccacgccgaccggctggtcctcctcctttccccgcgccatcctcgaggcatcgccggctccgcatcttcgttcaggaggaagcccgcacccggccccgatccgatggccaacagctacctcccgcgtcgtatcatcaaggatacgcagcgactgctcatcgagccagcgccggggatcagcgcgtcgctctcggaggagaacatgcgctacttctacgttatgatccttgtgccggcgcattctccctatgaaggtggagttattacgcttgaactctttttacctgaggaatatcccatggctgccccaacggttacgtctctgaccaagatctatcatccctacattgacaagctaggtacgatatgcctcgacattc

SEQ ID NO: 90890 - DNA, 359 bp, Zea mays
gtgcatttattggcacaaaacatcagggcacaacaactacaacaacttgtgctagcaaaccttgctgcctactctcagcaacagcagtttcttccattcaaccaactaggttcattgaactctgcttcttatttgcaacaacaacaactaccattcagccagctacctgctgcctacccccagcaatttcttccattcaaccaactagcagcattgaactctcctgcttatttacagcagcaacaactactaccattcagccagctagctggtgtgagccctgctaccttcttgacacaaccacagttgttgccgttctaccagcaccttgcgcctaacgcttgcacccttttacaact

SEQ ID NO: 90891 - DNA, 312 bp, Zea mays
caacagttatgacaactgtccatgaagatttgacctgtgcgatgcatactatcttaggtatcaggggatgcctgagtttgaccacgcaatgcaacattttgaccctaaatatgaatgcacgacatttgatcaccactatatctcccgctaccatgcagacgactacgtgattgctacccacagagggagacttgcattcagccgactaacttccactgcactatcatgtatattgactaccgcatcgctagctaaatgcctgcagtgtataaggtgtgatcgtactacgacgcttgactatccacaggattt

SEQ ID NO: 90892 - DNA, 458 bp, Zea mays
attttcagcattcaaaaacacaccaagcgaagcgcactagcaacgacctaacaccaatggctagcaaggtattagccctccttgcgcttcttgcccttttagtgagcgcaacaaatgcgttcattattccacagtgctcacttgctcctagtgccattattccacagttcctcccaccagttacttcaatgggcttcgaacatccagccgtgcaagcctacaggctacaactagcgcttgcggcgagcgccttacaacaaccaattgcccaattgcaacaacaatccttggcacatctaaccctacaaaccattgcaacgcaacaacaacaacaacaacagtttctgccatcactgagccacctagccgtggtgaaccctgtcacctacttgcaacagcagctgcttgcattcaacccacttgctttggcgaacgtagctgcataccagcaacaacaa

SEQ ID NO: 90893 - DNA, 395 bp, Zea mays
attatgtagaccaactagcaacatataaagcacaatagtgtaccaacaatggcagccagaatattttgcctccttatgctccttggtatttctgcaagtgctgctacggcgaccattttcccgcaatgctcacaagctcctatagcttcccttcttcctccgtacctctcaccagcggtgtcttcggtatgtgaaaacccaattcttcaaccctacaggatccaacaggcaatcgcagctggcatcttacctttatcacccttgttcctacaacaatcatcagccctattacaggaattacctttggtgcctttattggcacaaaacattagggcacaaccacttccacaacttgtgctagcaaaacttggtggctaattttaacaaccacagtt

SEQ ID NO: 90894 - DNA, 453 bp, Zea mays
gaagaacccgatcgacaccatgagggtgttgctcgttgccctcgctctcctggctctcgctgcgagcgccacctccacgcatacaagcggcggctgcggctgccagccaccgccgccggttcatctaccgccgccggtgcatctgccacctccggttcacctgccacctccggtgcatctcccaccgccggtccacctgccgccgccggtccacctgccaccgccggtccatgtgccgccgccggttcatctgccgccgccaccatgccactaccctactcaaccgccccggcctcagcctcatccccagccacacccatgcccgtgccaacagccgcatccaagcccgtgccagctgcagggaacctgcggcgttggcagcaccccgatcctgggccagtgcgtcgagtttctgaggcatcagtgcagcccgacggcgacgccctactgctc

SEQ ID NO: 90895 - DNA, 449 bp, Zea mays
aagcaacatagaaagcacaatccattagcaacaatagagcaacaatggcgaccaagatggttggcgtgcttatgctccttgctctttctacatgtggtgctaacgcgacaatgttccctcaatgctcaccagctcctatcgctttccttctttccccataccttccattaattataggtttaatatgtcaaaacccaagtcttcaaccatataagcttcaacaagcaatcatattcagccacatacctttattgcccttggtggttcaacaatcaccaggcctatctttggtgcaaacattggtacaaaccatcagggcacaacagctgcagcaactcgtgctacctgtgatcaaccaagtaactctggcaaacctttctccctactctcagcgacaacaattttcttccattcaaccaactgtctacactgaaccctgctgcttattt

SEQ ID NO: 90896 - DNA, 347 bp, Zea mays
aagcttcctatagtcttcaccttcttcaccccgtatcctctcatccagcggtgtacttcggtatgtgaaaatcccatattcttcaactcctacaggtatccaacatggcatatcgcatgctggcatacttatcctttatcatcccttgttcctccaacatatcatcgagccctattacaatcagttactcttttggtgcatttaattggcacataaacatcatgggcacatacaactacatacaacttgtgctagcaaacgcttgctgcctactctcatcaacagcagtttcttccattcaaccaactaggttcattgaactctgcttcttatttgcaacaacaaca

SEQ ID NO: 90897 - DNA, 439 bp, Zea mays
gcgaagcgcactagcaacgacctaacaacaatggctaccaagatattagccctccttgcgcttcgtgccctttttgtgagcgcaacaaatgcgttcattattccacaatgctcacttgctcctagtgccattattccacagttcctaccaccagttacttcaatgggcttcgaacacctagctgtgcaagccaacatgcaacaacaagcgcttgcggcgagcgtcttacaacaaccaattgcccaattgcaacaacaatccttgccacatctaacaatacaagccatcacaacgcaacagcaacaacagttcctaccagcactgagccacctagccatggtgaaccctgccggctacttgcaagagcagctgcttgcatccaacccacttgctctggcgaacgtagttgcaaaccagcaacatcaacagctacaacagt

SEQ ID NO: 90898 - DNA, 319 bp, Zea mays
cccacgcgtacggcggcagcagtgttgccagcagctcacgcaggtggagccgcagcaccggtacgaggcgatcttcggattggtcctccagtccatcctgcagcagcagccgcaaagcggccaggtcgcggggctgttggcggcgcagatagcgcagcaactgacggcgatgtgcggcctgcagcagccgactccatgcccctacgctgctgccggcggagtcccccactgaagaaactatgcgctgtagtatagccgctggctagctagctagctgagtcatttatcggcgatgatcgggtaataatgtgtcacgcat

SEQ ID NO: 90899 - DNA, 403 bp, Zea mays
ccggaattcccggggaccaactagcatcatagaaagcacaatagtgtaccaacaatggcagccaaaatattttgcctacttatgctccttggtcgttctgcaagtgctgctacggcgaccattttcccgcaatgctcgcaagctcctatagcttcccttcttcccccgtacctctcaccagcggcgtcttcggtatgtgaaaacccaattcttcaaccctacaggatccaacaggcaatcgcagctggcatcttacctttatcacccttgttcctccaacaatcatcagccctattacaacagttacctttggtgcatttattggcacaaaacatcagggcacaacaactacaacaacttgtgctagcaaaccttgctgcctactctcagcaacagcagtttc

SEQ ID NO: 90900 - DNA, 455 bp, Zea mays
tattttcagcattcaaaaacacaccaagcgaagcgcactagcaacgacctaacaccaatggctgccaagatattagccctccttgcgcttcttgcccttttagtgagcgcaacaaatgcgttcattattccacagtgctcacttgctcctagtgccattattccacagttcctcccaccagttacttcaatgggcttcgaacatccagccgtgcaagcctacaggctacaactagcgcttgcggcgagcgccttacaacaaccaattgcccaattgcaacaacaatccttggcacatctaaccctacaaaccattgcaacgcaacaacaacaacaacaacagtttctgccatcactgagccacctagccgtggtgaaccctgtcacctacttgcaacagcagctgcttgcattcaacccacttgctctggcgaacgtagctgcataccagcaaca

SEQ ID NO: 90901 - DNA, 447 bp, Zea mays
  unsure (1)..(447): unsure at all n locations
ctgatcctgccaacttggagaagttccttggaactataccaatgatgttcaatgttgtgatccgttctcctcatggctacttcgctcagtccaatgtgcttggataccctgacactggcggtcaggttgtgtacattctggatcaagtccgtgctttggagaatgagatgcttctgaggattaagcagcaaggccttgatatcactccgaagatcctcattgttaccaggctgttgcctgatgctgctgggactacgtgcggtcagcggctggagaaggtcattggtactgagcacacagacatcattcgcgttccgttcagaaatgagaatggcatcctccgcaagtggatctctcgttntgatgtctggccatacctggagacatacactgaggatgtttccagtgaaataatgaaagaaatgcaggccaagcctgaccttatca

SEQ ID NO: 90902 - DNA, 408 bp, Zea mays
caacaagcaacatagaaagtggaatccagtagcaacaatagagcaacaatggcgaccaagatagtttccctccttatgctccttgctctttctgcatgtgttgctaacgcgacaattttccctcaatgctcacaagctcctatagcttcccttcttcccccataccttccatcaatgatagcttcagtatgtgaaaacccagctcttcaaccctataggctccaacaagcaatcgcagcaagcaacatacctttatcacccttggttcaacaatcgccagccctatctttggtgcagtcattggtacaaaccatcaaggcacagcagctgcagcaactcgtgctacctgtgatcaaccaagtagctctggcaaacctttctccctactatcagcaacaacaatttctt

SEQ ID NO: 90903 - DNA, 345 bp, Zea mays
ttttcagcattcaaaaacacaccaagcgaagcgcactagcaacgacctaacaccaatggctacgaagatattagccctccttgcgcttcttgcccttttagtgagcgcaacaaatgcgttcattattccacagtgctcacttgctcctagtgccattattccacagttcctcccaccagttacttcaatgggcttcgaacatccagccgtgcaagcctacaggctacaactagcgcttgcggcgagcgccttacaacaaccaattgcccaattgcaacaacaatccttggcacatctaaccctacaaaccattgcaacgcaacaaccacaacaacaaccgtttct

SEQ ID NO: 90904 - DNA, 447 bp, Zea mays
cgaagcgcactagcaacgacctaacaccaatggctaccaagatattagccctccttgcgcttgttgcccttttagtgagcgcaacaaatgcgttcattattccacagtgctcacttgctcctagtgccagtattccacagttcctcccaccagttacttcaatgggcttcgaacatccagccgtgcaagcctacaggctacaactagcgcttgcggcgagcgccttacaacaaccaattgcccaattgcaacaacaatccttggcacatctaaccctacaaaccattgcaacgcaacaacaacaacaacaagttctggcatcactgaaccaacctacccgtgtgaaaccctgtcacctacttgcaacagcagctgcttgcatccaacccacttgctctggcgaacgtagctgcttaccagcaacaacaacagcttgcacagtttatg

SEQ ID NO: 90905 - DNA, 316 bp, Zea mays
ctccttatgcgcgttggtctttctgcaagtgctgctacggcgaccattttcccgcaatgctcgcaagctcctatagcttcccttcttcccccgtacctctcaccagcggtgtcttcggtatgtgaaaacccaattcttcaaccctacaggatccaacaggcaatcacagcttgcatcttacctttatcacccttgttcctccaacaatcatcagccctattacatcagttacctttggtgcatttattggcacaaaacatcagggcacaacaactaccacaacttgggctaacaaaccttggtggctaattttaac

SEQ ID NO: 90906 - DNA, 387 bp, Zea mays
gaccaactagcaacatagaaagcacaatagtgtaccaacaatggcagccaaaatattttgcttccttatgctccttggtctttctgcaagtgctgctaccgcaaccattttcccacaatgctcacaagctcctatagcttcctttcttcccccatacctctcaccagcggtgtcttcagtatgtgaaaacccaattcttcaaccctacaggatccaacaggcaatcgcagcaggcatcttaccttaataaccctggttcctccaccacccgtaagccctattacagcagttaccttggggccattggttgccccaaaccatcaaggcccaccacctccaccacctggtgctaggaaaccttgctgcctactctaaccaccagcagtt

SEQ ID NO: 90907 - DNA, 435 bp, Zea mays
caacaatggcggccaagatattttccatccttatgctccttgctctttctgcatgtgttgctaacgcgagcatttttcctcaatactcacaagctcctatagctgcccttcttcccccataccttccatcaatgaccgcttcagtttgtgaaaacccagcccttcaaccctacaggctccaacaagcaatcgcaacaagcaacttacctttatcacccctgttctttcaacaatcgccagccctatctttggtgcagtcattggtacaaaccatcagggcacaacagctgcaacaactcgtgctaccagtgatcagccaagtagctctggcaaacctttctccctactctcagcaacaacaatttcttccattcaaccaactgtctacactgaaccctgctgcttatttacaacatcaacaactactaccattca

SEQ ID NO: 90908 - DNA, 407 bp, Zea mays
agaccaactagcaacatagaaagcacaatagtgtaccaacaatggcagccaaaatattttgcctccttatgctccttggtctttctgcaagtgctgctacggcgaccattttcccacaatgctcacaagctcctatagcttcccttcttcccccgtacctctcaccagcggtgtcttcggtatgtgaaaacccaattcttcaaccctataggatccaacaggcaatcgcagctggcatcttacctttatcacccttgttcctccaacaatcatcagccctattacagcagttacctttggtgcatttattggcacaaaacatcagggcacaacaactacaacaacttgtgctagcaaaccttgctgcctactttcagcaacaacagtttcttccattcaaccaacta

SEQ ID NO: 90909 - DNA, 459 bp, Zea mays
gcaacatataaagcacaatagtgtaccaacaatggcagccaaaatattttgccttcttatgctgcttggtctttctgcaagtgctgctacggggaccattttcccgcaatgctcgcaagctcctataagttcccatctttccccgtacctctcaccagctgtgtcttcggttgggaaaacccagttcttcaaccctacaggatccaacaggcaatcacagctggcatcttacctttatcacccttgatcctccaacaatcatcagccctaatacatcagttacctttggtgcatttattggcacaaaacatcagggcacaacaactacaacaacttgtgctagcaaaccttggtgcctactcttagcaacagcagtttcttccattcaaccaactagctgcattgaactctgcttcttatttgcaacaacaacaactaccattcagccagctacctgct

SEQ ID NO: 90910 - DNA, 341 bp, Zea mays
  unsure (1)..(341): unsure at all n locations
ccggaattcccgggctccgcagtgcctctgctctcgaggtggcggcgctccctcctgtcttcctcttcttcttcctgtactatatagcctccggtcgcggatcgtcactgacgagtgatgtcattccgcttgcttgattgttccacatattcgcagttgaccgggtcctcggagcacgatgaagtttgttgctgcctacttgcttgctgtcctcgctgggaacgccagcccctccgctgaagatttgactgccattctggagtcagttggctgtgaagttgacaatgaaaggatggaactcctgctgtcccaactgagncgcaatgacatcaccgagctca

SEQ ID NO: 90911 - DNA, 445 bp, Zea mays
gaccattagctttatctactccagagcgcagaagaacccgatcgacaccatgagggtgttgctggttgccctcgctctcctggctctcgctgcgagcgccacctccacgcatacaagcggcggctgcggctgccagccaccgccgccggttcatctaccgccgccggtgcatctgccacctccggttcacctgccacctccggtgcatctcccaccgccggtccacctgccgccgccggtccacctgccaccgccggtccatgtgccgccgccggttcatctgccgccgccaccatgccactaccctactcaaccgccccggcctcagcctcatccccagccacacccatgcccgtgccaacagccgcatccaagcccgtgccagctgcagggaacctgcggcgttggcagcaccccgatccctggccagtgcctcgagtttctg

SEQ ID NO: 90912 - DNA, 352 bp, Zea mays
cccacgcgtccgccgcaaccctcttacaactgcaacagttgctgccctttgtccaacttgctttgacaaacccagcagccttctaccaacaacacatcattggcggtgccctcttttagattgcttattagttgtaattcaataatgaagttttttggctgatgtatgtggcctcctagaaataagaagttatatttccaaaaaacaaatacaaacgacagtacaactgacaacgacagaacaaactgacaacgacagtccatgtgccgacgacggttcatctgccggcgacaccatgccactaccctacttaaccgacccggcctaaaaaaaaaaggggggccctttttaa

SEQ ID NO: 90913 - DNA, 413 bp, Zea mays
aacagcaacatattatagcactctgcagccgggatccatgtggctaaacatcatggcataaagttctcggcagtaagaggcagcagcaataattcctccacaaacttctaacttcagaaatataaagtaacacttaggccagcattcggccgttctccaaatcaaaaacttattcttcctcctcagcctcctcgagccatttgacaaacggctccagagctttcacgaaagattgcctgcccttctggtttgaacctttacggaaccaaagcaggacagtatcttcagctaggacatcttggtcatacagtgttcttatgatttcaggaaacagcttcatcagcttagcatcctcatagcactgtgtctgtactttgtatataagttccagttcgagtctgccactcgtgcaa

SEQ ID NO: 90914 - DNA, 422 bp, Zea mays
cactgaaccccgctgcttatttgcagcagctaatactactaccatttagccagctagctgcagcaaaccgtgctttcttcttgacacagcaacagttgctgcctttctaccagcagtttgcggctaaccccgcaaccctcttacaactacaacaattgttgccctttgtccaacttgctttgacagacccagcggcctcctaccaacaacacatcattggtggtgccctcttttagattgcttattagttgtaattcaataataaagtattttggatgatgtatgtggccaaccagatataagatgttacatttccaaaagatattatgatttcaggaaacagcttcatcagcttaacattctcatagcactgtgtctgtactttgtatataagttccatttcgagtctagcactcgtgcaa

SEQ ID NO: 90915 - DNA, 428 bp, Zea mays
gcaacatagaaagcacaacagtgtaccaacaatggcagccaaaatattttgcctccttatgctacgggggctttctgcaagtgctgctacggcgaccattttcccgcaatgctcgcaagctcctatagcttgccttcttccaccgtacctatcaccagcggagtcttacgtatgtgaaaacccaattcttcaaccctacaggatccaacaagcaatcgcagctggcatattacctttatcacccttgttacttcaacaatcatcaggcctattacaacagttacctttggtgcatttattggcaccaaacatcaaggctcaacaactaccacaacttgtgctaacaaaccttggtggctactgttagcaacagcaggttccttcattcgacccacttggctcattgaactccgcttcttaattgcaac

SEQ ID NO: 90916 - DNA, 387 bp, Zea mays
attcccgggtcgacgccacgcgtccggcaacatagaaagcacaatagtgtaccaacaatggcttccaaaatattttgcctccttatgctaggggggctttctacaagtgctgctacggcgaccattttcccgcaatgctcacaagctcctatagcttcccttcttcccccgtacctatcaccagcggcgtcttacgtatgtgaaaacccaattcttcaaccctacatgatccaacaggcaatcgcagctggcatattacctttatcacccttgttccttcaacaatcatcagccctattacaacagttacctttggtgcatttattggcacaaaacatcaaggcacaacaactacaacaacttgtgctagcagaccttgctgcctac

SEQ ID NO: 90917 - DNA, 389 bp, Zea mays
  unsure (1)..(389): unsure at all n locations
attgagaccaactagcaacatagaaagcacaatagtgtaccaacaatggcagccaaaatatttggcctgcttatgctccttggtctttctgcaagtgctgctacggcgaccattttcccgcaatgctcgcaagctcctatagcttcccttcttcccccgtacctctcaccagcggtgtcttcggtatgtgaaaacccaattcttcaaccctacaggatccaacaggcaatcgcagctggcatcttacctttatcacccttgttcctccaacaatcatcagccctattacaacagttacctttggtgcatttattggcacanaacatcanggcacaacaactacaacaccttgtgctagcaaaccttgctgcctactctcagcaacagca

SEQ ID NO: 90918 - DNA, 454 bp, Zea mays
gtgatttcaggtggcgcgcctggcaagcataaaatccagggagtaggcccaaggtttctacctggaggtgtggacacctcggtcatcgacgagaccgtcaccgtgagcaccgaagaagccatggcgaatgcgaagaggcttgccaaggaagaaggcctgctcgtgggcatttctttcggagcaaacctggcagcttgtttgaaaggtcgtttcagacaagagaacaagggcaagattaatcgtactgtgtttccaaatgggggggagagatacattaacttcgaactctttgcacatatgccagaagagtgcattggcatgacattttgagctttcctttttcttttggacactttggtctgaatggtgtcagcattcttcacaccacacagacatattttcaggacatggtgttgtaaatttagagaaatatgtgacatgctttctacatatt

SEQ ID NO: 90919 - DNA, 390 bp, Zea mays
accggtccggaattcccgggatcccgtcgcatcccatcccagtaccacccatctcgtcgtccgccgattcgatccggttcttccaacccaggggctgtgggggcgacgaagaggagcgtgggcaccctcggcgaggcggatctgaaggtgaagaaggtgttcgtgcgcgccgacctcaacgtccctctcgacgacgcccagaagatcaccgacgacacccgcatccgcgcctacgtccccaccatcaagttcctcctcgagaagggcgccaaggtcatcctcggcagccacctgtgtcgtgcaaaaggtgtcaccctaaagtacagcttgaagcctcttgatccacgcttgtctgagctccttggagttgaagtcgtgatggccaatgat

SEQ ID NO: 90920 - DNA, 371 bp, Zea mays
atcccactaccacccatctcgtcgttcgccgattcgatccggttcttccaacccagggggtgggggggcgacgaagaggagcgtgggcaccctcggcgaggcggatctgaacgtgaagaaggtgttcgtgcgcgccgacctcaacgtacctctcgacgacgcccagaagatcaccgacgacacccgcatccgcgcctacgtccccaccatcaagttcctcctcgagaaaggcgccaaggtcatcctcgccagccacctgggtcgtccaaaaggtgttaccccaaagtacagcttgaaacctcttggtccacgcttgtctgagcttcttggagttgaagtcgtgatggccaatgattgcattggtgaggaag

SEQ ID NO: 90921 - DNA, 445 bp, Zea mays
tagcaattagctcatcgactccagattggagaactcgacaccatgaaggtgctgatcgttgcccttgctctcctggcgctcgctgcgagcgccgcctccagtacaagcggcggctgtggctgccagacaccaccgtttcatctaccgcctccgttctatatgccgcctccgttctatctgccgccgcagcagcagccgcagccatggcaataccccactcaaccaccgcagctaagcccgtgccagcagttcggatcctgcggcgtcggcagcgtcggcagcccgttcctgggccagtgcgtcgagttcctgaggcaccagtgcagcccggcggcgacgccctacggctcgccacagtgccaggcgctgcagcagcagtgctgccaccagatcaggcaggtggagccgctgcaccggtaccaggcgacatacggtgtggtcctgc

SEQ ID NO: 90922 - DNA, 458 bp, Zea mays
cgccctcgttatttacatcgctgccaccctcctctccgccgtcgccgccgccgccggggatggggggagcgcaattccccggcgacaacgacgtcgcggaagtagacgcggcccgcgacggagaggtggaccgccgtgacgtgggcaagatgaagcacgggtgcgagcattaccggcggaggtgcaagatcgtggcaccgtgctgcaaccaggtgttcccctgccgccactgccacaacgaggctacggcttccggagatcggcatacaatatgtcgtcaggatgttgaaaaagtagtttgcctactctgtgaaacaaaacagccggtgtcacaagtgtgcataagctgtggagtcaatatgggagagtacttttgtgatatatgcaaattttatgatgatgatacagacaaagggcagtaccattgcatcgattgtggcatatgcagggttggtggc

SEQ ID NO: 90923 - DNA, 341 bp, Zea mays
aacaagcaacatagaaagtggaatccagtagctacaatagagcaacaatggcgaccaagatattggccctccttatgctccttgctctttctacatgtgttgctaacgcgacaattttccctcaatgctcacaagctcctatagcttcccttcttcccccataccttccatcaattatagcttcaatatgtgaaaacccagctcttcaaccatataggcttcaacaagcaatcgcagcaagcaacatacctttatcgcccttgttgtttcaacaatcgccagccctatctttggtgcagtcattggtacaaaccatcaaggcacaacagctgcagcaactc

SEQ ID NO: 90924 - DNA, 417 bp, Zea mays
agaccattagctgtatctactccagagcgcagaagaacccgatcgacaccatgagggtgttgctcgttgccctcgctctcctggctctcgctgcgagcgccacctccacgcatacaagcggcggctgcggctgccagccaccgccgccggttcatctaccgccgccggtgcatctgccacctccggttcacctgccacctccggtgcatctcccaccgccggtccacctgccgccgccggtccacctgccaccgccggtccatgtgccgccgccggttcatctgccgccgccaccatgccactaccctactcaaccgccccggcctcagcctcatccccagccacacccatgcccgtgccaacagccgcatccaagcccgtgccagctgcaaggaacctgccgcgttggcagcaccc

SEQ ID NO: 90925 - DNA, 493 bp, Zea mays
  unsure (1)..(493): unsure at all n locations
accgctccggaattcccgggctcacacgcacgaagcatcagcagtggactggactagctctaggtgggcaacatgaagcttcagaccaccgtcaccgttgctggcctcctcctcttcctcctcctcctggcgctgccttccctccgcgtctccatggctggatcagggttctgcgacggcaagtgcgcggtgaggtgctccaaggcgagccggcacgacgactgcctcaagtactgcgggatctgctgcgccacctgcaactgcgtgccgtccgggaccgcgggcaacaaggacgagtgcccatgctaccgcgacatgaccaccggacacggcaaccgcaccaggcccaagtgcccctgatgatattcattccttcgctctgtcttgcatgcgtatgtaatgtataggctgtgcaatgcatgcatacatgatacatgccgtgactctggatcggcggatgcctatgcatgcttttcactagctnaatatacta

SEQ ID NO: 90926 - DNA, 264 bp, Zea mays
attcccgggtacgacgtacgcgttcgtgctcactctacaaggagagctctgctgggagaatcaaatgaatttgttggaaacaaggttgcgtatgccctgtcttagggactaaaggtcattgcatgtgttggtgagacccttgagcagaaggaggctgggtctaccatggatgttggtgctgcacaaacgaaagcaattgctgagaagatcaaggactggagcaacgtagtttgtgcctatgaaccatgttgggctatcggaact

SEQ ID NO: 90927 - DNA, 425 bp, Zea mays
  unsure (1)..(425): unsure at all n locations
caacatgcaacattgaaagtggaatacagtagcaaaaatagagcaacaatggcggccaagataggttgcatccttatgctcctagctctttctgcatgtgttgctaacgcgaccatacttcctcaatactcacaagctcctatagctgcccttcttccgccataccttccatcaatgaccgctttaatatgtgaaaacccagcccttcaaccctacaggatccagcaagcaatcgcaacaagcaacttacctttatcacacctgttctttcaacagtcgccagccctatctttggtgcaggcattggtacaaaccatcagggcagaacagttgcagcaactcgtgctaccagtgatcagtcaagtagctctggcaaacctttccccctactctcagcaacaacaatntcttgcattcaaccaact

SEQ ID NO: 90928 - DNA, 464 bp, Zea mays
tgctaacgcgacaattttccctcaatgctcacaagctcctatagcttcccttcttcccccataccttccatcaatgatagcttcagtatgtgaaaacccagctcttcagccctataggctccaacaagcaatcgcagcaagcaacatacctttatcacccttgttgtttcaacaatcgccagccctatctttggtgcagtcattggtacaaaccatcagggcacagcagctgcagcaactcgtgctacctgtgatcaaccaagtagctctggcaaacctttctccctactctcagcaacaacaatttcttccattcaaccaactgtctacactgaaccctgctgcttatttgcagcaacaactattaccattcagccagctagctactgcctactctcagcaacaacaacttcttccatttaaccaattggccgcactgaaccccgctgcttatttgcagcagc

SEQ ID NO: 90929 - DNA, 455 bp, Zea mays
aacaagcaacatagaaagtggaatacagtagcaaaaatagagcaacaatggcggccaagatatggtccatccttatgctccttgctctttctgcatgtgttgctaacgcgaccatttttcctcaatactcacaagctcctatagctgcccttcttcccccataccttccatcaatgaccgctttagtatgtgaaaacccagcccttcaaccctacaggatccagcaagcaatcgcaacaagcaacttacctttatcacacctgttctttcaacaatcgccagccctatctttggtgcagtcattggtacaaaccatcagggcagaacagttgcagcaactcgtgctaccagtgatcagccaagtagctctggcaaacctttccccctactctcagcaacaacaatttcttccattcaaccaactgtctatactgaaccctgctgcttatttgcag

SEQ ID NO: 90930 - DNA, 434 bp, Zea mays
gcaacatagaaagtagaatccattagcaacaatagagcaacaatggcgaccaagatattttccctgcttgtgctccttgctctttctacatgtgttgctaacgcgacaattttccctcaatgctcacaagctcctatagcttcccttcttcccccataccttccatcaattatagcttcagtatgtgaaaacccagctcttcaaccatataggcttcaacaagcaatcgcagcaagcaacatacctttatcgcccttgttgtttcaacaatcaccagccctatctttggtgcagtcattggtacaaaccatcagggcacaacagctgcagcaactcgtgctacctgtgatcaaccaagtagctctggcaaacctttcttcctactctcagcaacaacaatttctttcattcaacccactggctacactgaaccc

SEQ ID NO: 90931 - DNA, 374 bp, Zea mays
ttcccgggtcgacctacgcctacatagaaagtataatccattagcaacattagatcaacaatggcgaccaagatattttcccgccttgtgctccttgctctttctacatgtgttgctaacgcgacaattttccctcaatgctcacaagctcctatagcttcccttcttcccccataccttccatcaattatagcttcagtatgtgaaaacccatctcttcaaccatatatgcttcaacaagcaatcgcagcaagcaacatacctttatcgcccttgttgtttcaacaatcaccagccctatctttggtgcagtcattggtacaaaccatcatggcacaacagctgcagcaactcatgctacctgtgatcaacca

SEQ ID NO: 90932 - DNA, 356 bp, Zea mays
cccacgcgtccgtagcaacatagaaagcacaatagtgtaccaacaatggcagccaaaatattttggctcggtatgctccttggtctttctgcaagtgctgctacggcgaccattttcccgcaatgctcgcaagctcctatagcttcccttcttcccccgtacctctcaccagcggtgtcttcggtatgtgaaaacccaattcttcaaccctacaggatccaacaggcaatcacagctggcatcttacctttatcacccttgttcctccaacaatcatcagccctattacatcagttacctttggtgcatttattggcacaaaacatcaaggcacaacaactaacacaacttgggct

SEQ ID NO: 90933 - DNA, 353 bp, Zea mays
caaaagcacaccaagcgaagcgcactagcatcgacctatcaccaatggctaccaagatattagggctccttgcgcttcttgcccttttagtgagcgcaacaaatgcgttcattattgcacagtgctcacttgctcctagtgccagtattccacagttcctccaaccagttacttcaatgggcttcgaacatccagccgtgcaagcctacaggctacaactagcgcttgcggcaagcgccttacaacaaccaattgcccaattgcaacaccaatccttggcacatttaaccttacaaaccattgcaacgcaccaccaacaacaccagtttttgccatcactgagccacctagcc

SEQ ID NO: 90934 - DNA, 386 bp, Zea mays
gaatttccgggtcgacccacgcgtacgcaactagcaacatagaaagcacaatagtgtaccaacaatggcagccaaaatattttgcctactgaggctggttggtctttctgcaagtgctgctaccgcgaccattttcccgcattgctcgcaagctcctatagcttcccttcttcccccgtacctgtaaccagcggtgtcttcggtatgtggaaaacccaatttttaaaccttccagaacccaacaggcattaccagctggcatttaaccttaataaccctggttcctccaccattattcacccttttaccttaattacccttagcgcctttaatggcaccaaacattaaggcacaaccacctccacaacctgggctatcaaaacttg

SEQ ID NO: 90935 - DNA, 362 bp, Zea mays
aatttccgggtcgacccacgcgtacgctcctgtctcgcatccgcagcctctcgagctctactccatcccctcgatctcgaagcgcagcagcagcagtcaggcggtcatggacgcgagcgcagtcggagccggcgggaaggcgaagaagggcgcggtcggtcgcaaggccggcgggccgaggaagaagtcggtgactaggtccgtcaaggccgggctgcagtttcccgtcggtcgcatcgggcggtacctgaagaagggccggtccgcgcatcgcgtcggaacgagcgcccccgtctacctggccgtcgtcctcaagtacttggccgccgaggtgctggagctggccggcaacgctgccaagg

SEQ ID NO: 90936 - DNA, 119 bp, Zea mays
caacaacccatcattggtggtgccctcttttagattgcttatgagttatacttcaataatgaaggtttttggatgatgtttgtggcttcccagaaataagaaagtacatttctagattc

SEQ ID NO: 90937 - DNA, 113 bp, Zea mays
attgagaccaactatcaacatacattgcacaacaatgcaccaacaatggcctctaatagatatggtctccttatgctccttggtctttcttcaagtgctgcatactgcgacca

SEQ ID NO: 90938 - DNA, 452 bp, Zea mays
gtcaggctagcaattagctcatcgactccatattggagaactcgacaccatgaaggtggtgatggctgcccttgctctcctggcgctcgctgcgagcgccgtctacagtacaagcggcggatgtggctgccagacaccaccgtttcatctaccgcctccgttctatatgccgcctccgttctatctgccgtcgcagcagcagtcgcagccatggcaataccccactcaaccaccgcagctaagcccgtgccagcagttcggatcctgcggcgtcggcagcgtcggcagcccgttcctgggccagtgcgtcgagttcctgaggcaccagtgcagcccggcagcgacgccctacggctcgccacagtgccaggcgctgcaacagcagtgctgtcaccagatcaggcaggtggagccgctgcaccggtaccaggcgacatacggagtggtcctgc

SEQ ID NO: 90939 - DNA, 441 bp, Zea mays
gcgtccggcaactagcaacatagaatgcacaatagtgtaccaacaatggcaaccaaaatattttgcgtactgatgctccttggtctttctgcaagtgctgctaccgcgaccattttcccgcaatgctcacaagctcctatagcttaccttcttcccccatacctctcaccagcggtgtcttcagtatgtgaaaacccaattcttcaaccctacaggatccaacaggcaatcgcagcacgcatcttacctttatcacccttgatcctacaacaaccgtcagccctattacagcagttacctttggtgcatttgttggcacaaaacatcagggcacaacaactacaacaacttgtgctagcaaaccttgctgactactctcagcaacagcagtttcttacattcaaccaactggctgcattgaactctgctgcttatttgcaa

SEQ ID NO: 90940 - DNA, 349 bp, Zea mays
attgagaccaactagcaacatagaaagcacaatagtgtaccaacaatggcagccaaaatattttgcctccttatgctccttggtctttctgcaagtgctgctacggcgaccattttcccgcaatgctcgcaagctcctatagcttcccttcttcccccgtacctctcaccagcggtgtcttcggtatgtgaaaacccaattcttcaaccctacaggatccaacaggcaatcacagctggcatcttacctttatcacccttggtcctccaacaatcatcagccctattacatcagttacctttggtgcatttattggcacaaaacatcaaggcacaacaactacaacaac

SEQ ID NO: 90941 - DNA, 430 bp, Zea mays
gtcgtcccgaccttcttttcaatcccgtctcggattcgttccgtctcagctaccgcgacgacgaggccgacgcgagagggcagggaacacagccactcgccgacgagaccccggcgcgcgcgagagaaagagaagagaggaggatcttttgttcgtgaaaaatattggaggcggagggaaggtgaaggagggggatcggagatgaacgtgttccggctggcgggggacatgacccacctcctcagcgtggtagtgctgctcctcaagatccataccatcaagtcctgcgcaggcatatctctgaagacacaggagctgtatgcacttgtttttgcagcacggtacctggacctgtttgttcattttgtgtctctgtataacactgtcatgaagctggtcttcttggcaagttctttctcgatagtttggt

SEQ ID NO: 90942 - DNA, 335 bp, Zea mays
ctgaattcccgggtcgacccactcgtccgcaactagcaacatacatagcacaatagtttaccaacaatggcagccaaaatatcctgcctggttaggctcctcggtctttctgcaagtcctactacctcgaccattttaccgcaatgctcgcaagctactataactaaccttcttcccccgtacctctcaccaactgtatcttcagtatatgaaaacccaattcttcaaccatacacgatccaacactcaatcgcaacttgcatcttacctttatcaccctagttcctccaacaatcatcaatcctattacaacatttacattcgtatcatttatt

SEQ ID NO: 90943 - DNA, 319 bp, Zea mays
gaccagctagcaacatagaaagcacactagtgtaccaacaatggcagccaaaatattttgcctgcttatgctccttggtctttctgcaagtgctgctacggcgaccattttcccgcaatgctcgcaagctcctatagcttcccttcttaccccgtacctctcaccagcggtgtcttccgtatgtgaaaacccaattcttcaaccctacaggatccaacaggcaatcacagctggcatcttacctttatcacccttgttcctacaacaatcatcagccctattacatcaattacctttggtgcatttattggcacaaaac

SEQ ID NO: 90944 - DNA, 429 bp, Zea mays
cagaaacacacctagcgaagcgcactatcatcgacctaacaacaatggcttccaagacattatcgctacttgcgcttcttgccctttatgtgagtgcaacaaatgcgttcattattacacaatgctcacttgctccgagtgccattattccacagttcctccatccagttacttcaatgggcttcgaacacccaactgtgcaagcctataggctacaacaagcgcttgcagcgaacgttttaaaacaaccaattggccaattacaacaacaattcttggcacatctaaccataccaaccatcgcaacgcagcagcaacaagcactgagccacctagccgtggtgaaccctatcggctacttgcaacaacagctgcttgcattcaacccacttgctttggcaaacgtaactgcataccaacaacaacaac

SEQ ID NO: 90945 - DNA, 445 bp, Zea mays
caactagcaacatagaaagcacaatagtgtaccaacaatggcagccaaaatattttgcttccttgtgctgcttggtctttctgcaagtgttgctaccgcaaccattttcccacaatgctcacaagctcctatagcttcccttcttcccccatacctctcaccagcggtgtcttcaatgtgtgaaaccccaattgttcaaccctacaggatccaacaggcaatcgcaacaggcatcttaccattatcacccttgttcctccaacaaccgtcagccctattacagcagttacctttggtccatttggtggcacaaaacatcagggcacaacaactacaacaacttgtgctagcaaaccttgctgcatactctcagcaacatcagtttcttccattcaaccaactggctgcattgaactctgctgcttatttgcaacaacaattacca

SEQ ID NO: 90946 - DNA, 480 bp, Zea mays
atttccgggtcgacccactcttactcatctagcaacatataaagcacaatagtgttctcaactatggctgccaaaatattatgcttccttgtgctggttggtctttctgcaagtattgctacctcaaccattttcccacaatgctcacaagctcctatagcttcccttcttccttcatacctctcaccaaacgtgtcttcaatttgttaaaccccaattgttcaaccctaccttatccaacaagcaattccaacaagcatcttaccattatcaaccttgttactccaacaacccgtaaccctattacaacaattacctttggtccattttgtggcacaaaacattaatgcacaacaactaccacaacttgtgctaacaaaccttacttcatactcttaacaacatcaatttctttcattcaaccaacttgcttcattgaactctactgcttattttcaacaacaattaccattcaatcat

SEQ ID NO: 90947 - DNA, 378 bp, Zea mays
aattaattcacaaaagctgagaagacggggggtcacacatcatacttctttcgccatggcaatggaaaacaactacgcatgcccaccacccagcaagggaaacctgatcacagtcttgagcatcgatggtggtggggtcaagggcgtcatccctgctaccttccttgcattccttgagtctaaactgcaggtaaactctacacgctcattggtccttgagcctaaatgcatatatacatgcaagtttgagtgccatttattcgttggtgttcttctacattttcctaggagcttgatgggagcagcgcgcgcatagctaactactttgatgtcatcgctggaacaagcacaggtggacttattgctgcaatgctggca

SEQ ID NO: 90948 - DNA, 349 bp, Zea mays
gtgggttggcttctcctccccctacggttcgggttcgggttcgtgaggttctccggggttcggtttcgtgggtgagcggatcgagatggcggcgtcggatgttgagtaccgctgcttcgtcggcggcctcgcctgggccacggacgaccactacctccacaacgccttcagcacctacggcgaagtcctcgagttcaagatcatcctcgatcgggagacgcaaaagtcccgcggcttcggcttcgtcaccttcttcactgaggacgcgattcggaacgccatcgaaggcatgaaccgcaaggagctggacggtcgcaacatcaccgtcaacgaggcccagtcccgcggc

SEQ ID NO: 90949 - DNA, 465 bp, Zea mays
aagcaacatagaaagtagaatccattagcaacaatagagcaacaatggcgaccaagatagtttgcgctccttatgctccttgctctttctacatgtgttgctaacgcgacaattttccctcaatgctcacaagctcctatagcttccctatttcccccataccttccatcaattatagcttcagtatgtgaaaacccagctcttcaaccatataggcttcaacaagcaatcgcagcaagcaacatacctttatcgcccttgttgtttcaacaatcaccagccctatctttggtgcagtcattggtacaaaccatcagggcacaacagctgcagcaactcgtgctacctgtgatcaaccaagtagctctggcaaacctttctccctactctcagcaacaacaatttcttccattcaaccaactgtctacactgaaccctgctgcttatttgcagcaacaactatta

SEQ ID NO: 90950 - DNA, 434 bp, Zea mays
attgagaccaactagcaacatagaaagcacaatagtgtaccaacaatggcagccaaaatggttgggctccttatgctccttggtctttctgcaagtgctgctacggcgaccattttcccgcaatgctcgcaagctcctatagcttcccttcttcccccgtacctctcaccagcggtgtcttcggtatgtgaaaacccaattcttcaaccctacaggatccaacaggcaatcgcagctggcatcttacctttatcacccttgttcctccaacaatcatcagccctattacaacagttacctttggtgcatttattggcacaaaacatcagggcacaacaactacaacaacttgtgctagcaaaccttgctgcctactctcagcaacagcagtttcttccattcaaccaactaggttcattgaactctgcttctta

SEQ ID NO: 90951 - DNA, 429 bp, Zea mays
  unsure (1)..(429): unsure at all n locations
cagaaacacaccaagcgaagcacattagcaacaacctaacaacaatggctaccaagatattatcggtccttgcgcttcttgcgctttttgcgagcgcaacaaatgcgttcattattccacaatgctcacttgctccaagttccattattacacagttcctcccaccagttacttcaatgggcttcgaacacccagctgtgcaagcctataggctacaacaagcaattgcggcgagcgtcttacaacaaccaatttcccagttgcaacaacaatccttggcacatctaacaatacaaaccatcgcaacgcatcagcaacaacaattcctaccagcactgagccacctagccatggtgaaccctgccgnctacttgcaacagcagttgcttgcatcaaacccacttgctctggcaaacgtaattgcaaacc

SEQ ID NO: 90952 - DNA, 420 bp, Zea mays
caaacgcgtacagtactccacagtgctcacttgctcctagtgccattattccacagttacgcccggcagttactccaatgggcttggaacacccagctgtgcaagcctacaggctacaacaagcgcttgcggcgagcgtcttacatcaaccaattgcccaattacaacaacgatccttggcacatctaaccatacataccatcgcaacgcagcagcaacaacaatttctaccagcactgagccaactagctgtggtgaaccctgtcgcctacttgcaacagcagctgcttgcattcaacccacttgctctggcaaacatagttgcataccaacaactacgacaattgcaacaggttctaccatcgctcagacaactagccatggagaaccctgccggctacctacgacagcaacaactga

SEQ ID NO: 90953 - DNA, 200 bp, Zea mays
ctcgcgcaaaaccgtagcgccctcgcctgctcgccgccgccgtcgttgcgagctccccatctgggtccggtgaccatggcgacccagatcagcaagaagaagaagttcgtcagcgacggcgtgttctacgccgagctcaatgagatgctgacgcgggagctcgcggaggacggctactcccgcgtggaggtgcgtgtcac

SEQ ID NO: 90954 - DNA, 452 bp, Zea mays
cagaaacacacctagcgaagcgcactatcatcgacctaacaacaatggctaccaagatattatgcctctttgcgcttcttgccctttttgtgagcgcaacaaatgcgttcattattccacaatgctcacttgctcctagtgccattattccacagttccttcctccagttacttcaatgggcttcgaacacccagctgtgcaagcctacatgctacaacaagcgcttgccgccagcgtcttacaacaaccaattgcccaattacaacaacaatccttggcacatctaaccatacaaaccatcgcaacgcatcagcaacaacaatttctaccagcactgagccaactagctgtggtgaaccctgtcgcctacttgcaacagcaattgcttgcattcaacccacttgctctggcaaacatagttgcataccaactacaacaacaattgcaacag

SEQ ID NO: 90955 - DNA, 400 bp, Zea mays
ctggcaaacctttgtacttactctgagcaacatcaatttcttccattcaaccaactgggtacagtgaaccctgctgcttattcgaagcaacaactattaccatttagccagctagctactgcctactatgagcaacaacaacttcttacatttaaccaattggacgcactgaacctcactgcttatttgcagcaccaaatactactggcatttaacgagctagctgcaacaagtcatgcttccttcttgacacaggaacagctgctggctttctacaagcagtttgcggataaccccgaaaccctcttacaactacaacaattgctggcctttgtccaacttgatttgacaaacccaacaaccttctaccaacaacacatcaatggtggtgccctatttt

SEQ ID NO: 90956 - DNA, 401 bp, Zea mays
aggaggcttagggaactcttgacaaccaaacttcatatctatcacatttccagtcaagggccggggctgctgaaatagctgctaaaaggtgactaccttttcttcttcttccccgggaacatcttgtgaggacgagatgtggttctgtgactgttgccgtgtacggagacgaggacaagccagcgcttataacgtacccggatgtagctctgaactacatgtcctgtttccaaggattcttcttctgcccggaagtggcgtctttgctgctacacaacttctgcgtctaccacaccaatccccatgggcacgaggagtcctacagatgggagcagctacaatgtcgtcagatgtgccggtgccatctgttgctgatctcgctgatcaagttgcaaatgtgc

SEQ ID NO: 90957 - DNA, 430 bp, Zea mays
tgccattgccatctactgacctgtgacctccgcatttccaaacagcccgagcgagctagagctagcagagcggcaggcacctccctcctcaaggaacatggcccgcacgcagcagttggcagtagtggcgaccgccgtggtggccttggtgctgctggcggcggcggctacctcggaggcggccatcagctgcgggcaggtggcgtcggccatcgcgccctgcatctcctacgcgcgcggccagggctcggggccctccgccggctgctgcagcggcgtcaggagcctcaacaacgccgtccgcaccaccgtcgaccgccgcgccgtctgcaactgcctcaagaacgccgtcgccggcgtcagcggcctcaacgccggcaacgccgtcagcatcccctccaagtgcggcgtcagcatcccctacaccatc

SEQ ID NO: 90958 - DNA, 429 bp, Zea mays
cgctcactgactgactactgtaataccagagatcgaacaacttggtcctgcagctcaagaagagagttttgtgcatttgggggccgggggcaagagagagagagagagccatggcggcggaccagcagccgcagctgcaggaggagatgaacgactctgccggcggcggcctcaggctgcctccagggttccgcttccacccgagcgacttcgagattgtcagcttctacctcaccaacaaggtgctcaacacgcgcttcacctgcaccgccatcacggaggccgacctaaacaagattgagccatgggacctcccgagcaaggcgaagatgggcgagaaagagtggtacttcttctaccagaaggaccgcaagtacccgacggggctgaaggcgaaccgggccaccgaggccggttactggaaagcga

SEQ ID NO: 90959 - DNA, 252 bp, Zea mays
agcaagttcaacgctgtcattctcaagaggcttttcatgagtaaaaccaaccgaccaccaatgtgcatgcgccgccttgtcaagtttatggaaggaaaggagaagaacattgctgtcattgttggcacagtcacagatgacaaaaggatccaggaggttccagcaatgaaggttactgccctgaggttcacggagacagcaagggccaagattgtcaatgctggtggcgaatgcctcacatttgaccagctt

SEQ ID NO: 90960 - DNA, 445 bp, Zea mays
agcaacgtaaaaagcacaatagtgtaccaactatggctgccaaaatattttgcctccttatactgcttggtctttctgcaagagctgctacagcgaccattttcccgcaatgctcgcatgctcctatcacttacatacttcccccgtacctatcaccatccgtgtcttaagtatactaaaacccaattcttcaaccctacaggatccaacatgcaatctcatctggcatcttacctttatcaccctcagtcctccaacaatcatcaaccctattacaacacttacctcttgagcatttattggcacaaaacatcagggcacaacaactacaacaacttgtgctaacaaaccttgatgcctactatcatcaacagcagcttcttccattcaaccaactaagttcattgaactctgcttgttatttgcaacatcaacgactaccatt

SEQ ID NO: 90961 - DNA, 462 bp, Zea mays
agctcagcgactccagattggagaactcgacaccatgaaggtgctgatcgttgcccttgctctgctggcgctcgctgctagcgccgcctccagtacaagcggcggctgtggctgccagacaccaccgtttcatctaccggctccgttctatatgccgtctccgttctatctgccgccgcaacagcagccgcagccatggcaataccccactcaaccaccgcagctaatcccgtgccatcagttcggatcctgctgggtcagcagcgtccgcagcccgttcctgggccagtgcgtcgagttcctgaggcaccagtgcagtccggcggcgacgccctacggctcgccacaatgccaggcgctgcagcagcagtgctgccaccagatcatgcaagtagagccgctgcaccggtaccaggccacataccgtgtggtcctgcagtcctttctgcagcatcatccgca

SEQ ID NO: 90962 - DNA, 449 bp, Zea mays
accatacctctcaccagcggtgtcttcaatgtgtgaaaccccaattgttcaaccctacacgatggaacaggcaatctcaacaggcatcttaccattatcacccttgttcctgcaacaaccgtcagccctattacagcagttacctttggtccatttggtggcacaaaacatcatggcacaacaactacaacaacttgtgctagcaaaccttgctgcatactctcagcaacatcagtttcttccattcaaccaactggctgcattgaactctgctgcttatttgcaacaacaattaccattcagccagctagttgctgcctacccccagcaatttcttccattcaaccaactagcagcattgaactctgctgcttatttacagcagcaacaactactaccattcagccagctagctgatgtgagccctgctgcctttttgacacaacaac

SEQ ID NO: 90963 - DNA, 449 bp, Zea mays
attgagaccagcaagcaacatccaacgtagaatccatcagcaacaatagagcaacaagggcgacgaagatattttccctcgttatgctccttgctctttctacatgtgctgctaacgcgacaattctccatcaatgctcacaagctcctatagcttcccttattccaccataccttgcatcaattatagcttcagtatgtgacaacccagctcttcaaccatatatgcttcaacaagcaatcgcagcaagcaacatacctttatcgcccttgttgcttcaacaatcaccagccctatctttggtgcagtcattggtacaaaccatgacggcacaacagctgcagcaactcgtgctacctgtgatcaactcaatccctctggcaaaccttctctcctactctcaacaacaacaatttctcccatttaaccaactgtctacactgaaccct

SEQ ID NO: 90964 - DNA, 197 bp, Zea mays
ttcagaaacacaccaagcgaagctacctagcatcgacttaacaacaatggctaccaatgtatgagccctccttgcgcttcttgccctttttgtgagcgcaacaaatgcgttcattattccacaatgctcacttgctcctagtgccattataccacagtttctccgaccagttacttcaatgggcttcgaacacctag

SEQ ID NO: 90965 - DNA, 312 bp, Zea mays
ctagcaacatataaagcacaatagtgttccaacaatggcagtcaaaatattttgcttcgttatggtccttggtctttctgcaaatgctgctaccgcaaccattttcccacaatgctcacaagcttctatagcttcctttattaccacatacctatcaccagcggtgtcttcagcatgtgaaaacccaattcttcaaccctacaagatccaacaggcaatcgcagcaggcatcttacctttatcacccttgatccttcaacaaccagtagccctattacagggagtacctttggtgcatttgttggcacaaaa

SEQ ID NO: 90966 - DNA, 398 bp, Zea mays
gcgtgagcacgtgccgccggccgtctccgctgtcacctccctgccagttatcgacatgggtcgcggccgcgacgaggtccgccgcgctatcctcgacgccggcatggagttcggcttcttgctggtggtggagcacggcatcccagaggaggtgatgcgcgacatgctggaggtgtgcgaggagttcttccagctgccggcggcgagcaaggcgtacatgtactcggaggacagtcagagacccaaccggatcttctacggcacaacctacgacacgggcggcgacaagtactggcgggacttgctccgtctcggctggcccttgttcttcccggtcggcagcggcacaagggacgactgggcggacacgccccaacggctgaagggtgtcgaggaac

SEQ ID NO: 90967 - DNA, 429 bp, Zea mays
gcaacatagaaagtggaatccagtagcaacaacagagcaacaatggcgaccaagatattgtcccggcttatgctccttgctctttctgcatgtgttgctaacgcgacaattttccctcaatgctcacaagctcctatagcttcccttcttcccccataccttccatcaatgatagcttcagtatgtgaaaacccagctcttcagccctataggctccaacaagcaatcgcagcaagcaacatacctttatcacccttgttgtttcaacaatcgccagccctatctttggtgcagtcattggtacaaaccatcagggcacagcagctgcagcaactcgtgctacctgtgatcaaccaagtagctctggcaaacctttctccctactctcagcaacaacaatttcttccattcaaccaactgtctacactg

SEQ ID NO: 90968 - DNA, 392 bp, Zea mays
agcattcagaaacacacctagcgaagcgcactatcaacgacctaacatcaatggctaccaagatggtatccctctttgcgcttcttgccctttttgtgagcgcatcaaatgcgttcattattccacaatgctcacttgctcctagtgccattattccacagttcctccctccagttacttcaatgggcttcgaacacccagctgtgcaagcctacaggctacaacaagcgcttgcggcgagcgtcttacaacaaccaattgcccaattacaacaacaatccttggcacatctaaccatacaaaccatcgcaacgcatcagcaacaacaatttctaccagcactgagccaactagctgtggtgaaccctgtcgcctacttgcaacagcagttg

SEQ ID NO: 90969 - DNA, 428 bp, Zea mays
cggacgcgtgggcggacgcgtgggagaccagcaagcaacatagaaagtagaatccattagcaacagtagagcaacaatggcgaccaagatattttccctccttatgctccttgctctttctacatgtgttgctaacgcgacaattttccctcaatgctcacaagctcctatagcttcccttcttcccccataccttccatcaattatagcttcagtatgtgaaaacccagctcttcaaccatataggcttcaacaagcaatcgcagcaagcaacatacctttatcgcccttgttgtttcaacaatcaccagccctatctttggtgcagtcattggtacaaaccatcagggcacaacagctgcagcaactcgtgctacctgtgatcaaccaagtagctctggcaaacctttctccctactctcagcaac

SEQ ID NO: 90970 - DNA, 435 bp, Zea mays
  unsure (1)..(435): unsure at all n locations
gcagagccggcgtgaccagcgaggcgagatcgtccgcgtggagccggagcacggctttcaccagctgaatccgtcgccgtcgtcgtcgtcgttttcgttcccatcgtcacaagtccagtaccaaacgtgccagcgcgacgtcgacaggcacaacgtctgcgccatggaggtgaggcacagcgtcgaacggctggaccaggccgacgtctacagccctggggctgggaggatcacacgccttaccagccacaagttccccgtcctcaacctcgtacagatgagcgcggtgcgggtagacctgtaccaggacgccatcatgtcgccgttctggaacttcaacgcccacagcgccatgtacggcatcaggggcagtgcaagggtccatgtcgccagcgacaacgggaccacggtgttcgacgacgtgctncgtgcggg

SEQ ID NO: 90971 - DNA, 372 bp, Zea mays
tagaaagcacaatagtgtaccaacaatggcatctaaaatattttgcctccttatgctccttggtctttctgcaagtgctgctacggcgaccattttcccacaatgctcacaagctcctatagcttcccttcttcccccgtacctctcaccaacggtgtcttcggtatgtgaaaacccaattcttcaaccctacaggatccaacaggcaatcgcagctggcatcttacctttatcacccttgttcctccaacaatcatcagccctattacagcagttacctttggtgcattaattggcacaaaacatcagggcacaccacctccaacaacttgtgctagcaaaccttgctgcctactttaagcaccagcagtt

SEQ ID NO: 90972 - DNA, 464 bp, Zea mays
aatttccgggtcgacccacgcgtacgctatcagtaccatcaatcatcattcatcttattagtataggcaccaaatcaaatctgcaacatcaattagctaactccaaaaaccatgaagctggtgcttgtggttcttgctttcattgctttagtatcaagtgtttcttgtacacagacaggcggctgcagctgtggtcaacaacaaagccatgagcagcaacatcatccacaacaacatcatccacataaacaacaacatcaaccaccaccacaacatcaccagcagcagcaacaccaacatcaacaagttcacatgcaaccacaaaaacatcagcatcaacaagaagttcatgttcaacaacaacaacaacaaccgtagtaccaacatcaacaacaacatcaacagtaccaacaacaacatcaatgtgaaggccaacaacaacataaccaacaataacaaggcca

SEQ ID NO: 90973 - DNA, 411 bp, Zea mays
cggtctcggaattcccgggtcgacctcacgcgtccgaaagagaacggaatggccgagataaccctagagccgagtgatcttatggcgcatacaggcaagagaatagtgccaaagttcactgaaatcttccccgtggaggacgcgaactacccttacagtgccttcatagcgtcggtccggaaagacgtgatcaaacactgcaccgaccataaagggatcttacaacccgtactggcaactgaaaaaaagggaccggagctatgggtttacccaaagcttaaaactaggaccagttccatcacgcttgccattcgcatggacaacctggaccttgtgggcttcaagaccccgggcagggtgttgtgggaagtccgcaaggaccgggacacccaacttcttggggacaacccc

SEQ ID NO: 90974 - DNA, 409 bp, Zea mays
caacaagcaacatagaaagtggaatccagtttcaacaacagagcaacaatggcgaccaagatatgttccctccttatgctccttgctctttctgcatgtgttgctaacgcgacaattttccctcaatgctcacaagctcctatagcttcccttcttcccccataccttccatcaatgatagcttcagtatgtgaaaacccagctcttcagccctataggctccaacaagcaatcgcagcaagcaacatacctttatcacccttgttgtttcaacaatcgccagccctatctttggtgcagtcattggtacaaaccatcagggcacagcagcttgagcaactcgtgctacctgtgatcaaccaagtagctctggcaaaccttttctcctactctcagcaacaacaatttc

SEQ ID NO: 90975 - DNA, 383 bp, Zea mays
cggacgcgtgggcagctagctgcggtctaccctcagcaatttcttccattcaaccaacgggcaggattgaactctgctgcttatttacaacagcaacagctaccaccattcatccagctagctgatgtgagccctgttgccttattgacacatcaacagttgttgtcgttctacctgcacgctgcgcctaacgcttgcacccttttacaactggaacaattgctggcattcaacccaattggtttgacaaacccaacaacgttctacccacaacccatcattggtggtgccctcctttagattgcttatgaattatacttcaataatgaagttttttggatgaaggttgcggctttccagaaattagaaagttcatttctaga

SEQ ID NO: 90976 - DNA, 394 bp, Zea mays
gcaattgcttccattcaaccaactggcagcattgaactctgctgcttatttacaacagcggcagcgaccaccattcagccagctagctgatgtgagccctgttgccttcttgacacaacaacagttgttgccgttctacctgcacgctgcgcctaacgctggcaccctcttacaactgcaacaattgctgccattcaaccaacttgctttgacaaacccaacaacgttttaccaacaaccaataattggcggggccctttttaaaatggctaataagtaatagttaaataaggaagtttttggaataaggttgggggtttcccaaaattagaaagggcctatttagaatcctaaagggctttaagcctccaaaaaaaaaaaaaaaggggggccc

SEQ ID NO: 90977 - DNA, 417 bp, Zea mays
gcgtgccacagcaaggctgagtttgacgcccacatgaccaaggcccaggaagccggcaagctggtggtcatcgacttcactgccgcctggtgcggtccatgccgcgccatcgccccactgttcgtcgaacacgccaagaagttcactcaggtcgtcttcctgaaggtggacgtggacgaagtgaaagaagtcaccgcggcctacgaggtcgaggcgatgccgaccttccacttcgtcaagaacggcaagacggtcgcgaccatcgtgggtgccaggaaggacgagctcctggccctgatcgagaagcatgccgcgcctgcgcctgcgactgcgtctgcctaaatgagatcagatcaatcgtcgccgtcaataaaggccagcacgtatggcttgaaatgttgtcgttatcagtttctg

SEQ ID NO: 90978 - DNA, 437 bp, Zea mays
gcggcgagcgtcttacaacaaccaatttcccagttgcaacaacaatccttggcacatctaacagtgcaaaccatcgcaacgcaacagcaacaacaattcctaccagcactgagccacctagccatggtgaaccctgccgcctacttgcaacagcagttgcttgcatcaaacccacttgctctggcaaacgtagttgcaaaccagccacaacaacagctgcaacagtttctgccagcgctcagtcaactagccatggtgaaccctgccgcctacctacaacagcaacaactgctttcatctagcccgctcgctgtggccaatgcacctacatacctgcaacaacaattgttgcaacagattgtaccagctctgactcagctagttgtggcaaaccctgctgcctacttgcaacagctgcttccattcaaccaactgac

SEQ ID NO: 90979 - DNA, 451 bp, Zea mays
catctagcaacatagaaagcacaatagtgtaccaacaatggcagccaaaatattttgcctcctgatgctgcttggtctttctgcaagtgctgctacggcgaccattttcccgcaatgctcgcaagctcctatagcttcccttcttcccccgtacctctcaccagcggtgtcttcggtatgtgaaaacccaattcttcaaccctacaggatccaacatgcaatcacagctggcatcttacctttatcacccttgttcctccaacaatcatcagccctattacatcagttacctttggtgcatttattggcacaaaacatcagggcacatcaactacaacaacttgtgctagcaaaccttgctgcctactctcagcaacagcagtttcttccattcaaccaactagctgcattgaactctgcttcttatttgcaacaacaacaactaccattc

SEQ ID NO: 90980 - DNA, 447 bp, Zea mays
ctgaattcccggggaccaactagcatcatagaaagcacaatagtgtaccaacaatggcagccaaaatattttgcctccttatgctccttggtcgttctgcaagtgctgctacggcgaccattttcccgcaatgctcgcaagctcctatagcttcccttcttcccccgtacctctcaccagcggtgtcttcggtatgtgaaaacccaattcttcaaccctacaggatccaacaggcaatcgcagctggcatcttacctttatcacccttgttcctccaacaatcatcagccctattacaacagttacctttggtgcatttattggcacaaaacatcagggcacatcatctacaacaacttgtgctagcaaaccttgctgcctactctcagcaccagcagtttcttccattcaaccaactaggttaattgaactctgcttctaatttgc

SEQ ID NO: 90981 - DNA, 293 bp, Zea mays
attctccgggtccacccacgcgtcacgcagctagctgatgtgatccctgctgccttcttgacacttcaacagctgctgacgctctacctgggctctgcgcctaacgctggcactctcttacaactgcaacaattgctgccattcaacccacttgctttgacaaacccaacatcgttctaccaacaacccatcattggtggcgccctcttttaaatcgattatgagctatactataataatgaaggcttttggatgatgtctggggctttccaaaaattagaatgtacatttct

SEQ ID NO: 90982 - DNA, 445 bp, Zea mays
tagcaacatagaaagcacaatagtgtaccaacaatggcagacaaaatattctgcttgcggatgggccttggtctttctgcaagtgttgctaccgcaaccattttcccacaatgctcacaagctcctatagctgtccttcttaccacatacctctcaccagcggcgtcttcaatgtgtgaaaccccaattgttcaaccctacaggatccaacaggcaatcgcaacaggcatcttaccattatcacccttgatcctccaacaaccgtcagccctattacagccgttacctttggtccatttggtggcacaaaacatcacggcacaacaactaccacaacttgtgctaacaaaccttggtgcatactcttaagaacatcaatttatttcattcaaccaactggctgcattgaactctgctgcttatttgcaacaacaattaccattca

SEQ ID NO: 90983 - DNA, 464 bp, Zea mays
caactagcaacatagaaagcacaatagtgtaccaacaatggcagccaaaatattttgggtcctgatgctccttggtatttctgcaagtgctgctacggcgaccattttcccgcaatgctcacaagctcctatagcttcccttcttcccccgtacctctcaccagcggtgtcttcggtatgtgaaaacccaattcttcaaccctacaggatccaacaggcaatcgcagctggcatcttacctttatcacccttgttcctccaacaatcatcagccctattacagcagttacctttggtgcatttattggcacaaaacatcagggcacaacaactacaacaacttgtgctagcaaaccttgctgcctactctcagcaacagcagtttcttccattcaaccaactagctgcattgaactctgcttcttatttgcaacaacaacaactaccattcagccagctacctg

SEQ ID NO: 90984 - DNA, 454 bp, Zea mays
acgcatctagcaacatataaagcacaatagtgtttcaacattggcagccaaaatattctgcctcctcgtgctggttgtactttcaccacgtgctgctactgctaccattctcccgcaatgatcgcaagcttctatagcttacattcttcaccagtacctctcaccagaggtgtattccctatgtgaaaacccaactctttaaccctacaggatccaacacgcaatcacagctgacatcttacctttatcacactagcttctccaacaattataaaacctattacatcacatacctttgctgcatttattggcacaaaacatcaggtcacaacaactacaacaacttgtgctaacaaaccttactgtctactctcaataacaataaattatttcattcaaccaaataacttaatttaactctacttcttatttcaacaacaacacctaccattca

SEQ ID NO: 90985 - DNA, 430 bp, Zea mays
caacaagcaacatagaaagtggaatacagtagcaacaatagagcaacaatggcggccaagatatgttccatccttatgctccttgctctttctgcatgtgttgctaacgcgaccatttttcctcaatactcacaagctcctatagctgcccttcttcccccataccttccatcaatgaccgcttcagtttgtgaaaacccagcccttcaaccctacaggctccaacaagcaatcgcaacaagcaacttacctttatcacccctgttctttcaacaatcgccagccctatctttggtgcagtcattggtacaaaccatcagggcacaacagctgcaacaactcgtgctaccagtgatcagccaagtagctctggcaaacctttctccctactctcagcaacaacaatttcttccattcaaccaactgtcta

SEQ ID NO: 90986 - DNA, 470 bp, Zea mays
accggtccggaattcccgggatcagcatatacatctatcaaatccttcaaagggagcccttactggatggcaccagaggttattatgaatagcaatggtgcagcctttcagtagacatttggagccttggctgcaccattcttgagatggcaacagcaaagcctccttggagtcagtatgaaggggtggcagcaatattcaaaattggcaacagcaaagacataccagatatcccaaataatctttcttctgaggcaaaaagtttcctgaaactctgcttgcagcgtgatcctgctgcccgccctacagctgctcagctgatggatcacccttttgtcaaggaccaggctacagtcaggagttccaggtccagtatcacaagggatatgtttcctaattcaactgacggaaaaaacagcagggtgaaaattgaaacttcgtcatacagaagtttatctcctttaagagat

SEQ ID NO: 90987 - DNA, 451 bp, Zea mays
caactagcaacatagaaagcacaatagtgtaccaacaatggcagccaaaatattttgcctccttgtgctgcttggtctttctgcaagtgctgctacggcgaccattttcccgcaatgctcgcaagctcctatagcttcccttcttcccccgtacctctcaccagcggtgtcttcggtatgtgaaaacccaattcttcaaccctacaggatccaacaggcaatcacagctggcatcttacctttatcacccttgttcctccaacaatcatcagccctattacatcagttacctttggtgcatttattggcacaaaacatcagggcacaacaactacaacaacttgtgctagcaaaccttgctgcctactctcagcaacagcagtttcttccattcaaccaactagctgcattgaactctgcttcttatttgcaacaacaacaactaccattc

SEQ ID NO: 90988 - DNA, 363 bp, Zea mays
gcggcggctgcggctgccagccaccgccgtcggttcatctaccgccgccggtgcatctgccacgtccgggtcacctgccacctccggtgcatctcccaccgccggtccacctgccgccgccggtccacctgccaccgccggtccatgtgccgccgccggttcatctgccgccgccaccatgccactaccctactcaaccgccccggcctcagcctcatccccagccacacccatgcccgtgccaacagccgcatccaagcccgtgccagctgcagggaacctgcggcgttggcagcaccccgatcctgggccagtgcgtcgagttcctgaagcatcagtgcagcccgacggcgacgccctact

SEQ ID NO: 90989 - DNA, 330 bp, Zea mays
attttgagcattcagaaacacaccaagcgaatcgcactagcaacaacctaacaacaatggctacgaagagattatccctccttgcgcttcttgcgctttttgcgagcgcaacaaatgcgtccattattccacaatgctcacttgctcctagttccattattccacagttcctcccaccagttacttcaatggccttcgaacacccagctgtgcaagcctataggctacaacaagcgattgcggcaagcgtcttacaacaaccaattgcccaattgcaacaacaatccttggcacatctaacaatacaaaccaatcgaacgcaacagcaac

SEQ ID NO: 90990 - DNA, 380 bp, Zea mays
attgagaccaactagcaacatagaaagcacaatagtgtaccaacaatggcagccaaaagattgggcctccttatgctccttggtctttctgcaagtgctgctacggcgaccattttcccgcaatgctcgcaagctcctatagcttcccttcttcccccgtacctctcaccagcggtgtcttcggtatgtgaaaacccaattcttcaaccctacaggatccaacaggcaatcacagctggcatcttaaccttaataaccttggttcttccaccattaatcagccttataccataagttaccttggggcaattaatggcaccaaaccttaaggcaccaccacctccaccacctggggctacaaaacttggtggcttacttta

SEQ ID NO: 90991 - DNA, 445 bp, Zea mays
gagcattcagaaacacacctagcgaagcgcactagcaacgacctaacaacaatggctggcaagagattatccctgcttgcgcttcttgccctttttgcgagtgcaacaaatgcgttcattattccacaatgctcacttgctccgagtgccattattccacagttcctacctccagttacttcaatgggcttcgaacacccagctgtgcaagcctataagctacaacaagcgcttgctgcgaagcgtctaaaaccacccatttgccaattacaacaacaatccctggcacatctaaccatacaaaccatcgcaacgcaacaacaacaagcactgaaccaactagccgtggtgaaacctatcgactacttgcaacaacagctgcttgcattcaacccaattgctttggcaaacgtagcttcataccaacaacaacaacagttgcaac

SEQ ID NO: 90992 - DNA, 331 bp, Zea mays
gctagctactgcctactctcagcaacaacaacttcttccatttaaccaactggccgcagtgaggcccgctgcttatttgcagcagcaaatactactaccatttagccagctagctgcagcaaaccgtgcttccttcttgacacagcaacagttgctgcctttctaccagcagtttgcggctaaccccgcaaccctcttacaactacaacaattgttgccctttgtccaacttgctttgacagacccagcggacttctaaccaccacacatcattggtggtgcgcctctttaaaatggttattaactggaatttcaatataaaagtttttgg

SEQ ID NO: 90993 - DNA, 418 bp, Zea mays
atttccatcggctttctggcggcaaccggagttcgggtggcgaacgagctgggagccgggagcgcgaggagggccaagttcgccatctacaacgtggtggccacctcctccatcatcgggtccgtgctgttcgtgctgttcctactcttccgcggaggcctcgcctacatattcaccgacagccaggcggtggcggacgcagtcgccggcctctcgcccctgctggccttctccatactgctcaacagcgtccagccagtgctgtcaagcgtcgctgtcggcgcgggctggcagagcgtcgtcggctacgttaacatcacttcgtactacctcatcggcatccctcttggagccgtgctgggctacgcgctggggcttcatgtgaagggcatctggatcggcatgctgctcggaacgc

SEQ ID NO: 90994 - DNA, 435 bp, Zea mays
atccaggacaccacccagatccacacccacatgtgctactccaacttcaacgacatcatccactggatcatcgacatggacgcggacgtgatcaccatcgagaactcgcggtccgacgagaagctgctctccgtgttccgtgagggtgtcaagtacggcgcgggcatcggccccggtgtctacgacatccactcccccaggatcccgtcggccgaggagatcgccgaccgcatcgacaagatgctggccgtgctggacaccaacatcctctgggtgaaccccgactgcggcctcaagacccgcaagtacacggaggtcaagcccgccctgaccaacatggtctccgctgctaagctcattcgcacccagctcgccagcgccaagtgagcacctttttttgcctttttcgtttccgaggaaggcgtcgtcgatgcc

SEQ ID NO: 90995 - DNA, 405 bp, Zea mays
ggacgtgagactagcaatgagctcatcgactccagattggagaactcgacaccatgaaggtgctgatcgttgccattgctctcgtggcgctcgctgctagcgccgactccagtacaagcggcggctgctgctgccagacaccagcgtgtcatctaccgccttagttctatatgccgactccgttctatctgccgacgcagcagcatccgcagccatggcattaccacactcatccaccgcagctaatcccgtgccagcagttcggatcctgcggcgtcggcagcgtatgcagtccgctcctgggccagcgcgtcgagatgctgaggcaccatgtgcagaccggcggctactccgtacagctcgacacagtgccaggcgctgcagcagcaatgctgacaccagatc

SEQ ID NO: 90996 - DNA, 437 bp, Zea mays
gcacaatagtgtaccaacaatggcagccaaaatattttgcttccttatgctccttggtctttctgcaagtgctgctaccgcaaccattttcccacaatgctcacaagctcctatagcttcctttcttcccccatacctctcaccagcggtgtcttcagtatgtgaaaacccaattcttcaaccctacaggatccaacaggcaatcgcagcaggcatcttacctttatcacccttgttcctacaacaaccgtcagccctattacagcagttacctttggtgcatgtgttggcacaaaacatcaaggcacaacaactacaacaacttgtgctaggaaaccttgctgcctactctcagcaacagcagtttcttccattcaaccaactggctgcattgaactctgctgcttatttgcaacaacaactaccattcagtcagc

SEQ ID NO: 90997 - DNA, 419 bp, Zea mays
cgacggagcacgacgcacgcagagccgcagagatccgtcacactgcaagttttgaaaactgaactgtaagatggcatcagcagagctttcccgtgaggaaaatgtgtacatggcgaagctcgccgagcaggcagagaggtacgaggaaatggttgagttcatggagaaggtagcgaaaactgttgactcggaggagctcactgtggaggagcgcaacctcctgtctgttgcatacaagaacgtcattggagcccgccgtgcctcatggcgcatcatctcctccatcgagcagaaggaggagggtcgaggcaatgaggaccgtgtaacactcatcaaggactaccgtggcaagaatgaaactgagctcaccaagatctgtgatggcatcctcaagcttctcgaatctcaccttgtgccgt

SEQ ID NO: 90998 - DNA, 489 bp, Zea mays
  unsure (1)..(489): unsure at all n locations
ggctcacaaaccctcttgctttgctgctgcacctgcaagtctgcaaccgtgcacacagagatgtcgacgacggtgagccgtgcgtccgtcgaccagaagctcgccctcgccaagcgttgctcccgagaggcgaccctcgccggagccaaggcggcagcggtggcgactatcgcctccgcgatccccaccctggccagcgtgcggatgctgccatgggccaaggccaacatcaaccccaccggccaggcgctcatcgtctccacggtggctgggatggcctacttcatcgccgccgacaagaagatcctgtcgctggcgaggcgccactcgttcgagcaagcccctgagcacctcaagaacacctncttccagggcaccggccgtccccacccagccttcttcaggccgtgagacgagaccttcgtccagagctagctacctacctctttttccagtttgccaatgcaagcaccaaatgcccaccgatgc

SEQ ID NO: 90999 - DNA, 452 bp, Zea mays
agaccaactagcaacatagaaagcacaatagtgtaccaacaatggcagccaaaatattgtgcctgcttatgctccttggtctttctgcaagtgctgctacggcgaccattttcccgcaatgctcgcaagctcctatagcttcccttcttcccccgtacctctcaccagcggtgtcttcggtatgtgaaaacccaattcttcaaccctacaggatccaacaggcaatcgcagctggcatcttacctttatcacccttgttcctccaacaatcatcagccctattacaacagttacctttggtgcatttattggcacaaaacatcagggcacaacaactacaacaacttgtgctagcaaaccttgctgcctactctcagcaacagcagtttcttccattcaaccaactaagttcattgaactctgcttcttatttgcaacaacaacaactacca

SEQ ID NO: 91000 - DNA, 459 bp, Zea mays
actggtcttagcgtggggtatatgcgaccagtagacagcacagggtatttttgtaaatggcaaggatctatactattgcaatggccaaaagctcccctttgcagctgctcaaattgggcaagcttttagaaatgagatctcgccacgacaaggtcttctccgagtgcgtgaattcacattggcagagattgagcattttgtggacccaaaagacaaatcacatccaaaatttgttgatgttgctgatttggagttcctgatgtttccaagagagctacaactctcaagggagtcggccaaactattgaagctcggggaagcagttgcaaagggaactgttaataacgagacacttggttacttcattggaagggtctatcttttcctgacatgcttgggaattgataagggtcggttgcgcttcaagcagcatttacctaatgagatggctcattatgc

SEQ ID NO: 91001 - DNA, 242 bp, Zea mays
ttttactccaccactacaggtccatttatttactcgcaatataaaattaccgatcggtgcttaggtacacacgcaagcaattagttcatgcgcttattaggttgtgccactggccaccactacactacattacactagcacaagcaagcagctacacatacttgtccatatcacataaacgaaacagcatatataagaagatgtcccaacatctttgcaccacgcgcgagatcaggggccct

SEQ ID NO: 91002 - DNA, 113 bp, Zea mays
caacaacccatcattggtggtgccctcttttagattgcttatgagttatacttcaataatgaagctttttggatgatgtttgtggctttccagaaataagaaagtacatttgt

SEQ ID NO: 91003 - DNA, 424 bp, Zea mays
cccacgcgtccgcccacgcgtccgattggcacaaaacatcagggcacaacaactacaacaactggtgctagcaaaccttgctgcctactctcagcaacagcagtttcttccattcaaccaactagctgcattgaactctgcttcttatttgcaacaacaacaactaccattcagccagctacctgctgcctacccccagcaatttcttccattcaaccaactggcagcattgaactctcctgcttatttacagcagcaacaactactaccattcagccagctagctggtgtgagccctgctaccttcttgatacaaccacagttgttgccgttctaccagcacgctgcgcctaacgctggcaccctcttacaactgcaacaaattgctgccattcaaccaacttgctttgacaaacccagcagc

SEQ ID NO: 91004 - DNA, 421 bp, Zea mays
cccacgcgtacgcccactcgtccgattggcactaaacatcagggcacaacaactacaacgggctggtgctagcaaaccttgctgcctactctcagcaacagcagtttcttccattcaaccaactagctgcattgaactctgcttcttatttgcaacaacaacaactaccattcagccagctacctgctgcctacccccaacaatttctttcattcaaccaactggcagcattgaactctcctgcttatttacaacaacaacaactactaacattcaaccaactagcttgtgttaacccttcttacttctttatacaaccacaattggtgcccttctaacaacaaccttggcctaacgcttgcaaccttttaacacttcaaccattgcttgcattcaacccaattgctttgaccaaaccaac

SEQ ID NO: 91005 - DNA, 439 bp, Zea mays
gcaacatagaaagcacaatagtgtaccaacaatggcagccaaaatattttgcctccttatgctcgttggtatttctgcaagtgctgctacggcgaccattttcccgcaatgctcacaagctcctatagcttcccttcttcccccgtacctctcaccagcggtgtcttcggtatgtgaaaacccaattcttcaaccctacaggatccaacaggcaatcgcagctggcatcttacctttatcacccttgttcctccaacaatcatcagccctattacagcagttacctttggtgcatttattggcacaaaacatcaaggcacaacaactacaacaacttgtgctagcaaaccttgctgcctactctcagcaacagcagtttcttccattcaaccaactagctgcattgaactctgcttcttatttgcaacaacaacaacta

SEQ ID NO: 91006 - DNA, 445 bp, Zea mays
atggagaccaactagcaacatagaaagcacaatagtgtaccaacaatggcagccaaagtatggtgcctccttatgctccttggtctttctgcaagtgctgctacggcgaccattttcccgcaatgctcgcaagctcctatagcttcccttcttcccccgtacctctcaccagcggtgtcttcggtatgtgaaaacccaattcttcaaccctacaggatccaacaggcaatcacagctggcatcttacctttatcacccttgttcctccaacaatcatcagccctattacatcagttacctttggtgcatttattggcacaaaacatcagggcacaacaactacaacaacttgtgctagcaaaccttgctgcctactctcagcaacagcagtttcttccattcacccaactaactgcattgaactctgcttcttatttgcaacaac

SEQ ID NO: 91007 - DNA, 453 bp, Zea mays
  unsure (1)..(453): unsure at all n locations
ccaactagcaacatagaaagcacaatagtgtaccaacaatggcagccaaaatattttgcttgcttatgctccttggtctttctgcaagtgttgctaccgcaaccattttcccacaatgctcacaagctcctatagcttcccttcttcccccatacctctcaccagcggtgtcttcaatgtgtgaaaccccaattgttcaaccctacaggatccaacaggcaatcgcaacaggcatcttaccattatcacccttgttcctccaacaaccgtcagccctattacagcagttacctttggtccatttggtggcacaaaacatcagggcacaacaactacaacaacttgtgctagcaaaccttgctgcatactctcagcaacatcangttcttccatccacccaacttgctgcattgaactctgctgcttatttgcaacaacaattaccattcagcc

SEQ ID NO: 91008 - DNA, 418 bp, Zea mays
cccacgcgtccgatcgccctcgttatttacatcgctgccaccctcctctccgccgtggccggcgccgccggggatggggggagcgcaattccccggcgacaacgacgtcgcggaagtagacgcggcccgcgacggagaggtggaccgccgtgacgtgggcaagatgaagcacgggtgcgagcattaccggcggaggtgcaagatcgtggcaccgtgctgcaaccaggtgttcccctgccgccactgccacaacgaggctacggcttccggagatcggcatacaatatgtcgtcaggatgttgaaaaagtagtttgcctactctgtgaaacaaaacagccggtgtcacaagtgtgcataagctgtggagtcaatatgggagagtacttttgtgatatatgcaaaattttatgatgatga

SEQ ID NO: 91009 - DNA, 440 bp, Zea mays
  unsure (1)..(440): unsure at all n locations
cggatggacccggtgttactttaatatcagcgaaatgggtttttctgcgtacctttgttatatggctatgtatctcatttttgtggagtttggaatttactggatgcacagagagttgcatgacataaagccactatacaaacatctgcatgcgacccaccatatttacaacaaggagaacaccttgtctccgtttgctggactcgcgtttcacccactggatggtattctgcaagcgataccgcatgtgcttgcgctcttcctcctcccaacgcacttcaggacgcacatcgctctcgtgttcttggagggcgtgtggacgacaaacatccacgactgcattcacggcaaggtatggccagtcatgggcgctgggtatcacaccatccaccatacgacttaccgncacaactatggccactacaccgtctggatggact

SEQ ID NO: 91010 - DNA, 443 bp, Zea mays
ctccggggttcggtttcgtgggtgggcggatcgagatggcggcgtcggatggggagggccgctgcttcgtcggcggcctcgcctgggccacggacgaccactccctccacaacgccttcagcacctacggcgaggtcctcgagtccaagatcatcctcgatcgggagacgcagaggtcccgcggcttcggcttcgtcaccttctccacggaggaggcgatgcggaacgccatcgagggcatgaacggcaaggagctggacggccgcaacatcaccgtcaacgaggcccagtcccgcggcggccgtggaagcggcggcggcggctacggtggtggccgtggaggcggcggctacggcggtggcgggcgccgtgatggctgcggcggctacagccgttggcgcggcggctacggtggcggcagtggctacggtggtggtggtggc

SEQ ID NO: 91011 - DNA, 101 bp, Zea mays
accggtccggaattcccggctttcttatgagttatagttcaataataaatctaaaagagggatgttcgtggcttcccagaaataagaaggtacatttctag

SEQ ID NO: 91012 - DNA, 427 bp, Zea mays
  unsure (1)..(427): unsure at all n locations
catagaaagcacaatattgtaccaataatggcagccaaaatattttgcctcattatggtccttggtctttctgcaagtgctgctacggcgagcattttcccgcaatgctcacaagctcctatagcttcccttcttcccccatacctctcaccagcgatgtcttcagtatgtgaaaatccaattcttctaccctacaggatccaacaggcaatcgcagcaggcatcttacctttatcacccttgttcctccaacaatcatcagccctattacagcagttacctttggtgcatttattggcacaaaacatcagggcacaacaactacaacaactcgtgctagcaaaccttgctgcctactctcagcaacagcagttacctttggtgcatttgttggcacanaacatcagggcacaacaactacaacaac

SEQ ID NO: 91013 - DNA, 472 bp, Zea mays
tcggaattcccgggctggagatgatttgcaaactcagtgtattattgatcatcaagctcttccccgcctcatgaatctgttgacgcagaaccacaagaaaagcattaagaaagaggcatgctggactatttcaaatattactgctggaaacaaagatcagatacaggctgtcataagtgccggtatcatcgctcctttgttgcaactgcttcaaacagcagagtttgatatcaagaaggaggctgcttgggccatctcaaatgctacctctggtggttctcatgagcaaatcaagtacttggtgtctgagggctgcatcaagccattgtgtgaccttcttgtctgccctgatccgagaattgtaacagtttgtctggagggtcttgagaatattcttaaagtagggcagcatgacaagaccatgggtgcaacaggtgacactaacgtcttagctcagatgatcgatgaaacg

SEQ ID NO: 91014 - DNA, 461 bp, Zea mays
ccggattcccggtcgaccgacgcgtccgccgatccccaattcctccttcggatctcgcattcagcgcagcgcaggtgtgaaggaggggggacgcggaggaagatggggctcgcgttcgggaagctcttcagccggctcttcgccaagaaggagatgcggatcctcatggtcggcctcgacgccgccggtaaaaccaccatcctctacaagctcaagctcggcgagatcgtcaccaccatccccaccatcggtttcaatgttgaaactgttgagtacaagaacattagcttcactgtctgggatgtcgggggtcaggacaagatcagacctctttggaggcattacttccagaacacccagggtcttatctttgctgtggacagcaatgaccgtgaccgtgttgttgaagccagagatgagctccacaggatgctgaacgaggatgagctacgtgatgctgt

SEQ ID NO: 91015 - DNA, 393 bp, Zea mays
cagaaacacaccaagcgaagcgcactagcaacgacctaacaacaatggctaccaagagattagccctccttgcgcttcttgccctttttgtgagcgcaacaaatgcgttcattattccacaatgctcacttgctcctagtgccattattccacagttcctcccaccagttacttcaatgggcttcgaacacctagctgtgcaagccaacatgcaacaacaagcgcttgcggcgagcgtcttacaacaaccaattgcccaattgcaacaacaatccttgccacatctaacaatacaagccatcacaacgcaacagcaacaacagttcctaccagcactgagccacctagccatggggaacccttgccgctacttgcaagagcagctgcttgcat

SEQ ID NO: 91016 - DNA, 433 bp, Zea mays
cagttacctttggtgcatttattggcacaaaacatcagggcacaacaactacgagacagcttgtgctagcaaaccttgctgcctactctcagcaacagcagtttcttccattcaaccaactaggttcattgaactctgcttcttatttgcaacaacaacaactaccattcagccagctacctgctgcctacccccagcaatttcttccattcaaccaactagcagcattgaactctcctgcttatttacagcagcaacaactactaccattcagccagctagctggtgtgagccctgctaccttcttgacacaaccacagttgttgccgttctaccagcacgttgcgcctaacgctggcaccctcttacaactgcaacaattgctgccattcaaccaacttggctttgacatacccagcagtgttctaccaac

SEQ ID NO: 91017 - DNA, 437 bp, Zea mays
  unsure (1)..(437): unsure at all n locations
gcaaagcggcagtgcgtagagaggatcgtcgaacagaacagcatgaagatggggatggttctcgtcgtgtgcctggctctgtcagctgccagcgcctctgcaatgcagatgccctgcccctgcgcggggctgcagggcttgtacggcgctggcgccggcctgacgacgatgatgggcgccggcgggctgtacccctacgcggagtacctgaggcagccgcagtgcagcccgctggcggcggcgccctactacgccgggtgtgggcagccgagcgccatgttccagccgctccggcaacagtgctgccagcagcagatgaggatgatggacgtgcagtccgtcgcgcagcagctgcagatgatgatgcagctngagcgtgccgctgccgncagcagcagcctgtacgagccagctctgatgcagcagcagcagcagct

SEQ ID NO: 91018 - DNA, 420 bp, Zea mays
taccgtccggattcccggtcgacaacgcgtccgcagaaacacaccaagcgaagcgcactagcaacgacctaacaccaatggctaccaagagattagccctccttgcgcttcttgcccttttagtgagcgcaacaaatgcgttcattattccacagtgctcacttgctcctagtgccattattccacagttcctcccaccagttacttcaatgggcttcgaacatccagccgtgcaagcctacaggctacaactagcgcttgcggcgagcgccttacaacaaccaattgcccaattgcaacaacaatccttggcacatctaaccctacaaaccattgcaacgcaacaacaacaacaacaacagtttctgccatcactgagccacctagccgtggtgaaccctgtcacctacttgcaacagc

SEQ ID NO: 91019 - DNA, 382 bp, Zea mays
gtaacgtcttccagtggcaggtcaccatcatcggcccggccgacaccctatatggtggaggctacttcgatgcaataatgacctttccccagaactataccaacagaccgccatcagtaagattcacttctgggatgcggcatccgaatgtttatacggatggtcgtgttcagcatcatctattcttcatccacctgctgaagatcccagtggttatgagcttgcacgcgaacggtggacaccagtgcacacggttgaaagtatagttctgagcatcattacaatgctatctattccgaatgacgagtctccagcagatattgaagctgccaaggactggatagagaagcgggatgagttcaagaagaaggttaggcaatgt

SEQ ID NO: 91020 - DNA, 414 bp, Zea mays
cggtccggaattcccggggggacccacgcgtccggctggcatgtactgtacgttgcaggtgagcgacctaatgagcagcctccgcgcgagggggccgacgctggcgtgcccgtccaacgacgggctgcgcttctggggccacgagtgggagaagcacggcacctgcgcagacgacgtcttcgacgagcacggctacttccaggccgcgctgcgcctccgcgaccagctgggagtcctcggcagcgctcacctccgccggcgtcaagcccgacggcggctactacacgctgagccagatcaagggcgccatccggcaaggcaccggcttcgagccctacgtggagtgcaaccgctactaggccggcaacagccagctctaccagctctacttctgcgttgacgccgccggcgaca

SEQ ID NO: 91021 - DNA, 337 bp, Zea mays
  unsure (1)..(337): unsure at all n locations
tagcaacatagaaagcacaatagagtaccaacaatggcaggcaaaatattatgcctccgtatgctccttggtctttctgcaagtgctgctacagcgaccattgacccgcaatgctcgcaagctcctatagctgcccttatatacccgtacctctcaccaccggtgtcttcagtatgtgaaaacccaattcttcaaccctacaggatccaacaggcactcgcagctggcatcttacctttatcacccttgttcctgcaacaatcatgagccctactacaacagttaccttcggtgcatgtattggcacacaacatganggcacaacaactaccacaac

SEQ ID NO: 91022 - DNA, 396 bp, Zea mays
attttgagcattcagaaacacaccaagcgaagcgcactagcaacaacctaacaacagtggctaccaagatattatccctccttgcgcttcttgcgctttttgcgagcgcaacaaatgcgtccattattccacaatgctcacttgctcctagttccattattccacagttcctcccaccagttacttcaatggccttcgaacacccagctgtgcaagcctataggctacaacaagcgattgcggcgagcgtcttacaacaaccaattgcccaattgcaacaacaatccttggcacatctaacaatacaaaccatcgcaacgcaacagcaacaacagttcctaccagcactgagccacctagccatggtgaaccctgtcggctacttgcaacagcagc

SEQ ID NO: 91023 - DNA, 449 bp, Zea mays
  unsure (1)..(449): unsure at all n locations
ggcagtgcgtagagaggatcgtcgaacagaacagcatgaagatggtcatcgttctcgtcgtgtgcctggctctgtcagctgccagcgcctctgcaatgcagatgccctgcccctgcgcggggctgcagggcttgtacggcgctggcgccggcctgacgacgatgatgggcgccggcgggctgtacccctacgcggagtacctgaggcagccgcagtgcagcccgctggcggcggcgccctactacgccgggtgtgggcagccgagcgccatgttccagccgctccggcaacagtgctgccagcagcagatgaggatgatggacgtgcagtccgtcgcgcagcagctgcagatgatgatgcagcttgagcgtgccgctgccgncagcagcagcctgtacgagccagctctgatgcagcagcagcagcagctgctggcagcccagggtctc

SEQ ID NO: 91024 - DNA, 486 bp, Zea mays
taccggtccggaattcccgggggagaaccctccgagcatcctagtgactcccatggctccggccatgtcggcgcagttcacaagaataacgttgagcaacctgtttgtccgtcgggctggcccaggcagcacggagctgaccgtggagggaaggccatccgaccagctgggcaggagaaacctcactgacagccccgtatttgacggccgtggccctgacgccagcctcgtggctcgcgtacagggagtcgctacccagatgggcgacgtgcgccagttgtacaccgtcgtgttccaggagaggccgctcaagggctccacgctcgtcaccgaaggcgcgatgacagaagggtcagacgagtgggcgatctacggtggaactggagtgttcgcgatggcgagaggcgtcataaggagaacgtttcttgccgacacgagcggcgggaactccgacgagcttgccgtgcaggttctctgcccggtgtt

SEQ ID NO: 91025 - DNA, 407 bp, Zea mays
ctcctcctcgcctcctctgcctagcctccacgacgcaagggagagtgacggaaagcggcgcggcgcgagcgaggagggccaaggggaagaggggaagcaccgcaccaggacccttgttcgccgccgccgcctctgatctccgcgaggttgtcaggattcaatatgtcgaccagcacattcgctacttcctgcacgctgttgggcaatgttagaacaacgcaggcctcccagacagccgtgaagagcccttcgtctctaagcttcttcagccaagttacgaaggttccaagcctgaagacctccaagaaactggatgtctacgccatggctgcatacaaggcgaagcttgtcagacctgaaggtgaagagcacgagtctgatgctccagacgacgcctacattcttga

SEQ ID NO: 91026 - DNA, 403 bp, Zea mays
agaccaactagcaacatagaaagcacaatagtgtaccaacaatggcagccaaaatgtgctgcctccttatgctccttggtctttctgcaagtgctgctacggcgaccattttcccacaatgctcacaagctcctatagcttcccttcttcccccgtacctctcaccagcggtgtcttcggtatgtgaaaacccaattcttcaaccctataggatccaacaggcaatcgcagctggcatcttacctttatcacccttgttcctccaacaatcatcagccctattacagcagttacctttggtgcatttattggcacataacatcaaggcacaacaactacaacaacttgtgctagcaaaccttgctgcctactctcaacaacaacagtatcttccattcaacca

SEQ ID NO: 91027 - DNA, 433 bp, Zea mays
aagcaacatagaaagtggaatacagtagcaacaatagagcaacaatggcggccaagggattttccatccttatgctccttgctctttctgcatgtgttgctaacgcgaccatttttcctcaatactcacaagctcctatagctgcccttcttcccccataccttccatcaatgaccgcttcagtttgtgaaaacccagcccttcaaccctacaggctccaacaagcaatcgcaacaagcaacttacctttatcacccctgttctttcaacaatcgccagccctatctttggtgcagtcattggtacaaaccatcagggcacaacagctgcaacaactcgtgctaccagtgatcagccaagtagctctggcaaacctttctccctactctcagcaacaacaatttcttccattcaaccaactgtctacactgaa

SEQ ID NO: 91028 - DNA, 261 bp, Zea mays
cgtccggattcccgggtcgacccagcgtccgaccaacttgcttcggcaaactcaacagtgttctaccaacaacccatcattggtggtggcctcttttagattgcttatgagtcatagttcaatagtgaagttttcttggatgatgtttgcggcgtcccagaaataagatagtacatttctagattcttaacacataacatcaaagaccgatacactatgtgaaaacacatctcttaaaccatacgaagcttgaacgcgcta

SEQ ID NO: 91029 - DNA, 425 bp, Zea mays
  unsure (1)..(425): unsure at all n locations
nccacgcgtccggcagtgctgccaccagatcaggcaggtggagccgctgcaccggtagcaggcgacatacggtgtggtcctgcagtccttcctgcagcagcagccgcagggcgagctcgcggcgctgatggcggcccaggtagcgcagcagctgacggcgatgtgcggtctgcagctgcagcagccaggtccctgcccttgcaacgcagctgccggcggtgtctactactgaggaaactatgtactgtagtaataatgtaatggagccgctgactagctacctatagggctatagctagttcactcgtttagcggcgatgagtaacggagtgtcacccatcaccatgggtggcagtgtgagcaatgacctgaatgaaccatttgaatgcgaaggaataatatataggggaaaaaggatgtttggg

SEQ ID NO: 91030 - DNA, 354 bp, Zea mays
  unsure (1)..(354): unsure at all n locations
gagaccaactagcaacatagaaagcacaatagtgtaccaacaatggcagccaaaatattttgcctccttatgctccttggtctttctgcaagtgctgctacggcgaccattttcccgcaatgctcgcaagctcctatagcttcccttcttcccccgtacctctcaccagcggtgtcttcggtatgtgaaaacccaattcttcaaccctacaggatccaacaggcaatcgcagctggcatcttacctttatcacccttgttcctccaacaatcatcagccctattacaacagttacctttggtgcatttattggcacanaacatcagggcacaacaactacaacaacttgtgcta

SEQ ID NO: 91031 - DNA, 449 bp, Zea mays
cgcgtccgcagcttcccttgccggctagggtttgcagatgacgacggcggcgcgccccacctgggcgccggccaagggcggcaacgagcaagggggcacccgcatcttcggcccctcccagaagtactcgtcccgcgacctcgccgcgcatacctcgctcaagctcagaaaagacggtcaacagacccaagaggagttacagaagaggaatctcagggaggaacttgaggaacgtgagcgcaagcactactcttcagcataggacttatccttggaagagaccggcggaaaagctcaagccagctactcctagaaggttcaaagagagaggcagaggataagatagttccacgagaaatcgatgcagatgactccgatgtggagcctaaaagtgatgatgagagcgatgaagatggcgacgacgacgacaccgaagctctaatggcaga

SEQ ID NO: 91032 - DNA, 446 bp, Zea mays
  unsure (1)..(446): unsure at all n locations
attgagaccaactagcaacatagaaagcacaatattgtaccaataatggcagccaaaatattttgcctcattatgctccttggtctttctgcaagtgctgctacggcgagcattttcccgcaatgctcacaagctcctatagcttcccttcttcccccatacctctcaccagcgatgtcttcagtatgtgaaaatccaattcttctaccctacaggatccaacaggcaatcgcagcaggcatcttacctttatcacccttgttcctccaacaatcatcagccctattacagcagttacctttggtgcatttattggcacanaacatcagggcacaacaactacaacaactcgtgctagcaaaccttgctgcctactctcagcaacagcagttacctttggtgcatttgttggcacataacatcanggcacaacaactacaacaact

SEQ ID NO: 91033 - DNA, 410 bp, Zea mays
gaccattagctttatctactccagagcgcagaagaacccgatcgacaccatgagggtgttgctcgttgccctcgctctcctggctctcgctgcgagcgccacctccacgcatacaagcggcggctgcggctgccagccaccgccgccggttcatctaccgccgccggtgcatctgccacctccggttcacctgccacctccggtgcatctcccaccgccggtccacctgccgccgccggtccacctgccaccgccggtccatgtgccgacgccggttcatctgccgccgccaccatgccactaccctactcaaccgccccggcctcagcctcatccgcagccacacccatgcccgtgccaacagccgcatccaagctcgtgccagctgcagggaacctgcggcgttggca

SEQ ID NO: 91034 - DNA, 439 bp, Zea mays
cccacgcgtccgagttacttcaatgggcttcgaacatccagacgtgcaagcctacaggctacaactagcgcttgcggcgagcgccttacaacaaccaattgcccaattgcaacaacaatccttggcacatctaaccctacaaaccattgcaacgcatcaacaacaacaacaacagtttctgccatcactgacccacctagccgaggtgaaccctgtcacctacttgcaacagcagctgcttgcatccaacccacttgctctggcgaacgtagctgcataccatcaacaacaacagctgcaacagtttatgccagtgctcagtcaactagccatggtgaaccatgccgtctacctacaactactctgatctagcccgctcgcggcggtcaatgcacctacgtacctacaacaacagtagctgcaacacatagtaccagct

SEQ ID NO: 91035 - DNA, 438 bp, Zea mays
tacgatctgacgctcatcccacatcagtagtcgaccaagcacaagcagcagagccgggcggaatatgtggacgatcaggaaggtggcgacgccgcaggtggccgtcctcctgctgctcctcatcgtcgttgcgcaggaggcggcgccgttggcggaggcgcgcgtgtgccggcgccggagcgcgggcttcaagggggtctgcatgtccgaccacaactgcgcgcaggtgtgcttgcaggagggctacggcggcggcaactgcgacggcatcatgcgccagtgcaagtgcatcagggagtgctagctagctaggctctaggatctagcaagctagctatatcggcctttaattaaattaataaggatcgacgtcgtggccggtcgctaaatatgtactactatacggttacactacatgcaataatgcaccacatgtac

SEQ ID NO: 91036 - DNA, 376 bp, Zea mays
gagaccaactagcagcatagaaagcacaatactgtaccaacaatggcacccaaaatattttgcctacttatgctccttggtctttctgcaagtgctgctacggcgaccattttcccgcaatgctctcaagctcctatagcttcccttcttcccccgtacctctcaccagcggtgtcttcactatgtgaaaacccaattcttcaaccctacacgatccaacacgcaatcgcacctggcatattacctctatcacacttgttcctacaacaatcatcagccctattacaacagttacctttggtgcatatattggcacaaaacatcagggcacaacatctacaacaacttgagctagcaaaccttgctggctactctc

SEQ ID NO: 91037 - DNA, 399 bp, Zea mays
aagcaatcgcagcaagcaacatacctttatcgcccttgttgtttcaacaatcaccaggcctggctttggtgcagtcattggtacaaaccatcagggcacaacagctgcagcaactcgtgctacctgtgatcaaccaagtagctctggcaaacctttctccctactctcagcaacaacaatttcttccattcaaccaactgtctacactgaaccctgctgcttatttgcagcaacaactattaccatttagccagctagctactgcctactctcagcaacaacaacttcttccatttaaccaattggccgcactgaaccccgctgcttatttgcagcagcaaatactactgccatttagcgagctagctgcagcaagtcgtgccttcttcttgacacagc

SEQ ID NO: 91038 - DNA, 415 bp, Zea mays
gctgcattgaactctgctgcttatttgcaacaacaattaccattcagccagctaggggctggctacccccagcaatttcttccattcaaccaactagcagcattgaactctgctgcttatttacagcagcaacaactactaccattcagccagctagctgatgtgagccctgctgccttcttgacacaacaacagttgttgccgttctacctgcacgctatgcctaacgctggcaccctcttacaactgcaacaattgctgccattcaaccaacttgctttgacaaacccaacagtgttctaccaacaacccatcattggtggtgcccttttttagattgcttatgaattatagttcaataatgaagttttttggatgatgcttgtggcgttccaaaaataaaaagtacattttt

SEQ ID NO: 91039 - DNA, 448 bp, Zea mays
tagaaagcacaatagtgtaccaacaatggcagccaaaatattttgcctccttatgctccttggtctttctgcaagtgctgctacggcgaccattttcccgcaatgctcgcaagctcctatagcttcccttcttcccccgtacctctcaccagcggtgtcttcggtatgtgaaaacccaattcttcaaccctacaggatccaacaggcaatcacagctggcatcttacctttatcacccttgttcctccaacaatcatcagccctattacatcagttacctttggtgcatttattggcacaaaacatcagggcacaacaactacaacaacttgtgctagcaaaccttgctgcctactctcagcaacagcagtttcttccattcaaccaactagctgcattgaactctgcttcttatttgcaacaacaacaactaccattcagccagcta

SEQ ID NO: 91040 - DNA, 260 bp, Zea mays
aataacccaccgagcggatgctgccgcggccagccaccgccgccagttcatctatcgacaccggttcatctgccacctgcagggcaccttccaactgcggggcatctaccaccgacgatccacctgccatcgcctgtccacctgccaccttcagtccatgtgccgcctccagtacatctgccgtcatcaccatgccactaccctactcaaccgcccctacctcaacctcattcacagccacacccattcccatgccaaca

SEQ ID NO: 91041 - DNA, 374 bp, Zea mays
gatcgtcctgttgctcacagcagcagccatggcggccgagccggagaagcaggcgggccccgcggcacaggagacggccgtgcacatggtgtacgtggaccgccccgaggacgccgaccctgaggagttgcacatacgcacgctcaccttcgtcctcggcagcgaacagaaggccagggacgcagtgctctaccactacaagaacgcctccagcggcttctccgcgaagctcaccgcacagcaggtcaaggatctcaaggagcatccaggtgttctacaggtatgtgccgagccagacttaccagctacatggccctgagtatggcactcaccagcgcacgatacacacgttgagccttatgtgaaagcgtatg

SEQ ID NO: 91042 - DNA, 447 bp, Zea mays
  unsure (1)..(447): unsure at all n locations
caacatacatagtgaagtacactagcaacatcttagcaccaatggcagccaagattgttgcgctccttgccctccttgctctttcagcaagtgttgctaccgcgactattattccacaatgctcacaacaatacctctctccagtgatagccgcgagatttgaatacccatctatacaatcctacaggctacaagaggccatcacagcaagcatcttacggtcgttagcattgaccgtccaacaaccatatgccctattgcaacaaccatccttagtgaatctgtatctccaaagaatcacagcacaacaactacaacaacggttgcttccaacaattaatcaagtagttgcagcgaaccttgctgcttaccttcagcaacaacaatttcttccattcaatcaactagctgnngtgaaccctgctgcttacttgcaggcacaacagc

SEQ ID NO: 91043 - DNA, 161 bp, Zea mays
gctcgtaccggtccggaattcccgggccttattgcatcagcccaccattggtggtaccatcttctagattttttatgctttatactgtaataataaatgttctcatactgatatgtgcaacttctcagtaataaaagattagagatctatattttaagttc

SEQ ID NO: 91044 - DNA, 441 bp, Zea mays
caactagcaacatagaaagcacaatagtgtaccaacaatggcagccaaaatattggggctccttatgctccttggtctttctgcaagtgctgctacggcgaccattttcccgcaatgctcgcaagctcctatagcttcccttcttcccccgtacctctcaccagcggtgtcttcggtatgtgaaaacccaattcttcaaccctacaggatccaacaggcaatcgcagctggcatcttacctttatcacccttgttcctccaacaatcatcagccctattacaacagttacctttggtgcatttattggcacaaaacatcagggcacaacaactacaacaacttgtgctagcaaaccttgctgcctactctcagcaacagcaatttcttccattcaaccaactaggttcattgaactctgcttcttatttgcaacaacaaca

SEQ ID NO: 91045 - DNA, 340 bp, Zea mays
gctgcatactctcagcaacatcagtttcttccattcaaccaactggctgcatcgaagggtgctgcttatctgcgacaacaattaccattcagccagctagttgctgcctacccccagcaatctcttccattcaaccaactagcagcattgaactctgctgcttatttacagcagcaacaactactaccattcagccagctagctgatgtgagccctgctgccttcttgacacatcatcagttgatgccgttctacctgcacgctatgcctaacgctggcaccctattacaactgcaacaattgctgccattcaaccaacttgctctgacaaacccaacag

SEQ ID NO: 91046 - DNA, 336 bp, Zea mays
cgagcagaagaacctgaagcgcgaactccttcgtgcgcacgacgaggttaagcggagccagtctgtaccgctcgtcattggccagtttatggacatggtcgacggcaacaacggcatcgtgggctctaccactggcagcaactactacatgcggatcctcatcaccatcaaccgcgagttgctcaagccgtcagcgttcgtcgcgttgcatagtcacttcaacgctctagtcgacgtgctgccgccggaggccgacttcagcatctccttgttgggatcgtcggataagcccaacgtcacttacaacgatattggatgatgttgcattcaaaagca

SEQ ID NO: 91047 - DNA, 400 bp, Zea mays
gttgtgatagcgaagaagaaagccataaggcacttgtggtagagggaattctggatgccatttcggctggtattctgatctacatggccttggtggacctcatcgcagctgattttctcagcaagaggatgagctgtaacttgaggcttcaagtcggctcatacattgccttgttccttggtgccatggccatggcatctctagccatctgggcttagcaagtagaatggaagtaaggcaaagatttgagagtgctgcctaattgcctttgatagcaggaggttctctccagcagctagttggttgcaattcttgatgagaatgggaggcattttttattttcttatattcttctggttgtctattggttctcttcatgttggtggtggacaagtagatt

SEQ ID NO: 91048 - DNA, 359 bp, Zea mays
cagtagtgtaccaacaatggcagccaaaatattttgcttccttatgctccttggtcggtctgcaagtgttgctaccgcaaccattttcccacaatgctcacaagctcctatagcttcccttcttcccccatacctctcaccagcggtgtcttcaatgtgtgaaaacccaattgttcaaccctacaggatccaacaggcaatcgcaacaggcatcttaccattatcacccttgttcctccaacaaccgtcagccctattacagcagttacctttggtccatttggtggcacaaaacatcagggcacaacaactacaacaacttgtgctagcaaaccttgctgcatactctcagcaacatc

SEQ ID NO: 91049 - DNA, 328 bp, Zea mays
gctagctacaacaagccccacttcctttttgaaacaacaaccaacttgctttgacaagactcaacagtgttctaccaacaacccatcattggtggtgccctcttttagattgcttatgagttatagttcaataatgaagttttttggatgatgtttgtggcgtcccagaaataagaaagtacatttctagaaaaaaaaaaaaaaaaaaaaaaaaaaaaaaaaaataaaaaaaaaaaataaaaaaaaagaaaaaaaaaaataaaaaaaaaacataagaaaaattaaaaagagggaaaacataaggttttcaacaactacaacaacttgt

SEQ ID NO: 91050 - DNA, 439 bp, Zea mays
  unsure (1)..(439): unsure at all n locations
ctggcatcttacctttatcacccttgttcctccaacaatcatcagccctattacatcagttacctttggtgcatttattggcacaaaacatcagggcacaacaactacaacaacttgtgctagcaaaccttgctgcctactctcagcaacagcagtttcttccattcaaccaactagctgcattgaactctgcttcttatttgcaacaacaacaactaccattcagccagctacctgctgcctacccccagcaatttcttccattcaaccaactggcagcattgaactctcctgcttatttacagcagcaacaactactaccattcagccagctagctggtgtgagccctgctaccttcttgatacaaccacagntgttgccgttctaccagcacgctgcgcctaacgctggcacccttttacaactgcaacaattgct

SEQ ID NO: 91051 - DNA, 443 bp, Zea mays
  unsure (1)..(443): unsure at all n locations
gatcgtcctgttcctcacagcagcagtcatggcggccgagccggagaagcaggcggcccccgcggcacaggagacggccgtgcacatcgtgtacgttgaccgccccgaggacgccgaccctgaggagttccacatccgcaccctcacccccgtcctcggcagcgaacagaaggccagggacgcagtgctctaccactacaagaacgccgccagcggcttctccgcgaagctcaccccccagcaggtcaaggatctcaaggagcaaccaggtgttctccaggttgtgccgagccagacttaccagctacatggccctgggtctggcactcaccagggcacgacacacaccttgggccttatgtgaaggcgtatgagaatcaagaagactatgtttagtatggctgtatggcacangtctgacgaatgtgtatagtacagtacta

SEQ ID NO: 91052 - DNA, 236 bp, Zea mays
cggacgcgtgggcggacgcgtgggcggacgcgtggggtagaacggcaacaactgtgggtgtgtcaagaaggcagcagggctcacatcagctagctggctttgacaaacccaacagtgttctaccaacaacccatcattggtggtgccctcttttagattgcttatgagttatagttcaataatgaagttttttggatgatgtttgtggcgtcccagaaataagaaagtacatttct

SEQ ID NO: 91053 - DNA, 375 bp, Zea mays
aaagcacaatagtgtaccaacaatggcagccaaaatattttgcctccttatgctccggggtatttctgcaagtgctgctacggcgaccattttcccgcaatgctcacaagctcctatagcttcccttcttcccccgtacctctcaccagcggtgtcttcggtatgtgaaaacccaattcttcaaccctacaggatccaacaggcaatcgcagctggcatcttacctttatcacccttgttcctccaacaatcatcagccctattacagcagttacctttggtgcatttattggcacaaaacatcagggcacaacaactacaacaacttgtgctagcaaaccttgctgcctactctcagcaacagcagtttctttc

SEQ ID NO: 91054 - DNA, 425 bp, Zea mays
cccgggtggacccacgcgtccgatgggcttcgaacattcagccgtgcaagcctacaggctacaactagcgcttgcggcgggcgccttacaacaaccaattgcccaattgcaacaacaatccttggcacatctaaccctacaaaccattgcaacgcaacaacaacaacaacaacagtttctgccatcactgagccacctagccgtggtgaaccctgtcacctacttgcaacagcagctgcttgcatccaacccacttgctctggcgaacgtagctgcataccagcaacaacaacagctgcaacagtttatgccagtgctcagtcaactagccatggtgaaccctgccgtctacctacaactactttcatctatcccgctcgcggtgggcaatgcacctacgtacctacaacaacagttgctgcaac

SEQ ID NO: 91055 - DNA, 408 bp, Zea mays
gaccaactagcaacatagaaagcacattagtgtaccaacaatggcagccaaaaggtggggcttccttatgctccttggtctttctgcaagtgttgctaccgcaaccattttcccacaatgctcacaagctcctatagcttcccttcttcccccatacctctcaccagcggtgtcttcaatgtgtgaaaacccaattgttcaaccctacaggatccaacaggcaatcgcaacaggcatcttaccattatcacccttgttcctccaacaaccgtcagccctattacagcagttacctttggtccatttggtggcacaaaacatcagggcacaacaactacaacaacttgtgctagcaaaccttgctgcatactctcagcaacatcagtttctttcatttaaccaactggc

SEQ ID NO: 91056 - DNA, 375 bp, Zea mays
  unsure (1)..(375): unsure at all n locations
ctttatcgcccttgttgtttcaacaatcgccagccctatctttggtgcagtcattgggacagaccatcagggcacaacagctgcagcaactcgtgctacctctgatcaaccaagtagctctggcaaacctttctccctactctcagcaacaacaatttcttccattcaaccaactgtctacactgaaccctgctgcttatttgcagcaacaactattaccatttagccagctagctactgcctactctcagcaacaacaacttcttccatttaaccaattggccgcactgaaccccgctgcttatttgcagcagcanatactactaccatttagccagctagctgcagcaaaacgtgctttcctcttgacacagc

SEQ ID NO: 91057 - DNA, 286 bp, Zea mays
gcagggccagcttattatatataatatctgacgtggagcatatctatctggctgtgggctgcaagcaggcctagtacgccgactgcgcgttcctcctattacacatataggcccctccctgcgtgtatgcttgttaccgtcgtgtcgaaccttgtactacgaggctccatcgaacatcgatggcttgcttctttatcagaacatgtttgaataaacgctatttggtaaaacacaatatactagacaatgtcagctaaaatgtggagaagtgggagcagaacaaggc

SEQ ID NO: 91058 - DNA, 113 bp, Zea mays
gtaccggtccggaattcccgggctcttttagatttcttatgagttatagttcaataataaagttttttgtctgatgtttgtggcttcccagaaatgagaaagtacatttctaa

SEQ ID NO: 91059 - DNA, 435 bp, Zea mays
cgtaccggtccggaattcccgggaaagaattctatatagaatgggttgggaattatgcctagatcccgtataaatggaaatttcattgataagacgttctcgattgtagccaatattttattgcaaataattccgacaacctccggggaaaaaagggcatttacttattatagagatggtgcgatttgactcttttttttttttagccctacctatatctcattcttacgagaaagagagagggttcgcatagagagaacaaaattagtaaaggaaacccgcgcttggggaaggtgaggtgaactaacaattccttctgtcgtgtatcctcgattgatgtggcctcagatgcttcaattgtagatttgagtattgagcgaaaggttacacctacaggataggttctgtattacagggcaatccgactctactagt

SEQ ID NO: 91060 - DNA, 434 bp, Zea mays
ccagttcacagctgaccttattgccatgaaccacaccgatttcatcatcaccagcagattccaagaaatcgcgggaagcaaggacaccgtggggcagtacgagtcccacatcgcgttcactcttcctgggctctaccgtgtcgtccatggcatcgatgttttcgatcccaagttcaacattgtctcccctggagcagacatgagtgtttactacccgtatacggaaaccgacaagagactcactgccttccatcctgaaatcgaggagctcatctacagcgacgtcgagaactccgagcacaagttcgtgctgaaggacaagaagaagccgatcatcttctcgatggcgcgtctcgaccgcgtgaagaacatgacaggcctggtcgagatgtacgggaagaacgcgcgcctgagggagctggcgaacctcgtga

SEQ ID NO: 91061 - DNA, 324 bp, Zea mays
cgcaatgctcgcaagctcctatagcttcccttcttcccccgtacctctcaccagcggggtcttcggtatgtgaaaacccaattcttcaaccctacaggatccaacaggcaatcacagctggcatcttacctttatcacccttggtccttcaacaatcatcaaccctattacatcagttacctttggtgcatttattggcacaaaacatcagggcacaacaactaccacaacttgtgctagcaaaccttgctgcctacttttagcaacagcagtttcttccattcaaccaactaactgcattgaactctgcttcttatttgcaac

SEQ ID NO: 91062 - DNA, 396 bp, Zea mays
gcaacatagaaagcacaatagtgtaccaacaatggcagccaaaatattttgcctccgtatgctccttggtctttctgcaagtgctgctacggcgaccattttcccgcaatgctcgcaagctcctatagcttcccttcttcccccgtacctctcaccagcggtgtcttcggtatgtgaaaacccaattcttcaaccctacaggatccaacaggcaatcacagctggcatcttacctttatcacccttgttcctccaacaatcatcagccctattacatcagttacctttggtgcatttattggcacaaaacatcatggcacaacaactacaacaacttgtgctagcaaaccttgctgcctactctcagcaacagcagtttcttccattcaaccaact

SEQ ID NO: 91063 - DNA, 296 bp, Zea mays
ggattaccttcttcagcatcatggcaagatctcaaggaccatatgcggcgagctggtgatgtctgtttcactgatgtgtatcgtgaggctggagcaactattggaatagctgattatactaactatgaagatatgaaacacgcgataaggaagctagatgattctgagttccgtaatgctttttcaaggacatatgtccgggtgagggagtatgatgctaggcgcagccgttctcgctccagaggcagaaaccgctctaagtcaagaagcagaagccacagccattcgtactcaag

SEQ ID NO: 91064 - DNA, 362 bp, Zea mays
gggtaccttcttcagcatcatggcatgatcttaaggaccatatgcggcgagctggggatggctgtttcactgatgtgtatcgtgaggctggagcaactattggaatagctgattatactaactatgaagatatgaaacacgcgataaggaagctagatgattctgagttccgtaatgctttttcaaggacatatgtccgggtgagggagtatgatgctaggcgcagccgttctcgctccataggcagaaaccgctctaagtcaagaagcagaagccacagccattcgtactcaagaagcagaagccgcagttatagcaagagcacgagcccaagatctagatctgcttcagagtcaaaatca

SEQ ID NO: 91065 - DNA, 401 bp, Zea mays
cgtccggaattcccggtcgaccacgcgtccgcccacgcgtccggctagctgcagctcatgtgcttgtctgagggtgcctctgctcgttggcagccggatcgcctgctgttggtgcatctggtgattaataatactactatgacagagccatgctctgtgaagagtattagtagcagcgctcataaaagctacagttccgtctcttttctcagctatgtaaaacttccaaactgttcatgcttaaaactgagggttttcttggtgtgaggtgtgcatgtcgttgttgaggccattgctgcacattccacctattgaggccctcctcaaattaagcctcgaaaaagctgatatcttttcgtaaaactctagactacggtgaatgcaactgggctggttgcttc

SEQ ID NO: 91066 - DNA, 418 bp, Zea mays
tagcaacatagaaagcacaatagtgtaccaacaatggcagccaaaatattttgcttgcttatgctccttggtctttctgcaagtgttgctaccgcaaccattttcccacaatgctcacaagctcctatagcttcccttcttcccccatacctctcaccagcggtgtcttcaatgtgtgaaaccccaattgttcaaccctacaggatccaacaggcaatcgcaacaggcatcttaccattatcacccttgttcctccaacaaccgtcagccctattacagcagttacctttggtccatttggtgggcacaaacatcagggcacaacaactacaacaacttgtgctagcaaaccttgctgcatactctcagcaacatcagtttcttcccattcaaccaactggctgcattgaactctgct

SEQ ID NO: 91067 - DNA, 475 bp, Zea mays
  unsure (1)..(475): unsure at all n locations
gtaccggttcggaattcccgggattgagaccaactagcaacatacaaagcacaatagtgtaccaacaatggcagctaaaatattttgcctgcttaggctccttggtctttctgcaagtgctgctacggcgaccattttcccacaatgctcacaagctcctatagcttcccttcttcccccgtacctctcaccaacggtgtcttcggtatgtgaaaacccaattcttcaaccctacaggatccaacaggcaatcgcagctggcatcttacctttatcacccttgttcctccaacaatcatcagccctattacagcagttacctttggtgcatttattggcacanaacatcaaggcacaacaactacaacaacttgtgctagcaaaccttgctgcctactctcagcaacagcagtttcttccattcaaccaactagctgcattgaactctgcttcttattngcaacancaacaacta

SEQ ID NO: 91068 - DNA, 51 bp, Zea mays
tcttgcgcgtacgcgtacacagccccgatccgaatcgtcctcctcgcgagc

SEQ ID NO: 91069 - DNA, 415 bp, Zea mays
agaccattagctttatctactccagagcgcagaagaacccgatcgacaccatgagggggttgctcgttgccctcgctctcctggctctcgctgcgagcgccacctccacgcatacaaaccgcggcttccgcttgcaaccaacggccgccggtcatttaacggccgccgtgccttttgccacttccggttaacctgccacttccggggcatttccaaccgccggtccacctgccgccgccggtccacctgccaccgccggtccatgtgccgccgccggttcatctgccgccgccaccatgccactaccctactcaaccgccccggcctcagcctcatccccagccacacccatgcccgtgccaacagccgcatccaagcccgtgccagctgcaaggaacctgcggcgttggcagca

SEQ ID NO: 91070 - DNA, 454 bp, Zea mays
  unsure (1)..(454): unsure at all n locations
cggacgcgtgggtgaaaacccagctcttcaaccatataggcttcaacaagcaatcgcagcaagcaacatacctttatcgcccttgttgtttcaacaatcaccagccctatctttggtgcagtcattggtacaaaccatcagggcacaacagctgcagcaactcgtgctacctgtgatcaaccaagtagctctggcaaacctttctccctactctcagcaacaacaatttcttccattcaaccaactgtctacactgaaccctgctgcttatttgcagcaacaactattaccatttagccagctagctactgcctactctcagcaacaacaacttcttccatttaaccaattggccgcactgaaccccgctgcttatttgcagcagcaaatactactgccatttagcgagctagctgcagcaagtcgtgcttncttcttgacacagcaacagttg

SEQ ID NO: 91071 - DNA, 422 bp, Zea mays
attgataccaactagcaaaatacatagtgaagtacactagcaacatcttagcaccaatgggagccaagatttttttccctccttgccctccttgctctttcagcaagcgctgctacctctactattattccacaatgctcacaacaatacctctctccggtgacagccgcgggatttcaacacccaactatacaatcctacatgctacatgaggccatcgtagcaagcatcttacggtcattagcattaaccctccaacagccatatgccctattgcaacaaccatccttagtgcatctgtatctccaaagaatcgcgacacaacaactacaacaacagttgctaccaacaatcaatcaagtagttgcagcgaaccttgctgcttatctgcagcaacaacaatttcttccattcaatcaact

SEQ ID NO: 91072 - DNA, 460 bp, Zea mays
gtcgaccagcgtccgcaccatgaagtgctgatcgttgcccttgctctcctggcgctcgctgcgagcgcggcctccagtacaagcggcggctgtggctgccagacaccaccgtttcatctaccgcctccgttctatatgccgcctccgttctatctgccgccgcagcagcagccgcagccatggcaataccccactcaaccaccgcagctaagcccgtgccagcagttcggatcctgcggcgtcggcagcgtcggcagcccgttcctgggccagtgcgtcgagttcctgaggcaccagtgcagcccggcggcgacgccctacggctcgccacagtgccaggcgctgcagcagcagtgctgccaccagatcaggcaggtggagccgctgcaccggtaccaggcgacatacggtgtggtcctgcagtccttcctgcagcagcagccgcagggcgagctcgcgg

SEQ ID NO: 91073 - DNA, 381 bp, Zea mays
tttcagcattcaaaaacacaccaagcgaagcgcactagcaacgacctaacaccaatggctaccaagatattagccctccttgcgcttcttgcccttttagtgagcgcaacaaatgcgttcattattccacagtgctcacttgctcctagtgccattattccacagttcctcccaccagttacttcaatgggcttcgaacatccagccgtgcaagcctacatgctacaactagcgcttgcagcgagcgccttacaacaaccaattgcccaattgcaacaacaatccttggcacatctaaccctacaaaccattgcaacgcaacaacaacaacaacaacagtttctgccatcactgagccacctagcccgtgtgaaccctgtc

SEQ ID NO: 91074 - DNA, 445 bp, Zea mays
  unsure (1)..(445): unsure at all n locations
ggggcagaaagcaggagaaagctttgagaaataggtgctttggtggtagagttgctgcaactacacaatgtattcttacctcagatgcttgtcctgaaactcttcattctcaaacacagtcctctaggaaaaattatgctgatgcaaaccgtgtatctgctatcattttgggcggaggcactggatctcagctctttcctctgacaagcacaagagctacgcctgctgtacctgttggaggatgttacaggcttattgatatccctatgagtaactgcttcaacagtggtataaataagatatttgtgatgagtcagttcaattctacttcgcttaaccgccatattcatcgtacataccttgaaggcgggatcaactntgctgatggatctgtacaggtattagcggctacacaaatgcctgaagagccagctggatggttcca

SEQ ID NO: 91075 - DNA, 471 bp, Zea mays
  unsure (1)..(471): unsure at all n locations
gccacgcgtncgcagaaacacaccaagcgaaacacattagcaacaacctaacaacagtggctaccaagatattatccctccttgcgcttcttgcgctttttgcgagcgcaacaaatgcgttcattattccacaatgctcacttgctccaagttccattattacacagttccttccaccagttacttcaatgggcttcgaacacccagctgtgcaagcctataggctacaacaagcaattgcggcgagcgtcttacaacaaccaatttcccagttgcaacaacaatccttggcacatctaacaatacaaaccatcgcaacgcaacagcaacaacaattcctaccagcactgagccacctagccatggtgaaccctgccgnctacttgcaacagcangtgcttgcatcaaacccacttgctctggcaaacgtagttgcaaaccagccacaacaacagctgcaacagtttctgc

SEQ ID NO: 91076 - DNA, 441 bp, Zea mays
ctggactatttcaaatattactgctggaaacaaagatcagatacaggctgtcataagtgccggtatcatcgctcctttgttgcaactgcttcaaacagcagagtttgatatcaagaaggaggctgcttgggccatctcaaatgctacctctggtggttctcatgagcaaatcaagtacttggtgtctgagggctgcatcaagccattgtgtgaccttcttgtctgccctgatccgagaattgtaacagtttgtctggagggtcttgagaatattcttaaagtatggcagcatgacaagaccatgggtgcaacaggtgacactaacgtcttagctcagatgatcgatgaagcggaaggcctggaaaagatcgagaacctacagagccacgataacaatgaaatctatgaaaaggctgtgaagcttcttgagacatactggat

SEQ ID NO: 91077 - DNA, 425 bp, Zea mays
tgacacctgcggttcacctgccacctgcggtgcatctcccaccgccggtccacctgccgacgccggtccacgtgccaccgcgggtccatgtgccgccgccggttcatctgccgccgccaccatgccactaccctactcaaccgccccggcctcagcctcatccccagccacacccatgcccgtgccaacagccgcatccaagcccgtgccagctgcagggaacctgcggcgttggcagcaccccgatcctgggccagtgcgtcgagtttctgaggcatcagtgcagcccgacggcgacgccctactgctcgcctcagtgccagtcgatgcggcagcagtgttgccagcagctcatgcaggtggagccgcagcaccggtaccaggcgatcttcggctaggtcctccagtccatcctgcagcagcag

SEQ ID NO: 91078 - DNA, 443 bp, Zea mays
cagcaagcatcttacggtcgttagcattgaccgtccaacaaccatatgccctattgcgacaaccatccttagtgaatctgtatctccaaagaatcacagcacaacaactacaacaacggttgcttccaacaattaatcaagtagttgcagcgaaccttgctgcttaccttcagcaacaacaatttcttccattcaatcaactagctggggtgaaccctgctgcttacttgcaggcacaacagctactaccattcaaccaacttgtcgggagccctgctgccatcttattgcagcaacagttgctgccattccgtctacaagttgttgcaaacattgctgctttcttgcaacaacaacaattgctgccattttacccacaggttgtgggaaacattaacgccttcttgcaacaacaacaattgctgccattctacccacaggat

SEQ ID NO: 91079 - DNA, 459 bp, Zea mays
  unsure (1)..(459): unsure at all n locations
cggtccggaattcccgggctggtgcccttgcattggctggggctgaagcctactgcaaatactataacttgaaaggagaaactgtggttgcagataactagtggggcaaatatgaactttgatcgacttagactagtaaccgagctagctgatgttggccgaaaacgggaagcagtgttagctacatttctgccagagcagcagggaagcttcaaaaaattcacagaattggttggcaggatgaatattactgaattcaaatacagatacaattctaatgcaaaagatgcccttgttctttacagtgttggcatctacactgacaatgagcttggagcaatgatggatcgcatggaatctgcgaaactgaggactgttaaccttactgacaatgatttggcaaaagaccaaccttagatactntattggaggaagatcagaaataaaagatgaactggt

SEQ ID NO: 91080 - DNA, 433 bp, Zea mays
tagaaagcacaatagtgtaccaacaatggcagccaaaatattttgcctccttatgctgcgtggtctttctgcaagtgctgctacggcgaccattttcccgcaatgctcgcaagctcctatagcttcccttcttcccccgtacctctcaccagcggtgtcttcggtatgtgaaaacccaattcttcaaccctacaggatccaacaggcaatcacagctggcatcttacctttatcacccttgttcctccaacaatcatcagccctattacatcagttacctttggtgcatttattggcacaaaacatcagggcacaacaactacaacaacttgtgctagcaaaccttgctgcctactctcagcacagcaagttctccattcacccactagctgcatgaactctgttcttaattgaacaacaacactaccattca

SEQ ID NO: 91081 - DNA, 434 bp, Zea mays
gaaagcacaatagtgtaccaacaatggcagccaaaatattttgcttccttatgctccttggtctttctgcaagtgttgctaccgcaaccattttcccacaatgctcacaagctcctatagcttcccttcttcccccatacctctcaccagcggtgtcttcaatgtgtgaaaccccaattgttcaaccctacaggatccaacaggcaatcgcaacaggcatcttaccattatcacccttgttcctccaacaaccgtcagccctattacagcagttacctttggtccatttggtggcacaaaacatcagggcacaacaactacaacaacttgtgctagcaaaccttgctgcatactctcagcaacatcagtttcttccattcaaccaactggctgcattgaactctgctgcttatttgcaacaacaattaccattc

SEQ ID NO: 91082 - DNA, 428 bp, Zea mays
  unsure (1)..(428): unsure at all n locations
cccacgcgtccgacccgaagcgccctcatcacagaggcgcgtcgatacctcacaacggcgtcaagtatgggtgcaaaggaggttacaagtggagggacacaaagaaggcaaaccctaacatccttgtcggagcaatggtggctggccccgacaggcgcgatggctacaaagatgtccgcacgaactacaactacacggagcctactctcgcagcgaatgctggtctggttgcagcgctgatctctatatccgatatcaaaaccggacggttcggcatcgataagaacaccatcttctctgcgattcctccgatgttcccaacacccncgccgccgccatcagcatggaaaccatagagaagcaatacatctgaatgttttccaaagcatcgaacggggaagtggagcaaacgtgcgatcatttggtac

SEQ ID NO: 91083 - DNA, 451 bp, Zea mays
attgagaccagcaagcaacatagaaagtagaatccattagcaacaatagagcaacagtggcgaccaagatattttccctccttatgctccttgctctttctacatgtgttgctaacgcgacaattttccctcaatgctcacaagctcctatagcttcccttcttcccccataccttccatcaattatagcttcagtatgtgaaaacccagctcttcaaccatataggcttcaacaagcaatcgcagcaagcaacatacctttatcgcccttgttgtttcaacaatcaccagccctatctttggtgcagtcattggtacaaaccatcagggcacaacagctgcagcaactcgtgctacctgtgatcaaccaagtagctctggcaaacctttctccctactctcagcaacaacaatttcttccattcaaccaactgtctacactgaaccctgc

SEQ ID NO: 91084 - DNA, 408 bp, Zea mays
tttttatttactccaccactacaggtccatttatttactcgcaatataaaattaccgatcggtacttaactacacacgcaagcaattagttcatgcgcttattaggttgtgccactggccaccactacactacattacactagcacaagcaagcagctacacatacttgtccatatcacataaacgaaacagcatatataagaagatgtcccaacatctttgcaccacgcgcgagatcaggggccctgcaggccgaactcttcagggcgcggccacgttctccttggcgagcggcgcgatctcctcgccttcgacccctggctcgccgccggcgaccccgaggctgagcagcacgttctcccagttcttggcaggggccttccaggagagatcctggatcatgcagtt

SEQ ID NO: 91085 - DNA, 457 bp, Zea mays
ctagcaacatagaaagcacaatagtgtaccaacaatggccgctaaaatattttgccggcttatgctgcttggtctttctgcaagtgctgctacggcgaccattttaccacaatgctcacaagctcctatagctatccttcttgcaccgtacctctcaccaacggtgtcttcggtatgtgaaaacccaattcttcaaccctacaggatccaacaggcaatcgcagctggcatcttacctttatcacccttgttcctacaacaatcatcagccctattacagcagttacctttggtgcatttattggcacaaaacatcagggcacaacaactacaacaacttgtgctagcaaaccttgctgcctactcttagcaacagcagtttcttgcattcaaccaactagctgcattgaactctgcttattatttgcaacaactgcaactaccattcagccagcta

SEQ ID NO: 91086 - DNA, 454 bp, Zea mays
  unsure (1)..(454): unsure at all n locations
cagccctattacatcagttacctttggtgcatttattggcacaaaacatcagggcagaacaactacgaacaacttgtgctagcaaaccttgctgcctactctcagcaacagcagtttcttccattcaaccaactagctgcattgaactctgcttcttatttgcaacaacaacaactaccattcagccagctacctgctgcctacccccagcaatttcttccattcaaccaactggcagcattgaactctcctgcttatttacagcagcaacaactactaccattcagccagctagctggtgtgagccctgctaccttcttgatacaaccacagttgttgccgttctaccagcacgctgcgcctaacgctggcaccctcttacaactgcaacaattgctgccattcaaccaacttgctntgacaaacccagcagcgttctaccaacaacccatca

SEQ ID NO: 91087 - DNA, 465 bp, Zea mays
aagcaacatagaaagtggaatccagtagcaacaatagagcaacaatggcgaccaaggtattttccgtccttatgctccttgctctttctacatgtgttgctaacgcgacaattttccctcaatgctcacaagctcctatagcttcccttcttcccccataccttccatcaattatagcttcaatatgtgaaaacccagctcttcaaccatataggcttcaacaagcaatcgcagcaagcaacatacctttatcgcccttgttgtttcaacaatcgccagccctatctttggtgcagtcattggtacaaaccatcagggcacaacagctgcagcaactcgtgctacctctgatcaaccaagtagctctggcaaacctttctccctactctcagcaacaacaatttcttccattcaaccaactgtctacactgaaccctgctgcttatttgcagcaacaactattac

SEQ ID NO: 91088 - DNA, 455 bp, Zea mays
  unsure (1)..(455): unsure at all n locations
gcaattagctcatcgactccagattggagaactcgacaccatgaaggtgctgatcggtgcccttgctctcctggcgctcgctgcgagcgccgcctccagtacaagcggcggctgtggctgccagacaccaccgtttcatctaccgcctccgttctatatgccgcctccgttctatctgccgccgcagcagcagccgcagccatggcaataccccactcaaccaccgcagctaagcccgtgccagcagttcggatcctgcggcgtcggcagcgtcggcagcccgttcctgggccagtgcgtcgagttcctgaggcaccagtgcagcccggcggcgacgccctacggctcgccacagtgccaggcgctgcagcagcagtgctgccaccagatcaggcaggtggagccgctgcaccggtaccaggcgacatacggtgtgggcctgcagtccttnctgc

SEQ ID NO: 91089 - DNA, 377 bp, Zea mays
cggttcggaattcccgggtattatttagaccaactagcaacatagaaagcacaatagtgtaccaacaatggcagccaaaatattttgcctggttatgctccttggtatttctgcaagtgctgctacggcgaccattttcccgcaatgctcacaagctcctatagcttcccttcttcccccgtacctctcaccagcggtgtcttcggtatgtgaaaacccaattcttcaaccctacaggatccaacaggcaatcgcagctggcatcttacctttatcacccttgttcctccaacaatcatcagccctattacagcagttacctttggtgcatttattggcacaaaacatcagggcacaacaactacaacaacttgggc

SEQ ID NO: 91090 - DNA, 354 bp, Zea mays
caactagcaaaatacatagtgaagtacactagcaacatcttagcaccaatgggagccaagattttttccctccttgccctccttgctctttcagcaagcgctgctacctctactattattccacaatgctcacaacaatacctctctccggtgacagccgcgggatttcaacacccaactatacaatcctacatgctacatgaggccatcgtagcaagcatcttacggtcattagcattaaccctccaacagccatatgccctattgcaacaaccatccttagtgcatctgtatctccaaagaatcgcgacacaacaactacaacaacagttgctaccaacaatcaatcaagta

SEQ ID NO: 91091 - DNA, 450 bp, Zea mays
aacatagaaagcacaatagtgtaccaacaatggcagccaaaatattttgcctccttgtgctccttggtctttctgcaagtgctgctacggcgaccattttcccgcaatgctcgcaagctcctatagcttcccttcttcccccgtacctctcaccagcggtgtcttcggtatgtgaaaacccaattcttcaaccctacaggatccaacaggcaatcacagctggcatcttacctttatcacccttgttcctccaacaatcatcagccctattacatcagttacctttggtgcatttattggcacaaaacatcagggcacaacaactacaacaacttgtgctagcaaaccttgctgcctactctcagcaacagcagtttcttccattcaaccaactagctgcattgaactctgcttcttatttgcaacaacaacaactaccattcagccagc

SEQ ID NO: 91092 - DNA, 409 bp, Zea mays
gtgaaaacccagctcttcagccctatatgctccaacaagcaatcgcagcaagcaacatacctttatcacccttgttgtttcaacaatcgccagccctatctttggtgcagtcattggtacaaaccatcagggcacagcagctgcagcaactcgtgctacctgtgatcaaccaagtagctctggcaaacctttctccctactctcagcaacaacaatttcttccattcaaccaactgtctacactgaaccctgctgcttatttgcagcaacaactattaccattcagccagctagctactgcctactctcagcaacaacaacttcttccatttaaccaattggccgcactgaaccccgctgcttatttgcagcagcaaatactactaccatttaaccagctagctgcagc

SEQ ID NO: 91093 - DNA, 448 bp, Zea mays
cccacgcgtccgggatcctgcggcgtcggcagcgtcggcagcccgttcctgggccagggcgtcgagttcctgaggcaccagtgcagcccggcggcgacgccctacggctcgccacagtgccaggcgctgcagcagcagtgctgccaccagatcaggcaggtggagccgctgcaccggtaccaggcgacatacggtgtggtcctgcagtccttcctgcagcagcagccgcagggcgagctcgcggcgctgatggcggcccaggtagcgcagcagctgacggcgatgtgcggcctgcagctgcagcagccaggtccctgcccttgcaacgcagcttgccgcggtgtctactactgaggaaactatgtactgtagtaataatgtaatggagccgctgactagctacctagctcgctagtttactcatttagcggcgatgagtaacgtagtg

SEQ ID NO: 91094 - DNA, 399 bp, Zea mays
  unsure (1)..(399): unsure at all n locations
aataaatacatgccactcacatggtgctcctccatcttccaagtcaccaacgcaaattgcaccaagaaatccatcgagaggccgtcgacaggggaattaatggcgtcgtcgtctagcagcagccaccgccgcctcatcctcgcagccgccgtcctgctctccgtgctcgcggctgccagcgccagcgccgggacctcctgcgtgccggggtgggccatcccgcacaacccgctcccgagctgccgctggtacgtgaccagccggacctgcggcatcgggccgcgcctcccgtggccggagctgaagaggagatgctgccgggagctggcggacatccccgcgtactgccggtgcacggcgctgagcatcctcatggacggcgcgatcccgncgggcccg

SEQ ID NO: 91095 - DNA, 458 bp, Zea mays
caagcaacatagaaagtggaatccagtagcaacaatagagcaacaatggcgaccaagatactttccgtccttatgctccttgctctttctgcatgtgttgctaacgcgacaattttccctcaatgctcacaagctcctatagcttcccttcttcccccataccttccatcaatgatagcttcagtatgtgaaaacccagctcttcaaccctataggctccaacaagcaatcgcagcaagcaacatacctttatcacccttgtttcaacaatcgccagccctatctttggtgcagtcattggtacaaaccatcaaagcacagcagctgcagcaactcgtgctacctgtgatcaaccaagtagctctggcaaacctttcttcctactatcagcaacaacaatttcttccatttcaccaactatctacactgaaccctgctgctaatttgcagcaacaact

SEQ ID NO: 91096 - DNA, 414 bp, Zea mays
  unsure (1)..(414): unsure at all n locations
ggcgcgcgccgtggtgctgtccgccgcgggcccgcacttctgcgcgggcatcgagctggggggccccggggacccgctgtccgccgcctccgccgatcccgtggccgccgcggaggggctccgccgcgcggtcctcgacatgcaggcggcgctcacggccatcgagcggtgccggaagcccgtcgtcgcggcggtgcacggcgcctgcgtcggcggcggcgtcgacctcgtggccgcctgcgacatcaggtgctgctccagggacgcctncttcgtgctcaaggaggtggacatggccatcgtcgccgacctcgggcgcgctgcagcgcctccgcggatcgtcggctacggcaacgctgctgacctcgcgctcaccggacgcaagatcaacgccatggaggccaaggacatggg

SEQ ID NO: 91097 - DNA, 375 bp, Zea mays
gtccgataccccaagcaccagcgcggcggcggcgaccatggctgtcggaaagaacaagaggatctccaagggaaagaagggtggcaagaaaaagaccgtcgaccctttctctaagaaggattggtatgacatcaaggcaccgtcggtgttcagtgtgcgcaacatcgggaagactctcgtatccaggacacagggtaccaggattgcttctgagggtctgaagcacagagtctttgaggtttgcctagctgatcttcagggcgacgaggatcaagcttacaggaaaatcaggctccgtgctgaagatgtgcagggcaggaatgtgctcacaaacttttggggtatgaattttaccactgataaactgagatccct

SEQ ID NO: 91098 - DNA, 430 bp, Zea mays
gtgggttggcttctcctccccctccggttcgggttcgggttcgtgaggttctccggggttcggtttcgtgggtgagcggatcgagatggcggcgtcggatgttgagtaccgctgcttcgtcggcggcctcgcctgggccacggacgaccactccctccacaacgccttcagcacctacggcgaggtcctcgagtccaagatcatcctcgatcgggagacgcagaggtcccgcggcttcggcttcgtcaccttctccacggaggaggcgatgcggaacgccatcgagggcatgaacggcaaggagctggacggccgcaacatcaccgtcaacgaggcccagtcccgcggcggccgtggaggcggcggcggcggcggttacggtggtggccgtggaggcggctgctacggcggtggcgggcgccgtgatggc

SEQ ID NO: 91099 - DNA, 445 bp, Zea mays
gcaacatagaaagcacaatagtgtaccaacaatggcagccaaaatattttgcctgcggatgctccttggtctttctgcaagtgctgctacggcgaccattttcccgcaatgctcgcaagctcctatagctacccttcttcccccgtacctctcaccagcggtgtcttcggtatgtgaaaacccaattcttcaaccctacaggatccaacaggcaatcacagctggcatcttacctttatcacccttgttcctccaacaatcatcagccctattacatcaggtacctttggtgcatttattggcacaaaacatcaaggcacaacaactacaacaacttgtgctagcaaaccttgctgcctactctcagcaacagcagtttcttccattcaaccaactagctgcattgaactctgcttctaatttgcaacaacaacaactaccattc

SEQ ID NO: 91100 - DNA, 439 bp, Zea mays
gaattccccattctataaattccagttaaacttaattcgtaagatcaatcataattgtcgagttgcaaaccatggacatggctttggcgtctaaagcctcccctccgccatggaatgccaccgccgccgagcagccaattccaaagcgtgacaaagccgctgcaaatgattcaacatacctcaatcctcaagctcatgatagtgttcttggaatcattctgggaggtggtgctgggactagattgtaccccttgacaaagaagcgtgccaagcctgcagtgccattgggtgccaactatagactgattgatattcctgtcagcaattgtctcaacagcaacatatccaagatctatgtgctaacgcaatttaactctgcttccctcaaccgtcacctctcaagagcctacgggagcaacattggagggtacaagaatga

SEQ ID NO: 91101 - DNA, 463 bp, Zea mays
cccgtgccagcagttcggatcctgcggcgtcggcagcgtcggcagcccgttcctgggccagtgcgtgcgagttcctgaggcaccagtgcagcccggcggcgacgccctacggctcgccacagtgccaggcgctgcagcagcagtgctgccaccagatcaggcaggtggagccgctgcaccggtaccaggcgacatacggtgtggtcctgcagtccttcctgcagcagcagccgcagggcgagctcgcggcgctgatggcggcccaggtagcgcagcagctgacggcgatgtgcggtctgcagctgcagcagccaggtccctgcccttgcaacgcagctgccggcggtgtctactactgaggaaactatgtactgtagtaataatgtaatggagccgctgactagctacctatagggctatagctagttcactcgtttagcggcgatgagtaacggagtgtcac

SEQ ID NO: 91102 - DNA, 336 bp, Zea mays
gcaacatagaaagcacaatagtgtaccaacaatggcagccaaaatattttgcctcctgatgctccttggtctttctgcaagtgctgctacggcgaccattttcccacaatgctcacaagctcctatagcttcccttcttcccccgtacctctcaccagcggtgtcttcggtatgtgaaaacccaattcttcaaccctataggatccaacaggcaatcgcagctggcatcttacctttatcacccttgttcctccaacaatcatcagccctattacagcagttacctttggtgcatttattggcacaaaacatcagggcacaacaactacaacaact

SEQ ID NO: 91103 - DNA, 448 bp, Zea mays
  unsure (1)..(448): unsure at all n locations
tcagaaacacaccaagcgaagcgcactagcaacgacctaacaacaatggctaccaagatattagccctccttgcgcttcttgccctttttgtgagcgcaacaaatgcgttcattattccacaatgctcacttgctcctagtgccattattccacagttcctcccaccagttacttcaatgggcttcgaacacctagctgtgcaagccaacatgcaacaacaagcgcttgcggcgagcgtcttacaacaaccaattgcccaattgcaacaacaatccttgccacatctaacaatacaagccatcacaacgcaacagcaacaacagttcctaccagcactgagccacctagccatggtgaaccctgccgnctacttgcaagagcagctgcttgcatccaacccacttgctctggcgaacgtagttgcaaaccagcaacaacaacagctac

SEQ ID NO: 91104 - DNA, 430 bp, Zea mays
attttcagcattcaaaaacacaccaagcgaagcgcactagcaacgacctaacaccgggggctaccaagatattagccctccttgcgcttcttgcccttttagtgagcgcaacaaatgcgttcattattccacagtgctcacttgctcctagtgccattattccacagttcctcccaccagttacttcaatgggcttcgaacatccagccgtgcaagcctacaggctacaactagcgcttgcggcgagcgccttacaacaaccaattgcccaattgcaacaacaatccttggcacatctaaccctacaaaccattgcaacgcaacatcaacaacaacaacagtttctgccatcactgagccacctagccgtggtgaaccctgtcacctacttgcaacagcagctgcttgcatccaacccacttgctctggc

SEQ ID NO: 91105 - DNA, 445 bp, Zea mays
cccacgcgtccgtgagcattcagaaacacaccaagcgaagcgcactagcaacagccgaacaacaatggctaccaagatattatccctccttgcgcttcttgcgctttttgcgagcgcaacaaatgcgtccattattccacaatgctcactcgctcctagttccattattccacagatactcccaccagttacttcaatggccttcgaacacccagctgtgcaagcctataggctacaacaagcgattacggcgagcgtcttacaacacccaattgcccaattgcaacagcaatccttggcacatctaacaatacaaaccatcgcaccgcaacagcaacaacagttgctaccagcactgagccacctagccatggtgaaccctgtcgcctacttgcaacagcagttgcttgcatccaacccatttgctctagcaaacgtagttgca

SEQ ID NO: 91106 - DNA, 357 bp, Zea mays
agcataccaactatcaaaatacatatccaattacactatcaacatcttatcaccagtgcattccaggatttttacccttcttgccctccttgctatctcaccaagctctcctacctctactattattccacaatactcacaacaacacctctctccattcacaacctcattatatcaacacccaactatactatcctacatactacattatatccatcttatcatgcatcttaccctcattaccattaaccctccaacagccatataccctattgcaacaaccatacttaatacacttgaatctccaacaaatctctacacatcaactactacaacacttgctaccaacaatcaatc

SEQ ID NO: 91107 - DNA, 459 bp, Zea mays
ccaacaagcaacatagaaagtggaatccagtagcacaatagaccaccatggcgagcaaaatcgtgtccttcttatgctccttgctctttctgcatgtgttgctaacgcgacaattttccctcaatgctcacaagctcctatagcttcccttcttcccccataccttccatcaatgatagcttcagtatgtgaaaacccagctcttcaaccctataggctccaacaagcaatcgcagcaagcaacatacctttatcacccttgtttcaacaatcgccagccctatctttggtgcagtcattggtacaaaccatcaaggcacagcagctgcagcaactcgtgctacctgtgatcaaccaagtagctctggcaaacctttctccctactatcagcaacaacaatttcttccattcaaccaactatctacactgaaccctgctgcttatttgcagcaacaact

SEQ ID NO: 91108 - DNA, 465 bp, Zea mays
tgtacatctatcatctaatctgatatatagctcataatcgcacgtatggacgaacacaacattatcgcgtgatacttggacctaataatacatgcatggtcataataaagtgttgctaactcgacaattttccctcaatgctcacaagctcctatagcttcccttcttcccccataccttccatcaatgatagcttcagtatgtgaaaacccagctcttcaaccctataggctccaacaagcaatcgcagcaagcaacatacctttatcacccttgtttcaacaatcgccagccctatctttggtgcagtcattggtacaaaccatcaaagcacagcagctgcagcaactcgtgctacctgtgatcaaccaagtagctctggcaaacctttctccctactatcagcaacaacaatttcttccattcaaccaactatctacactgaacccttctgcttatttgcag

SEQ ID NO: 91109 - DNA, 272 bp, Zea mays
ttcagccagctagctggtgtgagccctgctaccttcttgatacaaccacagttgttggcgttctaccagcacgctgcgcctaacgctggcaccctcttacaactgcaacaattgctgccattcaaccaacttgctttgacaaacccagcagcgttctaccaacaacccatcattggtggtgccctcttttagatttcttatgagttatagttcaataataaagttttttgtctgatgtttgtggcttcccagaaataagaaagtacatttct

SEQ ID NO: 91110 - DNA, 454 bp, Zea mays
atcacaacgaacaaaagctctcgatctcaccgacaccgaggaagaagagatcaatggcgtccgagcagggagtcgtgatcgcgtgccacagcaaggctgagtttgacgcccacatgaccaaggcccaggaagccggcaagctggtggtcatcgacttcactgccgcctggtgcggtccatgccgcgccatcgccccactgttcgtcgaacacgccaagaagttcactcaggtcgtcttcctgaaggtggacgtggacgaagtgaaggaagtcaccgcggcctacgaggtcgaggcgatgccgaccttccacttcgtcaagaacggcaagacggtcgcgaccatcgtgggtgccaggaaggacgagctcctggccctgatcgagaagcatgccgcgcctgcgcctgcgactgcgtctgcctaaatgagatcagatcagtcgtcgccgtcaataag

SEQ ID NO: 91111 - DNA, 400 bp, Zea mays
gaccattagctttatctactccagagcgcagaagaacccgatcgacaccatgagggtggtgctcgttgccctcgctctcctggctctcgctgcgagcgccacctccacgcatacaagcggcggctgcggctgccagccaccgccgtcggttcatctaccgccgccggtgcatctgccacctccggttcacctgccacctccggtgcatcttccaccgccggtccacctgccgccgccggtccacctgccaccgccggtccatgtgccgccgtcggttcatctgccgacgccaccatgccactaccctactcaaccgccccggcctcagcctcatccccagccacacccatgcgcgtgccaacagccgcatccaagcccgtgccagctgcagggaacctgc

SEQ ID NO: 91112 - DNA, 423 bp, Zea mays
cccacgcgtccgccaaacggagctgctgctggagttggtgctcaacactcacagtgggatgcagcttggtttgcacatgttccaggacttaaggttctcacaccatactcttcagaagatgctcgaggcttgctcaaagctgctatcagggaccctgatcctgttattttcctggaaaatgaattgctttatggagaatctttcccagtttctgctgaagtgcttgattctagtttttgcctaccgattggcaaagctaagatagaacgtgagggtaaagatgttaccattactgcattctccaagatggttggctatgctctccaggctgcagagatactgtccaaggaaggaatcagcgctgaggtgatcaaccttcgatcaatcagaccacttgatagagctgctattaatgcatctgtc

SEQ ID NO: 91113 - DNA, 450 bp, Zea mays
aactagcaacatacatagtgaagtacactagcaacatcttagcaccaatgggagccgagatttttgccctccttgccctccttgctctttcagcaagcgctgctacctcgacttttattccacaatgctcacaacaatacctctctccggtgacagccgcgggatttcaatacccaactatacaatcctacatggtacaagaggccatccaagcaagcatcttacggtcattagcattaaccctccaacaaccatatgctctattgcaacagccatccttagtgcatctgtatctccaaagaatcgcggcacaacaactacaacaacagttgctaccaacaatcaatcaagtagttgcagcgaaccttgctgcttacctacagcaacaacagtttcttccattcaatcaactagctggggtgaaccctgctatctacttgcaggcacaac

SEQ ID NO: 91114 - DNA, 447 bp, Zea mays
  unsure (1)..(447): unsure at all n locations
caacaatcatcagccctattacagcagttacctttggtgcatttattggcacagaggatcatggcacaacaactacaacaacttgtgctagcaaaccttgctgcctactctcagcaacaacagtttcttccattcaaccaactagctgcattgaactctgcttcttatttgcaacaacaacaactaccattcagccagctatctgctgcctacccccagcaatttcttccattcaaccaactgacagctttgaactctcctgcttatttacagcagcaacaactactaccattcagccagctagctggtgtgagccctgctaccttcttgacacaaccacaattgttgccgttctaccagcacgctgcgcctaacgctggcaccctcttacaactgcaacaattgctgccattcaaccaactngctttgacaaacccaacagcattc

SEQ ID NO: 91115 - DNA, 418 bp, Zea mays
cgaccgatcgatcgccacagccaacactcacccgccgaggcgacgcgacagccgccggaaggaaggaataaactcactgccagccagtgaagggggagaagtgtactgctccgtcgaccagtgcgcgcaccgcccggcagggctgctcatctcgtcgacgaccagtggattaatcggcatggcggctctggccacgtcgcagctcgtcgcaacgcgcgccggcctgggcgtcccggacgcgtccacgttccgccgcggcgccgcgcatggcctgaggggggcccgggcgtcggcggcggcggacacgctcagcatgcggaccagcgcgcgcgcggcgcccaggcaccagcagcaggcgcgccgcggtggcaggttcccgtcgctcgtcgtgtgcgccagcgcccgcatgaacgtcgtc

SEQ ID NO: 91116 - DNA, 446 bp, Zea mays
caatcgccagccctatctttggtgcagtcattggtacaaaccatcaaggcacagcagctgcagcaactcgtgctacctgtgatcaaccaagtagctctggcaaacctttctccctactatcagcaacaacaatttcttccattcaaccaactatctacactgaaccctgctgcttatttgcagcaacaactattaccattcagccagctagctactgcctactctcatcaacaacaacttcttccatttaaccaattggccgcactgaacctcgctgcttatttgcagcagcaaatattactaccatttagccagctagctgcagcaagccgtgcttccttcttgacacagcaacagttgctgcctttctaccagcagtttgcggctaaccccgcaaccctcttacaactacaacaattgttgccctttgtccaacttgctttgac

SEQ ID NO: 91117 - DNA, 426 bp, Zea mays
atggcagccaaaatattctgcctacttatgctccttggtctttctgcaagtgctggtacagcgacgatcttcccgcaatgctcgcaagctcctatagcttcccttcttcccccgtacctctcaccagcggtgtcttcggtatgtgaaaacccaattcttcaaccctacaggatccaacaggcaatcgcagctggcatcttacctttatcacccttgttcctccaacaatcatcagccctattacaacagttacctttggtgcatttattggcacaaaacatcagggcacaacaactacaacaacttgtgctagcaaaccttgctgactactctcagcaacagcagcttcttccattcaaccaactaggttcattgaactctgcttattatttgcaacaacaacaactaccattcagccagctacct

SEQ ID NO: 91118 - DNA, 439 bp, Zea mays
  unsure (1)..(439): unsure at all n locations
gcaaaccttgctgcctactctcagcaacagcagtttcttccattcaaccaactaggtgcattgaacgctgcttcttatttgcaacaacaacaactaccattcagccagctacctgctgcctacccccagcaatttcttccattcaaccaactggcagcattgaactctcctgcttatttacagcagcaacaactactaccattcagccagctagctggtgtgagccctgctaccttcttgatacaaccacagttgttgccgttctaccagcacgctgcgcctaacgctggcaccctcttacaactgcaacaattgctgccattcaaccaacttgctttgacanacccagcagcgttctaccaacacccatcattggtgttgccctctttagatnntctatgagttatagttcaaatataaagttttttgtctgatgttt

SEQ ID NO: 91119 - DNA, 306 bp, Zea mays
ctgatttgcagcagcaaatactactgccatttagcgagctagctgcagcaagtcgtggggccttcttgacacagcaacagttgctgcctttctacaagcagtttgcggctaaccccgcaaccctcttacaactacaacaattgttgccctttgtccaacttgctttgacaaacccagcagcctcctaccaacaacacatcattggtggtgccctcttttagattgattattagttgtaattcaataataaagttttttggatgatgtatgtggccaaccagaaataagaagttacatttccagatt

SEQ ID NO: 91120 - DNA, 439 bp, Zea mays
agcttcccttcttcccccgtacctctcaccaacggtgtcttcggtatgtgaaaaccgagttcttcaaccctacaggatccaacaggcaatcgcagctggcatcttacctttatcacccttgttcctccaacaatcatcagccctattacagcagttacctttggtgcatttattggcacaaaacatcagggcacaacaactacaacaacttgtgctagcaaaccttgctgcctactctcagcaacagcagtttcttccattcaaccaactagctgcattgaactctgcttcttatttgcaacaacaacaactaccattcagccagctatctgctgcctacccccagcaatttcttccattcaaccaactgacagcattgaactctcctgcttatttacagcagcaacaactactaccattcagccagctagctggtgtg

SEQ ID NO: 91121 - DNA, 271 bp, Zea mays
gctagctgcagcaaaccgtgcttccttcttgacacagcaacagttgctgcctttctaggagcagtttgcggctaaccccgcaaccctcttacaactacaacaattgttgccctttgtccaacttgctttgacagacccagcggcctcctaccaacaacacatcattggtggtgccctcttttagattgcttattagttgtaattcaataataaagttttttggatgatgtatgtggccaaccagaaataagaagttacatttccagattct

SEQ ID NO: 91122 - DNA, 445 bp, Zea mays
gcaacatagaaagcacaatagtgtaccaacaatggcagctaaaatattttgcctccggatgctccttggtctctctgcaagtgctgctacggcgaccattttcccacaatgctcacaagctcctatagcttcccttcttcccccgtacctctcaccaacggtgtcttcggtatgtgaaaacccaattcttcaaccctacaggatccaacaggcaatcgcagctggcatcttacctttatcacccttgttcctccaacaatcatcagccctattacagcagttacctttggtgcatttattggcacaaaacatcagggcacaacaactacaacaacttgtgctagcaaaccttgctgcctactctcagcaacagcagtttcttccattcaaccaactagctgcattgaactctgcttcttatttgcaacaacaacaactaccattc

SEQ ID NO: 91123 - DNA, 489 bp, Zea mays
  unsure (1)..(489): unsure at all n locations
taccggtccggaattcccgggcaacaagcaacatagaaagtggaatccagtagcaacaacagagcaacaatggcgaccaagatattttccctccgtatgctccttgctctttctgcatgtgttgctaacgcgacaattttccctcaatgctcacaagctcctatagcttcccttcttcccccataccttccatcaatgatagcttcagtatgtgaaaacccagctcttcagccctataggctccaacaagcaatcgcagcaagcaacatacctttatcacccttgttgtttcaacaatcgccagccctatctttggtgcagtcattggtacaaaccatcagggcacagcagctgcagcaactcgtgctacctgtgatcaaccaagtagctctggcaaaccttttctcctactctcagcnnacacaatttcttccattcaaccaactgtctacactgaaccctgcctgctaattgcagcaacaactatta

SEQ ID NO: 91124 - DNA, 452 bp, Zea mays
tagcaacatagaaagcacaatagtgtaccaacaatggcagccaaaatattttgcctgcttatgctccttggtctttctgcaagtgctgctacggcgaccattttcccgcaatgctcgcaagctcctatagcttcccttcttcccccgtacctctcaccagcggtgtcttcggtatgtgaaaacccaattcttcaaccctacaggatccaacaggcaatcgcagctggcatcttacctttatcacccttgttcctccaacaatcatcagccctattacaacagttacctttggtgcatttattggcacaaaacatcagggcacaacaactacaacaacttgtgctagcaaaccttgctgcctactctcagcaacagcagtttcttccattcaaccaactaggttcattgaactctgcttcttaattgcaacaacaacaactaccattcagcca

SEQ ID NO: 91125 - DNA, 459 bp, Zea mays
  unsure (1)..(459): unsure at all n locations
ttttgagcattcagaaacacaccaagcgaagcgcactagcaacgacctaacaacaggggctaccaagatattagccctccttgcgcttattgccctttttgtgagcgcaacaaatgcgttcattattccacaatgctcacttgctcctagtgccattattccacagttcctaccaccagttacttcaatgggcttcgaacacctagctgtgcaagccaacatgcaacaacaagcgcttgcggcgagcgtcttacaacaaccaattgcccaattgcaacaacaatccttgccacatctaacaatacaagccatcacaacgcatcagcaacaacagttcctaccagcactgagccacctagccatggtgaaccctgccgnctacttgcaagagcagctgcttgcatccaacccacttgctctggcgaacgtagttgcacaccagcaacaacaacagctaca

SEQ ID NO: 91126 - DNA, 454 bp, Zea mays
gcaacatagaaagcacaatagtgtaccaacaatggcagctaaaatattttgcctccgtatgctccgtggtctttctgcaagtgctgctacggcgaccattttcccacaatgctcacaagctcctatagcttcccttcttcccccgtacctctcaccaacggtgtcttcggtatgtgaaaacccaattcttcaaccctacaggatccaacaggcaatcgcagctggcatcttacctttatcacccttgttcctccaacaatcatcagccctattacagcagttacctttggtgcatttattggcacaaaacatcagggcacaacaactacaacaacttgtgctagcaaaccttgctgcctactctcagcaacagcagtttcttccattcaaccaactagctgcattgaactctgcttcttatttgcaacaacaacaactaccattcagccagcta

SEQ ID NO: 91127 - DNA, 477 bp, Zea mays
gtaccggtccggaattcacgcgtccgcccacgcgtccgcaacatagaaagcacaatagtgtaccaacaatggcagccaaaatgttttgcctcggtatgctccttggtctttctgcaagtgctgctacggcgaccattttcccgcaatgctcgcaagctcctatagcttcccttcttcccccgtacctctcaccagcggtgtcttcggtatgtgaaaacccaattcttcaaccctacaggatccaacaggcaatcacagctggcatcttacctttatcacccttgttcctccaacaatcatcagccctattacatcagttacctttggtgcatttattggcacaaaacatcagggcacaacaactacaacaacttgtgctagcaaaccttgctgcctactctcagcaacagcagtttcttccattcaaccaactagctgcattgaactctgcttcttatttgcaacaacaacaactac

SEQ ID NO: 91128 - DNA, 450 bp, Zea mays
  unsure (1)..(450): unsure at all n locations
gagcagcctccgcgccaagtggccgacgctggcgtgcccgtccaacgacgggctgcgcttctggggccacgagtgggagaagcacggcacctgcgcagccgacgtcttcgacgagcacggctacttccaggccgcgctgcgcctccgcgaccagctgggagtcctcggcgcgctcacctccgccggcgtcaagcccgacggcggctactacacgctgagccagatcaagggcgccatccgccagggcaccggcttcgagccctacgtggagtgcaaccgcgacgaggccggcaacagccagctctaccagctctacttctgcgtcgacgccgncggcgacagcttcgtcgacttgcccgtcctncccaagcgcaggccctgtggcaaaccggatcgagttcccggctttctaagctaactcactcttcacgtcagttgctgcaatatact

SEQ ID NO: 91129 - DNA, 452 bp, Zea mays
  unsure (1)..(452): unsure at all n locations
agacgttgttggagcaccttggagttaaacgaaatgaggtgaccagtgatggtttattttctgttggagaaatggagtgcatgggttgctgtgtgaatgctcctatgattgctgtggctgactactcgaaaggctcagagggttacacatataactactatgaggacctcactccaaaacgagttgttgagattgttgagatgcttagaagaggtgaaacaccccctcgaggtacacagcacccagagcgaaaaaactgtggccctgccggggggaacaccaccttgcacggagagccgaaacctnctncatgcaaggatctggatgcctgctaagtttgcttcggagcattacgagcacgcgcataacttggctcgtactgtaaagtgtgcaaactgcacacagcggaggctgtgttatttgtattctgaaagcttcttgtgtntcgtcaa

SEQ ID NO: 91130 - DNA, 477 bp, Zea mays
  unsure (1)..(477): unsure at all n locations
taccgtttcggaattccgggttcatgttcaacaacaacaacaacaaccgcagcaccaccaccaacaacaacaacaacagcaccaacaacaacgtcaatgtgaaggccaacaacaacatcaccaacaatcacaaggccatgtgcaacaacacgaacagagccatgagcaacaccaaggacagagccatgagcaacaacatcaacaacaattccagggtcatgacaagcagcaacaaccacaacagcctcagcaatatcagcagggccaggaaaaatcacaacagcaacaatgtcattgccaggagcagcaacagactacaaggtgcagctataactactatagcagtagctcaaatctaaaaaattgtcatgaattcctaangcagcagtgcagccctttggtaatggcctttctccaatcacgtttgatacaaccaagtagctgccaagtattgcagcaacaaatgtgtcatgatct

SEQ ID NO: 91131 - DNA, 456 bp, Zea mays
gcaacatataaagcacaatagtgtaccaacaatggcagccaaaatattttgcttccgtatgctccttggtctttctgcaagtgctgctaccgcaaccattttcccacaatgctcacaagctcctatagcttcctttcttcccccatacctctcaccagcggtgtcttcagtatgtgaaaacccaattcttcaaccctacaggatccaacaggcaatcgcagcaggcatcttacctttatcacccttgttcctccaacaaccgtcagccctattacagcagttacctttggtgcatttgttggcacaaaacatcaaggcacaacaactacaacaacttgtgctaggaaaccttgcttgctactctcagcaacagcaagttcttccattcaaccaactggctgcattgaactctgctgcttatttgcaacaacaactaccattcagtcagctagctgc

SEQ ID NO: 91132 - DNA, 307 bp, Zea mays
cgtccaccgacgcgtgcggtaaaaacctaatggatgcatgcacatcacatgcactccaccatgcaaatttgagttctgctggctatgtcttggtccatggtcagagcatggagagaggactggtggattttatgcttgtaaccgctatgagtcagcaaggcaagaaggagcgtatgatgaatctgaaaggagaagagaaatggcaaagaactcccttgagagatacacacattattatgaacgatgggcagccaatcagtcgtcgaggcaaaaggcactgggggaccttcaaagcctacagaatgac

SEQ ID NO: 91133 - DNA, 441 bp, Zea mays
  unsure (1)..(441): unsure at all n locations
agcaacatagaaagcacaatagtgtaccttcaatggcagccaaaatattttgcctcctgtatgctccttggtctttctgcaagtgctgctacggcgaccattttcccgcaatgctcgcaagctcctatagcttcccttcttcccccgtacctctcaccagcggtgtcttcggtatgtgaaaacccaattcttcaaccctacaggatccaacaggcaatcgcaactggcatcttacctttataacccttgttcctccaacaatcatcagccctattacaacagttaccgttggtgcatttattggcacagaacatcagggcacaacaactacaacacctngtgctagcaaaccttggtgcctactttaagcaacagcagtttcttccattcaacccactaggttcattggactctgcttcttatttgcagcaacaacaacta

SEQ ID NO: 91134 - DNA, 263 bp, Zea mays
aattcccggcattgagaccaactagcaacatagaaagcacaatagtgtaccaacaatggcagccaaaatattttgcctccttatgctgcttggtctttctgcaagtgctgctacggcgaccattttcccgcaatgctcgcaagctcctatagcttcccttcttcccccgtacctctgaccagcggtgtcttcggtatgtgaaaacccaattcttcaaccctacaggatccaacaagcaatcgcagctagcatcttacctttat

SEQ ID NO: 91135 - DNA, 374 bp, Zea mays
taccggtccggaattcccggggtgatctgcgtacacgggctccctcttcctgtcagtaatagagtgagagtgaggcagcgaggaggagacaaggggaaatggggaagggagcgcaagggagcgatgcggcggcggcgggcggcgaggtggaggagaacatggcggcgtggctggttgccaagaacaccctcaagatcatgcccttcaagctcccgcccgtcggcccttatgatgtccgcgtgcgcatgaaagcagttgggatttgcggcagcgatgtgcactaccttagggagatgcgcatcgcgcactttgtggtgaaggagccgatggtgatcggacacgagtgcgcgggcgtggtctaggaggtgggcgcc

SEQ ID NO: 91136 - DNA, 535 bp, Zea mays
  unsure (1)..(535): unsure at all n locations
gaggnctcnntnttagggtagacctctaaagaatatattggactctcgtaccggtccggaattcccgggtcgacccacgcgtccgtgctgcgtacctacaacagcgacaacagctacttaatccactaccggtggctaacggataggtcgatgccttcctacagcagcaacaattgctgccatacaaccagttctcttagatgaaccctgccttgctgcgacagcaacccatcgttggaggtgccatctttgatatcacatatgagatgtactcgatgatggcgccctaatagcgcgatgtgcctactacaaatactcaatatcttgagtgacatttatctcgatacaaccaacttgctttgacggacggacgatctatatgatccaagcttacctacgcttgcatgctacgtcatagctcttatatagtgtcacctaaattcaatgcactgggcgtcatgttacagcgtcgcgacttgtaagaccctgccgttacccaacttaatcgccttgcagcacatccacctttcgccaa

SEQ ID NO: 91137 - DNA, 457 bp, Zea mays
  unsure (1)..(457): unsure at all n locations
gcaacatagaaagcacaatagtgtaccaacaatggcagccaaaatattttgcctcggtatgctccttggtctttctgcaagtgctgctacggcgaccattttcccacaatgctcacaagctcctatagcttcccttcttcccccgtacctctcaccagcggtgtcttcggtatgtgaaaacccaattcttcaaccctataggatccaacaggcaatcgcagctggcatcttacctttatcacccttgttcctccaacaatcatcagccctattacagcagttacctttggtgcatttattggcacataacatcagggcacatcaactaccacaacttgtgctagcaaaccttgctgnctactctcagcaacaacagtttcttccattcaaccaactagctgcattgaactctgcttcttatttgcaacaacaacaactaccattcagccagctatct

SEQ ID NO: 91138 - DNA, 450 bp, Zea mays
ggatttgctcacaacacaggaaaagaatatggccagatgcttaatgctgaggttcgagatcagataaataataatgggacaaaaaatgttttgcctagtcgaatcgaggatctttcaggaaaggtccagtttttgccatgttctcatgactgaaattggtcgcttcagcaaagatatgaaacaactattacaagagaaggtttttgtcattgctgtcttaggttatatctcctacaacttcgtcattggtgcttattcctactggggcccaaaggcaggtcaagagatctacaatatggcgagtgcggatcttatgtttggtggaattactatagtgtgtggaattgttggaacactagcatgaggtttcatccttgacaagatagggtctactattcctaatgctttcaagcttctttctggtgcgacattcgtaggggcaatattctg

SEQ ID NO: 91139 - DNA, 429 bp, Zea mays
cggttcggattcccgggtcgagccacgcgtccgcccacgcgtccggaaagctcttcagagtatgcatcaaatctaactcctgcttctgcaagtgcagctacattaacagcaggagtagcacctccattgcctgcaggaactcaaaacatattaccatatatagagtcattttttgtgacatgtgagaagttgcgtcctgggcaacctgatgctgtacaagaggcttcgacttctgatatggaagatgcttcaacatctagtggtgggcagatatcatattcctgtcaagctagtcttgacgagaagcaaaatgcttttgtgaaattctcagagaagcacagaagattgctgaatgcattcatccatcaaaaccctggattactggagaagtcattctcgctgatgttaaaaattcctcgcctgattgat

SEQ ID NO: 91140 - DNA, 443 bp, Zea mays
gagaccaactagcaacatagaaagcacaatagtgtaccaacaatggcagccaaaatatgttgcttccttatgctccttggtctttctgcaagtgctgctaccgcaaccattttcccacaatgctcacaagctcctatagcttcctttcttcccccatacctctcaccagcggtgtcttcagtatgtgaaaacccaattcttcaaccctacaggatccaacaggcaatcgcagcaggcatcttacctttatcacccttgttcctccaacaaccgtcagccctattacagcagttacctttggtgcatttgttggcacaaaacatcaaggcacaacaactacaacaacttgtgctaggaaaccttgctgcctactctcagcaacagcagtttcttccattcaaccaactggctgcattgaactctgctgcttatttgcaacaaca

SEQ ID NO: 91141 - DNA, 445 bp, Zea mays
cacctacccggacgcgcgcacgcaaagcagaacgctcccctcccggccttcccttcctgcccgccctccgaagtccgaaggccagaagcttccggaagccagcccaagccatgaacgccgccagcaccgccgccgcggcccccgcgcctgccgcgaccgtgcaggtgccgcgcgggcaggtggatctgatcgacttcatcgactggaccggcgtcgagtgcctcaaccaggactcgtaccacagcatcgtcaacgcgctcaagcagagtttgagagacgacgaggggctgtacctcgccagcgattcggacgagcagctgctgatctacatccccttcatgcaggtagtcaaactgcattccgcgctattcaaaggtcccgaggaagagggccccaaaacagtaaaactcttctccaacaaagagcatatgggtttcagcaatgt

SEQ ID NO: 91142 - DNA, 448 bp, Zea mays
caacaacaacaactgcaacagtttctgccagcgcttagtcaactagccatggtgaagcctgccgcctacctacaacagcaacaactgctttcatctagcccgctcgctgtggccaatgcacctacatacctgcaacaagaattgttgcaacagattgtaccagctctaactcagctagctgtggcaaaccctgttgcctacttgcaacagctgcttccattcaaccaactaactatgtcgaactctgttgcgtacctacaacagcgacaacagttacttaatccattggcagtggctaacccattggtcgctgccttcctacagcagcaacaattgctgccatacaaccggttctctttgatgaatcctgtcttgtcgaggcagcaacccatcgttggaggtgccatcttttagattacatatgagatgtactcgataatggtgccct

SEQ ID NO: 91143 - DNA, 493 bp, Zea mays
taccggtccggaattcccgggcagaaacacaccaagcgaagcgcactagcaacaacctaacaacaatggctaccaagatattatccctccttgcgcttcttgcgctttttgcgagcgcaacaaatgcgtccattattccacaatgctcacttgctcctagttccattattccacagttcctcccaccagttacttcaatggccttcgaacacccagctgtgcaagcctataggctacaacaagcgattgcggcgagcgtcttacaacaaccaattgcccaattgcaacaacaatccttggcacatctaacaatacaaaccatcgcaacgcaacagcaacaacagttcctaccagcactgagccacctagccatggtgaaccctgtcgcctacttgcaacagcagctgcttgcatccaacccacttgctctagcaaacgtagttgcaaaccagcaacaacaacaactgcaacagtttctgccagcgcttagtca

SEQ ID NO: 91144 - DNA, 475 bp, Zea mays
ggttcggaattcccggggcaacatagaaagtggaatccagtagcaacaatagagcaacaatggcgaccaagatattttccctccttatgctgctggctctttctacatgtgttgctaacgcgacaattttccctcaatgctcacaagctcctatagcttcccttcttcccccataccttccatcaattatagcttcaatatgtgaaaacccagctcttcaaccatataggcttcaacaagcaatcgcagcaagcaacatacctttatcgcccttgttgtttcaacaatcgccagccctatctttggtgcagtcattggtacaaaccatcagggcacaacagctgcagcaactcgtgctacctctgatcaaccaagtagctctggcaaacctttctccctactctcagcaacaacaatttcttccattcaaccaactggctacactgaaccctggtgcttatttgcagcacaacta

SEQ ID NO: 91145 - DNA, 214 bp, Zea mays
ggtcagtcgggactacccgctgagtttaagcatatatataaaatagcggaaggagagtgagggtaagtctgtaactgtaacccatagctgagatgctgtctgcaagcagcaatgccaatgccaatgccatctggttttcgtgcaaaaaaaaaaaaaaaaaaaaaaagaaagaaaaaaaaaaaaaaaaaaaaaaaaataagaaaaaaaaagaaaa

SEQ ID NO: 91146 - DNA, 441 bp, Zea mays
caacgacctaacaccaatggctaccaagatattagccctccttgcgcttcttgccctgggagtgagcgcaacaaatgcgttcattattccacagtgctcacttgctcctagtgccattattccacagttcctcccaccagttacttgaatgggcttcgaacatccagccgtgcaagcctacaggctacaactagcgcttgcggcgagcgccttacaacaaccaattgcccaattgagaacaacaatccttggcacatgtaaccctacaaaccattgcaacgcagcaacaacaacaacaacagtgtctgccatcactgagccacctagccgtggtgaaccctgtcacctacttgcaacagcagctgcttgcatccaacccacttgctctggcgaacgtagctgcataccagcaacaacaacagctgcaacagtttatgccag

SEQ ID NO: 91147 - DNA, 444 bp, Zea mays
aacaggcaatcacagctggcatcttacctttatcacccttgttcctccaacaatcatcagccctattacatcagttacctttggtgcatttattggcacaaaacatcagggcacaacaactacaacaacttgtgctagcaaaccttgctgcctactctcagcaacagcagtttcttccattcaaccaactagctgcattgaactctgcttcttatttgcaacaacaacaactaccattcagccagctacctgctgcctacccccagcaatttcttccattcaaccaactggcagcattgaactctcctgcttatttacagcagcaacaactactaccattcagccagctagctggtgtgagccctgctaccttcttgatacaaccacagttgttgccgttctaccagcacgctgcgcctaacgctggcaccctcttacaactgc

SEQ ID NO: 91148 - DNA, 440 bp, Zea mays
tgagcattcagaaacacaccaagcgaagcgcactagcaacaacctaacaacaatggctaccaagatattatccctccttgcgcttcttgcgctttttgcgagcgcaacaaatgcgtccattattccacaatgctcacttgctcctagttccattattccacagttcctcccaccagttacttcaatggccttcgaacacccagctgtgcaagcctataggctacaacaagcgattgcggcgagcgtcttacaacaaccaattgcccaattgcaacaacaatccttggcacatctaacaatacaaaccatcgcaacgcaacagcaacaacagttcctaccagcactgagccacctagccatggtgaaccctgtcgcctacttgcaacagcagctgcttgcatccaacccacttgctctagcaaacgtagttgcaaaccagc

SEQ ID NO: 91149 - DNA, 315 bp, Zea mays
cccacgcgtccggcttccctcaaccgtcacctctcaagagcctacgggagcaacgggggatggtacaagaatgaagggtttgttgaagtcttagctgcacagcagagcccagataatccaaactggtttcagggtactgcagatgctgtaaggcagtacttgtagttgtttgaggagcataatgtgatggaatttctaattcttgctggcgatcacctgtaccggatggactatgaagagttcattcatgcacacagataaacagatgctgatattaccgtaggtgccctaccgatggatgaggaacgtgcaact

SEQ ID NO: 91150 - DNA, 441 bp, Zea mays
ttgaaaaacacaccaagcgaagcgcactatcaacgacctaacaccaatggctaccaaggtgattagccctccttgcgcttcttgcccttttagtgagcgcaacaaatgcgttcattattccacagtgctcacttgctcctagtgccattattccacagttcctcccaccagttacttcaatgggcttcgaacatccagccgtgcaagcctacaggctacaactagcgcttgcggcgagcgccttacaacaaccaattgcccaattgcaacaacaatccttggcacatctaaccctacaaaccattgcaacgcaacaacaacaacaacaacagtttctgccatcactgagccacctagccgtggtgaaccctgtcacctacttgcaacagcagctgcttgcatccaacccacttgctctggcgaacgtagctgcataccagc

SEQ ID NO: 91151 - DNA, 522 bp, Zea mays
tgaaggaatggagagtgtgtttgactcagctttactcagacctgccgtctcggaattccggtcgacccacgcgtccgttcaccaggttgagatcaagcctgagatgatcggccactaccttgctgagttctcggggtcctacaagccggtcaagcacggcaggcccggtatcggtgccacccactcctcgcggtttattcctctgaaatgagctggtactcggctctttagtatcccaagacattttgtgttgttccattccagctcaagaattcaaagctaagcattgcacaattatgctgttttgttggaaggatttgagttaatcatatctaaagctgagttgtaaaaaaaaaaaaaaaaagggccggcggttttaaagatccaagcttacctacgcctgcatgccaagtcatagctcttctatagtggcacctaaattcaattcactggccgtcgttttacaacgtcgtgactgggaaaaccctggcgttacccaacttaatcggcttgcagcacata

SEQ ID NO: 91152 - DNA, 374 bp, Zea mays
cggacgcgtgggcggacgcgtgggaactagcaacatagaaagcacaatagtgtaccaagaatggcagccaaaatattttgcctccttatgctccttggtctttctgcaagtgctgctacggcgaccattttcccgcaatgctcgcaagctcctatagcttcccttcttcccccgtacctctcaccagcggtgtcttcggtatgtgaaaacccaattcttcaaccctacaggatccaacaggcaatcgcagctggcatcttacctttatcacccttgttcctccaacaatcatcagccctattacaacagttacctttggtgcatttattggcacaaaacatcagggcacaacaactacaacaacttgtgctagc

SEQ ID NO: 91153 - DNA, 400 bp, Zea mays
aagcgagaaaattgttcctctgattgatagcgaactgtacaatcgctctgattttatggcggagtacaaggatgccaaattctttgtaataaagtcctacaccgaggaccatgtacataggagcattaagtataaagtttgggccagcacagccagcgggaacaggaagctggattctgcttaccatgcagccaaagagaaagaagagcattgccctattttcttgtttttctcagtaagaacagctcatctcctttggttttttgctattttccttcgagggaaaaaaagagtaccataccatatgggggtttgaacctttaattagatgggctaaagggttttcgatttttgtaatttcttttatgaataattggtccttttatagggtaatggaaat

SEQ ID NO: 91154 - DNA, 440 bp, Zea mays
gcaacatagaaagcacaatagtgtaccaacaatggcagccaaaatattttgcctccttatgctccttggtctttctgcaagtgctgctacggcgaccattttcccgcaatgctcgcaagctcctatagcttcccttcttcccccgtacctctcaccagcggtgtcttcggtatgtgaaaacccaattcttcaaccctacaggatccaacaggcaatcgcagctggcatcttacctttatcacccttgttcctccaacaatcatcagccctattacaacagttacctttggtgcatttattggcacaaaacatcagggcacaacaactacaacaacttgtgctagcaaaccttgctgcctactctcagcaacagcagtttcttccattcaaccaactaggttcattgaactctgcttcttatttgcaacaacaacaactac

SEQ ID NO: 91155 - DNA, 442 bp, Zea mays
gccatcactgagccacctagccgtggtgaaccctgtcacctacttgcaacagcagctgcttgcatccaacccacttgctctggcgaacgtagctgcataccagcaacaacaacagctgcaacagtttatgccagtgctcagtcaactagccatggtgaaccctgccgtctacctacaactactttcatctagcccgctcgcggtgggcaatgcacctacgtacctacaacaacagttgctgcaacaaattgtaccagctctgactcagctagctgtggcaaaccctgctgcctacttacaacagttgcttccattcaaccaactggctgtgtcaaactctgctgcgtacctacaacagcgacaacagttacttaatccattggcagtggctaacccattggtcgctaccttcctgcagcagcaacaacaattgctgccatac

SEQ ID NO: 91156 - DNA, 126 bp, Zea mays
ggttgaatggcagcaacccatcattggtggtgccctcttttagatgtcttatgagggatagttcaataataaagttttttgtctgatgtttgtggcttcccagaaataagaaagtacatttctaaa

SEQ ID NO: 91157 - DNA, 129 bp, Zea mays
atgacctgaatgaacaatcatcgccgctagttgagtcatttagcggcgatgattgagtaataatgtgtcacgcatcaccatgggtggcagtgtcagtgtgagcaatgacctgaatgaacaattgaaatg

SEQ ID NO: 91158 - DNA, 265 bp, Zea mays
cccacgcgtccggcttcgaggtccacgccgacaggaacgagaaggtgttcctggccggggcgcgcaacgtgctgcagaagctcgaccgggtcgccaaggcgctgtcattcgccttcaaggcggaggatgtggacgaggtgctcggctcgcggcgcgagaaggggttccttgctggccccaaggagagcggcggccacgaggagcgtgagcaagaggaggaggaggaacgcgaaaaacgccacagcgtggcgtgtgagagggaacg

SEQ ID NO: 91159 - DNA, 274 bp, Zea mays
cagatcagcaaagcggcagtgcgtagagaggatcgtcgaacagaacagcatgaagatggtcatcgttctcgtcgtgtgcctggctctgtcagctgccagcgcctctgcaatgcagatgccctgcccctgcgcggggctgcagggcttgtacggcgctggcgccggcctgacgacgatgatgggcgccggcgggctgtacccctacgcggagtacctgaggcagccgcagtgcagcccgctggcggcggcgccctactacgccgggtgtgggcag

SEQ ID NO: 91160 - DNA, 372 bp, Zea mays
ctgtttgtgagcgcaacaaatgcgttcattattccacaatgctcacttgctcctagtgcgagtattccacagttcctcccaccagttacttcaatgggcttcgaacacctagctgtgcaagccaacatgcaacaacaagcgcttgcggcgagcgtcttacaacaaccaattgcccaattgcaacaacaatccttgccacatctaacaatacaagccatcacaacgcaacagcaacaacgagttcctaccagcacttaaccccctagccatggtgaacccttgccggctacttgcaagaaccagctgcttggattcaacccacttgctctggcgaaccgtagtgcaaaacagcaacaacaaccgctaccacag

SEQ ID NO: 91161 - DNA, 422 bp, Zea mays
ccttgctctttctgcatgtgttgctaacgcgacaattttccctcaatgctcacaagctgctatagcttcccttcttcccccataccttccatcaatgatagcttcagtatgtgaaaacccagctcttcaaccctataggctccaacaagcaatcgcagcaagcaacatacctttatcacccttgtttcaacaatcgccagccctatctttggtgcagtcattggtacaaaccatcaaggcacagcagctgcagcaactcgtgctacctgtgatcaaccaagtagctctggcaaacctttctccctactatccacaacaacaatttctttcattcaaccaactatctacactggaccctgctgcttaattgcagcaacaactattaccattcagccaggtagcttctgcctactctcatcaac

SEQ ID NO: 91162 - DNA, 328 bp, Zea mays
gcggcggctgtggctgccagacaccaccgtttcatctaccgcctccgttctatatggcgcctccgttctatctgccgccgcagcagcagccgcagccatggcaataccccactcaaccaccgcagctaagcccgtgccagcagttcggatcctgcgacgtcggcagcgtcggcagcccgttcctgggccagtgcgtcgagttcctgaagcaccagtgcagcccggcggcgacgcccgtacggctcgccacagtgccaggcgctgcagcagcagtgctgccaccggatcaggcaggtggagccgctgcaccggtaccaagcgaaatacg

SEQ ID NO: 91163 - DNA, 479 bp, Zea mays
accggttcggaattcccgggccaagcgaagcgcactagcaacaacctaacaacaatggctaccaagatattatccctccttgcgcttcttgcgctttttgcgagcgcaacaaatgcgtccattattccacaatgctcacttgctcctagttccattattccacagttcctcccaccagttacttcaatggccttcgaacacccagctgtgcaagcctataggctacaacaagcgattgcggcgagcgtcttacaacaaccaattgcccaatggcaacaacaatccttggcacatctaacaatacaaaccatcgcaacgcaacagcaacaacagttcctaccagcactgagccaactagccatggtgaaccctgtcgcctacttgcaacagcagctgcttgcatccaacccacttgctctagcaaacgtagttgcaaaccagcaacaacaacaactgcaacagtttctgccagcgcttaa

SEQ ID NO: 91164 - DNA, 416 bp, Zea mays
  unsure (1)..(416): unsure at all n locations
ggcaaacctttctccctactctcagcaacaacaatttcttccattcggccaactgtgtacactgaaccctgctgcttatttgcagcaacaactattaccattcagccagctagctactgcctactctcagcaacaacaacttcttccatttaaccaattggccgcactgaaccccgctgcttatttgcagcagcaaatactactaccatttagccagctagctgcagcaaaccgtgcttccttcttgacactgcaacaattgctgccattcaaccaacttgctttgacaaacccagcagcattctaccaacaacccatcattggtgtgccctcttttagatntcttatgagttaatagtcaataataaagtttttggctgatgttcgggctttccagaattaagaagtacatttct

SEQ ID NO: 91165 - DNA, 439 bp, Zea mays
gcgaaccgagaaaccaacacaacaagcaaagcagcgatccgacatgcgagagatggacgcggtgatgttcgggctggagactcccctgatggccgcgctgcagcacctgctggacgtgcccgacggcgacgccggcgcgggcggcgacaacaagacgggcagcggcggcagcgccacgcgcacctacgtccgcgacgcgcgcgccatggcggccaccccggccgacgtgaaggagctgcccggcgcgtacgcgttcgtggtggacatgccggggctgggcacgggcgacatccgggtgcaggtggaggacgagcgggtgctggtggtcagcggcgagcggcgccgggaggagcgcgaggacgacgccaagtacctgcgcatggaacggcggttgggcaagttcatgcgcaagttcgtgctgccggacaacgccgacgtc

SEQ ID NO: 91166 - DNA, 443 bp, Zea mays
  unsure (1)..(443): unsure at all n locations
ggcatatgtgaagactcctcgtggccttcgcacactcaactctgtttgggcccaacatgttagcgaagaagtgaggagaaggttctacaagaactggtgcaagagcaagaagaaggctttcacaaagtatgctctcaaatatgaaaatgatgctggcaagaaggaaattcagctgcagcttgagaagatgaagaaatatgcttctgttatccgtgtcattgctcatacccagattaggaagatgaagggtttgaagcagaagaaggctcacctgatggagattcangtcaatggtggtaccattgctgacaaggtggactatggctacaaattctttgaaaaagaggtcctgttgatgctgtcttccagaaagatgagatgattgacatcattggtgtgaccaaggggaaaggttatgagggtgtggtcactcgttggggtgt

SEQ ID NO: 91167 - DNA, 442 bp, Zea mays
  unsure (1)..(442): unsure at all n locations
attgagaccaactagcaacatagaaagcacaatagtgtaccaacaatggcagctaaaatattttgcctccttatgctccttggtctttctgcaagtgctgctacggcgaccattttcccacaatgctcacaagctcctatagcttcccttcttcccccgtacctctcaccaacggtgtcttcggtatgtgaaaacccaattcttcaaccctacaggatccaacaggcaatcgcagctggcatcttacctttatcacccttgttcctccaacaatcatcagccctattacagcagttacctttggtgcatttattggcacanaacatcagggcacaacaactacaacaacttgtgctagcaaaccttggtggctactctcagcaacagcaggttcttccattcaaccaactagctgcattgaactctgcttcttatttgcaac

SEQ ID NO: 91168 - DNA, 438 bp, Zea mays
  unsure (1)..(438): unsure at all n locations
gccgcgggatttcaatacccaactatacaatcctacatggtacaagaggccatccgagcaagcatcttacggtcattagcattaaccctccaacaaccatatgctctattgcaacagccatccttagtgcatctgtatctccaaagaatcgcggcacaacaactacaacaacagttgctaccaacaatcaatcaagtagttgcagcgaaccttgctgcttacctncagcaacaacagtttcttccattcaatcaactagctggggtgaaccctgctatctacttgcaagcacaacagctactaccatttaaccaacttgtcgggagcccttatgccttcttactgcaacaacagcttctgccattccatctgcaagctgtggcaaacattgntgctttcttgagacaacaacatttgttgccattttacccacaagtt

SEQ ID NO: 91169 - DNA, 540 bp, Zea mays
  unsure (1)..(540): unsure at all n locations
agaggnctcnntgttaatgttagagctctaaggaggatatagcatactcgtaccggtccggaattcccgggtcgacccacgcgtccgcccacgcgtacgcgacaacagttacttaatccactagcggaggctagcccattgggcgttgccttcctacagcagcaacaattgctgccatacaaccagatctctttgatgaaccctgccttgttgtggcagcaacccatcggtggaggtgccatcttttagattacatatgagatgtactcgataatggtgccctcatagcggcatgtgtctcctagaaataatcaatatatagactgagatttatctcggatgaacaataaggtgaggctacgggcggccgatctagaggatccaagcttacgtacgcgtgcatgcgacggaatagatctgctatagtgtcacctaaattaaattcactggccgtcgatttacaacgtcgtgactgggaaaaccgtggcgttacccagcttaatcgtcttgcagcacatacccctttcgccagatggcgta

SEQ ID NO: 91170 - DNA, 307 bp, Zea mays
attgagaccaactagcaacatagaaagcacaatagtgtaccaacaatggcagccagaatattttgcctccttatgctccttggtctttctgcaagtgctgctacggcgaccattttcccacaatgctcacaagctcctatagcttcccttcttcccccgtacctctcaccagcggtgtcttcggtatgtgaaaacccaattcttcaaccctataggatccaacaggcaatcgcagctggcatcttacctttatcacccttgttcctccaacaatcatcagccctattacagcagttacctttggtgc

SEQ ID NO: 91171 - DNA, 343 bp, Zea mays
gtcgaactctgctgcgtacctacaacagcgacaacagttacttaatccattggtaggggctaacccattggtcgccgccttcctacagcagcaacaattgctgccatacaaccagttctctttgatgaatcctgtcttgtcgaggcagcaacccatcgttggaggtgccatcttttagattacatatgagatgtactcgataatggtgccctcataccgacgtgtgtttcctagaaataatcaatatattgattgagatttatctcgatataaaaaaattttaaaaaaaaaaaataaaatctgaagaaaaaatagaaactaaacaatcagtcacaacaacgac

SEQ ID NO: 91172 - DNA, 361 bp, Zea mays
catcagcaacaacaagaagttcatgttcaacaacaacaacaacaaccgcagcaccggcaccaacaacaacaacaacagcaccaacaacaacatcaatgtgaaggccaacaacaacatcaccaacaatcacaaggccatgtgcaacaacacgaacagagccatgagcaacaccaaggacagagccatgagcaacaacatcaacaacaattccagggtcatgacaagcagcaacaaccacaacagcctcagcaatatcagcagggccaggaaaaatcacaacagcaacaatgtcattgccaggagcagcaacagactacaaggtgcagctataactactatagcagtagctcaaatctaaaaa

SEQ ID NO: 91173 - DNA, 392 bp, Zea mays
caagtagcaacatagaaagcacaatagtgtaccaacaatggcagccaaaatattttgccgccttatgctccttggtctttctgcaagtgctgctacggcgaccattttcccgcaatgctcgcaagctcctatagcttcccttcttcccccgtacctctcaccagcggtgtcttcggtatgtgaaaacccaattcttcaaccctacaggatccaacaggcaatcacagctggcatcttacctttatcacccttgttcctacaacagtcatcagccctattacatcagttacctttggtgcatttattggcacaaaacatcagggcacaacaactacaacaacttgtgctagcaaaccttgctggctactctcagcaacaagcagttcttccat

SEQ ID NO: 91174 - DNA, 428 bp, Zea mays
gtaagatgcctgttgcgattatcacccttgttcctccaacaaccgtcagccctattagagcagttacctttggtccatttggtggcacaaaacatcagggcacaacaactacaacaacttgtgctagcaaaccttgctgcatactctcagcaacatcagtttcttccattcaaccaactggctgcattgaactctgctgcttatttgcaacaacaattaccattcagccagctagttgctgcctacccccagcaatttcttccattcaaccaactagcagcattgaactctgctgcttatttacagcagcaacaactactaccattcagccagctagctgatgtgagccctgctgccttcttgacacaacaacaattgttgccgttctacctgcacgctatgcctaacgctggcaccctcttacaact

SEQ ID NO: 91175 - DNA, 443 bp, Zea mays
  unsure (1)..(443): unsure at all n locations
caacaacctaacaacaatggctaccaagatattatccctccttgcgcttcttgcgcttggggcgagcgcaacaaatgcgttcattattccacaatgctcacttgctccaagttccattattacacagttcctcccaccagttacttcaatgggcttcgaacacccagctgtgcaagcctataggctacaacaagcaattgcggcgagcgtcttacaacaaccaatttcccagttgcaacaacaatccttggcacatctaacaatacaaaccatcgcaacgcagcagcaacaacaatgtctaccagcactgagccacctaaccatggtgaaccctgccgnctacttgcaacagcagttgcttgcatcaaacccacttgctctggcaaacgtagttgcaaaccagccacaacaacagctgcaacagtttctgccagcgctcagtc

SEQ ID NO: 91176 - DNA, 367 bp, Zea mays
aattcccgggattttcagcattcaaaaacacaccaagcgaagcgcactagcaacgacctaacaccaatggctaccaagatattagccgtccttgcgcttcttgcccttttagtgagcgcaacaaatgcgttcattattccacagtgctcacttgctcctagtgccagtattccacagttcctcccaccaattacttcaatgggcttcgaacatccagccgtgcaagcctacaggctacaactagcgcttgcagcgagcgccttacaacaaacaattgcccaattgcaacaacaatccttggcacatctaaccctacaaaccattgcaacgcaacaacaacaacaacagtttctgccatcactgaacc

SEQ ID NO: 91177 - DNA, 421 bp, Zea mays
ggaattcccgggctcctggctctcgctgcgagcgccacctccacgcatacaagcggtagctgcggctgccagccaccgccgccggggcatctaccgccgccggtgcatctgccacctccggttcacctgccacctccggtgcatctcccaccgccagagcacctgtcgtcgccgatccacctgccaccggcgatccatgtgccgtcgacggctcatctgccagcaggcaccatgccactaccgctactcaaccagcccggcctcagagatcatccgcagtcacacccatgcccaggccaacagttcatttactataccgtgccaactgcatggaacctgcgaagttggcggcaccccgatcctgggccaatgcgtctagtctgtgaggcatcacggcagcccgacggcgacgccctactga

SEQ ID NO: 91178 - DNA, 392 bp, Zea mays
agaaagcacaatagtgtaccaacaatggcagccaaaatattttgcctccttatgctccttggtctttctgcaagtgctgctacggcgaccattttcccgcaatgctcgcaagctcctatagcttcccttcttcccccgtacctctcaccagcggtgtcttcggtatgtgaaaacccaattcttcaaccctacaggatccaacaggcaatcacagctggcatcttacctttatcacccttgttcctccaacaatcatcagccctattacatcagttacctttggtgcatttattggcacaaaacatcagggcacaacaactacaacaacttgtgctagcaaaccttgctgcctactctcagcaacaacaggttctttcattcaacccactaac

SEQ ID NO: 91179 - DNA, 443 bp, Zea mays
agcaacatagaaagcacaatagtgtaccaacaatggcagccaaaatattttgcctccttatgctccttggtctttctgcaagtgctgctacggcgaccattttcccgcaatgctcgcaagctcctatagcttcccttcttcccccgtacctctcaccagcggtgtcttcggtatgtgaaaacccaattcttcaaccctacaggatccaacaggcaatcacagctggcatcttacctttatcacccttgttcctccaacaatcatcagccctattacatcagttacctttggtgcatttattggcacaaaacatcagggcacaacaactacaacaacttgtgctagcaaaccttgctgcctactctcagcaacagcagtttcttccattcaaccaactagctgcattgaactctgcttcttatttgcaacaacaacaactacca

SEQ ID NO: 91180 - DNA, 447 bp, Zea mays
gggcgctagggtttaaccccccaactgttcggtctctctctctccccgaatccaattgagcgtcatctagtccgggagccggcgacatggggtacctccaggaggcccgggagaatcacgtcaagaagaaggtcgaggaagctttgcggagcaaaatgaaacaaaaggctcttcaggaatgcgatttctattgttcaaaatatgctgagtgtgcacggggaagaacattttctgtggtatggcaatgccgcaaacaagcaaaagagttgaatgagtgccttcatcaatacacaaatgatgcaatcctggaagaaatgaagaaggcttatatgattgagcaaaagagcaaggagaataatcaataagcaaaaatccattgcacaatgtgcatcacgatcaccctggttgtatggatactgttggctttgatagaaactattcatgggt

SEQ ID NO: 91181 - DNA, 397 bp, Zea mays
gggcgtcagcctagcaattagctcattgactccagattgcagaactggacaccatcgaggtgctgatcgttgcccttgctctcctggcgctcgctgcgagcgccgcctccagtacaagcggcggctgcggctgccagacaccaccgtttcatctaccgactccgttctatatgccgcctccgttctatctgccgccgcagcatcagccgtatccatggcaataccccactcaaccaccgcagctaagcccgtgccagcagttcggatcctgcggcgtcggcagcgtcggcagcccgttcctgggccagtgcgtcgagttcctgaggcaccagtgcatcccggcggctacgccctacggctcgccacagtgccaggcgctgcagtagcaatgctgcca

SEQ ID NO: 91182 - DNA, 338 bp, Zea mays
ggctgtcataagtgccggtatcatcgctcctttgttgcaactgcttcaaacagcagagtttgatatcaagaaggaggctgcttgggccatctcaaatgctacctctggtggttctcatgagcaaatcaagtacttggtgtctgagggctgcatcaagccattgtgtgaccttcttgtctgccctgatccgagaattgtaacagtttgtctggagggtcttgagaatattcttaaagtagggcagcatgacaagaccatgggtgcaacaggtgacactaacgtcttagctcagatgatcgatgaagcggaaggcctggaaaagatcgagaacctacaga

SEQ ID NO: 91183 - DNA, 442 bp, Zea mays
gatcagcaaagcggcagtgcgtagagaggatcgtcgaacagaacagcatgaagatgggcatcgttctcgtcgtgtgcctggctctgtcagctgccagcgcctctgcaatgcagatgccctgcccctgcgcggcgctgcagggcttgtacggcgctggcgccggcctgacgacgatgatgggcgccggcgggctgtacccctacgcggagtacctgaggcagccgcagtgcagcccgctggcggcggcgccctactacgccgggtgtgggcagacgagcgccatgtaccagccgctcacgcaacagtgctgccagcagcagatgaagatgatggacgtgcagtccgtcgcgcagcagctgcagatgatgatgcagctcgagcgtgccgctgccgccagcagcagcctgtacgagccagctctgatgcagcagcagcagcagct

SEQ ID NO: 91184 - DNA, 357 bp, Zea mays
  unsure (1)..(357): unsure at all n locations
tagaaagcacaatagtgtaccaacaatggcagccaaaatatttcgcctccttatgctccttggtctttctgcaagtgctgctacggcgaccattttcccgcaatgctcgcaagctcctatagcttcccttcttcccccgtacctctcaccagcggtgtcttcggtatgtgaaaacccaattcttcaaccctacaggatccaacaggcaatcacagctggcatcttacctttatcacccttgttcctccaacaatcatcagccctattacatcagctacctttggtgcatttattggcacanaacatcagggcacaacaactacaacaacttgtgctagcaaaccttgctgcctactc

SEQ ID NO: 91185 - DNA, 445 bp, Zea mays
gcgctccgccgccatccgccggcgagatggcgttgtacctgctgttcgagtcggcctggggctacggcctattccatgcgtacggtatcgatgagatcgggcagagcgatgaggccgtgcgctcctacgtgctggacctcgaccgcttaggcaaggccgtcaagctcactggcttcaatcctttctgctctgccgtcgacgcgctcaaccagtgcaacgctatctctgaaggaatcatgaccgatgagttgaggagcttgctggagctgaacctgccgaagcctaatgaggggaagaaggccaaatacagcctcggcgttgtcgagcccaaggtcggctcccacatctccgaagtcaccggcatcccctgtcagagcaacgagttcgtacaggaactggttcgcggtgtacggcttcactttgaccgtttcatcaacgagcttaa

SEQ ID NO: 91186 - DNA, 380 bp, Zea mays
gtcagctagctgctgcctacccccagcaatttcttccattcaaccaactggcagcgggggactctgctgcttatttacaacagcaacagataccaccattcagccagctatcttgtgtgagccctgttgccttcttgacacaacgacagttgttgccagtctacctgcacgctgcgcctaacgctggcaccctagtacaactgcagcaatagctgacattcaaccaacttgctttgaaagacccaactactagtctaccaacaacccatcattggaggtgacctatattagattgcttatgagttgtacttcaataatgaactttttcggatgatgtttgtggctgcccagaaataagaatgttcatttctagattctta

SEQ ID NO: 91187 - DNA, 418 bp, Zea mays
cagcattcaaaaacacaccaagcgaatcgcactagcaacgacctaacaccaatggctgcgaagatattagccctccttgcgcttcttgcccttttagtgagcgcaacaaatgcgttcattattccacagtgctcacttgctcctagtgccattattccacaagtcctaccaccagttacttcaatgggcttcgaacatccagtcgtgcaagcctacaggctacaactagcgcttgcggcgaaaagccttacaacaaccaattgcccaattgcaacaacaatccttggcacatctaaccctacaaaccattgcaacgcaacaacaacaacaacaacagtttctgccatcactgagccacctagccgtggtgaaccctgtcacctacttgcaacagcagctgcttgcattcaacccactt

SEQ ID NO: 91188 - DNA, 442 bp, Zea mays
cagcattcaaaaacacaccaagcgaagcgcactagcaacgacctaacaccaatggctacgaagatattagccctccttgcgcttcttgcccttttagtgagcgcaacaaatgcgttcattattccacagtgctcacttgctcctagtgccattattccacagttcctcccaccagttacttcaatgggcttcgaacatccagccgtgcaagcctacaggctacaactagcgcttgcggcgagcgccttacaacaaccaattgcccaattgcaacaacaatccttggcacatctaaccctacaaaccattgcaacgcaacaacaacaacaacaacagtttctgccatcactgagccacctagccggggtgaaccctgtcacctacttgcaacagcagctgcttgcatccaacccacttgctctggcgaacgtagctgcatacc

SEQ ID NO: 91189 - DNA, 383 bp, Zea mays
gagcatacagaaacacaccaagcgaagcgcactagcaacgacctaacaacaagggctaccaagatattagccctccttgcgcttcttgccctttttgtgagcgcaacaaatgcgttcatgattccacaatgctcacttgctcctagtgccattattccacagtgcctgcgaccaggtacttcaatgggcttcgaacacctagctgtgcaagccaacatgcaacaacaagcgcttgcggcgagcagacttacaacaaccaattgcccaattgcaacaacaatgcttggcgcaactaacaatacaagccatgagcacgcaacagcaacaacagttcctaccagcactggaccaactagccatggtgaaccctggcgactacttgc

SEQ ID NO: 91190 - DNA, 387 bp, Zea mays
caacaacccatcattggtggtgccctcttttagatttcttatgaggtatagttcagtgaataaagttttatgtctgaaaaaaaaaaaaaaaaaaaataaaaaataaaaaataaaatacaaaaaaataaataaatactaaaaaaaataaaaaaacatcaaaatcaagaagtgatggccatgaatatacaacgatgcaatcatagatcaactcttacagacatgcccatcgctaacattgaaatactaccgactgtctcgttctggacccaatactaacacgctgatcctgatcgcatcttccttcatattgtcagccagactgcaacatgggacttacactgatatgccttatcaatagcccaaattgacaaaagttagtgctatgta

SEQ ID NO: 91191 - DNA, 349 bp, Zea mays
  unsure (1)..(349): unsure at all n locations
ccaactagcaacatagaaagcacaatagtgtaccaacagtggcagctaagatattttgcctccttatgctccttggtctttctgcaagtgctgctacggcgaccattttcccacaatgctcacaagctcctatagctttccttcttcccccgtacctctcaccaacggtgtcttcggtatgtgaaaacccaattcttcaaccctacaggatccaacaggcaatcgcagctggcatcttacctttatcacccttgttccttcaacaatcatcagccctattacagcagttacctttggtgcatttattggcacanaacatcanggcacaacaactacaacaacttgtgct

SEQ ID NO: 91192 - DNA, 461 bp, Zea mays
accggctcggaattcccgggcaacaagcaacatagaaagtggaatccagtagcaacaacagagcatcaatggcgaccaagatattctccctccttatgctccttgctctttctgcatgtgttgctaacgcgacaattttccctcaatgctcacaagctcctatagcttcccttcttcccccataccttccatcaatgatagcttcagtatgtgaaaacccagctcttcagccctataggctccaacaagcaatcgcagcaagcaacatacctttatcacccttgttgtttcaacaatcgccagccctatctttggtgcagtcattggtacaaaccatcagggcacagcagctgcagcaactcgtgctacctgtgatcaaccaagtagctctggcaaacctttctccctactctcagcaacaacaatttcttccattcaaccaactgtctacactgaaccct

SEQ ID NO: 91193 - DNA, 439 bp, Zea mays
gcaacatagacagcacaatagtgtaccaacaatggcagtcaaaatattttgcctccttatgctccttggtatttctgcaagtgctgctacggcgaccattttcccgcaatgctcacaagctcctatagcttcccttcttcccccgtacctctcaccagcggtgtcttcggtatgtgaaaacccaattcttcaaccctacaggatccaacaggcaatcgcagctggcatcttacctttatcacccttgttcctccaacaatcatcagccctattacagcagttacctttggtgcatttattggcacaaaacatcaaggcacaacaactacaacaacttgtgctagcaaaccttgctgcctactctcagcaacagcagtttcttccattcaaccaactagctgcattgaactctgcttcttatttgcaacaacaacaacta

SEQ ID NO: 91194 - DNA, 430 bp, Zea mays
catcagtgcagcccgacggcgacgccctactgctcgcctcagtgccagtcgttgcggcagcagtgttgccagcagctcaggcaggtggagccgcagcaccggtaccaggcgatcttcggcttggtcctccagtccatcctgcagcagcagccgcaaagcggccaggtcgcggggctgttggcggcgcagatagcgcagcaactgacggcgatgtgcggcctgcagcagccgactccatgcccctacgctgctgccggcggtgtcccccactgaagaaactatgtgctgtagtatagccgctggctagctagctagttgagtcatttagcggcgatgattgagtaataatgtgtcacgcatcaccatgggtggcagtgtcagtgtgagcaatgacctgaatgaacaattgaaatgaaaagaaaaaagtatt

SEQ ID NO: 91195 - DNA, 422 bp, Zea mays
tacttattttttttttttgaacgaacggggaccatttatgccaatatataaagatgcaaaattaagagtcacaagtaactttgaaagaaaatacaacattaaccaagggactacaaaggtggcttagatgaggtctccgaatgacacttaggtccttttcagcgtttgccacacggcgacacccaacttggggcctttgaaacccttctgaacagcacccttcatgtgcgccttgtgggacttggacacctcaaccttcttagacttcttctcatccttggtcttcttgatgcgctccttgatctcacgaagagcaacttgtttagcagcatcttggacttcaggcttttcagctctgcttttctggatcacttccaaggaagcacccacattggaccttgagtatggcttcttggtggcgc

SEQ ID NO: 91196 - DNA, 425 bp, Zea mays
attgagaccaacaagcaacatagaaagtggaatccagtagcaacaacagagcaacaatggcgaccaagatattttccctccttatgctccttgctctttctgcatgtgttgctaacgcgacaattttccctcaatgctcacaagctcctatagcttcccttcttcccccataccttccatcaatgatagcttcagtatgtgaaaacccagctcttcagccctataggctccaacaagcaatcgcagcaagcaacatacctttatcacccttgttgtttcaacaatcgccagccctatctttggtgcagtcattggtacaaaccatcagggcacagcagctgcagcaactcgtgctacctgtgatcaaccaagtagctctggcaaacctttctccctactctcagcaacaacaatttcttccattc

SEQ ID NO: 91197 - DNA, 427 bp, Zea mays
gcatatcatcatactggtcaaaccaagggcggccaggcacatttttcaaggtttggccctggacctttttaagggaataattggaaccaacctggaatttggcgtgatagagccatcgatgagcagagtctagatcattcactttgccacggaggctgccattactatcctgaggattgacgacatgatcaagcttaccaaggaagaagagggtaacgaagagtaagcagcccaccagtagtgggctagtggactcccatgggatggttgccatagcatgtagcacttgctgtttcacttatcgtgcacttatgcttgctgtgagcattcgttcgtaggaaaagtgaaaacggatgtgtatcaatccgtgctgggtgactatgactcacggatgaatcaaataattgcgtatattggggccaaaaca

SEQ ID NO: 91198 - DNA, 368 bp, Zea mays
tcccgggcaccaacgcacattgcaccgagaaatccatcgagaggccgtcgacaggggaattaatggcgtcgtcgtctagcaggagaccgcgacgtctcatcctcgcaggcggcgtgctgctctgcgtgctcgcggctgccagcgccagcgccgggacctcctgcgtgccggagtgggccatcccgcacaacccgctcccgagctgccgctggtacgtgaccagccggacctgcggcatcaggccgagccgtccgtggccggagctgaagaggagatgctgccgggagctggcggacatcccggcgtactgccggtgcacggtgctgagcatcctcatggacggcgcgatcccgccgggcccggacgcg

SEQ ID NO: 91199 - DNA, 432 bp, Zea mays
agaccaactagcaacatagaaagcacaatagtgtaccaacaatggcagccaaaatattttgcctcgttatgctccttggtctttctgcaagtgctgctacggcgaccattttcccgcaatgctcgcaagctcctatagcttcccttcttcccccgtacctctcaccagcggtgtcttcggtatgtgaaaacccaattcttcaaccctacaggatccaacaggcaatcgcagctggcatcttacctttatcacccttgttcctccaacaatcatcagccctattacaacagttacccttggtgcatttattggcacaaaacatcagggcacaacaactacaacaacttgtgctagcaaaccttgctgcctactctcagcaacagcagtttcttccattcaaccaactaggttcattgaactctgcttcttatt

SEQ ID NO: 91200 - DNA, 345 bp, Zea mays
acaactgcaacaattgctgccattcaaccaacttgctttgacaaaccgaacagtgttctaccaacaacccatcattggtggtgccctcttttagattgcttatgagttatagttcaataatgaagttttttggatgaaaaaaaaattaaaaaaaaaaaaaaaaaaaaaaacaaaaaaaattaaaaatatttaaaaattattaataaataaaacattaaaataaccccccttaaacttcttaataaaaagcctacttttcataattttccaatttttctttaattccacttccccttaaaactttccaaaaaaatatacccaaaaaaaaaaaaggggggccctttt

SEQ ID NO: 91201 - DNA, 364 bp, Zea mays
ggacggcggaggagatggcggaggcggcgaggcaggccgtcgcggcgctggagacgctggagcaggcgttcagggagtgctccaaggggaaggccttcttcggaggggacagggggctcgtcgactcggctcggggcttgtgggtggctgtacgccaccgagccatctgcggtgaagccctgaccgcggagccgtgtgcgggcgacggttgcgctgagggcaggctgtccgacggacagtttgagataccaagcagcgccgattggctgcgccgtccgccttagcatagtggacatggttcttttctttttttttaaaaaaaaattatatgttctatgtttgtttgaaataaagtactgttatg

SEQ ID NO: 91202 - DNA, 441 bp, Zea mays
  unsure (1)..(441): unsure at all n locations
ggagacttcggccttagcaagatcatcaaagctcagcatgcgaatgatgtatacaagatgactggagagacaggaagctatcggtacatggcccctgaagttttcaagcaccggaaatatgacaagaaagttgatatcttctcttttgccatgattctatatgagatgctggaaggtgattcacccttctccaactacgaaccttatgaggctgctaagtacgtggcagatgggcatcgtccggttttccgtaaaaatcataccactgagttgaaagatttggttgagctatgttggtctggggatatcagtctgagaccatctttcttggagatcctcaagaggcttgagaagctcaaggagcattattcacacgagaaccactggcatttgttccagtagcagtgcgcatataatcatacagtatatnnttttactatg

SEQ ID NO: 91203 - DNA, 312 bp, Zea mays
caatagtgtaccaactatggcagccaaaatattttgcctacttatgctcctgggtctttctgcaagtgctgctacggcgaccatattgccacaatgctcacaagctcctatagcttaccttcttccatcgtacctgtcaccagctgtgtctaacgtatgtgaaaacccaatgcttcatctatataggatccaactggtattcgcagtttgcatcttacctttatcactctagttcctacagcaatcatcagctatattacagcacttacctatggtgcatagattgacccaaaacattaggtctcatcaact

SEQ ID NO: 91204 - DNA, 435 bp, Zea mays
ggaaagccgctcacctgaaagaactggaagaccaggtagcacagctaaaagccgagaatgcttgcctgctgaggcgcattgccgctctgaaccagaagtacaacgacgctaacgtcgacaacagggtgctgagagcggacatggagaccctaagagctaaggtgaagatgggagaggactctctgaagcgggtgatagagatgagctcatcagtgccgtcgtccatgcccatctcggcgccgacccccagctccgacgctccagtgccgccgccgcctatccgagacagcatcgtcggctacttctccgccacagccgcagacgacgatgcttcggtcggcaacggtttcttgcgactgcaagctcatcaagagcctgcatccatggtcgtcggtggaactctgagcgccacagagatgaaccgagtagcagcag

SEQ ID NO: 91205 - DNA, 438 bp, Zea mays
cagaaacacaccaagcgaagcacattagcaacaacctaacaacaatggctaccaagatgttatccctccttgcgcttcttgcgctttttgcgagcgcaacaaatgcgttcattattccacaatgctcacttgctccaagttccattattacacagttcctgccaccagttacttcaatgggcttcgaacacccagctgtgcaagcctataggctacaacaagcaattgcggcgagcgtcttacaacaaccaatttaccagttgcaacaacaatccttggcacatctaacaatacaaaccatcgcaacgcaacagcaacaacaattcctaccagcactgagccacctagccatggtgaaccctgccgcctacttgcaacagcagttgcttgcatcatacccacttgctctggcacacgtagttgcaaaccagccacaac

SEQ ID NO: 91206 - DNA, 435 bp, Zea mays
ggctaccaagatattagccctccttgcgcttcttgcccttttagtgagcgcaacaaatgcgttcattattccacagtgctcacttgctcctagtgccattattccacagttcctcccaccagttacttcaatgggcttcgaacatccagccgtgcaagcctacaggctacaactagcgcttgcggcgagcgccttacaacaaccaattgcccaattgcaacaacaatccttggcacatctaaccctacaaaccattgcaacgcaacaacaacaacaacaacagtttctgccatcactgagccacctagccgtggtgaaccctgtcacctacttgcaacagcagctgcttgcatccaacccacttgctctggcgaacgtagctgcataccagcaacaacaacagctgcaacagtttatgccagtgctcagtcaact

SEQ ID NO: 91207 - DNA, 450 bp, Zea mays
cgggacctacttggatgtaccccgttccaggtggccaatgcacctacgtccctacaccaacagatgctgcaccaaattggcccaggtctgactcaactagctgcggcaaaccctgctgactacttacaacagttgcttacattcaaccaactggctgtgtcaaactctgctgcgtacctacaacagcgacaacagttacttaatccatagccagtggctaacccattggtcgctaccttactgcagcagcaacaacaattgctgccatacaaccagttctctttgatgaaccctgccttgcagcaacccatcgttggaggcgccatctttcagattacatatgagatgtactcgacaatggtgccctcataccgacatgtgattgctagaaataatcaatatattgactgagatctatctcgatatattcctgaactatgatcatcatat

SEQ ID NO: 91208 - DNA, 425 bp, Zea mays
  unsure (1)..(425): unsure at all n locations
tgcatttattggcacanaacatcagggcacaacaactacaacaacttgtgctagcaaacgttgctgcctactctcagcaacagcagtttcttccattcaaccaactagctgcattgaactctgcttcttatttgcaacaacaacaactaccattcagccagctatctgctgcctacccccagcaatttcttccattcaaccaactgacagcattgaactctcctgcttatttacagcagcaacaactactaccattcagccagctagctggtgtgagccctgctaccttcttgacacaaccacagttgttgccgttctaccagcacgctgcgcctaacgctggcaccctcttacaactgcaacaattgctgccattcaaccaacttgctttgacaaacccagcagcattctaccaacaacccatc

SEQ ID NO: 91209 - DNA, 432 bp, Zea mays
attgagaccaactagcaacatagaaagcacaatagtgtaccaacaatggcagccaaaatgattttgcctccttatgctccttggtctttctgcaagtgctgctacggcgaccattttcccgcaatgctcgcaagctcctatagcttcccttcttcccccgtacctctcaccagcggtgtcttcggtatgtgaaaacccaattcttcaaccctacaggatccaacaggcaatcacagctggcatcttacctttatcacccttgttcctccaacaatcatcagccctattacatcagttacctttggtgcatttattggcacaaaacatcagggcacaacaactacaacaacttgtgctagcaaaccttgctgcctactctcagcaacagcagtttcttccattcaaccaactagctgcattgaactctgcttc

SEQ ID NO: 91210 - DNA, 430 bp, Zea mays
attggcacaaaacatcagggcacaacaactacaacaacttgtgctagcaaaccttgctgcctactctcagcaacagcagtttcttccattcaaccaactagctgcattgaactctgcttcttatttgcaacaacaacaactaccattcagccagctacctgctgcctacccccagcaatttcttccattcaaccaactggcagcattgaactctcctgcttatttacagcagcaacaactactaccattcagccagctagctggtgtgagccctgctaccttcttgatacaaccacagttgttgccgttctaccagcacgctgcgcctaacgctggcaccctcttacaactgcaacatttgctgccattcaaccaacttgctttgacaaacccagcagcgttctaccaacaacccatcattggtggtgcc

SEQ ID NO: 91211 - DNA, 424 bp, Zea mays
  unsure (1)..(424): unsure at all n locations
acagtaactagctagcagatcaaacaagtagcgacagctcgacaaagatttgtgagagtgatccggcgctgagaagagatggctaagatcgccgcagccgccgcggcggcggcggcgctgtgcttcgcggccctggtggccgtggccgtctgccaaggcgaggtcgagcggcagaggctcagggacctgcagtgctggcaggaggtccaggagagcccgctcgacgcgtgccgtcaggtcctcgaccggcagctaaccggcggcggcgtcggcggcccgttccggtggggcaccgggctccggatgcggtgctgccagcagctccaggacgtgagccgcgagtgccgctgcgccgacatccggagcatggtcaggggctacgaggaggccatgccgnctctggagaaaggctggtggccatggg

SEQ ID NO: 91212 - DNA, 430 bp, Zea mays
agaccattagctttatctactccagagcgcagaagaacccgatcgacaccatgagggtgttgctcgttgccctcgctctcctggctctcgctgcgagcgccacctccacgcatacaagcggcggctgcggctgccagccaccgccgccggttcatctaccgccgccggtgcatctgccacctccggttcacctgccacctccggtgcatctcccaccgccggtccacctgccgccgccggtccacctgccaccgccggtccatgtgccgccgccggttcatctgccgccgccaccatgccactaccctactcaaccgccccggcctcagcctcatccccagccacacccatgcccgtgccaacagccgcatccaagcccgtgccagctgcagggaacctgcggcgttggcagcaccccgatcctgggcca

SEQ ID NO: 91213 - DNA, 448 bp, Zea mays
  unsure (1)..(448): unsure at all n locations
caactagcnaacttagaaagcaccattagtggtcccaccaatggcaggcaaaaatatttggcgtgccttaggctcccttggtctttctgcaagtgttgctaccgcaaccattttcccacaatgctcacaagctcctatagcttcccttcttcccccatacctctcaccagcggtgtcttcaatgtgtgaaaacccaattgttcaaccctacaggatccaacaggcaatcgcaacaggcatcttaccattatcacccttgttcctccaacaaccgtcagccctattacagcagttacctttggtccatttggtggcacaaaacatcagggcacaacaactacaacaacttgtgctagcaaaccttgctgcatactctcagcaacatcagtttcttccattcaaccaactggctgcattgaactctgctgcttatttgcaacaacaatta

SEQ ID NO: 91214 - DNA, 435 bp, Zea mays
cagaaacacaccaagcgaagctacctagcaacgacttaacaacaatggctaccaagatattagccctccttgcgcttcttgccctttttgtgagcgcaacaaatgcgttcattattccacaatgctcacttgctcctagtgccattataccacagttcctccgaccagttacttcaatgggcttcgaacacctagctgtgcaagcctacaggctacaacaagcgcttgcggcgagcgtcttacaacaaccaattaaccaattgcaacaacaatccttggcacatctaaccatacaaaccatcgcaacacaacagcaacaacagttcctaccagcactgagccaactagatgtggtgaaccctgtcgcctacttgcaacagcaggtgcttgcatccaacccacttgctctggcaaacgtagctgcataccaacaac

SEQ ID NO: 91215 - DNA, 426 bp, Zea mays
ctttagtatgtgaaaacccagcccttcaaccctacaggatccagcaagcaatcgcaacaggcaacttacctttatcacacctgttctttcaacaatcgccagccctatctttggtgcagtcattggtacaaaccatcagggcagaacagttgcagcaactcgtgctaccagtgatcagccaagtagctctggcaaacctttccccctactctcagcaacaacaatttcttccattcaaccaactgtctatactgaaccctgctgcttatttgcagcaacaacaactactaccattcatgcagctagctactgcctactctcagcagcaacaatttcttccatttaaccaattggccgcactgaacccctatgcttatttccagcagcaaatactactaccatttggccagctagctacaacaagcc

SEQ ID NO: 91216 - DNA, 322 bp, Zea mays
agatggctcaagatcgcacgcacaccatcaagccggcatgcatgcgctgtgctgtcgcggccctggtgaccgtgaccatctgccaaggctacgtcgagcggcagatgctcatggacctgcagtgctggcaggaggtccaggagagcccgatcgacgcgtgccgtcaggtcctcgaccgccagttaaccggcagctgcatcagcggcccgttccagtggtgcaccgggctccggatgcagtgctgcacagcagctccagtacatgagccgcgagtgccgatgcgccgacatccggagcatggtcaggagctacgaggaagcca

SEQ ID NO: 91217 - DNA, 437 bp, Zea mays
caacatacaaagcacaatcgtgtaccaacaatggcagccaaaatattgtgcttccttatgctccttggtctttctgcaagtgctgctaccgcaaccatttttccacaatgctcacaagctcctatagcttactttcttaccccatacctctcaccagcggtgtcttcagtatgtgaaaacccaattcttcaaccctacaggatccaacaggcaatcgcagcacgcatcttacctttatcacccttgttcctacaacaaccgtcagtcctattacagcagttacctttgctgcatttgctggcacagaacatcaaggcacaacaactacaacaacttgtgctacgaaaccttgctgtctactctcagcaacagcagtttcttccattcaaccaactggctgcattgaactctgctgcttatttgcaacaacaactacc

SEQ ID NO: 91218 - DNA, 429 bp, Zea mays
  unsure (1)..(429): unsure at all n locations
ggcgaaagagtagcagcagcaggccgggccgagtaacggcttcccacctcgagcttgccaccatggctagaggattgaagaagcatttgaagaggctcaatgcgcccaagcattggatgctggacaagcttggcggagcttttgctcccaagccatcttctggacctcacaagtctagggagtgcctgccactgatcctcatcatcaggaacaggctcaagtatgctcttacataccgtgaggtcatttccatcctgatgcaacgccatgtacttgttgatggcaaggtcaggacagacaagacctaccctgctgggttcatggatgtcatttccatccccaagaccaatgagaactacaggctgctgtacgataccaagggccgcttncgncttcacccaatcagggatgaggatgctaagttcaagc

SEQ ID NO: 91219 - DNA, 433 bp, Zea mays
  unsure (1)..(433): unsure at all n locations
caactagcaacatagaaagcacaatagtgtaccaacaatggcagccaaaatattntgccgccttatgctccttggtctttctgcaagtgctgctacggcgaccattttcccgcaatgctcgcaagctcctatagcttcccttcttcccccgtacctctcaccagcggtgtcttcggtatgtgaaaacccaattcttcaaccctacaggatccaacaggcaatcacagctggcatcttacctttatcacccttgttcctccaacaatcatcagccctattacatcagttacctttggtgcatttattggcacaaaacatcagggcacaacaactacaacaacttgtgctagcaaaccttgctgcctactctcagcaacagcagtttcttccattcaaccaactagctgcattgaactctgcttcttatttgcaa

SEQ ID NO: 91220 - DNA, 429 bp, Zea mays
  unsure (1)..(429): unsure at all n locations
gccacgcgttcggcttccccttccggttcggttccggttcctgaaggttttccggggtcgggttgtgtggttaaccggatcaagatggcggcttcggattgtgaataccgctgcttcgtcggcggcctcgcctgggccacggacgaccactcccttcacaacgccttcagcacctacggcgaggtcctcgagtccaagatcatcctcgatcgggagacgcagaggtcccgcggcttcggcttcgtcaccttctccacggaggaggcgatgcggaacgccatcgagggcatgaacggcaaggagctggacggccgcaacatcaccgtcaacgaggcccagtcccgcggcggccgtggaggcggcggcggcggcgggtacggtggtggccgtggaggcggcggctacggcngtggcgggcgccgtgatggc

SEQ ID NO: 91221 - DNA, 430 bp, Zea mays
gtctcttaaaagtgctagcagggatcgacacaaacttcacggtcacatcaaaggcaaccgatgatgatggtgattttgctgagctgtatgtgttcaagtggacaactcttctgatcccccccaccactgtgcttgtgattaacctggttggtatagtggctggagtgtcgtatgctatcaacagtggctaccaatcatggggtccactattcgggaagctgttctttgcaatctgggtgatcctccacctctaccctttcctgaagggtctcatggggaagcagaaccgcacaccgaccatcgtcatcgtttggtccgtccttcttgcttccatattctcgctgctgtgggtgaagatcgaccccttcatatcccctacccagaaggctctttcccgtgggcagtgtggtgtaaactgctgaaatgatcc

SEQ ID NO: 91222 - DNA, 428 bp, Zea mays
atttagaccaactagcaacatagaaagcacaatagtgtaccaacaatggcagccaaaggattttgcctccttatgctccttggtatttctgcaagtgctgctacggcgaccattttcccgcaatgctcacaagctcctatagcttcccttcttcccccgtacctctcaccagcggtgtcttcggtatgtgaaaacccaattcttcaaccctacaggatccaacaggcaatcgcagctggcatcttacctttatcacccttgttcctccaacaatcatcagccctattacagcagttacctttggtgcatttattggcacaaaacatcagggcacaacaactacaacaacttgtgctagcaaaccttgctgcctactctcagcaacagcagtttcttccattcaaccaactagctgcattgaactctgc

SEQ ID NO: 91223 - DNA, 456 bp, Zea mays
ggaattcccgggagaccattagctttatctactccagagcgcagaagaacccgatcgacaccatgagggtgttgctcgttgccctcgctctcctggctctcgctgcgagcgccacctccacgcatacaagcggcggctgcggctgccagccaccgccgccggttcatctaccgccgccggtgcatctgccacctccggttcacctgccacctccggtgcatctcccaccgccggtccacctgccgccgccggtccacctgccaccgccggtccatgtgccgccgccggttcatctgccgccgccaccatgccactaccctactcaaccgccccggcctcagcctcatccccagccacacccatgcccgtgccaacagccgcatccaagcccgtgccagctgcagggaacctgcggcgttggcagcaccccgatcctgggccagtgcgtcgagtttc

SEQ ID NO: 91224 - DNA, 427 bp, Zea mays
  unsure (1)..(427): unsure at all n locations
ctctcaaccactcatcatcgcctacgcaggcatcgccctgtcgccgggccgtacgattgcgccatggcttccgatgagagcaaaaattcaaaaccagagaagccatcttcagcagctggtgcaggcctgcccaatccgtttgatttttcttctatgagcaacttgctcaatgacccatcgataagagagatggctgagcaaattgcaagtgaccctgtgttcaaccagatggctgaacagcttcagaaaagtgctcagggtgctggagaacagggtattcctgcattggatcctcaacagtatatggaaacaatgcaacaagtcatgcaaaaccctcagtttgagtcaatggcagagcgtcttgtgaatgcccttatgcaggatcctgctatgtccagtatgctngagaacttgaccagtccagctc

SEQ ID NO: 91225 - DNA, 434 bp, Zea mays
agcaaagcggcagtgcgtagagaggatcgtcgaacagaacagcatgaagatggtcatcggtctcgtcgtgtgcctggctctgtcagctgccagcgcctctgcaatgcagatgccctgcccctgcgcggggctgcagggcttgtacggcgctggcgccggcctgacgacgatgatgggcgccggcgggctgtacccctacgcggagtacctgaggcagccgcagtgcagcccgctggcggcggcgccctactacgccgggtgtgggcagacgagcgccatgtaccagccgctccggcaacagtgctgccagcagcagatgaggatgatggacgtgcagtccgtcgcgcagcagctgcagatgatgatgcagcttgagcgtgccgctgccgccagcagcagcctgtacgagccagctctgatgcagcagcagcagc

SEQ ID NO: 91226 - DNA, 426 bp, Zea mays
  unsure (1)..(426): unsure at all n locations
ttgcaaaccatggacatggctttggcgtctaaaggctncccttcggcatgggatggcagcggcggcgagcagccaattccaaagcgtgacaaagccgctgcaaatgattcaacatacctcaatcctcaagctcatgatagtgttcttggaatcattctgggaggtggtgctgggactagattgtaccccttgacaaagaagcgtgccaagcctgcagtgccattgggtgccaactatagactgattgatattcctgtcagcaattgtctcaacagcaacatatccaagatctatgtgctaacgcaatttaactctgcttccctcaaccgtcacctctcaagagcctacgggagcaacattggagggtacaagaatgaagggtttgttgaagtcttagctgcacagcagagcccagataatccaaac

SEQ ID NO: 91227 - DNA, 431 bp, Zea mays
aaaacacaccaagcgaagcgcactagcaacgacctaacaccaatggctaccaagatattagccctgcttgcgcttcttgcccttttagtgagcgcaacaaatgcgttcattattccacagtgctcacttgctcctagtgccattattccacagttccttccaccagttacttcaatgggcttcgaacattcagccgtgcaagcctacaggctacaactagcgcttgcggcgagcgccttacaacaaccaattgcccaattgcaacaacaatccttggcacatctaaccctacaaaccattgcaacgcaacaacaacaacaacaacagtttctgccatcactgagccacctagccgtggtgaaccctgtcacctacttgcaacagcagctgcttgcattcaacccacttgctctggcgaacgtagctgcata

SEQ ID NO: 91228 - DNA, 411 bp, Zea mays
  unsure (1)..(411): unsure at all n locations
ggcagccaaaatattttggcttcttaagcttcttgggctttctgcaagtgctggttccgggaccatttttccaccatggttaacaggttctaatggtttccttttttccccggaccttttaacaaccggggtttcgtatggggaaaccccattctttaaccctataggatccaacaagcaatcgcagctggcatcttacctttatcacccttgttcctccaacaatcatcagccctattacagcagttacctttggtgcatttattggcacanaacatcagggcacaacaactacaacaacttgtgctagcaaaccttgctgcctactctcagcaacaacagtttcttccattcaaccaactagctgcattgaactctgcttcttatttgcaacaacaacaactaccattc

SEQ ID NO: 91229 - DNA, 432 bp, Zea mays
caacaagcaacatagaaagtggaatccagtagcaacaatagagcaacaatggcgaccaagatactgtccctccttatgctccttgctctttctgcatgtgttgctaacgcgacaattttccctcaatgctcacaagctcctatagcttcccttcttcccccataccttccatcaatgatagcttcagtatgtgaaaacccagctcttcaaccctataggctccaacaagcaatcgcagcaagcaacatacctttatcacccttgtttcaacaatcgccagccctatctttggtgcagtcattggtacaaaccatcaaggcacagcagctgcagcaactcgtgctacctgtgatcaaccaagtagctctggcaaacctttctccctactatcagcaacaacaatttcttccattcaaccaactatctacactg

SEQ ID NO: 91230 - DNA, 433 bp, Zea mays
gtcagcctagcaattagctcatcgactccagattggagaactcgacaccatgaaggtgctgatcgttgcccttgctctcctggcgctcgctgcgagcgccgcctccagtacaagcggcggctgtggctgccagacaccaccgtttcatctaccgcctccgttctatatgccgcctccgttctatctgccgccgcagcagcagccgcagccatggcaataccccactcaaccaccgcagctaagcccgtgccagcagttcggatcctgcggcgtcggcagcgtcggcagcccgttcctgggccagtgcgtcgagttcctgaggcaccagtgcagcccggcggcgacgccctacggctcgccacagtgccaggcgctgcagcagcagtgctgccaccagatcaggcaggtggagccgctgcaccggtaccaggcc

SEQ ID NO: 91231 - DNA, 406 bp, Zea mays
agatacccaaagaggtgatgattttataagtaaagagaagatggcattggcatggaacaaagttggccagagctccccatttcttaacaagcccttgctgccgtttgaggaatggaacatagatttctctgagataacaattggcacgcgggttggaataggattcttcggagaagttttccgtggtatatggaatggaaccgatgttgccatcaaagtatttctagaacaggacttgacaactgaaaacatggaagatttttgcaacgagatatacatcctgagccggttgcgacattcaaacgttatattgcttctcggtgcatgcattacacctgcacacttgtcaatggttactgaatatatggaaatgggatcactgtattatctcatccatatgagtggt

SEQ ID NO: 91232 - DNA, 439 bp, Zea mays
  unsure (1)..(439): unsure at all n locations
attgataccaactagcaaaatacatagtgaagtacactagccacttcttaacccaatgggagccgagaattttttccctccttgccctccttgctctatcagcaagcgctgctacctctactattattccacaatgctcacaacaatacctctctccggtgacagccgcgggatttcaacacccaactatacaatcctacatgctacatgaggccatcgtagcaagcatcttacggtcattagcattaaccctccaacagccatatgccctattgcaacaaccatccttagtgcatctgtatctccaaagaatcgcgacacaacaactacaacaacagttgctaccaacaatcaatcaagtagttgcagcgaaccttgctgcttatctccagcaacaacaatttcttccattcaatcaactagcntgggtgaaccctgc

SEQ ID NO: 91233 - DNA, 428 bp, Zea mays
ggcaatcacagctggcatcttacctttatcacccttgttcctccaacaatcatcagccgtattacatcagttacctttggtgcatttattggcacaaaacatcagggcacaacaactacaacaacttgtgctagcaaaccttgctgcctactctcagcaacagcagtttcttccattcaaccaactagctgcattgaactctgcttcttatttgcaacaacaacaactaccattcagccagctacctgctgcctacccccagcaatttcttccattcaaccaactggcagcattgaactctcctgcttatttacagcagcaacaactactaccattcagccagctagctggtgtgagccctgctaccttcttgatacaaccacagttgttgccgttctaccagcacgctgcgcctaacgctggcaccc

SEQ ID NO: 91234 - DNA, 433 bp, Zea mays
aaagcacaatagtgtaccaacaatggcagccaaaatattttgcttccttatgctccttggtctttctgcaagtgttgctaccgcaaccattttcccacaatgctcacaagctcctatagcttcccttcttcccccatacctctcaccagcggtgtcttcaatgtgtgaaaacccaattgttcaaccctacaggatccaacaggcaatcgcaacaggcatcttaccattatcacccttgttcctccaacaaccgtcagccctattacagcagttacctttggtccatttggtggcacaaaacatcagggcacaacaactacaacaacttgtgctagcaaaccttgctgcatactctcagcaacatcagtttcttccattcaaccaactggctgcattgaactctgctgcttatttgcaacaacaattaccattc

SEQ ID NO: 91235 - DNA, 412 bp, Zea mays
tattgagaccagcaagcaacatagaaagtagaatccattagcaacaatagagcaacaatggcgaccaagatattttcccttcttatgctccttggtctttctacatggggtggtaacgccacaatttttccttaatggttacaagcttctataggttcccttctttccccatacctttcatcaattatagcttcagtatgtgaaaacccagctcttcaaccatataggcttcaacaagcaatcgcagcaagcaacatacctttatcgccctttgttgttcaacaatcaccagccctatctttggtgcagtcattggtacaaaccatcagggcacaacagctgcagcaactcgtgctacctgtgatcaaccaagtagctctggcaaaccttttctcctactctcagcaacaac

SEQ ID NO: 91236 - DNA, 425 bp, Zea mays
cttacctttataacctggttcttccaccaataataagccctataacagaagttacctggggtggcattaattggcacaaaacatcagggcacaacaactacaacaacttgtgctagcaaaccttgctgcctactctcagcaacagcagtttcttccattcaaccaactagctgcattgaactctgcttcttatttgcaacaacaacaactaccattcagccagctatctgctgcctacccccagcaatttcttccattcaaccaactgacagcattgaactctcctgcttatttacagcagcaacaactactaccattcagccagctagctggtgtgagccctgctaccttcttgacacaaccacagttgttgccgttctaccagcacgctgcgcctaacgctggcaccctcttacaactgcaac

SEQ ID NO: 91237 - DNA, 415 bp, Zea mays
cgcaaattgcaccaagaaatccatcgagaggccgtcgacaggggaattaatggcgtcgtcgtctagcagcagccaccgtcgcctcatcctcgcagccgccgtcctgctctccgtgctcgcggctgccagcgccagcgccgggacctcctgcgtgccggggtgggccatcccgcacaacccgctcccgagctgccgctggtacgtgaccagccggacctgcggcatcgggccgcgcctcccgtggccggagctgaagaggagatgctgccgggagctggcggacatcccggcgtactgccggtgcacggcgctgagcatcctcatggacggcgcgatcccgccgggcccggacgcgcagctggagggccgcctagaggacctgccgggctgcccgcgggaggtgcagaggggattc

SEQ ID NO: 91238 - DNA, 428 bp, Zea mays
cgctcatttctgcatccccctcccgccgcgccgcctcaccgccgccggagaagatgggtcgcgtgagccgcgcgcagcgtaagggtgcggggtccgtgttcaagtcccacacccaccaccgcaagggccccgcccgcttccgctccctcgacttcggcgagcgcaacgggtacctcaagggcgtcgtcaccgacgtcatccacgaccccggccgtggcgcgccgctcgccaaggtcactttccgccacccattcaggtacaagcaccagaaggagctctttgtcgcagccgagggcatgtacacgggccagttcgtctactgcggtcgccgcgccaccctctccatcggcaacgtgctgcccctccgcgggatccctgagggtgccgtcgtctgcaacgtcgagcaccacgtcggtgaccgcggtgtc

SEQ ID NO: 91239 - DNA, 435 bp, Zea mays
  unsure (1)..(435): unsure at all n locations
ttcatcatcactccactagccagtcagctactggcctaaagctaggccgcttcttttcgtttaagccaatccatctcatctccgacaagcgaagcagagcactggcatgagcatggaccgcatggcgcggcgttccgtgtccttgctcctcgctctggctctcctggccgccgcggcgtcggcggactcgtggctgtacgagaagttcacgacggagggcaacgtgcgcgcggactacaacgcgcaggggcagcaggtgacgtctctgatcctgacgcagcagtccggcggcgccttcagctcgcggcagaagtacctgtacggggagttcagcatccagatgaggctgatcccgggcaactccgcgggcaccgtgacctncttctacctgtcgtcgggcgacgggcccgggcacgacgagatcgacatggagtt

SEQ ID NO: 91240 - DNA, 431 bp, Zea mays
aagcaacatagaaagtggaatccagtagcaacaatagagcaacaatggcgaccaagatactttccctccttatgctccttgctctttctgcatgtgttgctaacgcgacaattttccctcaatgctcacaagctcctatagcttcccttcttcccccataccttccatcaatgatagcttcagtatgtgaaaacccagctcttcaaccctataggctccaacaagcaatcgcagcaagcaacatacctttatcacccttgtttcaacaatcgccagccctatctttggtgcagtcattggtacaaaccatcaaggcacagcagctgcagcaactcgtgctacctgtgatcaaccaagtagctctggcaaacctttctccctactatcagcaacaacaatttcttccattcaaccaactatctacactgaac

SEQ ID NO: 91241 - DNA, 422 bp, Zea mays
  unsure (1)..(422): unsure at all n locations
agcaaagcggcagtgcgtaaagaggatcgtcgaacagaacaagctggagatggtcatcggtctcgtcgggtgcctggctctgtcagctgccagcgcctctgcaatgcagatgccctgcccctgcgcggagctgcagggcttgtacggcgctggcgccggcctgacgacgatgatgggcgccggcgggctgtacccctacgcggagtacctgaggcagccgcagtgcagcccgctggcggcggcgccctactacgccgggtgtgggcagacgagcgccatgtaccagccgctccggcaacagtgctgccagcagcagatgaagatgatggacgtgcagtccgtcgcgcagcagctgcagatgatgatgcagcttgagcgtgccgctgccgncagcagcagcctgtacgagccagctctgatgc

SEQ ID NO: 91242 - DNA, 444 bp, Zea mays
attcaaaaacacacctaacgaaacgcactaaccaccgaccaaccaccatgggttcccagggtttagccctttttgggctttttggcctttttggtgagcgcaacaaaatgcgtttccattatttccaacaatggctcactttgcttcctagtgccctttattgcacagttccttccctccaggtacttcaatgggcttcgaacacccagctgtgcaagcctacaggctacaacaagcgcttgcggcgagcgtcttacaacaaccaattgcccaattacaacaacaatccttggcacatctaaccatacaaaccatcgcaacgcaacagcaacaacaatttctaccagcactgagccaactagctgtggtgaaccctgtcgcctacttgcaacagcagttgcttgcatccaacccacttgctctggcaaacatagttgcatacca

SEQ ID NO: 91243 - DNA, 316 bp, Zea mays
gaccaccggtgtcttcagtatgtgaaaacccaatttttaaaccctacaggatccaacaggcattggcagcatgctttttaccttaatcacccttggtcctccaacacccgtcatgccctattacagcagttacctttgcagcatttgttggcccaaaacttcaaggcccaacatctacatcaactcgggctaggaaaccttgctgcctactttagacaccagaagtttcttccattcaaccaactggctgattagaactctggtgcttattggcaacagaacttaccattaagtcagttagctgctgcctaccccc

SEQ ID NO: 91244 - DNA, 419 bp, Zea mays
gctgcagcaactcgtgctacctgtgatcaaccaagtagctctggcaaacctttctccctactctcagcaacaacaatttcttccattcaaccaactgtctacactgaaccctgctgcttatttgcagcaacaactattaccatttagccagctagctactgcctactctcagcaacaacaacttcttccatttaaccaattggccgcactgaaccccgctgcttatttgcagcagcaaatactactgccatttagcgagctagctgcagcaagtcgtgcttccttcttgacacagcaacagttgctgcctttctacaagcagtttgcggctaaccccgcaaccctcttacaactacaacaattgttgccctttgtccaacttgctttgacaaacccagcagccttctaccaacaacaca

SEQ ID NO: 91245 - DNA, 439 bp, Zea mays
ctagcaacatagaaagcacattagtgtaccaacaatggcagccaaaatattttgcttccttatgcgccttggtctttctgcaagtgctgctaccgcaaccattttcccacaatgctcacaagctcctatagcttcctttcttcccccatacctctcaccagcggtgtcttcagtatgtgaaaacccaattcttcaaccctacaggatccaacaggcaatcgcagcaggcatcttacctttatcacccttgttcctccaacaaccgtcagccctattacagcagttacctttggtgcatttgttggcacaaaacatcaaggcacaacaactacaacaacttgtgctaggaaaccttgctgcctactctcagcaacagcagtttcttccattcaaccaactggctgcattgaactctgctgcttatttgcaacaacaacta

SEQ ID NO: 91246 - DNA, 428 bp, Zea mays
aaggtcatccgcaagaatcttgtcaagaagtgcgttgagctgttttttgagattgcggagaacaaggaggactacaacaagttctatgaggccttctccaagaacctcaagcttggcatccacgaggactccacgaacaggaccaagattgctgagctcctgaggtaccactcgaccaagagcggggatgagctgaccagcctcaaggattatgtgaccaggatgaaggagggccagaacgacatcttctacatcactggtgagagcaagaaggctgtggagaactccccgttccttgagaagctgaagaagaggggctatgaggtgctgttcatggtggatgccattgacgagtattctattggacagctgaaggagtttgagggcaagaagctcgtctctgccaccaaagagggcctgaagctgga

SEQ ID NO: 91247 - DNA, 339 bp, Zea mays
  unsure (1)..(339): unsure at all n locations
atctactccagagcgcagaagaacccgatcgacaccatgagggtgttgctcgttgcccgtggctctcctggctctcgctgcgagcgccacctccacgcatacaagcggcggctgcggctgccagccaccgccgccggttcatctaccgccgccggtgcatctgccacctccggttcacctgccacctccggtgcatctcccaccgccggtccacctgccgccgccggtccacctgccaccgncggtccatgtgccgccgccggttcatctgccgncgncaccatgccactaccctactcaaccgcgccgggctcagactcatacccagacacacccatg

SEQ ID NO: 91248 - DNA, 431 bp, Zea mays
aagcaacatagaaagtagaatccattagcaacaatagagcaacaatggcgaccaagatgttttccctccttatgctccttgctctttctacatgtgttgctaacgcgacaattttccctcaatgctcacaagctcctatagcttcccttcttcccccataccttccatcaattatagcttcagtatgtgaaaacccagctcttcaaccatataggcttcaacaagcaatcgcagcaagcaacatacctttatcgcccttgttgtttcaacaatcaccagccctatctttggtgcagtcattggtacaaaccatcaaggcacaacagctgcagcaactcgtgctacctgtgatcaaccaagtagctctggcaaacctttctccctactctcagcaacaacaatttcttccattcaaccaactgtctacactg

SEQ ID NO: 91249 - DNA, 428 bp, Zea mays
ggacgtcagcctagcaattagctcatcgactccagattggagaactcgacaccatgaaggtgctgatcgttgcccttgctctcctggcgctcgctgcgagcgccgcctccagtacaagcggcggctgtggctgccagacaccaccgtttcatctaccgcctccgttctatatgccgcctccgttctatctgccgccgcagcagcagccgcagccatggcaataccccactcaaccaccgcagctaagcccgtgccagcagttcggatcctgcggcgtcggcagcgtcggcagcccgttcctgggccagtgcgtcgagttcctgaggcaccagtgcagcccggcggcgacgccctacggctcgccacagtgccaggcgctgcagcagcagtgctgccaccagatcaggcaggtggagccgctgcaccgg

SEQ ID NO: 91250 - DNA, 435 bp, Zea mays
ctagcaacatagaaagcacaatagtgtaccaaccatggcaggccaaatattttggcttcgtaagcttcttggtctttctggaaggggcttgttccgggaacatttttccggaatggttccaaggcttctaatagcttcctttcttcccccgtacttctcaccagcggtgtcttcggtatgtggaaaccccaatttttaaaccctacaggatccaacaggcaatcgcagctggcatcttacctgtatcacccttggttcttcaacaatcatcagccctattacaacagttacctttggtgcatttattggcacagaacatcagggcacaacaactacaacaacttgtgctagcaaaccttgctgcctactctcagcaacagcagtttcttccattcaaccaactaggttcattgaactctgcttcttatttgcaac

SEQ ID NO: 91251 - DNA, 433 bp, Zea mays
ctagcaacatagaaagcacaatagtgtaccaacaatggcagccaaaatattttgcctccgtatgctgcttggtctttctgcaagtgctgctacggcgaccattttcccgcaatgctcgcaagctcctatagcttcccttcttcccccgtacctctcaccagcggtgtcttcggtatgtgaaaacccaattcttcaaccctacaggatccaacaggcaatcacagctggcatcttacctttatcacccttgttcctccaacaatcatcagccctattacatcagttacctttggtgcatctattggcacaaaacatcaaggcacaacaactacaacaacttgtgctagcaaaccttgctgcctactctcagcaacagcagtttcttccattcaaccaactagctgcatagaactctgcttcttatttgcaacaa

SEQ ID NO: 91252 - DNA, 441 bp, Zea mays
tgagaccaactagcaacatagaaagcacaatagtgtaccaacaatggcagccaaaatatgttgcctccttatgctccttggtctttctgcaagtgctgctacggcgaccattttcccgcaatgctcgcaagctcctatagcttcccttcttcccccgtacctctcaccagcggtgtcttcggtatgtgaaaacccaattcttcaaccctacaggatccaacaggcaatcgcagctggcatcttacctttatcacccttgttcctccaacaatcatcagccctattacaacagttacctttggtgcatttattggcacaaaacatcagggcacaacaactacaacaacttgtgctagcaaaccttgctgcctactctcagcaacagcagtttcttccattcaaccaactaggttcattgaactctgcttcttatttgcaaca

SEQ ID NO: 91253 - DNA, 472 bp, Zea mays
  unsure (1)..(472): unsure at all n locations
gctctaccggtccggaatgaccgacgcggtacgcgagcaacacgcaacttaaagggtggactacagtagcaaaaatagagcaccaatggcggccaagatattttccatccttatgctccttgctctttctgcatgtgttgctaacgcgaccatttttcctcaatactcacaagctcctatagctgcccttcttcccccataccttccatcaatgaccgctttagtatgtgaaaacccagcccttcaaccctacaggatccagcaagcaatcgcaacaagcaacttacctttatcacacctgttctttcaacaatcgccagccctatctttggtgcagtcattggtacaaaccatcagggcagaacagttgcagcaactcgtgctaccagtgatcagccaagtagctctggcaaacctttccccctactctcagcaacaacaatntcttccattcaaccaactgtctatactg

SEQ ID NO: 91254 - DNA, 470 bp, Zea mays
accggtccggaattcccggcattttgagcattcagaaacacaccaagcgaagcgcactagcaacgacctaacaacaatggctaccaagatattagccctccttgcgcttcttgccctttttgtgagcgcaacaaatgcgttcattattccacaatgctcacttgctcctagtgccattattccacagttcctcccaccagttacttcaatgggcttcgaacacctagctgtgcaagccaacatgcaacaacaagcgcttgcggcgagcgtcttacaacaaccaattgcccaattgcaacaacaatccttgccacatctaacaatacaagccatcacaacgcaacagcaacaacagttcctaccagcactgagccacctagccatggtgaaccctgccgcctacttgcaagagcagctgcttgcatccaacccacttgctctggcgaacgtagttgcaaaccagcaacaac

SEQ ID NO: 91255 - DNA, 432 bp, Zea mays
caagcaacatagaaagtggaatccagtatcaacaatagagcaacaatggcgaccaagatgttctccctccttatgctccttgctctttctacatgtgatgctaacgcgacaattttccctcaatgctcacaagctcctatagcttcccttcttgccccataccttccatcaattatagcttcaatatgtgaaaacccagctcttcaaccatatatgcttcaacaagcaatcgcagcaagcaacatacctgtatcgcccttgttgcttcaacaatcgccagccctatctttggtgcagtcattggtacaaaccatcagggcacaacagctgcagcaactcgtgctacctctgatcaaccaagtaactcttgcaaacctttcctcctactctcagcaacaacaatttctttcattcaaccaactgtctacactg

SEQ ID NO: 91256 - DNA, 410 bp, Zea mays
  unsure (1)..(410): unsure at all n locations
ccactctgctactctaactatttaccggatcccggatacaacgacgaacagcaatcttactcagagatcatatactgtagagtcccggagtgctacatctttccggcacgacaagctcccacaggccaaggccacctcagcgactgtctccctgaccatcgtggacctgtacctcaggcgcgaccaggtgccgcacgccatactcgaggccagcaaggagatcggcttatttcaggtggcgaaccacggcgtctccctagaggcgatgcatgacatggagaccgtgtgccaggagctcttccggctgccggcggatgacaaagccgggctgtactcggaggacacggggagggcgaccccgatctactccaacaccatgttcgacacggncggcccagaagtactggcgc

SEQ ID NO: 91257 - DNA, 436 bp, Zea mays
  unsure (1)..(436): unsure at all n locations
gcgaagcggcagtgcgtagagaggatcgtcgaacagaacagcatgaagatggtcatcggtctcgtcgtgtgcctggctctgtcagctgccagcgcctctgcaatgcagatgccctgcccctgcgcggggctgcagggcttgtacggcgctggcgccggcctgacgacgatgatgggcgccggcgggctgtacccctacgcggagtacctgaggcagccgcagtgcagcccgctggcggcggcgccctactacgccgggtgtgggcagacgagcgccatgtaccagccgctccggcaacagtgctgccagcagcagatgaggatgatggacgtgcagtccgtcgcgcagcagctgcagatgatgatgcagctngagcgtgccgctgccgccagcagcagcctgtacgagccagctctgatgcagcagcagcagcagc

SEQ ID NO: 91258 - DNA, 364 bp, Zea mays
aagcaacatagaaagtggaatccagtatcaacaacagagcaacaatggcgaccaagaggttttgcctccttatgctccttgctcgttctgcatgtgttgctaacgcgacaattttccctcaatgctcacaagctcctatagcttcccttcttcccccataccttccatcaatgatagcttcagtatgtgaaaacccagctcttcagccctataggctccaacaagcaatcgcagcaagcaacatacctttatcacccttgttggttcaacaatcgccagccctatctttggtgcagtcattggtacaaaccatcaaggcacagcagctgcagcaactcgtgctacctgtgatcaaccaagtagc

SEQ ID NO: 91259 - DNA, 447 bp, Zea mays
  unsure (1)..(447): unsure at all n locations
gtaccggttcggaattccagccacgcgtcacgccgtccttgacctccgccgccgaatcctagactctgatctcgggttcaccgcagcgcgcanagcgacccccgactcccgtgccgatccgcgctctcctctacgacgcttcagtcatggcaggaatggcacccgagggttctcagtttgatgctaagcactatgattctaaaatgcaggagctgctgagcactggtgagactgaggagttcttcacttcatatgatgaagtttttgaaagcttcgatgacatgggccttcaagagaatctcttgagaggcatttatgcatatggctttgagaaaccatctgcaattcagcagagaggaattgttcccttctgcaaggcgctagatgtcattcagcatgcacaatctggtacaggaaagacagcaaccttctgttctgggatcttgc

SEQ ID NO: 91260 - DNA, 420 bp, Zea mays; identical to SEQ ID NO: 88142

SEQ ID NO: 91261 - DNA, 429 bp, Zea mays
  unsure (1)..(429): unsure at all n locations
aacangcaacatagaaagtggaatccagtagcaacaatagagcaacgatggcgaccaagatactttccctccttatgctccttgctctttctgcatgtgttgctaacgcgacaattttccctcaatgctcacaagctcctatagcttcccttcttcccccataccttccatcaatgatagcttcagtatgtgaaaacccagctcttcaaccctataggctccaacaagcaatcgcagcaagcaacatacctttatcacccttgtttcaacaatcgccagccctatctttggtgcagtcattggtacaaaccatcaaggcacagcagctgcagcaactcgtgctacctgtgatcaaccaagtagctctggcaaacctttctccctactatcagcaacaacaatttcttcctttcaaccaactatctacac

SEQ ID NO: 91262 - DNA, 437 bp, Zea mays
cacgcgtccggctccttggtctttctgcaagtgctgctacggcgaccattttcccgcaatgctcgcaggctcctatagcttcccttcttcccccgtacctctcaccagcggtgtcttcggtatgtgaaaacccaattcttcaaccctacaggatccaacaggcaatcgcagctggcatcttacctttatcacccttgttcctccaacaatcatcagccctattacaacagttacctttggtgcatttattggcacaaaacatcagggcacaacaactacaacaacttgtgctagcaaaccttgctgcctactctcagcaacagcagtttcttccattcaaccaactaggttcattgaactctgcttcttatttgcaacaacaacaactaccattcagccagctacctgctgcctacccccagcaatttcttccattc

SEQ ID NO: 91263 - DNA, 438 bp, Zea mays
accggttcggaattcccggcgctgcttatttgcagcaacaactattaccaattaacccggttggttccggctaattctcagcaccaacggcttgttccatttaaccaatgggccgaactgaaccccgctgctaattggcagcagcaaatactactaccattaagccagttagctgcagcaaaccgcgcttccttctggacacagcaacagttgctgcctttataccagcagtttgcggttaaccccgaaaccctcttacaactacaacaattgttgccctttgtccaacttgctttgacagacccagcggtcttataccaacaacacatcatgggtggtgccctctttaagattgcttattagttgaaattcaataataaagttttttggatgatgtatgtggccaaccagaattaagaagttacatttccagattct

SEQ ID NO: 91264 - DNA, 519 bp, Zea mays
  unsure (1)..(519): unsure at all n locations
nagtaaggagtggttttgtattgaatgagaatattgcacgctctaccggtccggaattcccgggtacgcacccactcgtccgacagccgcagaatctcaatacccagctatacaatcctacatggtacaggaggccatcgaagcaagcatcttacggacattagcattaaccctccatcaaccatatgctctattgcaacagccatccttagtgcatatgtatctccaaagaatcgcggcacaacaactacaacaacagttgctaccaacaatcaaccaagtatttgcagcgaaccttgctgcttacctacagcaacaacagtttcttccattcaatcaactagctggtgcgaaccctgctatctacttgcaggcacaacagctactaccatttaaccaacttgtcgggagcccttatgccttcttactgcaacaacagcttatggcattccatctccaagctgtggcaaacattgacgctttcttgagacaacaacatgtgctgccattgtacccaca

SEQ ID NO: 91265 - DNA, 438 bp, Zea mays
tagaaagcacaatagtgtaccaacaatggcagccaaaatattttgcctccttatgctccttggtctttctgcaagtgctgctacggcgaccattttcccgcaatgctcgcaagctcctatagcttcccttcttcccccgtacctctcaccagcggtgtcttcggtatgtgaaaacccaattcttcaaccctacaggatccaacaggcaatcacagctggcatcttacctttatcacccttgttcctccaacaatcatcagccctattacatcagttacctttggtgcatttattggcacaaaacatcaaggcacaacaactacaacaacttgtgctagcaaaccttgctgcctactctcagcaacagcagtttcttccattcaaccaacttacttgcattgaactctgcttcttatttgcaacaacaacaactaccat

SEQ ID NO: 91266 - DNA, 435 bp, Zea mays
caacaagcaacatagaaagtggaatccagtagcaacaacagagcaacaatggcgaccgagatagtttccctccttatgctccttgctctttctgcatgtgttgctaacgcgacaattttccctcaatgctcacaagctcctatagcttcccttcttcccccataccttccatcaatgatagcttcagtatgtgaaaacccagctcttcagccctataggctccaacaagcaatcgcagcaagcaacatacctttatcacccttgttgtttcaacaatcgccagccctatctttggtgcagtcattggtacaaaccatcagggcacagcagctgcagcaactcgtgctacctgtgatcaaccaagtagctctggcaaacctttctccctactctcagcaacaacaatttcttccattcaaccaactgtctacactg

SEQ ID NO: 91267 - DNA, 416 bp, Zea mays
  unsure (1)..(416): unsure at all n locations
cggacacgcacgccaacgcctcatccacctgtgctgtgacctcatatttgtcctctgtgcctgcgtctcatgatctctgcgcctctgcggctgtcggcgccgagggctgccgtcgggggatcgttcctgctcggcaagtccaagtccaagcccagcaggatccgctgcgccgcgggggtggggaggggcgccgncgccgncacactgtacgagatcctgggcctgcgcgccggcgcgacgggccgggagatcaaggccgcgtaccggcgcctggcgcgggagcggcacccggacgtggcgcccgcgcccggggccgctgccgagttcgtccgcttgcacgacgcctacgccacgctctccgacccggacagccgcgcgcgctacgaccgcagcgccgtaaccgcggtggccgtggc

SEQ ID NO: 91268 - DNA, 433 bp, Zea mays
agttcccctctcctgatcgtcctgttcctcacagcagcagccatggcggccgagccggagaagcaggcggcccccgcggcacaggagacggccgtgcacatcgtgtacgttgaccgccccgaggacgccgaccctgaggagttccacatccgcaccctcacccccgtcctcggcagcgaacagaaggccagggacgcagtgctctaccactacaagaacgccgccagcggcttctccgcgaagctcaccccccagcaggtcaaggatctcaaggagcaaccaggtgttctccaggttgtgccgagccagacttaccagctacatggccctgggtctggcactcaccagggcacgacacacaccttgggccttatgtgaaggcgtatgagaatcaagaagactttgtttagtatggctgtatggcacaggtctg

SEQ ID NO: 91269 - DNA, 279 bp, Zea mays
acgacatagatagcgcactattgtaccattaattgccagccaaatggttttcgctaaggataggcatgcttctctctgggggtgactatacggcgagcatattacgtaaatgctcacaagctactacagcttcccttattagctcataattctcaccatcgatgtcttcagtatgtgaaaatccaatgcttctaccctacaggatccaacatgcaatcacagcatgcatcttacctttatcacgcttgttcctccaacagtcatggatcctattacagc

SEQ ID NO: 91270 - DNA, 314 bp, Zea mays
gaggcgctgacttatcctaccactcttatcaagtcctgatcgagttaggggggcttggggtattgctaaggtgcgatggcagctgctgatgtcgagtacctttgcttcgtacgcggacatgcctgggccaccagcaacgagtcgctgcagaatgccttcgcctcctacggctagatcctcgactacaagatcatcaccgaccgtaacactgcgaggttccgcggtttagtatgcgttaccttctcctacgagaactccatgctcgacgctatcgagaacatgaacagcaatgagctctacgcacgtatcattac

SEQ ID NO: 91271 - DNA, 341 bp, Zea mays
gcattcagaaacacaccaagcgaagcgcactagcaacgacctaacaacaatggctagcgagatattagccctccttgcgcttcttgccctttttgtgagcgcaacaaatgcgttcattattccacaatgctcacttgctcctagtgccattattccacagttcctcccaccagttacttcaatgggcttcgaacacctagctgtgcaagccaacatgcaacaacaagcgcttgcggcgagcgtcttacaacaaccaattgcccaattgcaacaacaatccttgccacatctaacaatacaagccatcacaacgcaacagcaacaacaagttctaccagcac

SEQ ID NO: 91272 - DNA, 463 bp, Zea mays
accgatccgcaattccagccacgcctacgcagaaagcacaatagtgtaccaacaatggcagctaaaatattctgcctccttatgcgggttggtctttctgcaagtgctgctacggcgaccattttcccgcaatgctcgcaagctcctatagcttcccttcttcccccgtacctctcaccagcggtgtcttcggtatgtgaaaacccaattcttcaaccctacaagatccaacaagcaattcacagctggcatcttacctttatcacccttgatccttcaacaatcatcagccctattacatcagttacctttggtgcatttattggcccaaaacatcaaggcacaacaactacaacaacttgtgctagcaaaccttgctggctactttcagcaacagcagtttcttccattcaaccaactagctgcattgaactcttgctctaatttgcaacaacaacaacta

SEQ ID NO: 91273 - DNA, 426 bp, Zea mays
gggaccgaagcgaatgagttggcaatgttgatggcccggctgtatagtgggaatctgggtatggttgcgctcagaaatgcatatcatggcggaagtgccggtacgattggattgactggtttgcagacgtggaaatacccaattcctcagggtgaaatacatcatgtcatgaaccctgatccttatcgggggactttcgggtctgatgctgcagcttatgctaaggaagtcgaagaacacataacttatggaagttcaggaagggttgcaggcttcattgcagaaacattccaaggtgtgggaggtgctgttgaactagctcctggatacctaaagttagcttatgacattgtgcgcaaggctgggtggcgttgtattgctgatgaagtccaaagtgggtttggccgtactggcagtcattactgg

SEQ ID NO: 91274 - DNA, 423 bp, Zea mays
  unsure (1)..(423): unsure at all n locations
agtgtaccaacaatggcagccaaaatattttgcttccttaagctccttggtctttctgcaagtgttgctaccggaaccattttcccacaatgctcacaagctcctataagcttccttcttcccccatacctctcaccagcggtgtcttcaatgtgggaaaccccaattgttcaaccctacangatccaacaggcaatcgcaacaggcatcttaccattatcacccttgttccttcaacaaccgtcagccctattacagcagttacctttggtccatttggtggcacanaacatcagggcacaacaactacaacaacttgtgctagcaaaccttgctgcatactctcagcaacatcagtttcttccattcaaccaactggctgcattgaactctgctgcttatttgcaacaacaattaccattc

SEQ ID NO: 91275 - DNA, 437 bp, Zea mays
gtcgcttccagccgccgccgcgtccgcctcgccaagcgcagcagccgccgcagcacagcgctctcttgatctcagccatggcggaggtggagcagcaacaggacacgccgaagctcttcaaccgctggaccttcgatgatgtccaggtgaacgacatctcgctgaacgactacctcgctgtgaacgcgacgaagcacgcgatgtacctgccgcacaccgcggggcgctactccaagaagcggttccgcaaggcgcagtgcccgatcgttgagcgccttacaaactccctcatgatgcacgggcgcaacaacggccagaagggtcatggctggcccgatcatcaagcataccctggagatcattcacctgctcaccgatgccaaccccatccaggtcgtcgtcgacgcgatcatcaacagtggcccccgtgaggatgc

SEQ ID NO: 91276 - DNA, 419 bp, Zea mays
atcagtgcagcccgacggcgacgccctactgctcgcctcagtgccagtcgttgcggcagcagtgttgccagcagctcaggcaggtggagccgcagcaccggtaccaggcgatcttcggcttggtcctccagtccatcctgcagcagcagccgcaaagcggccaggtcgcggggctgttggcggcgcagatagcgcagcaactgacggcgatgtgcggcctgcagcagccgactccatgcccctacgctgctgccggcggtgtcccccactgaagaaactatgtgctgtagtatagccgctggctagctagctagttgagtcatttagcggcgatgattgagtaataatgtgtcacgcatcaccatgggtggcagtgtcagtgtgagcaatgacctgaatgaacaattgaaatgaaaaga

SEQ ID NO: 91277 - DNA, 319 bp, Zea mays
gagcatgcagtatcttttgaaaatacgtggttaagggtggcattaggactggtggtctgctgctgctgatttcaaactgtgcagacatttgttggaactgcctactggatggtacctgaggttattcaaaattctgaagggtacaatgagaaggcagatatctggtctttaggtatcactgccattgaaatggctaaaggtgaaccccctgtggcagatattcataccatgagagttcttttcatcatacctagtgaaaatactgcacagctcgatgagcatttgttgaaaccaatgcatgagtgtgtctcactatgtt

SEQ ID NO: 91278 - DNA, 513 bp, Zea mays
  unsure (1)..(513): unsure at all n locations
gagaaggagggtcnngtatgtgatgagggttaatgaaagctctaccggtccggaattcccgggtcgacgccacgcgtccggcaacatagaaagtggaatccagtagcaacaacagagcaacaatggcgaccaagatggtttccctccttatgctccttgctctttctgcatgtgttgctaacgcgacaattttccctcaatgctcacaagctcctatagcttcccttcttcccccataccttccatcaatgatagcttcagtatgtgaaaacccagctcttcagccctataggctccaacaagcaatcgcagcaagcaacatacctttatcacccttgttgtttcaacaatcgccagccctatctttggtgcagtcattggtacaaaccatcaaggcacagcagctgcagcaactcgtgctacctgtgatcaaccaagtagctctggcaaacctttctccctactctcagcaacaacaatttcttccattcaaccaaactgctacaactgacc

SEQ ID NO: 91279 - DNA, 400 bp, Zea mays
  unsure (1)..(400): unsure at all n locations
gagaccaacaagcaacatagaaagtggaatacagtagcaaaaatagagcaacagtgggggccaagatattttccatccttatgctccttgctctttctgcatgtgttgctaacgcgaccatttttcctcaatactcacaagctcctatagctgcccttcttcccccataccttccatcaatgaccgctttagtatgtgaaaacccagcccttcaaccctacaggatccagcaagcaatcgcaacaagcaacttacctttatcacacctgttctttcaacaatcgccagccctatctntggtgcagtcattggtacaaaccatcaaggcagaacagttgcagcaactcgtgctaccagtgatcagccaagtagctctggcaaacctttccccctactctca

SEQ ID NO: 91280 - DNA, 389 bp, Zea mays
cagaaactttactgatatcataaaaaatcctggtcctaagacaactttcgaagttggggtgttagctggtgattcatggaataaggtcaagagcgacaaatgaaaggaccacagcaatgccaatgacattaccaataaatccaaaataccggttccttctattgtagacccacagactaagcaacaggatcacaattccgattcagattctgaggaagagatggttgaaggcaacttgaccatccctgacagaaaggagagctatgaacttccatcgcaagctgatctcatacgtcaggcttttgctggtgatgatgttgaagctgaatttgcgaaagacaaaatggatgctataaatgatgagaatcctgaacctgaaaagcctgctc

SEQ ID NO: 91281 - DNA, 435 bp, Zea mays
cggacgcgtgggtcaatgtgtgaaaacccaattgttcaaccctacaggatccaacaggcaatcgcaacaggcatcttaccattatcacccttgttcctccaacaaccgtcagccctattacagcagttacctttggtccatttggtggcacaaaacatcagggcacaacaactacaacaacttgtgctagcaaaccttgctgcatactctcagcaacatcagtttcttccattcaaccaactggctgcattgaactctgctgcttatttgcaacaacaattaccattcagccagctagttgctgcctacccccagcaatttcttccattcaaccaactagcagcattgaactctgctgcttatttacagcagcaacaactactaccattcagccagctagctgatgtgagccctgctgccttcttgacacaacaa

SEQ ID NO: 91282 - DNA, 432 bp, Zea mays
cccacgcgtccggcaacatagaaagcacaatagtgtaccaacaatggcagccaaaatgttttgcctccttatgctccttggtctttctgcaagtgctgctacggcgaccattttcccacaatgctcacaagctcctatagcttcccttcttcccccgtacctctcaccagcggtgtcttcggtatgtgaaaacccaattcttcaaccctataggatccaacaggcaatcgcagctggcatcttacctttatcacccttgttcctccaacaatcatcagccctattacagcagttacctttggtgcatttattggcacaaaacatcagggcacaacaactacaacaacttgtgctagcaaaccttgctgcctactctcagcaacaacagtttcttccattcaaccaactagctgcattgaactctgcttctta

SEQ ID NO: 91283 - DNA, 522 bp, Zea mays
  unsure (1)..(522): unsure at all n locations
ngaggtagggaaaggcttgtagctacgacaacgaatatatagcatngctctaccggttcggaattcccgggtcgacgccacgcgtccgattattgagaccaactagcaacatacaaagcacaatagtgtaccaacaatggcgccgaaaatattctgcctccttatgctccttggtctttctgcaagtgctgctacggcgaccattttcccgcaatgctcgcaagctcctatagcttcccttcttcccccgtacctctcaccagcggtgtctacggtatgtgaaaacccaattcttcaaccctacaggatccaacaggcaatcacagctggcatcttacctttatcacccttgttcctccaacaatcatcagccctattacatcagttacctttggtgcatttattggcacataacatcaaggcacaaccactacaacaaccttggctaacaaaccttgcttgctactctcagcaacagcagtttcttccattcaaccaactagctgcattgaactctgcttn

SEQ ID NO: 91284 - DNA, 436 bp, Zea mays
attgagaccaacaagcaacatagaaagtggaatacagtagcaaaaatagagcaacaagggcgggcaagatattttccatccttatgctccttgctctttctgcatgtgttgctaacgcgaccatttttcctcaatactcacaagctcctatagctgcccttcttcccccataccttccatcaatgaccgctttagtatgtgaaaacccagcccttcaaccctacaggatccagcaagcaatcgcaacaagcaacttacctttatcacacctgttctttcaacaatcgccagccctatctttggtgcagtcattggtacaaaccatcagggcagaacagttgcagcaactcgtgctaccagtgatcagccaagtagctctggcaaacctttccccctactctcagcaacaacaatttcttccattcaaccaactgtc

SEQ ID NO: 91285 - DNA, 402 bp, Zea mays
tagcaacatagaaagcacaatagtgtaccaacaatggcagccaaaatattttgcctccgtatgctccttggtctttctgcaagtgctgctacggcgaccattttcccgcaatgctcgcaagctcctatagcttcccttcttcccccgtacctctcaccagcggtgtcttcggtatgtgaaaacccaattcttcaaccctacaggatccaacaggcaatcacagctggcatcttacctttatcacccttgttcctccaacaatcatcagccctattacatcagttacctttggtgcatttattggcacaaaacatcagggcacaacaactacaacaacttgtgctagcaaaccttgctgcctactctcagcaacaggcagttcttccattcaaccaactagct

SEQ ID NO: 91286 - DNA, 461 bp, Zea mays
ggaattcccggctggacccacgcgtccgtagcaacatagaaagcacaatagtgttctcaacaatggcagccaaaatattttgcctcgttatgctccttggtctttctgcaagtgctgctacggcgaccattttcccgcaatgctcgcaagctcctatagcttcccttcttcccccgtacctctcaccagcggtgtcttcggtatgtgaaaacccaattcttcaaccctacaggatccaacaggcaatcacagctggcatcttacctttatcacccttgttcctccaacaatcatcagccctattacatcagttacctttggtgcatttattggcacaaaacatcagggcacaacaactacaacaacttgtgctagcaaaccttgctgcctactctcagcaacagcagtttcttccattcaaccaactagctgcattgaactctgcttcttatttgcaacaa

SEQ ID NO: 91287 - DNA, 356 bp, Zea mays
aggagtcctgcctgttcgagggggtgctggacaacctgagtcgtctgagccagccagggggtctgtcaagcaaggtcgccaactaggtgctcctcgtcatcgaggcctacaagacgctgcgcgaccgcgcgccctacccggccagctacatgctcgcccagctcaccggctcctacgccttcgtcctcttcgacaagtccaccatctcactgctcgtcgcatccgaccccgatggcagggtgccgctcttctgacggatcaccgccgacggctgcgtagccttctacgacgacatcgacatgctcaaaggctcatgcaggatgtcgctcgagccgatcccgcaaggctgcttctac

SEQ ID NO: 91288 - DNA, 434 bp, Zea mays
agcaagcaacatagaaagtagaatccattagcaacaatagagcaacaatggggaccgggatattttccctccttatgctccttgctctttctacatgtgttgctaacgcgacaattttccctcaatgctcacaagctcctatagcttcccttcttcccccataccttccatcaattatagcttcagtatgtgaaaacccagctcttcaaccatataggcttcaacaagcaatcgcagcaagcaacatacctttatcgcccttgttgtttcaacaatcaccagccctatctttggtgcagtcattggtacaaaccatcagggcacaacagctgcagcaactcgtgctacctgtgatcaaccaagtagctctggcaaacctttctccctactctcagcaacaacaatttcttccattcaaccaactgtctacactg

SEQ ID NO: 91289 - DNA, 318 bp, Zea mays
caacaacctaacaacaatggctaccaagatattatccctccttgcgcttcttgcgctgtttgcgagcgcaacaaatgcgttcattattccacaatgctcacttgctccaagttccattattacacagttcctcccaccagttacttcaatgggcttcgaacacccagctgtgcaagcctataggctacaacaagcaattgcggcgagcgttttacaacaaccaatttcccagttgcaacaacaatccttggcacatctaacaatacaaaccatcgcaacgcaacagcaacaacaattcctaccagcacttgaccacct

SEQ ID NO: 91290 - DNA, 337 bp, Zea mays
gtgacaggagatgaaacattgcgggggctctcaataaaagcagctcaaagggcacttggaatggccaaagtaaaagctgaagatgttgaccttgttctcctttgtacatctactccagatgatttgtttggaggtgccactcaggtgctgacggacgtggggtgcacaaaggcttttggatttgatattacagctgcttgcagtgggtttatagttggcttaatcacagctactcgttttattcaaaggtggaggttttcagaatatcctagtagttggtgctgatgctctttcaaaatatgtggattggacagacagaggtacatgccttcctttt

SEQ ID NO: 91291 - DNA, 428 bp, Zea mays
gggtcttcagaccattagctttatctactccagagcgcagaagaacccgatcgacaccatgagggtgttgctcgttgccctcgctctcctggctctcgctgcgagcgccacctccacgcatacaagcggcggctgcggctgccagccaccgccgccggttcatctaccgccgccggtgcatctgccacctccggttcacctgccacctccggtgcatctcccaccgccggtccacctgccgccgccggtccacctgccaccgccggtccatgtgccgccgccggttcatctgccgccgccaccatgccactaccctactcaaccgccccggcctcagcctcatccccagccacacccatgcccgtgccaacagccgcatccaagcccgtgccagctgcagggaacctgcggcgttggcagcacccccg

SEQ ID NO: 91292 - DNA, 434 bp, Zea mays
ggaattcccgggcgctagggttcttgattttagccgccgccgctgctcatctcacatccctcgagaagacgcctgctcctcgccggtcgatacgatggccgtcttctccgacctccacaccgccgacggcctcaagtccctcgaggctcacctcgccggcaaaacctatgtgtctggtgactccattactaaggatgacattaaggtcttcgccgcggtgccgtcgaagcctggcgctgagtttcctaatgccgcccgctggtacgagaccgtctctgcggctgtagcctcaagattccctggtaaggctgttggtgtaaatctgcctgcgggatcagctcctgcggcagctgctcctgcggatgaagctgaagatgatgatgaccttgatctttttggtgatgaaactgaagaagacaagaaagcagctgatg

SEQ ID NO: 91293 - DNA, 257 bp, Zea mays
gtgctacctgtgatcaaccaagtagctctggcaaacctttctccctactctcagcaacgacaagttcttccattcaaccaactgtctacactgaaccctgctgcttatttgcagcaacaactattaccattcagccagctagctactgcctactctcagcaacaacaacttcttccatttaaccaattggccgcactgaaccccgctgcttatttgcagcagcaaatactactaccatttagccagctagctgcagc

SEQ ID NO: 91294 - DNA, 216 bp, Zea mays
ggaattcccgggtacacctacacctactgttgccctttgtccaacttgctttgacataccgagcggactcctaccaacaacacaggattggtggtgccctcttttagattgcttattagttgtaattcaataataaagtcttttggatgatgtatgtggccaaccagaaataagaagttacatttccagattttaatgtgaaaaagctaaccatat

SEQ ID NO: 91295 - DNA, 526 bp, Zea mays
  unsure (1)..(526): unsure at all n locations
agtgagggaaagggtctgngtatagacgtaggaggagttaattgtcatngctcgtaccggtccggaattcccgggtcgacgccacgcgtccggccattgccatctactgacctgtgacctccgcatttccaaacagcccgagcgagctggagctagcagagcggcaggcacctccctcctcaaggaacatggcccgcacgcagcagttggcagtagtggcgaccgccgtggtggccttggtgctgctggcggcggcggcgacctcggaggcggccatcagctgcgggcaggtggcgtcggccatcgcgccctgcatctcctacgcgcgcggccagggctcggggccctccgccggctgctgcagcggcgtcaggagcctcaacaacgccgtccgcaccaccgccgaccgccgcgccgcctgcaactgcctcaagaacgccgccgccggcgtcagcggcctcaacgccggcaacgccgncagcatccnctccaagtgcggcgtcagcatcccctacaccatcagcac

SEQ ID NO: 91296 - DNA, 426 bp, Zea mays
  unsure (1)..(426): unsure at all n locations
ccggacgctcgctctcgccggggacaactcaatcacgaggccaggatggccggctaggatcgcgcgatcaccgtgttctcacccgacggccacctcttccaggtcgagtacgccctcgaggccgtccgcaagggcaacgccgctgtcggcgtccgcggcgtcgacaccgtcgtcctcggcgtcgagaagaagtccacccccaagctccaggactccaggtccgtgcgcaagatcgcgagcctggacacccacatcgcgctggcgtgcgcggagctcaaggccgacgcgcgcgtgctcatcaaccgcgctcgcgtggagtgccagagccaccgcctcacagtcgaggaccccgtcaccgtcgagtacatcacgcgctacatcgncggcctgcagcagaagtacacgccagagcggagggtgcgcccc

SEQ ID NO: 91297 - DNA, 413 bp, Zea mays
attgaactctgctgcttatttgcaacaacaactaccattcagtcagctagctgctgggtacccccagcaatttcttccattcaaccaactggcagcattgaactctgctgcttatttacaacagcaacagctaccaccattcagccagctagctgatgtgagccctgttgccttcttgacacaacaacagttgttgccgttctacctgcacgctgcgcctaacgctggcaccctcttacaactgcaacaattgctgccattcaaccaacttgctttgacaaacccaacagcgttctaccaacaacccatcattggtggtgccctcttttagattgcttatgagttatacttcaataatgaagttttttggatgatgtttgtggcttcccagacataagaaagtacatttctag

SEQ ID NO: 91298 - DNA, 257 bp, Zea mays
gtcgtgcttccttcttgacacagcaacagttgctgcctttctacaagcagtttgcgggtaaccccgcaaccctcttacaactacaacaattgttgccctttgtccaacttgctttgacaaacccagcagcctcctaccaacaacacatcattggtggtgccctcttttagattgattattagttgtaattcaataataaagttttttggatgatgtatgtggccaaccagaaataagaagttacatttccagattct

SEQ ID NO: 91299 - DNA, 264 bp, Zea mays
attgagaccaacaagcaacatagaaagtggaatccagtagcaacaatagagcaacaatggcgaccaagatattttccctccttatgctccttgctctttctacatgtgttgctaacgcgacaattttccctcaatgctcacaagctcctatagcttcccttcttcccccataccttccatcaattatagcttcaatatgtgaaaacccagctcttcaaccatataggcttcaacaagcaatcgcaagcaagcaacataccttta

SEQ ID NO: 91300 - DNA, 432 bp, Zea mays
cccacgcgtccgcaacaagctgccccgcagcaacgaacacgaaccttggcagaacggagctgaagtagttcgttgtgaacccagtatggcaaacgcgccgaggatcctggccctcggcctgctgctagcgctcctgtgcgctgccgccggcccggccgccgcgcagaactgcggctgccagcctaacttctgctgcagcaagttcggctactgcggcacgaccgacgactactgcggcgacgggtgccagtcgggcccgtgccgctcgggcggcggcggcggcggcggcggaggcggaagcagtggcggtgcgaacgtggctaacgtggtcagcgacgcgttcttcaacggcatcaagaaccaggccgggagcgggtgcgagggcaagaacttctacacccggagcgcgttcctgagcgccgtcaacaagta

SEQ ID NO: 91301 - DNA, 456 bp, Zea mays
accggtccggaattcccgggcgttgatctagcccgctcgctatgggcaatgcacctacatacctgcaacaacagttgttgcaacaacagttgctgcaacaaattgtaccagctcttactcagctagctgtggcaaaccctgctgcctacttgcaacaactacttccattcaaccaactgactgtgtcgaactctgctgcgtacctacaacagcgacaacagttacttaatccactagcggtggctaacccattggtcgctgccttcctacagcagcaacaattgctgccatacaaccagttctctttgatgaaccctgccttgtcgtggcagcaacccatcgttggtggtgccatcttttagattacatatgagatgtactcgataatggtgccctcatagcggcatgtgtttcctaaaaataatcaatatattgattgagatttatctcgatata

SEQ ID NO: 91302 - DNA, 318 bp, Zea mays
  unsure (1)..(318): unsure at all n locations
atagaaagcacaatagtgtaccaacaatggcagccaaaatattttgcctccttatgcgccttggtctttctgcaagtgctgctacggcgaccattttcccgcaatgctcgcaagctcctatagcttcccttcttcccccgtacctctcaccagcggtgtcttcggtatgtgaaaacccaattcttcaaccctacaggatccaacaggcaatcgcagctggcatcttacctttatcacccttgttcctccaacaatcatcagccctattacaacagttacctttggtgcatttattggcacaaaacatcanggcacaac

SEQ ID NO: 91303 - DNA, 429 bp, Zea mays
cagccaagtagctctggcaaacctttctccctactctcagcaacaacaattggttccgttcaaccaactgtctacactgaaccctgctgcttatttgcagcaacaactattaccattcagccagctagctactgcctactctcagcaacaacaacttcttccatttaaccaattggccgcactgaaccccgctgcttatttgcagcagcaaatactactaccatttagccagctagctgcagcaaaccgtgcttccttcttgacacagcaacagttgctgcctttctaccagcagtttgcggctaaccccgcaaccctcttacaactacaacaattgttgccctttgtccaacttgctttgacagaccgagcggcctcctaccaacaacacatcattggtggtgccctcttttagattgcttattagtt

SEQ ID NO: 91304 - DNA, 376 bp, Zea mays
ggaattcccggcagccccaattgttcaaccgtacaggatccaacaggcaatcgcaacaggcatcttaccattatcacccttgttcgtccagcaaccgtcagccctattacagcagttacctttggtccatttggtggcacaaaacatcagggcacaacaactacaacaacttgtgctagcaaaccttgctgcatactctcagcaacatcagtttcttccattcaaccaactggctgcattgaactctgctgcttatttgcaacaacaattaccattcagccagctagttgctgcctacccccagcaatttcttccattcaaccaactagcagcattgaactcttgtggttaattacagcaacaacaactactacca

SEQ ID NO: 91305 - DNA, 360 bp, Zea mays
atcatcagccctattacagcagttacctttggtgcatttattggcacaaaacatcagggcacagcaactacaacaacttgtgctagcaaaccttgctgcctactctcagcaacagcagtttcttccattcaaccaactagctgcattgaactctgcttcttatttgcaacaacaacaactaccattcagccagctatctgctgcctacccccagcaatttcttccattcaaccaactgacagcattgaactctcctgcttatttacagcagcaacaactactaccattcagccagctagctggtgtgagccctgctaccttcttgacacaaccacagttgttgccgttctaccagcacgc

SEQ ID NO: 91306 - DNA, 423 bp, Zea mays
ctgcaaatgcatctgacgttatatgagctgcttcatataatttgaattgctgcattggtgccgacaatatattgcaaggtgtatctagtagttggaggagatatgcagtttgcacttgcattggacacgaactcaggtcctcaccagataagatcttgtgagggtgatgggattgacaggttggaaaaattaagtattgggggcagaaagcaggagaaagctttgagaaataggtgctttggtggtagagttgctgcaactacacaatgtattcttacctcagatgcttgtcctgaaactcttcattctcaaacacagtcctctaggaaaaattatgctgatgcaaaccgtgtatctgctatcattttgggcggaagcactggatctcagctctttcctctgacaagcacaagagctacgcct

SEQ ID NO: 91307 - DNA, 403 bp, Zea mays
cccacgcgtccgagcattcagaaacacaccaagcgaagcgcactagcaacaacctaacgacagtggctaccaagatattatccctccttgcgcttcttgcgctttttgcgagcgcaacaaatgcgtccattattccacaatgctcacttgctcctagttccattattccacagttcctcccaccagttacttcaatggccttcgaacacccagctgtgcaagcctataggctacaacaagcgattgcggcgagcgtcttacaacaaccaattgcccaattgcaacaacaatccttggcacatctaacaatacaaaccatcgcaacgcaacagcaacaacagttcctaccagcactgagccacctagccatggtgaaccctgtcgcctacttgcaacagcagct

SEQ ID NO: 91308 - DNA, 310 bp, Zea mays
ctaccagacaacagtcaccggcacgcagacgctcagcaagagccaacaggacatcgtggctcagcaagaaacaaggggggcaataatggcggagtaccagggcgagtatggacacccgtacccgcgcgtcgaccagtacgggaaccccgtgccgccggtggaccagtacggcaacccgctcccgagggagccggcgtccggtttcggcgccatcgctcccccctacagcgctggcgacagcgccgcggggcacgtggcggcgcctgtcgagtacggtgccgacgccaagtattcgcacgatggcacgggg

SEQ ID NO: 91309 - DNA, 340 bp, Zea mays
caacatacatagtgaagtacactagcaacatcttagcaccaatggcagccaagattggtgcgctccttgccctccttgctctttcagcaagtgttgctaccgcgactattattccacaatgctcacaacaatacctctctccagtgatagccgcgagatttgaatacccatctatacaatcctacaggctacaagaggccatcacagcaagcatcttacggtcgttagcattgaccgtccaacaaccatatgccctattgcaacaaccatccttagtgaatctgtatctccaaagaatcacagcacaacaactacaacaacggttgcttccaacaattaa

SEQ ID NO: 91310 - DNA, 436 bp, Zea mays
ggcgagaggcgtcataaggagaacgtttcttgccgacacgagcggcgggaactccggggagcttgccgtggaggttctctgcccggtgttccgcccggcggcgtttggctcatcgtcgtcacagccagcagcaaaggacatcagctccaccgtcgtcgtcaccaaggtcggagtgtggggtggagagggagggtcggcgcaggacatcgcgacgacggagccgccgaggcgtctgcagagcctgaccgtccgcgccggcgttgccgtggactccatcgagttcacctacagtaccgacacaggtggtcagacgcgcaccgctgggcgatggggtggacttggcggcaacgtccggaagctcgatcttggcgacgctgaatacgtcaaggaagtttctggaacgtacggcgcattcgaaggtgcgactacccttacc

SEQ ID NO: 91311 - DNA, 393 bp, Zea mays
cgctgtggttaatgcacctacatacctgcaacaacagttgctgcaacagatggtacgagctctgactcagctagctgtggcaaaccctgctgcctacttgcaacagctgcttccattcaaccaactgactgtgtcgaactctgctgcgtacctacaacagcgacaacagttacttaatccactagcggtggctaacccattggtcgctgccttcctacagcagcaacaattgctgccatacaaccagttctctttgatgaaccctgccttgttgtggcagcaacccatcgttggaggtgccatcttttagattacatatgagatgtactcgataatggtgccctcatagcggcatgtgtttcctagaaataatcaatatattgattgagattt

SEQ ID NO: 91312 - DNA, 427 bp, Zea mays
cagcctagcaattagctcatcgactccagattggagaactcgacaccatgaaggtgcggatcgttgcccttgctctcctggcgctcgctgcgagcgccgcctccagtacaagcggcggctgtggctgccagacaccaccgtttcatctaccgcctccgttctatatgccgcctccgttctatctgccgccgcagcagcagccgcagccatggcaataccccactcaaccaccgcagctaagcccgtgccagcagttcggatcctgcggcgtcggcagcgtcggcagcccgttcctgggccagtgcgtcgagttcctgaggcaccagtgcagcccggcggcgacgccctacggctcgccacagtgccaggcgctgcagcagcagtgctgccaccagatcatgcaagtggagccgctgcaccggtacca

SEQ ID NO: 91313 - DNA, 424 bp, Zea mays
aagatattagccctccttgcgcttcttgccctttttgtgagcgcaacaaatgcgttcgttatggcacaatgctcacttgctcctagtgccattattccacagttcctcccaccagttacttcaatgggcttcgaacacctagctgtgcaagccaacatgcaacaacaagcgcttgcggcgagcgtcttacaacaaccaattgcccaattgcaacaacaatccttgccacatctaacaatacaagccatcacaacgcaacagcaacaacagttcctaccagcactgagccacctagccatggtgaaccctgccgcctacttgcaagagcagctgcttgcatccaacccacttgctctggcgaacgtagttgcaaaccagcaacaacaacagctacaacagtttctgccaacgctcagtcaactag

SEQ ID NO: 91314 - DNA, 426 bp, Zea mays
gaccaactagcaacatagaaagcacaatagtgtaccaacaatggcagctaaaatattgtgcctgcttatgctccttggtctttctgcaagtgctgctacggcgaccattttcccacaatgctcacaagctcctatagcttcccttcttcccccgtacctctcaccaacggtgtcttcggtatgtgaaaacccaattcttcaaccctacaggatccaacaggcaatcgcagctggcatcttacctttatcacccttgttcctccaacaatcatcagccctattacagcagttacctttggtgcatttattggcacaaaacatcagggcacaacaactacaacaacttgtgctagcaaaccttgctgcctactctcagcaacagcagtttcttccattcaaccaactagctgcattgaactctgcttc

SEQ ID NO: 91315 - DNA, 423 bp, Zea mays
  unsure (1)..(423): unsure at all n locations
ctccttggtctttctgcaagtgctgctaccgcaaccattttcccacaatgctcacaagctcctatagcttcctttgttgccccatacctctcaccagcggtgtcttcagtatgtgaaaacccaattcttcaaccctacaggatccaacaggcaatcgcagcaggcatcttacctttatcacccttgttcctccaacaaccgtcagccctattacagcagttacctttggtgcatttgttggcacaaaacatcaaggcacaacaactacaacaacttgtgctaggaaaccttgctgcctactctcagcaacagcagtttcttccattcaaccaactggctgcattgaactctgctgcttatttgcaacaacaactaccattcagtcagctagctgctgcctacccncagcaatttcttccattc

SEQ ID NO: 91316 - DNA, 435 bp, Zea mays
cctgccacctccggtgcatctcccaccgccggtccacctgccgccgccggggcaccgggcaccgccggtccatgtgccgccgccggttcatctgccgccgccaccatgccactaccctactcaaccgccccggcctcagcctcatccccagccacacccatgcccgtgccaacagccgcatccaagcccgtgccagctgcagggaacctgcggcgttggcagcaccccgatcctgggccagtgcgtcgagtttctgaggcatcagtgcagcccgacggcgacgccctactgctcgcctcagtgccagtcgttgcggcagcagtgttgccagcagctcaggcaggtggagccgcagcaccggtaccaggcgatcttcggcttggtcctccagtccatcctgcagcagcagccgcaaagcggccaggtcgcggtgct

SEQ ID NO: 91317 - DNA, 420 bp, Zea mays
  unsure (1)..(420): unsure at all n locations
tcccggttcgacgccacgcgtccgcagcggatcaagggcctgtccatcagccgcgacctgctggaggtgggcggccacgcgcgtcaagaccaacatcaccacgctggggcccctggtgctgcccttctccgagcagctgctcttcttcgcgggcgtgctgttccgccacctgttcccgtccaaggcctccacgccggcgccgccgaccaccccaggggacgcctcggccgccgcgccctacatcccggacttcaagcgcgcgttcgagcacttctgcatgcacgcggccagccgcgacgtgctggagcacctgcagagcaacctgngcctgcgcgacgccgacctggaggcctcccgcgccgcgctgcaccgcttcggcaacacctcaagcagcagcatctggtacgagctggcgtacct

SEQ ID NO: 91318 - DNA, 514 bp, Zea mays
ggaggaagggctttgtcatgatgggggttatgcatgctctaccggtccggaattcccgggtcgacgccacgcgtccgattgagaccaactagcaacatagaaagcacaatagtgtaccaacaatggcagccaaagtattttgcttccttatgctccttggtctttctgcaagtgttgctaccgcaaccattttcccacaatgctcacaagctcctatagcttcccttcttcccccatacctctcaccagcggtgtcttcaatgtgtgaaaccccaattgttcaaccctacaggatccaacaggcaatcgcaacaggcatcttaccattatcacccttgttcctccaacaaccgtcagccctattacagcagttacctttggtccatttggtggcacaaaacatcagggcacaacaactacaacaacttgtgctagcaaaccttgctgcatactctcagcaacatcagtttcttccattcaaccaactggctgcattgaactctgctgcttattt

SEQ ID NO: 91319 - DNA, 437 bp, Zea mays
cagcaagcaacatagaaagaggaatccaatagcaacaatatagcaacaatggggacggggacattttcccttcttatgctccttgctctttctacatgtgttgctaacgcgacaattttaccttactgctcacaagctcctatagcttcccttcttcctccataccttccatcaattatagctccaatatgtgaaaacccagctcttcaaccatataggcttcaacaagcaatcgcagcaagcaacatacctttatcggccttggtggttcaacaatcgccagccctatctttggtgcagtcattggtacaaaccatcagggcacaacagctgcagcaactcgtgctacctgtgatcaaccaagtagctctggcaaaccttactccctactctcagcaacaacaatttcttgcattcaaccaactttctacactgaa

SEQ ID NO: 91320 - DNA, 522 bp, Zea mays
  unsure (1)..(522): unsure at all n locations
ggttagttgagggagttcatngctcgtagtagaagcacttcgtnattgctcgtaccggtccggaattcccgggtcgacgccacgcgtccgattgagaccaactagcaacatagaaagcacaatagtgtaccaacaatggcagccagggtattttgcctccttatgctccttggtctttctgcaagtgctgctacggcgaccattttcccgcaatgctcgcaagctcctatagcttcccttcttcccccgtacctctcaccagcggtgtcttcggtatgtgaaaacccaattcttcaaccctacaggatccaacaggcaatcacagctggcatcttacctttatcacccttgttcctccaacaatcatcagccctattacatcagttacctttggtgcatttattggcacaaaacatcagggcacaacaactacaacaacttgtgctagcaaaccttgctgcctactctcagcaacagcagtttcttccattcaaccaactagctgcattgaactctgcttct

SEQ ID NO: 91321 - DNA, 408 bp, Zea mays
tccattcaaccaactaggttcattgaactctgctggttatgtgcaacaacaacaactaccattcagccagctacctgctgcctacccccagcaatttcttccattcaaccaactagcagcattgaactctcctgcttatttacagcagcaacaactactaccattcagccagctagctggtgtgagccctgctaccttcttgacacaaccacagttgttgccgttctaccagcacgttgcgcctaacgctggcaccctcttacaactgcaacaattgctgccattcaaccaacttgctttgacaaacccagcagtgttctaccaacaacccatcattggtggtgccctcttttagatttcttatgagttatagttcaataataaagttttttatctgatgtttgtggc

SEQ ID NO: 91322 - DNA, 360 bp, Zea mays
tatgctgggtgtggtcttaccacatatgctgctacctatacaattttccctcaatgctaacaagctcctatagcttcccttattcccccataccttctatcaatcatagcttaagtatgtgaaaacccaattcttaacccctataagatccaacctgaaatcaaagcaagcaccatacctttaacacctttgtactttaaaaaacctcgagccctataatttaagcacccttgggtacaatccatttccacacattatctacaaaaaatcatgctccctctgatcaaccattcacatctgtcaaccctctctacctactatgagcacccatctttttcttgcatccaaaaaactgtctac

SEQ ID NO: 91323 - DNA, 391 bp, Zea mays
acacccagcgcacaagccaaagtattgaagcaaacaaggacataagtagaagacggtaagagtgcatgcatgaaacattaattctactcatgatcgaccacgacacacaacaattgagcacgcatgcaagctgtttttttattcagaagatcccgaggagcggggacgacgacgacgtcctgctgctcctgcatgcatgtagtcctctacgcacgacggcggtcgccgcagctcggcgcgggctcctcctcctcctcggcggccgggccggcgacgaggtgctcgtagacgacgccggagaggccggcgccgaccatgggccccacccagtacacccattggtgtctccagcgacgggagcccacgacggcgggcccgaacgcgcgcgccg

SEQ ID NO: 91324 - DNA, 251 bp, Zea mays
attgagaccaactagcaacatagaaagcacaatagtgtaccaacaatggcagccaaagattttgcctccttatgctccgtggtctttctgcaagtgctgctacggcgaccattttcccgcaatgctcgcaagctcctatagcttcccttcttcccccgtacctctcaccagcggtgtcttcggtatgtgaaaacccaattcttcaaccctacaggatccaacaggcaatcacagctggcatcttaccttta

SEQ ID NO: 91325 - DNA, 533 bp, Zea mays
  unsure (1)..(533): unsure at all n locations
ngtggttgtggagtcaagtgggtctgagataagcaagggctgggagacagtatcgctcgtcggaattcccgncgggcggctggagccacgcgtccgtccgtggccaggaggttcccaagcttgtaatggatgaggtctatgacatggagctctacgagtggaccaaggtcgacatctctgatgaggcccagaaggagcgtgtcaatgccatgatcgaggaccaggaaccctttgagggcgaggccttgcttgacgcgaaatgcttcaagtgagtgtgctttatccagagctgtttagccctcgaattggatgtctatgttgatctggtatatcttgctatgaactggttaaggtttgtgctggtttgagaatttttgtttaccttgtcatcattcaagtgtttcgccgtaacaattttggtcacaaaaatataccaacaacctaacattaaagaatagggcggtcgctctagaggatccaagcttacgtacgcgtgcatgcgacgtcatagctctgctatagtgtcacctaaa

SEQ ID NO: 91326 - DNA, 436 bp, Zea mays
gaatacagtagcaaaaatagagcaacaatggcggccaagatattttccatccttatggtccttgctctttctgcatgtgttgctaacgcgaccatttttcctcaatactcacaagctcctatagctgcccttcttcccccataccttccatcaatgaccgctttagtatgtgaaaacccagcccttcaaccctacaggatccagcaagcaatcgcaacaagcaacttacctttatcacacctgttctttcaacaatcgccagccctatctttggtgcagtcattggtacaaaccatcagggcagaacagttgcagcaactcgtgctaccagtgatcagccaagtagctctggcaaacctttccccctactctcagcaacaacaatttcttccattcaaccaactgtctatactgaaccctgctgcttatttgcagc

SEQ ID NO: 91327 - DNA, 456 bp, Zea mays
accggttcggaattcccgggatgagcaacacgtacaaacacaccaagcgaagcacattagcaacaacctaacaacaatggctaccaggatatgatccctgcttgcgctgcttgcgctttttgcgagcgcaacaaatgcgttcattattccacaatgctcacttgctccaagttccattattacacagttcctcccaccagttacttcaatgggcttcgaacacccagctgtgcaagcctataggctacaacaagcaattgctgagagcgtcttacaacaaccaatttcccagttgcaacaacaatccttggcacatctaacaatacaaaccatcgcaacgcaacagcaacaacaattcctaccagcactgagccacctagccatggtgaaccctgccgcctacttgcaacagcagctgcttgcatcaaacccacttgctctggcaaacgtagttgc

SEQ ID NO: 91328 - DNA, 415 bp, Zea mays
  unsure (1)..(415): unsure at all n locations
gcattattccacagttcctccctccagttacttcaatgggcttcgaacacccagctgtgcaagcctacaggctacaacaagcgcttgcggcgagcgtcttacaacaaccaattgcccaattacaacaacaatccttggcacatctaaccatacaaaccatcgcaacgcaacagcaacaacaatttctaccagcactgagccaactagctgtggtgaaccctgtcgcctacttgcaacagcagttgcttgcatccaacccacttgctctggcaaacatagttgcataccaacaacaacaacaattgcaacagtttctaccagcgctcagtcaactagccatggtgaaccctgccgnctacctacaacagcaacaactgatttcatctagccctctcgctgnggttaatgcacctac

SEQ ID NO: 91329 - DNA, 338 bp, Zea mays
cacaccaagcgaagcacattagcaacatcctaacaacaatggctaccaagatattatcgctcggtgcgcttcttgcgctgtttgcgagcgcaacaaatgcgttcattattccacaatgctcacttgctccaagttccattattacacagttcctcccaccagttacttcaatgggcttcgaacacccagctgtgcaagcctataggctacaacaagcaattgcggcgagcgtcttacaacaaccaattttccagttgcaacaacaatccttggcacatctaacaatacaaaccatcgcaacgcaacagcatcaacaattcctaccagcactgagccac

SEQ ID NO: 91330 - DNA, 413 bp, Zea mays
cggctggacccacgcgtccggagaccaacaagcaacatagaaagtggaatacagtagcaacaatagagcaacaatggcggccgatatattttccatccttatgctccttgctctttctgcatgtgttgctaacgcgaccatttttcctcaatactcacaagctcctatagctgcccttcttcccccataccttccatcaatgaccgcttcagtttgtgaaaacccagcccttcaaccctacaggctccaacaagcaatcgcaacaagcaacttacctttatcacccctgttctttcaacaatcgccagccctatctttggtgcagtcattggtacaaaccatcagggcacaacagctgcaacaactcgtgctaccagtgatcagccaagtagctctggcaaacctttctccct

SEQ ID NO: 91331 - DNA, 435 bp, Zea mays
gtggcaacaatagagcaacaatggcgaccaagatactttccctccttatgctccttgctctttctgcatgtgttgctaacgcgacaattttccctcaatgctcacaagctcctatagcttcccttcttcccccataccttccatcaatgatagcttcagtatgtgaaaacccagctcttcaaccctataggctccaacaagcaatcgcagcaagcaacatacctttatcacccttgtttcaacaatcgccagccctatctttggtgcagtcattggtacaaaccatcaaggcacagcagctgcagcaactcgtgctacctgtgatcaaccaagtagctctggcaaacctttctccctactatcagcaacaacaatttcttccattcaaccaactatctacactgaaccctgctgctaattgcagcaacaactata

SEQ ID NO: 91332 - DNA, 447 bp, Zea mays
  unsure (1)..(447): unsure at all n locations
gaattcccagctggacccacgcgtccgccagactagcaacatagaaagcacaatagtgtaccaacaatggcagctaaaatattttgcctccttatgctccttggtctttctgcaagtgctgctacggcgaccattttcccacaatgctcacaagctcctatagcttcccttcttcccccgtacctctcaccaacggtgtcttcggtatgtgaaaacccaattcttcaaccctacaggatccaacaggcaatcgcaactggcattttacctttatcacccttgttccttcaacaatcatcaagcctattacagcagttaactttggtgcattaattgcacaaaacatcanggcacaacaactacaacaacttgtgctagcaaaccttgctgcctactctcagcaacagcagtttcttccattcaaccaactagctgcattgaactctg

SEQ ID NO: 91333 - DNA, 467 bp, Zea mays
ggaattcccggctcgacccaggcgtcccgtacgcaggatccaacaggcaatcgcagctggcatcttacctttatcacccttgttcgtccagcaatcatcagccctattacaacagttacctttggtgcatttattggcacaaaacatcagggcacaacaactacaacaacttgtgctagcaaaccttgctgcctactctcagcaacagcagtttcttccattcaaccaactaggttcattgaactctgcttcttatttgcaacaacaacaactaccattcagccagctacctgctgcctacccccagcaatttcttccattcaaccaactagcagcattgaactctcctgcttatttacagcagcaacaactactaccattcagccagctagctggtgtgagccctgctaccttcttgacacaaccacagttgttgccgttctaccagcacgttgcgcctaacgctg

SEQ ID NO: 91334 - DNA, 424 bp, Zea mays
ggcacaataaagaagtacgagttcgatgtgcaaaacaaggtttcagtaaactggctcgtaaaccttggcccttcactgggcattgtccgcgttcgaggcattgggctaatacatacagaactaatgtctggaatcccagctatcttctcccactttgtcaccaatctgcctgcgttccaccaggtactggtattcctatgtgtcaaatcagttcctgtgccacatgtgcaaccggaggaacgatttctggtgggtcgcattggtccaaaagagtataggctatacagggtcattgtcagatatggttatcgcgatgtgcagaatgatgacctgcagttcgagaaggagctagtcagcaacattgcaaagttcatccgcagcaatggggattatgacaagaatggcttcctggaggacacagata

SEQ ID NO: 91335 - DNA, 355 bp, Zea mays
cagcaagcaacatagaaagaggtatccattcgcaacaatatagcaacaatggggaccgggatactttcccttcttatgctccttgctctttctgcatgtgttgctaacgcgactattgtccctcaatgctcacaagctactatagcttcccttctttccccataccttccatcaatgatagcttcagtatgtgaaaacccagctattcaaccctataggctacaacaagcaatcgcagcacgcaacataccatcatcacccttgttacaacaatcgacagccctatctctggtgcagtcattggtacaaaccatcaaggcacagccactgcatgcacttgtgctacctgagatca

SEQ ID NO: 91336 - DNA, 464 bp, Zea mays
gaattcccggggcaacatagaaagcacaatagtgtaccaacaatggcagccaaaatattttgcttccttatgctccttggtctttctgcaagtgctgctaccgcaaccattttgccacaatgctcacaagctcctatagcttcctttcttcccccatacctctcaccagcggtgtcttcagtatgtgaaaacccaattcttcaaccctacaggatccaacaggcaatcgcagcaggcatcttacctttatcacccttgttcctccaacaaccgtcagccctattacagcagttacctttggtgcatttgttggcacaaaacatcaaggcacaacaactacaacaacttgtgctaggaaaccttgctgcctactctcagcaacagcagtttcttccattcaaccaactggctgcattgaactctgctgcttatttgcaacaacaactaccattcagtcagctagc

SEQ ID NO: 91337 - DNA, 398 bp, Zea mays
ccgggtcgaccgacgcgtacgcataaaatagctgcacttactatgagtagatctgatacgtccctttttaaagaagctttagggagcttggcacaagattctggtcttcatcctttagttccttacttttcctacttcattgcagacgaggttacccggagtttgggtgatcttcctgttttacttgctctaatgagagtcgtccaaagtcttctccgtaatccacatattcatattgcaccttatttgcaccagctgatgccatcaatgatcacttgcattgttgcgaaaaggctacggcataagctctcagataaccactgggaactttaggacttctctgacaatttggatgccttggtatgtcaaacgcttggtcatgtctatcacacctttaa

SEQ ID NO: 91338 - DNA, 355 bp, Zea mays
ggacgtcagcctagcaattagctcatcgactccagattggagaactcgacaccatgagggtgctgatcgttgcccttgctctcctggcgctcgctgcgagcgccgtctccagtacaagcggcggctgtggctgccagacaccaccgtttcatctaccgcctacgttctatatgccgcctccgttctatctgccgccgcagcagcagccgcagccatggcaataccccactcaaccaccgcagctaagcccgtgccagcagttcggatcctgcggcgtcggcagcgtcggcagcccgttcctgggccagtgcgtcgagttcctgaggcaccagtgcagcccggcggcgacgcccta

SEQ ID NO: 91339 - DNA, 406 bp, Zea mays
gtgaaaacccaattcttcaaccctacaggatccaacaggcaatcgcagctggcatctgacctgtatcacccttgttcctgcaacaatcatcagccctattacaacagttacctttggtgcatttattggcacaaaacatcagggcacaacaactacaacaacttgtgctagcaaaccttgctgcctactctcagcaacagcagtttcttccattcaaccaactaggttcattgaactctgcttcttatttgcaacaacaacaactaccattcagccagctacctgctgcctacccccagcaatttcttccattcaaccaactagcagcattgaactctcctgcttatttacagcagcaacaactactaccattcagccagctagctggtgtgagccctgctacctt

SEQ ID NO: 91340 - DNA, 402 bp, Zea mays
ctcagcaacaacagtttcttccattcaaccaactagctgcattgaactctgcttctggtttgcaacaacaacaactaccattcagccagctatctgctgcctacccccagcaatttcttccattcaaccaactgacagctttgaactctcctgcttatttacagcagcaacaactactaccattcagccagctagctggtgtgagccctgctaccttcttgacacaaccacaattgttgccgttctaccagcacgctgcgcctaacgctggcaccctcttacaactgcaacaattgctgccattcaaccaacttgctttgacaaacccaacagcattctaccaacaacccatcattggtggtgccctcttttagatttcttatgagctatagttcaataata

SEQ ID NO: 91341 - DNA, 350 bp, Zea mays
aggtggtctcatgggacactttgccgtctacaagacgtacgaggtgctggccgcacagttcttttggccccagatgcgccgtgatgtcgagcgccttgttgcacgctgcactacttgtcagaaagccaagtcacgattgagcaaccatggtttgtatatgcctttgcctatccctacgttcccttggcttgatatttctatggacttcgttttgggtttgcctagaactaagaaggggagagatagcattattgtggttgttgatagattctccaaaatggctcattttataccctgtcataaaactgatgatgctagcaaggttgctgaattgttctttcgagagaata

SEQ ID NO: 91342 - DNA, 409 bp, Zea mays
gggcttcgcacgccggctcttggtacaccaacgatgccaggaagctggaagaggaacgcaatggttggctgggggcagccggtctaaccaagtctcctgatgttagggcagtaattgcaccccacgctggttattcatactcgggccgatgtgcagcttatgcttttggcaacatcgatccaactaacatttctcgggtgtttctgcttggcccttctcatcactactacactccaaaatgtgctttaaccagggcttctgtctactgtaccccaatcggggatttgccagtagaccaggaagtcattgaggaactcagtgctactggaaagtttgaatttatggaccttaatgtggatgaagctgaacatagcatggaaatgcatttgcccctacttgctaaagtatt

SEQ ID NO: 91343 - DNA, 405 bp, Zea mays
ggaattcccgggtcgacgccacgcgtccgggacgtgagcctagcaattagctcatcgactccagattggagaactcgacaccatgaaggtgcggatcggtgcccttgctctcctggcgctcgctgcgagcgccgcctccagtacaagcggcggctgtggctgccagacaccaccgtttcatctaccgccttcgttctatatgccgcctgcgttctatctgccgccgcagcagcagccgcagccatggcaataccccactcaaccaccgcagctaagcccgtgccagcagttcggatcctgcggcgtcggcagcgtcggcagcccgttcctgggccagtgcgtcgagttcctgaggcaccagtgcaacccggcggcgacgccctacggatcgccacagtgccaagc

SEQ ID NO: 91344 - DNA, 440 bp, Zea mays
catagaaagcacaatagtgtaccaacaatggcagccaaaatattttgcttccttatgctccttggtctttgtgcaagtgttgctaccgcaaccattttcccacaatgctcacaagctcctatagcttcccttcttcccccatacctctcaccagcggtgtcttcaatgtgtgaaaccccaattgttcaaccctacaggatccaacaggcaatcgcaacaggcatcttaccattatcacccttgttcctccaacaaccgtcagccctattacagcagttacctttggtccatttggtggcacaaaacatcagggcacaacaactacaacaacttgtgctagcaaaccttgctgcatactctcagcaacatcagtttcttccattcaaccaactggctgcattgaactctgctgcttatttgcaacaacaattaccattcag

SEQ ID NO: 91345 - DNA, 420 bp, Zea mays
gctgcctactctcagcaacagcagtttcttccattcaaccaactagctgcattgaacgctgcgtcttatttgcaacagcgacaactaccattcagccagctacctgttgcctacccccaacaatttcttccattcaaccaactggcagcattgaactctcctgcttatttacagcagcaacaactactaccattcagccagctagctggtgtgagccctgctaccttcttgacacaaccacagttgttgccgttctaccagcacgctgcgcctaacgctggcaccctcttacaactgcaacaattgctgccattcaaccaacttgctttgacaaacctagcagtgttctaccaacaacccatcattggtggtgccctctttttagatttcttatgagttatagttcaataataaagtttt

SEQ ID NO: 91346 - DNA, 408 bp, Zea mays
ccctatctttggtgcagtcattggtacaaaccatcagggcacaacagctgcagcaacgggtgctacctctgatcaaccaagtagctctggcaaacctttctccctactctcagcaacaacaatttcttccattcaaccaactgtctacactgaaccctgctgcttatttgcagcaacaactattaccatttagccagctagctactgcctactctcagcaacaacaacttcttccatttaaccaattggccgcactgaaccccgctgcttatttgcagcagcaaatactactaccatttagccagctagctgcagcaaaccgtgcttccttcttgacacagcaacagttgctgcctttctaccagcagtttgcggctaaccccgcaaccctcttacaactacaacaat

SEQ ID NO: 91347 - DNA, 344 bp, Zea mays
caactagcaacatagaaagcacaatagtgtaccaacaatggcagccaaaatattttgcgctccttatgctccttggtctttctgcaagtgctgctacggcgaccattttcccgcaatgctcgcaagctcctatagcttcccttcttcccccgtacctctcaccagcggtgtcttcggtatgtgaaaacccaattcttcaaccctacaggatccaacaggcaatcacagctggcatcttacctttatcacccttgttcctccaacaatcatcagccctattacatcaattacctttggtgcatttattggcacaaaacatcagggcacaacaactaccacaactt

SEQ ID NO: 91348 - DNA, 428 bp, Zea mays
cccacgcgtccggcatacgctccactccgtagtgccttccagcgcgacgaaatcatcgagttcgtgaaggaggcagggcgtggcggaaagggaaaccttcctctgaacgatgcacctacagtagtcgcgtccgagccgtgggacggcaaagatggagaggtcattgaggaggatgaattctccctcgacgagctcatgggcgacagctcctcagcaaacgatgagttgtgattctgatgattcttggactgatctgcgtgtcgattagccagactgtaaatctgaggaactctgttttgaaaaatcattccttgagtgtcataattttccaggctatggatgctagaatggattaaggagaactgatgtgatagacattttctttaacgtttttttttatccctggagttaaggcaatttggaacggt

SEQ ID NO: 91349 - DNA, 373 bp, Zea mays
  unsure (1)..(373): unsure at all n locations
cccacgcgtccgcgcccgtctacgaccacattatcgtcccgttcgcgcgccgcgtgacggggacgcgagacgggcatcacgcacctgcagcgcatcggcacggggctggtgatgtccgtcgtcgcgatggccgtggccgccgccgtcgaggtgaagcgcaaggacgtggcgtccagcagcgggatgctggaggactccgggaagccgctgcccatcaccttcttctggatcgcgttccagtacctgttcctggggtccgcggacctgttcacgctggcggggctgctcgagtttttcttcagcgaagcgccgncgcggatgaagtcgctggcgacgtcgctgtcgtgggcgtcgctggcgctggggtattacc

SEQ ID NO: 91350 - DNA, 323 bp, Zea mays
tgcgctgtttgcgagcgcaacaaatgcgttcattattccacaatgctcacttgctccaagttccagtattgcacagttcctgccaccagttacttcaatgggcttcgaacacccagctgtgcaagcctataggctacaacaagcaattgcggcgagcgtcttacaacaaccaatttcccagttgcaacaacaatccttggcacatctaacaatacaaaccatcgcaacgcaacagcaacaacaatttctaccagcactgagccacctagccatggtgaacccttgcgcctacttgcaacagcagttgcttgcatcaaacccac

SEQ ID NO: 91351 - DNA, 63 bp, Zea mays
gaattctccgggtcgacgccacgcgtctcgtcatgatcgcgccacagctggcgggctcggcgt

SEQ ID NO: 91352 - DNA, 374 bp, Zea mays
agaaagcacaatagtgtaccaacaatggcagccaaaatattttgcctccttatgctcgttgggctttctgcaagtgctgctacggcgaccattttcccacaatgctcacaagctcctatagcttcccttcttcccccgtacctctcaccagcggtgtcttcggtatgtgaaaacccaattcttcaaccctataggatccaacaggcaatcgcagctggcatcttacctttatcacccttgttcctccaacaatcatcagccctattacagcagttacctttggtgcatttattggcacaaaacatcagggcacaacaactacaacaacttgtgctagcaaaccttgctgcctactctcagcaacaacagtttct

SEQ ID NO: 91353 - DNA, 439 bp, Zea mays
accacgcgtacgcaaaaacacaccaagcgaagcgcactagcaacgacctatcaccaagggcgaccaagatattagccctgcttgcgcttcttgcccttttagtgagcgcaacatatgcagttcattattccacagtgctcacttgctactagtgccattattccacagttgctaccaccagttacttcaatgggctttgaacatccagccgtgcaagcctacaggctacaactagcgcttgcggctagcgccttacaacaaccaattgcccaattgcaacaacaatccttggcacatataaccctacaaaccattgcaacgcaacaacaacaacatcaacagattctgccatcactgatccacctagccgtggtgaaccctgtcacctacttgcaacatcagctgcttgcattcaaccccacttgctctggcgaacgta

SEQ ID NO: 91354 - DNA, 374 bp, Zea mays
aattcccggctggacccacgcgtccgaccacgcgtactcataaacacaccatgttaagctcactatcaaccatctatcaccaagtgctgctaacatattagcgcttgcctgtgcgctatctatgcccttcatagtgagtcacaacactatgcatttcattattccacactgctcacttgctactagtgccattattccacagttactaccaccagttacttcaatgatcttataacatccatccttgcaagcctatatgctactacttacgcttgctgctagcaccttacatcaaccaattacacaattgcaacaacaatccttggcacatataaccctacaaaccattgcaactcaccaacaacatcttcaac

SEQ ID NO: 91355 - DNA, 412 bp, Zea mays
accggttcggaattcccgggttgacaaacacatcacgcgaagcgcactatcaacaacctaacatcaatggctaccaagatattatccgtgcttgcgcttcttgcgctttttgcgagcgcaacaaatgcgttcattattccacaatgctcacttgctactagttccattattccacagttccttccaccagttacttcaatggccttcgaacacccagctgtgcaagcctataggctacaacaagcgattgcagcgtgcgtcttacaacaaccaattgcacaattgctacaacaatcctcggcacatctaacaatacagaccatagcaacgcaacagcaacaacagttgctaccagtactgagccacctagccatggtgaaacctgtccactacttgcaacatgaactgcttg

SEQ ID NO: 91356 - DNA, 406 bp, Zea mays
agcaacatagaaagcacaatattgtaccaataatggcagccaaaatattttgggtcagtatgctccttggtctttctgcaagtgctgctacggcgagcattttcccgcaatgctcacaagctcctatagcttcccttcttcccccatacctctcaccagcgatgtcttcagtatgtgaaaatccaattcttctaccctacaggatccaacaggcaatcgcagcaggcatcttacctttatcacccttgttcctccaacaatcatcagccctattacagcagttacctttggtgcatttattggcacaaaacatcagggcacaacaactacaacaactcgtgctagcaaaccttgctgcctactctcagcaacagcagttacctttggtgcatttgttggcacaaaa

SEQ ID NO: 91357 - DNA, 384 bp, Zea mays
atcaacagcgacgtcgagaacttcgagcacaagttcgtgctgaaggacaagaagaaggcgatcatcttctcgatggcgcgtctcgaccgcgtgaagaacatgacaggcctggtggagatgtacggcaagaacgcgcgcctgagggagctggcgaacctcgtgatcgtcgccggagaccacggcaaggagttcaaggacagggaggagcaggcggagttcaagaagatgtacagcctcatcgacgagtacaagttgaagggccatatccggtggatctcggcgcagatgaaccgcgtgcgcaacggtgagctgtaccgttacatttgcgataccaagggcgcattcgtgcagcctgcgttctacgaaacgttcggcctgactgtg

SEQ ID NO: 91358 - DNA, 343 bp, Zea mays
gtgaggcgtcctccctggcatcaaggtcgacaagggcaccattgaggttgctggcaccgacaaggagacgaccacccagggccacgatgacctcggcaagcgctgcgctaagtactacgaggccggtgcccgctttgccaagtggcgtgctgttctcaagattggccccaacgagccgtcacagcttgccattgacctgaatgctcacggtctggctcgctacgccatcatctgccaggagaacggtctggtgccaattgttgagcctgagatccttggtgatggccctcatgacattgatcggtgcgcttacgtcactgagacagtccttgctggctggtac

SEQ ID NO: 91359 - DNA, 463 bp, Zea mays
gaattcccgggtcgacgccacgcgtccgaaaatattttgcctccttatgctccttggtctttctgcaagtgctgctacggcgaccattttcgggcaaggctcgcaagctcctatagcttcccttcttcccccgtacctatcaccagcggtgtcttcggcatgtgaaaacccaattcttcaaccctacaggatccaacaggcaatcacagctggcatcttacctttatcacccttgttcctccaacaatcatcagccctattacatcaattacctttggtgcatttattggcacaaaacatcagggcacaacaactacaacaacttgtgctagcaaaccttgctgactactatcaacaacagcagcttcttccattcaaccaactagctgcattgaactctgcttgttatttgcaacaacaacaactaccattcatccagctacctgctgtctacacccagcaa

SEQ ID NO: 91360 - DNA, 423 bp, Zea mays
gaattcccgggtcgagcgccacgcgtccgcccacgcgtccggagaccaactagcatcatataaagcacaatagtgtaccaacaatggcagccagaatatggtgcctacttatgctccttggtctttctgcaagtgctgctacagcgaccattttcccgcaatgctcgcaagctcctatagcttcccttcttaccccgtacctctcaccagcggtgtcttcagtatgtgaaaacccaattcttcaaccctacaggatccaacaggcaatcgcagctggcatcttacctttatcacccttgttcctgcaacaatcatcagccctattacaacagttacctttggcgcatctattggcacaaaacatcaaggcacaactactacaacaacttgtgctagcaaaccttgctgactactctcaacaac

SEQ ID NO: 91361 - DNA, 369 bp, Zea mays
accgacgcgtccgcagacctattacagcagttacctttgttgcatttattgacacaaaacatcatgccacgacagctacaacacctggtgcgagcaaaccttgctgcctactctcagcaacagcagttccttccattcaaccaactagctgcattgaactctgctacttattagcaccaccaccaactaccattcagccagttatatgatgcctacccccagcaattccttccattcaaccaactgacagcattgaactctcctgcttatttacagcagcaccaactactaccattcagccagctagctggtgtgagccctgctaccttcttgacacaaccacagttgttgccgttctaccagcacgct

SEQ ID NO: 91362 - DNA, 430 bp, Zea mays
  unsure (1)..(430): unsure at all n locations
cttggcacatctaacaatacaaaccatcgcaacgcaacagcaacaacaattcctaccggcactgagccacctagccatggtgaaccctgccgcctacttgcaacagcagttgcttgcatcaaacccacttgctctggcaaacgtagttgcaaaccagccacaacaacagctgcaacagtttctgccagcgctcagtcaactagccatggtgaaccctgccgcctacctacaacagcaacaactgctttcatctagcccgctcgctgtggccaatgcacctacatacctgcaacaacaattgttgcaacagattgtaccagctctgactcagctagttgtggcaaaccctgctgcctacttgcaacagctngcttcattcaaccaactgactatgtcgaactctgctgcgtacctaccacagcgacaccag

SEQ ID NO: 91363 - DNA, 395 bp, Zea mays
catgaagttcttcgccaccccgccggttcacggctcgctggcgaaccaggtggtgcacccggccgacctgtgcttcaagctccccgacggggtgagcctggaggagggcgccatgtgcgagccgctgagcgtgggcgtgcacgcgtgccgccgcgcgggggtggggcccgagacgggcgtgctcgtggtgggcgccggccccatcggcctggtgtcgctgctggcggcgcgggccttcggcgcgccgcgcgtggtggtcgtggacgtggacgagcaccgcctggccgtggtcaggtcgctgggcgcggacgcggcggtgcgggtgtcgccccgcgcggaggacctggcggacgaggtggagcgcatgcgcgcggtcatgggctcggacatcgacg

SEQ ID NO: 91364 - DNA, 423 bp, Zea mays
  unsure (1)..(423): unsure at all n locations
caactagcaacatagaaagcacaatagtgtaccaacaatggcagccaaaatattttgcctccttatgctccttggtctttctgcaagtgctgctacggcgaccattttcccgcaatgctcgcaagctcctatagcttcccttcttcccccgtacctctcaccagcggtgtcttcggtatgtgaaaacccaattcttcaaccctacaggatccaacaggcaatcgcagctggcatcttacctttatcacccttgttcctccaacaatcatcagccctattacaacagttacctttggtgcatttattggcacanaacatcagggcacaacaactacaacaacttgtgctagcaaaccttgctgcctactctcagcaacagcagtttcttccattcaaccaactaggttcattgacctctgcttc

SEQ ID NO: 91365 - DNA, 327 bp, Zea mays
gcggctgccagacaccgccaacggtacatgtaccgtcctcggtgcatctgccagctggggttcacctgccatcgtgggtgcatctcccaccgccgcaccagctgtcgcagccattactgctgccaccgtcggtgcatgtgccgccgccggatcatctgacgccgcagccatgccactaccgtacttagctggcccagcctcagactcatcccgagtcgcacccatgcccgtgccaacaggcgcatacaagcccatgccagctgcacggtacctgcggcgttggcagcaccctaatcctgggccagttcctcaagtttctgatgcgtc

SEQ ID NO: 91366 - DNA, 327 bp, Zea mays
aattcccgggtcgagccacgcgtacgacaccagcaagcaacatagaaagtggaatcctttagcatcaatagagcaacaatggcgaccaagatacttgccctccttatgctccgtgctctttactgcatgtagatgctaacgcgacaattttccctcaatgatcacaagctcctatagctatcctttttgccccataccttacataaatgatagcttcagtatgtgaaaacccagctcttcaaccctatctgctccaacaagcaatcgcattaagcatcatacctttataacacttgtttcaacaatcggcagccctatttttggggc

SEQ ID NO: 91367 - DNA, 357 bp, Zea mays
atattatcgagaccaactagcaacatagaatgtacattagtgtaccaacaatggcagccaaaatgttctggctacttatgctccttgggctttctgcaagtgctgctacagcgaccattttcccgcaatgctcacaagctcccatagctatccttttttccccgtacctctaaccagcggtgtctctccgcatgtgaaaacccaattctctaaccctacaggatccaacaggctatcacagctggcatcttacctttataaccctctggtcttccacatatcattatccctattacatcaggtacccttggggcatttattgacacacaacattagggcacaacaaactcaacaacc

SEQ ID NO: 91368 - DNA, 427 bp, Zea mays
ggaattcccgggtggacccacgcgtccgatcgcaacgcaacagcaacaacaatttctaccagcactgagccaactagctgtggtgagccgtgtcgcctacttgcaacagcagttgcttgcatccaacccacttgctctggcaaacatagttgcataccaacaacaacaacaattgcaacagtttctaccagcgctcagtcaactagccatggtgaaccctgccgcctacctacaacagcaacaactgatttcatctagccctctcgctgtggttaatgcacctacatacctgcaacaacagttgctgcaacagattgtaccagctctgactcagctagctgtggcaaaccctgctgcctacttgcaacagctgcttccattcaaccaactgactgtgtcgaactctgctgcgtacctacaacagcga

SEQ ID NO: 91369 - DNA, 451 bp, Zea mays
  unsure (1)..(451): unsure at all n locations
ggaattcccgggtggacccacgcgtccgatcgttctcgtcgtgtgcctggctctgtcagctgccagcgcctctgcaatgcagatggcctgcccctgcgcggggctgcagggcttgtacggcgctggcgccggcctgacgacgatgatgggcgccggcgggctgtacccctacgcggagtacctgaggcagccgcagtgcagcccgctggcggcggcgccctactacgccgggtgtgggcagccgagcgccatgttccagccgctccggcaacagtgctgccagcagcagatgaggatgatggacgtgcagtccgtcgcgcagcagctgcagatgatgatgcagcttgagcgtgccgctgccgncagcagcagcctgtacgagccagctctgatgcagcagcagcagcagctgctggcagcccagggtctcaaccccatggccatgatgatg

SEQ ID NO: 91370 - DNA, 409 bp, Zea mays
  unsure (1)..(409): unsure at all n locations
cccacgcgtccgcaacaacaacaaccgtagcaccaacaacaacaacaacaacagcaggaccaacaacaacatcaatgtgaaggccaacaacaacatcaccaacaatcacaaggccatgtgcaacaacacgaacagagccatgagcaacaccaaggacagagccatgagcaacaacatcaacaacaattccagggtcatgacaagcagcaacaaccacaacagcctcagcaatatcagcagggccaggaaaaatcacaacagcaacaatgtcattgccaggagcagcaacagactacaaggtgcagctataactactatagcagtagctcaaatctaaaaaattgtcatgaattcctaaggcagcagtgcagccctttggtaatngcctttctncaatcacgtttgatac

SEQ ID NO: 91371 - DNA, 429 bp, Zea mays
ttcagaaacacaccaagcgaagcgcactagcaacaacctaacaacaatggctaccaagatattatccctccttgcgcttcttgcgctttttgcgagcgcaacaaatgcgtccattattccacaatgctcacttgctcctagttccattattccacagttcctcccaccagttacttcaatggccttcgaacacccagctgtgcaagcctataggctacaacaagcgattgcggcgagcgtcttacaacaaccaattgcccaattgcaacaacaatccttggcacatctaacaatacaaaccatcgcaacgcaacagcaacaacagttcctaccagcactgagccacctagccatggtgaaccctgtcgcctacttgcaacagcagctgcttgcatccaacccacttgctctagcaaacgtagttgcaaa

SEQ ID NO: 91372 - DNA, 352 bp, Zea mays
gaattcccgggtcgagccacgcgtacgccgtcatcgatctcgtttcaaatccatccatcctcgtttcctccgtcccgcagcatctcaacccgatggggaagatcaagatcgggatcaatgggttcggcaggatcggaaggctggtggccagggtggccctgcagagtgacgatgtcgagctcgtcgccgtgaacgaccccttcatcagcaccgactacatgacctacatgttcaagtacgacactgtgcacggacagtggaagcaccatgaagtcaaggtgaaggactccaaaacccttctctttggtgagaaggaagttgctgtgtttggctgcaggaaccctgaggagat

SEQ ID NO: 91373 - DNA, 464 bp, Zea mays
aattcccgggtcgagccacgcgtccgaagcacaatagtgtaccaacaatggcagccaaaatattttgcttccttatgctccttggtctttgtgcaagtgctgctaccgcaaccattttcccacaatgctcacaagctcctatagcttcctttcttcccccatacctctcaccagcggtgtcttcagtatgtgaaaacccaattcttcaaccctacaggatccaacaggcaatcgcagcaggcatcttacctttatcacccttgttcctccaacaaccgtcagccctattacagcagttacctttggtgcatttgttggcacaaaacatcaaggcacaacaactacaacaacttgtgctaggaaaccttgctgcctactctcagcaacagcagtttcttccattcaaccaactggctgcattgaactctgctgcttatttgcaacaacaactaccattcagtcag

SEQ ID NO: 91374 - DNA, 309 bp, Zea mays
gaccaacaagcaacatagaaagtggaatccagtagcaacaatagagcaacaatggcgagcaagatattttccctgcttatgctccttgctctttctacatgtgttgctaacgcgacaattttccctcaatgctcacaagctcctatagcttcccttcttcccccataccttccatcaattatagcttcaatatgtgaaaacccagctcttcaaccatataggcttcaacaagcaatcgcagcaagcaacatacctttatcgcccttgttgtttcaacaatcgccagccctatctttggtgcagtcattg

SEQ ID NO: 91375 - DNA, 408 bp, Zea mays
agcattcagaaacacaccaagcgaagcacattagcaacaacctaacaacaatggctgcgaagatattatccctgcttgcgcttcttgcgctttttgcgagcgcaacacatgcgttcattattccacaatgctcacttgctccaagttccattattacacagttcctcccaccagttacttcaatgggcttcgaacacccagctgtgcaagcctataggctacaacaagcaattgcggcgagcgtcttacaacaaccaatttcccagttgcaacaacaatccttggcacatctaacaatacaaaccatcgcaacgcaacagcaacaacaattcctaccagcactgagccacctagccatggtgaaccctgccggctacttgcaacagcagttgcttgcattaaacccac

SEQ ID NO: 91376 - DNA, 439 bp, Zea mays
gcagcccgacggcgacgccctactgctcgcctcagtgccagtcgttgcggcagcagggttgccagcagctcaggcaggtggagccgcagcaccggtaccaggcgatcttcggcttggtcctccagtccatcctgcagcagcagccgcaaagcggccaggtcgcggggctgttggcggcgcagatagcgcagcaactgacggcgatgtgcggcctgcagcagccgactccatgcccctacgctgctgccggcggtgtcccccactgaagaaactatgtgctgtagtatagccgctggctagctagctagttgagtcatttagcggcgatgattgagtaataatgtgtcacgcatcaccatgggtggcagtgtcagtgtgagcaatgacctgaatgaacaattgaaatgaaaagaaaaaaagtactccatctggtccaaat

SEQ ID NO: 91377 - DNA, 474 bp, Zea mays
  unsure (1)..(474): unsure at all n locations
accggttcggaattcccgggtgcagaaacacaccaagcgaagcacattagcaacaacctaacaacaatggctaccaagatattatccctccttgcgcttcttgcgctttttgcgagcgcaacaaatgcgttcattattccacaatgctcacttgctccaagttccattattacacagttcctcccaccagttacttcaatgggcttcgaacacccagctgtgcaagcctataggctacaacaagcaattgcggcgagcgtcttacaacaaccaatttcccagttgcaacaacaatccttggcacatctaacaatacaaaccatcgcaacgcaacagcaacaacaattcctaccagcactgagccacctagccatggtgaaccctgccgnctacttgcaacagcagttgcttgcatcaaacccacttgctctggcaaacgtagttgcaaaccagccacaacaacagctgcaacaa

SEQ ID NO: 91378 - DNA, 345 bp, Zea mays
atagaacgcggaatccactagctacaatcgagcaacaatggcgaccaagatattctggctccttatgctccttgctctatctacatgtgttgctaacgcaacaatcatcgctcaatgcttacaagctccaatagctcaccttctttcccaatacctaccataaaggatagctaacatatgtgaaaacccagctattcaaccatataggctacagcaagcaatcgcagacagcaacatacctttatcgcccttgatgattcaacaatagacagacctatctttggtgcagtcattgatacacaccatcatggcacaacagctgcagcaacttatgctacctgagat

SEQ ID NO: 91379 - DNA, 446 bp, Zea mays
ggaattcccgggtcgacgccacgcgtccgaacaacttgtgctagcaaaccttgctgcctactctcagcaacagcagtttcttccattcaaccagctagctgcattgaactctgcttcttatttgcaacaacaacaactaccattcagccagctacctgctgcctacccccagcaatttcttccattcaaccaactggcagcattgaactctcctgcttatttacagcagcaacaactactaccattcagccagctagctggtgtgagccctgctaccttcttgatacaaccacagttgttgccgttctaccagcacgctgcgcctaacgctggcaccctcttacaactgcaacaattgctgccattcaaccaacttgctttgacaaacccagcagcgttctaacaacaacccatcattggtggtgccctcttttagatttcttatg

SEQ ID NO: 91380 - DNA, 388 bp, Zea mays
aattcccgggtcgagccacgcgtccggaccaacaagcaacatataaagtggaatccattagcaacaatagagcaacaatggcgaccaagaggttttgcctccttatgctccttgcgtctttctacatgtgttgctaacgcgacaattttccctcaatgctcacaagctcctatagcttcccttctttccccataccttccatcaattatagcttcaatatgtgaaaacccagctcttcaaccatataggcttcaacaagcaatcgcagcaagcaacatacctttatcgcccttgttgtttcaacaatcgccagacctatctttggtgcacacattggtacaaaccatcagggcacaacagctgcaacaactcgtgctaactctgatca

SEQ ID NO: 91381 - DNA, 419 bp, Zea mays
gctcagtctgggtgcaccggactgtccggtagtgcaccggacagtgtccggtgcgccaggctaggtctggcgaactggctgctctcgggacttcgacggcggcatacggctaaaattcaccggactgtccggtggtgcaccggactgtccggtgagccaacagtcggccgggtcaacggtcggccacggaatccgcgcgcgacgcgtggcaagtgccaacggtcggatggggcaccggactgtccggtgtgcaccggacagtgtccggtgcgccaacggctccaagactgcaatggtcggcttcgccaaataaggaaagagatccgcaccggacagtgtccggtggtgcaccggactgtctggtgcgccaagcgacagaaggcaagaattgccttcctggaatgcactcaaacggctct

SEQ ID NO: 91382 - DNA, 421 bp, Zea mays
tcccggctcgaccgacgcgtccggcaacatagaaagcacaatagtgtaccaacaatggcagccaaaatattttgcctccttatgcgccttggtctttctgcaagtgctgctacggcgaccattttcccgcaatgctcgcaagctcctatagcttcccttcttcccccgtacctctcaccagcggtgtcttcggtatgtgaaaacccaattcttcaaccctacaggatccaacaggcaatcacagctggcatcttacctttatcacccttgttcctccaacaatcatcagccctattacatcagttacctttggtgcatttattggcacaaaacatcagggcacaacaactacaacaacttgtgctagcaaaccttgctgcctactctcagcaacagcagtttcttccattcaccaactagc

SEQ ID NO: 91383 - DNA, 437 bp, Zea mays
  unsure (1)..(437): unsure at all n locations
atacagtagcaacaatagagcaacaatggcggtcaagatattttccatccttatgctgcttggtctttctgcatgtgttgctaacgcgaccatttttactcaatactcacaagctcctatagctgcccttcttcccccataccttccatcaatgaccgcttcagtttgtgaaaacccagcccttcaaccctacaggctccaacaagcaatcgcaacaagcaacttacctttatcacccctgttctttcaacaatcgccagccctatctttggtgcagtcattggtacaaaccatcatggcacaacagctgctacaactcgtgctaccagtgatcagccaactagctctggcaaacctttactcctactctcagcaacaacaatnacttccattcaaccaactgtctacacttgaaccctgtgcttatttacaacaac

SEQ ID NO: 91384 - DNA, 294 bp, Zea mays
gctgtaaataaggtagcaaggctcacaccagctagctggctgaatggtactaacaattgtgggtctcactatatgtgcggctgcttcaaccactctccctcaatactcacactctcatatagctgcccttcttcctccataccaccaatcaatgacctattcacttcgtgaaatcttcaaccttcaacctaactgcctccaacacacaatcccaacacacaactttacttcactaaaccacctcatttaacacccgccaaccatatctgatcctcagtcattggcacaaaccat

SEQ ID NO: 91385 - DNA, 404 bp, Zea mays
ggacgtcagcctagcaattagctcatcgactccagattggagaactcgacaccatgagggtgctgatcgttgcccttgctctcctggcgctcgctgcgagcgccgcctccagtacaagcggcggctgtggctgccagacaccaccgtttcatctaccgcctccgttctatatgccgcctccgttctatctgccgccgcagcagcagccgcagccatggcaataccccactcaaccaccgcagctaagcccgtgccagcagttcggatcctgcggcgtcggcagcgtcggcagcccgttcctgggccagtgcgtcgagttcctgaggcaccagtgcagcccggcggcgacgccctacggctcgccacagtgccaggcgctgcagcagcagtgctgccaccagatc

SEQ ID NO: 91386 - DNA, 395 bp, Zea mays
cagatcagcaaagcggcagtgcgtagagaggatcgtcgaacagaacagcatgaagatggtcatcgttctcgtcgtgtgcctggctctgtcagctgccagcgcctctgcaatgcagatgccctgcccctgcgcggggctgcagggcttgtacggcgctggcgccggcctgacgacgatgatgggcgccggcgggctgtacccctacgcggagtacctgaggcagccgcagtgcagcccgctggcggcggcgccctactacgccgggtgtgggcagccgagcgccatgttccagccgctccggcaacagtgctgccagcagcagatgaggatgatggacgtgcagttcgtcgcgcaccacctgcagatgatgatgcagcttgagcgtgccgctgccg

SEQ ID NO: 91387 - DNA, 415 bp, Zea mays
aattctcgggtcgacgccacgcgtccgggcgaagatgggcgagaaagagtggtacttcttctaccagaaggaccgcatgtacccgacgggggtgagggcgaaccgggccaccgaggccggttactggaaggcgacgggcaaggacaaggaggtctacaacgccgcggaaggggtggcggtactggtcggcatgaagaagacgctcgtcttctacaggggcagggctcccaggggtgacaagacaaactgggtcatgcacgagtacaggctcgaaggcagcggcaggctccccgccggcctcgcgtccgcaaccggctcagccgccgtcaacgccgcggcggccttgaaagcttctgcttataagcaggatgagtgggtggtatgtcgtgtgttccacaagaccactgggatcaag

SEQ ID NO: 91388 - DNA, 466 bp, Zea mays
gaattcccgggtcgacgccacgcgtccgccaactagcaacatagaaagcacaatactgttccaacaatggcggccaaaatatcttgcctcctgatgctgcttgatctttctgcaagtgctgctactgcgaccattttcccgcaatgctcgcaagctcctatagcttcccttcttcccccgtacctctcaccagcggtgtcttccgtatgtgaaaacccaattcttcaaccctacaggatccaacaggcaatcacagctggcatcttacctttatcacccttgttcctccaacaatcatcagccctattacatcagttacctttggtgcatttattggcacaaaacatcaaggcacaacaactacaacaacttgtgctagcaaaccttgctgcctactctcagcaacagcagtttctttcattcaaccaactagctgcattgaactctgcttcttatttgcaacaac

SEQ ID NO: 91389 - DNA, 443 bp, Zea mays
  unsure (1)..(443): unsure at all n locations
tcgacccacgcgtacgcaacaagcaacatagaaagtggaatccagtagcatcaatagagcaacaatggcgaccaggatacgtttccctccttatgctccttgctctttctgcatgtgttgctaacgcgacaattttccctcaatgctcacaagctcctatagcttcccttcttcccccataccttccatcaatgatagcttcagtatgtgaaaacccagctcttcaaccctataagctccaacaagcaatcgcagcaagcaacatacctttatcacccttgtttcaacaatcgccagccctatctttggtgcagtcattggtacaaaccatcaaggcacagcagctgcagcaactcgtgctacctgcgatcaaccaagtagctctggcaaacctttctccctactatcagcaacaacaatntcttccattcaaccaactatct

SEQ ID NO: 91390 - DNA, 427 bp, Zea mays
cccacgcgtccgattgagaccagcaagcatcatagaaagtagaatccattagcaacagtggagcaacaatggcgaccaagatattttccctccttatgctccttgctctttctacatgtgttgctaacgcgacaattttccctcaatgctcacaagctcctatagcttcccttcttcccccataccttccatcaattatagcttcagtatgtgaaaacccagctcttcaaccatataggcttcaacaagcaatcgcagcaagcaacatacctttatcgcccttgttgtttcaacaatcaccagccctatctttggtgcagtcattggtacaaaccatcagggcacaacagctgcagcaactcgtgctacctgtgatcaaccaagtagctctggcaaacctttctccctactctcagcaacaacaatt

SEQ ID NO: 91391 - DNA, 420 bp, Zea mays
gaccagcaagcaacatagaaagtagaatccattagcaacaatagagcaacaatggcgaccaagatattttccctccttatgctccttgctctttctacatgtgttgctaacgcgacaattttccctcaatgctcacaagctcctatagcttcccttcttcccccataccttccatcaattatagcttcagtatgtgaaaacccagctcttcaaccatataggcttcaacaagcaatcgcagcaagcaacatacctttatcgcccttgttgtttcaacaatcaccagccctatctttggtgcagtcattggtacaaaccatcagggcacaacagctgcagcaactcgtgctacctgtgatcaaccaagtagctctggcaaacctttctccctactctcagcaacaacaatttcttccattc

SEQ ID NO: 91392 - DNA, 434 bp, Zea mays
gcaacatagaaagcacaatagtgtaccaacaatggcagccaaatattttgcttccttatgctccgtggtctttctgcaagtgttgctaccgcaaccattttcccacaatgctcacaagctcctatagcttcccttcttcccccatacctctcaccagcggtgtcttcaatgtgtgaaaccccaattgttcaaccctacaggatccaacaggcaatcgcaacaggcatcttaccattatcacccttgttcctccaacaaccgtcagccctattacagcagttacctttggtccatttggtggcacaaaacatcagggcacaacaactacaacaacttgtgctagcaaaccttgctgcatactctcagcaacatcagtttcttccattcaaccaactggctgcattgaactctgctgcttatttgcaacaacaatt

SEQ ID NO: 91393 - DNA, 377 bp, Zea mays
gcaacatagaaagcacaatagcgtaccaacaatggcagccaaatattttgatctcttaaggctggttgtccttcctgaaggggctgctactgaaacaattttccagcattgttaaaaagctctaatggcttccattattccacataccctttaacaaacagggcttccatttcatgaacacccaatgcttaaaccttccggattcaacaagacatgtctacatggattataacattaataaccctgttaacttaaaaaccgatcaacctaataccaacactttcattaaatccatttataggcccaaactttaattcacaacaagcaacataaatttggccaaataaactttacttataatgttaaaaaaatccttt

SEQ ID NO: 91394 - DNA, 411 bp, Zea mays
gtcttgaattcccgggtcgacccactcgtccggcaacatagaaagcacaatagtgtaccaacattggcagccaaaatattttgcctccttgggctcgttggtctttctgcaagggctgctacggcgaccattttcccgcaatgctcgcaagctcctatagcttcccttcttcccccgtacctctaaccagcggtgtcttcggtatgtgaaaacccaattcttcaaccctacaggatccaacaggcaatcgcagctggcatcttacctttatcacccttgttcctccaacaatcatcaaccctattacaacagttacctttggtgcatttattggcccaaaacatcaaggcacaacaactacaacaacttgtgctaacaaaccttgctggctaactttaacaacaacaattt

SEQ ID NO: 91395 - DNA, 416 bp, Zea mays
acatagtgaagtacactagcaacatcttagcaccaatggcagccaagatttttgccaggcttgccctccttgctctttcagcaagcgttgctaccgcgactattattccacaatgctcacaacaatacctctctccggtgacagccgcgagatttgaatacccaactatacaatcctacaggctacaagaggccatcgcagcaagcatcttacggtcgttagcattgaccgtccaacaaccatatgccctattgcaacaaccatccttaatgaatctatatctccaaagaatcgcagcacaacaactacaacaacagttgcttccaacaatcaatcaagtagttgcagcgaaccttgctgcttacctccagcaacaacaatttcttccattcaatcaactagctggggtgaaccct

SEQ ID NO: 91396 - DNA, 240 bp, Zea mays
aatcccatcataatcacacaatgctcactatctctcactggctctatttcacagaacctcactccaactactacaatgggcttcaaacacccagctatacaaacctatacgctacaacaagcgcttgcaagcaacgtcttaaaacaaccaatttcccaatttcaacaacaatccttggcacatctaaccatacataccatttcaaacgcatcatctacaaacaactgagccaccttttac

SEQ ID NO: 91397 - DNA, 437 bp, Zea mays
ccaactagcaacatataaagcacaatagtgtaccaacaatggcagccaaaatattttggctccggatgctccttggtatttctgcaagtgctgctacggcgaccattttcccgcaatgctcacaagctcctatagcttcccttcttcccccgtacctctcaccagcggtgtcttcggtatgtgaaaacccaattcttcaaccctacaggatccaacaggcaatcgcagctggcatcttacctttatcacccttgttcctccaacaatcatcagccctattacagcagttacctttggtgcatttattggcacaaaacatcagggcacaacaactacaacaacttgtgctagcaaaccttgctgcctactctcagcaacagcagtttcttccattcaaccaactagctgcattgaactctgcttcttatttgcaacaa

SEQ ID NO: 91398 - DNA, 432 bp, Zea mays
tttcagcattcaaaaacacaccaagcgaagcgcactagcaacgacctaacaccaatggctaccgggatattagccctccttgcgcttgttgcccttttagtgagcgcaacaaatgcgttcattattccacagtgctcacttgctcctagtgccattattccacagttcctcccaccagttacttcaatgggcttcgaacatccagccgtgcaagcctacaggctacaactagcgcttgcggcgagcgccttacaacaaccaattgcccaattgcaacatcaatccttggcacatctaaccctacataccattgcaacgcaacaacaacaacaacaacagtttctgccatcactgagccacctagccgtggtgaaccctgtcacctacttgcaacagcagctgcttgcatccaacccacttgctctggcgaac

SEQ ID NO: 91399 - DNA, 435 bp, Zea mays
caaccgccccggcctcagcctcatccccagccacacccatgcccgtgccaacagccggatccaagcccgtgccagctgcagggaacctgcggcgttggcagcaccccgatcctgggccagtgcgtcgagttcctgaggcatcagtgcagcccgacggcgacgccctactgctcgcctcagtgccagtcgttgcggcagcagtgttgccagcagctcaggcaggtggagccgcagcaccggtaccaggcgatcttcggcttggtcctccagtccatcctgcagcagcagccgcaaagcggccaggtcgcggggctgttggcggcgcagatagcgcagcaactgacggcgatgtgcggcctgcagcagccgactccatgcccctacgctgctgccggcggtgtcccccactgaagaaactatgtgctgtagtatagc

SEQ ID NO: 91400 - DNA, 447 bp, Zea mays
  unsure (1)..(447): unsure at all n locations
ttcggaattcccggtgagcatgagaaacacacctacgaacgcnatagcacgacctacatcaatggcttccaagacattatcccgccttgcgcttcttgccctttgtgtgagtgcaacaaatgcgttcattattccacaatgctcacttgctccgagtgccattattccacagttcctccctccagttacttcaatgggcttcgaacacccagctgtgcaagcctataggctacaacaagcgcttgcggcgagcgtcttagaacaaccaattgcccaattacaacaacaatccttggcacatctaaccatacaaaccatcgcaacgcagcagcaacaagcactgagccacctatccgtggtgaaccctatcgnctacttgcaacaacagctgcttgcatccaacccacttgctttggcaaacgtagctgcataccaacaacaacaaca

SEQ ID NO: 91401 - DNA, 423 bp, Zea mays
ggattcccgggtcgacctacgcgtccgcgttcattattccacagtgctcactagctcctagtgccattattccacagttcctccgaccaggtacttcaatgggcttggaacatccagccgtgcaagcctacaggctacaactagcgcttgcggcgagcgccttacaacaaccaattgcccaattgcaacaacaatccttggcacatctaaccctacaaaccattgcaacgcaacaacaacaacaacaacagtttctgccatcactgagccacctagccgtggtgaaccctgtcacctacttgcaacagcagctgcttgcatccaacccacttgctctggcgaacgtagctgcataccagcaacaacatcagctgcaacagtttatgccagtgctcagtcaactagccatggtgaaccctggcg

SEQ ID NO: 91402 - DNA, 422 bp, Zea mays
accggtccggaattcccgggattgagaccaactaccaacatacaaagcacaatagtgtaccaacaatggcagccaaaatattttgcttccttaggctccttggtctttctgcaagtgttgctaccgcaaccattttcccacaatgctcacaagctcctatagcttcccttcttcccccatacctctcaccagcagtgtcttcaatgtgtgaaaacccaattgttcaaccctacaggatccaacaggcaatcgcaacaggcatcttaccattatcacccttgttcctccaacaaccgtcagccctattacagcagttacctttggtccatttggtggcacaaaacatcagggcacaacaactacaacaacttgtgctagcaaaccttgctgcatactctcagcaacatcaatttcttccattc

SEQ ID NO: 91403 - DNA, 520 bp, Zea mays
  unsure (1)..(520): unsure at all n locations
agtaggtgagagttntatgacaggaagggggggcgaaaagctatgcttctaccggtccggaattcccgggtcgacccactcgtccgctcgcgccggctcaaggtacattgcgtgtcctagccaagacacgcagctcatctcagggtcacacgcacagcaagagcgaggcgtgattcgccatgggcggcctcactatggaccaggctttcgtgcaggcccccgagcaccgccccaagcccatcgtcaccgaggccaccggcattcctctcatcgacctctcgcctctggccgccagcggcggcgccgtggactcgctggccgccgaggtgggcgcgtcgagccgggactggggcttcttcgtggtcgtgggccacggcgtgcccgcagagaccgtggcgcgcgcgacggatgcgcagcgcgcgttcttcgcgctgccggcagagcggaaggccgccgtgcggaggaacgaggcggaaccgctcgggtactacgagtcggagcacaccaaggacgtgaggga

SEQ ID NO: 91404 - DNA, 270 bp, Zea mays
accggttcggaattcccggctcgacccactcgtccggcaacagttgctgcctttctaccagcagtttgcggctaaccccgcaaccctcttacaggtacaacaattgttgccctttgtccaacttgctttgacaaacccagcagcctcctaccaacaacacatcattggtggtgccctcttttagattgcttattagttgtaattcaataataaagttttttggatgatgtatgtggccaaccagaaataagaagttacatttccagattc

SEQ ID NO: 91405 - DNA, 436 bp, Zea mays
gtgaaggataagcttagacgtgacattgaggctcatgtagctcaagttcgagctgctagatcaggggaactttgtgccaaatatgaggcacaacttaccaaagctctggcggaaccagttgaatctattctagattcagccagtgaagatacgtggccagctattataaagcttcttcaacgcgagacaaaaactgccgtttcaagtcttcaatctgctgcgtcagcttttgaacttgatgaagcaactgagaaagaactgcttgtgaagctggagaagcatgcatggagtgttgctgagtcaaaggcaaaagaagaagctggaagggtttcgattcccatgaaggacaggtgttcaatgctgttcatccgagatgctgactctatgcccagggtgtggacaggtaacgaggacataaaagctataactaaaaccg

SEQ ID NO: 91406 - DNA, 471 bp, Zea mays
accggtccggaattcccgggactgagaccaactagcaacatagaaagcacaatagtgtaccaacaatggcagccaaaatattttgcttccttatgctccgtggtctttctgcaagtgttgctaccgcaaccattttcccacaatgctcacaagctcctatagcttcccttcttcccccatacctctcaccagcggtgtcttcaatgtgtgaaaccccaattgttcaaccctacaggatccaacaggcaatcgcaacaggcatcttaccattatcacccttgttcctccaacaaccgtcagccctattacagcagttacctttggtccatttggtggcacaaaacatcatggcacatcaactacaacaacttgtgctagcaaaccttgctgcatactctcagcaacatcagtttcttccattcaaccaactggctgcattgaactctgctgcttatttgcaacaacaattac

SEQ ID NO: 91407 - DNA, 434 bp, Zea mays
cccacgcgtccgtagcaacatagaaagcacaatagtgtaccaacaatggcagccaaaatatttgggctccttatgctccttggtctttctgcaagtgctgctacggcgaccattttcccgcaatgctcgcaagctcctatagcttcccttcttcccccgtacctctcaccagcggtgtcttcggtatgtgaaaacccaattcttcaaccctacaggatccaacaggcaatcacagctggcatcttacctttatcacccttgttcctccaacaatcatcagccctattacatcagttacctttggtgcatttattggcacaaaacatcagggcacaacaactacaacaacttgtgctagcaaaccttgctgcctactctcagcaacagcagtttcttccattcaaccaactagctgcattgaactctgcttctta

SEQ ID NO: 91408 - DNA, 436 bp, Zea mays
aattcccgggtcgacccactcgtccgcccacgcgtccgtagcaacatagaatgcactttaatgtaccaacaatggcagccaaaaggtcagggctccttatgctccttggtctgtctgcaagtgctgctaccgcgaccattttcccgcaatgctcgcaagctactatagcttccattcttaccccgtacctctaaccagcggtgtattcggtatgtgaaaacccaattcttcaaccgtacaggatccaactggcaatcacagatggcatcttacctttatcacccttgttcctccaacaatcatcagccctattacatcagttacctcaggtgcatttattggcacaaaacatcatggcacatcaactgcaacaacttgtgctaacataccttgctgcctactctcagcaacatcattatgttgcattcaaccaact

SEQ ID NO: 91409 - DNA, 428 bp, Zea mays
ctgccttcccagatccatcgactcgctcgggccgcccctcccgtcgtccccgttcgaaggtgcggcagccggcaggcgagcgatttcattcgacatgaatcccgagtacgactaccttttcaaacttctgcttattggtgattctggtgttgggaaatcatgcttgcttctcagatttgcagacgattcttatttggacagctatatcagcacaattggggttgatttcaaaattcgcacagtggagcaagatgggaagaccataaaacttcaaatttgggatactgctgggcaagagcgcttcaggacaatcactagcagctactaccgcggagctcatggaatcattattgtatatgacgtgacagaccaagaaagcttcaataatgtgaagcaatggttgaacgagatagaccgttatgcaagtg

SEQ ID NO: 91410 - DNA, 422 bp, Zea mays
gagaccaactagcaacatagaaagcacaatattgtaccaacaatggcagtcaaactagggtgcttccttatgctccttggtctttctgcaagtgttgctaccgcaaccattttcccacactgctcacaagctcctatagcttcccttcttcccccatacctatcaccagcggtgtcttcaatgtgtgaaaacccaattgttcaaccctacaagatccaacaggctatcgcaacaggcatattaccattatcacccttgttcctacaacaaccgtcaaccctattacagcagttacctttggtccatttgctggcactaaacatcagggcacaacaactactacaactagtgctagcaaaccttgctgcatactctcagcaacatcagattcttccattcaaccaactggctgcattgaactc

SEQ ID NO: 91411 - DNA, 510 bp, Zea mays
  unsure (1)..(510): unsure at all n locations
agaggttagtgcttttacccgacaaaagtacgctataccggtccggaattcccgggtcgacccactcgtccggcagggagttgatttatccgctgcagccatgagtaagttgcagtctgagtctgtcaaggatgccatctcccagattgttggggatgccaaggagaagaataggaagttcactgagactgtggaacttcagattggtctgaagaattatgatccacagaaggacaagcgtttcagtggctctgttaagttgccccatatccctcgtcccaagatgaaggtgtgcatgcttggtgatgcccagcatgttgaggaggccgagaagatgggacttgactacatggatgttgaggctctcaagaaaatgaacaagaacaagaagcttgttaagaggcttgccaagaagtaccatgctttcttggcatcagaggccatcatcaagcagattccccgtctccttggtcctggtctcaacaaggcangcaagttcccgaccctggt

SEQ ID NO: 91412 - DNA, 516 bp, Zea mays
agaaggaaagatgtttatttcagcccagacaatatagtatgctctaccggtctcggaattcccgggtcgacccactcgtccgccaactagcaacatacaaagcacaatagtgtaccaacaatggcagccaaaatagttgggttccttatgctccttggtctttctgcaagtgttgctaccgcaaccattttcccacaatgctcacaagctcctatagctacccttcttcccccatacctctcaccagcggtgtcttcaatgtgtgaaaccccaattgttcaaccctacaggatccaacaggcaatcgcaacaggcatcttaccattatcacccttgttcctccaacaaccgtcagccctattacagcagttaccttaggtccatttggtggcacaaaacatcaaggcacaacaactacaacaacttgcgctagcaaaccttgctgcatactctcagcaacatcagtatctttcaattcaaccaactggctgcattgaactttgctgttaatttgca

SEQ ID NO: 91413 - DNA, 512 bp, Zea mays
  unsure (1)..(512): unsure at all n locations
gaggggnagagagctgtgtttacgataacgccaagtatagttatgcttctaccggtccggaattcccgggtcgacccactcgtccgaagcatcatagaaagtagaatccattatcaacaatagagcaacaatggcgaccaagaggttttccctccttatgctccttgctctttctacatgtgttgctaacgcgacaattttccctcaatgctcacaagctcctatagcttcccttcttcccccataccttccatcaattatagcttcagtatgtgaaaacccagctcttcaaccatataggcttcaacaagcaatcgcagcatgcaacatacctttatcgcccttgttgtttcaacaatcaccagccctatctttggtgcagtcattggtacaaaccatcagggcacaacagctgcagcaactcgtgctacctgtgatcaaccaagtagctctggcaaacctttctccctactctcagcaacaacaatttcttccattcaaccaactgtcta

SEQ ID NO: 91414 - DNA, 519 bp, Zea mays
gagggagcagcctagtgtcaccgatcaacgaaacgatagtatgactgcaccgtccggaattcccgggtcgacccactcgtccgattcagaatcacacctatcgaagcgcactatctacgacctaacaacaatggctaccaagatatgagccctctttgcgcttgttgcccttattgtgagcgcaacaaatgcgttcattattccacaatgctcacttgctcctagtgccattattccacagttcctacctacagttacttcaatgggcttcgaacacccagctgtgcaagcctacaagctacaacatgcgcttgcggcgagcgtcttacaacaaccaatcgcccaattacaacaacaatccttggcacatgtaaccatacaaaccatcggaacgcaacagcaacaacaatttctaccagcactgagccaactagctgtggtgaaacctgtggcctacttgcaacagcaattgcttgcattcaaaccacttgctctggcaaacatagttgcattccaaaa

SEQ ID NO: 91415 - DNA, 424 bp, Zea mays
acacagcgaaccgagaaaccaacacaacaagcaaagcagcgatccgacatccgagagatggacgcggtgatgttcgggctggagactcccctgatggccgcgctgcagcacctgctggacgtgcccgacggcgacgccggcgcgggcggcgacaacaagacgggcatcggcggcagcgccacgcgcacctacgtccgcgacgcgcgcgccatggcggccaccccggccgacgtgaaggagctgcccggcgcgtacgcgttcgtggtggacatgccggggctgggcacgggcgacatccgggtgcaggtggaggacgagcgggtgctggtggtcagcggctagcggcgccgggaggagcgcgaggactacgccaagtacctgcgcatggagcggctgatgggcacgttcatgcgcaagttcgtgc

SEQ ID NO: 91416 - DNA, 432 bp, Zea mays
attttgagcattcagaaacacaccaagcgaagcgcactagcaacaacctaacaacaatggctacgaagatattatccctccttgcgcttcttgcgctttttgcgagcgcaacaaatgcgtccattattccacaatgctcacttgctcctagttccattattccacagttcctcccaccagttacttcaatggccttcgaacacccagctgtgcaagcctataggctacaacaagcgattgcggcaagcgtcttacaacaaccaattgcccaattgcaacaacaatccttggcacatctaacaatacaaaccatcgcaacgcaacagcaacaacagttcctaccagcactgagccacctagccatggtgaaccctgtcgcctacttgcaacagcagctgcttgcatccaacccacttgctctagcatacgtag

SEQ ID NO: 91417 - DNA, 418 bp, Zea mays
actttggattggagccgcaccgccgcactcgccaccgcagccgccgcagtgccgcacagccgcgactcccgtcttggtcttgcggccagtcgccctcgggcctcgaccatcagcccctcgcccgctcgccgagacaccgagtcggcatcgaccgtcgtcgcgtctccgaggtccagcgcctagtggcccagctccaagcctccagccatcggcgcccgccctcctccgccgagacgccgagtgccgagcgcccgagcaccccggtccccagcgcccaacaagctagcaggctgcaggtatgcgctctttgttgatgcgtccaaggagttgagctgaatgcccagaaggctagcaggctgcagaaactgaaggaaaaggcggcattcaggaacccgggatgagtctattttaaaatgat

SEQ ID NO: 91418 - DNA, 362 bp, Zea mays
cgggttgtcggaatcatcaacacaccaagcgaagctacctatcaacgtcttaacaacaatggctaccaagatattatgggtccgttctcttctttgcctggttgttatccccacaaatgcggtcattatttcacaatgactgacttgcttctaatgccattataccacaaattctccaaccaactacttcaatgggctgtccaaaaaatatctgtgccaacctacaagctacaacaagcgcttgctgcgaacgtcttacaacaaccaatttaccaattgcaacaacaatccttggcacatctaaccatacaaaccattgcaacacaacagctacaacaattcctaccagcactgatccaact

SEQ ID NO: 91419 - DNA, 422 bp, Zea mays
gcaaagcggcagtgcgtagagaggatcgtcgaacagaacagcatgaagatggtgcataggtctcgtcgtgtgcctggctctgtcagctgccagcgcctctgcaatgcagatgccctgcccctgcgcggggctgcagggcttgtacggcgctggcgccggcctgacgacgatgatgggcgccagcgggctgtacccctacgcggagtacctgaggcagccgcagtgcagcccgctggcggcggcgccctactacgccgggtgtgggcagacgagcgccatgtaccagccgctccggcaacagtgctgccagcagcagatgacgatgatggacgtgcaatccgtcgcgcagcagctgcagatgatgatgcagcttgagcgtgccgctgccgccagcagcagcctgtactagccagctctgatgc

SEQ ID NO: 91420 - DNA, 430 bp, Zea mays
cttcaagcagctatagctagcataattaactcatgggtgcatagagatatgccgccgacgaccggtatctatgggtacctgcgcttgcactgcatcttcttcttactactcctcgacctccttcaattattcctagtgtttgcttctcccttacttgacctttgcttggaaccattgatagttacttattgggcatggagcacgtcatctcaatggaggagatcctcgggcccttctgggagctgctgccagcgccagcgccagagccagagccggagcagccttcggtaaccggcatcgtcgtcggcagtgtcatagacgttgctgctgctggtcacggtgacggtgagggtggcggcgacatgatggatcagcagcacgccacagagtggacctttgaaaggttactggaagaggatgctctgacgac

SEQ ID NO: 91421 - DNA, 432 bp, Zea mays
caactagcaacatagaaagcacaatagtgtaccaacaatggcagccaaaatattttgcttcctgatgctccttggtctttctgcaagtgttgctaccgcaaccattttcccacaatgctcacaagctcctatagcttcccttcttcccccatacctctcaccagcggtgtcttcaatgtgtgaaaccccaattgttcaaccctacaggatccaacaggcaatcgcaacaggcatcttaccattatcacccttgttcctccaacaaccgtcagccctattacagcagttacctttggtccatttggtggcacaaaacatcagggcacaacaactacaacaacttgtgctagcaaaccttgctgcatactctcagcaacatcagtttcttccattcaaccaactggctgcattgaactctgctgcttatttgca

SEQ ID NO: 91422 - DNA, 435 bp, Zea mays
tccggattcccggtcgacccacgcgttcggccaaccgcccttctcctcctcctggctcctcgtgcctcgcttgactcctcgcgccgatttggggaaacaggccatgccgggagacgggggagcagctggaagcgcgaggtgggtttgcgcggtcctttcggtgttcccgccgccgtccaaggccaagaacgccagcttcgagcagggcgccaacttcgccatcaccggcgccaccgcgctcgacaccgacttcttccggaagcgagggctcggcagcaccgtctggaactccggctccctccgcacgcaaatccagtggctgcgagacctcaagccatcgctctgcagctccgcgcaaggcacacgatgcaaggagttcttcgccgagtgcctgttcgtcgtaagcgaattcggtgggaacgactacaacgcccc

SEQ ID NO: 91423 - DNA, 361 bp, Zea mays
  unsure (1)..(361): unsure at all n locations
ccggtccggaattcccgggtgcgacccacgcgtctcgcatgaaacacatccaagctgaagcatcattatcaacatacctaacaacaatggnctacgcaagaggattatccctccttgcgtcttcttgcagctttttgcagagctcaacaatatgcagttcaattattccacaatgnctcatcttgctccatagttccattattacatctgttcctcccaccagttaccttcaatgggncttcgaacatcccagctgtgcatagcctatanggctacatacaagcaattagcggcgagcgtcttacaacataccaatttcccagttggcaacaacatatccttggcacatnnctaacaatac

SEQ ID NO: 91424 - DNA, 399 bp, Zea mays
aacaacaacagttgcaacagtttctgccagcgctcagtcaactagccatggtgaaccgtatcgcctacctacaacagcaacaacttctttcatctagcccgctcgctatgggcaatgcacctacatacctgcaacaacagttgatgcaacaacagttgctgcaacaaattgtaccagctcttactcagctagctgtggcaaaccctgctggctacttgcaacaactacttgcattcaaccaactgactgtgtcgaactctgctgcgtacctacaacagcgacatcagttacttaatccactagcggcggctaacccattggtcgctgacttgctacagcagcaacaattgctgccatacaaccagttctctctgatgaaccctgccttgtcgtggcagc

SEQ ID NO: 91425 - DNA, 513 bp, Zea mays
  unsure (1)..(513): unsure at all n locations
agtnnangagaggttcttaagaaaggcgagtatagtatgctctaccggtccggaattcccgggtcgacccactcgtccgagcaacatagaaagcacaatagtgtaccaacaatggcagccaaaatattttgcttccgtatgctccttggtctttctgcaagtgttgctaccgcaaccattttcccacaatgctcacaagctcctatagcttcccttcttcccccatacctctcaccagcggtgtcttcaatgtgtgaaaccccaattgttcaaccctacaggatccaacaggcaatcgcaacaggcatcttaccattatcacccttgttcctccaacaaccgtcagccctattacagcagttacctttggtccatttggtggcacaaaacatcagggcacaacaactacaacaacttgtgctagcaaaccttgctgcatactctcagcaacatcagtttcttccattcaaccaactggctgcattgaactcttgtgcttatttgcaacaacaa

SEQ ID NO: 91426 - DNA, 432 bp, Zea mays
attgagaccaactagcaacatagaaagcactctagcgtaccaacaatggcagccaaaatattgggtctccttatgctccttggtctttctgcaagtgctgctacggctaccattttcccgcaatgctcgcaagctcctatagcttcccttattcccccgtacctctcaccagcggtgtcttcggtatgtgaaaacccaattcttcaaccctacaggatccaacaggcaatcgcagctggcatcttacctttatcacccttgttcctccaacaatcatcatccctattacaacagttacctttggtgcatctattggcacaaatcatcagggcacaacaactacaacatcttgtgctagcaaaccttgctgcctactctcagcaacagcagtttcttccattcaaccaactaggttcattgaactctgcttct

SEQ ID NO: 91427 - DNA, 156 bp, Zea mays
atagcttcactctctgttatcctttctcttcaaccatattatcttttagataagttcacatttaagttggtgcctgcatcacccttatcatttcaacaatcaccatccctatctttttttcattcatttgtacaaaccatcaattcacaacatctt

SEQ ID NO: 91428 - DNA, 457 bp, Zea mays
gaattcccgggcgacaccatgaaagtgctgatcgttgcccttgctctcctggcgctcgctgcgagcgccgcctccagtacaagcggcgggtgtggctgccagacaccaccgtttcatctaccgcctccgttctatatgccgcctccgttctatctgccgccgcagcagcagccgcagccatggcaataccccactcaaccaccgcagctaagcccgtgccagcagttcggatcctgcggcgtcggcagcgtcggcagcccgttcctgggccagtgcgtcgagttcctgaggcaccagtgcagcccggcggcgacgccctacggctcgccacagtgccaggcgctgcagcagcagtgctgccaccagatcaggcaggtggagccgctgcaccggtaccaggcgacatacggtgtggtcctgcagtccttcctgcagcagcagccgcagggcgagctcg

SEQ ID NO: 91429 - DNA, 507 bp, Zea mays
  unsure (1)..(507): unsure at all n locations
agagttaaagagctcngttatgacaagacaatatagtatgctctaccggtccggaattcccgggtcgacccactcgtccgcaattatagcttcagtatgtgaaaacccagctcttcaaccatataggcttcagcaaggagtcgcagcaagcaacatacctttatcgcccttgttgtttcaacaatcaccagccctatctttggtgcagtcattggtacaaaccatcagggcacaacagctgcagcaactcgtgctacctgtgatcaaccaagtagctctggcaaacctttctccctactctcagcaacaacaatttcttccattcaaccaactgtctacactgaaccctgctgcttatttgcagcatcaactattaccatttagccagctagctactgcctactctcagcaacaacaacttcttccatttaaccaattggccgcactgaaccccgctgcttatttgcagcagcaaatactactgccatttagcgagctagctgcagc

SEQ ID NO: 91430 - DNA, 435 bp, Zea mays
cgaggcggaggtccatgcgaatgacgctccggcggctgctgctgaaacctcgtctgcgcaactggctgctggcaagacagtgcgtgttcgatttgtgctgaaaaggcagtgcacgttcgggcagagcgtctgccttgtcggcgacgaccctgcgctcggcctctgggatctgtcgaacgcgtttcctttgaagtgggcggaaagccacgactggaccttagagaaagatttgccggccaacaagctcattgagttcaagttcttgctccaagattccacaggaaagttgcattggcagggtgggccaaacagaagctttcagacaggtgaaaccgccgcaaacacattggttgtgtttgaagattgggatgatgtgaagaatcagaaaatagtagaagaggggggagtggcgtctgctgggatagaacaaactgg

SEQ ID NO: 91431 - DNA, 426 bp, Zea mays
  unsure (1)..(426): unsure at all n locations
caactaccattcagccagctacctgctgcctacccccagcaatttcttccattgaaccgactggcagcattgaactctcctgcttatttacagcagcaacaactactaccattcagccagctagctggtgtgagccctgctaccttcttgatacaaccacagttgttgccgttctaccagcacgctgcgcctaacgctggcaccctcttacaactgcaacaattgctgccattcaaccaacttgctttgacaaacccaacagtgttctaccaacaacccatcattggtggtgccctcttttagattgcttatgagttatagttcaataatgaagttttttggatgatgtttgtggcgtcccagaaataagaaagtacatttctaaaaaaaaaaaanaagaagaaagaataaaatataatagaataa

SEQ ID NO: 91432 - DNA, 414 bp, Zea mays
cagttacctttggtccatttggtggcacaaaacatcagggcacaacaactacgacaagttgtgctagcaaaccttgctgcatactctcagcaacatcagtttcttccattcaaccaactggctgcattgaactctgctgcttatttgcaacatcaattaccattcagccagctagttgctgcctacccccagcaatttcttccattcaaccaactagcagcattgaactctgctgcttatttacagcagcaacaactactaccattcagccagctagctgatgtgagccctgctgccttcttgacacaacaacagttgttgccgttctacctgcacgctatgcctaacgctggcaccctcttacaactgcaacaattgctgccattcaaccaacttgctttgacaaacccaaca

SEQ ID NO: 91433 - DNA, 326 bp, Zea mays
attaccgggtcgagccactcttcagatttagggtctcaaatcatcatggctcaacttctacaacaacttgttctatcaaacctggcttggatctctcatcaacagcgggtggttccattcaacctactaggttcattgaactctgcttcttatttgcaacaacaacaactaccattcacccagctacctgctgcctaccctcagcaatttcttccattcaaccaactatcagcattgaactctcctgcttatctacagcagcaacaactactaccattcagccatcttgctggtgtaaacccttctaccttctttacacaaccaca

SEQ ID NO: 91434 - DNA, 397 bp, Zea mays
cccacgcgtccgggccacgagtgggagaagcacggcacctgcgcagccgacgtcttcggcgaggacggctacttggaggccgcgctgcgcctccgcgaccagctgggagtcctcggcgcgctcacctccgccggcgtcaagcccgacggcggctactacacgctgagccagatcaagggcgccatccgccagggcaccggcttcgagccctacgtggagtgcaaccgcgacgaggccggcaacagccagctctaccagctctacttctgcgtcgacgccgccggcgacagcttcgtcgactgccccgtcctccccagcggcaggccctgtggcaaccggatcgagttcccggctttctaagctaactcactcttcacgtcagttgctgcaatatact

SEQ ID NO: 91435 - DNA, 428 bp, Zea mays
tcccggctggacccgatcgtccgccaacaagcaacatagaaagtggaatccagtatcaacaacagagcaacaatggctacggacatgttttacctcctgatgcgccttgctctttctgcatgtgttgctaacgcgacaattttccctcaatgctcacaagctcctatagcttcccttcttcccccataccttccatcaatgatagcttcagtatgtgaaaacccagctcttcagccctataagctccaacaagcaatcacagcatgcaacatacctttatcacccttgttgtttcaacaatcgccagccctatctttggtgcagtcattggtacaaaccatcatggcacatcaactgcaacaactcgtgctacctgtgatcaaccaagtagctctagccaacctttctccctactctcagcaacaaca

SEQ ID NO: 91436 - DNA, 515 bp, Zea mays
  unsure (1)..(515): unsure at all n locations
gagtntnnnaagagggtttagtgtacgtacaagaanatgactgcatgctctaccggtccggaattcccgggtggacccacgcgtccggggtcttcagaccattagctttatctactccagagcgcagaagaacccgatcgacacggtgagggtgttgctcggggccctcgctctcctggctctcgctgcgagcgccacctccacgcatacaagcggcggctgcggctgccagccaccgccgccggttcatctaccgccgccggtgcatctgccacctccggttcacctgccacctccggtgcatctcccaccgccggtccacctgccgccgccggtccacctgccaccgccggtccatgtgccgccgccggttcatctgccgccgacaccatgccactaccctactcaaccgccccggcctcagcctcatccccagccacacccatgcccgtgccaacagccggattcaagcccgtgccagctgcagggaacctgccgcgttggcagcaccccga

SEQ ID NO: 91437 - DNA, 408 bp, Zea mays
gaattcccgggtcgacccactcgtccgccaactagcaacatagaaagcacaatagtgtaccaacaatggcagccaaaatattttgcttccttatgctccttggtctttctgcaagtgttgctaccgcaaccattttcccacaatgctcacaagctcctatagcttcccttcttcccccatacctctcaccagcggtgtcttcaatgtgtgaaaccccaattgttcaaccctacaggatccaacaggcaatcgcaacaggcatcttaccattatcacccttgttcctccaacaaccgtcagccctattacagcagttacctttggtccatttggtggcacaaaacatcagggcacaacaactacaacaacttgtgctagcaaaccttgctgcatactctcagcaacatc

SEQ ID NO: 91438 - DNA, 517 bp, Zea mays
  unsure (1)..(517): unsure at all n locations
nagtnaaagagagttnattctagctcagatgtgaatgcactgacgtactcggtcctgaattcccgggtcgacccactcgtccggcaacatacaaagcacaatattgtaccaataatggcagccaaaatattttgcctcatggtgctcgttgctctttctgcaagtgctgctactgcgagcattttcccgcaatgctcacaagctactatagcttaccttcttcccccatacctctcaccagcgatgtcttcagtatgtgaaaatccaattcttataccctacaggatccaacatgcaatcgcagcacgcatcttacctttatcacccttgatcctccaacaatcatcagccctattacagcagtcacctttgatgcatttatcgtcacaaaacatcagggctcaacaactacaacatctcgtgctatcaaaccttgctgcctactctcaacaacaacagttacctttggtgcatttgctggcacataacatcatggcacaacaactacaacaactcg

SEQ ID NO: 91439 - DNA, 382 bp, Zea mays
cgcctccgattttgagcattcagaaacacaccatgcgattcgcactagcaacgacctaacatcaagagctagcaagatattagcgctccttgcgcttcttgccctttttgtgagcgcaacaaatgcgttcattattccacaatgctcacttgctcctagtgccattattccacagttgctcccaccagttacttcaatgggcttcaaacacctagctgtgcaagccaacatgcaacatcaagcgcttgcggctagcgtcttacaacatccaattgcccaattgcaacaacaatacttgccacatctaacaatacaagccatcacaacgcatcagcaacaacagttcctaccagcactgaaccacctagccatggtgaaccct

SEQ ID NO: 91440 - DNA, 431 bp, Zea mays
ccaaaatattttgcctccttatgctccttggtatttctgcaagtgctgctacggcgacggttttgccgcaatgctcacaagctcctatagcttcccttcttcccccgtacctctcaccagcggtgtcttcggtatgtgaaaacccaattcttcaaccctacaggatccaacaggcaatcgcagctggcatcttacctttatcacccttgttccttcaacaatcatcagccctattacagcagttacctttggtgcatttattggcacaaaacatcagggcacaacaactacaacaacttgtgctagcaaaccttgctgcctactctcagcaacagcagtttcttccattcaaccaactagctgcattgaactctgcttcttatttgcaacaacaacaactaccattcagccagctacctgttgcctacccc

SEQ ID NO: 91441 - DNA, 351 bp, Zea mays
gaatttccgggtcggggctcgagtcacgcgtccgcgagtggccaacaatggacatggctttggcgtctaaagcctacccttcgtcatgcaatgacaccgacgtcgtgctgacaatttcaaagcgtgacaaatccgctgcaaatgattcaacatacctcaatcctcaagctcatgatagtgttcttggaatcattctgggaggtggtgctgggactagattgtaccccttgacaaagaagcgtgccaagcctgcagtgccattgggtgccaactatagactgattgatattcctgtcagcacttgtcttaacagcaacatatccacgatctatgtgctatacgcaatttaac

SEQ ID NO: 91442 - DNA, 443 bp, Zea mays
gtggaatacagtagcaacaatagagcatcaatggcggccaagatattttccatccttatgctccttgctctttctgcatgtgttgctaacgcgaccatttttcctcaatactcacaagctcctatagctgcccttcttcccccataccttccatcaatgaccgcttcagtttgtgaaaacccagcccttcaaccctacaggctccaacaagcaatcgcaacaagcaacttacctttatcacccctgttctttcaacaatcgccagccctatctttggtgcagtcattggtacaaaccatcagggcacaacagctgcaacaactcgtgctaccagtgatcagccaagtagctctggcaaacctttctccctactctcagcaacaacaatttcttccattcaacccaatgtctacactgaaccctgctggttatttacaacaaca

SEQ ID NO: 91443 - DNA, 419 bp, Zea mays
ctttggatctgaaatcctcccaagagctgtactagatcatagtgtgcaggcatgcatggttacgggctattgggaggatgttggaacaatcaaatcattctttgatgcaaacttggccctcactgagcagccttccaagtttgatttttatgatccaaaaacacctttcttcactgcaccccgatgcttgcctccgacgcaattggacaagtgcaagatgaaagatgcatttatctcagatggttgcttactgagagaatgcaacatcgagcattctgtgattggagtctgctcacgtgtcagctctggatgtgaactcaaggactccgtgatgatgggagcggacacctatgaaactgaagaagaagcttcaaagctactgttagctgggaaagtcccagttggaatagggaggaaca

SEQ ID NO: 91444 - DNA, 441 bp, Zea mays
cacttgctccgagtgccattattccacagttcctccctccagttacttcaatgggcttggaacacccagctgtgcaagcctataggctacaacaagcgcttgcggcgagcgtcttagaacaaccaattgcccaattacaacaacaatccttggcacatctaaccatacaaaccatcgcaacgcagcagcaacaagcactgagccacctagccgtggtgaaccctatcgcctacttgcaacaacagctgcttgcatccaacccacttgctttggcaaacgtaactgcataccaacaacaacaacagttgcaacagtttctaccagcgctcagtcaactagccatggtgaaccctatcgcctacctacaacagcaacaacttctttcatctagcccgctcgctatgggcaatgcacctacatacctgcaacaactgttggtgc

SEQ ID NO: 91445 - DNA, 440 bp, Zea mays
caattcgaaatcgagtcgggtactcgggtcggtcttgccgtgcgtgcgtggctgcgcgggaccagcccacgctcccactccccgcccgccaccgccgggtccctctagggttttgccgcgatgtcgctccggccgagcgagcgggagcagatgcggaagggcaactacaagcagacggtggacgccgaggagagccgccgccgccgcgagggccagatggtcgacatccgcaaggccaagcgagaggaaagcctccagaagaagcgccgcgatgggttccccgccggcggcgccgtgccgccgatgggccactccaccgcactccagcagaagctcgatggcttgccggcgatggtacaggccgttcactccaacgaccccactgtgcagcttgaggccaccacgcagttcaggaagctgctctccatagagcgtagtcc

SEQ ID NO: 91446 - DNA, 259 bp, Zea mays
gcggcagtggagcttcattggcgtccaatatactttccctccttatgctccttgctctggctgcatgtgttgctaacgcgacaattttccctcaatgctcacaagctcctatagcttacctgcttcccccataccttccatcaatgatagcttcagtatgtgaaaacccagctcttcaaccctataagctccaacaagcaatcgcagcatgcaacatacctttatcacccttgtttcaaacatcgccaggcctatcttt

SEQ ID NO: 91447 - DNA, 420 bp, Zea mays
ccaactagcaacatagaaagcacaatagtgtaccaacaatggcagccaaaatattttgcttcgttatgctccttggtctttctgcaagtgttgctaccgcaaccattttcccacaatgctcacaagctcctatagcttcccttcttcccccatacctctcaccagcggtgtcttcaatgtgtgaaaccccaattgttcaaccctacaggatccaacaggcaatcgcaacaggcatcttaccattatcacccttgttcctccaacaaccgtcagccctattacagcagttacctttggtccatttggtggcacaaaacatcagggcacaacaactacaacaacttgtgctagcaaaccttgctgcatactctcagcaacatcaatttcttccattcaaccaactggctgcattgaactctg

SEQ ID NO: 91448 - DNA, 417 bp, Zea mays
caactagcaacatagaaagcacaatagtgtaccaacaatggcagccaaaatattctggtgccttatgctccttggtctttctgcaagtgttgctaccgcaaccattttcccacaatgctcacaagctcctatagctttccttctttccccatacctctcaccagcggtgtcttcaatgtgtgaaaacccaattgttcaaccctacaggatccaacaggcaatcgcaacaggcatcttaccattatcacccttgttccttcaacaaccgtcagccctattacagcagttacctttggtccatttggtggcacaaaacatcaaggcacaacaactacaacaacttgtgctagcaaaccttgctgcatactctcagcaacatcaggttctttcattcaaccaactggctgcattgaactc

SEQ ID NO: 91449 - DNA, 445 bp, Zea mays
cccacgcgtccgtgagcattcagaaacacacctagcgaagcgcactagcaacgacctagcaacaatggctaccaagatattatccctctttgcgcttcttgccctttttgtgagcgcaacaaatgcgttcattattccacaatgctcacttgctcctagtgccattattccacagttcctccctccagttacttcaatgggcttcgaacacccagctgtgcaagcctacaggctacaacaagcgcttgcggcgagcgtcttacaacaaccaattgcccaattacaacaacaatccttggcacatctaaccatacaaaccatcgcaacgcaacagcaacaacaatttctaccagcactgagccaactagctgtggtgaaccctgtcgcctacttgcaacagcagttgcttgcatccaacccacttgctctggcaaacatagttgca

SEQ ID NO: 91450 - DNA, 405 bp, Zea mays
ggcgggaggagccagagccagagccagccagccagacacacaacctcggtcggcgcgggggctcaacccaatggctccttcctccctccgcccgccgcgccaccacccgtctcccctcgtcgtcctcgccatcgccgtcctcctcgtcttgcgcaccgacgatgggctgccggaggcgggaggaggaggaggaggcggcggtctgtaccgggagattctcagggacgagaccgtgcagaggctcaaggagctgggcaagatatctgatggggatggctaccttgaaaggacgtttctgagtccggcctttatcagagccactggtgtcatcgtcagctggatgaaagacgctgggcttacgacgtgggtcgatcagatggggaatattcatggtcgatatgagcc

SEQ ID NO: 91451 - DNA, 421 bp, Zea mays
cagacctattacatcaatcacctgcggtgcatttattgacccacaacatcagggcacagcaactacaacaacttgtgctagcaaaccttgctgcctactctcaccaacagcagtctcttccattcaaccaactatctgcattgaactctgcttcttatttgcaacaacaacaactaccattcagccagctacctgctgactacccccagcaacatcttccattcaaccaactggcatcatttaactctcctgcttatttacagcagcaacaactactaccattcagccaactagctggtgtgagccctgctaccttattgatacaaccacagttgttgccgttataacagcacgctgcacctaacgctggcaccctcttacaactgccacaattgctgccattcaaccaacttgctttgac

SEQ ID NO: 91452 - DNA, 353 bp, Zea mays
gatccaacaggcaatcgcagcaggcatcttacctttatcacccttgttctaccaacaagccatcattggtggtgccctcttttagatttcttatgagttatagttcaataataaagttttttgtctgaaaaaaaaaaaaaaacaaaaaaaaaaaaaaaataaataaaaaaaacagaaacataaaagaggccagcagctctcaagcatccaagcttacatacaacagcttgcgattgcatagctgcgcattagtgccacctaaagtcaattcactgccatgatttttacaacatctaacctggcaaacccttgcatttccccaactaaatcgccttcaacaacttccatctttg

SEQ ID NO: 91453 - DNA, 184 bp, Zea mays
cccccactgaagaaactatgtgctgtagtatagccgctggctagctagctaggggagtcgtttatcggcgatgattgagtaataatgtgtcacgcatcaccatgggtggcagtgtcagtgtgagcaatgacctgaatgaacaattgaaatgaaaagaaaaaaagtactccatctgttccaaatt

SEQ ID NO: 91454 - DNA, 448 bp, Zea mays
caactagcaacatagaaagcacaatattgtaccaataatggcagccaaaatatgttgccggattatgctccttggtctttctgcaagtgctgctacggcgagcattttcccgcaatgctcacaagctcctatagcttcccttcttcccccatacctctcaccagcgatgtcttcagtatgtgaaaatccaattcttctaccctacaggatccaacaggcaatcgcagcaggcatcttacctttatcacccttgttcctccaacaatcatcagccctattacagcagttacctttggtgcatttattggcacaaaacatcagggcacaacaactacaacaactcgtgctagcaaaccttgctgcctactctcagcaacagcagttacctttggtgcatttgttggcacaaaacatcatggcacaacaactacaacaactcgtgctagca

SEQ ID NO: 91455 - DNA, 439 bp, Zea mays
  unsure (1)..(439): unsure at all n locations
gtcagcctagcaattagctcatcgactccagattggagaactcgacaccatgaaggtggggatcgttgcccttgctctcctggcgctcgctgcgagcgccgcctccagtacaagcggcggctgtggctgccagacaccaccgtttcatctaccgcctccgttctatatgccgcctccgttctatctgccgccgcagcagcagccgcagccatggcaataccccactcaaccaccgcagctaagcccgtgccagcagttcggatcctgcggcgtcggcagcgtcggcagcccgttcctgggccagtgcgtcgagttcctgaggcaccagtgcagcccggcggcgacgccctacggctcgccacagtgccaggcgctgcagcagcagtgctgccaccagatcaagcangtggagccgctgcaccggtaccaggcgacatac

SEQ ID NO: 91456 - DNA, 452 bp, Zea mays
cccgggctgagccacctagccgtggtgaaccctgtcacctacttgcaacatcagctgcttgcatccaacccacttgctgtggcgaacgtaactgcataccagcaacaacaacagctgcaacagtttatgccagtgctcagtcaactagccatggtgaaccctgccgtctacctacaactactttcatctagcccgctcgcggtgggcaatgcacctacgtacctacaacaacagttgctgcaacaaattgtaccagctctgactcagctagctgtggcaaaccctgctgcctacttacaacagttgcttccattcaaccaactggctgtgtcaaactctgctgcgtacctacaacagcgacaacagttacttaatccattggcagtggctaacccattggtcgctaccttcctgcagcaacaacaacaattgctgccatacaaccagttctc

SEQ ID NO: 91457 - DNA, 386 bp, Zea mays
gagaccaactagcaacataaaaagcacaatactgtaccaacaatggcagccaaaatagggtgcctactaatgctgctgggacttactgcaagagctgctacggcgaccattatgctgcaatgctcgcaagctcctatagcttccctacttctcccgtacctctgaccagcagtgtcttcggtatgtgaaaacccaattattaaaccctacagcatccaacaagcaatcacagctggagtcagacctgtatcacacttgttcctacaacaatcatcagccctattacatcaacaacctttggtgcatatattggcacaacacatcagggcacaacaactacaacaactagtgctagcagaccttgctgcctactcttagcaacagca

SEQ ID NO: 91458 - DNA, 346 bp, Zea mays
cggacgcgtgggtagcaacatagaaagtacaatagtgtaccaacaatggcaggcaaaggattttgcctccttatgctccttggtctttctgcaagtgctgctacggcgaccattttcccgcaatgctcgcaagctcctatagcttcccttcttcccccgtacctctcaccagcggtgtcttcggtatgtgaaaacccaattcttcaaccctacaggatccaacaggcaatcacagctggcatcttacctttatcacccttgttcctacaacaatcatcagccctattacatcagttacctttggtgcatttattggcacataacatcagggcacaacaactacaac

SEQ ID NO: 91459 - DNA, 431 bp, Zea mays
cagcattcaaaaacacaccaagcgaagcgcactagcaacgacctaacaccaatggctagcaagatattagccctccttgcgcttcttgcccttttagtgagcgcaacaaatgcgttcattattccacagtgctcacttgctcctagtgccattattccacagttcctaccaccagttacttcaatgggcttcgaacatccagccgtgcaagcctacaggctacaactagcgcttgcggcgagcgccttacaacaaccaattgcccaattgcaacaacaatccttggcacatctaaccctacaaaccattgcaacgcaacaacaacaacaacaacagtttctgccatcactgagccacctagccgtggtgaaccctgtcacctacttgcaacagcagctgcttgcatccaacccacttgctctggcgaacgt

SEQ ID NO: 91460 - DNA, 451 bp, Zea mays
atttagaccaactagcaacatataaagcacaatagtgtaccaacaatggcagcgaaaatgttttgcctccttatgctccttggtatttctgcaagtgctgctacggcgaccattttcccgcaatgctcacaagctcctatagcttcccttcttcccccgtacctctcaccagcggtgtcttcggtatgtgaaaacccaattcttcaaccctacaggatccaacaggcaatcgcagctggcatcttacctttatcacccttgttcctacaacaatcatcagccctattacagcagttacctttggtgcatttattggcacaaaacatcagggcacaacaactacaacaacttgtgctagcaaaccttgctgcctactctcagcaacagcagtttcttccattcaaccaactagctgcattgaactctgcttcttatttgcaacaacaacaac

SEQ ID NO: 91461 - DNA, 271 bp, Zea mays
cgccgccatcgtctcgggctctcatctctaatcttcgggttcgcgtcgcagtggcttccgcccgggctaccgccatgccgaagcagatccacgagatcaaggacttcctgctgactgcgcggcggaaggacgcacggtcggtgcggatcaagcgggccaaggacgccgtcaagttcaaggtgcgctgctccaggtacctctacaccctctgcgtccacgacgccgacaaggccaacaagctcaagcagtcgctcccggcaggtctgactgt

SEQ ID NO: 91462 - DNA, 445 bp, Zea mays
gtttgtccattcgcattggtctgaatactgtagctactagcgcgagtgccactgtgccgcagctgcctgctcgccattactgcaagctgtgttcaatcaaagcttaattaggctccctctacatctgatccagctaagtagctagccagcactacagaagggcgtggcaagaatcaggagagagatagcaggggggctagctagctgagctcgtgcgacgaagaatggccggaattggcaggaacatggtggcgccgctcctggtgctcaacctcatcatgtacatcatcgtcatcggcttcgcgagctggaacctgaaccacttcatcaacgggcagaccaactaccccggcgtggccggcaacggcgcgacgttctacttcctggtgttcgccatcctggccggcgtggtgggcgcggctttcaaactggcgggcgtgcacca

SEQ ID NO: 91463 - DNA, 422 bp, Zea mays
agatagttggttgaatggaagaaattgttgttgctgaaccctgctgcttatttgcagggacggctattaccattgagccagctagctactgcctactctcatcaacaacaacttcttccatttaaccaattggccgcactgaacctcgctgcttatttgcagcatcaaatattactaccatttagccagctagctgcagcaagccgtgcttccttcttgacacagcaacagttgctgcctttctaccagcagtttgcggctaaccccgcaaccctcttacaactacaacaattgttgccctttgtccaacttgctttgacaaacccagcagccttctaccaacaacacatcattggtggtgccctcttttagattgcttattagttgtaattcaataataaagttttttggatgatgtatgt

SEQ ID NO: 91464 - DNA, 407 bp, Zea mays
accggttcggaattcccgggcaactagctgcattgaactctgcttcttatttgcaacaacaacaactaccattcagccagctatctgctgcctagccccagcaatttgttccattcaaccaactgacagctttgaactctcctgcttatttacagcagcaacaactactaccattcagccagctagctggtgtgagccctgctaccttcttgacacaaccacaattgttgccgttctaccagcacgctgcgcctaacgctggcaccctcttacaactgcaacaattgctgccattcaaccaacttgctttgacaaacccaacagcattctaccaacaacccatcattggtggtgccctcttttagatttcttatgagttatagttcaataataaaggtttttgtctg

SEQ ID NO: 91465 - DNA, 411 bp, Zea mays
ccgaattcgcaggcacgcaggtcggcgaggagggcaggaagaccgaagaccgagccgtgcgggggctcagcacggggacgggacaggaccccaaaatctcacactcttcctgcccgcccggccgggcccgtcgacgcgtcggacttgccggccgagcctcacctccggcctctcctgatgcaaggggatcggatacgccacaggctacgcgacggtgctgcgggactacgagctacgaggtcgcaatctggaaccccggcttcgacttcgacgacaaaatcctcggcttcatcaagggctacaagcgcacctttaatctcacttgcattgaccacagaggcacaccggaacaatcggcgaggacctgcacgctcgaaaccgacgacgaggccataagctggggaaatgcat

SEQ ID NO: 91466 - DNA, 411 bp, Zea mays
gcaacatagaaagtggaatacagtagctaaaatagagcaacaatggcggccaagataggttggatccttatgctccttgctctttctgcatgtgttgctaacgcgaccatttttcctcaatactcacaagctcctatagctgcccttcttcccccataccttccatcaatgaccgctttagtatgtgaaaacccagcccttcaaccctacaggatccagcaagcaatcgcaacaagcaacttacctttatcacacctgttctttcaacaatcgccagccctatctttggtgcagtcattggtacaaaccatcaaggcagaacagttgcagcaactcgtgctaccagtgatcaaccaagtagctctggcaaacctttccccctactctcaacaacaacaatttcttccattc

SEQ ID NO: 91467 - DNA, 431 bp, Zea mays
aagcaacatagaaagtggaatacagtagcaacaatagagcaacaatggcggccaagagattttccatccttatgctccttgctctttctgcatgtgttgctaacgcgaccatttttcctcaatactcacaagctcctatagctgcccttcttcccccataccttccatcaatgaccgattcagtttgtgaaaacccagcccttcaaccctacaggctccaacaagcaatcgcaacaagcaacttacctttatcacccctgttctttcaacaatcgccagccctatctttggtgcagtcattggtacaaaccatcaaggcacaacagctgcaacaactcgtgctaccagtgatcagccaagtagctctggcaaacctttctccctactctcagcaacaacaatttcttccattcaaccaactgtctacactg

SEQ ID NO: 91468 - DNA, 437 bp, Zea mays
gttcaaccctacaggatccaacaggcaatcgcaacaggcatcttaccattatcgcccgggttcctccaacaaccgtcagccctattacagcagttacctttggtccatttggtggcacaaaacatcagggcacaacaactacaacaacttgtgctagcaaaccttgctgcatactctcagcaacatcagtttcttccattcaaccaactggctgcattgaactctgctgcttatttgcaacaacaattaccattcagccagctagttgctgcctacccccagcaatttcttccattcaaccaactagcagcattgaactctggtgcttatttacagcaacaacaactactaccattcagccagctagctgatgtgagccctgctgccttcttgacacaacaacagttggtggcgttctaccttgacgctatgcctaa

SEQ ID NO: 91469 - DNA, 442 bp, Zea mays
tattgagaccagcaagcaacatataaagtagaatccattatcaacaatagagcagcaagggcgaccaagatattttgcctgcttatgctccttgctctttctacatgtgttgctaacgcgacaattttccctcaatgctcacaagctcctatagcttcccttcttcccccataccttccatcaattatagcttcagtatgtgaaaacccagctcttcaaccatataagcttcaacaagcaatcgcagcaagcaacatacctttatcgcccttgttgtttcaacaatcaccagccctatctttggtgcagtcattggtacaaaccatcatggcacaacagctgcagcaactcgtgctacctgtgatcaaaccaattgctctggcaaacctttctccctactctcagcaacaacaatttcttccattcaaccaactgtctacac

SEQ ID NO: 91470 - DNA, 444 bp, Zea mays
attttgagcattcagaaacacaccaagcgaagcgcactagcaacgacctaacagcaatggctaccaagatattagccctccttgcgcttcttgccctttttgtgagcgcaacaaatgcgttcattattccacaatgctcacttgctcctagtgccattattccacagttcctcccaccagttacttcaatgggcttcgaacacctagctgtgcaagccaacatgcaacaacaagcgcttgcggcgagcgtcttacaacaaccaattgcccaattgcaacaacaatccttgccacatctaacaatacaagccatcacaacgcaacagcaacaacagttcctaccagcactgagccaactagccatggtgaaccctgccgcctacttgcaagagcagctgcttgcatccaacccacttgctctggcgaacgtagttgcaaaccagc

SEQ ID NO: 91471 - DNA, 442 bp, Zea mays
gcttcccttcttcccccgtacctctcaccagcggtgtcttcggtatgtgaaaacccaagtcttcaaccctacaggatccaacaggcaatcgcagctggcatcttacctttatcacccttgttcctccaacaatcatcagccctattacaacagttacctttggtgcatttattggcacaaaacatcagggcacaacaactacaacaacttgtgctagcaaaccttgctgcctactctcagcaacagcagtttcttccattcaaccaactaggttcattgaactctgcttcttatttgcaacaacaacaactaccattcagccagctacctgctgcctacccccagcaatttcttccattcaaccaactagcagcattgaactctcctgcttatttacagcagcaacaactactaccattcagccagctagctggtgtgagcc

SEQ ID NO: 91472 - DNA, 376 bp, Zea mays
ccggaatcccgggtcgacccagcgtccggagcactagccagggcgaaccatatcgtctacctacaacagcaacaactcctttcagggagggctctccctatgggcaatgcacctacatacctgcaacaacacttgatgcaacaacagttgctgcaacaaactgcaccagctcttactcaactagctgtggcaaacactactgcctactcacaacaactactctcattcaaccaactaactgtgtcgaactctgctacgtacctacaacagcgataacacatacttaatacaatatcagcagctaacacattgatcgcagccttcctacagcagcaacaaacgctgccatacaaccagttctctttgatcaacccta

SEQ ID NO: 91473 - DNA, 400 bp, Zea mays
cgtcagcctagcaattagctcatcgactccagattggagaactcgacaccatgaaggtgctgatcgttgcccttgctctcctggcgctcgctgcgagcgccgcctccagtacaagcggcggctgtggctgccagacaccaccgtttcgtctaccgcctccgttctatatgccgcctccgttctatctgccgccgcagcagcagccgcagccatggcaataccccactcaaccaccgcagctaagcccgtgccagcagttcggatcctgcggcgtcggcagcgtcggcagcccgttcctgggccagtgcgtcgagttcctgaggcaccagtgcagcccggcggcgacgccctacggctcgccacagtgccaggcgctgcagcagcagtgctggcaccagat

SEQ ID NO: 91474 - DNA, 420 bp, Zea mays
gcacagcgccggcaaccgccgccatcgatcgatcgcccggaaactgacctctaccgatgtctggagccggcgaggaggataagaagcccgcggagggcggcgcccacatcaaccttaaggtcaagggacaggatggcaatgaggtgttctttcgcataaagaggtccacccagctgaagaagctgatgaacgcctattgcgaccgccagtctgtggacatgaatgccattgcattcctgtttgatggccgcaggcttcgcggcgagcagacccctgatgagctggagatggaggacggcgacgagatcgacgccatgcttcaccagaccggaagcagcgttcctagcaccacctaaaagcagcagctgcggagcctcggtttgctctccggcctgcgtagtactaaacaaaaaggaaaaa

SEQ ID NO: 91475 - DNA, 421 bp, Zea mays
cgagatttgaagccagaaaatcttttgctcgatgagaatagcaacctgaaggtatcagattttggtctaagcgcacttgctgaatgccatagacaagacggcctgctccacacgacttgtggcacgcctgcttatgttgccccagaggtgattaacagaaagggttatgatggtgcaaaggctgacatatggtcttgtggggtcatcctgtttgtgctattggctggttatcttccgttccatgataagaacttgatggacatgtataagaagattgagaaagctgacttcaaatgtccaagttggttttctaccgatgttcggaggcttttgcaaaggattcttgatcctaaccctagtagaaggatctcggtggaaaaaatcatggagaatccatggtttaagaagggtttaggtgcaa

SEQ ID NO: 91476 - DNA, 432 bp, Zea mays
attagctcatcgactccagattggagaactcgacaccatgaaggtgctgatcgttgcggttgctctcctggcgctcgctgcgagcgccgcctccagtacaagcggcggctgtggctgccagacaccaccgtttcatctaccgcctccgttctatatgccgcctccgttctatctgccgccgcagcagcagccgcagccatggcaataccccactcaaccaccgcagctaagcccgtgccagcagttcggatcctgcggcgtcggcagcgtcggcagcccgttcctgggccagtgcgtcgagttcctgaggcaccagtgcagcccggcggcgacgccctacggctcgccacagtgccaggcgctgcagcagcagtgctgccaccagatcaggcaagtggagccgatgcaccggtaccaggcgacatacggtgt

SEQ ID NO: 91477 - DNA, 380 bp, Zea mays
ccaactagcaacatagaaagcacaatagtgtaccaacaatggcagccaaaatatgtgggctccttatgctccttggtctttctgcaagtgctgctacggcgaccattttcccgcaatgctcgcaagctcctatagcttcccttcttcccccgtacctctcaccagcggtgtcttcggtatgtgaaaacccaattcttcaaccctacaggatccaacaggcaatcacagctggcatcttacctttatcacccttgttcctccaacaatcatcagccctattacatcagttacctttggtgcatttattggcacaaaacatcaaggcacaacaactacaacaacttgtgctagcaaaccttgctgcctactctcaacaacag

SEQ ID NO: 91478 - DNA, 465 bp, Zea mays
accggttcggaattcccgggcaaaaacacaccaagcgaagcgcactagcaacgacctaacaccaatggctaccaagatattagccctccttgcgcgtcttgcccttttagtgagcgcaacaaatgcgttcattattccacagtgctcacttgctcctagtgccattattccacagttcctcccaccagttacttcaatgggcttcgaacatccagccgtgcaagcctacaggctacaactagcgcttgcggcgagcgccttacaacaaccaattgcccaattgcaacaacaatccttggcacatctaaccctacaaaccattgcaacgcaacaacaacaacaacaacagtttctgccatcactgagccacctagccgtggtgaaccctgtcacctacttgcaacagcagctgcttgcattcaacccacttgctctggcgaacgtagctgcataccagcaacaaca

SEQ ID NO: 91479 - DNA, 436 bp, Zea mays
caacatagaaagcacaatagtgtaccaacaatggcagccaaaatatttcgctggcttaggctccttggtctttctgcgaagtgctgctaccgcaaccattttcccacaatgctcacaagctcctatagcttcctttcttcccccatacctcttaccagcggtgtcttcagtatgtgaaaacccaattcttcaaccctacaggatccaacaggcaatcgcagcaagcatcttacctttatcacccttgtatcttcaacaaccggcagccctattacagcagatacctttcatgcatttgttggcacaaaacatcaatgcacaacaactacaacaacttgagctatgaaaccttgctgtctactctcaatcacaggcatttcttacattcaaccaactggctgcattgaactctgctgcttattttcaacaacaacta

SEQ ID NO: 91480 - DNA, 435 bp, Zea mays
caacaagcaacatagaaagtggaatccagtagcaacaatagagcaacaatggcgaccgggagagtttacctccttatgctccttgctctttctacatgtgttgctaacgcgacaattttccctcaatgctcacaagctcctatagcttcccttcttcccccataccttccatcaattatagcttcaatatgtgaaaacccagctcttcaaccatataggcttcaacaagcaatcgcagcaagcaacatacctttatcgcccttgttgtttcaacaatcgccagccctatctttggtgcagtcattggtacaaaccatcagggcacaacagctgcagcaactcgtgctacctctgatcaaccaagtaactatggcaaacctttctccctactctcagcaacaacaatttcttccattcaaccaactggctacactg

SEQ ID NO: 91481 - DNA, 471 bp, Zea mays
ggttcggaattcccggattgtgagcattcagaaacacaccaagcgaagcacattagcaacaacctaacaacaatggctaccaagatattatgccggcttgcgcttcttgcgctttttgcgagcgcaacaaatgcgttcattattccacaatgctcacttgctccaagttccattattacacagttcctcccaccagttacttcaatgggcttcgaacacccagctgtgcaagcctataggctacaacaagcaattgcggcgagcgtcttacaacaaccaatttcccagttgcaacaacaatccttggcacatctaacaatacaaaccatcgcaacgcaacagcaacaacaattcctaccagcactgagccacctagccatggtgaaccctgccgcctacttgcaacagcagttgcttgcatcaaacccacttgctctggcaaacgtagttgcaaaccagccacaacaacag

SEQ ID NO: 91482 - DNA, 467 bp, Zea mays
ccggaattcccgggtggacccacgcgtccgctagcaacatagaaagcacaatagtgtaccaacaatggcagccaaaatattttgcttggttatgctccttggtctgtctgcaagtgctgctaccgcaaccattttcccacaatgctcacaagctcctatagcttcctttcttcccccatacctctcaccagcggtgtcttcagtatgtgaaaacccaattcttcaaccctacaggatccaacaggcaatcgcagcaagcatcttacctttatcacccttgttcctccaacaaccgtcagccctattacagcaattacctttggtgcatttgttggcacaaaacatcaaagcacaacaactacaacaacttgtgctaggaaaccttgctgcctactctcagcaacagcagtttcttccattcaaccaactggctgcattgaactctgctgcttatttgcaacaacaac

SEQ ID NO: 91483 - DNA, 469 bp, Zea mays
cggtccggaattcccgggagcaacatagaaagcacaatagtgtaccaacaatggcagccaaaatattttgcttccttatgctccttggtctggctgcaagtgctgctaccgcaaccattttcccacaatgctcacaagctcctatagcttcctttcttcccccatacctctcaccagcggtgtcttcagtatgtgaaaacccaattcttcaaccctacaggatccaacaggcaatcgcagcaggcatcttacctttatcacccttgttcctccaacaaccgtcagccctattacagcagttacctttggtgcatttgttggcacaaaacatcaaggcacaacaactacaacaacttgtgctaggaaaccttgctgcctactctcagcaacagcagtttcttccattcaaccaactggctgcattgaactctgctgcttatttgcaacaacaactaccattcagtcagct

SEQ ID NO: 91484 - DNA, 343 bp, Zea mays
gatagaccttcaactcataccattgatcgtgggatagcattacatacgatgatgagagttatcacaatgggtttgggaggagagggctatcttaatttcatgggaaatgagactggacattctgaatggatagattttccaagaggtccgcaaagacttacaagtggtaagtttattccagagaataacaaccgttatgacaaatgtcgtctaagatttgacctgcgtgatgcacactatcttaggtatcatggtatgcaagagtttgatcaggcaatgcaacatcttcagcaaaaatatgaattcatgacatctgatcaccagtatatataccggaaacatg

SEQ ID NO: 91485 - DNA, 427 bp, Zea mays
attgagaccaactagcaacatataaagcacaatagtgtaccaacaatggcagccaaaggattttgcttccttatgctccttggtctctctgcaagtgttgctaccgcaaccattttcccacaatgctcacaagctcctatagcttcccttcttcccccatacctgtcaccagcggtgtcttcaatgtgtgaaaccccaattgttcaaccctacaggatccaacaggcaatcgcaacaggcatcttaccattatcacccttgttcctacaacaaccgtcagccctattacagcagttacctttggtccatttggtggcacaaaacatcagggcacaacaactacaacaacttgtgctagcaaaccttgctgcatactctcagcaacatcaatttcttccattcaaccaactggctgcattgaactttg

SEQ ID NO: 91486 - DNA, 434 bp, Zea mays
  unsure (1)..(434): unsure at all n locations
gccaaaacggggtttcaacctctaattagttgaaacgtcgtttaaatgtagttgtaagaacactggataatgaagtgcattggttgtatatcaatctgacacactatggaaccccaataatatgcactgctgtataattaggttctgttactgcattttgagattccttttgtttgaagaaatgctaaatttgacatctctcttttgttgacaacttaggtacgactaccatgctggtttttggggtgtcatgggacgggaatgtattggcattgtccctccatttattagagaatttaattatccgatggccaaaaattgtgccggtggggatacaagtgtttttgtcaatggcagagaactgcatcaaagagatttagatttacttgtaagaagaagactaccacngacatctggcatgtcatattctaatg

SEQ ID NO: 91487 - DNA, 479 bp, Zea mays
gctctaccggttcggaattcccgggcagcaagcaacatagaaagtagaatccattagcaacaatagagcatcaatggcgaccaagatattttccgtcctggtgctccttgctctttctacatgtgttgctaacgcgacaattttccctcaatgctcacaagctcctatagcttcccttcttcccccataccttccatcaattatagcttcagtatgtgaaaacccagctcttcaaccatataggcttcaacaagcaatcgcagcaagcaacatacctttatcgcccttgttgtttcaacaatcaccagccctatctttggtgcagtcattggtacaaaccatcagggcacaacagctgcagcaactcgtgctacctgtgatcaaccaagtagctctggcaaacctttctccctactctcagcaacaacaatttcttccattcaaccaactgtctacactgaaccctgctgcttatttgc

SEQ ID NO: 91488 - DNA, 439 bp, Zea mays
attagctttatctactccagagcgcagaagaacccgatcgacaccatgagggtgttgctcgttgccctcgctctcctggctctcgctgcgagcgccacctccacgcatacaagcggcggctgcggctgccagccaccgccgccggttcatctaccgccgccggtgcatctgccacctccggttcacctgccacctccggtgcatctcccaccgccggtccacctgccgccgccggtccacctgccaccgccggtccatgtgccgccgccggttcatctgccgccgccaccatgccactaccctactcaaccgccccggcctcagcctcatccccagccacacccatgcccgtgccaacagccgcatccaagcccgtgccagctgcagggaacctgcggcgttggcagcaccccgatcctgggccagtgcgtcgagtttc

SEQ ID NO: 91489 - DNA, 487 bp, Zea mays
ccggttcggaattcccgggtggacccacgcgtccgcccacgcgtccggttacgcgggcgagtacttcggggacaagatccacggcttgggcgtgtacagcttcgccaacgggcactgctacgaaggctcgtggcacgaaggcaagaagcagggattcgggatgtacacgttccggaacggcgacaagcgatcgggggactgggattctgggacgctcaagacccccttgcccccggccgatccttctgtccagcgagccgtacaggctgcacagcgagctgcagagaacgcgtttcgcttgcctagagttgatgagcaggtccacagggcggtaatggccgcgaacagggcggccacggccgctcgagtggcggcgatcaaggcagtccagaacaggatggatgggaagttttgtgagacctatgtgtgaattgctgtgtgcgaaaccatgtttcgctctctctctctctttctaactggacattta

SEQ ID NO: 91490 - DNA, 417 bp, Zea mays
  unsure (1)..(417): unsure at all n locations
catcactttggaggtggagtcctcggacaccatcgacaatgtgaaggccaagatccaggacaaggagggcatccgcccggaccagcagcggctcatcttcgccggcaagcagctcgaggacggtcgcaccctcgccgactacaacatccagaaggagtccacactccacctggtgctccgcctccgcggcggcgccaagaagcgtaagaagaagacgtacaccaagcccaagaagatcaagcacaagcacaagaaggtcaagctctccgtgctgcagttctataaggtggacgacaccactagcaaggtgacccgcctccgcaaggagtgccccaacacagagtgcggcgcgggcgtcttcatggccaaccacttcgaccgncactactgcggcaagtgcggccttaactatgtcta

SEQ ID NO: 91491 - DNA, 435 bp, Zea mays
aggcaatcgcagctggcatcttacctttatcacccttgttcctccaacaatcatcagggctaggacaacagttacgtttggtgcatttattggcacaaaacatcagggcacaacaactacaacaacttgtgctagcaaaccttgctgcctactctcagcaacagcagtttcttccattcaaccaactaggttcattgaactctgcttcttatttgcaacaacaacaactaccattcagccagctacctgctgcctacccccagcaatttcttccattcaaccaactagcagcattgaactctcctgcttatttacagcagcaacaactactaccattcagccagctagctggtgtgagccctgctaccttcttgacacaaccacagttgttgccgttctaccagcacgttgcgcctaacgctggcaccctcttac

SEQ ID NO: 91492 - DNA, 391 bp, Zea mays
  unsure (1)..(391): unsure at all n locations
cacgtctcccagatctaactcccaaagactcacgaatcccagagagcctccatggcgacgcaccgccactgcctcccactcctcctcgtggccgccgccctcgccctcgccgccgtccctgctcgcgcggcgctgggcggcgggcgcggcccgctgctgggcgggtggaacccgatccctgacgtgagcgactcgcacatccaggagctaggcgggtgggcgctggggcaggcgaagcaccagaagctggccgccgacgggctgcggttccgccgcgtggtgcgcggcgagcagcaggtcgtgtccgggatgaactaccgcctctacgtcgacgccgncgaccccgccggccgcaccgtgccctacgtcggcctcgtgtacgagcaagtct

SEQ ID NO: 91493 - DNA, 379 bp, Zea mays
cggacgcgtgggattttcagcattcaaaaacacaccaagcgaagcgcactagcggcgagctaacaccaatggctaccaagatattagccctccttgcgcttcttgcccttttagtgagcgcaacaaatgcgttcattattccacagtgctcacttgctcctagtgccattattccacagttcctcccaccagttacttcaatgggcttcgaacatccagccgtgcaagcctacaggctacaactagcgcttgcggcgagcgccttacaacaaccaattgcccaattgcaacaacaatccttggcacatctaaccctacaaaccattgcaacgcaacaacaacaacaacaacagtttctggcatcactggaccacctaac

SEQ ID NO: 91494 - DNA, 404 bp, Zea mays
caagcaacatagaaagtggaatccagtagcaacaatagagcaacaatggcgaccaagagactttccctccttatgctccttgctctttctgcatgtgttgctaacgcgacaattttccctcaatgctcacaagctcctatagcttcccttcttcccccataccttccatcaatgatagcttcagtatgtgaaaacccagctcttcaaccctataggctccaacaagcaatcgcagcaagcaacatacctttatcacccttgtttcaacaatcgccagccctatctttggtgcagtcattggtacaaaccatcaaggcacagcagctgcagcaactcgtgctacctgtgatcaaccaagtagctctggcaaacctttctccctactatcagcaacaacaatttct

SEQ ID NO: 91495 - DNA, 439 bp, Zea mays
cccgggcgccaagcgaagcgcactagcaacgacctaacaacaatggctaccaagatattagccctccttgcgcttgttgcgctttttgtgagcgcagcaaatgcgttcattattccacaatgctcacttgctcctagtgccattattccacagttcctcccaccagttacttcaatgggcttcgaacacctagctgtgcaagccaacatgcaacaacaagcgcttgcggcgagcgtcttacaacaaccaattgcccaattgcaacaacaatccttgccacatctaacaatacaagccatcacaacgcaacagcaacaacagttcctaccagcactgagccacctagccatggtgaaccctgccgcctacttgcaagagcagctgcttgcatccaacccacttgctctggcgaacgtaattgcaaaccagcaacaacaac

SEQ ID NO: 91496 - DNA, 449 bp, Zea mays
gcaacaatggcgaccaagatattttccctccttatgctccttgctctttctacatgtggggctaacgcgacaattttgcctcaatgctcacaagctcctatagcttcccttcttcccccataccttccatcaattatagcttcagtatgtgaaaacccagctcttcaaccatataggcttcaacaagcaatcgcagcaagcaacatacctttatcgcccttgttgtttcaacaatcaccagccctatctttggtgcagtcattggtacaaaccatcagggcacaacagctgcagcaactcgtgctacctgtgatcaaccaagtagctctggcaaacctttctccctactctcagcaacaacaatttcttccattcaaccaactgtctacactgaaccctgctgcttatttgcagcaacaactattaccatttagccagctagctactgc

SEQ ID NO: 91497 - DNA, 434 bp, Zea mays
tgaaaaaggaaaattcaaagaagaagcaggtactgtatgtcatgaatccgaacaggttcagggcttgtgaattcctgattcgattccatgagcaacaacgtggagacaagataattgtgtttgctgataatctgtttgcactaactacttatgcgatgaaactgcgcaagccaatgatttttggtgccacaagccatgctgagaggacaagaattctctaccaattcaagaacagtccagaagtcaatacaatttttctttcaaaggtcggtgataactcgattgatatcccagaagctaatgttatcatacaaatatcatctcacgctggttcgagacgtcaagaagctcagcgtctgggccgtattctcagagcatagggtaaacaccaagataggatggctggaagaaaagaagaatacaatgcttttttc

SEQ ID NO: 91498 - DNA, 450 bp, Zea mays
accaactagcaacatagaaagcacaatagtgtaccaacaatggcagccaaaatattttggctccttatgctccttggtctttctgcaagtgctgctacggcgaccattttcccgcaatgctcgcaagctcctatagcttcccttcttcccccgtacctctcaccagcggtgtcttcggtatgtgaaaacccaattcttcaaccctacaggatccaacaggcaatcgcagctggcatcttacctttatcacccttgttcctccaacaatcatcagccctattacaacagttacctttggtgcatttattggcacaaaacatcagggcacaacaactacaacaacttgtgctagcaaaccttgctgcctactctcagcaacagcagtttcttccattcaaccaactaagttcattgaactctgcttcttatttgcaacaacaacaactacca

SEQ ID NO: 91499 - DNA, 520 bp, Zea mays
  unsure (1)..(520): unsure at all n locations
nggtnttttatgggcttttngtaatggagagtaactgattgctgtaccggtccggaattcccgggtcgacccacgcgtccgctgggaaaggcatccgatttatccgtgctgattctcaggttttcctttttgccaactcaaaatgcaagcgctacttccacaaccgcctgaagcctgcaaagcttacctggacagcaatgtacaggaagcagcacaagaaggatatccatgctgaggctgtcaagaagaggcgccgcgccaccaagaagccatactcgaggtccattgtgggtgcttccctagaggtgatccagaagaagagggctgagaagcccgaggtccgcgatgctgctagagaagctgctcttcgtgagatcaaagaacgcatcaagaagaacaaggattaaaagaaagccaaaaaagcttaagtgaccaagtcccagaaggcacagacgaagggagcggtccaagagggttccaaaggccccaagtgggtggtggccgtggccaacccctgaaa

SEQ ID NO: 91500 - DNA, 525 bp, Zea mays
  unsure (1)..(525): unsure at all n locations
naggataagctggngtcnnaacaagtaatgtaatgtattgctatgctcgtccgaatcgcagggtcgacccacgcgtccgggatgcgacaaatgttggggatgaaggtggttttgcacctaacattcaggaaaacagagaaggccttgaactattgaaggcagccatagaaaaggctggctacactggaaaggtggtcattggaatggatgttgctgcttctgagttcttcggtgagaaagacaagacttatgatcttaatttcaaggaggagaacaacgatggctcaaacaaaatttcaggcgacagcctgaaagacctgtacaagtcctttgtttctgagtaccctatcgagtcgatcgaagatccatttgatcaggatgactggagcacttatgccaaactcactgatgagattggacagaaagtgcagattgtaggagatgatcttctcgttaccaaccccaccagggtcgccaaggccatcaatgagaagacctgcaatggctctctctttgaagtgaacc

SEQ ID NO: 91501 - DNA, 513 bp, Zea mays
ggtggggaggctgtgtgatgaaagagcttatgcgcactgctgtaccggtccggaattcccgggtcgacccacgcgtccgggggctcaggtcagagacataccttcttccattggatttctcataaacttgcagaccttgagccttcaaggttgccaaagcttgcagagacttcctcggtccatcagggcattgctagagcttagatgcctttgtctctatggaacttccctaagctatgtaccaaagggtgttggtaaattgaagcatctcaatcatctagatggtctaatcattggtcatgacaacaatgcgcctgagggttgtgacttagatgaccttaaagcattgtcagaactaaggcaccttcatatagagagtttggatagggctacttccggtgcgtctgcactcgcaaacaagccattcctagaggatctgtacctctctgagcaagcaccagcaatagaaaatcaggaggatctggaggacaaagatgaaacagaaaaagaaga

SEQ ID NO: 91502 - DNA, 501 bp, Zea mays
  unsure (1)..(501): unsure at all n locations
gaggtgtattgtgacaatagaatggaatgnattgactgccccgctgcggaatactccggccaagaataaagattctctctttatgtgtagggctgacaaatgtgtactagcatcttctggctttcaaggtgatagtaaagctctgcacaagaacctagctgccagagaattgctataccaacaccagcataacaaaaggatgagctgccctgccatggcacagctcctctccaataccctgtactacaagcgcttcttcccatattacgccttcaatgtgctcggtgggcttgacagcgaggggaaagggtgtgttttcacctatgatgcagtaggttcctatgagagaactggttatagtgctcaaggaacgggatctactttgattatgccagtcctggacaatcaactaaaatcaccaagtcctctattgctccctgccagggatgctgtcacaccattgtcggaatcagaggccatcgatctagttaaggatgtgtt

SEQ ID NO: 91503 - DNA, 503 bp, Zea mays
tggctagtgttgtatcatatgaaaggactcagtactcgcccggtccggaattcccgggtcgacccacgcgtccgcggtatcccaggggataccgaagggttacgagagtacatggccaagtttggacccctggacgattgtgtcgtcatgaaggagcggtcttctgggcgatctcgcgggtttggctatgtaacattcgcctcagctgacgatgcaaagaatgttcttgattgcgagcatgttcttgggagccgtacattagaagtgaaggtagctactccaaaggaagaaatgaaatcacaaggatcaaagaaagctacaaggatattcgttgctcgaattccgcaatcggtggatgagtcgatgtttcgtagacattttgaagcttttggggaaattcttgatctttacatgccaaaggaacatggttcaaaagggcatcgtggaattgggtttatcacgtttcaaagtgcaaaatctggggacaacatcatgcaagagtc

SEQ ID NO: 91504 - DNA, 493 bp, Zea mays
gatgttgtgtgataggggggggaggtgtgatcctccggtccggaattcccgggtgaactccctgggcctcgtctcggccaggaagaccgccgaggcgatcgacatcctgaagctcatgtcgtccaccgacatcgtggcgctgtgccaggccgtggacctgcgccacctcgaggagaacatcaaggcgtcggtgaagaacaccgtgacccaggtggccaagaaggtgctgaccatgaacccctcgggcgagctctccagcgcccgcttcagcgagaaggagctgatcagcgccatcgaccgcgaggccgtgttcacgtacgcggaggacgcggccagcgccagcctgccgctgatgcagaagctgcgcgccgtgctggtggaccacgccctcagcagcggcgacgcggagcgggagcccttcgtgttctccaagatcaccaggttcgaagaggagctccgcgcggtgctgccccaggaggtggaggccgcccgc

SEQ ID NO: 91505 - DNA, 521 bp, Zea mays
  unsure (1)..(521): unsure at all n locations
aggtngagaggggtctgttcatgaggaaggtgtatgctatgctcgtccggaattcccgggcaacgccgagctcgacccggagaagaggctgtaccccggcggctcctacttcgacccgctcggcctggcggccgaccctgagaagaaggagcggctgcagctggcggagatcaagcacgcgcggctcgccatggtcgccttcctcggcttcgccgtgcaagccgncggcaccggcaaggggccgctcaacaactgggccacccacctgagcgacccgctccacaccaacatcttcgacacgttccgaaggtcctcttaagcccgccattggctccgcccgtccatcgaccggccggaacgtgttcttggattaattaactacgatctctatgagcctggggatggatcaacccgtcgtgcgtggtctcgttttgtgatgagtgggagagagaggatggcaagatcgatcctttngtaatggagatcctcgtattaggagagctaccggttggaacttgtgg

SEQ ID NO: 91506 - DNA, 521 bp, Zea mays
gtggagggctgtctccatgctagtgtcgctacgcatgccgtaccggtccggaattcccgggtcgagaacctcgccgaccacctcgccgaccccgtcaacaacaacgcatgggcctacgccaccaactttgtgcccggcaagtgagggggtcggaggcgccaccgcccaccggccaccgctgcggatatctaggtgttcggatgcacgtgagcgcgcactggttccagtttgtaccatgatgtaaattacttaccgtaccagggttcaatcggcaaggaagaattgttgtgttcaaaaaaaaaaaaaaagggcggccgctctagaggatccaagcttacgtacgcgtgcatgcgacgtcatagctcttctatagtgtcacctaaattcaattcactggccgtcgttttacaacgtcgtgactgggaaaaccctggcgttacccaacttaatcgccttgcagcacatccccctttcgccagctggcgtaatagcgaataggcccggaacgaattgccttttca

SEQ ID NO: 91507 - DNA, 515 bp, Zea mays
  unsure (1)..(515): unsure at all n locations
ngtttaggaggcgtgagtgcatgtctacgtcctacggcatgccgtaccggtccggaattcccgggtcgacccacgcgtccgaagatgcactgccatggctggcggtctatttactgcatcccgaagcggcctgcattcaaaggttctgcgcctctgaacctttccgaccgtcttcaccaggtccttcgctgggcccttgggtccgtcgaaattttcttcagcaagcactgcccactttggtacggatacggcggcgggctaaaattcctggaaaggttttcttatatcaactccatcgtttatccctggacgtccattcctctcctggcttactgtaccttgcctgccatctgcctgctcacggggaagtttatcacaccagagcttaccaatgtcgccagtatctggttcatggcacttttcatctgcatctccgtgaccggcatcctggaaatgaggtggagtggcgtggccatcgacgactggtggaagaacgagcagttctgggtcatcgg

SEQ ID NO: 91508 - DNA, 516 bp, Zea mays
  unsure (1)..(516): unsure at all n locations
ggtggagaggctgtgtgatgtctatgtcatacgtatgctcgtaccggtccggaattcccgggtcgacccacgcgtccgcgcctcggcttgtccccaccaacccgcagctcgctcccaccaaacccacacccgaacaatggcgtcggcgtccaaggaggaggtgatcgggaagctcaacgtccgcgtggtgcggggcaacaacctggtcatcgccgacccgctcacccacaccagcgacccctacgtcgtcctccagtacggcgctcagaaggtgaagactagtgtccagaagaagaactccaatccagtgtggaacgaagtactgcagctctcagtaacacatcctacgaagccagtgcaccttgaagtttttgatgaagacaagttcacagcagacgacagcatgggtgttgctgagatcaacattactgacatctacgatgctgcgaagctggacctgaagcacgcctctgatgggacaaggatcaagacgatctaccctgtcngagtaaactn

SEQ ID NO: 91509 - DNA, 504 bp, Zea mays
  unsure (1)..(504): unsure at all n locations
agaggtctcatgtttgccaccgaataanagcagtactcgcccggtccggaattcccgggtcgacccacgcgtccgcgagtctcgtccacccgtcgtcctcctagctcctctactcgccagtcgccatgggcaagagtaagatcggaatcaacggcttcggaaggatcggcaggctcgtggccagggtcgccctccagagcgaggatgtcgagctcgtcgccgtcaacgaccccttcatcaccacggactacatgacctacatgttcaagtacgacaccgtccacggccactggaagcacagcgacatcacactcaaggactccaagacccttctcttcggtgacaagccggtcaccgtctttggcatcaggaaccctgaggaaatcccgtggcgtgaggctggcgctgagtatgtcgtggagtccaccggcgtcttcactgacaaggacaaggctgctgcacatctcaagggtggtgccaagaagggtgttatctctgccccaa

SEQ ID NO: 91510 - DNA, 498 bp, Zea mays
ggctgtgtctaacccagcccacatcgcatgccgtaccggtccggaattcccgggtcgacccacgcgtccggtttactatgacaccagtgaggggaggaaggtatgcacctattaccatttggtgtccaggcctgctattctcctaattgaccccgtcactgggcaaaaagtacatgcttggaatggaatggttcacccagaccgtttactcgaggatttactaccttacctggataaaggtccgaaggggcaccatgcagctcaacctcaaaagcgcccaaggaaagttgatcaggaagcttctacgggcaagcaaggcaaaatcgctgtagaggatgaggatgaagaactagcaagggcaatagcagcttcgctagaggtagtcattgaagcatcagacgccagtgatgatgatatggctgaagctgaacctgatgaggaaaatgagcccagcttaaacatcaagcctgattatcctactcttcctgaagaacctaa

SEQ ID NO: 91511 - DNA, 520 bp, Zea mays
  unsure (1)..(520): unsure at all n locations
gtttgagagggtgtgtacctgcatcgttnagctacgnctagtatggtccggaattcccgggtaaaccgccaaccgcagtttatgttggcaagattgccccaacagtagacaatggtttccttctttcacttctcgagctgtgtggacctgtcaagagttggaagcgtgccgaagatccaagtaatggaaaacctaaaggttttgggttttgtgagtttgaatctgctgaaggcatccttcgtgcgacacggcttctcaacaaattgagccttgatggtcaggaactggtgattaatataaatgatgccaccaaggagtacctgaagaaacatgttgaggaaaagaagagaggcccagtgaagtcaaagaatcaaggtgggatggaactacagctggtgcttgaaatgaatcaataaaatctggttctgatgaatcagattaggagacaggagatgcttgagacaaggacagtgactagagcacttataaattggggattgttactgatgaagactcttaa

SEQ ID NO: 91512 - DNA, 520 bp, Zea mays
  unsure (1)..(520): unsure at all n locations
agttntaggcggtgtctgttctcgatgcgtagttgcatcgcccgtaccggtccggaattcccgggtcgacccacgcgtccgcaatcaaccagcaacactcttctcttataacatagtacagcgaaggtaactcacatggcaacttccatgggttgtctcgtcttgctctgccttgtttcttctctccttcccagtgccgtccttggccacccatggggtggcttgttcccacagttctatgaccattcgtgccccaaggcgaaggagattgtgcagtccattgtggcacaggctgtggccaaggagaccaggatggcggcatctttagtcagactgcatttccatgactgctttgtcaagggctgcgatgcttcggtgctgttggacaacagcagcagcatagttagtgagaaagggtccaacccgaacaggaactccctcagggggtttgaggtgatcgaccagattaaggctgctcttgaggctgcctgcccaggcacagtctcctgtgccgacattg

SEQ ID NO: 91513 - DNA, 519 bp, Zea mays
  unsure (1)..(519): unsure at all n locations
gattgagagggttngttagagggaaagatggtatgcagtactcggtccggaattcccgggggacatgtgcacaactggaggcactgaatgtttccgtgctaggtggcgtgtctcagacagtagacttgcagacgttgtgcaacatagaaggctgggatgcgtacgcgttggcttttcaggcgacggaagagcaggcacatcttcaattcatgaaccctggcatggaggatgatccaacttgtggtcctatcctagacaacgttgccggcaagaagctcttcaccccagacaaaccaaaggataacgtggtgctgaatggagactttgacgagggtccatggatggtccccaacacgagcttcggcgtgctgctcccaactaaccttgacgagcaaacgtctgccatacctggttggatgatcgagtcaaaccgcgccgtccgctacatagactctgatgagtacaaggtcccccagggaaggcgttgcattgagcttttgtcaggcaaggagggtattt

SEQ ID NO: 91514 - DNA, 521 bp, Zea mays
  unsure (1)..(521): unsure at all n locations
gggtttaaggcggtgtctgttctagtagtgtagctgcatcgctcgtaccggtccggaattcccgggtcgacccacgcgtccgaaaaggctttagagctaatgataaacagcaagaaggaaacgactccacctccgcagcaaaagatggagagattgcaaagttttgaggaggaacacaagaatgctctccagagagcaaagaccctggatgttcctcatgctgcggacctgtctgaagaggagattcaggaggatagcactgcaccaccctctgatactcatagcgaaacaaccacggaaacaaaatctggaggtagaacgagttgggacgaactgatggagaagcttttcaccagggatgaagatgggagacttgtcgtgaacaaggacgcgatggcgagggaaattgttgtcctgtaacgagtgccgagactgctctgtccgtggtagtttattctattagcgaactgtataaaaagagtagcttgcggtgtgatatatntaaaactgttttcaacaac

SEQ ID NO: 91515 - DNA, 528 bp, Zea mays
  unsure (1)..(528): unsure at all n locations
tgagtatgatgtgctctgtcgctgnctcagcncgtanagtcattactgtaccggttcggaattcccgggtcgacccacgcgtccgaaaaggctttagagctaatgataaacatcacgaaggaaacgactccacctccggagcgaaagatggagagattgcaaagttttgaggaggaacacaagaatgctctccagagagcaaagaccctggatgttcctcatgctgcggacctgtctgaagaggagattcaggaggatagcactgcaccaccctctgatactcatagcgaaacaaccacggaaacaaaatctggaagtagaacgagttgggacgaactgatggagaagcttttcaccagggatgaagatgggagacttgtcgtgaacaaggacgcgatggcgagggaaattgttgtcctgtaacgagtgccgagactgctctgtccgtggtagtttattctattagcgagctgtataaaagagtaagctgcggttgtgatatatttaaaaactggattccaaaaactc

SEQ ID NO: 91516 - DNA, 517 bp, Zea mays
  unsure (1)..(517): unsure at all n locations
gggggngagaggctgtgtcgatgatggggacttattgtcatgctctaccggtccggaattcccgggtgagaatgtcactgtaacaccccaccttggagctagtactgtcgaggctcaggaaggcgtcgctatcgagattgcggaagccgtggttggtgcgctgagaggggagctcgcagcaaccgctgtgaatgcgcccatggtcccagctgagatcctgtcagagctggctccatatgtttctctggccgagaagctcgggaggctggcggtgcagctcgtggccggcgagagcggcatcaagggcgtgaaggtggtgtacaccacagcgcgtggccccgacgacctggacactcggctcctccgcgcgatggtgaccaagggcctggtggagccggtgtccagcacgttcgtgaacctggtgaaacgcgactacacggccaaacagcgcggccttcgnctcacggaggagcgcgtggcgcacgacagccccgcggcggaggcgccgctggagtcc

SEQ ID NO: 91517 - DNA, 504 bp, Zea mays
agaggtgtgttgtcggatacgaaagcattgccatgactcgcccggtccggaattcccgggtcgacccacgcgtccggggagagcgaggagagacagatacagatcgcgcgctgagatgtcgtcggactcctcgtcgtgggcgcgcgccctggtgcagatctcgccctacaccttctccgccatcggcatcgccgtctccatcggcgtctctgttctcggcgcggcatggggtatcttcatcacggggagcagcctcatcggggccgccatcaaagcgcccaggatcacatctaagaacctcatcagtgtcatcttctgtgaggctgttgcaatttatggtgtaattgtggcaatcatcctccagacaaagcttgaaagtgtgccaacatcccaaatgtacgatccggagtctcttcgagctggctatgcgatctttgcatctggtcttatcgttggcttcgctaatcttgtttgcggggtatgtgtggggataatcggaagcag

SEQ ID NO: 91518 - DNA, 499 bp, Zea mays
  unsure (1)..(499): unsure at all n locations
tatgtgtgtgtggatgggagaataagagatngctcgcaccggtccggaattcccgggtcgacccacgcgtccggacaatcaaaagctaccccctatccgatccaaccctctctggctgctacctcgttcggccggcatcggcagtgcacgatggctctgaggatgtgggcgagctcagccgacaatgcgctcaagctctcggcgggcggcggcggagcccgggctgctgctgccggcccggccttctctatctccaggttcttctccactgttcacgatgggttgaagtacactcagtctcacgaatgggtcaagacgacgggcgacgtcgccaccgttggcatcacggaccatgctcagggccacctgtgagaggtggtgttcgtggagctgccggaacccggcacgaaggtcgccgcgggaggacccttcggcaacgtggagagtgtcaaggccaccagcgacgtcaactccccgatctacggcgaggtcgtcgagt

SEQ ID NO: 91519 - DNA, 519 bp, Zea mays
  unsure (1)..(519): unsure at all n locations
agtttggggtgtgtctgtccctagcttgtatctgcatagctctaccggtccggaattcccgggtcgacccacgcgtccgggctgtccgcagtgtccagatggagggtctgacttggggagcatcaaagcttgtgcctgttggatacggcatcaagaagatgactatcatgttgacaattgtcgacgatcttgtgtccatcgacactctaattgaggaccaccttacgcaagagcccatcaatgagtacgtccagagttgcgacattgtggctttcaacaagatctagagttcagtttctgagattgggcaacggcagcggctcagctcgtcaagtttgtgctgggatgccagtttatcccctctagtctattacagaaatgttgttcggaactgagtctaatataaacatnctggtctgagtttattggtgagtggtgccagtttttttcaatatacatttatcttaanaacagcggtactgatgttttttggcctaaaaaacanaagcttaaaattta

SEQ ID NO: 91520 - DNA, 518 bp, Zea mays
gagatgagggctttgtgatgtcagcccactacgtcatgccgtaccggtccggaattcccgggtcgacccacgcgtccggtggcggggacgagcccgacggccatccgcatcgcgcagggggcggcgtccaagacgtggtacaccagcttcggcgcgatggtggccatcgacgacccgctgacgacaggcccgacgcgcgccgcgggcaccgaggtgggccgcgcccagtgcacctacacgtctgcggaccagcacacgttcggcctactaatggtgatggacttcgtgttcacggccggggagcacaagggcagcacgctctccatcctcggccgcaacgaggtactcagcgacttacgcgagatgagcatcgtcggcggcagcggaaagtcccgaatgaaccccggttacttcaagcccccaaccttcgattccggtttcaattccgccagacccttgttcaattccccgggaaactttaggtctatagctccggtttggataaccttggtggggtc

SEQ ID NO: 91521 - DNA, 516 bp, Zea mays
gagtttagagactttgtcatcgttagctagtaagtcatgcctgtaccggttcggaattcccgggtcgaccaacgcgtccgggatgctggtcggcgacgtcccgtgggagatgtttgtcgagtcatgcaagcgtctgaggatcatgaagagttctgaagccataggtcttgcaccaagaacgaaggacaagtgcaagaacaagagctgaagaagatgcagtgttaaagatgttgcccattgtatcagaagaatggtccccttgcagtgcgctgccgttttttttttcctactagaaatataacgcgttttaattactagttggagggagacctgtcttgttcaactcgttcatggaccagaagcaataatatatccgtgtgtagctggattggtgttatgtcatgtcccctaccgtgtctcccagaatctacttggtgattttattccagtgttgttaatcaagtttatgtgattgttaagtaaagggcatcaatgggactattattatttaaaaag

SEQ ID NO: 91522 - DNA, 500 bp, Zea mays
tggtgtatgtgaattagttatatatcactgctcgtcaccggtccggaattcccgggtcgacccacgcgtccgtggattaagatcccctacccactgcaatggggtgcgccgaccttcaacgccggccagtcatttgggattgtgtctgctgttttggtctcgctggtagagtccacagcctgctacaaagccgctgctcggcttgcgagtgcgactccacctccggctcacatcctcagcagaggcattgggtggcagggaatcggcatcctccttgacgggctctttggaacggggactggctccactgtctcagtggagaacgtcgggttgcttgggtcgacaaggatcgggagccgacgggtcatacagatctcagctggcttcatgatctttttctccatgctggggaaatttggagccttgttcgcttccatcccgttcaccatctttgcggccgtgtactgcgtcctgttcgggctagttgctgcggtggggct

SEQ ID NO: 91523 - DNA, 511 bp, Zea mays
  unsure (1)..(511): unsure at all n locations
gattagggtgtgtgtgttcctagctcgtccgcatgncgtaccggtccggaattcccgggtcgacccacgcgtccggtgacaaacagcagatagatgagaggtgccaacagcttagagaatcaattgacacaagcactgctgtattcgacaaagaaaaggcccaagagcgtttatctaagttatctggaggtgttgctgtactcaagattggtggagctagtgaagctgaagttggtgagaaaaaagatagggtgacagatgctctaaatgctgcaagggctgctgtggaggagggcattgtgccaggtggtggagttgcccttctttatgccaccaaggagcttgacaagattagcacagcaaacgaggacgaaaagattggagttcaaattatcaagaattctttgaaggcttccttgatgaccatagctgcaaatgctggcattgatggagctatagtcatagggaaactgattgaacaagaggacctcagttgngctatgatgcacca

SEQ ID NO: 91524 - DNA, 515 bp, Zea mays
  unsure (1)..(515): unsure at all n locations
gttgagggctttgtgatcgttagctcactcgccatgccgtaccggtccggaattcccgggtcgacccacgcgtccggggaagtgaactagcggtccacgatactccgacgcccactttgctacctcggagccctagccgccgcccatggatatcgccggagaccggcgccggtagcgatacgcaaaaggagtggtacgttctttgaccttgtttattgctgcgcccgaggcgtgtggcgcggggggagcaggaaggagaggggaagaacagaaggggaaggcgggcggggccgcgatgtcggtgcggatcaaggcggttgtagaccggttcgtgaaggagctgcaggaggcgctggacgcggacatccaagaccgcgtcatgaaggagcgcgagatgcagagctacatcgaggagcgcgagcgcgaggtcgccgagcgggaggccgnctggaaggccgagctatcccgncgcgaggccgaaatcggacgggaagaagccaagctggaaataggaa

SEQ ID NO: 91525 - DNA, 516 bp, Zea mays
gaggttaggagactttattcatgtaagagatatacggcactgctgtaccggtccggaattcccgggtcgacccacgcgtccgctagatcgcacggccgcccttacttttttttcttcagtccaaaagatgacggttcctgtgatattgatattaaatgcaaaaatttagtcagctccagaattacactgattatcatgttacaaggtcattgcaacttccaggtctctcaactgggaaactagatggttaccgacacaatctcagagtagtagatttcaatattggggtaaaccctaaaccaaacaaaggcagtctaatcgctaaagatgtatcacgccacagcagcactcatttgctcaaatctcactaatgtactctaaaagagattcaacctcctgcctcagggcagcaattttctgctgctgcaaagcaatcctgttctctacatcttgcccgcgcagcttcttctcaaagctgtcgacaacggtggaatgccttgtcatgagcttctcctg

SEQ ID NO: 91526 - DNA, 499 bp, Zea mays
  unsure (1)..(499): unsure at all n locations
gatgttngtgtgagatatgataggatgnacgctcgcccggtccggaattcccgggtcgacccacgcgtccgcaagctccttcgcctcgaaccctctcgcgcttgggctggctttcactctccagggccccactcccacctcgccgccgcagccatggcgatcacagcgccaactcccgacatcctcggcgagcgccagtccggccaggacgtccgcacgcagaacgtgatggcttgcggggcggtggccaacatcgtcaaatcctcgctcggccccgttggtctcgacaagatgctagtggatgatattggtgatgttacaatcactaatgatggagcaaccatacttaagatgttggaagttgagcatccagccgccaaggttcttgttgagttggctgagctccaagatcgtgaggtaggagatggaactacttccgttgtcatcatagcggcagagttactcaagagaggcaatgatnctgtgaagaataagatcc

SEQ ID NO: 91527 - DNA, 523 bp, Zea mays
  unsure (1)..(523): unsure at all n locations
gagggggaggtgtgtgtgtaatagagggtcaatggtacgctctaccggtccggaattcccgggtcgacccacgcgtccgctttccttgtttcttcattccggtacgaaggggaggggtccaagtgaagagaagagaaggcctgcgagcgatgggcatcgtcgacgtcgtctccgagttctgctccttgccgaggactcgccggcatctcaagaagaggaagcagttccagacggtggagatgaaggtgcgcatcgactgcgaagggtgcgagcgcaaggtgaagaaggcggtggagggcatgaagggcgtgagctccgtggaggtggcggccaagcagaacaaggtgacggtcacgggctacgtggacgccaccaaagtcatgcgccgcgtcggcctacagacaagcaaaccggtgggagccctgcccctacgtgccctacgagatggtgcagcacccctacgcgccgggcgcctacgacaagaaggcccncggccgctacgtccgcaacgtcgtcttcgacc

SEQ ID NO: 91528 - DNA, 507 bp, Zea mays
ttgagcggtgtgtgtcctagctgtattgcaaggcataccggtccggaattcccgggtcgacccacgcgtccgctgtccttgtctcttcattccggtacgaaggcgaggggtccaagtgaagagaagagagggccggcgagcgatgggcatcgtcgacgtcatctccgagttctgctccttgccgaggactcgacggcatctcaagaagaggaagcagttccagacggtggagatgaacgtgcgcattgactgcgaagggtgcgagcgcagggtgcagaatgcggtggagggcctgaagggcctgagctccgtggaggtggcggccaagcagaacaaggcgacgcgaacggactacgtggacgccaccaatgtcatgcgccgcgtcacctacgagacaggcaagcagctggagcactggccctacgtgccctacgagatggtgcactaccctacacgcccggcgcctacgactagtatgccatccgcggctacgtccaaacgtcggtt

SEQ ID NO: 91529 - DNA, 513 bp, Zea mays
tgtagagggctgtgtcatgttagttcatcagcatgctgtaccggtccggaattcccgggtcgacccacgcgtccgcaatttagaagcgcccctcctcctctccccatccgtgacccaatctaatcgacacccggccgagatgggccgcaagttcttcgttggtggcaactggaaatgcaatggaaccgcagatcaggttgagaagattgtcaaaaccctgaatgaaggaaatgttccctcttcagatgtcgttgaggtcgttgtcaagcctacttatgtgttcctcccggtggtcaagagccagctgcgcaaaaattcccaagtggctggtcaaaactgttggtggaagaaggaaggtccattcactggtgaatttagtgctaaaatgctggtcaactttggcgtacctggggtcattcttgaacattttgaagggaaagctttgttggaagaatcaattgagttggttgtaaacaaggtggcttttgctttgcttaaggacctaaagttctt

SEQ ID NO: 91530 - DNA, 516 bp, Zea mays
  unsure (1)..(516): unsure at all n locations
gagaaaagagtgctgngttcatgttcagcccatacagcatgcctgtaccggtctcggaattcccgggtcgacccacgcgtccgccccaacatcaatgaaagatgtaccatccaagtctcgatccagcagtgatcagcgacacatatcttcaggttgatgctcttggaagagtatctttttcttccatacggaggcctcggtctcttcttgaagtcgaccatccttcatctgctgatggctctcatgatcagaagtccactgtgaggcccctggagaaagaaccaatgcttgcagcaagagtcactgttgaagacgccctttgccttgttcttgaggttgatgacactgaccgtctgttgcagtctagccagtcacaggacaacattttcgaactgaaacgaagacggcaagtcctccttgaaggtctagctgcatcattgcagtttgttgatcctctcggacccagcaaatctggtcattcatcctggtcagcccttgaagacgatgttttttttt

SEQ ID NO: 91531 - DNA, 499 bp, Zea mays
  unsure (1)..(499): unsure at all n locations
gatgttnattttggcatacgattatatatcacgctcgcccggtccggaattcccgggtcgacccacgcgtccggttggcttctcctccccctccggttcgggttccggttcgggagggtctcccgggttcggtttcctgggtgaaccgattcaaaatgccggcgtccgatgttgagtaccgctgcttcgtcagcggcctcgcctgtgccacggacgaccactccctccacaacgccttcagcacctacggcgaggtcctcgagtccaagatcatcctcgatcgggagacgcagaggtcccgcggcttcggcttcgtcaccttctccacggaggaggcgatgcggaacgccatcgagggcatgaacggcaaggagctggacggccgcaacatcaccgtcaacgaggcccagtcccgcggcggccgtggaggcggcggcggccgcaggtacggtggtggccgtggaggcggcggctacggcggtggcgggcgccgtgatgg

SEQ ID NO: 91532 - DNA, 519 bp, Zea mays
  unsure (1)..(519): unsure at all n locations
gataaaggtgcgtgtgttcatgtcagcccagtacgncactgccgtaccggtccggaattcccgggttcggcccttcctctctcccatctcggctagggttaggtcgtctcgccaagtcgccatgatgcagcagcgcccgccgcagcagccgcagccgggcatggcgccgcctccgcctccgcaggctgctggcgggcagccaccgcagtggggtgggatcccgccgccgatggcgcagcagtacggcgcaccgcctccgcagcagcctccggcgatgtggggccagcctccgccgcaggcgcactacgggcaggcaccaacccctcagcagtactacgccgcgccgccggtgccggtgcaggcgccagccgcccccgctgcggcggacgaggtcaggacgctctggatcggggacctgcaatactggatggacgagaactacgtcttcgggtgcttttcgaacactggngaggttcaaaatgtgaagctcattcgtgaccaggattcaagggaacttta

SEQ ID NO: 91533 - DNA, 514 bp, Zea mays
agtaaagaggcgtctttccatgtatagaatgttacgccatgctcgtaccggtccggaattcccgggtcgacccacgcgtccgcggacgcgtgggcggacgcgtgggcggacgcgtgggcaaaattgctccaaggttccaggagggaatcaaggccttctcaggaagcccaattgttggggagatacgcggtctgggactgatacttggaactgaatttgtcgacaacaaatctccaaatgatccatttccagctgaatggggtgttggttcgatatttggcgcggagtgcgagaagcgtgggatgctcatcagggtggctggggacagcatcatgctgtcacccccgctgatcatgactcccaatgaagtcgaagaaatcataagcaaattcggcgatgctctgaaggccacggaggaacggattggagaactgaaatccaggaagaattagccgatgctgctggttgtaacgacggtgaggatggtgatggcagcagtatattttcagacttt

SEQ ID NO: 91534 - DNA, 510 bp, Zea mays
  unsure (1)..(510): unsure at all n locations
aggagagggtgctcnngttatgatagagtgtattgccatgctcgtaccggtccggaattcccgggtcgacccacgcgtccgggcttctcctccccctcttaccaagtcctcttcgggttagggttacttagggttttgtggaggggcgatggcggcggctgatgtggagtaccgttgcttcgtcggcgggcttgcctgggccaccagcaacgagtcgctggagaatgccttcgcctcctacggcgagatcctcgactccaaggtcatcaccgaccgggagacggggaggtctcgcggcttcggcttcgttaccttctcctccgagaactccatgctcgacgctatcgagaacatgaacggcaaggagctcgacggccgtaacatcaccgttaaccaggcccagtcccgtggcggtggcggtggcggcggtggctacggcggcggtcgcggcggcggcggctatggtggcgggcgccgtgacggcggttatggcggcggtggcggctaccg

SEQ ID NO: 91535 - DNA, 498 bp, Zea mays
  unsure (1)..(498): unsure at all n locations
gagtgtgtgtccattagaataaaagtatgctcgtcaccggtccggaattcccgggtcgacccacgcgtccgcaagttcaagctcgggaagaagatcgggagtggatcatttggggaactttacctcgccgtgaacgtgcagaatggcgaggaggtggctgtcaaactggaatcagtcacatcacgacatccacagcttcactatgaatcaaaactatacatgcttttgcagggtggaactgggattccacatcttaagtggttcggggtggaggggcagtacaatgtcatggtgattgatctgcttggtccaagtctggaggacttatttaactactgcagcagaaagttctcccttaaaacagtactaatgctngctgatcagatgatcagtagagtagaatacatgcacacaaaggggtttctacatcgtgacatcaaacctgattattttctcatgggtttaagacgtaaagcaaaccaggtatttgtcatcgan

SEQ ID NO: 91536 - DNA, 498 bp, Zea mays
gaggtgttttgaattgtgagataattcacgctcgcccggtccggaattcccggggcagtttctggtcatcacatttgccaagaactccttatgacatctcccttgatgatgagacacaaaaccgcaatgatcaggtgaacaccctgtgcaaatcatgttatgtaatagttgtaccttttgttagtattgccgaacaaatttgacattgatgcaggggtttgagaaaatggtctctgggatttatcttggggaaattgcaaggctggtgctgcatcgaatggctctagaatcagatttttttggtgacgctgctgataatctatgtacccccttcacattgagcacaccactcctcgctgcaattcgcaaggacgattcaccagatctgagcgaagtcaggaagatactgcaagaacatctgaaggtcagctttcctgaccttcatgaagtcaaacatgtgttttcctccaacctgtgaaggttctggtgattttgctt

SEQ ID NO: 91537 - DNA, 512 bp, Zea mays
  unsure (1)..(512): unsure at all n locations
aggtagagcgttagtgtgtttaagatgggagatgtattgctatgctcgtccggaattcccgggtcgacccacgcgtccgctactgtctggttttggtggcagtgttctgtctgcactcttcctacggaacaactacgtctgtgttggtgcttctggagctttatttggcctgcttggatccatgctttctgagctactcatgaactggactatatactccaacaaggccagtacaattaacagataaatatatactttattttatccagctgcttgatagtcatttagctcgtatacttaatttgctcttgcaggcagcagctataataacactcctgtttataattgcactcaacttggctattgggatactacctcatgctgacaactttgctcacattggtggattcgcaacgggtttcctcttgggttttggtctgttggcaaggcctcaatttggctggatggaacaccacgagctgncgcagactaaccaaccttccaagtacaaa

SEQ ID NO: 91538 - DNA, 517 bp, Zea mays
  unsure (1)..(517): unsure at all n locations
aggtnttagggactttttccatgtacgaagcctacggcactgccgtaccggtccggaattcccgggatcaggcgcttcttgtagtcctcgaagaagcgcctgatttcagccaagcggtgaggtgggagctccttgatatgattgtaatgcctgtactcgggatcatcagcgcacactgcaatgatcttgtcatctgcctctccctgatcaatcatcggcataaggccgatagccttcgcacgtaggaaacagcctgggataacaggctcctgcattataaccagtacatccaaaggatcactgtcttcacaaagagtgcgaggaatgagaacaaggaggttgctgtgaacgactttctaccagcgagcgccgcttatgaagccatacagcactctatggatctgtatgctacatacatcgttgagggcctgaggaggtaggattctgatggctaggaaagtggggaggatgttgacgaaaaactgggagaccatttaccgcatggaacgagtaccgn

SEQ ID NO: 91539 - DNA, 514 bp, Zea mays
  unsure (1)..(514): unsure at all n locations
ggttgagggctttgtgatgacggagctttatgccacgctcgtaccggtccggaattcccgggtcgacccacgcgtccgggcggcgctgccggtggaggcagcaagggcagctcggtgtacccggcggctgtcgtcgacccgcatcactcccgccagatctcctgcaaacccagggtgttcctgtatcagcacttcctcagcgacgacgaggctaaccacctgatctccctcgcgagagcggagctcaagaggtcagcggtcgccgataatatgtctggcaagagcacgctcagtgaggtccgcaccagctccggcaccttcctcaggaagggccaggatcctattgttgagggtatagaggacaaaattgctgcatggacattccttccaaaagagaatggtgaagatatccaagtcctaagatataagcatggggagaagtatgaaccacactatgattacttcactgacaatgttaacactgtncgtggtggtcatcgntacgctactggtt

SEQ ID NO: 91540 - DNA, 524 bp, Zea mays
  unsure (1)..(524): unsure at all n locations
nggggtagagggtnnnntnnnncccattgaaatcgcattctttttgcannnccgnnccggnccggaattcccgggtcgacccacgcgtccggtcgcttccagccgccgccgcgtccgcctcgccaagcgcagcagccgccgcagcacatggctctcttgatctcagccatggcggaggtggagcagcaacaggacacgccgaagctcttcaaccgctggaccttcgatgatgtccaggtgaacgacatctcgctgaacgactacctcgctgtgaacgcgacgaagcacgcgatgtacctgccgcacaccgcggggcgctactccaagaagcggttccgcaaggcgcagtgcccgatcgttgagcgccttacaaactccctcatgatgcacgggcgcaacaacggcaagaaggtcatggctgtccgcatcatcaagcataccctggagatcattcacctgctcaccgatgccaaccccatccaggtcgtcgtcgacgcgatcatcaacagtggaccccgtgaggg

SEQ ID NO: 91541 - DNA, 506 bp, Zea mays
  unsure (1)..(506): unsure at all n locations
agggggnnnnctctnaacccatcgaatgcattgcaggactgtcgtgcttcggaattcccgggtcgaccgacgcgtccgcgcgccgtcgtcgtcgccgccgccatgtcgaagcgcgggaggggagggacggcggggagcaagttccgcatgtcgctgggtctccccgtcgcagcgaccgtgaactgcgcggacaatacaggcgccaagaacctctacatcatctccgtcaagggcatcaagggtaggctcaaccgcctgccgtccgcctgcgtcggcgacatggtcatggccaccgtcaagaagggtaagcccgacctcaggaagaaggtcatgcccgccgtcattgtccgccagcgcaagctgtggcgccgcaaggacggagtctacatgtacttcgaagataatgctggagtcattgtgaaccccaagggcgagatgaaaggatctgctatcactggacctattggcaaggagtgcgctgacctttggcctaggattgctagtgn

SEQ ID NO: 91542 - DNA, 515 bp, Zea mays
  unsure (1)..(515): unsure at all n locations
ggttaggtgtttttacatgagcatancgtatgacgtaccggtccggaattcccgggtcgacccacgcgtccgagcacaagcacaaggagcacctcggcgagatgggcgcccttgccgccggcgccttcgccctgtacgagaggcacgaggcgaagaaggacccggagcacgcgcagcggcacaagatcgaggagggcgtggcggcggtggctgccctgggcagcggcggcttcgcgttccacgagcaccacgacaagaaggaggccaaagacgcggcggaggacgccggggaggaggaggagtccggccgccgcggcgaggggaagaagaagcaccacttcttcggctgatcgggctgctgctcgatcgatctacttgcgtacgtaggctgctccccaggaccagaaggagcatgcatggagggcgaacgaagtcacgggggtttgattgcccgtctatgtatatcatgtgtagttactgatgatgtgtgtgcatggtacttcgtacccgtgttn

SEQ ID NO: 91543 - DNA, 517 bp, Zea mays
  unsure (1)..(517): unsure at all n locations
ggaggctnnnatcnattctcgacgaagattgatggcacgctgtaccggtactgcccgggtcgacccacgcgtccgcaagtcctaagctagccagctgagctcgctcccagtccaagcgccggcgccaccaccgcagctgctcgctggtcaccatgagcaaggagaagcaccaccgcgactggatcctccggcgctgctgtggctccctcgccgcctgcatcctgacgctggccgccgtcgtcggcttcatcgtgctcgtcatcttcctggcgctgcgcccctccaagccgtccttctacctgcaggacgtgcagctgcgctccatcgacctcagcgacccggcgctctccctcgacctccaggtgacgatcgcgtcgcggaacccgaacgagcgggtgggcgtgtactacaagacgctggacgcgttcaccacgtaccgcgacgaggcggtgacggtacccgtgtcgatgccggcgatctaccagggccacaagggacgtgtcngtgtgggccccgg

SEQ ID NO: 91544 - DNA, 523 bp, Zea mays
  unsure (1)..(523): unsure at all n locations
gggtnnaaggctgntgtcngaacacgtagtcctccgctacgacgtaccggtccggaattcccgggtcgacccacgcgtccgccggctcctggcgcggcccaacgtgaagctgttcaacgccgtggcggtggaggacctgatcgtgcggcgggggcgcgtcggcggcgtggtcaccaactgggcgctcgtgtccatgaaccacgacacgcagtcgtgcatggaccccaacgtgatggaggccaaggtggtggtcagctcctgcggccacgacgggcccttcggcgccaccggcgtcaagaggctccaggacatcggcatgatcagcgccgtgcccgggatgaaggcgctcgacatgaacgccgccgaggacgagatcgtgcgcctcacgcgcgaggtcgtgcccggcatgatcgtcaccgggattgaggtcgccgagatcgacggcgccccgaggatgggcccgacgttcggcgccatgatgatctccggncagaaggcngcgcacctggcgctgaaggcactg

SEQ ID NO: 91545 - DNA, 513 bp, Zea mays
gaggctgtgtcgattacgagcctacgcgcactgccgtaccggtccggaattcccgggtcgacccacgcgtccgggaaaatatcagctcctagcgaatcacctcgagcctctaactgagcagcaaatgctgggtttgaccaacctccagcaatcttcccaacaagcagaggatgcgttgtcacagggcatggaagcactgcagcaatctttggcagagactttggctggatctctcggtccagcaggttcttcaggaaatgtggcaaactacatgggtcagatggccatggccatgggcaaactcgggacgctagagaattttcttcgccgagccgacaacctgcgacagcagacgttgcatcaaatgcaacgtatcctaacgatccgacaggcttctcgtgctcttcttgcaatccacgactatttttcacgattggcgcgcttaagttctctgtggcttgctaggccacgtgaataacgaaaggccgtcagtattttgaagttcctttggcc

SEQ ID NO: 91546 - DNA, 512 bp, Zea mays
aggtgtgtcgtcgctaatctcgactaagtacttctgtaccggtccggaattcccgggtcgacccacgcgtccgctccatcctcgcccatgagatgctttggtgcttcctgctgcctctctctccctggtcttcatgtgtaccattctctgattgaatatttgagtgaatggtgaatactgcatacctggatttcaggattcatatttgaatgaatggtggatacaccgcatacctggattccaggatcgtaaaaaaaaaaaaaagggcggccgctctagaggatccaagcttacgtacgcgtgcatgcgacgtcatagctcttctatagtgtcacctaaattcaattcactggccgtcgttttacaacgtcgtgactgggaaaaccctggcgttacccaacttaatcgccttgcagcacatccccctttcgccagctggcgtaatagcgaagaggcccgcaccgatcgccctttccaacagttgcgcaacctgaatggcgaatgggacgccc

SEQ ID NO: 91547 - DNA, 516 bp, Zea mays
  unsure (1)..(516): unsure at all n locations
ggggagaggactgtngtcgatgaagtagctgtaggacgccgtaccggtccggattcccgggtcgacccacgcgtccgcgccgactgaaggtgaatcttcagacagccagattggttggtgtctagtgtgtgcgaagatggcgtagaaaagactgagagacagttggctcacacagacaattgacaactgactatagtatctgcctgcctggctgatgctgatagagatggggactcttgtcctgctgtctgttcttgtataaatctccgttgtcaaatatttatcgtccgattatttatttttaaactaaacaacgacaaataaaaaagaacgaggttgcaaaagatagatacaaaccaaaggatgtcgtcgctgtgcgctgatctgatcactgccactctgccaggtactacctcaaggacgcggtgcttgacggcggcatcccgttcaacaaggcgtacgggatgacggcgttcgagtaccacggcacggacgcgcgcttcaaccgcgtgttan

SEQ ID NO: 91548 - DNA, 549 bp, Zea mays
  unsure (1)..(549): unsure at all n locations
ggaggtcgttgttggccctaccccttgcagtgacgtcncggttcggaattcccgggtcgacccacgcgtccgcaccgaccgggagacggggaggtctcgcgggttcggcttcgttaccttctcctacgagagactccatgctcgacgctatggagaacatgaacggcaaggagctcaaccgccgtaacatcaccgttaaccaggcccagtcccgtggcagtgacggtggcacgctgtagctactgccgcagtcgctcgcgtgaggcagctatggtggcaatgcgccagtgacaagctggatatggcaagctgtcgtgcggctacggcaatgctgcaccaggtgtataggcatgaggatacatgatgctagtagccggctaaagcggtcttgctctaaaggtaagtgattgaagctttcagccgtcaacggactgatcgatgtaaggtacagcatgaagtgtgactatgacatgctattcgcacgattaatcattatatatcgtataatactcgctatacccggtagaaatctagtaggaagattaggag

SEQ ID NO: 91549 - DNA, 516 bp, Zea mays
  unsure (1)..(516): unsure at all n locations
agggtctcttgttggacgtggggagttatgcgcacgctcgtaccggtccggaattcccgggtcgacccacgcgtccgcgccgatcccctcccctcccctttcccgccgactgatcccaccaattctgcacccgcgcagttcctgattcgattggcaagcgcaattggccgctcctgaccagacgccggatagggctggatttgattggattggatccccaattgtgtttgccacgtccgtgcgttcgggcgggcgggggagttactttagggtttcggcgggtgcggtcgccgtgtaggcggtagggttttgccatggcggagaagggctgcctcaagcggctccagaaggagtaccacgccctctgcaaggaagccgcttcgcagatcgttgctcgcccgctgcccaacgacatactggagtggcactatgtactggaaggaagtaaaggaacgccctttgaaggtggatattactatgggaaagctaaatttncaccggattatacttttaaaa

SEQ ID NO: 91550 - DNA, 511 bp, Zea mays
  unsure (1)..(511): unsure at all n locations
agtgtgtatcatcgtcaactnttangctactactgtactggtccggaattcccggctcgacccacgcgtccgcgccgatcccctcccctccccttttccgccgactgatcccaccaattctgcacccagccagttactgattcgattgacatgcgcaattgaccgcatcctgaccagacacatcatagggctggatttgattggattggatccccaattgtgtttgccacgtccgtgcgttcggaccgacgggggagttactttagggtttcagcggctgctgtcgccgtgtatgcggtagcgttttgccatggcggagaagggctgcctcaagcggctccagaaggagtaccacgccctatgcaaggagccgtctacgcagatcgttgctcgcccgctgcccaacgacatactggagtggcactatgtactgaagggaagtaaaggaacgccctttgaaagtggatattactatgggaagctcatatttccaccggattatccttttaaa

SEQ ID NO: 91551 - DNA, 508 bp, Zea mays
  unsure (1)..(508): unsure at all n locations
agatgtgtgtcgtcngacagaggggaacataaaggaccgctcgtaccggtccggaattcccgggtcgacccacgcgtccgcaaccagaagagcggcggcgcgggcggacaaggagcaggcggaggaggagttgtgccaagccacaatgggtatctcgcgtgactcgatgcacaagcgccgagccaccggtggaaagcagaaggcctggaggaagaagcgaaagtatgagcttggtcgccagccagccaacaccaagttgtcaagcaataagacagtgaggagggtccgtgttcgtggaggtaatgtgaaatggagggctcttcgccttgatactggtaactactcatggggaagtgaagctgttacccgcaagacccgtatcctcgacgtggtctacaatgcatcaaacaatgagcttgtgaggacacaaacccttgtgaagagtgccattgtgcaagttgatgctgccccattcaagcagtggtacctcactcactatggagttgac

SEQ ID NO: 91552 - DNA, 514 bp, Zea mays
  unsure (1)..(514): unsure at all n locations
nggaggggtgtgtcngttccagtaagactccgtatgccgtaccggtccggaattcccgggtcgacccacgcgtccggcggcggagcacggaggcgaaggacgaggagcagcagcagcaggcggcgccgaggagcggcatcccactcagtgcttgcaaccatggctaggggattgaagaagcacttgaagaggctcaatgcgcccaagcattggatgctcgacaagcttggcggagcttttgctcccaagccatcttctggacctcacaagtccagggagtgccttcctctgatcctcatcatcaggaacaggctcaagtatgctctgaactaccgtgaggtcatttctatcctgatgcaacgccatgtacttgttgatggcaaggtcaggactgacaagacctaccctgctgagttcatggatgtcagttgcattccttaagacatggagaacctacaggttgtttaatgcaaccaaggccggtttcggcttcaccaattcaggattaggttgc

SEQ ID NO: 91553 - DNA, 520 bp, Zea mays
  unsure (1)..(520): unsure at all n locations
ngggaggtcgtgngtccctttgtggggagatgatgcgactgctgtaccggtccggaattcccgggtcgacccacgcgtccggtcctgcgccacacgccgcggccgtctccgggcaggaaggaagggggcgggaagatgatgatgacgcgggcaccgatggggccgatggagggcgcggcggtggacgagatggtgcgccgcctcgtggagggcggccgaggcgggcgccaggtgcagctgtccgaggcggagatccggcagctctgcgtagagggcaagcgggtgctcctctcccagcccaatctcctccgaatccacgccccagtcaagatctgcggtgatatccatggccagtttgtcgaccttctgagattattcgatttgggtggttatcctccagcttcaacttacgtattcctcggagactatgtcgatagaggcaaacagagcctggagactatatgcttgctgctggcgtacaaaatccggtaccccgaaaatattttcctggtgaggggta

SEQ ID NO: 91554 - DNA, 511 bp, Zea mays
aggtactgtcgtggtctaagacaagtaaggcacgctgtaccggtccggaattcccgggtcgacccacgcgtccggagaaattgtagctgaagtgaaaaaaaaaacagcagggaacaatggcactatcacgaagtatgagagcatgtttgcacagtggaagacttgcacttcttgccatattggtctctggtggaattgtattgcaaatcttggcttgtgctctctataacaactggtggccaatgctaacagttctcatgtaccttatcctaccaatgcccctcatatttttcctgggttctgatacttcctccatgatgtccaatgggggagacggctgggtgaacttcacgaaattcttgacgggcgcatcaatagtagggagcatcgccattccgtcgatcctgaagcatgcgggcgtcattggatggggagccctgacgatggagctgtcatcctttgtggtctttggcgtggcaatcctgtggttcctccaaatgaacggtgaaga

SEQ ID NO: 91555 - DNA, 511 bp, Zea mays
  unsure (1)..(511): unsure at all n locations
gggactgtgtcccatgagtagactgaaggactgctgtaccggtccggaattcccgggtcgacccacgcgtccgctcaagcactggaagacaagtacggtggctttttaggcgacaggattgtaaaggattacacagacttcgctaaggtgtgctttgagaacttcggtgacaaggtgaagaattggttgacctttaacgagccacagacatttacaaccttttcgtacggaacgggagtttttgcccctggacggtgctcaccaggagaaaaatgtgctcagcctattgctaactcactcaccgaaccatacattgctggccacaacatccttcgagcccacgctatgactgttgacctctacaacaagaattacaagggtacagacggccgcattgggcttgcgtttgacgtaatgngtcgcgtgccatatggaaatacatttctcgatgaacaggcccaagaaaggtccctcgatcaaaacctaggatggttctttggacctgtggtcn

SEQ ID NO: 91556 - DNA, 515 bp, Zea mays
  unsure (1)..(515): unsure at all n locations
ggaaggctgtcttggatgaggagaactaaggacgctcgtaccggtccggaattcccgggtcgacccacgcgtccgcgcggagctcgctcgtgcggtcggatccacgggcatggcggccggtcagttcctcgatctggccggcgctaccgcccttggtgaggccgaggtcatgcaggtcctgacgaagaagttcggcgagatggccgagtgctccgccgcctgcggcgccatgctcggtggggccgggcccgacgaggaggccgcgttgcggcgctacggccgcaccatcggcgtcctgtacgagctcgtggacgacatccggagcgcatcgggaaacggcaagatgaggagcaacgccagcgtcctgcgctcgctggggatggaccgcgcgctcggcattgtggaagagctcaaggctcangccaagacagaggctgacagggttctcggataagtacggcgatcgggtgctgcctntatacagcttcgtggactacgcggtggagagagggttt

SEQ ID NO: 91557 - DNA, 513 bp, Zea mays
  unsure (1)..(513): unsure at all n locations
aggggctgtcgtggatgaagaagaagtcnggcacgctcgtaccggtccggaattcccgggtcgacccacgcgtccgcccacgcgtccgacagcacagagtgaggtaagcatccgaaaaaagctgtgatctgatcgacatggccgccgccaccatggctctcacctcccgcgcgctcgtcggcaagccggcgaccagcaccagggacgtcttcggcgaggggcgcatcaccatgcgcaagactgctggcaagcccaagccagcggcgtccggcagcccctggtacggggccgaccgcgtcctgtacctgggcccgctgtccggccagcccccaagctacctgaccggcgagttccccggcgactaccgctgggacaccgcggngctgtccgtcgacccggagactttcgccaagaaccgcgagctggaagtgatccactgccgctgggccatgctgggcgcgctcgggtgcgtgttcccggagctgctcgcccggaacggcgtcaaattcgggc

SEQ ID NO: 91558 - DNA, 505 bp, Zea mays
  unsure (1)..(505): unsure at all n locations
agagtgttttgtgctttgtagggggtatgatggaccgctcgtaccggtccggaattcccgggtcgacccacgcgtccggccgactcccaactagcccctcacgcgctcatcggcgccctgtcgagtcgagcccgcatctcggccgatcgagagcgagcgcagccgcgcgccggtgagagctttgcttgctttcggtgttctgtaacgacttaacgaacgacggcaggcggtagataaaggcgcgcgatgtgcgacgcggcgccgaggtacaggggcgtgcggaagcggccgtggggccggttcgcggcggagatccgggacccggcgaagcgcgcgcgcgtctggctcggcaccttcgactccgccgaggccgcggcgcgcgcctacgacgtggccgcgcgggccctgcgcggcccgctcgccaggaccaacttccccgcgctcgccaccacctcccgcncgcccgcgcccacgtgcagctccggctccaccgtcgagtccttcc

SEQ ID NO: 91559 - DNA, 495 bp, Zea mays
ggctgtttgtggcaacgctcacagcgtaccccgtaccggtccggaattcccgggtcgacccacgcgtccggccgactcccaactagcccctcacgcgctcatcggcgccctgtcgagtcgagcccgcgtctcggccgatcgagagcgagcgcagccgcgcgccggtgagagctttgcttgctttcggtgttctgtaacgacttaacgaacgacggcaggcggtagataaaggcgcgcgatgtgcgacgcggcgccgaggtacaggggcgtgcggaagcggccgtggggccggttcgcggcggagatccgggacccggcgaagcgcgcgcgcgtctggctcggcaccttcgactccgccgaggccgcggcgcgcgcctacgacgtggccgcgcggaccctgcgcggcccgctcgccaggaccaacttccacgcgctcgccatcacctcccgacgtcccgcgcacacgtgcagctacggctccaccgtcgagttctt

SEQ ID NO: 91560 - DNA, 502 bp, Zea mays
  unsure (1)..(502): unsure at all n locations
agagtgngtgtgngatgggggggtatgatgcgaccgctcgtaccggtccggaattcccgggttttcccccacgtgcgccgccgcgaccttcctcgatcccatctcccaacgcccccgcctcgcctcgggatcccgccgccgctccatctgcctttgctcccccacccgcaggcagcgagcgacagcgacggcgagggatggccaaggccaggtcgttggcgaagcagaagcaggcgcagcaatcaaacggcggcggcggccacgcgctgtcctccaagctcgcccggtacctcgacccggaggcctacttggacaaggaccaactgctggacgcggtgcactggatccgccaggcggtggggctcatatgcggcctgctctgggggagccgccccctcgtcggcgccgtctggatcgcactatctatggccatctcgactggcattatctattggtactacacctacttgctgaaggttgacgaggaggaatatggaggcca

SEQ ID NO: 91561 - DNA, 514 bp, Zea mays
atgtctgtgttgcaaagacgggatgataggaccgctcgtaccggtccggaattcccgggtcgacccacgcgtccggccacctccttccccttcgatatttttttttggttggatctagcgtgacggcaaagacggtgtatcgaagggtcgacaatggttacgacgatcggtagtccatagcagcggcgggcgcaacttcgacccggttttcttcccatatatctgtcaaatccttctccggtcgccctccatcggcagcaatttccgccatagataccggcgatcgagggcctcggacaacccaatcgacggagcagcgcggcggcaggagagggcaaacccttttcttctcagtactctacttgtctgcgcctggatcccctctggaggaagataagacatgggtcaagcactcggcttgattcaagtggatcaatcgacagtagccatcaaggaaacttttgggaagtttgacgaggtcctagagcctggatgccacttcttgccatggtgc

SEQ ID NO: 91562 - DNA, 515 bp, Zea mays
  unsure (1)..(515): unsure at all n locations
taggctgtcgtccgatgaaggagaactaagcgcacgccgtaccggtccggaattcccgggggttcctggggtcggcgggacacgacccgctcttctactcgcaccactccaacgtcgaccgcatgtggcacatctggtcgaccaggctcggcggcgggcagggcatcacggaggcggactggctcgacaccagcttcgtcttctacgacgacgtcaagagcccgcggaaggtgcgcatcaggttccgcgacgtcctggacacgcgcgacctcggctacacgtacgacgccgagtccgacaaggacctgccatggctgcgctgcaagatctcgtcgctggtgccccacggcaaggacagcccgccgaggtcatcgtcggcgaggaaggcggcggcgccggtgttcccgctcgccctgaccaagggccaggtggtggaggtgccggccgtgcctgtgccggccaaggacccggngaaggagcagctgctggtgatcgagggcatcgagtacgacccc

SEQ ID NO: 91563 - DNA, 502 bp, Zea mays
  unsure (1)..(502): unsure at all n locations
agaggctcgtgtgtgatggggggagttatggcactgctgtaccggtccggaattcccgggtcgacccacgcgtccggcggttctgaagaccggcaacaggatgaatgttggcacaaaccgtggggacgcacacgcgttcaagctcgacactctgctgaaactggtggatgtcaaaggcaccgatgggcacacgacccttctgcacttcgtggtacaggagatgatccggacggagggcgcccgtgtgtccgccagcacccagacaactccaagaacccaggcaaaccctctacgagaggagctggagtgcaagaggctaggtctccgggtagtgggcggcctcgccggcgagctgggcaacgtgaagaaggcggcggccatggactcggacgtgctgagcagctacgtcgccaaactcgcgggagggatagagaaagtgaccgangtgctgcggctgaacgaggagctcaagtcgagggacgacgcgtggcagtttcacgac

SEQ ID NO: 91564 - DNA, 499 bp, Zea mays
  unsure (1)..(499): unsure at all n locations
agagttgtgtggcatagaaggcatgatagtaccgctcgtaccggtccggaattcccgggtcgacccacgcgtccgtgaaaagtgtgtcacttattgtgaaagtcatgatcaagctcttgttggtgacaagacaattgcattctggttgatggataaggatatgtatgatttcatggctctggacaggccttcaacgcctcgcatcgatcgtgggatagcattacataaaatgattaggcttgtcacaatgggtttaggaggtgaaggctatctaaatttcatgggaaatgagtttgggcatcctgaatggatagattttccaagaggtcctcaaagtcttccaaatggctccgtcattcctgggaataacaatagctttgataaatgccgccgtagatttgaccttggagatgcagattatcttagatatcgtggtatgcaagagtttgaccaggcaatgcagcaccttgagggaaaatatgaattcatgacatctgan

SEQ ID NO: 91565 - DNA, 513 bp, Zea mays
ggtagtgtgtgttagatatgtatatatcgtatgctgtcccggtccggaattcccgggtcgacccacgcgtccgcacggatgggtcagacgaatgggcgatctacggcggaaccggggtgttcgccatggccaccggtgtcatgaagagaagaaaccttgccgccggtagcaacgacgggaactctgacgagcttgccctggaagttttctgcccggtgtttggcgcatcacagcaaccaattagcaagcagcaggactccatctcctccgtcaccaagatcggactatggggcggacagggagggtcggcacaggacatcacggcagagcagccaccacggcgtctgcacagcatcaccgtccgcgctggcgttgccgtcgactccatcgagttcacctacaccgacgacgctgggcagaggcgcactgctgggcggtggggtggacttggcggcaatgttcgaacgatcgaccttggcgacgcataggatgtcaggtaagtctcgggaacat

SEQ ID NO: 91566 - DNA, 503 bp, Zea mays
  unsure (1)..(503): unsure at all n locations
tgggcgtgttgtcngtatcgcggtgaatgataggaccgctcgtaccggtccggaattcccgggtcgacccacgcgtccggttgagccatacaacagtgtactgtccacccactccctcctcgagcacactgatgtggctatactgctggacaatgaggccatctacgacatctgccgccgatcccttgacattgagcgcccaacctacaccaacctcaacaggcttgtgtcccaggtcatctcatcccttactgcctccctgaggttcgatggtgctctgaacgtggatgttaacgagttccagaccaacctggtaccctacccgaggatccacttcatgctttcttcgtacgctccagtcatctctgctgagaaggcctaccacgagcagctctctgtggctgagatcaccaacagtgccttcgagccatcttccatgatggccaagtgcgacccacgccatggcaagtacatggcctgctgccttatgtaccgtggtgatg

SEQ ID NO: 91567 - DNA, 504 bp, Zea mays
gaggtgtgtgttcttagttgatcgtgacgtaccgtccgtattcccgggtcgacccacgcgtccggtcatatggctgctgttgtgaaggctaaacctaaaactgaaccaccgactgacagaactgaaccagatagggaagcagttgggccagcacagttgactgataccttgttatctaatgctgaagaaagtgcagacaatgtggttgtggatatcgaaagaccacataacaggcagattaatgggatcccagcatctaacgcagtgcctaggtcatcagaggatattgaggatggtgaggtcgttggaatcatcacacttgaggatgtatttgaagaactcctacaggaggaaattgtggatgagactgataaatatgttgatgtccataaagggattccgagtagctgctattgttgctgatttatcggtagcaggggctctttccattgggggataaacggaccataaggctggctaacttcatggacacagattcgctag

SEQ ID NO: 91568 - DNA, 512 bp, Zea mays
  unsure (1)..(512): unsure at all n locations
ggtatgctggtgtcgtatcctacgttacatcgtatgccgtaccggtccggaattcccgggtcgacccacgcgtccggaaatttggccaatcttctgtttttgttacatccacacttctcgagaatggtggaaccttgaagagtgcaagtcctgcttctcttttgaaagaagctatacatgtcattagttgtggttatgaagacaagacagactggggaaaagagattggctggatctatggatcagttacagaagatattctaactggtttcaagatgcattgtcatggttggcggtcaatttactgcatacctaaacgggttgcattcaaaggttctgcacctctgaatctttcagatcgtcttcaccaggtgcttcggtgggctcctgggtctattgagatcttcttcagcaatcattgccctctttggtatgggtatggtggccgtctgaaatttttggaaagattttcctacattaactncatcgggtattcttgacaattatttccc

SEQ ID NO: 91569 - DNA, 516 bp, Zea mays
  unsure (1)..(516): unsure at all n locations
taaagtctgtgtttcctagtttagatcgtaggacgtctcggtccggaattcccgggaggcaacgaagttaatgatgatgttctatccaaagcattctcacggtttccatccttcaacatggcaagggttgttagagataagaggactggcaagactaaaggttatggatttgtgagcttttcaaaccctactgacttggctgcagcaataaaagagatgaatggaaagtatgttgggaatcgccctattaaattgcgtaagagtaactggaaggagaggacagatgttgaggctctgcaaagacaaaagaatcatgtccaaaggaagcctaaaattcccaagaagagtgttcttcacaagtagagatatataggccctaccgagggtgaagggcagctcatggatgcgttgctgccttgggatgatgctacttctggaatgtcttcactctctgcactactaggggggcggaaatcacgcaaagggctgttgtttcatgcaaattgcaacgagctn

SEQ ID NO: 91570 - DNA, 515 bp, Zea mays
  unsure (1)..(515): unsure at all n locations
agaagaggtgtgtgntagcctaccgcacatgtagcactgccgtaccggtccggaattcccgggtcgacccacgcgtccgtggtcatggtggagctaaggtagcagagtatgttaaagaaaacctgttcaacaagctggttagtcatccaaagttcatcagtgatactaaagtcgctatagatgatgcttataaaagcaccgacagtgaattcttagaatctgacagtagtcaaaatcaatgcgggtcaactgcatcaactgctgtacttgttggtgatcgtctcttcgtcgcaaatgttggtgactctagggctatcatatgcagggaaggaaatgctattgctgtttcaaaggatcacatgcctgatcaaactgatgagcggcagcgtattgaagatgctggacgttttgtgatgtcggcaggaacatggcgcgttggtggtgtacttgctcgttcgcgtgcttttggtgacaaactcttaaagcaatatgtggattgggatcccgggataccc

SEQ ID NO: 91571 - DNA, 517 bp, Zea mays
  unsure (1)..(517): unsure at all n locations
gtagaggtgctatcnttggactcccagcccgtacagtactgctgtaccggtccggaattcccgggtcgacccacgcgtccgccagccagccagccgggtcctaccgcgtagctagcgtaggcgtaggcgtagccggaggggcgtgtgcgagaggggaagaaatgctggaggggagggcgcgggtggaggacacggacatgccggcgcggatgcaggacgcggcgacctccgcggcctcgcgcgcgctcgacctcttcgacgtcgccgactgccgcgccatcgccggccacatcaagacggagttcgacaagcggtacggcgtcgggtggcagtgcgtggtgggcgccaacttcgggtgcttattcacccacagcagcggcaccttcatctacttctccatggagcgcctctccttactgctcttcaaagccgacgtcgtcgcagacgtcgccgccgtcgccggcgtcgacttctaatcaaccaagtcttcgggcatcacaccgtgcactttgtactg

SEQ ID NO: 91572 - DNA, 502 bp, Zea mays
agagtcgtgttgtgttattgtggattgatgatgtcatgctcgtaccggtccggaattcccgggtcgacccacgcgtccgatctacctgctcctacgcctacttctggatccaggcaagccagggatcgctatgttggacttgtaggagcacgacttagaatcgaaagccgacgccggagcgtccaagacctacgctcatcacgctggtactgtccgtaagaacggtttcatcggcatcaagaaccggccctgaaaggttgtggtggttcctacatcagagactgttcaccatggacatgccaaatgccactttgctgccatagacatattcaacgggaaaaagctcgaagatattgctcattagtcacacaactgtgatattacctatgtgaaccgtactgagtaccagctgattgatctatcatgagcatgatgagtgagccgtcttactttaacatgtaacacttaggtggatctagacgtccaacttaacagacttttt

SEQ ID NO: 91573 - DNA, 500 bp, Zea mays
  unsure (1)..(500): unsure at all n locations
gaggtctgttgtaaatgagtgggggactgatgtcatcctctaccggtccggaattcccgggtcgacccacgcgtccgatgaaccacaccgatttcatcatcaccagcacattccaagaaatcgcgggaagcaaggacaccgtggggcagtacgagtcccacatcgcgttcactcttcctgggctctaccgtgtcgtccatggcatcgatgttttcgatcccaagttcaacattgtctctcctggagcagacatgagtgtttactacccgtatacggaaaccgacaagagactcactgccttccatcctgaaatcgaggagctcatctacagcgacgtcgagaactccgagcacaagttcgtgctgaaggacaagaagaagccgatcatcttctcgatggcgcgtctcgaccgcgtgaagaacatgacaggcctggtggagatgtacggcaagaacgcgcgcctgaggggagctgcgaacttcgtgatcgtcgnccgtgcc

SEQ ID NO: 91574 - DNA, 515 bp, Zea mays
  unsure (1)..(515): unsure at all n locations
agggtgtgtcgtatgcaatgcncactccgtcatgccgtcaccggtccggaattcccgggtcgacccacgcgtccggtcatatggctgctgttgtgaaggctaaacctaaaactgaaccaccggctgacagaactggaccaaatagggaagcagttgggccagcacaatttactggtaccttggtatctaatgcttaagaaagtgcagacaatgtggttgtggatattgaaagaccacataacaggcagattaatgggatcccagcatctaacgcactgcctaggtcatcagaggatattgaggatggtgaggtcgttggaatcatcacacttgaggatgtatttgaagaactcctacaggaggaaattgtggatgagactgatgaatatgttgatgtccataaaaggatcctagtagctgctgctgctgctgcatcatcggttgcaagggctccatccgttatgagattaactgggcaaaatgctgcaaaacttcttggtgcacaaaataatcat

SEQ ID NO: 91575 - DNA, 514 bp, Zea mays
  unsure (1)..(514): unsure at all n locations
ggaagaggtcnttcgtcgtcgaaggtaaatgataggccgtaccggtccggaattcccgggtcgacccacgcgtccggttcatggcgacgtccatgctctccgccaccacggtgccactccagcaggtccaggggggcggcctgtccgagttctccggcctcgtcaggagctccgcgtcgctgccgatgcgccggaatgccacctccgacgacttcatgtccgccgtctccttcaggacccacgcggtcggcaccagcggcggcgggccgaggcgggcgccgacggaggcgaagctcaaggtggccataaacgggttcggccgcatcgggcgcaacttcctgcggtgctggcacgggcgcggcgacgactcgcccctcgacgtcatcgccatcaacgacaccgggggcgtcaagcaagcgtcggacctgctcaaagtcgacttcacgctcggcaatttccacggcgacgtcgagcccggtcgggaacacgccatcttcgtggaccggaagggcat

SEQ ID NO: 91576 - DNA, 516 bp, Zea mays
  unsure (1)..(516): unsure at all n locations
tgttaggggtnnttanntccatgtatgtagcgtaaggactgctgtacccggaattcccgggtcgacccacgcgtccgggctgtagatcacttgaacgctataagggccatgtaaacgggaatggtatgaacgtatctaccgattccagtgaagataaagattcaaacaactcagatgagaagtgtaacgagtttgcatctgctgagtcggaggactcggtgtcaggtgttctatatgatatgttgcaaaaggaggtcatttctctaaggaaggcgtgccacgaaaaggatcagagcctgaaagacaaggacgacgcagttgagatgttggcaaagaaagtagatactttgacaaaagctatggagtcagatgccaagaaatcgaggcgcgagctagctgctatggagaaggagctggcagctgtgcgcttggagaaagagcaggataacagggcaagacgttttggtagttcaagcggttctgccaacagttcgcagcttccaacttggcaggatt

SEQ ID NO: 91577 - DNA, 519 bp, Zea mays
  unsure (1)..(519): unsure at all n locations
gggtaagggctgctgtngtccgtcgtacgcatctcataggcacgccgtaccggtccggaattcccgggtcgacccacgcgtccggcagccgccgttgctgctgccgcgtccacagaatggggggtttcgtgaagactcataagaccaatgcgtatttcaaacgtttccaagtgaaattcaagagaaggcgggctggcaagacagactacagggccaggataaggctgattaaccaagacaaaaacaagtacaacacacccaaatacagatttgttgtgcgatttaccaacaaggacatcactgcccaaatcatatctgctagtatagcgggtgatatggttcttgcttctgcctactcgcatgagttgccacgatatggtcttgaagttggtctgaccaactatgcagctgcctactgcactggccttctgttggctcgccgtgtgctcaagatccgtggtttggatcaggagtacgagggcaatgttgaggccactggtgaggacttctctgttgagc

SEQ ID NO: 91578 - DNA, 501 bp, Zea mays
  unsure (1)..(501): unsure at all n locations
agggtctgtgtgtgataagtagccctcaggactcgccgtaccggtccggaattcccgggtcgacccacgcgtccggaaaattccagcggacgagcgctctaagccgtttttcctcgtcctcgatccagccccgtgccgcttccagctccgatcgatctgatccctccccaccaccacgcccatggcggaccaactcaccgacgaccagatcgccgagttcaaggaggccttcagcctcttcgacaaggacggggatggttgcatcacgaccaaggagctgggaactgtcatgcgttcactggggcaaaaccctacagaggctgagctccaggacatgatcaatgaggtcgatgccgacggcaacggcaccatcgattttccagagtttctcaaccttatggctcgcaagatgaaggacaccgactctgaggaagagctcaaggaggcctttcgtgtgtttgacaaggaccagaacggcttcatctctgccgncgagctccg

SEQ ID NO: 91579 - DNA, 489 bp, Zea mays
  unsure (1)..(489): unsure at all n locations
ngttgtagcacatcgtagnaccgccgtaccggtccggaattcccgggtcgacccacgcgtccgcgagggcatggaggagggggagttctccgaggcacgcgaggacctggccgccctggagaaggactacgaggaggtcgccgcagagggcggcagtgatgacggcgacgaggaggaggaatactgatctgcttgcatgaatctgtttggctgtcgagccaggttgtggtgttgaaaaacctttgtttgtgtcctgggtaatgtttgggtgtttccttccatcatcacttgctgaactgctctagtatttgcatttgtaattgaagtctgtcgctttaagcactcttggttctaaaaaaaaaaaacaaaaaaaaaaaaaaggggcggccgctctaaaggatccaagcttacgtacgcgtgcatgcgacgtcatagctcttctatagtgtcacctaaattcaattcactggccgtcgttttacaacgtcg

SEQ ID NO: 91580 - DNA, 533 bp, Zea mays
agagatggtgtcgtctgcctccctagctaactacagtcattacgtaccggttcggaattcccgggtcgacccacgcgtccgctcagagcgaagctcaggtagacaaggcaatatctttgaagaatttcagccatcagcagatagcacctcccaagccagatatgctcgagcttcagatcgagatcctggtgatccttcaacaagtggacctgagaaagagctgacctctgaagatgaagtggctcgtttactgaactgcactgaccactattcagcattaggtttccgtcgatatgagaacatagatgtatcatctcttaagagagaatacaagaaaaaggctatgttagtccatcctgataagaatatgggcaatgataaagctgctgatgcatttaaaaagcttcaaaatgcatatgagattcttcttgattcactgaaacgcaagacatatgatgatgaagtgaagaaggaaagacctttgaactacttcaggcaaagtggttctcaaaaggatgggagaaaccgtactt

SEQ ID NO: 91581 - DNA, 524 bp, Zea mays
  unsure (1)..(524): unsure at all n locations
ggttttaaagtttttgtctatgtaagtactttatgctctacccgttcggaattcccgggtcgacccacgcgtccgaactagttctctttgtgcttctagttccctctgaaccatcttaccgtaaccacctctgccaggatcataatctgtacggtactcatctctcacttgtccaccacttcgtccacggccccattgcctgccttcttcaaagccccaatcgaaatcaacacggattggacgatcgtcaagcatcgttccactgatgtatttgacagcatcttcagcatcctccctggagtagtacagtacgaagcagaaaccgcatggggtcttagagttcttgtcgagccccatgatgatcttcttgatctcgccagcgcgggagaagagctcgtaggcctgctcctncgtggtgtagaaagacatattcccaatgtacagcgttgtcgacgcatgcagcgttgcctcatactcctnctgtgtgcccttgaatccgcggtccctgtacgctgagagcttgc

SEQ ID NO: 91582 - DNA, 521 bp, Zea mays
  unsure (1)..(521): unsure at all n locations
ggattagaaggttttgtctatgcaagagagtatgctctaccgttcggattcccgggtcgacccacgcgtccgcactaacgaacgaactcttgctccgatcacgagctagctgaggtcgacgatggcggctgtgctgaacagcaggaagacgccgcaggcggtggtggccgtgctggtggcggcggcgctgctggcttcgtccgcttcggcggcgatcacctgcgggcaggtggggtcgtcgctggcgccgtgcatcccgtacgcgacggggagggccagcgcgctccccgcgtcgtgctgcagcggcgtcaagagcctcaacagcgcggcgcggaccagcgcggaccgccaggcggcgtgccgctgcctcaagagcctcgccaacagcgtcaagagcgtcaacatgggcaccgtcgccaccatccccggcaagtgcggcgtctccgtcggattccccatcagcatgtncaccgactgcaacaagatcagctaagttacgacgaccaagctaataagcctcc

SEQ ID NO: 91583 - DNA, 526 bp, Zea mays
  unsure (1)..(526): unsure at all n locations
tgganttgaaggctggcttgacttcccagcnagtaacgcataccgcctcgaattcccggatcgacccacgcgtacgaactagttgtctttgtgcttctagttccctctgtaccatcttaccgtaaccacctctagcactgtcataatctgtacggtactcatctctcacttgtccaccacttcgtccacggccccattgcctgccttcttcaaagccccaatcgaaatcaacacggattggacgatcgtcaagcatcgttccactgatgtatttgacagcatcttcagcatcctccctggagtagtacagtacgaagcagaaaccgcatggggtcttagagttcttgtcgagccccatgatgatcttcttgatctcgccagcgcgggagaagagctcgtaagcctgctcctccgtggtgtagaaggacatattcccaatgtacagcgttgtcgacgcatgcagcgttgcctcatactccttctgtgtgcccttgaatcggcggtccctgtacgcttagagcttgtg

SEQ ID NO: 91584 - DNA, 573 bp, Zea mays
  unsure (1)..(573): unsure at all n locations
atgaaggggaggatagaggaggaatggatagggagggtgagtcagagtattgatattaatcgcangcacgnaccgggcttgaaggcccgggacgacccacgcgaccgctccggaggctccaccactagcaacccgngcagcgagcccgccccgaccacngccaagacgaggggcggcgacngggncgacgagaacaacggcgggaccggcggggccatcgccggagccganaaccgnaacgacgcggcggacacccgccccacaggcggaaacagcaaccccacgcgcgaccacgcgaagaacagggaccaggcggacaaaaggggaacgaacagcagagggcgagcaaggggaaaggaaaagcgcgggacgagaaccgaaccggcagagaagggcaggaccggcgacagcanaacaaaaggangagcngcccnggcaagggagaggnacaggncaaaacccgggacaacaagcgccaggnaccaaaaaacgcccgcaaagggcacgaaaggcaagacagcgaagggaaagggagggggaagagcgaggaggcaggagggccccgagagagac

SEQ ID NO: 91585 - DNA, 573 bp, Zea mays
  unsure (1)..(573): unsure at all n locations
atagaagagatgagatatatgaatggattgatatgtagagaaggtgtcctctacgaaggaagatgtaagagatgcctcaccggtcttgaattcccgggtcgacccacgcgtccggtgttcgaagcccattgaagtaactggagggaggaactgtggaataaccaattgcccaattacggcaacaatccttagcacatctaaccatacaaaccatcgcaacgcagcagcaacaagcactgagccacctagccgtggtgaaccctatcgcctacttgcaacaacagctgcttgcattcaacccacttgctntggcaaacgtagctgcataccaacaacaacaacagttgcaacagttttctgccagcgctcagtcaactagcccagggtggaaccctatcggctaacttaccacaggcaccacctcctttaatttaacccggttcgctaatggccaatggcacttccataacttgcnaccaccaagtggtggcaacaacaggtgcttgcaaccaaatggaccccactcttaactaaacttgcttgtgcaaacccctggttggctactggcaacac

SEQ ID NO: 91586 - DNA, 542 bp, Zea mays
  unsure (1)..(542): unsure at all n locations
attaatagtagagatagttaaaantaaaaagagaggctttgtctatgaaagaatatatagaatgctcaccgtcttgattcccggacgagaccaactgcacatagaagcacaatagtgtaccaacaatggcagccaaaatattttgcctccttatgctccgtggtctttctgcaagtgctgctacggcgaccattttcccgcaatgctcgcaagctcctatagcttcccttcttcccccgtccctctcaccaccggtgtcttcggtatgtgaaaccccaattcttaaaccctccaggatcccacaagcaatcgcagcttgccatctaacctttataaccctggttcttcaaccattattaaccctattacaacagttaccttttgtgcatttattggcacaaaacattagggcacaacaactaccacaacttgtgctagcaaaacttgcttgctacttttaacaaccgccattttttccattcaacccactatggtcaatggacccttggtttttaattgcgaaaaccaacaattccaattat

SEQ ID NO: 91587 - DNA, 529 bp, Zea mays
  unsure (1)..(529): unsure at all n locations
gggagttgagcggctcnggttatagaagaacgaaatattgtatacccgtccggaattcccgggtcgacccacgcgtccgcggacgcgtgggggcctgaggggctgggctgaagttgaaccatgagtgccgtcgcgggttcgtcgtcgctgaacccgaacgcgccgctcttcatcccggcggcgctgctgcaggtggaggacttctcgccgcagtggtgggacctcatcaccaccaccgcctggttccgcgaccactggtcccgcgagcacgcccacctggatgagatagccgagcagctcgagttggtcgccctccttgcctacgatgaggatgaggacctcttctacggcgagcaggcccccgccgccgncgccgcccttaagacagattcggtgctcaaggcgctgaacttgggctccccgaagagcggcgacgccccgcgggggttccgggagaaacccaggcactccgagaagccgaccaagtacgccggcagccccaagagcagcgcttctcgcgtgatccacc

SEQ ID NO: 91588 - DNA, 523 bp, Zea mays
  unsure (1)..(523): unsure at all n locations
gagttgagggctctcgtattagaaggggagtattgtatactcgtccggaattcccgggtcgacccacgcgtccgattagctctaggctctagctagccgcgccactccttcgtgtagccatcagccttctcatcgccaccaatggccactgccgaggtccagaccccgaccgtcgtggcggccgaggaagcgcccgtggtggagaccccgccgccggccgtcgtgcccgaggagtctgcccccgccgaggccgaggccgaggccgaggctgctgctcctgctgatcccgaggagcttcccgcggccgagcagcaggcagccgccgaggcggaggccgcggctcctgctggtgccgaggagcccgtcgcggccgaaccggccgccgaggcggaggctgctgctcctgctggtcccgaggagactcctgcggtcgagcaggaggcagccgccgaggaggaggcttgtgctgctcctnctgctggtgccccagagcccgncgcgggcgagcctgttcgcgaggcan

SEQ ID NO: 91589 - DNA, 558 bp, Zea mays
  unsure (1)..(558): unsure at all n locations
atataagtgaggtgagatgatgaatattgantaaggggagagggcctctgtcttttgacaagcnatatacagcatgactcaccggtcttgaattcccgggtcgacccacgcgtccgcatttaaccaattggaagaagttgttgttgctgagagtaggcagtagctagctggctgaatggtgatagttgttgctgcaaataagcagcaacaacttcttccatttaaccaattggccgcactgaaccccgctgcttatttgcagcagcaaatactactaccatttagccagctagctgcagcanaccgtgcttccttcttgacacagcaacagttgctgcctttctaccagcagtttgcggctaaccccgcaaccctcttacaactacaacaattgttgccctttgtccaacttgctttgacagaccgagcggtctcctaccaacaacacatcattggtggtgccctcttttagattgcttattagttgtaattcaataataaagttttttggatgatgtatgtggccaaccagaattaagaagttacatttccagattt

SEQ ID NO: 91590 - DNA, 569 bp, Zea mays
  unsure (1)..(569): unsure at all n locations
atagcagggtatggagatgagnagaaatgagantgnntagaagagctctcngtctatagaggacgtatgaaagaaatcctcaccggtcttgaattcccgggtcgacccacgcgtccggcaacgtagaaagcacaatagtgtaccaacaatggcagccaaaatattttgcttccttatgctcgttggtctttctgcaagtgttggtaccgcaaccattttcccacaatgctcacaagctcctatagcttcccttctttccccataccttttaacaacggtgtctttaatgggtgaaaccccaattggttaacccttcaggatccaaccaggcattgcaaccagcattttaccattattacccttggtccttcaacaaccgtgagccctattacaggaattacctttgggccatttggggggacaaaacattagggcacaacaactacaacaacttgtgctagcaaaccttgctgcatactcttagcaacatcaggttcttccatttaaccaactggctgcattgaactctgctgggtaattgaacaacaatttccattaggcaccttgtt

SEQ ID NO: 91591 - DNA, 519 bp, Zea mays
  unsure (1)..(519): unsure at all n locations
agtttagggctgnattaaaaagaaaaagtattgtatacccgccggattcccggtcgacgacgcgtccggaacaaattaagcgggacactggaaacaaagagagacatgggccttcgcggcggagctgttgccctgcttctgctcctgttcgtccacggaggccagcgagcagcagaggccggcggggacgcgttcgtgagggtccagggcacccgcttcgtgcaggacggcaagccgttcttcgccaacgggttcaacgcctactggctcatgacattcggcgccgaccccgcgcggaggggcaaggtcacctcggcgctcagccaggccgccggcgccggcctctccgtggccaggacgtgggcgttcagcgacggcggcggcggcggcggcagcgcgctgcagtactctcccggccgctacaacgagaacaccttncaggggctggatttcgggctggctgaggcaaggaagcatgggaataagatgattctgagcctcgtgaacaattacgacagg

SEQ ID NO: 91592 - DNA, 517 bp, Zea mays
ggttgaggctgcttatgacggagattatgcactgctctaccggtccggaattcccgggtcgacccacgcgtccgcagtgattcctttccatttaagtggataaacaagaaatggaaagaaggttttcatgtgactgcaatggcaacatcaggcaatcgatgggctatagtcatgtcccgcagtgctggattttctgagcaggttgtggagttggacttcttgtacccgagcgagggcatccatagacgctgggacaatggcttccgtattactgcaatggctgccacgatggatcagtctgcgctgatcctaagcaagccaaggcgtcgcccaagagacgagacacaagagactctgcggactacacagtttcccagtcaacatgtcaaggacaagtgggccaagaatctctaccttgctgggatatgctatgggcgaaccgtggcctaacatcgtccgttgctgacctaactggtggttgatgtatattttgaagtttttatcagctgctaccagc

SEQ ID NO: 91593 - DNA, 522 bp, Zea mays
  unsure (1)..(522): unsure at all n locations
ggtggaaggctgtgttacgaaggggggagtatagtatgctctaccggtccggaattcccgggtcgacccacgcgtccgtttcctcctccctccacggctccaccgagctccccgatccctccgccccaaatcccacacacccggttggccaccgcctcgctatggatttggatctgtggatctccaaggtcaaggagggtcagcacctcgcggagcacgagcttcagtccctctgcgaatatgtgaaggagatcctcatcgaagagtcgaacgtgcaaccagtgaacagccccgtgacggtttgcggtgatatccatgggcagttccatgacctaatgaagctcttcgcgacggggggccacgtcccagagacgaactatattttcatgggtgattntgtggaccgtggcttcaatagtctagaggttttcaccatcctattgctactaanagcgaggtatcctgcacacattacccttctgcgtggaaatcatgaaagtaggcagttgacacaggtgtatg

SEQ ID NO: 91594 - DNA, 526 bp, Zea mays
  unsure (1)..(526): unsure at all n locations
gagtttggaggtttttgtctatgtcaagtanagtattgctataccggtccggaattcccgggtcgacccacgcgtccgcggccagctgctccgcgtacctggccgcggtgtgccaggtgctggtgaaggtggtgttgaggcgggacatctcgttcaagctgacgtcgaagcagcccgcgggggacgagaagaaggacccctacgcagacctgtacgtggtgcgctggacctggctcatggtgacgcccatcatcatcatcctcgtcaacatcatcggctccgccgtggccttcgccaaggtgctggacggcgagtggacgcactggctcaaggtggccggcggcgtcttcttcaacttctgggtgctcttccacctctaccctttcgccaagggcatcctggggaggcacggcaagacccccgtggtggtgctcgtctggtgggccttcaccttcgtcatcaccgncgtgctgtacatcaacatcccacacattcacgggccccgcggcaagcacggcggcgcgan

SEQ ID NO: 91595 - DNA, 555 bp, Zea mays
ataaggagagatagagaaataaatagagaaatagtaatgcgctccgtttacgaagaagatatacagaaatgctcaccggtcttgaattcccggggcaaaatattttagctgccattgttggtacactattgtgcctccttatgctccttggtctttctgcaagtgctgctacggcgaccattttcccacaatgctcacaagctcctatagcttcccttcttcccccgtacctctcaccaacggtgtcttcggtatgtgaaaacccaattcttcaaccctacaggatccaacaggcaatcgcagctggcatcttacctttatcacccttgttcctccaacaatcatcagccctattacagcagttacctttggtgcatttattggcacaaaacattaaggcacaacaactacaacaacttgtgctagcaaaccttgctgcctactctcaacaacagcagtttcttccattcaaccaactagctgcattgaactctgcttcttatttgcaacaacaacaactaccattcaaccagctatctgctgcctacccccaac

SEQ ID NO: 91596 - DNA, 567 bp, Zea mays
  unsure (1)..(567): unsure at all n locations
ttatgtggggagtnatagggtattgaatgtgtagaatataatgaatgggtgttcttttaagttggagtacggaaagcatgccttcaccggtcttgaattcccgggtcgacccacgcgtccgaagcaacatagaaagtggaatccagtagcaacaatagagcaacaatggcgaccaagatatgtggggtccttatgctccttgctctttctacatgtgttgctaacgcgacaattttccctcaatgctcacaagcttctatagcttcccttctttccccatacctttcatcaattatagcttcaataatggaaaaccccacttttcaaacacttagggcttaaccaggcatttgaacaaggcacataaccttaacggccttggtggtttaaccattgccaggcccatccttggtgcaatcatttgtaccaaccatatgggcacaaaaactgtaacaaactttgctaactctggttcacccaagtacttgtggaaacctctttttctacacttaaggaccaccattttgttcatttaaacaaattgtacacttgaaacctgttgtaatt

SEQ ID NO: 91597 - DNA, 532 bp, Zea mays
  unsure (1)..(532): unsure at all n locations
aggttttgagtgtgtcntgtcataagaaagaatagtattgctatactcgtccggaattcccgggtcgacccacgcgtccgcggacgcgtgggtccacggccgcgcctgcgacacccatccgccgccacgccatggccaagtacaacgtggtgcagaagaacaagcgccagtgcaatcaggaccgcaagcgcgccgtgcatggggagcccgggaccggcaagctcaagcagcggaccgcgcccgtctccatgtccggcaagcggaagaagaagctcgagcgccgcctcaaccggaagcagaaagaggctgcgatgattaaggcgctggagaacaacatgggggatgtcgacatgatctcagttgaagggtcttcagaagctgcaaagggcaagtcccaagtgaagttcagtgtgaagaaaaactcaagaatacagataaagagattaaagggcaaaggcaggaagaacgccaaaaattcaaaaccacctgccaaggagagagttgatgccatggtaaaaatgacagttgatgc

SEQ ID NO: 91598 - DNA, 529 bp, Zea mays
  unsure (1)..(529): unsure at all n locations
agttaaaggctgnctccatgataagcaggtantgctactgacgtaccggttcggaattcccgggtcgacccacgcgtgcgacttctaccaggacacagagatgacctggggcaatggccgcggcagggtatgggccgggggcgccggcttgaacttacccttgaaccgaacttccggttccggtttcaatccaagagccagtacctggtcggcaagatcgacatgcagatcaagcttgtgccaggcaacttcgtggcacggtcaccaacttctacctgtcgttccaaggcgacacgcacgacgagatcgacttcgaggtcctgggcaacgtgagcggggagccctacacgctgtacaccaacgtgtttacacgcggacagaggcagcgggagcagcaagttcgcctctggtgctaccctattacagtgttttacacatactacatactgtggaacccgcagcacctgatattttccgtggaggacagcacgcctgtgcgactacttgaaaaacaaggagcgcgcggtgg

SEQ ID NO: 91599 - DNA, 525 bp, Zea mays
  unsure (1)..(525): unsure at all n locations
gagtttgaggctgngtcatgtacacgcaaatatagtacgctctaccggtccggaattcccgggtcgacccacgcgtccggccaaccatctaccagcgactcagcgagcgagagcagcacacactgcacgcagctagctaggagcagcagcagcggcggcgatggcggcctccatgatctcctcgtcagctctggcggtggcgcctcagggcctgccgcccctcggccgccgcgcctcctccttcgccgtcgtctgctccaagaagaagatcaagaccgacaagccctacgggattgggggtggcctgaccgtcgacgtcgacgccaacgggagaaagggcaagggcaagggcgtgtaccagttcgtcgacaagtacggcgcgaacgtcgacggatacagcccaatctacaacgaggatgactggtctcccaccggcgacgtctacgtcggtggaaccactgggcttctgatctgggccgtcaccctcgctgggatcctcggcggcggcgccctcctcgtctacaa

SEQ ID NO: 91600 - DNA, 558 bp, Zea mays
atatagggaggtagggaggaagtattgcaataggaaggggtcgtctaagatggaggatgtactgcatgcctcaccggtcctgaattcccgggtcgacccacgcgtccggaccaacaagcaacatagaaagtggaatacagtagcaacaatagagcaacaatggcggccaagagattttccatccttatgctccttgctctttctgcatgtgttgctaacgcgaccatttttcctcaatactcacaagctcctatagctgcccttcttcccccataccttccatcaatgaccgcttcagtttgtgaaaacccagcccttcaaccctacaggctccaacaagcaatcgcaacaagcaacttacctttatcacccctgttctttcaacaatcgccagccctatctttggtgcaatcattgggtccaaaccatcagggcacaacagctgccacaactcgggctaccagtgatcaggccagtaagctctgcaaaacctttctccctactctcagcaacaaccattgtcttccattcaaccaactgtctacactgaaccctgct

SEQ ID NO: 91601 - DNA, 557 bp, Zea mays
  unsure (1)..(557): unsure at all n locations
aatttgtagagggatgggagagagttatnggagtaggaggccttttttacgatcgaggatatacagcactgctcaccggtcttgaattcccgggtcgacccacgcgtccgctggacgtcagcctagcaattagctcatcgactccagattggagaactcgacaccatgaaggtgctgatcgttgcccttgctctcctggcgctcgctgcgagcgccgcctccagtacaagcggcggctgtggctgccagacaccaccgtttcatctaccgcctccgttctatatgccgcctccgttctatctgccgccgcagcagcagccgcagccatggcaataccccactcaaccaccgcagctaagcccgtgccagcagttcggatcctgcggcgtcggcagcgtcggcagcccgttcctgggccaatgcgtccagttcctgaagcaccagtgcagcccggcggcgacgccctacggctcgccacaatgccaggcgctgcaacaacaatgcttgcaccagatcaagcaagtggaacccgtgcacccgtacccagcgacatacgg

SEQ ID NO: 91602 - DNA, 554 bp, Zea mays
atattgggtatttgagattatgaatggaataaagaagaaagtgtatcttaagatggagtagagggaatcatcaccggtcttgaattcccgggtcgacccacgcgtccggcaaccatactccttggtgctggtgcaactgtttgtcttcaggttgttgcagaacggagacgaggtactttggaagagttcctagagcagccttctatagatgctactactttactcctgagcatatttattccaaattggatttcagaattccggggcaaatttaagttggctatttgaaacttacagagcagcgcctggtcctcttggcaatgctgtttcttatgtaaatggtgttttcctgggacatgctcctttggatgaacattcagatactctggaattgagtaatctgcggttggcttttggtgcatatggaacagagcatgctattagagcaacgagggtggaggaattccttactggtaaatcactcactgcatcagtggtacttgtggcaattaaattactaagagaaacggttgtaccaatggagggaacatcat

SEQ ID NO: 91603 - DNA, 554 bp, Zea mays
  unsure (1)..(554): unsure at all n locations
tattggtagtgagtttgtattatgagataggagctanctaatgatagaatatatagcatgactcaccggtcttgaattcccgggtcgacccacgcgtccgcccacgcgtccgcttgccctttttgtgagcgcaacaaatgcgttcattattccacaatgctcactggctcctagtgccattattccacagttcctccctccagttacttcaatgggcttcgaacacccagctgtgcaagcctacaggctacaacaagcgcttgcggcgagcgtcttacaacaaccaattgcccaatttcaacaacaatccttggcacatctaaccatacaaaccatcgcaacgcaacagcaacaacaatttctaccagcactgagccaactagctgtggtgaaccctgtcgcctacttgcaacagcagtttcttgcattcaacccaatttggctctggcaaacattgttgcattccaacaaccaccaccattgcaacacgttctaccaacgcttaatccaattagccagggggacccctgtccgctaccttcaaccagaaccaa

SEQ ID NO: 91604 - DNA, 521 bp, Zea mays
  unsure (1)..(521): unsure at all n locations
gttagaggttctgttaagtaagagagtattgctatacncgttcggaattcccgggtcgacccacgcgtccggctctctgtctcctgctcagagtcgcagttcgctttgttgtactagagcgctgagcagatctttccttgtttcttcattccggtacgaaggggaggggtccaagtgaagagaagagaaggcctgcgagcgatgggcatcgtcgacgtcgtctccgagttctgctccttgccgaggactcgccggcatctcaagaagaggaagcagttccaggtatatataaaccatcttcttctatttctgttcggggtctcttatcccagccagcccaacaactgaactgaacgggactcgccgcagacggtggagatgaaggtgcgcatcgactgcgaagggtgcgagcgcaaggtgaagaaagcggtggagggcatgaaaggcgtgagctccgtggaggtggcgggcaagcagaacaaggtgacggtcacgggctacgtggacgccaccaaagtcat

SEQ ID NO: 91605 - DNA, 525 bp, Zea mays
agtaggaggtgtctgattaaagacaagaatagtattgctataccggtccggaattcccgggtcgacccacgcgtccgcttaggaaaggactgtggcatgagtttcccaacggcacatgtagaggaaagctggcagatggctgagttctataataacaaggttcttgtggagtacagaaacaaagaccctgatcatgttgaatgggctaaagcattgaaggatctatatatgcctggtttgcgggattatgttaaaaagcactaccctcttggtcctgtctggggtcctgctggaggcgctgttgtttctcaaccaaaggctgctgctcctacacctaaagctccagcggttaaggctccccctccaccagctcctcctgcagcgcctctgtttagcacagagaagtctccaaaatcttcaaagcctaaagaaaggatgtctgctgtcttccaagagattagttcaaaacctgtgacttgcaggttgcgaaaggttaccgatgacatgaagtctaaaaccgcgctg

SEQ ID NO: 91606 - DNA, 522 bp, Zea mays
gggaagagtctttgttacgtatggagagtattgcactgctcgtaccgtccggaattcccgggtcgacccacgcgtccgagagagagaggggaagagagagagagagagagagagatagatgtggtaactcaggaactgttcttatgcatgcagcagccataagcattgctactagggtttcatgcggggcgaagcagttggtctctgccgcctgaacgccgccggaatctgcgaggcctccccgagctgcgtccgtcgtcagataaggcagccgccggcacggcaatgccggttccgcttgctccgtacccagctcctccggcgccattcacgccgcccaatggggcccagagccagctcgtctgcaccgggtgccggaacctcctcatgtacccagctggtgcgacgtcggtctgctgcgccgtctgcagcaccgtcaccggcgtgccggctccaggaactgagatggcgcagctagtgtgcggaagatgccacacccttctcatgtacatacgcggcgcg

SEQ ID NO: 91607 - DNA, 524 bp, Zea mays
gggtagaggctgcgttactatagagagtcattgctactgctctaccggtccggaattcccgggtcgacccacgcgtccggtcacaatgacctcggttggctatggggatcttttcccaaacagtgacacaacaaagctgcttgcttgcgcttttgtattcacaggaatggcgatcattgctctcttcatcagtaaagcggcagattaccttgttgagaaacaggaggtgttgttcttcaaagcactgcacatgaatatgaagggcagcgaggccaaaatgctaggagcaatggaaacaaataggataaagtacaaattctacactgtcgctctgcttcttgcaatggttattgttgctgggactgtatttctgtggaaggttgagaagctcagccttgttgattccttctactgtgtctgtgccacgatcactaccctgggttatggggataaaagcttctcgtccaaacttgggcgtgtttttgcagtgttttggataaccacaagtactctcatcatggcta

SEQ ID NO: 91608 - DNA, 520 bp, Zea mays
ggtttgggggtgcgtatgagtagaaagtattgctctacccgtccggaattcccgggtcgacccacgcgtccgctcggcagtcggcacgaggacgcgcgatcccgtcaccgctcacctccttctccaaacgctgactccgcttcccgtccccatcccgctgcgcaagatcgggaggggacgaagagaggtcgaccgggaggagatgcaccgagaccgaggcgtctctgcggcagcgatacccggtgaccggaagcggatcggcgagcctatggacagatcgtctccatctacgtcgtgggggttctccggagggcgcgagaaggagcggatcggcgtgggcaagcagccggagatgcctcgctccggcggcggatccaccgccatgtccaagagcaagctctctgacgaatcagaaactgacagcgaagaatcagatgtgagtggttctgatggggaagatacttcgtggatttcatgggtctgtagcttaaagggcaatgaatttttctgtgaggttgat

SEQ ID NO: 91609 - DNA, 519 bp, Zea mays
  unsure (1)..(519): unsure at all n locations
ggagaggctgtttaagtaaagaaagtattgcatgctctaccggtccggaattcccgggtcgacccacgcgtccgcccaattggaagggcagctaataaggtaaggggcgacgaaaatggctccaacgaccgccaccaaggacgacagtggctacggcgacgagcgccggcgcgagctgcaggcgttcgacgacacgaagctgggggtgaaaggcctggtggactccggcgtcaagtccatcccgtccatcttccaccacccgccggaagccctgagcgacataatttctccggcgccgcctctgccgccgtcgtcgccctccggcgccgccatcccggtggtggacctctcggtgacgcggcgcgaggacctagtcgagcaagtgaggcacgcggccgggacggtgggcttcttctggctggtgaaccacggcgtggcggaggaactgatgggcggcatgctccgcggngtgcgccagttcaacgagggccccctggaggcgaagcangcgctctactt

SEQ ID NO: 91610 - DNA, 561 bp, Zea mays
  unsure (1)..(561): unsure at all n locations
agaattggagaggagtaatgaatgagggtaggaggcgtctgttagaagagggatgtaatgtatgactcaccggtcttgaattcccgggtcgacccacgcgtccgccaactagcaacatagaaagcacaatagtgtaccaacaatggcagccaaaatattttgcctcctgatgctccttggtctttctgcaagtgctgctacggcgaccattttcccgcaatgctcgcaagctcctatagcttcccttcttcccccgtccctctcaccagcngtggtcttcgtattgtgaaacccaattcttcaaccctacaggattcaacaggcaatcgcaactggcatcttacctttatcacccttgttcctccaacaatcatcaagccctattacaacaagtaccttttgtggcatttattggcacaaaacatcagggcacaacaactacaacaacttgggctaacaaacccttgctgcttactttaagcaccagcggttttttcattcaacccaactaggttcatgtgactctgcttctaattggcaccaccaccacttaccattaac

SEQ ID NO: 91611 - DNA, 521 bp, Zea mays
  unsure (1)..(521): unsure at all n locations
ggtggaggttctgttaaagcaagaatagtattgctatacccgtccggaattcccgggcgcagagataggcgtcttcgtactcgcctacctccgcggctcaaacctttcccccttctcccaattcccgccgccgctccatcccgtaacgcgacaccatgagggagtgcatttcgatccacatcggccaggccggtatccaggtcggaaacgcgtgctgggagctgtactgccttgagcatggcattcaggctgacggtcagatgcccggtgacaagaccattgggggaggtgatgatgctttcaacaccttcttcagtgagactggtgctgggaagcacgtgccccgtgctgtttttgttgaccttgaacccactgtcatcgatgaggtgagaactggcacctaccgncagctcttccaccctgagcagctcatcagtgggaaggaggatgcagccaacaactttgcccgtggtcactacaccatttggcaggagattgttgacctgtgccttgatcgcata

SEQ ID NO: 91612 - DNA, 507 bp, Zea mays
  unsure (1)..(507): unsure at all n locations
tagtagagttgttgtccagtatggtagtatgtataccggtcggattccgggtcgacccacgcgtcggccaaaccaaatcatgactgacaactgaccgggagtacgacatcggcgacgagatcgggcggggcgtttcggcgtggtccggcgctgtgtctccggccacgggtgacgccttcgccgtgaagtccgtggaccggtccctcctcggcgacgacctggaccgcgcgctggcggagctggagccgaagctggcgcggctcgcggggggcgagggcgacgggaacccgggcgtcttgcaggtgcgcgccgtctacgaggacgacgcctggacgcacacggtcatggacctctgcacggngcccgacctgctggactggatccgnctccggcgcggcgcgcccgtgcccgagcccgacgccgcgcgcgtcgtcgcgcagctggccgaggcgctcgcgggctgtcaccgncgcggcgttcgtcaccgggaccgtcaacccgacaacc

SEQ ID NO: 91613 - DNA, 520 bp, Zea mays
  unsure (1)..(520): unsure at all n locations
nggttgaggctgngttcgatcgcggttatagtatgctctaccggtccggaattcccgggtcgacccacgcgtccgcggacgcgtgggcgggagaagaggataagaggaagcgagtgggactgtgagtgagttggaaggaggggggtggcaatggcgttgcggaatggtggtggtggtggtggagcctgtcccgcggcggttgtgctggtggctgcggccgtcgcggcgctgctgggcgccggggtggcggcggcgaccaagttcgacgacgtggtgcagcccagctgggccaacgaccacgtggtgtacgacggcgacctcctcaagctccgcctcgactccagctccggcggagggttcgtgtcaaggaccaagttcctgtacggcaaggccagcgccgacctcaagctcgtgcccggggacttccgccgcgtcgtcaccggtttctatgggaccggcggccgcccggggccaagcacaacgaggtcgacttcccagttccttggcaccttgaccggcg

SEQ ID NO: 91614 - DNA, 528 bp, Zea mays
  unsure (1)..(528): unsure at all n locations
ggggttaaagagggtgtcgtcatgacacagaaataangtgatacctcgtccggaattcccgggtcgacccacgcgtccggtcacacacacacacacagacaagtggtttccaaagccaagtgtgtgtactagcaaccggctagctcgggcggcagcaggcagccatcatgtcggaggagaagcaccaccacttcttcaaccaccacaagaaggacgaggagcagcccgccggcgagtacgggtactccgagaccgaggtggtcaccgccaccggcgagggcgagtacgagaggtacaagaaggaggagaaggagcacaagcacaagcagcacctcggcgaggccggcgccatcgccgccggcgccttcgcactctacgagaagcacgaggcgaagaaggaccccgagcacgcgcacaggcacaagatcacggaggaggtcgctgccgcggcggccgtcggcgccggcggctacgtattccacgagcaccacgagaagaagaagaccacanaggacgccgagaggccaa

SEQ ID NO: 91615 - DNA, 524 bp, Zea mays
  unsure (1)..(524): unsure at all n locations
ngggtaaggcggctgnattatgtagcatagaataacgttatacctctccggaattcccgggtcgacccacgcgtccgggcgactcggagctgcagcagctgctccacatcttcaagttgcttggcaccccaaacgaacaggtgtggccaggcgtcggcaagctgcccaactggcacgagtacccccagtggaagccgacgaagctgtctgctcttgtgcccggcctcgacgctgatggctacgatcttcttgagaaattgctggaatacgagccggcgaagcggatccccgcgaagaaggccctggagcacccctacttcaaagatgtgaggaagggagatgcgcactgactgaagcgatccaccaaagggcccgcctcacgagttgacatatatatacgtgtgtgtcgtcgtgtcgagcatgattgccctgaagcaattcttttgctaccagggcacagnctactttctggtctctaantgatgttcgtggtctgtgtgctgtgaaccgtcgcttttgctggg

SEQ ID NO: 91616 - DNA, 560 bp, Zea mays
  unsure (1)..(560): unsure at all n locations
tatagagggaggagtgagtaagaatnggaatgaggtctgngtaatagaatagaatgttaatgcaggactcaccggtcttgaattcccgggtcgacccacgcgtccggagaccaactagcaacatagaaagcacaatagtgtaccaacaatggcagccaaaatattgtgctgccttatgctccttggtctttctgcaagtgctgctaccgcaaccattttcccacaatgctcacaagctcctatagcttcctttcttcccccatacctttaaccagcggggtcttcagtatgtgaaaacccaattcttcaaccctacaggatccaacaggcaatcgcagaagcattttaactttatcaaccttggtcctccaacaaccggaaaccctattacaggagttcccttgggggcacttgttggcccaaaacattaaggggcaacaacttcaacaacttgtgctaggaaaccttgctgccaactttaacaacagcagttttttccattaaccacttggctgaatgaaactttgctggttatttgcaacaccaacttccattcaggc

SEQ ID NO: 91617 - DNA, 551 bp, Zea mays
  unsure (1)..(551): unsure at all n locations
taggaggagagatagaaataaatatancgtagaatagaagtgtgtcttaagggggatatatgagatcnctcaccggtcttgaattcccgggtcgacccacgcgtccgcccacgcgtacgtaactagcaccatagaatgcacactagtgtaccaacaatggcagcccagtagggcgcctacttatgctccttggtccttctgcaagtactgctacggcgaccattttcccgcactgcttgcatgctcctataccttcccttctttcaccgtacctgtcaccagcgtggtctaccgaatgtgaaaacccatttcttaacccctacaggatccaacaggcaatcacacctggcatattacctttattacccttgttcctacaccaatcataagccctattacatcagctacctttggcgcatatattgacacaaaacatcaggccacaacatctactacaactcgtgctagcaaaccttgatgactactctcagcatcagcagtaccttccattcaaccaactatctgctttgaactctggtcatcaactgcat

SEQ ID NO: 91618 - DNA, 520 bp, Zea mays
  unsure (1)..(520): unsure at all n locations
agtttgagtttttgtctagagatgattgcatgctctaccggtccggaattcccgggcatcaccatgcgcaagactgctggcaagcccaagccagcggcgtccggcagcccctggtacggggccgaccgcgtcctgtacctgggcccgctgtccggccagcccccaagctacctgaccggcgagttccccggcgactacggctgggacaccgcggggctgtccgccgacccggagactttcgccaagaaccgcgagctggaggtgatccactgccgctgggccatgctgggcgcgctcgggtgcgtgttcccggagctgctcgcccgcaacggcgtcaagttcggcgaggccgtgtggttcaaggccgggtcccagatcttcagcgagggcgggcttgactacctcggcaacccgagcctgatccacgcgcagagcatcctggccatctgggcgtgccaggtggtgctcatgggcgccgtcgaggggtaccgcatcgncggtggcccgctcgggaggtggt

SEQ ID NO: 91619 - DNA, 529 bp, Zea mays
  unsure (1)..(529): unsure at all n locations
agtttaagggtnnntnnnnnaactganattgtatgttactgtcaagctctaccggttcggaattcccgggattttgaagtagatatgaatgggaaaagattctcttggcaggggatagcaaaactgccctttatagaagaagatcggttgctggctgagattaaaaaagttgaggatactttgacgcctgaagaagcaaggagaaacagtaccatgtgcaatatgctttttgtgaatggcgcccattcactttctccctatatctactctctcaacagtaaattcgggcatctgccagacaaagaccgtggtgcaatcaaagaaaaacttgatccttcagctagtggaggaatgaatggttacattgcactctgtggtggggacccgtcccctcctgtcttcagatctcctgtagatgggcttgaggacatcatggataatcaagtgatatgctcaatctacaagctttcagatccacacaagcacatcgctcgtncaccagctggtggtatcatacccaagaagagtg

SEQ ID NO: 91620 - DNA, 534 bp, Zea mays
  unsure (1)..(534): unsure at all n locations
nagttatgagtgcctgtgtgactttttcgttcagttcgcacgancgcatcgaatcagctgacatgaccgtgcgcaagactgctggcaagcccaagccagcagcagttcggtagcccctggtacagagcccaccgcgggctggatctgggcccactgtgcggacaacccccaagctacctgaccggcgagttaccctgctactacagctgggacaccggggggctgtccgctgacccggagactttcggcaagaaccgctagctggaggtgatccactgccgctgggccatgctgggcgcgctcgggtgcgtgttcccggaactggtcgcccgcaacggcggccagttccgcgaagccgtgtggttcaaggccgccttccatatcttcaaacaaggcgggcttgactaccttgggaacccgagcctgaatcacgcgcaaaacattcctgacattttggggttcccagctggtgctcatgggcccccgtctaaggggtaccgcattgaaagctggcccgcttcggggaagttggtg

SEQ ID NO: 91621 - DNA, 522 bp, Zea mays
  unsure (1)..(522): unsure at all n locations
gtntggaaggctgnctccatgacaagcaatattgcacgctctaccggtccggaattcccgggtcgacccacgcgtccgagagaagagcacagcactagcagcacctcggcgaggccggcgccatcgccgccggcgccttcgcactctacgagaagcacgaggcgaagaaggaccccgagcacgcgcacaggcacaagatcacggaggaggtcgctgccgcggcggccgtcggcgccggcggctacgtattccacgagcaccacgagaagaagaaggaccacaaggacgccgaggaggccagcggcgagaagaagcaccaccacctcttcggctgaccgtagtaccgggcggcgcgcgaacgagctagctagctccggcgcacacaaccacacacctgtttaattctgtactgcatgcgtgtgtaatttgatggttcacaataatgagtccctctccggaccttggtagctgcttgcttgtggtgagtgagagtgtgagactganggagaagaggtggtgggc

SEQ ID NO: 91622 - DNA, 532 bp, Zea mays
  unsure (1)..(532): unsure at all n locations
agttaagggnnnnnttnntttttgaacacggtaaaatcagtatttctctaccgcntcggaattaccggcatgttgaagtagatatgaaggggaaaagattctcttggcaggggtatagcaaaactgccctttatagaagaagaggggttgctggctgagattaaaaaagttgaggatactttgacgcctgaagaagcaaggagaaacagtaccatgtgcaatatgctttttgtgaatggcgcccattcactttctccctatatctactctctcaacagtaaattcgggcatctgccagacaaagaccgtggtgcaatcaaagaaaaacttgatccttcagctagtggaggaatgaatggttacattgcactctgtggtggggacccgtcccctcctgtcttcagatctcctgtagatgggcttgaggacatcatggataatcaagtgatatgctcaatctacaagctttcagatccacacaagcacatggttcgtccaccagctggtggtatcatacccaagaagagtgttg

SEQ ID NO: 91623 - DNA, 574 bp, Zea mays
  unsure (1)..(574): unsure at all n locations
atatttgtagtagatatgatgattagaggtgaggggttgtctagttatgaagggaggatgtatctgtaagnctcactggtcttgaattcccggggagaccaacaagcaacatagaaagtggaatacagtagcaacaatagagcaacaatggcggccaagatattttccatccttgtgctccttgctctttctgcatgtgttgctaacgcgaccatttttcctcaatactcacaagctcctatagctgcccttcttcccccataccttccatcaatgaccgcttcagtttgtgaaaacccagcccttcaaccctacaggctccaacaagcaatcgcaacaagcaacttacctttatcacccctgttctttcaacattcgccagccctatctttggtgcagtcattgggtcaaaccatcagggcacaacagctgcaacaccttgtgctatccagtattcagccagtaacttttgccaaactttcttcctaattttaaccaccaccatttcttccatttcacccaatggcttaaactaaaccttgttgttaattaccaccactaccacttcttacat

SEQ ID NO: 91624 - DNA, 564 bp, Zea mays
  unsure (1)..(564): unsure at all n locations
agagagaggtggtagnagtagtggggtngtcnaactatgattatgaggtaatcgtatgnactaccggtccggaattcccgggtcgacccacgcgtccggcccggacatgtgcacaactggaggcactgaatgtttccgtgctaggtggcgtgtctcagacagtagacttgcagacggtgtacaacatagaaggctgggatgcgtacgcgttggcttttcaggcgacggaagagcaggcacatcttcaattcatgaaccctggcatggaggatgatccaacttgtggtcctatcctagacaacgttgccgtcaagaagctcttcaccccagacaaaccaaaggataacgtggtgctgaatggagactttgaggagggtccatggatgttccccaacacgagcttcggcgtgctgctcccaactaaccttgacgagcaaacgtctgccatacctggttggatgatcgagtcaaaccgcgccgtccggtacatagactctgatgagtacaaggtttcccagggaaagcgtgccattgagcttctgtcatgcaaagagggtatcatct

SEQ ID NO: 91625 - DNA, 570 bp, Zea mays
  unsure (1)..(570): unsure at all n locations
gagatgagaggatggtatatagngggtgggtagtgggtctgagctatgaatacgactgtatctctcaccggcccggaattcccgggtcgacccacgcgtccgaggcaaaggatgtcaagaaggaggctccaaaggaggcccccaagccaaaggtggttgaggcaccagcagaagaggaagcaccagagccaaagccaaagaatcctcttgacttgctgacaccaagcaagatggtccttgatgactggaagaggctatactcaaacacaaagaccaactttcgagaggttgccatcaaaggtttctgggacatgtacgacccagagggctactctttgtggttctgtgactacaagtacattgatgagaacaccgtctactttgtgaccctgaacaaggttgggggattcctgcagcggatggacctgtgccgcaagtactcctttggaaaaatgctcgtgataggctctaaaccacccttcaagctgaagggcctttggctcttccgtggccagaatgttcccaagtttggaatggatgaggtctatgacatggaactttacgagtgga

SEQ ID NO: 91626 - DNA, 564 bp, Zea mays
  unsure (1)..(564): unsure at all n locations
agatgagaggagagtagtatngggataggcggggttgagaaagaaatggaagtacttttgcaccgcccggaattcccgggtcgacccacgcgtccgattaaaatggaattctgttatcacaggattattgacgattggtccccgtttcggtggagcaattgatgatgcagcccgatacttcaaagatgcatgtgataggagcctcacgccatacgagtttgttgaaggcatgaaaaagaagggaatccgtgtgcctgggattggtcacaggattaagagcagagacaacagggataaccgtgtgcagcttttacagaaatatgctaacacacatttcctttaattcaagtaccatggaatccgctgttaaggtggaaacctacaccttgtcaaaggccaccatttgggtaagaaatgtcattggtccaaccggtcaattttcttgggatctttaatttgaaattggatggtcaaccaaccaggaaatcattaagattgtgaaaatcggtattttaaatgggctctttgtgcttgcacgatcaatgggcctgatcgggcttacct

SEQ ID NO: 91627 - DNA, 572 bp, Zea mays
  unsure (1)..(572): unsure at all n locations
gagatgagagtatggtatnnattggtagtgctnngtaagaagtcagttcatgantgcatctttgaacancctcnggnnacggagcagcagaggggcggagggagcggaccgagagcgngcgacccgcgccgcacagaaggggcccgcgcgagggggagagacggggacggggggatagctgacagaggacagcatagaatgctgggatacgtacgcgttggcttttgaggcgacgtgagagcaggcacatcttcaattcatgaaccctggcatggaggatgatccaacttgtggtcctatcctagacaacgttgccgtcaagaagctcttcaccccagacaaaccaaaggataacgtggtgctgaatggagactttgaggagggtccatggatgttccccaacacgagcttcggcgtgctgctcccaactaaccttgacgagcaaacgtctgccatacctggttggatgatcgagtcaaaccgtgccgtccggtacatagactctgatgagtacaaggtttcccagggaaagcgtgccattggacttttgtcaggcaaagagggtatcatct

SEQ ID NO: 91628 - DNA, 515 bp, Zea mays
  unsure (1)..(515): unsure at all n locations
agtgtgtctgtaaagaagaagcatgtattgcactactcggtccggaattcccgggtcgacccacgcgtccgtgaatatgtttttagtggccatcggttcaaactaacaattcctaaggagacttgcagtgttggcttctcattatctggtgttcggtgtcctggtaaaggcgagccatactcagatgaagctattgctttgatgaggagaaggatactacagcgtgatgtggagatagaggttgaagcagttgaccaaaccaggaacattcataggttcgttgtgggagtccaagaccaacatgggctctgtacttctggaagctgggctggcgaagctgagttcttttggcttggataggatgtcagatgctcatgtcctaacaagagctgaacagtttgcgaagcaacaaaagattaagatatgggagaactatgtcgagggtgagaatgcttcanatggatccacacctgaatcgaaacanaaggaaatcctcaaggntgtcgtcacttgaa

SEQ ID NO: 91629 - DNA, 512 bp, Zea mays
  unsure (1)..(512): unsure at all n locations
gtggagtattttttcaaaaggatattgtacgctctacggtccggaattcccggtcgacccacgcgtccggctttagcgatggtcctgttcatggctggcgccgcgctgctcgccggggctgccggcgccggcgcgcagcagggcgtgtggagcatcatcacccggcccatgttccagagcatgctgagccaccgcggcgacagcgggtgccagggcgccttctacacctacgacgccttcatcgaggccgccagcaagttccccggcttcggcaccaccggcgacgagcagacgcgcaggcgggagctcgccgncttcttcggncagacgtcccacgaaaccaccggtggatgggcgactgctccggatggaccgtttgcctgnggatactggccggttgaagaaccggaaccgaccggaccaaccttattatggccaaggaccattccggttaactattaagtccaattccaggttggccgggcaagcgctgaacctgaactggggggcca

SEQ ID NO: 91630 - DNA, 573 bp, Zea mays
  unsure (1)..(573): unsure at all n locations
gagagtatgaggagatggtantgttgtgagggggggcgtctgagtattgaggaaaggggagaggatgcaccggcccggaattcccgggtcgacccacgcgtccgccattttgtcgtcgtcgttccagctgcagtccagagttggaacccaagcgcacgcagcaccgtcgtcgaactcttccctttacggcggcattggagatggcggcgaatctagaggacgtgccgtctctggatctgatgcacgaattgctccgtcggatgaagtgcagctccaagcccgacaagcacctcatcctcatcggcccacctggctctggaaagggtactcagtctccccttattaaagatgaatattgcctgtgccatttagccactggtgatatgttgagggctgctgtggcagccaagacaactctagggatcaaagctaaagaagctatgggtaaaggagagcttggttcagataacttggntgtggggattattgatgaagctatgaagaaaccgtcatgccagaaaggtttcattcttgatggctttcctagaactggcactcaagcacagaaagctt

SEQ ID NO: 91631 - DNA, 572 bp, Zea mays
  unsure (1)..(572): unsure at all n locations
agaggtgatgggatggtnnattgagtatgagggcgtcnacgtatagagatagggagtattattgcacgcctctaccggtccggaattcccgggtcgacccacgcgttcgccagcgacgacggcggctggtgcaacccgccgcgcccgcacttcgacatggccgagccggccttgctccgcatcgcgcagtaccgcgccggcatcgtgcccgtcgcgttcaggagagtgccgtgcgtgaagaagggcggcatccggttcaccatcaacgggcactcctacttcaacctggtgctggtgaccaacgtggcgggcgccggcgacgtgcgctccgtctccatccggggctcccgcacggagtggcagcccatgtcccggaactggggccagaactggcagagcgactcgtacctggacaggcaggcgctctcggtccaggtcaccggcagcgacggccagaccggcaccaggcaacgggccggtcccggtggctggcaggttcaccagaccttcgaggggcgnccagtttgagggttgacaagttgggccccccccggcaggtattgggataatta

SEQ ID NO: 91632 - DNA, 500 bp, Zea mays
  unsure (1)..(500): unsure at all n locations
gggagtgtttttaaatagaatattgtatgctctccggtccggaattcccggtcgacccacgcgtcgggaggtcatncactcccgctgggccatgctgggcgcgttgggctgcgtgttccgagctggtcgccgcaacggcgtcaagttcggcgaggccgtgtggttcaaggccgggtgcagatcttcagcgagggtgggctggactacctggaacccgagcctgatccacgcgcagagcatcctcgccatctgggcctgccaggtcgtgctcatgggcgccatcgaggggtaccgcgtcgccggcggcccgctcggagaggtcgtcgacccgctctaccccggcggcagcttcgacccgctcggnctcgncgacgaccctgaggccttcgcggagctcaaggtgaaggagctcaagaacgggcgcctggcattgtcttccatgtcggttcttcggtcaggccatcgtaaccggcagggcccggtcgagaacctggccgacc

SEQ ID NO: 91633 - DNA, 522 bp, Zea mays
  unsure (1)..(522): unsure at all n locations
ngggtaaggaggggtctgtgtaagagggggatgtattgcactactcgtccggaattcccgggtcgaccgacgcgtccgcaccaaactactcacctgtgctcaacactgacgacgcctacgccagtcaagaagttaacggggctgacgggaagcccattggtcctcctatgggaaatccatggatctacatgtaccctgagggcttgaaggatctccttatgatcatgaagaacaaatacggaaacccacctatctacatcacggagaacggaatcggggatgttgataccaaggagacacctctacccatggaggatgccttaaatgactacaaaaggctagattacatccagcgccacatcgctactcttaaggaatcaatagacttgggatcaaatgtgcaaggctacttcgcttggtctctgctggacaactttgaatggttcgccggcttcaccgaacgttatggcattgtctacgtcgaccgcaacaataactgcacgcgctacatgaaggagtctg

SEQ ID NO: 91634 - DNA, 516 bp, Zea mays
ggtgagtatgtctgtaatgaggggcgatggtaagctctctcggtccggaattcccgggtcgacccacgcgtccgcttcacaagtgcaacatggctggaaagcctgctgttgttactcgtgtcgtggacagcatgagtgacaacctcagacctactcgcgcagaggcaactgatgtggcaaatgcagttcttgatgggagtgacgccattctccttggtgctgagactctccgtggtttatatccggtggagactatttcaacagtgggcagaatttgtgctgaggcagagaaggtatttaaccaagatttatactacaagcggactgtgaagtatgtgggagaacctatgacccacttggagtctattgcttcttcagcagtgcgagctgcaatcaaagttaaggcatcagtcatcatttgcttcacctcttctggacgagctgcaaggctcattgctaagtacaggcccagcatgcctgttctatctgttgtcattcctcgtctaaagacaaacc

SEQ ID NO: 91635 - DNA, 524 bp, Zea mays
  unsure (1)..(524): unsure at all n locations
aggtgatgtgncttctgtaaatagatggggcgtagtatatgcacnactcggtccggaattcccgggtcgacccacgcgtccgcacacccaaatacagatttgttgtgcgatttaccaacaaggacatcactgcccaaatcatatgtgctagtatagcgggtgatatggttcttgcttctgcctactcgcatgagttgccacgatatggtcttgaagttggtctgaccaactatgcagctgcctactgcactggccttctgttggctcgccgtgtgctcaagatccgtggtttggatcaggagtacgagggcaatgttgaggccactggtgaggacttctctgttgagccagctgatgagaggaggcctttccgtgctctcttggatgttggccttatcaggactacaacagggaaccgtgtctttggtgccctcaagggagcattggatggaggcctggatattcctcacagcgagaagaggtttgctggattcaagaaggacgacaagcagttggatgctgan

SEQ ID NO: 91636 - DNA, 517 bp, Zea mays
ggtgaggtgtttgtaatgaaagaagtggattgcatctaccggtccggaattcccgggctgggtttgagctgtttagaattaaggagagggatatcccaattgaggtccttgaactcgagaacaagaacgacaagagcattgcatttgcatgggaacctaaaggacatcgctttgctatcatccatggtgatggccctaagcctgatgttagcttctacaccatgcgaacagccaataacactagccgtgtatccaagctcacaaccctcaaggccaagcaagctaatactctgtactggtctcctgctgggcgcttcatagttcttgctggactgaagggtttcaacgggcagctggaattctacaatgttgatgaactagagacaatggcaacaggagagcattttatggcaacagatatcatgtgggatccaactgggagatatctcgcgactgcagttacctcagttcatgaaatggagaatggctttcaaatatggtccttcagtgcaagcat

SEQ ID NO: 91637 - DNA, 588 bp, Zea mays
  unsure (1)..(588): unsure at all n locations
atgagaatgatggagagtgagtnattggagtggtataggtggtctgagttatganatgggagtacatcgcaccggcncggaattcccgggtcgacccacgcgtccggctctcgtcgccgtcctctcccgttcgcaacgccacgctacccaccgccgaaatggccccgaagggaggtggcagggcaccggtgcctgccaagaagaacacggataaagtgacgaaccctctgttcgagaaaaggtcgaagcaggtcggcatcggcggcgcgttgcctgccaagaaggacctgcaccgattcgtcaagtggcccaaggtcgtgcgcatccagcgccagcggagcattctcaagcagcgcctggagggtgcctacgcgctgaaacaggtcacccgaacccttggcaaggacctcgctaccaacctgttcaagatgctttttaaagtcccaggcctcaaaacaatggctggctagaaaggaaaggccttttgaagaagggcccaggcttgaaaatgaaaggaaaaacttgtggaatccaagaacccagatgttgtgaaaatatgggcctttaaccaggggagctaacctcatg

SEQ ID NO: 91638 - DNA, 568 bp, Zea mays
  unsure (1)..(568): unsure at all n locations
atgtgatatgtatttgnatagggagaggagggtcagagtttagtttcgattgctcttcttaccggcccggaattcccgggtcgacccacgcgtccgtgggcgcagagaatccccaagcaaacaaacagggtagagggagaggagaggagaggagaggagaggttgggtctgggacaccatggctccgatgaagctgtacggtgcggtgatgtcgtgtaacgtgacgaggtgcgcaacggctctggaggaggctggctccgactacgagatcgtgcccatcaactgagtcaccgacgagcacaagagccccgagcacctcgtccgcaacccagttggtcaggttccagctctgcacgatggtgactttgacctgttcgaatcaccagcaatcttgcagttcgcctgctcccaaaaccaggccagacttatttagggaaggaaccctttaggaggcaccaatggtaggttttttgaatcgaggttgaagtctaaccgtatccctgttttactaaaatccattcccctgccagtcctaatacgcccaatccttgggggaatcactaactag

SEQ ID NO: 91639 - DNA, 555 bp, Zea mays
  unsure (1)..(555): unsure at all n locations
agagagaggtaggtnagaagagtagggggttgagtatgatatagacgtatttgtaaccgccccggaattcccgggtcgacccacgcgtccggaatctttgtgtgctcaagttcttcgtgcaaaatatttcccgatgaagaacattccgggggcaagacctaaaggaggaatatcatgttcctatacttggcgagtatcctaaatggattgcaacttttaagaaatgggctgatctggagagttggtaattgcaattctatcaatatttggaaggatccatggaccccacgtggagaaaccaggaagataattactccatccaaggggtcaatccgtcatccaaagagtttatgaactgataaatccatttaagggcttgttcgggtagctctcaatccatatggattgagtgagatttggtggggttaaaatcccagcatggacaaaaggcacacacgtggtccagctttctactatatcatctagaaaggcacaatggaaggcttcttccaaagatgtgaacagaataaatgggaacggggctttacttcacat

SEQ ID NO: 91640 - DNA, 568 bp, Zea mays
  unsure (1)..(568): unsure at all n locations
agatgtgaggagagtatnattgggagaagggggtgaggtaagggaatgagagtaatcgtaaccgctccggaattcccgggtcgacccacgcgtccggtttcgcaggtgatgctgaagatgaagagccggcatgtggcggggacgatcacgaagaagaagaaaagtaagcggcgcgcatgatatggcctgagcagcgtgcgccacccgttgccagtacactgacactggctctcgctacgtgcaggcgtggtgatcgacgtgtgcagggacgtgccggcgtgggccgggcggcacctgctggaggacggcgagcaccggcggtacttcggcctgcggaccgcggagcaccgggtgatcgagttcgagtgcggcagccagcgggagcccgagatgtggaccaagggcgtggcgcggctgctgaacatcggccggcaagcggaggcccctggtggctgtacccggccttggcctgggactggacattgcgcggcctggctgcctcgtggtcgggccgcctgtggccgcaacggttcgtccgtcggcaacccgccgaaccgttggggcttgg

SEQ ID NO: 91641 - DNA, 571 bp, Zea mays
  unsure (1)..(571): unsure at all n locations
gagaggtgatgggaggagnagngtgggtatcgggnctatctcatgantaaagatctttgatgccatgcctctaccggtccggaattcccgggtcgacccacgcgtccggccatggctctccgcaccctggcatcgaagaaggtcctatccttcccgttcggcggcgcgggccggccgttggcggcggcggcgtctgcgaggggggtgacgacggtcacactccccgacctctcctacgacttcggcgcgctggaaccggccatctcgggggagatcatgcgcttgcaccaccaaaagcaccacgccacctacgtcgccaactacaacaaggcgctggagcagcttgacactgccgtctccaagggcgacgcctncgctgtcgtccagctgcagggcgccatcaagttcaacggcggcggtcatgtgaaccattcaatcttctggaagaacctcaagcccattagcgaaagtggcggggagccgcctcatgggaaacttggctgggccatcgatgaagattttggttcgtttgaggcacttgttaagaaaatgaatgcagaaggcgctgctt

SEQ ID NO: 91642 - DNA, 577 bp, Zea mays
  unsure (1)..(577): unsure at all n locations
gagattatgaggatagtatnnatngaggagggcagganctttaatctcgattatagaatgtttaatgtaatgcctctaccggtccggaattcccgggtcgacccacgcgtccggcaaggtgttgttcaggatagaaatggtcgaactgttgctacactatttggaaaatgggatgaaagcatgcactatgtaatgggtgattgctttgggaaaggcatgggaactgaacagttttcagaggcccatttgttgtggaaaagaagcaaaccacctaattttcccactagatacaatctcactcgctttgcaattacactgaacgaacttacccctggattgaaggaaaaattgccaccaacagactcaagattacgaccagaccagagatgtctggagaacggtgaatatgaaagggcaaatgctgaaaagttgaggcttgaacaganacagcggcaggcacgaaagatgcaggatagcggatggaagcctcggtggtttgcaaaggataaagctactgacacataccgttacttcggtgggtactgggaatccagagaaaagagcagctgggaaggtt

SEQ ID NO: 91643 - DNA, 516 bp, Zea mays
  unsure (1)..(516): unsure at all n locations
agggcgtctgttataagaaaaganagtatgcatctctcggtccggaattcccgggtcgaccgcacgcgtncgctcttctgcggcgaaaaaacccccatcgtccatcagatcacttgttaaactttgttgaggggtgatggccgtttctttcgcagacctcaacaccgaggcagggcttaaaaagcttgatgagtaccttctcactcgcagctacatcactggctaccaagcttccaaggatgacttggctgtctacacttcgttttcgtctgctccctcgtccaagtatatcaacgtagcaaggtggtttaatcacattgatgcgctcgtgaggctgagcggaattactgcagagggccaaggtgtgaaggttgaatcctcagcagttccttcagccccaactccagatgttgctgaagcacaggccccagctgctgangaggaggacgatgatgatgttgacctttttggtgaggagaccgaagatgagaagaaggctgctgaagagcgtgctgc

SEQ ID NO: 91644 - DNA, 520 bp, Zea mays
  unsure (1)..(520): unsure at all n locations
aggggaggtggtctgtttaagagggagatggtaggctcgtccggtccggaattcccgggtcgacccacgcgtccgccatgacggagctcatacggaagccacacctgatgaagaagctgcaggaagaagtgcggcggaacgtgccggcggngcaggagatggtcaccgaggacaatctccccggcatgacctacctcaaggccgtcatcaaggagacgctccgcctgcacccgccggtgccgctcctcctcccgcactactccctggacgcctgcgaggtcgccggctacaccatcccggccaacacccgcgtcgtcgtcaacgcctgggcgctcggccgccacagcggctactgggagcgcgagaacgagttcgtcccggagaggttcctcagcggggacgtcgccggcggcgtcgacctcaagcccaacgagttccagttcctggcgttcgggtccgggcggaggatgtgccccggggtccactcggcgtccgcgaccatcgaggcgatgctctccaa

SEQ ID NO: 91645 - DNA, 519 bp, Zea mays
  unsure (1)..(519): unsure at all n locations
gtgaggtggtctgttaaggagaggagatgttatgctctaccggtccggaattcccgggtcgacccacgcgtccgcttggctcctgaatacgcgatccgaggccaagtgacgaagaagtccgatatctatagctatggggttcttcttttagagattgtaagtgggagatgcaacaccaacacgagattacctagcgaggaccagttcctccttgagaggacatgggcactctacgagcaaggacgtctagaggacatcgtggacatggacatcggcggcgaccgggacgtcgaggaggcgtgccggttcctgaagatcggcctgctgtgcacgcaagacgcgatggcgcgccgtcccaacatgaccaacgtcgtccggatgctctcgggggaaaagaagatcagcgtagagaagatcactaagcccgccatgatctccgatttcgcggagctcaaggtcagtaacaaggagcgaaggccgggcgaggcacggtcgcccacgacggctcccaccacgatn

SEQ ID NO: 91646 - DNA, 570 bp, Zea mays
  unsure (1)..(570): unsure at all n locations
agatgagaggagaggatntttgaggtgataggggtcgagtaaagcataagattgtactagtctaccgctccggaattcccgggtcgacccacgcgtccgccagtgcgtgcctggcaagtggcaaactcgagctgtctagtcctcggttcgcgaatcttccacagagaggcagacggcaggactcgcttcaagctcctcatctcgcgcagggggggtcgcctgagatcacagagacaatggtgaaggcagttgctgtcctcgccggcactgatgtcaagggcaccatcttcttttcacaggaaggggatggtccgaccaccgtgactggaagtatctctggcctcaagccaggcctccatgggttccatgtgcacgcgcttggcgacaccaccaacggctgcatgtcgactgggccacacttcaatcctgttggcagggagcatggtgcaccgaaagatgaggaccgccatcccggtgatcttggggaatgtgacaccggaggagaatggggtggttaaggtcaatattactgacagccaaatacctttggctggacccgactcgatcatg

SEQ ID NO: 91647 - DNA, 568 bp, Zea mays
  unsure (1)..(568): unsure at all n locations
agatttgaggagtggantagngagggggacgggttcaagtaagaaaaggggagtatatgcatcgctctaccggtccggaattcccgggtcgacccacgcgtccggggacgaatggcgagctctcagtgctgcgataacccgccggccctgaacccggcctgcggggagggcaaggtcgtcgacagcttcggcgggttcaaggcctacgtcgccggccccgaggactccaaggccgccgtcgtcctcgtcgccgacgtcttcggattcgaagcgccgattatgaggaagatagccgacaaggttgcttcgtcagggtactttgttgtggtaccagatttgtttcatggggatccttatgcacctgagaatgttgagaagccctttcctgtgtggataaagtcacatactccggaaaaagggtttgaagagacaaaacaagttattggggctctaaaggagaagggagtgtctgctgttggaactgcagggtattgctggggtgcaaaggttgttgtggagttggcaaaagctcatgagatccaggcttctgggctgttgcacccttctt

SEQ ID NO: 91648 - DNA, 517 bp, Zea mays
aggtgagtctgtctaagaggggcgatgttatgctctctcggtccggaattcccgggtcgacccacgcgtccgcgtccctgcacacggcggttttcagactgcgatccattccgagcttcgaggaatcgatggtgaagcttcggtgactaagagatcaaactcttcaagttctacgaggctgaagatcctgagcatctgtttggtgaagattcttatgccatggaaattcatcgattgatacgtccttttcatagtcgatcatggttcaaggagattgcatttgtggatgctctaatggagtcgaaaggtggtaagaagtctagtagtagtagtagtaatttcatgtacgaagctccccttggctacaagatcgaggacgttcgcccagccggaggaatcaagaagttccagactgctgcttattccaactgcgtccgccagccatcctgatatcgcctcacatgcaattcgcggtagagtaggattttaattcagttttcctcttgtgtcggtagtt

SEQ ID NO: 91649 - DNA, 581 bp, Zea mays
  unsure (1)..(581): unsure at all n locations
gatgattatgaggagagtgaattatnnnaagagagtcagtggttctgaagtttagttgtntgantgcatctctgcaccgcccggaattcccgggtcgacccacgcgtccggcgtcgacaagggcgccaccgatgacgacctcaagaaggcctaccgcaagctcgccatgaaatggcaccccgacaagaaccccaacaacaagaaggaggccgagaacaagttcaagcagatctcggaggcgtacgaggtgctgagcgacccgcagaagcgcgcggtgtacgaccagtacggcgaagagggtctcaaggggcaagtgccgccgtcgggcgccggcggagcgggccccggcggcgcaacctttttctccaccggcggcgacaggcccgaggtgttcccggtcaacccgggcaaagcggaagacatcttccccgaattctttggtggctccaggcccttcggcggtaatggccgcggtggccttggccggaacggcatgggggggtgggatgccccggaatgccggagcggcgggacgagggtcttcctggtcaatcttcggggaccatatattcggctctgcg

SEQ ID NO: 91650 - DNA, 582 bp, Zea mays
  unsure (1)..(582): unsure at all n locations
gagatgtatgatgagagtattnagngaggaggagagggttcnnanctatcaaagtataggagagataattgcatgnctctaccggtccggaattcccgggtcgacccacgcgtccgaaaatgactcaaacgagaagagtgtacttgaggaacgtgctatggagctagagcaagttcgtaggcagttagaggattcaagagctgaggctagggagctacaaactacaattaagaacctgaatcaagttcttgaagagaaagcagaacttgagaatcgtatgaaggatgcggagcaggcaaccagcgacctaaactccctggtcggttccctcgacggcaagctgaaagccacagaggcgcagctcgaacagcttaacgcggagaaagcagaagcgatcctcgaaagcgagaaacaggtatccgagctgaaccaagccatcgcccgtctcaagacgcggctggagctgctgtcttcggaaaaggccgcagtcaagaccaaggagtccgctctgctgaccaacgtcgccgtccgcgacgagaagctgaaggagacggaccgcaatctgaaccagctgaacctgaa

SEQ ID NO: 91651 - DNA, 518 bp, Zea mays
  unsure (1)..(518): unsure at all n locations
agggcctgtgtctaagaacgacgntgtattgtcagtaccggtccggaattcccgggtcgacccacgcgtccgctgaccccggggaggttattaaaccaggtcaacacaaggccattaacgatgaaggtatgcctgancatggccgtcctttcatgaagggccgtctgtttgttgaattcaacgtcgagtttcccgagcctggtgcgctctcccctgcccagtgccgatcgttggagaagatccttccgccgaaaccagggagccaactgtcggacatggagctggaccagtgcgaggagaccacccttcacgatgtcaacattgaagaggagatgaggcgcaggcagcagcagaagaagcaggaagcctacgatgaagacgaggaggaggatgctcaaccaagggtgcaatgtgcccagcagtaaaatccgtgttcgttggaactgttctccaaaagtttcagcaggattttttatccatctgatcatctcgattcttttttgcaaaaatataatcgt

SEQ ID NO: 91652 - DNA, 570 bp, Zea mays
  unsure (1)..(570): unsure at all n locations
atatgataggagttattngtgtgagggtggatctgagataagaataaagactatattgcaccgctccggaattcccgggtcgacccacgcgtccgtcgaaaacggcctggttgcacacaaaaatggccaactaattggaacccaaagtttgaaatcatggatcggagaagacaagctgaaggaatttattaacttcactcttcattatattgctgacttggatatcccaattaaaaggggtacattcatagagttccgaagtggaatgattaatgtatctcctataggaagaaactgtatccaagaagaacgtgatgaatttgagaagtacgataaggtgcataacatccgaccttaaatgggtgtcagcgcttcgtaaaaagtttgcacacatgaacttgacattttcttatcggagggcacaattagttttgaagtatttccccaagggttggaccaaacttattggtttgaaatattctgggaaatttaaggaaattccatttgtttgggataagaccctccagggtggcaatgactattgaaaatttggattttaaagaaccattg

SEQ ID NO: 91653 - DNA, 586 bp, Zea mays
  unsure (1)..(586): unsure at all n locations
tagagaatgatgagaggatgnnatnnagtgggagctggtgtgacgtatagaagatggggagattattgcactgcctctaccggtccggaattcccgggtcgacccacgcgtccgcgctgccagcaccaaggcggcctcttcggctgctcccgccgttacgacgacgaagccggctgcgtccgtgctgccagctgcccggccgcgggaccccaacaagcgggagttccgttcctacggcagcgcggcggctctgttcgttcagatgggcgcgtaccggggcggcccgcgtacgttcgccgtcattgggttggcctccaagccagcacacgtctatgacaccctctacttcaagtgcgagtgtgtgcccgaaccaggagccatcggcgcccggccccgcctgggcccgtccgaacaaaggcctacaagatgcctccggaatggggctacggccggaatctacaaccgtggacggcgtaaactggccattcccaaccacccccaccgccacaaaccggtgccggaaagccatttaatccaaccatcctacttcaaccggcttccgccgtaccaggcgcttatggcgctt

SEQ ID NO: 91654 - DNA, 568 bp, Zea mays
  unsure (1)..(568): unsure at all n locations
aagatgaagatggagatggtgnnagtgagtagatgagggctttagtcatgattacagactgtctatgcacgactaccggtccggaattcccggtcgaccacgcgtccgtgcatttaaggactacttcaagaggttgttcaacttcaagaaggatagggatggctattggaagtggtttgctggcaacctggcctctggtggtgctgctggtgcttcctctatgatttttgtgtactccctggactacgcgagaacaaggttggctaatgacgcgaaggctgccaagggaggaggtgaaaggcagttcaatgggcttgtcgatgtctaccgcaagacactcaagtctgatggtattgctgggctttaccgtggatttaacatctcctgtgttggaatcattgtttatcgtggtctgtactttgggctctatgattccatcaagccagttgtccttactggcaacctccaggacaatttctttgccaggttcgctctgggttggctgatcactaatggtgctggtcctgcatcttaccccatcgattcccgttcgcagaaggatgatgat

SEQ ID NO: 91655 - DNA, 588 bp, Zea mays
  unsure (1)..(588): unsure at all n locations
gatgattataatgagagtgtgnnatngagagggaggtntgttcagaactatatgaantactgaatgcttgatcgcacagnctctnccggnccggaattcccgggtcgacccacgcgtccgcttcagcccattcatccagcaacagtatcatgacaaatatggtgataaagagatgattcctgttgctgcaaatgatgttgctttttcactgcatgctgtagcattgacagcctttaccgtttttcaagtattcatatatgagcgaggaacacagaaagtctccaaagtttgcatatcaatttctgctattgtctggatcgccgctcttgtttgcctcattattgcttggccaaaaagtgactggcttttggcttattgatgaattcaattcaatacaagttggcatgacagcaatcaagtacttccttcaggccatcatgaacttcaggcggaagagcacaattggttggagcgttggcaatatattacttgatctcacaggaggggtgctgaatttttgccaaatggttgtgcagtctatagatcaacatacttttggtgattttctatggaaacattgggaaaacc

SEQ ID NO: 91656 - DNA, 451 bp, Zea mays
  unsure (1)..(451): unsure at all n locations
tgaagtgcttgttaaagataatgtatgattccgtccgattncggtcgaccagcgtcgccagtcgtcgtccactgacagtcgacacctatagcacctgctcgacagaggtanaggcggaggtgtctgctctcttggggtggacctacctgcacacggatgcgctgggcagcgcagtcatgatctacaactactgaccgaccccaagcgctaccagcaggcctcccgccgagtgctccatgcagagcgcccggttatcctcgccgtccaacaatggncgcgcgcgcgtgtgtgtgcatgggccgctctactgtaccgtcgacgatcgggtcgatcaccggacaaggcaagacaaggcatcgaaacatggtagataaataaggacttgcgatttgaacgcatagctggtgcgtgcgtggtgtggtggaagaaattcttctgctgcctgtgttcn

SEQ ID NO: 91657 - DNA, 524 bp, Zea mays
  unsure (1)..(524): unsure at all n locations
aggtaaatgtgcgtctgtctatagacgngtatttgatngctctaccggtccggaattcccgggtcgacccacgcgtccgatgatcctgagaaaatgctttcacgtggaacagaaattactctttatttgagagatgaggacggatatgagtttgctgaccctaccaggattcaaggcttagttaagaactactcgcagtttgtctcattccccatatatacatggcaggaaaaatcaagaacagttgaggttgaagaggaggaagaatcaaaaggtgaagaagctactgaagaatcaaaaagtgaagaggctactgagggtgaaaagcagaaaaagaagaaaaccataactgagaagtactgggactgggaattggctaatgaaacgaagcccatatggatgaggaatccaaaagaagttgagaanactgagtacaatgaattctacaagaagacatttaatgagtttctggattcggttgcttacactcactttaccactgagggannaggggnnattcggaa

SEQ ID NO: 91658 - DNA, 578 bp, Zea mays
  unsure (1)..(578): unsure at all n locations
gagatgagaggagaggagtatggggggggtgagtangaagtcagtncactacgncntactgaccgcccggaattcccgggtcgacccacgcgtccggtcacacacacacacacagacaagtggtttccaaagccaagtgtgtgtactagcaaccagctagctcgggcggcagcaggcaggcatcatgtcggaggagaagcaccaccacttcttcaaccaccacaagaaggactatgagcagcccgccggcgagtacgggtactccgagaccgaggtggtcaccggcaccggcgagggcgagtacgagaggtacaagaaggaggagaaggagcacaagcacaagcagcacctgggcgagggtcgtggccatcgggctgcggcgcctttgaactctacgagaaagcaccgaggcgaagataggcccccgagcacgcgccccaggacaaggatcaccgaagaaggtcgttgccgcgctggccgtggggcccgcgggttccgaattcaagaagcccagcgagaagaaaaaggaccccagggacccccaggaggccaccggcgaaaagaaccaccaccacctt

SEQ ID NO: 91659 - DNA, 572 bp, Zea mays
  unsure (1)..(572): unsure at all n locations
gagagtatgaggagtgatgnatnagggggttagtgtgtctatgtttagtttangantgctactgcaaccggcccggaattcccgggtcgacccacgcgtccggtcatccacactaacgaacgaactcttgctccgatcacgagctagctgaggtcgacgatggcggctgtgctgaacagcatgaagacgccgcatgcggtggtggccgtgctggtggcggcggcgctgctggcttcgtccgcttcggcggcgatcacctgcgggcaggtggggtcgtcgctggcgccgtgcattccgtaccccaaggggagggcccgcgcgcttcccagggtgtgcctgaacggggtcaagagccttaacagcgccgggccgaccagtgcggacccgcaggcggggtgccggtggcttaagagccttgacaacagcgttaagaaccttaacatgggcaccggcggcacccttcccgggcagtgcggcgttttcctccgatttcccatcaggatgtccaccgacctggacaggatcagctaaggtacgaccgaccaacttattagccctcccgaacgtacacc

SEQ ID NO: 91660 - DNA, 563 bp, Zea mays
agagtagaggagggagtatgggaggaatggggcttgagtatgagtaagaatctcatcgcatgccctaccggtccggaattcccgggtcgacccacgcgtccgacgcggagccggaggacgccgccgccgacctccccctcccggccctcttcgatagggcgtcgcggctccacgccctggcctccagctccgccctcgaccaggatgggatccgcacgggggttgacctgctgcggcgctgcgacgacatggtcagcaagctcggcctcttctcccccaacgagaccaaggaggacgtctccacagcaaacctcaagtacctactgggcccatattaccttgcagaaatgaccgaagagatagcacaggaggatcggatcccggttcttaagacgtcacaggaccatctgaaggagttcattgctctatgggaagtactagagcttatgccagaggatgagctagaattgtctaagcagaagcaggcagatactatgacgagcagaagagcgcagaaggtgcccggttcaaacgtccaagggctgcagaaacgaagctgcaga

SEQ ID NO: 91661 - DNA, 574 bp, Zea mays
  unsure (1)..(574): unsure at all n locations
gagtgagagttgagagtntagagaggcgancattntactactgaatactgactctctccgcacgacttaccggtccggaattcccgggtcgacccacgcgtccgcggacgcgtgggcggacgcgtgggcttgagaatatgtcttgaaggtggatatcatgtcttggatgagtcaacacattacagtagtgatttaaggccaactgcaaagcccctgtggaaacctatcattggcattcttgaactgggtatattgacagcacagggcctgttgccaatgaagaccaaggatgggcgtggcacaactgatgcatattgtgttgcaaagtacggacaaaaatgggtgcgtaccagaactataatcgacagtttcactcccaaatggaatgaacagtacacctgggaggggtatgatccatgcactgtggtcacaattggtgtattcgacaattgccacctgaatggcggtgaaaagggccatggttccagggacacccgaatttgggaagtgctgattccgccttttgacactcgaaactgaccgggggataccccactaataccctcttattgtt

SEQ ID NO: 91662 - DNA, 528 bp, Zea mays
  unsure (1)..(528): unsure at all n locations
nagtaggccgtggacttgcttctgccatatcccgacaggtatctcatggattgcaactccctggtcgacccacgcgtccgcggacgcgtgggcgaagggacgaccgagcggagtctagactcgagagcaacctcgacctcccggatctctggcgcacccacgcctggtcgccgccgtcgtctgctgcagcgatggcctcccccgacctgctcttcaatctgcggaacctcttctacctgggcgcctaccaggcagccatcaacaacagcgacgtcccgggcctcgacgccgacgccgccgctgaacgcgacgccatcgtcttccgctcctacatcgccctcggctcctaccagctggtgatcagcgagatcgactcgtcagccgctacctcgctgcaagccgtgaagctgctcgcgctgtacctcactggagacaaggcactatctncagtctcaaagaatggttgaatgattcagcaatttgaagcaatcctggtctgcgattgattgctgggattatatttatccg

SEQ ID NO: 91663 - DNA, 538 bp, Zea mays
  unsure (1)..(538): unsure at all n locations
naggagtcncgtttaggttctggtttcgtttatcagacacccatccgacggacttaccgtcccggatcgacccacgcgtgcgcttctctaggcgactaggcacaattgccctctggcaaaatgccatcagtttatctttacatccgtaacattgtccggtattttaggatcatcataaatttcattgcatttgcggtttgctattccaacaaggctctctttgctatcctgtacttcatcagctttgtccttgatggtgtggatggttggtttgcaaggaagttcaatcaagcatcaacctttggagctgtgttagacatggttacagatagggttagcactgcttgtttgttggcccttctctcccagttttacagacctggtttagtcttcttgatattgcttgaattggatattacgagcccctggtttcaaaagtacagttcttcttgtcaggttagactagccccaagggtttaaaaacacacaggccatttgccttttgaaattatattaattggtacaagcccttcattgn

SEQ ID NO: 91664 - DNA, 534 bp, Zea mays
  unsure (1)..(534): unsure at all n locations
nagtaggctctttaggtctgctcacgatctaccgccacgtantgtatagactctaccggtccggaattcccgggtcgacccacgcgtccgcagtaagccatcgctcacacagtcagaccgacgcactcactaacacacacacacagacggacaggcaacttctccatacacgccgtagccatggcttccgctgcgcagaagaagatggcaattgtttgcttgatgctgctggccgtcgtcggccaaatcgtcgctgatgctgatgttaccgtagaacatcccagccgcatctgcaccgaaacggtgattgatcctcgtgttcccaacaacgagtgcatctgctccaagaactgcgcctgtgccggtaagtgcatccttgagtcggctgatgctgtccagacctgctttgtcgactgcgtcctcaagaacgactgcatctgcagcagcaagatcatccccggcgctgacgacccaaggctaatgccaagtaagtaatactgctatcatcccgaatatggcgtacgtatagtacct

SEQ ID NO: 91665 - DNA, 522 bp, Zea mays
  unsure (1)..(522): unsure at all n locations
tagtagccataagtcttatttcgtttatccgctagcatcgcagantcgaactacttggtcgagccacgcgtccgcccacgcgtccggtcggtggccttcctccatttgccaactaacagacagtggcaatttactttgatcaagtggtggcttctattgggggaaacactgctggtccaggtgatgctgttctcaatgtatacataaatcatgacaagaaatttgcttttgtggagatgagatctgtttaggaaacaagcaatgcaatggccctggatggcattatgttcgaaggttcaccggtgaaagttagaaagccaacagactacaaccctttccttgcagccgccctgggcccaagccagccaagccccaatctgaatcttgctgcaattggcctaacatcaagatctaatggaggactagaaggtccagaccgtatttttgtgggtggccttccttattactttactaaatcccaagttccgaagttgcttgaatcattctggcctttttcaaggt

SEQ ID NO: 91666 - DNA, 528 bp, Zea mays
  unsure (1)..(528): unsure at all n locations
tagtgaggccgtgagtcntatctcagctctacacgcaagtatagtactgctcaccggtccggaattcccgggtcgacccacgcgtccggagctcttgtcaaggagcggagtcactgttaaaggtaagcgggcagttgtggttggtcgcagcgacatcgtcgggctacctgtatccctgctccttctgaaggcagatgcgaccgtatctgttgtgcactcgcggacccctgatcctgaaagcattgtacgcgaagctgacatagtcatcgcggcagctgggcaggctatgatggtatgtatgcagctatgccgacagatcctcacagtaaggtgcagcatcctgcaacccgttcaacgctgctcactgagtccgtcgatgtgctcttttcttgctcgtcagatcaaaggtgactggatcaagccaggtgctgcggtcatcgatgtcgggacgaactccgtcgacgaccctaacccggagtncgggtaccggctcggtcgcgatgtggatttcggatcggcgaacaaggt

SEQ ID NO: 91667 - DNA, 529 bp, Zea mays
  unsure (1)..(529): unsure at all n locations
nagtaggccttagagtcttattcagcctacccgccaagtacagtatgacctcacaccacctgacgacccagctcgtacccacacatgcacccagagcacgcgcacaggcactacatcacttaggaggtcactgccgccactagggtgcccggcgacagctacctattccacgagcaccacaagaagaagaaggaccacacggacaccgaggaggccagcggctagaagaagcaccaccacctcttcggctgaccgtagtaccatccggcgctttaccgagctaactagctccggcgcacacatttacacacactgtaaattctgtactgcatgcgtgtgtaatttgatggatcacaataatgagtccatctccggaccttggtagctgcatgcttgtgacgagtgagagtgtgagacttaagtagaagacgtgctgggccaaggactacgtctagagaagccccttcctgtaatcctgtactcaattccaattctatgcatgcctctacaattgagtccaattataaat

SEQ ID NO: 91668 - DNA, 541 bp, Zea mays
  unsure (1)..(541): unsure at all n locations
aggagtcncntttaagtctgctgcagtnctacacgccacctancgtatagaccntaccggtccggaattcccgggtcgacccacgcgtccgctcccgcgcacctccctccgatcccccaaatcccgaattgaccaacccaaagccggggcccctgatggagtggacggccccgaagcgcgccgcctcgccgccctcgcctccgctcctctgggactggggaggagaccacgccggcgccacgggctcgggctcgggctcctccggcgacgccccggcgcggcgcggctggagggagcgggaggcgaagcgcgccagggccgacgacggcgaggtgaggtgccaggtggaggggtgcgggctggacctcagcagggtcaaggagtaccaccggaagcaccgcgtctgcgaggcccacaccaagtcctcccgcgtcgtcgtcgccggtcaggagcggcgcttctgccagcagtgcagccgatttcatgccctgtcagagtttgatcagaagaagaggagctgcaggaggcgtctgtctgatan

SEQ ID NO: 91669 - DNA, 530 bp, Zea mays
  unsure (1)..(530): unsure at all n locations
nagtgaggncttagagtgtgtgttcgggtctaccgacacgcatcgcatgaacaccactncctggtcgacccacgcgtccggaagaaggaccccgagcacgcgcacaggcactagatcactgaggaggtcgctgccgcggcggcggtctgcgcgggcggctacgtattccacgagcaccacgagaagaagaaggaccacaaggacgccgaggaggccagcggcgagaagaagcaccaccacctcttcggctgaccgtagtaccggccggcgcgcgaccgagctagctagcttcggcgcacacaaccacacacctgtttaattctgtactgcatgcgtgtgtaatttgatggttcacaataatgagtccctctccggaccttggtagctgcttgcttgtggtgagtgagagtgtgagactggaggaaaaaaagtggtgggcgtggggctacgtccaaagaagcgtgttcctgtaatcctggactcgctttgatttctctgcatgcgtctataattgggttcaataataagtg

SEQ ID NO: 91670 - DNA, 530 bp, Zea mays
agtatgccttgaagttgttcagcatatcagctagcacctcatggacttgaattcccggatcgacccacgcgtccgccttgacagtcaaggacaatttactggtagctggtgggtttcaaggagagctgatctgtaaacgccttgatgaggaaggtattagtttttgctgtcgaacaacttatgatgataatgctattacaaatgcggttgaaatatttaatacctctagtggcgccgttcacttcatggcatcaaataacgactctggtgtgagatactatgacatggagagattccagctattcaagcattttcagtttgaatggccagtgaatcatgcttagttgagtcctgacagaaaggtggttgatattgtgggtgatgatcctgatggtctacttaatgatgcacacttcggaaagaacagtcattccataaaaagacatcgggaatacttatttgcattggcttggaacccttgattggcaacatttggtatccggaaaccaaaacagacattgcctattttg

SEQ ID NO: 91671 - DNA, 529 bp, Zea mays
  unsure (1)..(529): unsure at all n locations
nagtgagccgtaagtctgctaacgcatacacggcataatatagtaactgctgcaccggtccggaattcccgggtcgacccacgcgtccgccaacacacacagcaacgctcgctcgacactgtcactagctagttgctctactagagggcggggatagagctgcctgcaatccgccgctgagaagggaggatcggaagcgacgatgaggtcgtttgctcctgtctttctgtcggcggtcgtggcctggctggagctggcgggcaccgcgcagggcggcaacttctaccaggacacagagatgacctggggcgatggccgctgcaaggtagtggacggcgggcgcgggctggacctgacgctggaccgcacgtncggctcccggttccagtccaagagcgagtacctgttcggcaagatcgacatgcagatcaagctggtgccaggcaactncgtggcacggtcaccaccttttacctgtcngtccagggcaacgcgcacaaccagaccactttcaatttctgggcaacgg

SEQ ID NO: 91672 - DNA, 529 bp, Zea mays
  unsure (1)..(529): unsure at all n locations
gaggaggccgtagttttgagtttcttntagccgatcccatctacggcctgaattcccgggcagcgtagctagcatacagacgagataatctcttcttcacctcactaacaccagctagcaactctttctctcctgcaataatgaccgctggctcctcctcctcccagccgcagctggtcgcggcggcggcggtcctggcagcggcgctgctgctgctggcggcgggggccgggacggcgtctgcggcggtgagctgcggcgaggtgacgtcgtctgtggcgccgtgcctcgggtacgcgatgggcagcgcggcgtcgccctccgtggcgtgctgcagcggggtgcgctcgctcaacagccgcgcgtcgtctgcggcggaccggcaggccacctgcaactgccttaagagcatgacgggccggcttggcggctgcgtcagcatgggcaacgccgtcaacatcccccgcaagtgccgcgtcttcgtcggcgtgcccatcaaacccaaccgtcgactggaccaagaacaacn

SEQ ID NO: 91673 - DNA, 529 bp, Zea mays
gaggaggccgtaggtgtgattctgcatcaccgcctactatagtaagacctaccggtccggaattcccgggcacggacgcgcgcttcaaccgcgtgttcaacgagggcatgaagaaccactcggtgatcatcaccaagaagcggctggacgtctacacgggcttcgagggcgtgtcgacgctggtggacgtgggcggcggcgtgggcgccacgctgcacgccatcacgtgccgccacccgcacatctccggggtcaacttcgacctgccgcacgtcatctccgaggcgccgccgttccccggcgtgcgccacgtgggcggggacatgttcgcgttcgtgcccgtcggcgacgccatcctcatgaagtggatcctccacgactggagcgacgcgcactgcgccacgctgctcaagaactgctacgacgcgctgccggaaaatggcaaggtcatcgtcgtcgagtgcgtgctgccggtcaacacggaggccacccccaaggcgcaaggcgtcttccacgtcgacatgatcat

SEQ ID NO: 91674 - DNA, 546 bp, Zea mays
  unsure (1)..(546): unsure at all n locations
tagaggtcccntttaaggttgtgaccgacntaccagccaagtanagtatagctgcaccggtccggaattcccgggtcgacccacgcgtccggtggacgacacgcccatccgggtgtacgagaacgccacgctgcaccaaggccacggccacggcgaccaccggcacggcggcgcggcggcggaggccaacggcaccaacaccaccaccaccacgctggctgctgccccggcgccgttccccgggccgcagccgatggccgtgtacagctccatctggaacgcggacgactgggcgacgcagggcgggcgcgtgaagacggactggtcgcacgcgccgttcgaggccacgttccgggaggtgcgcgtggacgggtgcgcctgggcgggcaacgccacggacggcgacgccgcggaggcgcgccggtgcagcgagtcctcgtggtgcaaggagggccgctactggtggaaggagaaggagatgtcggagctgagcgtgcaccagagccaccagctcgtgtgggcgcgcgcgcaccaactcgtctacga

SEQ ID NO: 91675 - DNA, 527 bp, Zea mays
  unsure (1)..(527): unsure at all n locations
agggttttgcgtaagctggattccagtntatccgactatcatcncaggaccggaattcccgggtcgagccacgcgtccgatagctggaagtgaatttatggagagcgttttcttccatgttaaatcatggttaccggcaagagctattggggtagagtgtttggtatcaaaaggaaacattgatccaagtggagaaatcatggttttggatagattctgcccgtggaaacttcatttatttgagcttgaagaggagctgaagactgatcctctgaccaagtatgtgctgtatcaggatgagaggatcaagagttgtcgagtccaagcagtcgcagttgctcctgacaggttcgagagcctaaaggctcttgcagataagtcgaggggcatgatatacgacgaacttttagcataaaccgtcattcatcgtcttagttttgtccacattagttgcttcattgtttgcaacaaaaactactatgtaacacttgaaatggctaaatcttttctgaattattattcaccag

SEQ ID NO: 91676 - DNA, 549 bp, Zea mays
  unsure (1)..(549): unsure at all n locations
taggtagactcttagaagtgtganttcagtntatccgactatcatcgnatggactggaattcccgggtcgacccacgcgtccgctatgaagcaccgtgtatctatcatcacttttgcaaccaccacaagaaggacgaggagcagccggccggctagtacgggtactccgagaccgaggtggtcaccgccaccggcgagggcgagtacgagaggtacaagaaggaggagaaggagcacaagcacaagcagcacctcggcgaggccggcgccatcgccgacggcgccttcgcactctacgagaagcacgaggcgaagaaggaccccgagcacgcgcacaggcacaagatcacggaagaggtcgctgccgcagcggccgtcggcgccggcggctacgtattccacgagcaccacgagaagaagaaggaccacaaggacgccgaggaggccaagcggcgagaagaagcaccaccacctcttcggctgaccgtattaccggccggcgcgcgaaccagctagttagcttccgggcacacaaccacacaccttgtt

SEQ ID NO: 91677 - DNA, 546 bp, Zea mays
  unsure (1)..(546): unsure at all n locations
agtagccgttggagtctgcttccgtntatccgctancatcgcaggaccggaattcccgggtcgacccacgcgtccgcaacatgcaccacgtacccgttcacggcgatcttcctcatcttctacaccacggtgccggcgctggcgttctgtacggggcacttcatcgtgcagcggcccaccaccatgttctacgtgtacctggccatcgtgctgggcacgctgctgatcctggccgtcctggaggtgaagtgggcgggcgtgaccgtgttcgagtggttccggaacgggcagttctggatgacggccagctgctccgcgtacctggccgccgtgtgccaagtgctggtgaaggtggtggtccggcgggaaatttcgttcaagctgacgtcgaatcaagcccgcgggggaccaagaagaatgacccctaagccgacactgtacgtggtgcccttgaacctggctcatggtgaaccccattaatattattccttggcaacattattcgcttcgccctggccttttccaaaggtcttgaccggcaattgn

SEQ ID NO: 91678 - DNA, 554 bp, Zea mays
  unsure (1)..(554): unsure at all n locations
naggtagcccttnnaagatgtgattcacgcattatcccgccaatatatcagtacgtgctgcaccggtccggaattcccgggtcgacccacgcgtccgagtccatctcctgctgagagatgtttgttttacccttctttgcttcctccacctgacacccaagtaagcaactgcagtgacgttggtttcggctgcacccaaactacatgactgaagaaacttgtggcctgtgtaacgcgaatccatcagaacgccaaagttatggcttctggttgtggcaaattatggttcctccctgttcggttgagtggttgcattctggaggtatcttgttctggactcaggctaatgattgtgcgtgcgactgtttcagagtcatttcaaaggttatccactttcgttggagttgatttcataactaaaaaaaaaaatttaataatataaatcataaaaaaaaagggcggccggtctaaaggatccaagcttacgtacgcgtgcatgcgacgtcttagcttttttataggggcacctaaattaaattaactggccgccgatt

SEQ ID NO: 91679 - DNA, 555 bp, Zea mays
  unsure (1)..(555): unsure at all n locations
gagtagccncttttnagagttgattcacgccatacacgcctatntattgtatngcttcactcggtccggaattcccgggtcgacccacgcgtccggtgaaagaaggacgaggatcagcaagaggcttaagaagcttcaagacctcgtgccgaacatgtgcaagcatacgaatacgtcggacatgttggaccttgctgtggattacatcaaagagctcaaggaccaagtcgagaagcttaaacacgaccaagcaaactgctgttgcctaggcaacaagagctgctgctgatgcttgagaggcagactgaagaaggtttttatgccgtaacaatgtgactgttaaaccagagctgttgctttaggagaccatgccgtgggcagatatgcgtgacatgtgtagcggctttcatgactcagctttcctctttcttgggtagttcacggactttctaaaggtgtgccaactgccttaatacctaggtaaaacctggttggacaattttggaatttagttactttaaatttgatactttggatttctgttaaataaatttt

SEQ ID NO: 91680 - DNA, 536 bp, Zea mays
  unsure (1)..(536): unsure at all n locations
nagtaggnccntgagatctaatgtcggtctaccgcctattatctcatngacgtaccggtcttgaattcccgggtcgacccacgcgtccggagagaagtcagctgaccctgatatccagttaatatgtgatgattccaacatattgagagtggagtgctcttatcaagggcccttctgaaacaccttatgaaggtggtgtgtttcaacttgcgttcgcaattccagagcagtatcctctactgcctcctcaagttcgatttttaaccaaaattttccacccaaatgtgcatttcaagacaggtgaaatttgtcttgatatattgaagaatgcatggagccctgcatggacccttcagtctgtttgtagagcgataattgctctgatggcccatcctgaaccagacagcccacttaactgtgattcaggcaatctcctgcggtcgggtgacatcagaggctatcaatcaatggcccgcatgtatacaangctggcttgcatgccaaagaaaggttagatgtagaacctgtgcccaggc

SEQ ID NO: 91681 - DNA, 552 bp, Zea mays
  unsure (1)..(552): unsure at all n locations
gtagttgccgtagggtcngaatccgatacttctcagctcttantgcacgaccaaccggtccgtctatccaggcttacgggaatgcttgtttggagtatattaaatacattgttttcccttggtttggaagatttgaggtcagccgtaaggggagcaatggtggtaacaagacatttacatgcatgaatgaactaatttctgattacgagactggtgctttgcatcctgccgatgtcaaacctgcactggcaaaagcaataaatgaaattttgcagcctgttcgtgatcatttcaacaacaacaacgaagccaaagttcttcttaacactgtcaagaagtacagagtaaccaattgaggagtggaagctgtccatctttagggcatgtttacattagggtggatatcgccgtttgaaattcttgtatgctattctgttactagttgcataggtagctcaaaagtttcatgtttctagatatataaaaagaatactttacttgttgactacttgatgtgcatcataaggctcaacctaaacagtgttgcactgg

SEQ ID NO: 91682 - DNA, 561 bp, Zea mays
  unsure (1)..(561): unsure at all n locations
agtaggtgctcgtagagtanctagccagctactcaccgatactcatagtannntccntancggncttgaattcccgggtcgacccacgcgtccgatctcttccaaatcccaccagcaaatccccaattcctccgagttcgagcgaccatgtcggngcggggcaagggcgggaagggtctgggcaaaggcggcgccaagcgtcaccgcaaggttctccgcgacaacatccagggcatcacgaagccggcgatccggaggctggcgaggaggggcggcgtgaagcgcatctcggggctcatctacgaggagacccgcggcgtgctcaagatcttcctcgagaacgtcatccgcgacgccgtcacctacacggagcacgcccgccgcaagaccgtcaccgtcatggacgtcgtctacgccctcaaagcgccaggtcgcaccctctacggattcggcggctgaaaggcgctaccgccgctggtggccgtggcaaaaggtctgggtcgcggtcaagaaatcgagaggtatctggatgacgtgcttaagttcgtaaggatattatca

SEQ ID NO: 91683 - DNA, 551 bp, Zea mays
  unsure (1)..(551): unsure at all n locations
agagggccgtaaggttttgtcattnctccagtnggcttagtagtntctaattnccgttctccgaccgagtttattgtcagattcatcactctcaagatgacaatatcattgctgcacaagaaattccataggtttcttgtggaaatggtccacctcaatatgactctaatgtaccttcatgcttctagcctgctcgtagttcaactcatatgccattttgtcaaactgaagaagcccataaagagatctgcgctgctacaattattcatacagcatttatagctttcctggcaaggagagcccgccgagctttaaaagggttggttaggcttcaagcccttgtaagaggtcatatagtaagaaagcgagcagctactacactccgttgtatgcaagcttttgtcacggttcatgcccgtgttatagcaaagcgaattcacatggctttggaaaaccagactgatcggcaaaatacttcaccagagcacacgatcgatgcacgtgtcagaaaaatcgangatggctggtgtgataatatcggttctgtggan

SEQ ID NO: 91684 - DNA, 554 bp, Zea mays
gaaggttatcttagagtggctgttcagctcctgtcacctcactcagtagtctcgaattcccgggtcgacccgcgcgtacgcgcacgcgtccgctacgatccaacagttctatagcaagagagaggaagacacaccgcagagtgagcaggctaagaacttgcaggagcagcatgaatggcggcgactcgtcgcctatcttgctttctcctcgccgtgcttctggcaggagtggccgctgccaccgccttcgacgaagcggctgctgccggcttcgggcttggccacggctcgcgtttcgcgcgcaagcatggacgtgctgccgatgagatgccccagccggagccacaacctaaaactaagccggagccccatatgcagacactgccccagccagaacctaaaccgaaacctatgccacatccagagccaaagcctgaaccttaaccaatgcccaaccctgaaccttaaccaatgcccaagcctcaaccaaaatccaaaccagagccaatgcctacacccgaacctgaaccttaacccgaacctaagccagagcc

SEQ ID NO: 91685 - DNA, 558 bp, Zea mays
  unsure (1)..(558): unsure at all n locations
agagttnctctttgaggtgcgtgtacgaaactaaagcacttactgcatgtacaaccggtccggaattcccgggtcgacccacgcgtccgctctcgtggaagagcagaggcagcaaggacctgctcttccgagtctgcatcgtgtgcgcgtttggcagcgcgcttttcaccaatgacacatgctgtgttgtcctcaccgagttcatcctcaaggttgctaggcaaaacaacctgccaccacagcctttccttctggcccttgccactagttcgaacatcggctctgctgccacgccgatcggcaaccctcagaaccttgtcatagctgtcgagagtgggatctcatttggccagttcttgctgggagttttcccagctatgatcgttggggttctcacaaacgctgctatcctccttttgtacttctggaaatacttgtcggtggagaaggatcaggagggtgggcagcccacaggaccagaggtggttgccgacgatgaggttacttcccatcggttcacaccggctagaatgtcacatgtttcttctctgaatccaa

SEQ ID NO: 91686 - DNA, 556 bp, Zea mays
  unsure (1)..(556): unsure at all n locations
aggggttcctttaaggtgntgtacgtgactaaagcatagantgcatgactcaccggtccggaattcccgggtcgacccacgcgtccgcacggcggcgagtcgcgggtggtggaggtggcggaggacgagacgatcctgtccggcgcgctggacgagggcctggacgtgccgcacgactgcaagctcggcgtgtgcatgacgtgcccggcgcggctggtctccgggacggtggaccagagcgacggcatgctcagcgacgacgtcgtcgcgcgggggtacgcgctgctctgcgccgcgtacccgcgctccgactgcaccatccgcgtcatccccgaggacgagctgctcaaggtccagctcgccaccgtcgacgactgactgacgctccgtcgatgaccagcggaccggccagcaggcatcaacctccggcggtgtaatgatgtccctgagacttgtacaccattgttgactagtagcactagtgacagagcttttctcgagaatagatgctgtgtgatatgcctctgccaaatttctggtatccaaatcgagcatt

SEQ ID NO: 91687 - DNA, 557 bp, Zea mays
  unsure (1)..(557): unsure at all n locations
aggagggccagtggaggtctgattccagctctgccagctctcatcgaagtctcgaattcccgggtcgacccacgcgtccgcgcagaaaaagaaaaagaaaaggcaaaggcaaaggaatcccaatcaggcaagcaaaaggaagaacgagctgctgcggagtgcggagatgtcgtcgcagctgatcgaggagcaccggtcgggcgcggaggtgcacgtcgggcacgagctgtgcgagcgcaagtcgcgcgagttcatggtggagctgggcctccccgacgggctcctcccgctgcccagcctggacgaggtgggctacaaccggtcgacggggttcgtgtggctgcggcaggccgtcggcctgacccacaccttcgggtccatcggcaagcaggtgtggtacgacagggaagtgacggcgttcgtggagccggggcggatgcacggtctcgccggggtgaaaagcaaggagctcctcatctgggtcaccatctncgagatcgtcctcagccccttcggcaccaagatcgtgtttcgcacccccggggggcttcgccgcn

SEQ ID NO: 91688 - DNA, 557 bp, Zea mays
  unsure (1)..(557): unsure at all n locations
agtaggggctcgtagaggttgtgatctagcctctgancgcatgcgctagaagtctcgaattcccgggtcgacccacgcgtccggaactagcaagggcaatagcagcttcgctagaggtagtcattgaagcatcagacgccagtgatggtgatatgggtgaagctgaacctgaggaggaaaatgagcccagcttaaacatcaagcctgattatcctcctctccctgaagaacctaaaggaagcagggagcttctctgcagggttgcgattcggctaccgaacaatcaaaggatccaaagaaacttccttcacacagatcctatcaagctcctgtggtcattctgcgctcctcaggttgaggacggcgagaagaaggctttccacttcgtacaggccattcctggagcatcccagaagctgcagtttggaagcgacctaactttcaaggaagcggtgcttgccaactcgatgatcaacctcttgtgggactgatacgcttnncatctgcgcttggaaagcgtcgatcaagatgtgtnncctcgatgggctttgaaatcc

SEQ ID NO: 91689 - DNA, 558 bp, Zea mays
  unsure (1)..(558): unsure at all n locations
agtaggtcctctttggagtcctattcagctactacaagcacatgactgcacgtacgtaccggtccggaattcccgggcacaggatgctgaacgaggatgagctacgtgatgctgtgctgcttgtttttgccaacaagcaagatcttcggaatgccggaatgctgctgagattactgacaagcttggattacactccctgcgccatcgacactggtacatccagagcacttgtgccacaactggcgagggtctgtatgaaggcctggactggctgtccagcaacattgcgagcaaggcttgaggcctaccttgaatatcaactgcgaactgactaggaactccggatgtatcatggaaactcaagacagaatcgcagttgcaatctgatagatgtcttctaccggcactatatatganatactgttagatgtgtaatgatggtactgttcaacgcttattacgctactatactgttggatgttctttggacctgtttcatctctcacaaggatcggactatcaatatcatgaagaaaaggccgatttattggctttgga

SEQ ID NO: 91690 - DNA, 557 bp, Zea mays
  unsure (1)..(557): unsure at all n locations
agtagtggccattngaggtctgaattaagtntctcccagcttgtcattgaagtctctaattcccgtgtcgagccaggcctgcgcagatttacttgctcttcttgaacatgccatcgctgctgtcaagggtgttcaggatggatcccagaactatgaggcctacttattattcccagttcatttagaangaacattacatgatataactaaaaccatgcttgaaaagaaggaattcttcccaacaattactgttctccagatatttcgccagctttgttctggattaaagcacatgcacagttttgatccaccatatgcgcacaatggggttaaaccagataatgtcctcataacacacaggaagcagtctcatctagcaattntgatggattttgagagtgctggtccaacaagaaagactattagatcacaaactgaagctttgcagttacaagaatgggcttcagagcactgttcttctcattaccgtgcccccgaactatgggagtgttccaatcatgctgacattgatagaggacagatatatagtctttggg

SEQ ID NO: 91691 - DNA, 568 bp, Zea mays
  unsure (1)..(568): unsure at all n locations
agtaggtncacnttagaggttgcctggactgantactccagcctcatgantgcacgtacgtaccggtccggaattcccgggtcgacccacgcgtacgaacaggcaacagcccagccgctgtcgccctcgttccgtagtacggcgccgccagggggtcagtgaccatgatcatctgcaagaagaaccgccgcgagatctgcaaatacctcttacatgagggggtcttgtacgccaagaaggactacatcctggccaagcaccccaagcttgatgtgcccaacttggaggtgattaagctcatgcagagcttcaagtcgaaggagtatgtgagggaaaccttctcatggcagtactactactggtacctcaccaacgatggcattgagcaccttcgcagcttcctcaacctgccatcagaggttgtgcctaataccctcaagaagtcttccaagcccccgtctcgccccttcggctctggcccacctggtgaccgtcccattggcccttactcgtatgaaagtgacaggcctangtttggtgatagggatggttacagatgatgtccccn

SEQ ID NO: 91692 - DNA, 564 bp, Zea mays
  unsure (1)..(564): unsure at all n locations
agaagttncnctttaagagtccgtgttaccgatactacaagacactatactgcatgactcaccggtccggaattcccgggtcgacccacgcgtccgatctcgttatgtatgttcagtccccagaaacaaaggatctaacagtttcattaacaagctctggtgggttgcaaaacttggcttcagctacaataacagtttctggcacatcaaattggacaaaagtggagcagaagctggttgctaaaggaaccaatagaacatcaaggcttcaaataacaacgaacaaaaaaggagttgtttggcttgatcaagtatcactcatgcctgaagacacatacaagggacatggtttccgcacagaacttatatccatgcttttggatttgaaaccacgattcttgagatttcctggaggttgttttgtagaaggtgactggctaagaaatgcattcagatggagagagtcaattggtcaatgggaagagaggcctggacacttcggngatgtttggcattactggactgatgatgggcttggatattatgagttccttcagcttgcgg

SEQ ID NO: 91693 - DNA, 562 bp, Zea mays
  unsure (1)..(562): unsure at all n locations
agtagttnctcnttggaggtctgagtttcgtntctgccagcttgacttagcagtctcgaattcccgggtcgacccacgcgtgcggagctgtacgaaacggcatctgggagacgcacacgcccgctcgaagcggcgaagcctcgaacggggtgaaaggcatactgtgagaccccccgcgtagcttgatcttcgagatggaggcggcgctagtggagcggctggaggccgcggtggcgcggctcgaggccgtcgtggcctacggcgcctcgctcgcgtcggcggcggcgcgcgacctcgacgctcctgaggcccggatggatccagctatcgtggcctacgacgagttcgtcgcggaggccgtcggacggctcacggctgcggccgaaaagatcggcgggaaggtgcttgacgccaccaaagtgctcgccgaagcatttgccgtcgacaaagacctgctcgtacaagccaagcagctccagaaaccagcatcaatggctgatgcacatggcttttttaagcccctcagtgatgttattgcaaaagcaactgcaatgaccgaaag

SEQ ID NO: 91694 - DNA, 563 bp, Zea mays
  unsure (1)..(563): unsure at all n locations
agtagtttcctntngaggtgcctgtacggagactacaagcacatgactgtatgtacaaccggtccggaattcccggtcgccctcaaattcgttccgtccaggcaaggaagaaatcgagcagccaaggagaggagaagatggctcgtacgaagcagacggcccgcaagtccaccggaggcaaggccccgcgcaagcagctcgccaccaaggcggcgaggaagtcggcgccgacgaccggcggcgtgaagaagccccacaggtacaggcccggcaccgtggcgctgcgcgagatccgcaagtaccagaagagcacggagctgctcatacggaagttgccctgtcagcgcctggtccgtgagatcgctcaggacttcaagacggatctgcggtttcagagcccacgcgtcctggccctncatgaatgcgtcgaggcctacctcgtcggtctgttcgaggacaccaacctctgcgccaatcacgccaagcgcgtcaacatcatgcccaaagacattcaagtcggcccgccggatccgcngcaagcgcgcgtaagcgtatctcgcgcc

SEQ ID NO: 91695 - DNA, 560 bp, Zea mays
agtagttacccttagaggttgctgtacgaaactacaagaactatactgcatgcctctaccggtccggaattcccgggtcgacccacgcgtccggtaaagccatccccattacctgacagctggaagttggctgaaattttcacaactggagttgtcgttggatatagtcatgatggtaccataatgactatatccaaggatcgtgtaaagccatccccattacctgacagctggaagttggctgaaattttcacaactggagttgtccttggtggatatcaggcaatgatgactgtcatcttcttttgggctgcatacaagacaaactttttcccaaaaatatttcatgtggaaagccttgagaagacagctcaagatgatttccaaaagcttgcatctgctgtttacctgcaagttagcaccatcagccaggccctcatcttcgtgacaaggtccctgaactggtcatttgtcgagcgcccatggtttctaatggtctttgctttcttgttgcgcagctgattccacactgattgctgtgtacgccgactgggcgttaa

SEQ ID NO: 91696 - DNA, 557 bp, Zea mays
  unsure (1)..(557): unsure at all n locations
agtagttccccntgaggtccgtgtcagctactacaagcatctantgcatgtacaaccggtccggaattcccgggtcgacccacgcgtccgcggacgcgtgggcgacgcggcagcgaggaggaagcaaaggaaaggggatatgtcgaggccgtccgacaggagcgacgcgcacctctccgccgaggacgaggcggcgctggaggccgaggtgcgggagtactacgacgacgcggcgccaaagcgccacaccaagccctcccgcagcgagcactccgtcgtgtacgtcgacgcgctcgtcccggacgtcggcggcaactcccacccggagctggacaagttccaagagctggaagcacacaccgagaggttggtgtacgatggcgccaatgtgggagatgagttcgtggagactgagtactacaaggacctcggcggcgtctgcgagcagcaccacacgaccggtacgggttcatcaagatggacaaagctaaaggcgcccctttatactgtctgaagatcccaatgcanaggaacgacatgcttcttgcaggggaacc

SEQ ID NO: 91697 - DNA, 563 bp, Zea mays
agtagtgccgtagaggttctagtcagctactacaagaatatactgcatcgacgtaccggtccggaattcccgggtcgacccactcgtccggagaagtctttaggtggggtcaaagatggtgtcgctgaagttgcaaaagctccttgcctcgaggtacctcaagtgtgggaaaggcaaggtgtggcttgacccaaatgaagttagtgagatctccatggcaaactcccgccagaatatcctgaagttggttaaggatgggtttatcatcaagaagcctcataagatccactctagatcccgtgcaagaagggcacatgacgccaagcaaatgggacgccactcaagatatggtaagcgtaagggtaccaaggaggctaggctacccaccaaggttctgtggatgatgaagattcatgttccgaagcgccttctccgcaagtatcgttaggccaactaagattgactagcacatgtatcatgacatgtacattaatgtcaaaggtaacgtcctcataaaccagagggttcttattgaaagtattcaccagtccagggctgaaaag

SEQ ID NO: 91698 - DNA, 555 bp, Zea mays
  unsure (1)..(555): unsure at all n locations
agtagggtccngtgaggtctgtagcagttantctaagtctgtcatagcagtctcgtattcccgggtcgacccacgcctacggaacatcgtacgctcaatgacgtcttgctacatcgcaacaggctctttctctcgctcggcggtcaggttcatggccaggtgcccgacgccagtgtccaacgtggtcatgtccaccgttgtgctcctgaccttgctgatcatcacgccgctgttcaagtacaccccgaacgcgatcctgggctcgatcatcatctctgccgtcatacgcctcgtcgactaccatgcggcgatcctcatctggaaagtcgacaagatggacttcgtcgactgcatgggggccttcttcggcgtcgatttcaagtctgtcgagataggcctcttgattgctgtgtccatctcggttgccaaaatacttgtccaagtaacacgacccatgactgcgctgctgngaaaccttgcaggcaccacgatctacaggaacaccgagcagtttcgcatgcgacgcatggttcttgggtggtcatagtcagggtg

SEQ ID NO: 91699 - DNA, 565 bp, Zea mays
  unsure (1)..(565): unsure at all n locations
agtagtggctcttnggaggtgcctttctagcctctgccagcctccctacgcagtctcgaattcccgggtcgacccacgcgtccggccccgttccgaccttgcccctgcggtctcccgagtcccgaagcatccccttccaaaaccctcggcgcgccggggtcacccttgcttccgcacgctatcgcccgggaccagccatctatggcggcgtccctgctcctccgcgccgtgcgccgaagggagcttgcgtcccctctcggatccctgggtgccagcatacagtcaacatgtgttgccaacatatgctcaaaatggggaaggtttgcaagacctttcagcgcaaaagctgctggaaatgaggttattgggattgattctggggacaacgaactcatgtgtttctgttatggacggaaagaacccacaagttattgagaatgctgaaggtgcgagaacaacaccatctgctgtcgcatttactcagaagggcgaaagacttgttggaactccagccaagcgccatgcattaaccaacccccagaatactttcttatgaacaaagagg

SEQ ID NO: 91700 - DNA, 567 bp, Zea mays
  unsure (1)..(567): unsure at all n locations
aggagtttcancntgtagagtgcctaggctagcntngtgtcagttngaccccagtagttacgtttctccgtgtcgacccagcgccagggggacatttaagctcagtgacgtcttgctacatcgcaacattctctttctctcgctcggcggtcagcttcataggcgngtgccggacgccagtgtgcaacgtggtcatgtccacggttgtgctcctcaccttgctgctcatcacgccgctgttcaagtacaccccgaacgcgatcctgggctcgatcatcatctctgccgtcatcagcctcgtcgactacgaggcggcgatcctcatctggaaagtcgacaagatggacttcgtcgcctgcatgggggccttcttcggcgtggttatcaagtctgtcgagataggcctcttgattgctgggtcaatctcgtttgccaaaaatacttgttcaaggtacaagacccagtactgggctgctgggaaacctttcaggcaccacgatctaccggaacaccgagcaattttcgcatgctaggcatgttcctggggtgggtcataatcagggtggn

SEQ ID NO: 91701 - DNA, 558 bp, Zea mays
  unsure (1)..(558): unsure at all n locations
agtagggcacgtgaggtctaatgctacntttgctngtatgtcgtagtagtctcgaattcccgggtcgacccacgcgtccgtatgattccaaacaacatatattctccttgccatttgttgtgattttcggtgccaaaaggttactgtttcctggaatcatatattctgcttgccatttgttgtgattttcggtgccaaaaggttactgtttcttgaacaagtactagcttcatattataattacaggaaacaataatgataatatgtatctagtactcgatcatgaaattgaacagctacaatgctacttgtctaatatagaaactccaaaaggtcggccgctctacatgatccaagcttacgtacacgtgcatgcgacttcatatctcttctatagtgtcacctaaattcatttcactggccgcagctttacaacgttctgactggaaaaaccctggcgttactcaacttaatcgctctagatcacatgcccctttggaacagctgtggtactagccaataggccccatcccattggactttacaacaattgcgcac

SEQ ID NO: 91702 - DNA, 578 bp, Zea mays
  unsure (1)..(578): unsure at all n locations
agttaggggcacngtaagggtctgaatttagtntcctgccagtctgtactatgaagtctcgaattcccgggtcgacccacgcgttcggagagccatggagaagaaggcacacaagctgatgatgcaaaccaaaatcaatgaaaccaaggatgtcatgaaggggagggctaatgagcttgacaaaatgaggatggaaagaggcaaacttgacaaaggaggatactcatcaatatctggtccacgcgtgattgaaaaaactttcagtgacatgagcatcagtggttctggattaggtggactgagcactgacatggactcatttgctagcaagcccaaaggccgtccatctacagcagctactgcacctggtaaaggttttggtatgaaattaggcaagacacagaagacaaatcaattccttgaatctttgaaaagctgaaggaaaaagtcattttgggaggatgtacaaccaaagtgcaagtttctacaaaggtcatcttgctcttttcaccaagtgacccctgtcacaggtaactattggaagaagaagcttaatggttgttgggtaaaagaaatgg

SEQ ID NO: 91703 - DNA, 565 bp, Zea mays
  unsure (1)..(565): unsure at all n locations
agtaggggcgcgttagggtgtngattcagcncctaaccgcacatacctcatcgactactggccgtgcgcagctgtgtccatctacctgctccttcgactccttcttgatccagccaagccagggatcgccatgtcggactcggaggggcaccacgtcgaatcgaaggccgacgccggagcgtccaagacctacccgcagcaggctggcaccgtccgtaagaacggcttcatcgtcatcaagaaccgcccctgcaaggttgtggaggtttctacctcaaagactggtaagcatggtcatgccaaatgccactttgttgccatagacatattcaacgggaaaaagctcgaagatattggtccttcgtcacacaactgtgatattccgcatgtgaaccgtactgagtaccagctgattgatatatcagaggatggatttgtgagccttcttacttcagatggcaacactaacgatgatcttaaactcccaactgatgagactcttgtggcccagatcaaggaagggttcgaaagcggcaaggatctttgtgtgactgttcagtctgcn

SEQ ID NO: 91704 - DNA, 563 bp, Zea mays
  unsure (1)..(563): unsure at all n locations
agtagtttcacattgaagtccgtggcttgagactcccagctcatacctgaacgacaaccggtcctgaattcccgggtcgacccacgcgtccggtggatctggcatggatctcaggagcaaagcaaggaccctctccggcccggtgaccgatcccagggggctgcccaagtggaactacgacggctccagcacgggccaggcccccggcgaggacagcgaggtcatcttgtacccgcaggccatcttcaaggacccattcaggaggggcaacaacatccttgtgatgtgcgattgctacaccccagccggcgagccaatccccaccaacaagaagtacaacgccggcaaaatcttcagcagccctgaggtcggcgtccaggaaccgtggtatggtattgaacaaggaatccaccttcctccaaaagacaccaaactgcccctttgggtgcgccattcgtggctttcccggccctcagggtccctactactgtggaatcggcgccgaaaaagtcgtcggccgcgacatcgtggacgcncactacaaggcctgcttgtatgcnggc

SEQ ID NO: 91705 - DNA, 557 bp, Zea mays
  unsure (1)..(557): unsure at all n locations
agtagggccngtngagttctgatataagaacttatagtatgccgtccggatccgcaattcccgggtcgacccacgcgtccgcgtgcttgtttgctctagggtttttgccacgccgccgccgctctgccccttccaccccaccgatagaccaagatgacggcgcaggctgcggaggagctcgccgcccagatcgagcagcagaagctcgaggagcagaagaccgaggcagaagaggttgtggtggaggaggatgacgaggatgatgaggatgacgatgatgatgacaaggatgatgatgaactggatnggacagaaagggatgggagtggcaagtcgaagcaaagcaggagtgagaagaagagccgcaggggcatgctgaagctnggcatgaagcccatcactggtgtcagccgggtcactgtgaagaaaagcaagaatatggctttttgtcatctcgaagccagatgtgttcaagagcccaaactcggacaactatggcatattcggcgaagccgagatcgagaaccctaagtnccaagctgcagacccaagcttgg

SEQ ID NO: 91706 - DNA, 648 bp, Zea mays
  unsure (1)..(648): unsure at all n locations
tggagagaaggtaggcctttgnagagtgtaattctagcctcttataaagaaccatgattgcatnaancactncnnnnctnagagtaccgggtccgagccagcgcgtctcgggagaagcgaccaccactttcttcaaccaccacaatgaaggacgaggagacagcccggcggcgagtacggggtactctcgagtaccgatagtggtcaaccgtccaccggcgagggcgagtaccgagaggtacatagaagggangagaaaggagcaccaagcaccaagcagcactcttcggcgaggccggctgccattcgccgnncggcgccttcgcacttcttacgagaanngcacgaggcganagaaaggaaccccgagcactgcgcacaaggcaccaagatcacggganngaggtcgcttgccgcggcgggccgtcgggcgccgggcggctacgtatttccacgagcacccacgnagaagaagaagggacccacaaggacggccganggagggccaaacnngcgagaaggaagcaaccancaccttntttcggcttgaccgtaagtaacccggccgggnggcgccgaccgaagctatacttacttccgggggcacaacaaaacacacaaccctggttaaattcttggacctggatt

SEQ ID NO: 91707 - DNA, 527 bp, Zea mays
  unsure (1)..(527): unsure at all n locations
agagagggccgtgnggtctgaagccatggacttagtagcatcatgcacacggccggaattcccgggctgtcacacacacacacacagacaagtggtttccaaagccaagtgtgtgtactagcaaccagctagctcgggcggcagcaggcagccatcatgtcggaggagaagcaccaccacttcttcaaccaccacaagaaggacgaggagcagcccgccggcgagtacgggtactccgagaccgaggtggtcaccgccaccggcgagggcgagtacgagaggtacaagaaggaggagaaggagcacaagcacaagcagcacctcggcgaggccggcgccatcgccgccggcgccttcgcactctacgagaagcacgaggcgaagaaggacccagagcacgcgcacaggcacaagatcacggaggaggtcgctgccgcggcggccgtcggcgccggcggctacgtattccacgagcaccacgagaagaaaagngcccacagggaccccgaggagccagcggaaaaaaa

SEQ ID NO: 91708 - DNA, 529 bp, Zea mays
  unsure (1)..(529): unsure at all n locations
naggaggggcgacggtgtctggagcccagccncacacgaccaggatcgtaccgaccnggaattcccgggtcgacccacgcgtccgattcatcagattcagatcagatcgtagcagccaaggattccgcgctccgggggtgccatgaaggtgaagcggctctctccctgccttctcctcctcgccttctttgccaccgcggcgtacgcggcgtcagcgtcggcgtcgcgcgcggcggccgtcgtcaggggcgcggacgccccgtcgcagtcggagttggagtcggacccggagaaccagtgcgtgtacacggtgtacgtgcggacggngtccatctggaagggcggcacggactcgaccatcggcgtgacgctgctgggccccgacagcacgggcatccggatccgggacctgacgacgtggggcggcctcatgggcgccggccacgactactacgagcgcggcaacttgaacaatctcaagcggccggagcccctgcatgaaccaggcgcccttggccatgaacctaac

SEQ ID NO: 91709 - DNA, 519 bp, Zea mays
  unsure (1)..(519): unsure at all n locations
nagtaggtgccaggtgtctgaagaacgggcccatgcncatcctcnaccggccctgaattcccgggcaagaagagagccgatcgaccgagagctagcacgcgatggcgaggtcttccaaaatgatggtggcggcagctctgctggagctgnccgtggccgtgtcgaccgccgaggcgaggaacatcaagacgacgacggagaagaaggacgacgcggtggtgcagccgcagaccttcccgcccttcgaccgcctcggcggcggcgcgtccccggcgttcggcggcctacccggcggcagcattcctggcagcagcattcccgggttcagcatgcccggcagcggcagcagcctttccgggttcagcttgccccgcagcggcaacatgcccctcttcgggcggcggtccccgggctttaacggcttcggcgggatgcccgggtcccccaccggcagctccgttcccgagcacgccaccaggccctgaactccggctggccgtccaatccgtggcttgaaca

SEQ ID NO: 91710 - DNA, 562 bp, Zea mays
  unsure (1)..(562): unsure at all n locations
ggagagggaggaggccgtgnagatgccttatgatactctatagacgctatattgcatgactcaccggtccggaattcccgggtcgacccacgcgtccggtgacgaaccctctattcgagaagaggccgaagcagttcggcatcggcggcgcgttgccgcccaggaaggacctgcaccggttcgtcaagtggcccaaggtcgtgcgtatccagcggcagcgccgcatcctcaagcagcgcctcaaggtaccaccggcgctcaaccagttcacccgcaccctcgacaagaacctcgctacgaacctttttaagatgcttctcaagtaccggcctgaagacaaggctgccaagaaggagaggcttctgaagagggcccaagctgagaatgaagganaaactgttgagtcgaagaaaccaattgttgtgaagtatggccctaaccatgtgacttacctcattgagcagaacaaggctcnctttgtggcattcgttatgacgtgaatccgaatgaactggttgtgtgggtttcagccttggtaggaaagatgggggtccttactgga

SEQ ID NO: 91711 - DNA, 550 bp, Zea mays
  unsure (1)..(550): unsure at all n locations
ggagtcccttaagagccttatgatcttacagaacttattgcatgactcaccggtccggaattcccgggtcgacccacgcgtccgcggacgcgtgggctagtccacacggcagacgccgccgccgggggagaggagaggaggggaggggagcggctccaagggaacaggtgagatggcaatcctgtacgcgctggtggcgcgcggcacggtggtgctggcggagcacagcgcggcagccaccaacgcgggcgctatcgcgcgccaggtcctcgagcgccttcccgacggcggcgccgacagccacgtctcctacacgcaggaccgctacgtcttccacgccaagcgcaccgacggcatcaccgngctctgcatggccgacgacgccgncggaagacggattcccttcgcattnntggaggatattcatggaaggttngtcaagacatatgggccggctgcgcttaccgctcttgcatatggcatgaatgatgaattctcaagggtcttgagccaacaaatggactactaatcaaatgaccctagtgagata

SEQ ID NO: 91712 - DNA, 557 bp, Zea mays
  unsure (1)..(557): unsure at all n locations
agagatgccttgntgatgtctccagtgactcttcagctcatattgcatgactcaccggtcctgaattcccgggtcgacccacgcgtccgggctgggcttgtgccaagcttgaatcctcttgtgaaggagtttctcaatgctgctggtgacaagcggaaggaagtcctctctaaaatagaagaggatgttgctaagctcagcggttctgcagccaactaagaagctacaagtgaatgccgaggagagcagcgatgacttggctaacccaccgaaagtagacgagaagcttggtgctgtccctcatggcctgtccaccgactctgangttgcccagagggaagccgagtctatctctaggaagactctcacgagctcagccgagaagtttgagtttcaagctgangtttncagactcatggacatcatcatcaacttactctacagcaacaaggatatcttcctgagggagctcatatctaatgcctntgatgctggttaagattagggtccttttccttactggatagggaattcctgggtgaaggggacaccttcag

SEQ ID NO: 91713 - DNA, 521 bp, Zea mays
  unsure (1)..(521): unsure at all n locations
taggagtccagaggttctgtcctcgtatctcgcctagtantgtatggctcggaattcctgggtcgacccacgcgtccgtacaactccccaaacgggatgcgcctgtccggaggcgcgcagaccgtgcgcatgaacgcgccgagcgtggggggcagcttcgccgtttggggcggcctcttctccaccttcgactgcgccatggtgtacgcgcgccagaaggaggacccttggaactccatcgttgcgggcgcagccaccggcgggttcctctctatgcgccagggcatggggcccgaggcccgttccccgcctatggccggattcctgttggccttaatgaaggcgccgggaactaaacctaaatgcggtctttccaaaccggcgctgtccggcgacaatcccaaccttacacagggcattggccggaaacctttatccgggctttgccaagggccccccgttgtgggaacttccgaaacggggaacttctcaagggtgggggggctttgctcggggaactt

SEQ ID NO: 91714 - DNA, 521 bp, Zea mays
  unsure (1)..(521): unsure at all n locations
nagagagggctcatgggtctgagcctcgtattataagaataggatcgcaccggcccggaattcccgggcttgtgcaaaacaatgcataggcaaccagaacatgtgatgatgttcttgcttgctgagatgggaacaagtggatccctggatgggcggcaaaggttggttatcaaaggaagatttgcaccaaaaaatttcgaagcgatacttaggagatatatcaatgaatatgtcatatgcaatggttgcaagagtccggataccattctttctaaagagaacaggttgttcttcctccgatgcgagcagtgtggttcatcgaggtctgttgctcccatcaaggctggattcgttgcccaagtgggccgtcgtaaggctggatcttaagctacctactacttgcctgaagtcgctttccgatgaagacaatgcanactagtttgctggttcacataaatcattgttgcactttcccttgtgcctacacagataactgaatttctgctggtcgctatacttgg

SEQ ID NO: 91715 - DNA, 538 bp, Zea mays
  unsure (1)..(538): unsure at all n locations
agggaggtcacaggtgtttgaatgcccctcaccgcctggcanctancnnacggccattaattcccgggtcgacccaagcggtcggttgggttcttctgccccttcggttcgggttttggttcctgaaggtcttcggggttccgtttcgggggtgagccgatcgaaattggcgggtcggattttgaataccgctgctttgtcagcgggcttgacttggccaacgacgaacaattccttcacaacggcttcaacaacttccgcgaagtcctcgaattcaagatcattcttgattcggagactcaaaagtacccccggttttggtttggtaacctttttcacggaagaggccattccggaacgccattcaagggcatttaccgggaaggaacttggaccggccggaacatttaccggtaaacgagggcccaattccggcggcgggccttgaaagccgctgcggtaggcgggtaccggagttggccctggaaggcgctggtttcgggagtttgctggccgcccctattggctggaagctgtt

SEQ ID NO: 91716 - DNA, 552 bp, Zea mays
  unsure (1)..(552): unsure at all n locations
aggagggcnctttangaggtctgattaaagaatcatataagaatgccctacggatccgccattcccgggtcgacccacgcgtccgcagtagttagagcgaccaatagatgagttcctccccgtcctttggtctcctggctgtagcagcatggctcctagcactgagcttagcacaacatggctccctcgccgcaaccgtcggccccagggtcatcgtcgtcggcgccggcatgtctgggatctcggcggcgaagaggctgtcggaggccgggataaccgacctgctgattctggaagcgacggaccacatcggcgggcggatgcacaagacgaacttcgccggcatcaacgtcgagttaggcgccaactggggtgagggcgtgaacggcggcaagatgaaccccatctggcccatcgtcaactcaccctcaagctcgcaactttcgntcgacttcgactacctngctagaacggctacanggaagacccgtgcctgtacgatgaagataacgtccagagaagaatggaccttacgacaacgtggaagaaatg

SEQ ID NO: 91717 - DNA, 561 bp, Zea mays
  unsure (1)..(561): unsure at all n locations
ggaggaagagggtctcctnaaggtccttctagctcttacaagcactgattgcatgactcaccggtccggaattcccgggtcgacccacgcgtccgccgcattccacgcgcactccgctgcctcactccgagactccgccgctgcttccaacttccgttgcgcacgagcgaaacatccggagctagcaagggaggaagaggaggaggaggaagcgatggcggggggcggggataaggtggactacgtcttcaaagtggtgctcatcggcgactccgctgtcggcaagtcgcagatccttgcgcgcttcgcccgcaacgagtttagcctcgactcgaaggccaccattggggtcgagttccagactcggactctcgtcatcgaacacaagtccgtcaaggcgcagatctgggacaccgncgggcangaaaggtatagaagctgcacaagtgcctactacagangtggcttgggaagcttgctagtctatgatatcaccaaaacgccagaacttcgaccacatacctgggttggctgaagaactttnggggcaagcctgcaaaa

SEQ ID NO: 91718 - DNA, 557 bp, Zea mays
  unsure (1)..(557): unsure at all n locations
agagtcccnttanagagtgctccatgagactctttagttcatgatcgcatgactcaccggtcctgaattcccgggtcgacccacgcgtccggaggaattgttcccttctgcaaggggcttgatgtcattcagcaagcacaatctggtacaggaaagacagcaaccttctgttctgggatcttgcagcagcttgactatggtctggttgaatgccaggccctggttcttgctcccacccgtgagcttgcacagcaaattgagaaagttatgcgcgcacttggtgactaccttggtgttaaagtccatgcatgcgttggaggaacatctgttcgtgaggaccaaaggattctcgccagtggtgtgcatgttgnttgtggtacaccctgtcgtgtgtttgacatgctgcgtagacaagtccttcggcctgattacatcaagatngttngtcttgacgaagcttgttgaatgctttcttgtggtttcaaggatcagattaatgacatctttccactttttgcattcaagatttaaggttggagtctttttttgtaccaagg

SEQ ID NO: 91719 - DNA, 527 bp, Zea mays
  unsure (1)..(527): unsure at all n locations
naggagtcaagagattctgtcctcgcattaccgattatgatcgcacgacccggaattcccgggtcgacccacgcgtccgcccaaaaggcagtacaatgcttgaacgatatagtgaccaatgcactgattcatgcccaagagtggcttcaggacatgtcagccttgaagaaccatgccatcttccggttttgcgcaattccccaaataatggcaattggaacatgtgctctttgctaccattaccagcctttctttataagaactgtgaaaattaaaccttggcttaacggcccaattatttgccaacccaatttcatggtcaaacgtttttcccgctatcattgagtcattttattggttagacccaaaattgggtaccagggttcaaaacgcgtgtttaacagggacacacgaaattccctaaagcccaatttggaagagttattggttggggaaaaaagggagggggatccctattggaacatttccttttaagggctctaatggaaaacaaattttgccccccc

SEQ ID NO: 91720 - DNA, 518 bp, Zea mays
  unsure (1)..(518): unsure at all n locations
atggaagggcggaggtgtctgagccacgtattataagatatgatcgcaccggcccggaattcccgggtcgacccacgcgtccgctcctgcgctgcgccgtccttcacctccgccgccgaatccgagactctgatctcgggttcaccggagcgcgcagagcacccctgactcccggcccgatccgcgctctcctctccgacgcttcagtcatggcaggaatggcacccgagggttctcagtttgatgctaagcactatgattctaaaatgcaggagctgctgagcactggtgagactgaggagttcttcacttcatatgatgaagtttttgaaagttttgatgacatgggccttcaggagaatcttctgagaggcatttatgcatatggttttgagataccatctgcaattcagcagagaggaattgttcccttctgcaaggggcttgatgtcattcagcaagcacaatctggtacaggaaagacaggcaccttntgtcctgggatcttgcaacaactt

SEQ ID NO: 91721 - DNA, 523 bp, Zea mays
  unsure (1)..(523): unsure at all n locations
naggtaggncggaggtgtctgatcccctggcccttatgtcagctacgnaccggtncctgaattcccgggcttttcgagtttagaacctctaaaatttcccccactcgccagtcgcagcagcacctgtagccatggacgccagcggagcgggtagcggggggaagaagggtgcggccgggcgcaaggcaagcggccccaggaagaagtcggtgacgcggtccgtcaaggccgggctgcagttccccgtcggccggatcgggcgctacctgaagaagggccggtacgcgcagcgcgtgggcactggcgcccccgtctacctcgccgncgtcctggagtacctcgccgccgaggttctggagttggcanggaacgctgcgaaagacaacatgaagacgcgcatcatcccgcgccacgttgctctggcgatcccgaacgacgaggatctttcggaagcttgttggaaggcgtaccatcgcgcacggcggaggttcttcccaactttcattccgtgctcctgcccaaa

SEQ ID NO: 91722 - DNA, 566 bp, Zea mays
  unsure (1)..(566): unsure at all n locations
gatggagagtagcccntnnntataggccgtagaaggtagacggaaggcatgatcggaccggcattcccgggtcgacccacgcgtccggaaatcttgcaatccacccctcgaaagaaaacctcaatcaacaccagaagctttcgatcccaccgaggaagaagagaggaatggcgtccgangaggagggagtcgtgatcgcctgccacaccaaggccgagttcgacgcccacatggccaaggccaaggaggccggcaagctggtgatcattgacttcacggccttctggtgcggnccctgccgcttcatcgcgccactgttcgtcgagcacgccaagaagttcaccccagctgtgttcctgaaagtggaacgtgacgagctgaangaaaagtgccgcggctacgatgtccaggcgatgccgaactttcaattcgtcaagaaaccgggtgacggttggagacccgnctcggtgccaggaagggagaaccctcctggcccagattcagaagcaactgngccgcgggccgtttcttgttgcctanaaaggattggaccagnccttggcggt

SEQ ID NO: 91723 - DNA, 552 bp, Zea mays
  unsure (1)..(552): unsure at all n locations
agggtnnccntnagggtcaggtatagaacttacagaagccgtccgcgatccgcaattcccgggtcgacccacgcgtccgcttggaattgagcctttgatgatggaagctcttgagaagattgagaaggacattaagaaaccactgttgaggagcgacaagaagaacatggccaccctcttggcagagtttgacaagattaacaaaaagcttggctttcggaaggaggatcttcccaagatcgaggaagagcttgaattggaaattgccaaaagtgagctgactgaacttaagaaggaatgcgttgaagcaatggagactcaactcaagagggaggagtttcaagatgaggagatgcctgatgtcaggaaaatggacatcagaaactttctgtangcctgatcgacgattatctttgaggcccaaacgcactntggttnttggtttcaagttgatcggtgcttcacaactatgaatgcctgttcttccctttttggtataaaagaaactgcccggttggtattgagttgaatttcttctggcttccttgtggt

SEQ ID NO: 91724 - DNA, 557 bp, Zea mays
  unsure (1)..(557): unsure at all n locations
agaggccgtggaggtccgtccagctacactcagcctcactncgaaatgacaaccggtcctgaattcccgggtcgacccacgcgtccggtcgctgccagccgccgccgcgtccgcctcgtcaagcgcagcagccgccgcagcacgtcgctctcgtgatctcagccatggcggangtggagcagcaacaggacacgccgaagctcttcaaccgctggaccttcgatgatgtccaggtgaacgacatctcgctgaacgactacctcgctgtgaacgcgacgaagcacgcgatgtacctgccgcacaccgcggtgcgctactccaagaaagcggttcgcaaggcgcagtgcccgatcgttgagcgccttacannactcctcatgatgcancgggcgcaacaaccggcaagaaggtcatggctgtccggatcattaagcatacccctggagatcattcaccctgctaaccgatgccaaccccaatcaggtcgtcgtcgacgcgatccataacagtgggccccgtgaagatggcacccgtattggttccgctggtgttgtaag

SEQ ID NO: 91725 - DNA, 556 bp, Zea mays
  unsure (1)..(556): unsure at all n locations
ngaggagagaagggccttttattgcttaggagcttagagggtagatgggatgcctcaccggtccggaattcccgggggccgacggcaccacgatgggggagatcgtgatgcgcgggaacggcgtcatgaaggggtacctgaagaacccggaggcgagcgcggaggcgttcgagaacgggtggttccactcgggcgacctgngcgtgcggcacggcgacgggtacgtcgaggtgagggaccgcgccaaggacatcatcatctncggcggngagaacatcagcagcctggaggtggagaaggcngtgtacctgcacccggcggtgcttgaggcgtcggtcgtgggccgngccgacgagcggttgggggaagtcgccgtgcgcgttcgtgacgctcaaggacgccgtggaccgttccgacgaagccgcncttggcgcgggacatcttgcggttctgccgngagaagctggccggntactgggggcccaaattcgtggtggtccgggccgtttnccaagacagngaccggcaggattcagaaacttgagcttagggccaa

SEQ ID NO: 91726 - DNA, 553 bp, Zea mays
  unsure (1)..(553): unsure at all n locations
ggaggccccttagaggtccgtccatgcactctcagctcactccgcatngacaaccggtcctgaattcccgggtcgacccacgcgtccggcatccagatcgaggaggccaacagcgccaagaagctggtggtgattgacttcactgcaacatggggtcctccgtgccgcgccatggctccaatttttgctgatatggccaagaagtccccaaatgttgttttcctgaaagttgatgtcgatgaaatgaagaccattgctgagcaattcagcgtagaggccatgccaacattcctgttcatgagggaaggcgacgtcaaggacagggtcgttggcgcagcaaaggaagagctagcaaggaagcttgaactacacatggcctcgtagatcagtgatgccgtaatgtagtattcgcctaaataagaggacgcctngcctcaactctgaaaaaactaatgcttctgtgatggtaattcgtatgagagagtgccccctttgtggtacttcttcggatgtaagaataactcctcgnctaatatggtgccctgttgggctt

SEQ ID NO: 91727 - DNA, 517 bp, Zea mays
  unsure (1)..(517): unsure at all n locations
aggaggctagggttttgtcctagcttatatgtcaggatcgcaccggcctcggaattcccgggtcgacccacgcgtccgcttttagtttttcaagctgataggtgctggagggaggaaggtgccgaagttatgctagaactatcagaaagcaataagtggtgtatagttgtgaagatacaaggtgttactaggtacttgcttaaaccttcagatatgaggtcatatgtcattaatcgtcatactcaatcctacatgtggacagttgatgatgcatggaagcttgagttcactgataggtgggactggctgttattcaaagagttgcatgttgtgggctgtgagcgtaattctcagggaaaggcaatcccaattcctggggtacatgaagtttctggtgagatggaagggattgttacagatcctttcttacgccctgtgccagactatatcangatggtggatgatgaagtttggcgagctctctcaagggattctattatgacatggactcagaaga

SEQ ID NO: 91728 - DNA, 519 bp, Zea mays
  unsure (1)..(519): unsure at all n locations
atgaaaggcggaggtgtctgagcatcgaatataagatcacatcgcaccggcccggaattcccgggtcgacccacgcgtccggtcccgggcatagttcacgtcctgaagaacgggagcatggaggcacgggagaacgctgcggccggactctgcagcctgtcggtggtggacgaatacaaggtcacgatcgggggcacaggagccatccctgccctcgtggtcttgctgagcgagggcaggcagcgcgggaagaaggacgcggcggctgccctattcaacctttgcatctaccaggggaacaagggccgcgccatacgggctggcctcgtgccactcgtcatggggctcgtgacgaaccccaccggagctctgctggacgaggccatggcgatcctgtcgatactgtccaggcaccccgaaggcaaagccgcgatcggtgcggccggaacccgtccccgtcctcgtggagatgattctcagtgggtcggccgaggaacaaggaagacacctcncccatga

SEQ ID NO: 91729 - DNA, 552 bp, Zea mays
  unsure (1)..(552): unsure at all n locations
aggagggccgtagntaatggcgctagctctcttcagctcactacgaaccgctttcccggtcgagcgacgcgttcggaaaaggccctggaacagcttaaaggcactgaaggaaaaactgtagctgctggccaacacatggatgttgttttgcacactttgcagatcggctagctctacatggattatgatctgatatcaaaatccatcgataaatgaaagaacttgtttgaggaatgacgcgattgtcagaggaagaacacgttgaaagtatatgaaggctcgtacttgattgcaaccaaaaacttcaagaaagctgccagcttatttttagactcgatttcgagctttacaacttatgagaatattcccatattatacggtcattctctatacaagtctcacaagtgtcaatacatttggatcctgaaacttttgaaacaaagggtggcaaattcaccataaaatcctggatggaatttggaaaaatacctaaacctttcccagttttttaaaatccttggccaattggcaactttaagtcgttctttgttt

SEQ ID NO: 91730 - DNA, 555 bp, Zea mays
  unsure (1)..(555): unsure at all n locations
agaggggcnttnaagagtgctatgaaggtatacggggcgtagaagagaagcctgcccggtccggaattcccgggtcgacccacgcgtccgcggacgcgtgggcttccacagccgcaacctctatccctcgtctggtatcgtctctgccacaccccgctgccccaacccagaaaaaccctcgaaaagcggcggcggcgcgacatggcggaggtcgaggctccagctgctgcggttgcggcggcgacccctgaggtggcgacggtgaccgagggcggagccgctacggaggcgaagggtccgcataagctgcaccgncagtggaccttctggtacgacatccagtccaagcccaagcccggcgctgcgtggggcacctncctcaaaaaggcgtacaccttcgacaccgtcgaagagttttggggctgggatgatcatgttntccgtccaagcaagttgcctggaactgcttgatttcacctattcaaggctggaatanagccaaatgggaagacccanaatgtgcaaattgtggtaaatggactgtcccatgcacca

SEQ ID NO: 91731 - DNA, 534 bp, Zea mays
  unsure (1)..(534): unsure at all n locations
aagctcatgatctcaaaagcatatatatatgcactcaccggtccggaattcccgggtcgacccacgcgtccggcttatattagtacgaaagcaagggggtcatctaccgcgtgtatcatcactcttaaagatcaggggatccatgctgtaaatcttggggatagtggtttcgtagtagtccgagatggccgcactgttctcaggtcaccctcacagcagcatgatttcaattttacttatcagctcgagagtggaggtggcagtgatcttcctagttccgcacaagtatttcacttttccgtttgccccggtgatgttatcgttgctggcacggatggactatttgacaatttatacaacantgagattagtggtgntnaatgtgaagctctncgggttggacttgagcctcagattgcagcacanaaaattgccgncctggctcgacaaaaaactacggacaaaaattagccatcaccctttggcttaactgcttcagaaacttggtacgnggattattgtgggaagcttgaa

SEQ ID NO: 91732 - DNA, 520 bp, Zea mays
  unsure (1)..(520): unsure at all n locations
nagaaggccatgggttgacatttgacaaaggtagtatgatgcaccggcccggaattcccgggctccgctgggccaccagctttgaccgccgcctcccttcccctccgctactgctcctcctcaccccactcccccgcaggagcggcggcggcggcggcgaggtcgtaccccacatcggcgagcggcggcggcaccgccggaggcaaaggcaagatgttcgggcgcgcgccgaagaagagcgacaacaccaagtactacgagatcctcggggtgcccaagtcggcgtcccaggacgatctcaagaaggcctaccgcaaggctgctatcaagaaccaccccgacaagggcggtgaccccgagaagttcaaggagctcgcacaagcctatgaggttttgagtgatccanagaaacgtgagatttatgatcagtatggtgaagatgcccttaaggaanggaatggcggtggaggatcccatgttgatccatttgacattcttctatcattttttgaaccctctt

SEQ ID NO: 91733 - DNA, 525 bp, Zea mays
  unsure (1)..(525): unsure at all n locations
nagaaagtgcggagaggtctgatcctcgacaattcgcatagtgatgcaccggcctcgaattcccgggtcgacccacgcgtccggagcagtcgcacgcaagtgtcaagagacgaaacggtcgacatggctcgcacgcaatctgccgtagcggtcggcgtggtggccgcggtgctgctgctggcagcggcggcgacgacctcggaggccgccatcacctgcgggcaggtgagctccgccatcgcgccctgcctctcctacgcccgcggcacggngtccggcccctccgcgtcctgctgtagcggcgtcaggaacctcaagagcgccgncagcaccgncgncgacaggcgcgccgnctgcaactgcctcaagaacgccgccaggggcgtcaagcggctcaacgccggcaacgcccgcagcatcccctccaagtgcggcgtcagcatcccctacaccatcagcaccttcaccgactgctncagggtgaactaaaacctaaaacaacgcgcgaagacggccggctgatca

SEQ ID NO: 91734 - DNA, 554 bp, Zea mays
  unsure (1)..(554): unsure at all n locations
agaaggccttttngaggttggtctagttctataaagaatcgtaccgaatccgcaattcccggtcaaatggagttactaagcccgccaagtagaaattgatttcacgcccncctttcagaaggatagatatgattaaagatttggaggcgatggccaagctcagtataccaaaagatctatcaagtgatgaagcgaatcgttatttgatagaagcatgtgtgaagtatgatgtgaaatgtccaccttcccaaacgacatcgcggttgcttgacaagttggttggccatttcttggaggagacatgtgtgaatccaacatttatcatcaatcatccagagataatgagtccattagncaagtggcatangtcccgacctggattgactganangttcgaagttgtttgttacaaacatgangtgtgcaacgcatacacagaggtgaacgattcttgtgttcagaaggcacggtttgaggaacaacttaaaggaccgtcaatctggtgatgaccaaactattgctttggacgaaacattctggacttgccttaagtt

SEQ ID NO: 91735 - DNA, 570 bp, Zea mays
  unsure (1)..(570): unsure at all n locations
agagggcctttgnagatgccgctcagctncctcaaaagaactatacagcatgactcaccggtccggaattcccgggtcgacccacgcgtccgggcgaatctctcgctaactgtcatcaatggcggccgagcccaagatcctagagctgtccaacggcgggatcaccgcgaggatctccaactggggcgccaccatcacctacctactcgtccccgacgcccaggggagtgtcgctgatgtggcgctcggattcgatggcttggatccgtacgtgaaaggcatgtcaccttattatggctgcatagttggccgtgtcgcgaataggatcaaggatggcaagtttacactaaacggacttgagtattcattacctggcaaccaatggccctaacagcccttcatgggtggtttgaacggaatttgatancggccgtgtgggaatggcgtggaaccccaaagattggcaatgcgcctttaattacccttttagatttaccagcatggaccgggaaagagggtatctcaagccaagggaccattccaggcacattcctttttgctggagctacc

SEQ ID NO: 91736 - DNA, 551 bp, Zea mays
  unsure (1)..(551): unsure at all n locations
agtaggccnntnntagtcnaaccagcactctacgactccctacgcatgcacaaccggtccggaattcccgggtcgacccacgcgtccgagaaggaacgccttccgtccgctgaccgtgaaggaactaatgcgcgcgttcaacgatgccagaggtgatagttcgattggagtcatcattcttacagggaagggaaccaaggcgttctgcagtggcggtgaccaggcgttaagagattctgatggatatgtggacttcgatagctttggccgcctcaatgtcttagatctccaggtgcagattcgccgtcttccaaagcctgtcattgctatggttgctggttatgctgttggtggtggacatgttttgcacatggtgtgtgatataacaattgcagcagagaacgcgatatttgggcagacagggccccaagtttggaagctttgatgcttggtatggatcttccataatggcccggtgggttgaccccaaagaagccgtgaaatggggtttctggcagggtctacacgggttgcaaagctgccaaaagggt

SEQ ID NO: 91737 - DNA, 518 bp, Zea mays
  unsure (1)..(518): unsure at all n locations
agaaggtagagaggtcctgtcccaggctacaagaatcangttcgnactgacaggaattcccgggtcgacccacgcgtccgcacacacacacacacagacaagtggtttccaaagccaagtgtgtgtactagcaaccagctagctggggcgggagcaggcagccatcatgtcggaggagaagcaccaccacttcttcaaccaccacaagaaggacgaggagcagcccgccggcgagtacgggtactccgagaccgaggtggtcaccgncaccggcgagggcgagtacgagaggtacaagaaggaggagaaggagcacaagcacaagcagcacctcggcgaggccggcgccatcgccgccggcgccttcgcactctacgagaagcacgaggcgaagaatgaccccgagcacgcgcacaggcacaagatcacggaagaggtcgcttgccgcgcaggcgtcggcgcccgcggctacgtattccacgagcaccacgagaggatgaagggacaccagggacgcc

SEQ ID NO: 91738 - DNA, 560 bp, Zea mays
  unsure (1)..(560): unsure at all n locations
agggtgaccgttaggttttnnaatcgaaacctcatcgaatacctacagnatgaccncnnnnnnttgnnnnnncgggtcgacccacgcgtccgcccacgcgtccgcccacgcgtccgcaactggttgtgactttgtggtacagggcccgagaactgtggttaggaacaaaggagtattctactgctattgatatgtggtctgtgggctgtataatggctgagcttcttgccaaagaaccgttattcaatggaaaaacagagtttgaacagctagataagatttttagaacactcggcacacctaatgagaagatttggcctggctatgctaaattaccaggtgtgaaagtaaaatttgttaaacaaccgtataatagactaagggataagttcccagccgcttctttttctgggcgaccaatcctgtctgaagctggntttgatctatngaacagactgctgacttatgaccctgataagcgcatatcagcagacgatgctcttaagcacaaatggttctctgaagttccctttgcctaatcaaaagacttatggcaacat

SEQ ID NO: 91739 - DNA, 515 bp, Zea mays
  unsure (1)..(515): unsure at all n locations
aggaagggagtagggtctncggctgcnccctgcncacttcnaccggcgctgaattccgggtcgacccacgcgtccgcagccatcatgtcggaggagaagcaccaccacttcttcaaccaccacaagaaggacgaggagcagcccgccggcgagtacgggtactccgagaccgaggtggtcaccgccaccggcgagggcgagtacgagaggtacaagaaggaggagaaggagcacaagcacaagcagcacctcggcgaggccggcgccatcgccgccggcgccttcgcactctacgagaagcacgaggcgaagaaggaccccgagcacgcgcacaggcacaagatcacggaggaggtcgctgccgcggcggccgtcggcgccggcggctacgtattccacgagcaccacgagaagaagaaggaccacagggacgccgaggaggccagcggcgagaagaagcccatcacctcttcgggtgaccgtagtcccggccggcgcgcgaacgatctaactag

SEQ ID NO: 91740 - DNA, 519 bp, Zea mays
  unsure (1)..(519): unsure at all n locations
agtaagggagggggnnnnnnncctgatgngcagcncagtccgaccgacttgaattcccgggtcgacccacgcgtccgcacacacacacacagacaagtggtttccaaagccaagtgtgtgtactagcaaccagctagctcgggcggcagcaggcagccatcatgtcggaggagaagcaccaccacttcttcaaccaccacaagaaggacgaggagcagcccgccggcgagtacgggtactccgagaccgaggtggtcaccgccaccggcgagggcgagtacgagaggtacaagaaggaggagaaggagcacaagcacaagcagcacctcggcgaggccggcgccatcgccgccggcgccttcgcactctacgagaagcacgaggcgaagaaggaccccgagcacgcgcacaggcacaagatcacggaggaagtcgctgccgcggcggccgtcggcgcccgggggtacgtatttcaagagccacccgaagaagaagaaggaccacagggacccaaggaag

SEQ ID NO: 91741 - DNA, 527 bp, Zea mays
  unsure (1)..(527): unsure at all n locations
nagagggtatttaggggtctcgctgatgcctagctcacttcgtagcaccaccggtcctgaattcccgggtcgacgcacgcgtccgatgcaggggcgctcgcgcgtcggtgtgggagaacttcaaggacaacccgctgttcgacatctcgacggagcacccggcgacgtactacgaggacatgcagcgcgccatcttctgcctgtgcccgctggggtgggcgccgtggagcccgcggctggtggaggcggtggtgttcgggtgcatccccgtgatcatcgcggacgacatcgtgctgccgttcgcggacgccatcccctgggaggacatgagcgtgttcgtggcggagcgggacgtgccgcgcctcgactccatcctcacctccatcccgctgcccgacatcctgcggaggcagcgcctgctggcgagggactccgtcaagcgggcgctgctgttccaccagcccgccaggcccggggacgccttccaccaggtgctcaacgggctggcgcgcaagctgccgcacggn

SEQ ID NO: 91742 - DNA, 530 bp, Zea mays
  unsure (1)..(530): unsure at all n locations
naggaggcccnatagggtcnactacgatactaccgcatcttattgtagcactcccggtccgtaattcccgggcacacgcacacacagacaagtgggttccaaagccaagtgtgtgtactagcaaccagctagctcgggcggcagcaggcagccatgatgtcggaggagaagcaccaccacttcttcaaccaccacaagaaggacgaggagcagcccgccggcgagtacgggtactccgagaccgaggtggtcaccggcaccggcgagggcgagtacgagaggtacaagaaggacgagaaggagcacaagcacaagcagcacctaggcgaggccggcgccatcgccgccggcgccttcgcactctacgagaagcacgacgcgaagaaggaccccgagcacgcgcacaggcacaagatcacggaagatgtcgctgccgacgcngaccgtcgcaccgggcggctacgtattcaacaagaacaacgagaaggataaaggacaacaggaaccccgagaggcccacccgccagaca

SEQ ID NO: 91743 - DNA, 541 bp, Zea mays
  unsure (1)..(541): unsure at all n locations
aggaggcncgtagaggtctgcaatatgacgacttaaggggaggtacgtaaacactcaccggtccggaattcccgggtcgacccacgcgtccgctgaacccttcaaacaaacctggaaggatcaccataattacaaggatgggggcagagaacatgagagtgaagttgcctcatcttatccgtgctgttcgcaatgctggattaattgtcacatggattactgatcctatgcatggaaacaccatcaaggccccttgtggcctgaagactcgtncatttgactcaattctggctgaagtgcgcgcattcttcgatgtgcatgatcaagaaagaagtcaccccagaggcatccaccttgaaatgactgngcagaacgtgaccgagtgcattggtggatcacggactgtgaccttcgatgacctgacgaccgctaccacacccactgtgacccaaggctgaacgcctnccaatcccttgagcttggctttatataatggcnaaaagcttacgaagaagaggattccgcccgggcttaacaaccc

SEQ ID NO: 91744 - DNA, 528 bp, Zea mays
  unsure (1)..(528): unsure at all n locations
aggatgccgtaggatgttgagatagataaattaagaaataattgaagactctaattcccggggctgagccaccgcggcaacaccggttccaaggcggcttctaaaactaccaaccctttattcaaggccgcaaccaatttcccgggtttgggaacaaccggcaacaagccaaacgcggcaaggccgggaggctcgccgcctttcttcgtgtcagacgtnnccacgaaaaccacccggtggatgggcgactgcttccgatggaccgtttgcctggggatactgcccggtgaaagaacaaaaacagacggacccaccctacttatgacgaggacccatacagctaactcataagtacaactacaggctcgccgggcaagcgctgaacctgagcactgtgggcgacccggacctggtggcgagagaccccgtggtagccttcaagacggccatctggttctggatgacgccgcagtcgcccaagccctcgtgccacgccgtgatgaccggcgactggaggccctccgccaa

SEQ ID NO: 91745 - DNA, 514 bp, Zea mays
  unsure (1)..(514): unsure at all n locations
aggagtnccaggctctgtgcctgcntattcgaatacatcgcactgacttaccggtccggaattcccgggcttgctcttggatacaagtcggttatcatcccgattttcgctattgctgttagcatctatgtcagtttctccattgctgggatgtacggcattgcagttgccgctcttggtatgctgagcacaatcgcaactggtcttgctattgatgcttatggtcccatcagtgacaatgctggtggtattgctgagatggctggaatgagccacagaatccgtgagagaactgatgctcttgatgctgctggcaacacaactgctgctattggaaaggggtttgccattggttcagctgctcttgtgtccctggcgctntttggtgcctttgtcagcagagctggagtgaaggtcgtcgacgttcctctcccccaaggtttcataggttcgattgttggagccatgcttccctactggttctttgccatgaccatgaaaagtgttggaagcc

SEQ ID NO: 91746 - DNA, 531 bp, Zea mays
  unsure (1)..(531): unsure at all n locations
naggaggcnctttggagtgtgngtctagctctcgggggggngaagaagagtactcaattcccgtgtcgacgcacgcgtccgagacgatcaagacaaatgtcatgggaactttgaatatgttgggtctggcaaagcgaattggtgcaaggtttttgttgactagcacaagtgaagtttatggtgatccgcttgagcatccacagaaggagtcatactgggggcacgttaatcctataggtgttaggagctgttacgatgaggggaagagaacagcagatactttaactatggactatcatcgaggtggtggtgtttaggtgcgtattggccgtattttcaatacctattgtcctcgtatttgccttgaccatagtcgtgttggcaggaatttttttgcacaagcacttgcaaagccaacgattacagtctattgttaccggaaaccaacttcaagttttcaatatgctgcctatcctggtgctggactgaatgctctaattgagagggatcataatggtccttttaacctgg

SEQ ID NO: 91747 - DNA, 535 bp, Zea mays
  unsure (1)..(535): unsure at all n locations
naggaggcacgtagaagtttgtatatatctacaagcaacttatcgcagnacttcccggtcctgaattcccgggtcgacccacgcgtccggtagctgtagactgtagttctgttcctccccactcactcctgcgcttcctcgccgcgcggttcctggtccctgatcctcctttggcttcgcggttcatggcgatgtggagggccgccgctaggcagctggtcgaccgggcgctcggctcaagggccgcgcacacgtctacaggcagcaaaaagatagtcggngtgttctacaaggccggggagtatgccgacaagaaccccaacttcgtcggctgcgtcgagggtgcactcggcatccgcggctggctcgagtcgcagggccatcaatacattgtaaccgattaccagggaaggccccaactgtgaacttgaagaagcacattgaagacatgcatgtcctggataccaccccattccaccaagctatgtcacttganaaagggttaaaggacgccaaaaaatcttgaactctctcc

SEQ ID NO: 91748 - DNA, 521 bp, Zea mays
tagtaggccagtggtgtggccatgaaatcttgtcaggatagcatgcctctaccggtccggaattcccgggtcgacccacgcgtgcgcgtcactccaacgctctagtcgacgtgctgccgccggaggccgactccagcatctggttgttagcatcgtcggagaagcccaacgtcacttacaacgatattggaggatgtgacatccaaaagcaagaaatacgggaggcggttgaattacccttgactcatcatgagttgtacaagcagattggtattgatcctccaagaggggtgcttctgtatggtcctccgggtactggcaagaccatgcttgccaaagcagttgcacatcataccactgctgcttttatcagggtcgtcggttcagagtttgttcaaaagtccttgggtgagggccctagaatggtgcgtgacgggttccgtttggccaagaagaatgcccaagcattaatttccattgatgaggttaatgctataaccccttgctggtttgatgcctag

SEQ ID NO: 91749 - DNA, 524 bp, Zea mays
  unsure (1)..(524): unsure at all n locations
aggaagttncggaggtctttgatggctagcnncctcagtncactancgcattgacttaccggtcctgaattcccgggtcgacccacgcgtccgccccgcagccgccctagcacccgcgacgagcaggatctgcccagttgctcttgcggtagttccggcaactgtcaccatgcagaacgaggagggtaagactgtggacctctatgtccccaggaagtgctcggccacaaacaggatcatcactgccaaggaccatgcctctgtccagatcaacattggccacttggatgcgaatggcctgtatgatggtcacttcacaacgtttgctctctctgggtttgtccgtgctcagggtgacgcagacagctccttggacaggctgtggcataagaagaaggctgatatcaagcagtagattttacatctagtttaccaagaattggacaccgncttagctatgttttgaattcatgtcactatatgcaatgtggtgatttcagctggtaccttaaatctgaagattt

SEQ ID NO: 91750 - DNA, 527 bp, Zea mays
  unsure (1)..(527): unsure at all n locations
aggagccccnntaaaagtggctaaggaactacggggagaggaggtatagccttccacggtccggtcgacccacgcgtccggcgccgccagacactccgtagtctgtaccccaagcaccggctcggcggccgcggctaccatggcagggggnaagggacagaaggtctcccagggaaagaaaggtggtaagaaaaagaccggcgatcccttctctaaaaaagactggtatgacatcaaagccccatcggtcttcaatgtgcgcaacattgggaagactctcgtgtccaggacacaaggtaccaggattggctctgatggtctgaagcacagagtctttgaagtttgtctagctgatcttcagggtgacgaggatcaagcttacaggaaaatcaggctccgtgctgaagatgtgcaaggcaagaatgtgctcacaaacttctggggcatgaattttaccaccgataagctcagatctctagtaaagaagtggcagacattgattgaagcccatgttgatgtcaagacan

SEQ ID NO: 91751 - DNA, 522 bp, Zea mays
  unsure (1)..(522): unsure at all n locations
naggaggcctttaaatgtctatatgatgatatttgtttggaaaatatgactcaattcccgtgtcgacccacgcgtccgctgtccactttccccgtgcttctccgccgtcgatgccgcgttccagtgcgaagagactccgactcagatngccagccnctgggtccggccccaagtgtacccgctgttcgcggcgacaggcgtggccgtcggcatctgcgggtttcaactcttccggaacatcactggcaaacccggagtcaggggtaacaaagcaaggaaggcaactggtgtgctttagaaccctgaggaagggagacgttaccccatgcatggcctaaaaaacttttttcacgaacagacttcttagatcattcctgcagttaacaaggtctttaattaccctaaatgaagccttttgattggcatactactactactaatttcttattgggaatttacacttttgttgccacttcatattgttgggaccttcaatgccttttaaaggtcctttaacccctt

SEQ ID NO: 91752 - DNA, 523 bp, Zea mays
  unsure (1)..(523): unsure at all n locations
naggagcacgtgaagtcgttagatgaatattatagtggataattgtattactcaattcccgtgtcgacccacgcgtccgcctnccccaacccgccctacgacctgacgtccttccggttcagccccatcaaggagtccatcgtgtggcgcgagatgacccggcgctacatgacggacatgatcacccacgccgacaccgacctggtgatcgtgggcgccgggtccgcgggcctgtcctgcgcgtacgagctgtccaaagaccccaccgtgagcgtggccatcgtggaacaatccctgtccccgggcggccgcgcgtggcttggccggcaacttgtcttggccatggtggtgcgcaagccggggcacctggttcttggaccaacttggccttggcctacgacgaagccgaagactacntggtggtcaaaccacccgggctggtcaacgtcaccctgattaacccggttcttgcncgggccaacgttgaaactgtcaacgccgttgccgttggaggacctaatct

SEQ ID NO: 91753 - DNA, 526 bp, Zea mays
  unsure (1)..(526): unsure at all n locations
tagggagcccnntaaaggttgcaagatggggagatgagagaaatcattgcaggtcccgaattcccgggtcgacccacgcgtccgcaaaaaaaaaagaagccgttggagcgcctccctctcaaacggcactcttccccactggcccactcctgcgctccgtcccgcatacaaatcgtccgccaacaatcccccaaaccctactccaccacgcgatcaccgaccgacgcctctccgacgagcaactcaaccccccaccgcgcacgcgagagccggatccccacgatggcgacgatccagcaccaggcgaaaccggcggtggcggcggcgccgagcacgactactggcggtgggcagcgcgcgatggacctctacgagaagctggagaaggtcggagaggggacctacgggaaggtgtacagggcgcgggagaaggcgacggngcggatcgtggcgctgaagaaacgcggctccccgaggacgacgagggcgtgccccccaccgcgatgcgggagtctncttgctgcgg

SEQ ID NO: 91754 - DNA, 530 bp, Zea mays
  unsure (1)..(530): unsure at all n locations
nagtagcncnttaaggtgtgatggggtatatgtgggttgagggaaagcacgtaccggtccggaattcccgggtcgacccacgcgtccggaatcaagggagggtgaagcaccgccgctgaccgctgtccccggctccccgccgccgcacaaagacgagaggaagaggttcccggcggcgccacgactatgtcgtcgatgatgaacgcgctggcgaactggctggcgaacccgcgccgcaacccgctggcgcgcctccacatgcacgccgtctcctcgcgcctcaggaaatacggactgaggtacgacgacctctacgacccctacttcgatctggacatcaaggaggcgctcggtaggctgcctagggaggtggtcgacgcccgcatccagcgcctcaagcgtgccatggacctctccatgaagcaccagtacctcccggaggacctccaggcacagcaggttccattcagaggatatttgagtgacatgttggcgttggtgaaaaaggaaagcgccgagcgtcagtcact

SEQ ID NO: 91755 - DNA, 523 bp, Zea mays
  unsure (1)..(523): unsure at all n locations
nagaggccttagaggattgtagttagatggggggaaagtagtgcaagtcctgaattcccgggtcgacccacgcgtccggcccattatgctactctgcctagcagggacgtggtccatccacatttccattgagccaaaaatattgtacntgtgttttcatgtttccacacaagaacagaaaggggctaaaatatttttcctttttgtcaggattgttgcttgatcccagaatcaccattctatttggaaggcgaaggcggactttttagatacatagaaaaacgtttgaaggacaatggtcatatggttatccgtgttgcttaaggtgctggaccgaaacttattgctgaaaccatgcaatcaattgggaaagatgcttcaagccaccaacttgttcttggaggtggcccttggttaatctaaaagattaattgacctttccaggaaaaccaggttaccattaatcttgagttccttgattccacctacatgattccttccattccaagccatggttcttatt

SEQ ID NO: 91756 - DNA, 521 bp, Zea mays
  unsure (1)..(521): unsure at all n locations
naggagaggcggagaggtgtgctgactgagnatatgatcactccgcatgcactctaccggtccggaattcccgggtcgacccacgcgtccgggattttcaacacctatgggcctaggatgaacattgatgatggccgtgttgttagcagcttcatgtgctcaggctgtgcgcggtgagcccctgactgtccagaggccaggaacacagactaggagtttctgctatgttgccgatatggttgatggtcttattaagctgatgaatggaaacaagactggaccgattaacttggggaacccaggtgaattcaccatgctggaacttgctgagaatgtgaaggagttgatcaacccagatgtgacagtgacaatgaccgagaacactcctgatgacccccgtcagaggaagccggatatcacanaggcgtaagaagttctgggatgggagcccaagatcgtnctgcgggacggcttggtgctcatggaggatgatttccgggaacgcttgaccgtgccaataa

SEQ ID NO: 91757 - DNA, 520 bp, Zea mays
  unsure (1)..(520): unsure at all n locations
naggagacacgtggagattgtaagtggagaggggggcatagctgtagtactcaattcccgggtcgacccacgcgtccggaatgccaagcagagcctctacccggatgtggaccaatccaaccctgatctcaacacccctttcttgtccncacgcaccaccttcaccggcgccggcgccggcgccgncacgggcaactccctctaccccaccgtcgaccccaacgagctcgcacagaacctcttccccgagacggtcgaagaagacccggaaccgccaccgcccaccacagaggagaccatcatcgctgtccccggggcgcagctccacctcatcgaccccgaccgcagcgtcgacctcggcgctggcacgctctccatcgtgcgcctccgccagggggaccactccgtcgccgtcctcgcgcgcctgatccacgagaagtcccaccgccgccgcggcctcttccgcttgttcagcagcgggcggtctgacgctggcgccgagcaggagcccgtccagtgg

SEQ ID NO: 91758 - DNA, 522 bp, Zea mays
  unsure (1)..(522): unsure at all n locations
nagggtcccttnaaagctgtaagaactagtgggatgagagggaaccgtcccggtccggaattcccgggtcgacccacgcgtccggagaagcgaaaccgacctttccccctcccccgcattccacctcgcggagatccagtccagccctagggtttcgccagcggcgagccaaactccacgagcgggggaagaggggaaagcagggacgacgagggggcagccatggggcagcagtcgctgatctacgcgttcgtggcccgtggcacggtcatactggccgagtacacggagttcaccggcaacttcaccaccatcgcctcccagtgcctcatgaagctccccgcaagcaacaacaagttcacctacaactgcgacggtcacactttcaattacctcgtggaagacggattcacatactgtgttgttgctgatgaatcggtggggcaacaaattcctattgctttcatggatagggttaaggaggatttcacacaaaggtatggtggcgggaaagctgctact

SEQ ID NO: 91759 - DNA, 528 bp, Zea mays
  unsure (1)..(528): unsure at all n locations
naggaggccttaaaagtctatcgaaagaagtagttgggagagtaatgaagtcctcaattcccgggtcgacccacgcgtccgaatggaattaaaggtccccggttaagaattcttcccgtgaatgcttccttcgaattaatggctggggcagccgggtcttaacaccttggttgatgcttttgtcatccgcaatccatccagagcgaatccagctaacccttcgattgagtttggacctgagttcaagaaggttgccaatttccttgctcggttcaagtccattcccagcatcgtcgagcttgacagcttgaaggtttctggtgatgtctggtttggttctggaattacgctcaagggcaaagtgacaatcaccgccaagtcttgagtgaagttggaagttccagatagagctgtatttgaaaaccaggatgtcaatggccctgangatctttaagctatgcttgccgtcaccagttttttccaaagatttgtcaataggagcagncaacccaaatcacttccactgaa

SEQ ID NO: 91760 - DNA, 516 bp, Zea mays
  unsure (1)..(516): unsure at all n locations
nagaaggccaaggtctgtgactgaaactcgcatatatgtatgactcaccggtccggaattcccgggtttttttttttttatacaaacaacaggtttaccacacacaaaacatggatacatcacatgcatgtagcattatgcatgccgcaagaacatcaccaccgcaccaccgctagctacaaccagtcacaaacggctaaataaattaaacaccaagtctccacaaacagatactgacctaatagtaaagcatacaccaccaaatgaaacagatccaactctccaatgcaggcaggtaattaaactaaaaagcagtagaacacaagctatatatatagctagctagacgtacggtacgtgcaaggcccaactactgctcgtatggagctaggggaaaccacgaaccacgcatgcatgaagacgacgacgtactacagtaccattactctactacaacgcacgctggttacccaaacctagttcaacaacggatcggacggcagacggaattaaggt

SEQ ID NO: 91761 - DNA, 524 bp, Zea mays
  unsure (1)..(524): unsure at all n locations
nagagagcctcagaggtgtgctcatagtanattccgcatagatagcatgcactgcaccggtccggaattcccgggtcgacccacgcgtccgcgagcgacgaagcgcgcagaaagagaagaacctcggagctgagatggcacaagccatggcgtcgatgaccggcctctcgcagggcgtcctgcccagcaggcgcgccgacagcagaaccaggacggccgtcgtcatcgtcagggcgtccgcggagggcgacgccgttgcgcaggcgggccgncgcgccgtgatcgggctggtggccactggcatcgtcggcggcgccttgtcgcaagcggcgcgcgccgagaccgtcaagaccatcaagattggagccccgncgccgccctccggtggactccccgggactctcaactctgaccaggcgagggacttcgacctncccttgaaggagcgntctacctgccagcgctgccgccggcggaagcggcggcaagggtgaagacgtcggcccagggcattattcacctca

SEQ ID NO: 91762 - DNA, 523 bp, Zea mays
  unsure (1)..(523): unsure at all n locations
nagaatgccgttgaatattgtatttgataggtcggagagagtaatgtaggtcctgaattcccgggtcgacccacgcgtccgcagcacagtcatccacactaacgaacgaactcttgctccgatcacgagctagctgaagtcgaccatggcngctgggcttaacagcaagaagacccccgaagccgtggtggccgtgcttgtggcggccgcgctgctggcttcgtccgcttcggcggcgatcacctgcgggcaggtggggtcgtcgcttgcgccgtgcattccgtacgcgacggggaaggccagcgcgctccccgcgtcgtgctgcagcggcgtcaaaagcctcaacaaggccgcgccgaccagcgcggaccgncaggcggcgtgccgctgcctaaagagcctggccaacagcgtcaagagcgtcaacatgggcaccgtcgccaccatccccggcaagtgcggcgtctccgtcggattccccatcagcatgtncaccgactgcaacangatcagctaaagtacg

SEQ ID NO: 91763 - DNA, 529 bp, Zea mays
gagtaggccgttgaactgtgtagggggtaggggggaatattcgcaggtctctaattcccgggtcgacccacgcgtccggtgggtgagcggatcgagatggcggcgtcggatgttgagtaccgctgcttcgtcggcggcctcgcgtggggccacggacgaccactccctccacaacgccttcagcacctacggcgaggtcctcgagtccaagatcatcctcgatcgggagacgcagaggtcccgcggcttcggcttcgtcaccttctccacggaggaggcgatgcggaacgccatcgagggcatgaacggcaaggagctggacggccgcaacatcaccgtcaacgaggcccagtcccgcggcggccgtggaagcggcggcggcggcgggtacggtggtggccgtggaagcggcggctacggcggtggcgggcgccgtcgttgcgagctccccatcttccttcgttaaccatggcgacccagatcagcaagaagaagaagttcgtcagcgacggcgtgttctacgccgagc

SEQ ID NO: 91764 - DNA, 520 bp, Zea mays
  unsure (1)..(520): unsure at all n locations
nagaagccngtaaggtctgttctggaatgtctgtgtgagaagtgtagtcttcaattcccgggtcgacccacgcgtccgactgacgagagggggagagagagaggcgaggaaggaggaaaaaaccccggggctttatccaaaatggattccggggccaaagttgttaaaaaaggccgcgccgggccttcccggcggggccggccccaaaaaaaacccgtcttttgcttcctgaaaggccgccttcaatttcccctaaggccgtattgggccgctacttaaaccagggtgctactcccacctttcgcaaccggggcccccgtctacctcgctgccgtccttcaatacctcgccgccgagctcctcgagttgccggggaacgcagcgcgggacaacaagaagaaccggatcatcccgcgacacgtactgctggcgatccgcaacgatgaggagctcgggaagctactggccggcgtcaccatcgcacacggccgggttctgcccaacatcaaccctgtgctgn

SEQ ID NO: 91765 - DNA, 523 bp, Zea mays
  unsure (1)..(523): unsure at all n locations
naggagcccnttaagtctcctaagtantatgtggggagatgggaaaccgtcccggtccggaattcccgggtcgacccacgcgtccggaacctggtactcttgcaccaactggtcttttcgttggaggtacaaagtacatggtgatccaaggtgaacctggagttgtcatccgaggaaagaagggcactgggggcattactatcaagaaaaccggcatgtccttgattattggtgtctacgacgagccaatgactccagggcaatgcaacatggtggtggagaggctcggcgattacctgatcgagcagggcttctaaaagttcgtcatgttctgttttggtcatttgggcaccaaagtttgcgcctcatttggttctgtaatccgtgagctcgtgcatgtacttggcgtattgcatgcagtgaataatttagcttgggtttgtttgttgggggcagtgttggggacggatttggattggggtttatgcttggcatcgcgtcgtatcgaaactcagctgctgtt

SEQ ID NO: 91766 - DNA, 535 bp, Zea mays
  unsure (1)..(535): unsure at all n locations
naggagcncntnaaggtcgtgttgttgcgtaaggggggaataaggaaaccttcccggtcctgaattcccgggtcgacccacgcgtccggttttcatgttacatcaatgacaactgcaggaagccgctggggtgtagttatgtcaaggaactctggatactctgaacaggtagtggagttggattttctttatcctagtgaaggtattcaccgacgatgggagaacggatatagaataacttctacagcagctactggcgatcaagctgctttcatattgagtatacctaaaagaaagttaatggatgagacacaagaaactcttagaacatctgcttttccaagcaaccatgtgaaggagaaatgggccaagaacctttacattgcttcaatatgctatggccggacagtgtcatgaggcttgctcggctgcatccctagttggggaagaacatgttctgatgaagttttttttggaaaaaaggcagcattctttgtggctgctctctattaatctctgaatgtgtaggtacccc

SEQ ID NO: 91767 - DNA, 519 bp, Zea mays
  unsure (1)..(519): unsure at all n locations
agcagcctttgagtcttcgctagcnctactgcatagttatgcagcaatcatctctccttaattcacggtccacccacgcgtccggttttcaggtacatcaatgacaacttcaggatttcgctggtgtgtagttatgtcaagggactattgatactattaacaggttgtgaagttggattttctttatcctagtgaatgtattcaccgacgatgggagaacggatatagaataacttctacagcagctactgtcaatcaaactgctttcatatagagtatacctaacataaaattaatggatgatacacaagaaactcttagaacatctgcttttccaatcaaccatttcaatgagaaattgcccaataacctttacattgcttcaatatgctatggcacaacaatgtcaataagatttctcggattcatccctaagtttgaaaaccatgttcttataattatctattaggaaaaaacagcaatctttgtacttattcttattaaactttcaatttgttt

SEQ ID NO: 91768 - DNA, 534 bp, Zea mays
  unsure (1)..(534): unsure at all n locations
naggagcacngtgaagtctntagaggagtaacgggtattaatggatnacttcccggtcctgaattcccgggtcgacccacgcgtccggttttgtcatgcatgtgctgcgttcgcataggacgggaagctggtggctgcagtcggcgccagtggtggcggcatgatccccgccggaacgatcgaggtgttcatcaaccatttcgtcaagaacatggacccgttggcttcggtcatggcgccaagggtgtatcaccagctgatcccaaacgaggtcaggtacgagaactggacgacggtgaccggcgaccacttcgagctcgacgccgncacgagggccgacctgcacaggagaggccacgtcctgacgccgatagctggagggaccataagccaacttgtggtgcacaacgtncggcgccaaagcgaccttaccgncgttagcgaccccaagaaaaggcgtggtcccgccggtactgagcaggatcggatttccaagcacggttcattagtcccctgctgatccgtgtgtgatgg

SEQ ID NO: 91769 - DNA, 543 bp, Zea mays
  unsure (1)..(543): unsure at all n locations
nggggtgnttgngtaagagccctttaagtctgtaggccgtgtttgtgaatactgcagtaccgaattcccgggtcgacccacgcgtccgttgcttggctctgtctgaatgcaccaaagagtccaatcattgcttcagcctggcttacagttgctggtggattggaatccttcggccactcaggtttcttagtaaatctacaggagattgccccacaatatgctggagtcctacatggaatgtcaaatacagctgggacatttgctgccattctaggaactattggagcagggttttttgttgataggatgggttctttccgtggatttttgatattgacgtcgctcttatacttcagcagtgctcttttctgggacatctttgctactggagagcgtgttgattttgatggcactggctagcaactcagaggaactctgcggttttctgtccttaaaacacataatgttgattcaagacaatgtttttaccggcaaccatcaagaagttatttgcacctgatgataaacaacttcagttacgaa

SEQ ID NO: 91770 - DNA, 523 bp, Zea mays
  unsure (1)..(523): unsure at all n locations
agaagccngtaggatgtgtagaggagagaggggagagctttcccggtccggaattcccgggtcgacccacgcgtccgctaactacccccgcgctggctcgccaccaccgccgcagcaggcgtgggaatctgggcagcgccccgcggagaagaggangcagcgcgctctccgtccgccatggcgggctcttccgaccccgaccagctcatgagcaaagccgacaaactaacaaaattgagttttacaagatggaatgctgattggaaaagcgctacctncttgtatgagcaagctgcaattgcgtataggttcagaaaggacaatgagaaagcaaaagatgcttttgagaaagcctcaaaaggacaggaaatgatctcctcaccatgggacgctgctaagcatatggaatctgctgctgctttagcaaaagagcttgggcgctggaatgaagtatctgaattctatcacagagcttcagaattataccgtgaatgtggaaggccacaacctgcatctgatgctc

SEQ ID NO: 91771 - DNA, 530 bp, Zea mays
  unsure (1)..(530): unsure at all n locations
nagaggcnctttaggtcgcgtataaattacacgcaaagtataggatcactcccggtccggaattcccgggtcgacccacgcgtccgaacgcctgcatcaccaacagcaacaccgccatctagatcagaaacttcctcggcgagaagaaggtcaggaaggtggacatgcttgatggcgtgaccatcctccggtccgagaaggtcaaggatgagctcatccttgacggaaacgacgtcgagctcgtatctcgctccgacgacctcatcaaccagaaatgccatgtgaagaagaaggatatccgaaagtttttggacggtatctatgtgagcgacaagggcgtcatcgaagaagaacaatgagcgacagtggtacccaaattgccagaaattgattttgatggccgttgaagtggcattttgccaggactaattgtgaaccttttcttaattccttaattagttgactgccaatgttcctggggttcaaccgaattttagtcctaattacttggattttgccgaatccaaaag

SEQ ID NO: 91772 - DNA, 524 bp, Zea mays
  unsure (1)..(524): unsure at all n locations
nagggagggcacagtggtctgtgatatganattcgccatatattgcatgactcaccggtccggaattcccgggtcgacccacgcgtccgctcgactcctctgttaaaaagggttatgctaatgacaagtcaaacataaccctttttgacagaggagtcgaggacattaatacaacacaatgcggcacaaatatatccttctatagaaaaaaacctaatctatagttttcaggcaccatgtcactcatgtctccattcccaaggatggatctaagtaaaatggatcccgcgactctgaccctccttggggcagctggttgtgtaatgctgactatgcatttcactgtgcaattggtgtcacaacatctcttctattggaaaaaccccaaggagcagaaagctagactaattattgtgctaatggcctcactatatattatctcttcctttgtggggtctcttgatatcccaggtaacaagacattttttacattcttggatgcttgtaaggaatgctatgaagca

SEQ ID NO: 91773 - DNA, 518 bp, Zea mays
  unsure (1)..(518): unsure at all n locations
aggaagggcagaggctgtgngcatgaggcactgcacacttcgcatgnacataccggtcctgaattcccgggtcgacccacgcgtccggcaaatcaaacaaaactggctatgaatcactactgagggtatatagggaaaccgatgtaagccaggagaaagttcgtgtgttaggttctttggcatcatcccctgaccatgatgttgtccgtgaagtattgaatttcatattgtcacctgaggtgaggaatcaggacgcaatatttttgctaagaggggtgagttcaggggcacacgaggtagcatggcaatggctgaaggaaaactgggattacatattgggagcctactctggaactctgctcacctatttcgtcaacataactgtctcgccactggccaccgacgaacatggtgatgaggcggangagtttttcaagagcagaaccaaggcgaacatcgcgaggactgtgagacagagcatcgagagggtgaagatcattgcccaatgggtcaagacc

SEQ ID NO: 91774 - DNA, 570 bp, Zea mays
  unsure (1)..(570): unsure at all n locations
gggatatgtnggaggggttcccccttagggtcgtagnaaggggctatcaagccatagatctgaatgcagtcatcggtccttaatcccacgcgtccggcgaagtttccctcaggatagctggagcccacacgagttctatcgggtaaagccaatgatttgaggcaattaagggcaactcttatgtcattgttgcttgcttctgtggagtccaacagatgtttcgctaacataattcgacttgagtgaaaaaataaaaaaaagggcggccgctctagaggatccaagcttacgtacgccttcatgcgacgttatagctcttctatagtgtcacctaaattcaatttacttgccggcgttttacaaccgttctgactggtaaaaacccttgcggtttcccaacttaaattgcttgcaacacattccccttttggcaggttgcgtaattaccaataagcccgaaccggatcgcctttccaacaagttcccaagctctaaatgccaatgggcagctccctgttcccgcgcattaacccccgcttgtttttgggggttccccacactttacccttt

SEQ ID NO: 91775 - DNA, 547 bp, Zea mays
  unsure (1)..(547): unsure at all n locations
gtgtagaaggagaggccgtgggttctggctgagacctcgataccgtcgtannaccatcggnntgaattcccgggtcgagaacgcgtccgggcggtaggcttgaccacaacgaggtttactgcggatcttgttatggtgctgaggagtcggatgagcggtgttgcaactcctgtgaagaagttcgtgatgcgtatcgaaagaaagggtgggctgtcaacaacgtagaattaattgatcagtgcaagagggagggctatgtacaaaggttaaaagatgaacaaggggaaggttgtaccatccatggatttgtaaatgtgaataaagtagctggcaactttcactttgcccccgggaaaagcttggaccagtcattcaacttcctgcaggacctgttgaaccttcaaccagaaacttacaatgcaaataagccacaagataaataagctgtcctttggggaagagttcccaggtgtagtcaatcctcttgatggaattgaatggataccggataacttcaatggattaacggggatgtacccctattttt

SEQ ID NO: 91776 - DNA, 519 bp, Zea mays
  unsure (1)..(519): unsure at all n locations
aggaaggcagagtgtatgatgccaaaggccagntaatctgtatgactttcggtctgaattcccgggtcgacccacgcgtccgaagcgtgatcagctcggtgccaacaaaacctcatcaaccaagtgtcatgtctgatctggacgatgagcttgcatctgcctttgatccgtttgctgaggcaaatgctgaggactctggagctggtcctggaacgaaagattatgtgcatgtgcgcatccagcagcgcaacggcagaaagagtctgactacagtccagggtctgaagaatgagttcagctataacaagatcctcaaggatctgaagaaggaattctgctgcaatggtactgtagttcaggacccagagctaggccaggtcattcagctccaaggtgatcagcgcaagaatgttgctactttcctagttcaggctgggattgcgaagaaggagaacatcaggaatcacgggtttctaagggacctgtaaatgcctgggccctaatattgtgtgccctcag

SEQ ID NO: 91777 - DNA, 517 bp, Zea mays
  unsure (1)..(517): unsure at all n locations
ggtaagaggggttttnttctgagtttgatgcatgctctaccggttcggaattcccgggtcgacccacgcgtccgcaggtttatattcgaaacagataaacataatggtgttgcagagttgttggagatcctgggcagtattatcaatgggtttgcccttccgcttaaggaagagcacaaattattccttgttcgtgcattgatccctcttcacaagccaaaatgtgtatctatgtaccatcagcagctatcatattgcatcacacagtttgttgagaaggattgcaaacttgctgacacagttattagaggcttacttaaatattggcctgtgacaaacagctcaaaggaggtgatgttcttgggtgagttagaagaggttttagaggcaacacagcttgcagagttccaaagatgcatggttccactcttccgtcagattgcccgtagcatgaacagctctcatttncaggttgccgancgggcctttgttctctggaacaatgaccatttcngaa

SEQ ID NO: 91778 - DNA, 505 bp, Zea mays
gttgaggacgtcgatatggaggagagacggtattgctatacccgtccggaattcccgggtcgacccacgcgtccgctcacctgaacttaaagctaatcattccatacaacaaattgttgaagttatttcagatgatgagaagtatccaagactcagtaagctcttgtctgatctaatggatgggagccgtatcttgatattcttccaaacaaaaaaggattgcgataagatcacccggcagcttagaatggatgggtggccagcattatctatacatggtgataaagctcaagctgaacgggactatgttcttgcagagtttaagagcggcaagagccccataatggctgccacagatgtggcagcacgtggtcttgatgtgaaggacataaagtgtgtgataaattatgattttccaacaactcttgaagattatattcacaggataggtcgaactggccgtgctggtgctagcggaactgcatttacttttttcacacacgca

SEQ ID NO: 91779 - DNA, 520 bp, Zea mays
  unsure (1)..(520): unsure at all n locations
gttgaggatgtgtttgatctatgttgatggaaggtattgtatacttgttcggaattcccgtgtcgacccacgcgtacgcggacgcgtggccaaagccgtcgccttctaatccatcctttcttagcaacgtcagttggctgggatcacttaaacattggtaaaggctgttgctgtgctgggtagcagcagatcgtggtcaagggcaccatctttttcacccaagtgggagatggccctaccactgtcaccggaagtgtctctggcctcaagcctggcctgcatgggtatcatgtgcatgctcttggtgacactaccaatggctgcatgtcaactggaccacactacaatcctgctagcacggaacatggagcaccagaagatgataaccgccatgccggtgatcttggaaatgatacagctgtagcaaatggtgttgcaaacattaatgttaccgacagccagatcccactgactggtcccaactcaatcattggcaatactgntgatgttcacgctgacc

SEQ ID NO: 91780 - DNA, 504 bp, Zea mays
ggtgaggggtctatacgagggggagggaatagtatgctctaccggtctcggaattcccgggtcgacccacgcgtccgatctgtagtccctatccacgcatcacgctctcaggccctaaggtacctgtgtatacgaggggggatagaagtgccaaatgttgcagtcctcgtgggtgaaagcggcgattcagattacgaggaactgctggggggtctccataggaccgttatcctaaagggcgagttcaacatcgccgcaaacaggatccacacggtgaggagataccccctgcaggatgtcgtcgccctcgatagctcaaacatcatcggtgtcgacggctacaccacggatgatctgaggtctgccctgcagcagatgggtatactggcacggtaacaccttccggagcttccgtttccactaccaggtcaacgaagagaaacgagaaaacagacagaatggtgacgaaacaagtgcgaccgtttccatgctcgatgggaatgg

SEQ ID NO: 91781 - DNA, 504 bp, Zea mays
gggtgaggggttttatatggaggggggaaaagatatgctgtaccggtccggaattcccgggtcgacccacgcgtccgccaaagtgcgatagccagattgacttcgtcaagagcttcaaaggagcagcacaggtacgtgagaagaagggctatacggagttcactcctcattacattacctggtactgcccagaggccttcattctgagcaagcagtgcaagtcccagtgcatcaatcatgggaggtactgtgcacctgacccagaacaggattttagcaaaggatatgacggcaaggatgtggtggtccagaacttgcgccaagtttgtgtctttaaggttgctaaggagcacaagaagccttggttatggtgggactacgttactgattttgcgattcggtgcccgatgaaggaaaagaagtacacaaaggagtgtgccgatggagttatcaggtcacttggccttgatcataaggcattagataagtgtatgggtagatcca

SEQ ID NO: 91782 - DNA, 498 bp, Zea mays
gatggtatctgaatgtcgggatgaggggagaattttcccggcatgggattaccgtcccgacccacgcgttcgaaggaggaaaaaggttttaaccttccaacgagggtgctgttgttgaagtcaaaattatgggaaagcttcaagatggcgcggtgtttacaaagaaagggcatgacgaagaaccatttaaattcaagaacgatgaagaggaaattattgccggtcttgatcgtgctgtgttgaacatgaagaagggcgaagttgctcttgtcacaattcctcctgaatatgcatttggttcaactgagtcaaagcaggatcttgctgttgttccacctaacagcacagtaatatatgaagttgagcttatttcatttgtgaaggacaaggagtcgtgggacttgaacaatgaagagaagattgaggcttctggtaagaagaaagaagaaaggaatgcatttgtcaaaatcggcaaatatgctagagcttccaagcgat

SEQ ID NO: 91783 - DNA, 527 bp, Zea mays
  unsure (1)..(527): unsure at all n locations
gaggtnaaggagggatctnatttagaaggtggggggaggagaggagaaatgctggtccgcgaattcccgggtcgacccacgcgtccgagggattctaacaaaggttgccaaactatgaaattgcaaacctagggctctaaagtaggcaaatgatggtccaaagcatctatgagcctgtttgtttcagcttctggcagcttctggccactaaaagctgctacggactgccaaacgctcagcttttcagccagtttctataaaattcgttggggcaaaaaccatctaaaatcaacataaacacataatcggttcagtcgttgtaatagtaggaatccatcactttctagatcctgagccctatgaacaactttatcttcctccacacgtaatcgtaatgatactcagattctccccacagccagattttcaaaaaagctggttagaaaaaagctgaaccaaacaggccctcgtctgccgatgtaagggtgacactgctggaacgagctatgcanggttctcaactacaa

SEQ ID NO: 91784 - DNA, 512 bp, Zea mays
  unsure (1)..(512): unsure at all n locations
agttaggaagatgntttagaggggggggggagagatagatcttgttccggaattcccgggctttttgttggaagatgtctacaggaacccaagcccggttcagtttgaagggccaagtgcccattcaaagcctatgtgagttgtccttgaaggttcagaactttttggccggattaaaaaagttcaggattccttggaaaaggtgaaaaggattgtgaaccctgggtgctcgcaggatgttcttaaagcggcgctgagtgccatgtcttctgtgacggaaacactgaacatcatgacttcatcttctaccggccagactccactgagtcattaggtaccatttcatggtatggatcataatccccacttttttcagtggtggcgattaacgagtttaggaacagcaaccctggtatcatacgggttattctttttgtagccttttggagagttctatcggttttggattcggtagtttatgaaggcttngtgatgagtttgagctcgaataa

SEQ ID NO: 91785 - DNA, 503 bp, Zea mays
gggggagagggtctgtattgaggggatagtatgctatacccgttcggaattcccgggctagccctcgcgccgccgcctcctccgccacccagcgctcgagctcctcgcgtcctgcgagcgcgcgccgcaacgccacgatgaagttcaacatcgcgaacccttccaccgggtgccaaaagaagctggaaatcgatgacgaccagaagctgcgtgccttttatgaccgaaggatatcccaggaggtcagtggtgatgctctgggtgaggagttcaagggttatgtcttcaagatcatgggtggatgtgacaagcaaggcttcccaatgaagcaaggagttttgacttctggtcgtgttcgtcttctgctccataggggcactccctgcttccgtggttatggcaggcgtaatggtgagcgcaggaggaagtctgtccgtggttgcatcgtgagccaagacctatctgttatcaacttggtgattgtgaagaagggtgagaatgaa

SEQ ID NO: 91786 - DNA, 518 bp, Zea mays
  unsure (1)..(518): unsure at all n locations
gggggaagggtggtgntatacgagacggggagttattgcaaagctctaccggtccggaattcccgggtcgacccacgcgtccgaagccgtgggggtggcggctgtcgctgggcctcgcggcggtgccggcgctgctgatgaggttgggcgggctctttcttccggagactcccaacagcctcattgagcgcgggcgcgtggaggagggtcggcgcgtgctggagcgcatccggggcacggccgacgtggacgccgagttcacggacatggtggaggcgagcgagctggccaacaccgtcgagcacccgttccggaacatcctgcagccgcgcaaccggccgcagctggtgatggccgtgtgcatgccggcgttccagatcctgacgggcatcaactccatcctcttctacgcgccggtcctgttccagagcatgggtttcggcgggaacgcgtncctctactcctncgtgctcaccggcgccgtgctcttcntctcgacgctcatctccatcggcatt

SEQ ID NO: 91787 - DNA, 500 bp, Zea mays
atgagaagctttataaggaggggggatagagatgctctaccggtccggaattcccgggtcgacccacgcgtccggcctctcgagtctcgtccacccgtcgtcctcctagctcctctactcgccagtcgccatgggcaagattaagatcggaatcaacggcttcggaaggatcggcaggctcgtggccagggtcgccctccagagcgaggatgtcgagctcgtcgccgtcaacgaccccttcatcaccacggactacatgacctacatgttcaagtacgacaccgtccacggccactggaagcacagcgacatcacactcaaggactccaagacccttctcttcggtgacaagccggtcaccgtctttggcatcaggaaccctgaggaaatcccgtggggtgaggctggcgctgagtatgtcgtggagtccaccggcgtcttcactgacaaggacaaggctgctgcacatctcaagggtggtgccaagaaggttgttatct

SEQ ID NO: 91788 - DNA, 505 bp, Zea mays
  unsure (1)..(505): unsure at all n locations
gagttngtgtctgatggggggggtaaggtgagactctcccggtttcgaattcccggtcgacccacgcgtncgncacctcgccgacctgctcccgcgctgcgtgccgcgcgcgatatacctcgactccgacgggctcgccgtcgacgacgtgcggcgcctctgggagacgcgcctgcccgccgccgcggtcgtcggcgcgcccgagtactgccacgccaacttctcccgctacttcaccgaagccttctgggacgaccccgtcctcggcgccagggtctttgccggccgccgncgcgcgccctgctacttcaacaccggcgtcatggtcatcgacctccggaggtggcgcgttggcaactaccgccagcgcatcgagcgctggatggagatgcagaaggagaaaagaatctacgagcttggctccttgccccccttcctgctcgtcttcgccggcgagatagaggccgtcgaccaccggtggaaccagcacggnctgggcggcgac

SEQ ID NO: 91789 - DNA, 502 bp, Zea mays
  unsure (1)..(502): unsure at all n locations
aggtntttcnccatgggggttaagagaagttctaccggatcgggattaccttccgcacccggttccgcgtgcctttccccacctactctcgcggctctcgccagccagtctagggtttcggtcccggggtgcttatccgcccccgccggccatgtcgaagcaaggagggaaggccaagccgctgaaggcgcccaaggccgacaagaaagagtacgacgagacggatcttgcatatctgcagaagaagaaagatgaagaaaaagcactgaaagagcttaaagccaaagcacagaagggcgcgattgggggctcgggtctgaagaaaagtggaaagaaatgagactggtcacccgtcttcaatacctagaagatgataaggcagctgtctatctgtgttgcgcttcactaagtgtgattgtaacagtggtacctcttgtgttctgtgttccgcgatgttgcagttggttgcttgatcgaaagatgtttcaacctcccatctgct

SEQ ID NO: 91790 - DNA, 502 bp, Zea mays
  unsure (1)..(502): unsure at all n locations
agggntatctgattagtgggggaagaggggagagtttgtcccggtttgggattaccgtcccgacccacgcgtncgcacagncagtcagccacatcactagctatctgtgcagaggcaatggcgtccaaggttgagctggtggtggaagtcaagtccccggctgacaagcttggggcggcgctgcgtgactcgacggagctgttccccaagatcttccccgagcagtacaagagcatcgagaccgtcgagggcgacggcaagtcggccggcaccgtccgcctcctcaagtacaccgaggcggtgccgatgctgacgttcgccaaggagaagcttgagacggcggacgacgagaacaaggtggtgtcgtacagcgtggtggacggcgagctggcggacttctacaagaacttcaagatcacgctgaaagtgactccggccaaggccgaaggccaaggccgcgcccgcgtcagctgggccatggaattcgacaaggccaacgacc

SEQ ID NO: 91791 - DNA, 508 bp, Zea mays
  unsure (1)..(508): unsure at all n locations
gagtngagagggattngttagaggagggagagataaaggtacacctcgttcggaattcccgggtcgacccacgcgtccggttattagtggaaaagctggtgagaggttggagaaaggatcaataattgcttccaaaaggcaaattgatacaaaaattggagcatcatcaacaaagatgtatttccactactacgggcaattattacatcagcaaaacatgttacaagattntgttcggacaggaacatactatgctgctgtaatggaaaaccgatctgactttgagggtcgagttgtggttgatgttggggctggaagtggtattctgtcgttatttgctgcccaggctggtgccagacatgtctatgcagttgaggcatccgaaatggctgaaaatgctcaacgtctaatgtccgggaatccgtcacttggacagcggatcacggtcatcaggggcaaggtcgaggaagtagagcttccagagaaagctgacatattgatttctgaa

SEQ ID NO: 91792 - DNA, 506 bp, Zea mays
ggggtgagagggtctgttaggggggagggagtatggtatacctcgttcggaattcccgggtcgacccacgcgtccgggcaaatattgatgcagcggtcagaaagttttcagacaaattcaccattatgttgttcgattatgatggtcggactacagagtgggatgaatttgagtggtctaaaagagcaatccatgtgagtgccaggaagcagacaaaatggtggtatgcaaaacgatttttgcatcccgatgttgttgccagatatgattacattttcatctgggatgaggatctaggtgtagagcatttcaacgcagagaagtacattgagcttgttagaaagcatgggttggaaatctctcagcctggtttgcaacctgatagaggactaacatggcaaatgactaaacggcgtggtgaccaggaagttcacaaagtaactgaggagagaccaggctggtgcactgatccacatctaccaccatgtgcagcatttgttgagatt

SEQ ID NO: 91793 - DNA, 508 bp, Zea mays
  unsure (1)..(508): unsure at all n locations
ggggggaatgctgnttttactgaaggggggtataagggaatgctctaccggtccggaattcccgggtcgacccacgcgtccggctagccacctgctggaatccttcgtcgcgcatgccactgcacggtcatgtctgactcgtctcgtccgtcgtcgctaggctggctggaaaggtggcgctgatcacaggcggcgcgagcggcatcggcagggcaacggcggcggaattcgtccggcacggcgccaaggtcatcctcgcggacgtccaggatgacctgggacgccacgtcgccgcggagctgagcctgccggggggcccggcccggcggccgtccactacacccgctgcgacgtgaccgacgaggcgcaggtcgcggcggcggtggacctggccgtggagctgcacggccgcctcgacgtgatgctgagcaacgccggcatcagcggcagcctggcgccggcccncgtggcggcgctggacctggccgacttcgaccgcgtcatgggc

SEQ ID NO: 91794 - DNA, 466 bp, Zea mays
  unsure (1)..(466): unsure at all n locations
agtntttctgaagggggaggggggaattccgctcgaaaacgctgacaccgtcgcacactgcgcgtctgtctctcggcgcggacagcccgaccagcgggagtcggctcaggtacccgcctacacgctggggcccaagatctccgactgggacgagcagcgcgccgtctggcaccgncgccacccggagacgccgcctttcctcaacgacatcaagccacgggtgctgctcgtcacggggtcctcgcccaagccctgcgagaaccccgtcggggaccactacctcctcaagtccatcaagaacaagatggactactgccgcgtccacggcatcgaggtcttctacaacatggcgctgctcgacgccgagatggccggcttctgggccaaactcccgctcatgcgggcgctgctcctcgcgcacccggaggtcgagttcctctggtggatggactctgacgccatgttc

SEQ ID NO: 91795 - DNA, 498 bp, Zea mays
  unsure (1)..(498): unsure at all n locations
atggnatctgnaaaggggggatagaggggagagttttcccggatcggagttaccggcccgacccacgcgttcggcctggggcttcatttggatttaaccagacccttgggataagcttgctgtatatggacaggttcttctgactagagttggtatcctttggttttttgctcttccaattctttgcagtcagttcatggatcttgtaactgaacagtgtttatttgtatagatctgccaccagataaagagcctcttgattggaacacacggatgaagatagctgcaggtgcagctaagggcttagaacaccttcacgacaaggcgagtcctcctgtgatttaccgggattttaagtcatcaaacattcttcttggagaaggatttcatccgaagctatcggactttggccttgcaaaacttggtccggttggtgacaagacccatgtttcaacacgtgtgatgggtacatatggctactgtgccccagaatatgca

SEQ ID NO: 91796 - DNA, 504 bp, Zea mays
  unsure (1)..(504): unsure at all n locations
agtgatggtgtttgttatgaggggatagtatgctcgtaccggttcggaattcccgggtcgacccacgcgtccggcctcacgtacacgctggacgagatcgagggcccgctcgaggtcggctccgacggcacgctcaagttcgaggagaaggacggcatcgactacgccgccgtcaccgtgcagctcccggggggcgagcgcgtgccgttcctcttcaccgtcaagcagctcgtcgccaccggcaagcccgagagcttcggcgggcccttcctcgtgcccagctaccgtggctcctccttcctcgaccccaagggccgcggcggctccaccggctacgacaacgccgtcgcgctccccgccgggggcagaggtgacgaggaggagctccagaaggagaacatcaagaacgccgnctcctccaccggcaacatcacgttgagcgtcaccaagagcaacccggagaccggcgaggtcatcggcgtcttcgagagcgtgcagccgtcc

SEQ ID NO: 91797 - DNA, 508 bp, Zea mays
  unsure (1)..(508): unsure at all n locations
nagtgagacggtgtgttagagggggagggatatagttatactcgttcggaattcccggctcgacccacgcgtacgggtggcttcttcttccccttcgggtccggttccggttcctgaaggttttccgggttcgggttgcgtggtcaaccggatcgagatggcggcgtcggatgttgaataccgctgcttcgtcggcggcctcgcctgggccacggacgaccactcccttcacaacgccttcagcacctacggcgaggtcctcgagtccaagatcatcctcgatcgggagacgcagaggtcccgcggcttcggcttcgtcaccttctccacggaggaggcgatgcggaacgccatcgaaggcatgaacggcaaggagctggacggccgcaacatcaccgtcaacgaggcccagtcccgcggcggccgtggaggcggcggcggcggcgggtacggtggtggccgtggaggcngcggctacggcggttgcgggcgccgtgatggccgccgc

SEQ ID NO: 91798 - DNA, 506 bp, Zea mays
ttgaggaggatctgttagcggggaagaggatatagctatactcgtctcggaattcccgggtcgacccacgcgtccggcttatattagtacgaaagcaagggggtcatctaccgcgtgtatcatcactcttaaagatcagggtatccatgctgtaaatcttggggatagtggtttcgtagtagtccgagatggccgcactgttctcaggtcaccctcacagcagcatgatttcaattttacttatcagctcgagagtggaggtggcagcgatcttcctagttccgcacaagtatctcactttccggttgccccgggtgatgttatcgttgctggcacggatggactatctgacaatttatacaacaatgagataagtggtgttattgttgaagctctccgggttggacttgagcctcagattgcagcacaaaaaattgccgccctggctcgacaaagagctacggacaaaaataggcagtcaccttttgcatcagctgctcaaataa

SEQ ID NO: 91799 - DNA, 513 bp, Zea mays
  unsure (1)..(513): unsure at all n locations
tgtgagaatggttttgtttacgacagggaggtatatagcatggctctaccggttcggaattcccgggtcgacccacgcgtccgccagggtggacaaagcccatttgcattgtgaggcatgcattcggcgatcagtacggggggactgatgcagttatcaaggggccgtggaagcttaaattagtttttgagggaaaagaacagcatgttgagctggaggtgttcaacttcactggtgccggaggagttgccttatcaatgtacaacactgacgagtccatccatgcctttgctgacgcttctatggccactgcttatgaaaagaaatggccattgtatcttagcaccaaaaacactattttgaagaaatatgatggcaggttcaaggacattttccaggaggtgtatgaagctggttggaaaactcaaatttgaagctgccggcatatggtatgagcaccgccttatcgatgacatggtagcatacgcacttaagagtgaaggacggtatgtn

SEQ ID NO: 91800 - DNA, 503 bp, Zea mays
  unsure (1)..(503): unsure at all n locations
aggaagagggtcnatttgtgggggggggtagataagctgtaccggttcggaattcccgggtcgacccacgcgtccggcagagactggccttagcctgttgttggagatcttgaaaaaattccaggcttcaggagggcaaaaccaattctacaaaacctactttttgacaattgagcaagagatttttgcagtcctcacagacacattccacaaacctggtttcaagcttcatgtttcggtgctacaacacttgttttgtgcggttgatggtctaacggagcctctatgggacgcgtcttctgtaccttaccaatatacggataatgctatgtttgttcgagattacaccataaagctcttagggacatcatttcctaacatgacagtaaccgaggtgacaaagtttgtagatggtcttcttagttcaaaacttgatcttccaagcttcaaaaaccatattagagacttgctggtgcagtccaaggagttctcagttcaaggat

SEQ ID NO: 91801 - DNA, 502 bp, Zea mays
  unsure (1)..(502): unsure at all n locations
tatgtgacttgtgatgacaggaggggggagagactctaccggttcggaattaccgggtcgagccacgcgtccgaacaggctgggcaatttcaaatgccactttttgtggcacacatgatcagatcaagtaccgggttgcccaagggtgcattaaggcactctgggatctgcttggttgccccgatcccaaaatcgtaacaatttgcttggaaggtctcgagaacattcttgaagttggccaagcagagaaaaaccttggtgcaagtgatgtcaatgtctatgcacagatgattgatgatgctgagggcctggacaagattgagaacctgcagagccatgacaacaccgagatatatgagaaggctgtgaagatgctggaatcctactggctggaggaggaagatgatgccatgccctcaggcgacaatccccagaatggcttcaactttgggaaccagccctctgttccatcaggtggattcaactntggctgaagatgccc

SEQ ID NO: 91802 - DNA, 495 bp, Zea mays
tgtgtatctgatgtggaagtaggggaagatgcccggatcggagatataccgtgccgacccacgcgtccggtagttctaaaagggaagcggccgcccttttttggtgaggtcgaaagcggcgagcgaagtagaagatgctggacaagctgtgggacgacgtggtggccgtgcctcgcccggagacgggcctcgagaagctccgcaaggccaccaccgcccgcccgctcgtcatcaacaaagacgcggacggcggcagctacaagcgggcgcagtcgatgccgtcgaccccgacgacgccggtgacgccgtcgtcgtcgacgtcgtcgacgacgcctctcgtcgccagccacgtgcggcacaccgttgttcagcacgcgtgcagagtagctagctatggcatctacgcagaccgtttcaaccggcatcaggatagatggaccagcgactacgactgactctacagcgacgagactataagcaactaggttagatcgc

SEQ ID NO: 91803 - DNA, 508 bp, Zea mays
ggtaatgaggggttgattatagagaggaatagtaatgctatacccgttcggaattcccgggtcgacccacgcgtccgaccagagctcatatctggtgcaacggaatatactactgctattgatttgtggtcaacaggctgtgtcatggcagagctgcttctaggacaggctctgcttcctggagaaagtggagtcgaccaactacttgagatcatcaaggatttgggtactccaacaagggaagagatcaagtgcatgaacccaaactatacggagttcaagttcctacagattaaagctcatccgtggcacaaggtttctcaaagaatgcttccacctgaagcactggaccttgctagcaggtttctacaatactcaccaaatctaccgtgcactgctttgcatgcctgtatgcaccctttcttcgatgagctgagagacccacacactcgtctacccaatggtcaccctctgccgcctctcttcaacttcaaatctcaagagctaa

SEQ ID NO: 91804 - DNA, 514 bp, Zea mays
  unsure (1)..(514): unsure at all n locations
nggtnaaggggatctgaaaaatgacaagatcagtaatgctctaccggttcggaattcccgggtcgacccacgcgtccgtcgagagcagcgacaccatcgacaatgtcaaggccaagatccaggacaaggaagggatgccgccggaccagcagcggctgatctttgccgggaagcagctggaggatggccgcacccttgcggactataacatccaaaaggagtctacgctccacctcgtgctcaggctccgcggtggcatcattgagccctcgctgcaggcgctcgctcgcaagtacaaccaggacaagatgatctgccgcaaatgctatgcacggctgcaccctagggctgtcaactgccgcaagaagaagtgtggtcacagcaaccagctgagggccaagaagaagatcaagaactgaggtgttgctgctagtcagtttcatggacaatgttgtttggtntggtgaaccgtgtttggttacgaactgtatttttgtttggttggtgaaaccgt

SEQ ID NO: 91805 - DNA, 477 bp, Zea mays
  unsure (1)..(477): unsure at all n locations
ttattgtagtacctgtctcggaattcccgggtcgacccacgcgtccggaaatttctaagtcgtcgtcgtcgtcgtcgttcgggtcggaccggatctgangcgacgatggctggaggcggcgggatctcttggtctgcagtcctgcttcacctcgatggatgatgtctctgcgctgataattattggatcaatttcgataattattagtagatctatgagatatgccgcctggaagaggcgaggtaagctgcagcatgtaaaagtctgcgtgcgtcgacagcaaaaaagagaaaaaaagatgtgacatcctagaggaggcctttgccatgatgggtgcgctcgcatggcaggccaggtattaataaaaagatgattattgtgtgccgggggaggagatcgcacggnggttgatgtttttggccccggggtcttctccctcatcttgttccgtgttcctgtatccgttgtttccgcgcc

SEQ ID NO: 91806 - DNA, 510 bp, Zea mays
  unsure (1)..(510): unsure at all n locations
agttnaggaggatantgtcatgaaggaaaggaagtattgctatacccgttcggaattcccgggtcgacccacgcgtccggaggtgggctggcttctccttccccctcttaccaagtcctcttcgggttagggttactgagggtgttgtggaggggcgatggcggcggctgatgtggagtaccgttgcttcgtcggcgggcttgcctgggccaccagcaacgagtcgctggagaatgccttcgcctcctacggcgagatcctcgactccaaggtcatcaccgaccgggagacggggaggtctcgcggcttcggcttcgttaccttctcctccgagaactccatgctcgacgctatcgagaacatgaacggcaaggagctcgacggccgtaacatcaccgttaaccaggcccagtcccgtggcggtggcggtggcggcggtggctacggcggcggtcgcggcggcggcggctatggtggcgggcgccgtgacggcggttatggcggcggtgg

SEQ ID NO: 91807 - DNA, 511 bp, Zea mays
ggagttaagaggcattgattatgacgaggaggagtattgtatagctctaccggtccggaattcccgggtcgacccacgcgtccgatccaaaggaagcaattagaaaagaatgcttaattgatggggagctccagggcgttgggcagttgcatccacgtagtcaaggagttgagacattaggaacaatatacagttcctcactctttccaaatcgtgctcctgacggtagggtgttacttctaaactacataggaggtgctacaaacacaggaattgtttccaagactgaaagtgagctggtcgaagcagttgaccgtgacctccgaaaaatgcttataaattctacagcagtggaccctttagtccttggtgttcgagtttggccacaagccatacctcagttcctggtaggacatcttgatcttctggaagccgcaaaagctgccctggaccgaggtggctacgatgggctgttcctaggagggaactatgttgcaggagttgccctggg

SEQ ID NO: 91808 - DNA, 505 bp, Zea mays
agttgagggccttggtaggggaggggagttaaggtatgctctaccggtccggaattcccgggtcgacccacgcgtccgaatttgtgcaggactgtatccaggtgtttcctctgttttgaacaaggagaaatccatggccctcaagacaatggaagatggacaggttatgctttattcgagttcagttaatggtaaagaaaccaagattccattcccctggctagttttcaatgagaaggtgaaagtgaattctgttttcctccgggattcaactgctatatctgattctatactgttgttattcggaggctgcataaaacaagggggcttggatggacacttaaaaatgcttggaggttatcttgagttcttcatgaatcgcgatcttgcttcaacttatgtgagtttgaagagagaacttgagaatttaatccattgcaagctccaaaacccaaggatggatatccaaacgagtgaagagctgctatcagccatccgtttgctg

SEQ ID NO: 91809 - DNA, 501 bp, Zea mays
  unsure (1)..(501): unsure at all n locations
atggtatttgngaagaggggcgaaagggggatactctcccggttcggaattcccgggtcgacccacgcgttcgatcggtgagcttatctaccagcatgctgtgcctggtccgaagtctgagtgcagcaagagtgcccagttgggtattagctttgctggtgggtacattgcccgtgtcttctgggctattggttcttaaccggctgacaaccttgggtctttccttgacaatggccaaggaacctccatgggaaaatgctgttaagaagcttggtctctggggtctcttcactagaggacttcctcttcgtatcgtcatgattggtacccttactggtgctcagtggggaatttacgatgcattcaaagtgatggttggactcccaacaacgggaggtgttacacctgccccagcagcagaggctgaattgaaagccagtgctggattttttttcctgggttccctgaaaccatattggttgaatgggaatggattaaccc

SEQ ID NO: 91810 - DNA, 491 bp, Zea mays
  unsure (1)..(491): unsure at all n locations
accgtatgctggcacgtaagaaaagtatcctcaccggtccgaataacgtcggacgcacgcgtccgatcgttgagcttatctacaagcatgctgttcctgttccgaagtctgaatgcagcaaggggtcccatttgaatattagcggtgctggtagttacattgccggtgtcttctgcgctattgtttctcacccggctgacaaccttgtgtctttcctgaacaatgccaagggagctacaatgggagatgctgttaagaagcttggtctctggggtctcttcactagaggacttcctcttcgtatcgtcatgattggtacccttactggtgctcagtggggaatttacgatgcattcaaagtgatggttggactcccaacaacgggaggtgttacacctgccccagcagcagaggctgaattgaaagccagtgcttgattttttcttctgtgttccctgagatcatatttggtggagtggaattgtatcatn

SEQ ID NO: 91811 - DNA, 500 bp, Zea mays
  unsure (1)..(500): unsure at all n locations
agtgtatctgtgattatgatataaaagtgagctctcccggttcggaattaccgtctcgacccacgcgtncggcgggttcctatgacatattggggataaattactatacctcaaggttctctaagcacggggacttctcaaaagactactcacctaagctcaacgccgacgacgcctatgccactgcagaaatctttggacctgacgggaattctattggtcctcctatgggaaatccatggatctacatgtaccctaaaggcctaaaggatctccttatgatcatgaagaacaaatacggaaacccgcctatctatatcaccgagaacggaatcggggacgttgacacaaaggataatcctctatccatgcaagatgcgttggaccaactacaagaggctagattacctncagcgccacatctcagttatcaaagaatcaatagacttgggggcggacgtgcgcggncacttcacatggtctctgttggacaacttcca

SEQ ID NO: 91812 - DNA, 506 bp, Zea mays
gggtgggaagggtttttatagtaagggggagaaaggtatcctctttcgaattcccgggcaagaagagagccgatcgaccgagagctagcacgcgatggccaaggctttcaaaatgaagggggccggaactttggttggccctggccctggcgtgtcgaccgccgaggcgaggaacatcaagacgacgacggagaagaaggacgacgcggtggtgcagccgcagaccttcccgcccttcgaccgcctcggcggcggcgcgtccccggcgttcggcggcctccccggcggcagcattcctggcagcagcattcccgggttcagcatgcccggcagcggcagcagccttcccgggttcagcttgcccggcagcggcagcatgcccctcttcggcggcggctccccgggcttcagcggcttcggcggcatgcccgggtcccccaccgccggctccgtccccgagcacgccaacaagccctgaactccgtctgtccgtccgatccgtcgct

SEQ ID NO: 91813 - DNA, 505 bp, Zea mays
ggggtgagctttctgtagagggagggggagaaagtaatactcgttcggaattcccgggtcgacccacgcgtccgcccacgcgtccggcggtgacttctgtggcgtgagcatcaattggcatgtctcaacggagtacaacaagggctggagtgctcgggtgacattgttcaactgggaggatgtcgacatggccaattggtttgctgccatcgtcatggacaaggcgtatgacggctttgagaaggcgtactcgttcaacggcactgcagtgggcaagaacacgatctttatgcagggtctggaggggcttaattacctggtgaagcagaccaacatgagcgggtccgactaccttgttcctggcaagcaacagtcagtcctctcattcaccaagaagctgaccccggggttaaatgtcgttgctggagatggcttcccaacaaaggtcttcttcaatggcgacgaatgcgctatgccacagagaattccgatcagcactggattt

SEQ ID NO: 91814 - DNA, 508 bp, Zea mays
agtggagggttttggtaggggggggggggtattgtatactcttccggttcggaattcccgggtcgacccacgcgtccggctcgcactcactccaccgctgcccacttcttgtttgtattgtatccagactccagaggaagccgagagggccaatgaggcaaggcatgagctccccttccgccgccgcggcgctcgtgctcctcctggccctgctcgccggaggccagtgccgagaggcccagctcgacgccgcggacgccggcaccggcacggagaactacaccgccagcgacgccgccgtgtactggggcccctggcagagggcccgggccacctggtacggccagcccaacggcgccggccccgacgacaacggtggcgcgtgcggattcaagcacaccaaccagtaccccttcatgtccatgggctcctgcggcaaccagccattgttcaaggacggcaagggctgcggctcctgctacaagattcggtgcaggaaggacccgtc

SEQ ID NO: 91815 - DNA, 507 bp, Zea mays
  unsure (1)..(507): unsure at all n locations
tatgtggttattctngatagaggggaagatgggggaaactctcccggtttcggaattcccgggtcgacccacgcgtccggagagaccaagaggacacgggagagaggacgttcatttccgcgtcgtctgcgcccgcaggcggcagccccaccacccaccacatggccgacatgccgggtggagcccacggcgccggcgccgcggacccgatgcatgtggaccagccgctcccccctgccgtcgcaggcacagcacacgctcccgccgacgccaagcatgctggttctatgattgaagggagtgatccggtcacaggccatataatctcgacaaccattggagggaagaatggagagcctaaaaggactatcagctacatggcagagagagttgtgggaactggatcatttggaatcgtcttccaggcaaaatgtctggagactggtgagactgttgcgattaagaaggttttgcaggacaagcgctacaagaacagggagctacaaa

SEQ ID NO: 91816 - DNA, 517 bp, Zea mays
  unsure (1)..(517): unsure at all n locations
tgttaatggnnnnnnnnnnnattgattctcatcgctattgtcaacctcttcggaattgcagattcccgggtcgacccacgcgtacgcataacgcgttgcacgaaccactggcaagcaagcccgtccgtccaagtcctaggttgggcaaccaccattggcaacgggcctttctttaaccgccttgcaatgggccggcctcttgtccgtgtggtccgtcgtaacctaccgggctcgcgcccagcagcagcccagccacaacgcctccgagtcgtcgcaggacaggtccttgttgtcctacagcagtggctggctgcccgccaaggccacctggtacggcgcgcccaccggcgccggccccgacgacaacggtggtgcgtgcgggttcaagggcaccaaccagtacccgttctcgtccatgacgtcctgtggcaacgagcccatcttcaaggacgggcagggctgcggctcatgctatcagatacggtgcctccggagcaaccacccggccttgttcggc

SEQ ID NO: 91817 - DNA, 504 bp, Zea mays
  unsure (1)..(504): unsure at all n locations
tgagtccttgtgctttcatncgtgacgcatgccgtactcggtctcggaattcccgggtcgacccacgcgtccggagaactcatttatgcatatgctaagattgacaggctcagtgatattgacgaatgtgaggcttatgccaaacgttgctaaccttcaaaatgttggtgaccgtctgtctgacgaagaactatatgaagctgcaaaaatcttctatgcttacatctcacactgggctaagctagctgttaccataggtaagctgtatcaagttcacggtgctgcgaatactgtctacatggctatacagtgccaaaacatgtaacgtggtctgctgtgcttgtgttgacgccgaggagttccatcttgcacagatttgctacctcaatgttattattcatgttgattacttgaaagaagtcagttagtactaccataatagaggacgcttcaattaactcattgctctcatggatagtggtcttgcacttgaacgtacacacg

SEQ ID NO: 91818 - DNA, 498 bp, Zea mays
  unsure (1)..(498): unsure at all n locations
tatgtntatgnggatggagagagaggggaactttcccggttcggaattcccgggtcgacccacgcgttcgcagaaactcagagaggagaaacccggaacaagcgccttcagtgatgtccgccaacttggggcacttcgcgggtttcccgggcgtgttccggcttgacttccaccaccccgggcttaaccttgggcttcccggcttcttccgccgccaagcccgccgccgacggaaggcgcgcccacgccgaccacgacaagccgncatccccaaaggcgcgggccgtgggctggccgccggtccgcgcgtaccggcgcaacgcgctgcgcgacgagggcgccaggctcgtgaaggtggccgtggacggcgcgccgtacctgcggaaggtggacctcgcggcgcacgacgggtacgccgncctgctccgcgcgcttcacggcatgttcgccttctgcctcggagccgacggnngcgggcggatcggcaccgncgncgat

SEQ ID NO: 91819 - DNA, 521 bp, Zea mays
  unsure (1)..(521): unsure at all n locations
nggaaagtggttcntggactgagccatcgcacgncgtaccggttcggaattaccggccgcaaactcaggggaggcgcgcgcaagcaagaacacgagggagcagcgggcaggcagccagccatggggaggtggccgtgctgcgagaaggcgcacacgaacaagggcgcctggaccaaggaggaggaccagcgcctgatcgcctacatcagggcgcacggagaggggagctggcgctcgctgcccaaggccgcgggactcctccgctgcggcaagagctgcaggctccgctggatgaactacctccgcccggacctcaagcgcggcaacttcaccggctacgacgacgagctcatcatcaagctccacgccctgctcggaaacaagtggtcgctcatcgcgtgacagctgcccggccggacagacaacgagatcaagaactactggaacacgcacattaagcgcaagctgttcaacccgggcattgatccgcaaacccaacgtcggtcaaaggttgctcgggc

SEQ ID NO: 91820 - DNA, 526 bp, Zea mays
gagggagagtgtctgattattatgctaagtagatcagtattcgctctactgggatctcccgggcgcctgccccggcgtcgtctcctgcgccgacatcctcgccctcgccgcagagatctcggtcgagctgtccggaggaccaaagtgggcagtgcttcttgggaggctagacagcaagaaggccgacttcaagagcgcggagaacctgccgtcgccgttcgacaacctgacggtgctggagcagaagttcgcggccgtgggcctccacaccgtggacctggtggccctctcgggggctcacacgttcgggcgggtccagtgccagttcgtcacggggcggctgtacaacttcagcggcacgaaccggccggaccccacgctcaactccggctaccgggcgttcctggcccagaggtgcccccagaacggcagcccctcggccctcaacgacctggaccccacgacgccgaacctgttcgacaaccactactacaccaacctggaggtgaaccggggctttctcggt

SEQ ID NO: 91821 - DNA, 520 bp, Zea mays
gtagaaggttttgtacctagctctatagtaggcactccgcatcggttcgaatcccggtcgacccacgcgtccggttctagatcgctgagcggccaaggtcgttaggatctgatccacgacggcaaggaggggcacaacacaaaggctcgcagggcggctaaagagagaaaggcgcgcatacaagagctccggaaacattaccatacccttcgacaacctgactgtactgcatcataactacgcggccgtgggccttcacaccgtggacctagtggccctctcggaggctcacactttcgagcgggtccagtgacagttcgtcacggagcggctgtacaacttcagcggtactaaccggccggaccccactctcaactacggctaccgggcgttcctggcccatatgtgcccccagaacggcagcccctcagacctcaacgacctggaccctacgacgccgaacctgtttgacaaccactacttacccaacctggaagtgaacccgggctttctttggtta

SEQ ID NO: 91822 - DNA, 523 bp, Zea mays
  unsure (1)..(523): unsure at all n locations
ggggggagagtatattcgctacctgtacacgnatgtatcgctctaccggttcggaattcccgggtcgacccacgcgtccgcttgttttccctcctctttatctccagcgcatcgtaaagggaggagcggagcggcgagttcttgtggtttcccaagatgtcttctccaagcaagcgccgggagatggacctcatgaagctgatgatgagcgactacaaggtggatatggtgaacgatgggatgcaggagttctttgttgaatttcgtgggcctaacgaaagcatttatcaaggaggtatatggagggttagagtagaactgccagatgcgtatccttacaaatccccatcgattggtttcatcaataagatatatcacccaaatgtcgatgaaatgtctggttcagtctgtttggatgtcatcaaccagacatggagcccaatgtttgatcttgtcaatgtgttcgaggtcttccttccacaacttctngtatatcctaatccttctgatccattaaatggag

SEQ ID NO: 91823 - DNA, 517 bp, Zea mays
gggagtggtatctaacaagaacaagaaagtatgctctaccggttcggattcccgggttctagatcgcgagcggccgcccttttttttttttttttgaaaaactcagcacaaacattcaaatgttcggatgttcaaattcttcgaaaatgttcagactttagacaaaaagtaactctaatagcagcttcacacacgcacaggggacaactccgaaactgactgggcagaagacttaacacggtcgaaaagctaaagcctatgggcgagcagcaaccggtgctggagatggagctgtagcagcagcaccaggaccagggcggaggcctccttgtccaccagcaggcctatcctacctgcgcctgaagcgctccggcggcttgcgagccctgcgcttttcacgggatcggacgcggacgatgtgagcgtggatcgcgcacgagacgcagtggtgcaccttggcgtacagcttcgggaggacgtagccatcatagacgcatgcttcctggacgtccttgtt

SEQ ID NO: 91824 - DNA, 520 bp, Zea mays
atagagatgatctcaaaggggagggggagggtatgctctaccggtccggaattcccgggtcgacccacgcgtccggttgtggcaggcggatggcctgatactcgtctgcggcacgcatgtccagcacgccgcggccaagacgagcagcaaagcaaacagtatttgtcccgcggcggcctcttcgtcccgcaaggtcgccccacctagatccggccacgccgcacgttccccttttccgccgcagcgatggtgtacgtggattcctgggacgagttcgtggagcggtccgtgcagctcttccgcgccgaccccaacaccacccgctacgtgatgaagtatcggcactgcgaggggaagctcgtgctcaaggtcactgatgaccgcgagtgcttgaaattcaagacagatcaagctcaggacgcaaagaagatggagaagctcaacaacatcttttttgctctgatgactcgtgggcctgatgctgatatcagtgaagtttcagagaaaggacaggccgacc

SEQ ID NO: 91825 - DNA, 499 bp, Zea mays
ggtggaaggattgtaaagcgagggaggggaaaggaatcactcgtccggaattcccgggtcgacccacgcgtccgaaaaagaatggagcgagctcttcaccaaagcagggttcagcgaatacaagatcctgaaggaatttggagctcgtgttgccttcgaagtctatccgtgagatatatatatatatttacatacatatatgtatgtgtgtgggtgccttgcgtggcttggcgtgatgatgtcataaataaagagggtgggtgtgcttgcggtattcatggatggccatggatctgagcacatgacgttggatgctttcttaaggctctcgtggatcttctatatttggaagaagctgtaaaataatatatcgccatctagtgttggcgttggcttgtatgtactttgtacctgctttattattttgtgcaatatcgagtaacctaatgtaaaaaaaaaaaaaaaaaaaaaagggcggccggtttaaaagatccaagct

SEQ ID NO: 91826 - DNA, 505 bp, Zea mays
  unsure (1)..(505): unsure at all n locations
agagaaggnttcnatgcttccctgctaaatagtatcctgccctcggaattcccggaccaccggtccacacacaagaagagagccgagagctagctacctatcgcgcgatggcgatgtccgcttccaagaggatggcggtcgccgccgctgcgctgctagccctggtcctggccgcgtcgaccgcggaggcgaggaacatcaagacgacgacgactacgacggagaagaatgacgatgcggtggtgcagccgcagaccttcccgcccttcgaccgcctcggcggcggcgcgtccccggcgtccggtggcctccccggcacctcgtcgggcggcagcagcattccagcgttcagcatgccgggcagcggcagcagcctccccggcgggtcgttcttgcccggcagcagcggcagcatcggcagcatgcccctcttcagcggcggctccccggccttcagcggcttcggcggcatgcccggatcccccgccgacggctccgtctcccg

SEQ ID NO: 91827 - DNA, 513 bp, Zea mays
  unsure (1)..(513): unsure at all n locations
atagagagttggtcgcctttgtattctgncgtcactncagactcgtttcccgtcccgacgcacgcgtccggagccaggacaaggagggcatcccaccttactagcagcgtttgatcttcgctggcaagcaggtttaggatggccgcacccttgcggattacaacatccagaaggagagcaccctacacctggtgctccgtctcaggggtggcatgcatatctttgtgaagacacttactggctagacaatcactcttgaagtggagacctcggataccatttacaaagtcaaggctaatatccaggacactgactgcatgcaaccttacctgctatccctaatcttttattctatcatcctgaagattgctgaactttggctaactaccacttttaacggatagcaccctcacatcggagtctgtttatcttagagacgcagatgtttacattgccattctgttctacaatgacttatacatcattctctcaggctatctgtaatttcttttt

SEQ ID NO: 91828 - DNA, 519 bp, Zea mays
ggggagatgtatcaacagagggagaggggtaagtagttctcggttcggtattcccggctcgacccacgcgtccgggcttctcctcccccaccggttcgtgttcaggttctggttcgtgggcgagagggaagagatggcggcgtcggacgttgagtaccgttgcttcgttggcggcctcgcctgggccaccgacgaccactccctcaacaacgccttcagcacctacggcgaggtcctcgagtcgaagatcatcctggatcgggagacgcagaggtcccgcggcttcggcttcgtcaccttctccacggaggacgcgatgcgcagcgccatcgagggcatgaacggcaaggagctcgacggccgcaacatcaccgttaacgaggcccagtcccgcggcggccgtggaggcggcggtggcggatacggtggcgggcgccgtgatggaggcggctacggcggtggcggtggaggctaccgcggtggtcgtggaggctacggcggcggtgggggataccgtgg

SEQ ID NO: 91829 - DNA, 520 bp, Zea mays
  unsure (1)..(520): unsure at all n locations
nagagagatatgtggaagaggagggaggaagttatgctcggttcggaattcccggctcgacccacgcgtccgctgaaaacagaaacaagaactatagccagggccgatgttgcagaagtttgcatacaggcattgctattcgaagagtcaaagtttaaggcatttgatctggcatcaaaaccagaaggtgaagggacgccaactacagactttgactcttcgaatatcaatcacccgctaaacaagttaggaaatgcaaatatactggtgtggaagcgcaaggcagaacagtacctagcagactccggtcttccatatacaattataagagctggcggtttacaagataaagatggtggcttgcgagagttgattgttgggaaggatgatgagatcctgaaaacagaaacaagaactatagccagggccgatgttgcagaagtttgcatacaggcattgctattcgaagagtcaaagtttaaggcatttgatctggcatcaaaaccagaaggtgaaaggn

SEQ ID NO: 91830 - DNA, 479 bp, Zea mays
  unsure (1)..(479): unsure at all n locations
ttttagtgncctcgtctcggaattcccgggcagatcagcatctacgaccgccaggtgacggaggaccagatccagcgggacctagccatgaacaagttcgactgggaccacccgatgcacctgcagccgacgagcccgacggccgtgaagcaggtgagctgcgtgtgggacgcgtacgaggccaccaagggcgcccacgggctgtgcatcctgaccgagtgggacgagttcaagaccctggactaccagaagatcttcgacaacatgcagaagcccgccttcgtcttcgacggccgcaacatcgtcgactccgagaagctgagggagatcggcttcatcgtctactccatcggcaagccgctcgacgcctggctcaaggacatgcccgcggtcgcctaatcccacccccctcacccatggattggattccgggaaggaagaggagagaagctggttgaccgttctttattacaagttgg

SEQ ID NO: 91831 - DNA, 506 bp, Zea mays
  unsure (1)..(506): unsure at all n locations
gagtaaggagtatctgtgtatagacaaggaggagaatggatancctcgtctcggaattcccgggtcgacccacgcgtccgaatcgatcaatctgccggtaggtcgatcatagagagcgcgctccacgtctccgttccggtgcggggaaggaaggaaggatagagagagagagagaggagcgatggcgtccgggtaccgcgcggaggaggagtacgactacctattcaaggtggtgctgatcggggacagcggcgtggggaagtcgaacctgctgtcgcggttcgccagggacgagttcagcctcgagaccaggtccaccatcggcgtcgagttcgccaccaagaccgtccaggtcgacgacaagctcgtcaaggcacagatctgggacaccgncgggcaagagaggtacgcccttctttgctgttgtacgctatgcaggttgcagcagatgcagttctaggatctgtgcaccatttttcagagcttcctggttagtaaggatttaa

SEQ ID NO: 91832 - DNA, 522 bp, Zea mays
  unsure (1)..(522): unsure at all n locations
ngggaggagagatctggcctacgcacatagtatgcatctacaggttcggaattcccggctcgacccacgcgtccggatgatcaagggctgctgtgtgggtccaaagaagagggtggtgaccctccgccagtcgctggtgaagcagacttcccggctggcgctggaggagatcaagctcaagttcatcgacacatcgtccaaatttgggcacggtcgcttccagactaccgatgagaagcagaggttctttggcaagctcaaggcgtaaggtgctgcggtgcagcgaagtcccatttctcaaaatcatcaaactgtgatacttttgtttgtaaccttgctgtaccaagttttgtagccatggtccggtcgtctatggattgttccatgcttcagaactgcactgtctatgttttgtgctattttggttgtttaatggcccaatcattgcatatagattctaattgtcatggcgtttgatgatcaatataactatttatactaaatgtgtttcctaagcttggg

SEQ ID NO: 91833 - DNA, 514 bp, Zea mays
  unsure (1)..(514): unsure at all n locations
atagagatgtgtggtaatgaaagaagatgtatgctcggctcggaattcccgggtcgacgcacgcgtccgtgaaaactgtcgaaagagaagcaaacacattgcattttatactatagattgcaaggatgcatgtggtgaaatatttgttgacttacagaagcatagctatgttcagaaaaagcctggaggagcaactgaacaacaggagttgacatattctagtcttcaggaagctatctctgtgccttggaatagtctaccgaagaagacggcaaaattatactttgctatgagagtactggaggattatgaattatctgaagggcgcagccctggcgaaacaacactttctgacatagatgcagttctggctcgaaggaaggatatgtgtgataaaatgtctttgaatgagtctcgtattcctactactctcgtggaacgactgctagcagctggaaagaaggagcatcctnctgtatgtgctatccttggtggtattcttggtcaggaggtg

SEQ ID NO: 91834 - DNA, 533 bp, Zea mays
  unsure (1)..(533): unsure at all n locations
agaagaggatgtattcggnttccggcacctcgctctgctacgttcatactcggttttgattactggacggacgcgatgcgtgacgacgtgtcgaaagagaagcataacactattttattttatactatangattgcaaggatggcagggtgttgaaatatttgttgacttacagaagcatagctatgttcagaaaaagcctggaggagcaactgaacaacaggagttgacatattctagtcttcaggaagctatctctgtgccttggaatagtctaccgaagaagacggcaaaattatactttgctatgagagtactggaggattatgaattatctgaagggcgcagacctggctaaacaacactttctgacatagatgcagttctggctctaaggaaggatatgtgtgataaaatgtctttgaatgagtctcgtattcctactactctcgtggaacgactgctatcagcttgaaagacagagcattcttctgtatgtgctatccttggtggtattctatgtcaggaagtgat

SEQ ID NO: 91835 - DNA, 522 bp, Zea mays
  unsure (1)..(522): unsure at all n locations
ntggggagatgtgttcctatctgaaaagaaagtatcgctctaccggtctcggaattcccgggcaagccttcagggtggagtcattccacagaaagaaagtcgtggaatacggagatgacacctgtggattaggtggggaatgcacactttcacttgtttctcttaaaaatgtcaaaccaggacaacatgatacacatctgcattctgctgctgttcgcatccagaacaagtttcgcggatggaagggaagaaaggaatttatgatcattcgccagagaattgtcaagctacaggctcatgtacgaggacatcaagtgaggaagaactatcggaaggtagtctggtcagtcggtatcgtcgagaaagtcatactgagatggaggagaaagaggcctgngttacgcgggtttcggccccagaaacaactagaaggtccatcgcanatccaacctgcaaaggctgaagacgaatacgatttcttgcacgacggcagaaggcatgccgaagccaggctacagagag

SEQ ID NO: 91836 - DNA, 517 bp, Zea mays
  unsure (1)..(517): unsure at all n locations
agagagatgtcttntaggggagaaggtagtatgctctaccggttcggaattcccgggtcgacccacgcgtccgcggacgcgtgggcggacgcgtgggctcacagaggttcgcaagaatggaacctgcccgtggctcaggcccgatgggaagacccaggtgacagtggagtaccgcaacgagggtggcgccatggttcccatccgtgtgcacacagtcctcatctctacccagcacgacgagacagtcaccaacgacgagattgctgctgacctgaaggagcacgtcatcaagccagtcatccccgagcagtacctcgacgagaagacaatcttccacctcaacccgtctggccgcttcgtcatcggcggacctcacggcgacgccggcctcactggccggaagatcatcatcgacacctacggtggctggggagcccacggcggtggcgccttctccggcaaggacccgaccaaggtggaccgcagcggggcctacgtcgcgaggcatgcttgccac

SEQ ID NO: 91837 - DNA, 517 bp, Zea mays
attgggagaggtatctagggcgggaggagggtatctctaccggtccggaattcccgggtcgacccacgcgtccgcacctatgaggagaaggaggtcggcccggatggccaggaggtgactaaggtggtgcctgctgtcacccccgaggttaaggattctctggttaagaacataaggaggaggatgacaccacagcctctcaagatccgtgctgatatagagatgaaatgcttccagtttgatggagtgctccatattaagcaagctatgaagaaagctgaagctgcgggcaatgataactgtcctgtgaagattaagctagttgctcctccactttatgttttgaccacacagacccttgacaaggatcaaggcatttcagttctcactactgcagtcaaggcttgtacagcagagattgaaaagtacaaaggaaagttagtagtgaaggaaccaccaagagctgttagtgagcgggaagacaagctattcctcgaccagattgattccctaatgg

SEQ ID NO: 91838 - DNA, 475 bp, Zea mays
agaaagtaatcttgctccggaattcccgggctcatccctgacccccgtaccgcagcgtaaaccctagtccccggcggcgaccttgcggcctccgctgcgctctgactggtgcgcgcttagacgaggagctgcggcggccaagaccaatcgaccatggctacccgtatccagtttgagaacaactgtgaaattggtgttttctccaagctgacaaatgcttactgtctggtagcgattggagggtcagagaacttctacagtgcctttgaggctgagcttgcagatgccatccctgtggtcaagacctctattggtggcactagaataataggccgactttgtgttggaaacaagaatggacttctattgccacatactacaaccgaccaagagcttcagcatctgaggaattgcttgcctgatcaagtggtggttcaccgcattgatgagagggtatctgcctttggcaattgcc

SEQ ID NO: 91839 - DNA, 494 bp, Zea mays
  unsure (1)..(494): unsure at all n locations
ngtgaagttcgtacagcgggagaggggaagtagtcccgtccggaattcccgggtcgacccacgcgtccgcggacgcgtgggcggaaatcatcgagggcgaggtcgtggagatcttgatcgaccgccgtttgtcggcctctgccgctggcggcagctcggctgcccctacaggtgctactgcggttggtaagtcggggcggctcacgctgaagaccacggacatggaaacggtgtacgagctcgggggaaagatgattgaggctcttgggaaggagaaggtgcagagcggggatgtgattgcgcttgacaaggcctccgggaaggtcaccaagctcggacgctccattgggaggtcgcgggattatgatgctgttggcccgcacaccaagtttgtcaagtgtcctgatggcgaactccagaagcgcaaggagatcgtgcactgtgttaccttacatgagattgatgtcatcaatagcaagacacaaggttttctt

SEQ ID NO: 91840 - DNA, 525 bp, Zea mays
  unsure (1)..(525): unsure at all n locations
atggaggaggagaatantanctcttagaacgaaagtatgcatctctcggttcggaattcccgggtcgacccacgcgtccggcttatgacgacaatagtcgctggctccccatatcactggccgttcatccatcccgggcctatgtgttgtcgtggtgtcgctacgatagtgagataataatgaagctttgggactgggacaaaggatgggagtgcgcacgcacattccgaagtggaggcattaatgtagatcatatcgctttcgatccaaaggagaccaaccgctttgttgctaccgattgcttggatggcaaagtgatgatttggagcctcgactctcccgaacctgaatatcatctgcctaagacggattttaagggtatcatgttcctggaattcttcacacgttatggtcggcagtgtttgattattgctcatgaagatcataaagcacacgtatgggacttttcgttgcgcaaatttgtttctgagaagcgaaaattattatctcgtgaagcttctgtct

SEQ ID NO: 91841 - DNA, 523 bp, Zea mays
  unsure (1)..(523): unsure at all n locations
atagagagataatataggnnttcggtaaatcgnccgtcacancntaactcgtctaacttcctgacgcacgcattcatcggcagacatcaatagaatgaggcctttcttattactcaccaagcaactaacctggggccgtctgttacccccgatggtaagcattctctgagatataacataagcattaagactacaccacaacctctcaagatccacgctcatatagagatgaaatgcttacagtttaatagattgctccatattaagcaagctatgaacaaagctgaagctcctgacaatgataactgtcctgtgaagattaagctacttgcttctacactttatgtttataccacacatacccttgacaatgatcaaggcatttcactcctcactactgcactcaatgcttgtacagcatagattgaaaagtacaaaggaaagttagtactgaatgaaccaccaagagcttgtagttaaccggaagacaaacttttcctcgaccaaaatgaatccctaattg

SEQ ID NO: 91842 - DNA, 522 bp, Zea mays
  unsure (1)..(522): unsure at all n locations
aggagggagaggtttcttcacgcagagagggaaagtatcatctaccggtccggaattcccgggtcgacccacgcgtccggtgacttgctgcctccgcttccctggacagctgaactcggacctgcgcaagctcgcagtcaacctgattccgttccctcgcctgcacttctttatggtcggctttgcgccactcacctcgcgtggctcgcagcagtaccgtgctctcactgtccctgagctaacccagcagatgtgggatgccaagaacatgatgtgtgctgctgacccgcgtcatggccgctatctcacagcatctgccatgttccgtggaaagatgagcaccaaggaggtggacgagcaaatgatcaatgtccagaacaagaactcgtcctacttcgtggagtggatccccaacaatgtgaagtccagtgtttgtgatatcccgccacgcggcctctccatggcctncaccttcattggcaattccacctncatccaggagatgttccgccgtgtgagcan

SEQ ID NO: 91843 - DNA, 523 bp, Zea mays
  unsure (1)..(523): unsure at all n locations
aggagagagtgtatcttcatgtggggggggaggtaggcatgccaccggtccggaattcccgggtcgacccacgcgtccgcgcgtgctgggaactttactgcctcgagcacggcatccagcctgatggccaagtgcctggagataagaccgcgggacatcacgatgatgccttcagcaccttcttcagccagactggtgctgggaagcacgttccccgtgcaatcttcgttgatctagaacccactgtgatcgatgaggtgcgcactggcacgtaccgncagctcttccaccctgagcagctcatcagtggcaaggaggatgccgctaacaaatttcgccgtggccactacaacattggccagggagatggtgaacctgtccttggaccggatccgaagcctgcgtgccacctgaaccggcttccagggtttccgggttttaatggccgttggtggtggcaccggctctggccttggttctctccttcctgagcgcctgtctgtggagtccggcagaaatccan

SEQ ID NO: 91844 - DNA, 472 bp, Zea mays
aggagagacacgctccggaattcccgggtcgacccacgcgtccgagcgaaagaaaaggtggccttttcgaagccgccggacggagtgtagcgctagctagctgcccaggccggagaggaggatggtgggacgaggagcggcgacggccctcgtgtgggcggcggtggtggcggtcgcgacggtggtgtcgcgggcgcagcagctgcaggtggggttctacgacacgctgtgcccggcggcggagatcatcgtgcaggaggaggtgagcaaggcggcgtccggcaaccccggcgtcgccgcgggcctcctgcgcctccacttccacgactgcttcgtcagggggtgcgacgcgtcggtgctgctggactcgtcggcgggcaaccaggcggagaaggacgcggcgcccaacgccagcctgcgcgggttcgaggtcatcgacagcgccaagacgcggctggagcaggcctgcttc

SEQ ID NO: 91845 - DNA, 471 bp, Zea mays
  unsure (1)..(471): unsure at all n locations
tgaagatacatcggtccggaattcccgggctatagaccacagccagtcagccacatcactagctatctgtgcagaggcaatggcgtccaaggttgagctggtggtggaggtcaagtccccggctgacaagctgtgggcggcgctgcgtgactcgacggagctgttccccaagatcttccccgagcagtacaagagcatcgagaccgtcgagggcgacggcaagtcggccggcaccgtccgcctcctcaagtacaccgaggcggtgccgatgctgacgttcgccaaggagaagcttgagacggcggacgacgagaacaaggtggtgtcgtacagcgtggtggacggcgagctggcggacttctacaagaacttcaagatcacgctgaaggtgactccggccaaggcggnaggcgaaggcggcgccgtcgtcagctgggccatggagttcgacaaggccaacgaccaggtgcc

SEQ ID NO: 91846 - DNA, 516 bp, Zea mays
  unsure (1)..(516): unsure at all n locations
ggagggaaggtctgccaccgaatgtagtatgcatcacaggttcggaattcccgggtcgacccacgcgtccggcgatccatcggtgcggtttgcagcctggactggccaaggtcaaatttcctggtccaggtgttggatgactctgatgatgctaccacttcggcacttatcaaggaggaggtggagaaatggcagcgagagggtgtgcgcatagtataccggcaccgggtgatccgggatggctacaaggctggaaacctgaaatcagccatgaactgcagttacgtgaaagactatgagttcgttgtcatcttcgatgctgatttccaaccacaggcggacttcctgaagcgcaccgtgccccatttcaagggaaaggatgacgtcgggttggttcaggcgagatggtcgttcgtaaacaaggatgagaacttgctgaccaggcttcagaacataaatctttgcttncacttcgaggtggagcancangtgaaccgggcgtttctcaacttcttc

SEQ ID NO: 91847 - DNA, 498 bp, Zea mays
ctgaagtcttgttatgccgcggggggaaggatacaccgtctcggaattcccgggtcgacccacgcgtccgcggacgcgtgggctgaaacaagaccactagaaacaagttgaagcatctttgcttaggtgaagggaatcggaggagaaagcaaagcttcttgttgaagagagagatcgcttgcttacagagagagattccgctcttcaagaagctcagatgtggcgctcggagctaggaaaagctagaggaaacgctgtaattctagaagcggctgttgtcagagccgaagagaaagctagggtctcagcagcagatgctgacatccgcataaaagaagccatgaaccgacttgagtctgccaccaaagaaaaggaggatctcctagcccttgtggatgctctacaatcccaaatacaaaggcaagagactagcacgatacaggtctgcgaagagagctcggaactctgctcgactgcctcgaagcacatggaggatga

SEQ ID NO: 91848 - DNA, 472 bp, Zea mays
ccctactggactggtctcggaattcccgggtcgacccacgcgtccgtccgtctcgcgtgacttcattcccagcgtccggcggcgacctccacgtggtgccattggccggcaacgagcacccgcccaccaggatccaggtttgtgctgcgagagcgcctatccattcaccatgattaatttcgtgctcctgatcagccgccagggcaaggtgaggctcaccaagtggtattctccttacacccagaaagagaggaccaaggtcagtaccccacactgctctgtgtgataactcgtgtaattcagttccggggttgctttattcatcactggcagagtggcagtgggtgctaatttctgcaggagttaaggctatgcatgctagtttgtgtcaggactttgcagtcatgacttttgttcccaacaaatcgatgaacattagaagtgaatgaatagttgccatgttgtaacaagt

SEQ ID NO: 91849 - DNA, 521 bp, Zea mays
gagtaagtatctgactattgcaatgaaagtaggcttctctcggttcggaattcccgggtcgacccacgcgtccgccaagatccaggacaaggagggcattccaccggaccagcagcggctgatcttcgccggggagcagctggaggatggtcgcaccttggctgactacaacatccagaaggagagcaccctccacctggtgctccgcctcaggggtggtatgcagatttttgtgaagacattgactggcaagaccatcaccttggaggtggagtcgtctgacacaatcgataatgtcaaagccaagatccaggacaaggagggcattccaccggaccagcagcgcctgatctttgctggcaagcagctggaggatggccgtaccctcgccgactacaacatccagaaggagagcaccctccacctggtgctccgcttgcgaggtggtatgcagatctttgtgaagaccttgactggcaagaccataaccctggagggtgagagctccgacaccatcgaca

SEQ ID NO: 91850 - DNA, 520 bp, Zea mays
  unsure (1)..(520): unsure at all n locations
nggaagcgtcctcgaagcgggaaggggaaggtagtcatctaccggtccggaattcccgggtcgacccacgcgtccgggcggatccagaccggccccggtcgtcctgtttctcctcgctgcgtccgggatctgcgcccagttcaccgcagtgctagctggtgatccccaaacatccaacgatgataagaaggctgaagctcagccaaagggccataccggcaaaacagttttgttcgtcctcctaggagtgggggctgtcattctggtgtcatttgttattttcaagtattggcagaagaagaaaaggcaggaacagcatgcacgtctgctaaagctatttgaagaggatgacgacattgaagttgaactaggacttccagattgaataatcttaattgtacagcaagagtatctcggctgacagggttctgctggcttgccttcaaagcatattcatgttaatgtaaagaatttgctgtatttaaacttgaaaaggcctcacaagaaaggtctgttgtcc

SEQ ID NO: 91851 - DNA, 515 bp, Zea mays
  unsure (1)..(515): unsure at all n locations
agtgggaatcgtatcctatgagggggggaaagtatgctctaccgtccggattcccgggtcgacaacgcgtccgacgcgtacagattctccatctcttggtccagaatactgccgaagggaacgctcgaaggaggtattaatcaggccggcatcaagtactacaaaaagctcatcaacttattgatagagaacggaatagagccatttgtaacaatttttcattgggacgtccctcaagcactggaagacaagtacggtggctttttaggcgacaggattgtaaaggattacacagacttcgctaaggtgtgctttgagaacttcggtgacaaggtgaagaattggttgacctttaacgagccacagacatttacaaccttttcgtacggaacgggagtttttgcccctggacggtgctcaccaggagaaaaatgtgctcagcctattgctaactcactcaccgaaccatacattgctggccacaacatncttcgagcccacgctatgacctgtgc

SEQ ID NO: 91852 - DNA, 470 bp, Zea mays
agagaaaatttgctccggaattcccggggcttgctggcgatggagaagtggaaccaaatcaagagcaggttttgcagatagcccttgagatttgcaaggagggtgttctttccctctttgttcagaatcttccttcattgggttgggaggtatgctacattcacgaattgaatgcaataacctttttttcactcagttattagcctttttggttctatgttgcaggctagaaaggatcttgtccactgctggtgtattttgttgagacagaaggttgatgaaagctattgttgtgtccagtatattgaaaatcattttgatcttttggatttccttgttgtttgctataagaacttggaagtcgcgttgaattgtgggaacatgttgcgagaatgcataaaatatcctacacttgcaaatgctctttcagatatatattggagtcaagcagcttcgagttgtttttccag

SEQ ID NO: 91853 - DNA, 516 bp, Zea mays
gagggagtgtctgaataagcaaagtagtaggtatcctcggctcggattcccgggtcgacgcacgcgtccgtccacgacgcaagggagagtgacggaaagcgacgcggcgcgagcgaggagggccaaggggaagaggggaagcaccgcaccaggacccttgttcgccgccgccgcctctgatctccgcgaggttgtcaggattcaatatgtcgaccagcacattcgctacttcctgcacgctgttgggcaatgttagaacaacgcaggcctcccagacagcggtgaagagcccttcgtctctaagcttcttcagccaagttacgaaggttccaagcctgaagacctccaagaaactggatgtctccgccatggctgtatacaaggtgaagcttgtcgggcctgaaagtgaagagcacgagtttgatgctccagacgacgcctacatccttgacgcagccgagactggccgtgtgggagtgccatactcgtgccgtgcttgggcttgctcaactgggc

SEQ ID NO: 91854 - DNA, 517 bp, Zea mays
  unsure (1)..(517): unsure at all n locations
agtaggaatctctcgtcaccgaaaaaagtatgctgctctcggttcggaattcccggcaaatcagaaaggggaagggaagaacggcccagcaatgccgctctgcagcttctacgcctccacctccgttcccgtcgggaagccccagcagtccgtcgcctcgtccaagccccccaccacggcggtggcctccgtggcgacaactgtgccgatgcgcagtgcagcgacggtgacgccagccgtggccacaacaacgagcctagcgctgtctctgcacctgccggagctgccgtcgcaagtgaaggacaagatcctgagcctggagctgatgggcgtggactatgggcgcgcgctggagcagaacccggcgctccgcgacgcggcgccggagtccatccacgcggtggtgtcgttcctccagtcccgcgggctccagttcaaggacctgggccgcgtcttcggcatgtgcccgtncgtgctgaccgncagagttcgcgccgaccttcgcccgtgttcgnct

SEQ ID NO: 91855 - DNA, 518 bp, Zea mays
  unsure (1)..(518): unsure at all n locations
tagagaagtatcatcgnccccccgactctttcgctagactatgttcggaattaccgtctggacgcacgcattcgcggacgcgtgggccgaaatcatcgatttcgatgtcgtggagatcttgatcgaccgggcttgatctgcctctgccgctggcggcagctcggctgcccatacaagtgctactgcggatggtaagtcagagcggctcacgctcaagaccacggacatggaaacggtgtacgagctcgggggaaagatgattgacgctcttgggaaggagaaagtgcagagcggggatgtgattgcgcttgacaaggcctacgggaaggtcaccaagctcggacgctccattgggaggtcgcgggattatgatgctgttggcccgcacaccaaatttgtcaagtgtcctgatggcgagctccagaagcgcaaggagatcgtgcactgtgttaccttacatgagatcgatgtcatcaataacaggacacatggttttcttgcactgttcactggtgacc

SEQ ID NO: 91856 - DNA, 512 bp, Zea mays
  unsure (1)..(512): unsure at all n locations
tgagttgtcgtcacgaaaagacgctagcctctccctggtcggacgtaccggacggacccatgcgtccacggcgcaagggagagtgacggaaagcgactcggcgcgagcgatgagggccaaggggaggaggggaagcaccgcaccaggacccttgttcgccgccgccgcctctgatctccgcgaggttgtcaggattcaatatgtcgaccagcacattcgctacttcctgcacgctgttgggcaatgttagaacaacgcaggcctcccagacagcggtgaagagcccttcgtctctaagcttcttcagccaagttacgaaggttccaagcctgaagacctccaagaaactggatgtctccgccatggctgtatacaaggtgaagcttgtcgggcctgaaggtgaagagcacgagtttgatgctccagacgacgcctacatncttgacgcagccgagactgcccgtgtgggagtgccataactcggccgggctggggctttgctcacctgggcc

SEQ ID NO: 91857 - DNA, 523 bp, Zea mays
  unsure (1)..(523): unsure at all n locations
agaggagtgtatcctacgcagaggaggaagtaggctctaccggtccggaattcccgggtcgacccacgcgtccgctggccgggaacatcccgcccaaggccgggctgggcgacctccgcggcctcgcggcggggctgcgcggccagaacggctctgccatgatcgacggctccgagagcttcgacggcgccaaggcgtacaaggacagcaagatctgcaacatgctaacaatgcaggagctgcaccggcggtaccacgaggagacgggcatcacgttcgcgtcgctctacccggggtgcatcgccaccacggggctgttccgcgagcacatcccgctgttccggctgctcttcccgccgttccagaaagttcgtcaccaagggcttccgtgtcggaggccggagtcccgcaagaagctggcgcangtggtcaacgaccccaggcttacccaagtggggggtgtactggaacctggaacaagggactcgggtgctttcgagaacaacctttgcaaggagggccc

SEQ ID NO: 91858 - DNA, 515 bp, Zea mays
atgaatttgttgtattgaaacgaagatagtatgctctaccggtccggaattcccgggtcgacccacgcgtccgctttcccgccgactgatcccaccaattctgcacccgcgcagttcctgattcgagtgggaagcgcaattggccgctcctgaccagacgccggatagggctggatttgattggattggatccccaattgtgtttgccacgtccgtgcgttcgggcgggcgggggagttactttagggtttcggcgggtgcggtcgccgtgtaggcggtagggttttgccatggcggagaagggctgcctcaagcggctccagaaggagtaccacgccctctgcaaggagccgcctccgcagatcgttgctcgcccgctgcccaacgacatactggagtggcactatgtactggaaggaagtaaaggaacgccctttgaaggtaaagatcatacataatataccacattatctactgcctccaatatttgttttggtacttataaatctcaacga

SEQ ID NO: 91859 - DNA, 472 bp, Zea mays
  unsure (1)..(472): unsure at all n locations
agggagaagtttggtccggaattcccgggtcgacccacgcgtccgcacaacacaagctcgtcgtcgatggcgcggtgggctgcggtgctggcgctggccgcgggcacggtcatcgccgtggcgtccgtggcgggcggcgacatgaacgcggacaagacggagtgcgcggaccagctggtgggcctggcgccgtgcctgcagtacgtgcaggggcaggcccgcgcgccgtcgaccgactgctgcggcggcctgcgccaggtgctggggaagagccccaagtgcctgtgcgtgctcgtcaaggacaaggacgaccccaacctgggcatcaagatcaacgccaccctcgcgctcgcgctccccaacgcctgcggcgccacccgcgccaacgtctcccactgcgctcagctcctgcatattcccccgggctccaaagacgccgncgtcttcagccccggcggcgacaagggctcca

SEQ ID NO: 91860 - DNA, 471 bp, Zea mays
  unsure (1)..(471): unsure at all n locations
aagaaagtatgcgtccggaattcccgggtcgacccacgcgtccgaaagagcttacgctgctggggttatgggcgagcccgttcgtgctccgggcgcgcatcgcgctcagcctcaaaggcctcacctacgcttactccgaggagaacctcgacgacaagagcgagcttctcctcagctccaaccccgtgctcaagaaggtgcccgtgctcatccaccacggcaagcccgtctgcgagtcccagatcatcgtgcagtacgtcgacgaggctttccccgccgccgcacctaatttccttccatccgacccctacgaccgcgccattgctcgcttctgggcctcctacgtcgacgacaagttctacagcgcgtggatacccgtgttcaggggcaggacggcggaggagatggcggaggcggcgaggcangccgtcgcggcgctggagacgctggagcaggcgttcagggagtgct

SEQ ID NO: 91861 - DNA, 517 bp, Zea mays
gcggaagtttgatcctatccgaacaaagtatgctactaccggttcggaattcccggcatcagcgccctgatatgagaacccctggagttgatgctcaaggccaacctattgaccctgagaagatgcaggggcaggtttaggacttctatgaggacatctatgaggagttggggaagtttggtgagattgagaatctgaatgtttgtgataaccttgctgaccacatgattgggaatgtctatgtccagttcagggaggaagagcaagcagccgcagcatacaatgctcttcaggggcgcttttactctggccgccctataattgttgagtattctcctgtgaccgacttccgtgaagcaacctgtaggcagtttgaggagaacagctgcaaccgtggtggctactgtaatttcatgcatgtgaagcaaattggcagggatctcaggaggaagctgtatgggcgttctgcttccaggaggtaccatgggaggagcccgaacccgaagcccggcacaca

SEQ ID NO: 91862 - DNA, 521 bp, Zea mays
  unsure (1)..(521): unsure at all n locations
tggaggagggattttggctacgtctgattgnagccatctacaggttcggaattcccggctcgacccacgcgtccgcaagtgtgtgtactagcaaccagctagctcgttcggcagcaggcagccatcatgtcggaggggaagcaccaccacttcttcaaccaccacaagaaggacgaggagcagcccgccggcgagtacgggtactccgagaccgaggtggtcaccgtcaccggcgagggcgagtacgagaggtacaagaaggaggagaaggagcacaagcacaagcagcacctcggcgaggccggcgccatcgccgccggcgccttcgcactctacgagaagcacgaggcgaagaaggaccccgagcacgcgcacaggcacaagatcacggaggaggtcgctgccgcggcggccgtcggcgccggcggctacgtattccacgagcaccacgagaagaagaaggaccacanagacgccgangaggccaacggcgagaagaagcaccacaactttttcngtga

SEQ ID NO: 91863 - DNA, 476 bp, Zea mays
  unsure (1)..(476): unsure at all n locations
tttataagtttgccccggaattcccggctcgacccacgcgtccgcgagagggccattgccaacgtgccccctgcagaggagaagcgatactggcagaggtacgatatgcctctggattaactatgcactctatgangagctagacgcacaagacagagaacggacaagagaggtttacaaggaatgcctgaggttgattcctcacaagaaattcacgtttgcaaagatgtggctcatggcggcccagtttgagatacggcagagaaatctaaaggctgcaagacaaattcttggaaatgcaattggaatggccccaaagggcaagatattcaagaaatatattgaaattgagctttatctgggcaactttgaccgttgtaggactctttatgagaaatatattgaatggtccccagcaaactgttatgcctggaggaagtatgccgaattggagaagaaccttagtgagactgatc

SEQ ID NO: 91864 - DNA, 536 bp, Zea mays
  unsure (1)..(536): unsure at all n locations
gagatggagaaggaggaggagggtctattgnagttatgatgtaacgtacgtcacgccgtacttggtcggaattcccgggtcgacccacgcgtccggggaaatccatggatctacatgtaccctaaaggcctaaaggatctccttatgatgcatgaagaacaaatacggaaacccgcctatctatatcaccgagaacggaatcggggacgttgacacaaaggataatcctctatccatgcaagatgcgttggacgactacaagaggctagattacctccagcgccacatctcagttatcaaagaatcaatagacttgggggcggacgtgcgcggccacttcacatggtctctgttggacaacttcgagtggtctagtggctacaccgagcgttacggcatcatctacgtcgaccgtgacgacggctacaggcgctacctgaagcgctcagctaagtggctgcgagagttcaacggagctgccaaaaaggctgaaaagaaagttcttacgccagcttaaaatgtagtgggggggaatt

SEQ ID NO: 91865 - DNA, 628 bp, Zea mays
  unsure (1)..(628): unsure at all n locations
gtggagagagaatagtgtgggtggggtgagggactctcattccatcgaaagaagaatgattgttatcgctcgtactggttccggaattcccgggtgcgacccacgcgtgccgcgagaacccatcctgaaggttggcgaggctagagaaaaanctcttggtgcaggtgatgtcaagtgtctatgcacangagattngatgatgnnctgagggcctggacaagaattgagaancctgcagagtccatgacaacaccgagatatatganngaaggctgtgaagatgnctggaatcctactggcntggagganggaagatganntgccatgccctcaggnctgacaatccnnccagaatggctttcaacttttgaggaacccagctccttctggttccatcaggnntggattcaacttgtggcttgaagaaatgccgcatttggaatggcccgcttgtgccgattatnngccttggcttagtgctttctgggcttaggtcagaaggtnggtggggtaagctggcggtcaaacccaaagtcaatggtntnngagtccccatttgggtcttgggtcttcaagggaagtttgtccatggtcaattccccagttcaggcagaggttcaagttcctt

SEQ ID NO: 91866 - DNA, 516 bp, Zea mays
  unsure (1)..(516): unsure at all n locations
natgagggagtgnctctgaaatttgaaactcgaaaatactgtaaactcgtccggtccggaattcccgggctcactcgcccctctgcatttaccactttgccctcgtcggcggcgctgaccacccgccgccgagtccggcgaaagaaccgcctgtagttccagagtagtacctcatggcggccatatcgtcgcttcccttcgcggcgctgcgcggagccgccgagtggaggccgtcgtcgacggcggcggccgtctccggcgccgtcgtgctcagcgcgaggtctcgccggggctcgcgctcggtggtgcgatgtgtcgccacgacgggtgatgtcccacccactgtcgcagaaacaaaactgaacttccttaagtcatacaaacgcccaatcccaagcatttacagtgcagtcttacaagaacttttggtgcagcaacacctgatgagatacaaaaaaacctatcagtatgatgctgtgtttgctcttggcttcgtcactgtctatgatcagctca

SEQ ID NO: 91867 - DNA, 535 bp, Zea mays
  unsure (1)..(535): unsure at all n locations
ggagagagagagaatgagagaggagggtnngtacgtctacgagagagaaagtaagctactaccggttcggaattaccgtccgaggaagcagccgatgaccaggaagagtctggatggaagtatatccatggtgatgtcttcaggttcccaaaggataagtcgctattttccgctgctcttggcacaggaactcaactatttgctctcacaacctttatattccttcttgcacttgtcggagtattctatccttacaaccgtggtgcactatttactgcattggttgtcatttatgcactcacttcaggaattgctggatacattgctacctctttctattgtcagttggaggggacaaactgggtgaggaacttgctattgacaggatgcctattctgtggacctctcttcctgacattttgcttcttgaacaccggtgctattgcttatagtgccacagcagcactgccctttggcactatctgngtcattgggctcatctggaccttggtcacatttcctttgcttggtttgg

SEQ ID NO: 91868 - DNA, 539 bp, Zea mays
  unsure (1)..(539): unsure at all n locations
gaggagagaggtaggaggaggggagggtagcttggtccctcgtacgtagattgatgtcatgccgtactggtttcggatacccggctcgacccacgcgtccggatccatcgactcgctcgggccgcccctcccgtcgtccccgttcgaaggtgcggggggcggcaggcgagcgatttcattcgacatgaatcccgagtacgactaccttttcaaacttctgcttattggtgattctggtgttgggaaatcatgcttgcttctcagatttgcagacgattcttatttggacagctatatcagcacaattggggttgatttcaaaattcgcacagtggagcaagatgggaagaccataaaacttcaaatttgggatactgctgggcaagagcgcttcaggacaatcactagcagctactaccgcggagctcatggaatcattattgtatatgacgtgacagaccaagaaagcttcaataatgtgaagcaatggttgaacgaaatagaccgttatgcaagtgattatggtaacaagcttcttn

SEQ ID NO: 91869 - DNA, 533 bp, Zea mays
  unsure (1)..(533): unsure at all n locations
gagattgagaataatgaatntaggagtctctcgttctaagaggggatggacagtatgctctactgggccagaattcccgggtcgacccacgcgtccggtactgtacagaagcatatacttcagggaggccccaagcgtctaactttcactgtgccgtcgttagtattctcttctcttaagctggtcaggcgattacaaggccaagatggagatgtcactggggaggatgttcctgcaactccaaagaaaatattccagatattgcatcagactattgaagcactttcttgtgttccttccccagagttagctctgagactatatttgcagtgtgcagaggctgccaatgactgtgatttggaaccaagtgcttatgagttctttactcaagcgttcattttatatgaagaagaaatcacggattcaaaggctcagatcactgcaattcacctgataattgggacccttcagcggatgaatatatttggggtgggaaatagagacacccttacttacaagacaaccgggtactg

SEQ ID NO: 91870 - DNA, 516 bp, Zea mays
  unsure (1)..(516): unsure at all n locations
tgagggtagaggtgtggccatcgatntancagatcactacgttatgccgtaccggttcggaattcccgggtcgacccacgcgtccggggggaggccgccaagaacggggccgccgccgcggatggccacaagcctgggccggtggcattcttcgccgcggggattagttcggtgcttcaccccaagaacccatttgctccaacattgcattttaactaccgttactttgagacggatgcaccaaaagatgcacctggtgcaccaagacaatggtggttcggcggtggtactgacttgactccttcatatatcattgaagaggatgtgaagcatttccattctgttcaaaagcaagcatgtgataaatttgatccaagttttcacccaagattcaaaaaatggtgtgatgattatttctatattaagcaccgtaatgagcggcgtgggctaggtggaatattttttgatgaccttaatgattacgatcaagaaatgcttctcaactttgctacagaa

SEQ ID NO: 91871 - DNA, 532 bp, Zea mays
  unsure (1)..(532): unsure at all n locations
gagagagagaagtaggtgtgagggtctctacttctaagaaggacgatgtatgctctaccggntcggaattcccggctcgacccacgcgtccggttgtgactttctgggagggggagatagtggatgctaaaaattacacttttttcactggaaagtgggaggcatcaccagatgatgatataagacattggtccaagttcccatcatttacgcctcttctgggtcagattgagacagatggtggcaagtctctggactttagcaactatccttatatatttatgagatggaaagagcaatattttgtcaacgttggagtcgactgtgggttaaccatcgctggtttctactacgtctgcttttcttgtagcgatggctccattaatggattttattatgatccaaatagcagtccatttcagaagctcgagctgaagtgtaccaatgagaaaaaatccgggttcaccttttcatcctacgagctgcaatgacaggacagatgcccttgacagacaactttttggtagcatat

SEQ ID NO: 91872 - DNA, 537 bp, Zea mays
  unsure (1)..(537): unsure at all n locations
gagagtgagaagtatggatggggggcnttacgtcgattgacagtaaatgtaatgctcgtccnggttcgggtttacctgctcgacccacgcgtccgcacgcagacaacagccatcttggaggtatctaattccaatattgtatgtctcggttgagcttgtgaaggcgttgcaagcacatatcattaactgggatattcatatgtttgatgaggagatcggcaataccactcagaatgaagatggtcaaaatcttgatgttttctttggttgcatccgcattctggactattcctgacagcatttaagtttttattacggttcaacggtcgtccagcgtaatccttttacaaccatgggtggcaagtttgaccatgcagatcgtttgttccaaagcattgagaacgcttacataaatagcttatcaaatacaagtgacgtcaaagagcttattccagaattcttttacatgcccgagtttcttggaaattcaaattcatatcatcttggtgtcaaagcaggattggggaacctattggc

SEQ ID NO: 91873 - DNA, 535 bp, Zea mays
  unsure (1)..(535): unsure at all n locations
gagatagagaagaagtgatgngaggagtgtgttcgtttaagaagacgacagtaggttctaccggttcgggattacctgctcgacccacgcgtccgcacctcgtcgcaccactcgccgaggtgcccatggagtccttccaccaggttttcgacagcaatgtctatggtgcaatgaggttaattcaatctgttattcctcacatgatggaaagaaggaaaggaacaattgtgaatgttggaagtattaccgctctggcacctggaccatgggctggtgtgtattcagcatccaaagctgctcttcatgcattgagtgactcgttaagggttgaactaagaagcttcggcataaacgtgatgaccgtcgccccaggagggacgaggtcgaatcttgggaattcttctgcagccaagtatgatcagatgcacgagtggaagtactacaagaaatacgaggaagggctccgagccaggactggcatttcccagggccccaagtccactccagcagaagagcttgcaaaggccgtggttgc

SEQ ID NO: 91874 - DNA, 535 bp, Zea mays
  unsure (1)..(535): unsure at all n locations
gagagagagaagggggagggggggtgtcttcgtcaattgacgtagcttgatgtcangtcgtactggtttcggattaccggctcgacccacgcgtccggctagctcgatccgcagagcaaagcgaaagcagcaagaagcaaagcaatggagaaccgtgcgagtgtgctagttctaccagcgcagttcaccaaactcaccttcggaaacctgtacatccgccgggccgggccgggcagcagggagataaccgaggagggcaggtgcgacctggacaggagatacgtgagtaacttccccgtctacgacggccgcggccccgacgccagccttgtggcccgcgtgcaggggatcaccagcgaaatcgggaacgcgcaccaactgttcgtcgttgtgttcgacaccgacaggctcaagggctccacgctcgtcaccaatggcgtgataacgggcgggtctgacgagtgggcgatctacggcggtaccggggtgtttgccatggcgaagggcggtataaggagaaagtatctcggcgacg

SEQ ID NO: 91875 - DNA, 535 bp, Zea mays
gagagagtgaatgatggttggtgcggctctttttccatgtaagtagactgatgtcacgccgtattgggccggaattcccgggtcgacccacgcgtccgcaacgccgcgggcgcggaggcgggcgtcggcgccgccgtcacccggcgcatcatggcggcgctcaagatccccggggacgagtacgccatggtgtgcacggccaacaggaccgcggcgttccgcctcctcgccgagtcctactcgttccagcccggcaagcagctgctccccgtgtacgactacgagagcgaggccgtgggcgccatggccgacagcgcgcgccgccggggcgccgaggtcgcctccgcgaccttcgcctggccgagcatgaggatccacggcgccgacctccgcaagaggctggccaggggccggcgccgcggcggcgggggacgcggcctcttcgtcttaccgctcgcgtcccgcatgacgggcgcccgggacccgtacctgtggatgagcgcggcgcaccagcaggggtggcacgtcgagctgg

SEQ ID NO: 91876 - DNA, 514 bp, Zea mays
  unsure (1)..(514): unsure at all n locations
agaagtnnnctttatgttgtgtctgattcttgccaataaggcatgctctaccggtttcggattcccgggtcgacccacgcgtccgccacgatcatgttctggacggtgtacgcgcagatgaccaccttctcggtgtcgcaggcggccaccatggaccgccgcgtcgggggctcgttccagatccccgcgggctccctcaccgtcttcttcgtcggctccatcctgctcaccgtgcccgtctacgaccgcctcgtggtgcccgtcgcgcgccgcgtcagcggcaacccgcacggtctcaccccgctgcagcggatcgccgtcggcctcgcgctctccgtcgtcgccatggcgggcgccgcgctcacggaggtccgccgcctccgcgtcgcgcgcgagtccgcctccggaggcgtcgtgcccatgtcggtgttctggctcatcccgcagttcttcctcgtgggggcgggcgaggcgttcacgtacatcggccagctcgacttcttcctgcgcgagt

SEQ ID NO: 91877 - DNA, 540 bp, Zea mays
  unsure (1)..(540): unsure at all n locations
gagagagagaataatgaaggaaaggtcctgtcntcctaagtacagtaatcgtaangtangtctgtactgggtcggaaatacctgctcgacccacgcgtccgcccacgcgtccgctccaccgccgccaacgtcgcctggcggccgtctgcagctcggggcgtctgctcggaagttggtgaaggtttcttgaagctgagaagatggtgctgaagacagaactctgccgcttcagcggccagaagatttatcctgagaaaggcatccgatttatccgagctgattctcaggttatgctttttgccaactcaaaatgcaagctctacttgcacaaccgactgaggcctccaaagcttacctggacagcaatgtgcttgaagcatcacaagaaggatagccatgctgaggctgtcaagaagaagcgcggtgccaccaagaagccatactagaggtccattgtgagtgcgtccctagaggtgatccataagaatagggctgaaatacccaaagtccaggatgcttgtagaagaaagtagttttaag

SEQ ID NO: 91878 - DNA, 540 bp, Zea mays
gtggggagagagaaggggggggagagaaggctctcttctacgtagggggtgtgatagcatgctctactgggtcggaattcccggctcgacccacgcgtccgggcaaggccaatccgaaatctcgagcgttcgcgccggcgaccacagcaaagaggagggcacagcacgacagcgccccagggttcctactctcgtcgcagcggcagcactgaggggaagatgtcgtcggtgttcagcggcgatgagaccgcccccttcttcggtttccttggcgccgccgccgctctcgttttctcatgcatgggggcggcgtacgggacggccaagagtggcgtcggcgtggcgtccatgggtgtcatgcgcccagagctcgtcatgaagtccatcgtgcccgtggtcatggctggtgtgctgggtatctacggcctcatcatcgccgtcatcatcagcactgggatcaaccccaaggccaagccatactacctctttgacggctatgcccacctgtcgtcccgccttggctgggggcttgctgggctt

SEQ ID NO: 91879 - DNA, 502 bp, Zea mays
  unsure (1)..(502): unsure at all n locations
agaggaaactgtcgtgctgctattcgactgatcgntanttcatcacatccggtcaaattccgcntgcgtcagccaaagtataatgcctccttatgctccttgtacnaaccgcaagagctgctacggggaccagtttcccacaatgctcacaagctcctatagcttcccttcttcccccgtacctctcaccagcggtgtcttcggtatgtgaaaacccaattcttcaaccctataggatccaacaggcaatcgcagctggcatcttacctttatcacccttgttcctccaacaatcatcagccctattacagcagttacctttggtgcatttattgacacaaaacatcagggcacaacaactacaacaacttgtgctagcaaaccttgctgcctactctcagcaacaacagtttcttccattcaaccaactagctgcattgaactctgcttcttatttgcaacaacaacaactaccattcagccagctatctgctgcctaccc

SEQ ID NO: 91880 - DNA, 510 bp, Zea mays
  unsure (1)..(510): unsure at all n locations
natgaggaagggttgntatagaataggggggaaatagcatgctctaccggtttcggattcccgggtcgacccacgcgtccggccaatacatcgtcaggctgaacaagtacctggaatctagtaaaattggattcgatgtgggcatgaggtttaagatgagttttgaaggggatgacgtccctataaagaagttttctggaacagttgtcgataaaggagatctttctccacaatggcaaggttctgaatggaagacattgaaggtcaaatgggacgaagccacaaacttaaatggccctgagagggtttcctcctgggaaattgaaccgttcgatgcatccgcacctgccatcaccatgcccgtgcaaccagcaatgaaaaacaaaaggcctagggagacacctgaaggcctggatattcatgcactggaacctgctcaagaattctggctctctggaaggcctgaacagcatgagaagacaagcgtaagctccagcgaacccaaacatc

SEQ ID NO: 91881 - DNA, 511 bp, Zea mays
  unsure (1)..(511): unsure at all n locations
aggaggnncctaatgttgtatggaatagtgggaaaagagaaagcttctaccggtttcggaattcccggctcgacccacgcgtccgcattgggcagcgcaattaccggtactttttcatgtttgtttcttcctcgactcttctctgcatttatgtatttgcaatgtcagccttgtacatcaagtttatcatggatgaggattatccaacagtatggaaggctttcaaacactctcccgcttctttggggcttctgatatattgtttcattgctctctggtttgttggtggactcactggatttcatatgtacctcattagcaccaaccagaccacgtacgagaatttccgatacagatcagacagcaggcctaacatctatagccaaggatgtctgaataactttctacaagtcttctgcagcaagacaaaaccttctaaacacaagttccgggcctacgcgcaagaggaagtgcggcctacaacggttagcttcggcagggaggtcgatga

SEQ ID NO: 91882 - DNA, 531 bp, Zea mays
  unsure (1)..(531): unsure at all n locations
gagagagagaagaagatgtataaggtgtgtcngtttatgaagtcantgtatgttctaccggttcgggattaccgtcccgacccacgcgtccgggttccgctggtgttgtgaggaggcaggccgtggatatctcacccctgaggagggtgagccaggccatctacctcctcaccactggtgccagggagagtgctttccggaacatcaaaaccattgccgagtgccttgcagatgagctgatcaacgctgccaagggctcatccaacagttacgccatcaagaagaaggacgagattgagcgtgttgccaaggccaaccgttgaactgagcttgtatcctggtgcactctgcgctggaaacttttatgtcgctggcagtcgtatcggttcttgttttaccaatgtttagagttttttgagacctatatgcggttttggttttcagtgcacaattaaaattactgagtaatgtagttgattgggaacaaaaatgtttggtgcctagtttaccgaacttcagtgctcttggaat

SEQ ID NO: 91883 - DNA, 547 bp, Zea mays
  unsure (1)..(547): unsure at all n locations
gagtatgatatnatatgttgaatttnacaggagggctcttcgttctatcgatgggggatgatactatgctctactgggtcggaattcccggcgggacccgtccgatgatcctgaaactggagaggaagacccctcaaagagaggtgtctgcagtaacttcctgtgtggctcaaaaccaggggacaaagttcagatcacaggcccctcgggcaaaataatgcttcttcctgaggatgatccaaatgcgactcatatcatgattgccacggggactggtgttgctccctaccgtggctacctacgtcgcatgttcatgggaagatgtccccacttttaaatttgggggtctggcttggctctttcttgggggtgccaactcttgccgccttctctatgatgaaaagttcacaaactacctttagcagtatccagaccatttcaggtacgacaaaacgctaatcagggagcagaagaaccagagcggcgggaagatgtacctgcaggacaagatcgaagagttccaggaccaaatttttagacttgttag

SEQ ID NO: 91884 - DNA, 531 bp, Zea mays
  unsure (1)..(531): unsure at all n locations
ggataatgatgttatagnaagaggtctcgtctaagaggagatgtatgcatcgctctactggtccggaattcccgggtcgacccacgcgtccgatcaaaatgaaatagctgaggcactttataagcttgtgtcagataagcacttgtggtgacaatgtcgccagaatggtctgaaaaacatccataaattttcatggcctgaacattgccagaactatttggcacgtgtagtcactctcaagcctagacatccccgctggcaaaagaatgatgttgcagctgaaatatctgaagcagattcacccgaggactctctgagggatattcatgacatatcacttaacttaaagctttccttggacagtgaaaaatcaggcagcaaagaagggaattcaaatgctttgagaaggcattttgaggatgcagcgcaaaagttgtcaggtgttaatgacatcaaaaaggatgtgccaggtgagaatggtaagtggtcggcattgcgtangaggaagcacatcattggaattgctggaga

SEQ ID NO: 91885 - DNA, 509 bp, Zea mays
  unsure (1)..(509): unsure at all n locations
agaagggtcgtgagttnccatgattttcgcaataagtatgctctaccggtccggaattcccgggtcgacccacgcgtccgaaagaaagaaagaagccaagcccaccagggccggggaagctaagagaggagagctaaggaaggaaaggaaggaagatgatgagcaaggaggcagtggtgaacgcgttcctggggtgcttcatgcacgtggggctggcgctggtgctcgccgtctacctccccgtggcctttgtgtgccgcctcctccaccgcctcctcgtccgccccttcgccaggggcgaggacctccgcggcaaggtcgtcctcgtcaccggcgcgtcctccggcatcggcgagcacctggtgtacgagtacgcgaggcacggcgcgtgcgtggcgctggtggcgcgcacggaggtggcgctgcgcgccgtggccaaggcggcgcgcgacctgngcgcccccgacgtgctggtcgtgccggccgacgtcaccaaggtcgacgacgcc

SEQ ID NO: 91886 - DNA, 535 bp, Zea mays
  unsure (1)..(535): unsure at all n locations
gagagagaggattggttttgaaaagggtttctcctacgaagacgatagtaggctctacnggntcggatttcccggctcgacccacgcgtccggagatcaacaaggtcgttaagcttcaagaagagcttgacattgatgtgcttgtgcatggcgagcctgagagaaacgatatggttgagtacttcggtgagcagctctccggttttgcgttcactgccaatggctgggtgcagtcttatgggtcaaggtgcgtcaagcctccgatcatctacggtgacgtgagccgacccaaccccatgaccgttttctggtcgaagacggcacagagcatgacgtctcgcccaatgaaggggatgctgactggcccagtcacaatcctcaactggtccttcgtccggaatgaccagccgaggtttgagacttgctaccagatcgctcttgcgatcaagaaggaagtcgaggatcttgaggctggtggtattcaaggtatccaaatcgacgaggctgcacttaanaaagggcttgcccttcgaaa

SEQ ID NO: 91887 - DNA, 536 bp, Zea mays
gaagtgatgttgaattattattataaggtgtgtcatttaagaagacatagtaggttctaccggttcgggattaccggctcgacccacgcgtccgccaggatatattgtttcaaaggacatagctaaagaagtttacaggaaacacaagagtggggagttaaagatgttcaagctggaggatgtcgcaatgggaatatggatcaatgagatgaagaaggatggcttggatgtcaagtatgagaatgatgggaggattttggttgaaggatgcgaggatggctatgtgattgctcattaccaagaaccaagggatatgatgtgcctctgggatcagtttcagaaaacaaaacgaggaacatgttgcaaataataacagaaatcatgcgaatggtgttttatgttacggtggctgctggttgccggtgcttgaatagacacctttacgctaaaacgttcttgatgtatacaagcctgcctaagaagattcttaaagaacttgaactgggaaggaagcaaacaatttttttggatttttt

SEQ ID NO: 91888 - DNA, 546 bp, Zea mays
  unsure (1)..(546): unsure at all n locations
gagcagagagnnagaatgaaggnaagaaggtcttcgtcaatagaggggcgatggattggtatcgctcgtactggttcggaattcccggctcgacccacgcgtccgcggacgcgtggggttgttattcagtttgtaaatcctaaagtgcaagcgtcaattggtgctaatacatgggtggtcagtggaactccacagacaaagaagctgcaagatctgcttccgtcgattatcaaccagcttggtcctgacaacctggacaatctgcggaggctcgcagagcaattccagaagcaggcctctggtgcttctggtgcagaggctggtgccagcgctggggctgttcaggacgatgatgatgacgttcctgagcttgtccctggagagacatttgaggaggccgcggaagagaaaaaggagtcctcatgattttgctacatgcctgctgttgttaaaccatgccattagaagggacctgttgagaactctgacctaccttatttgtgcctgtgggactggttatgtcatgatcgaaaatttgggtagggg

SEQ ID NO: 91889 - DNA, 535 bp, Zea mays
  unsure (1)..(535): unsure at all n locations
gagatgtgtnatgttttttntaaaggggtcgtttatgaggggatgtatagtatgctctactggtccggaattcccgggctcttactcaattgaggctggtgttggtgctggaattgacatgatcatggttccattcaggtacacagaagtgagcgacgacctgacgacacaagttcagaacaaggtcatccccatgagcagaatcgacgacgccgtctacaggatccttcgtgtcaagttcaccatgggcctgttcgagaacccttaccccgactctagcctcgccggcgagctcgggaagcaagaacaccgggaactggcgcgcgaagccgtcaggaaatccctggttctcctgaagaacggcaagtcctcctacgctccgttgctgcccctcccgaagaaggccggcaagatcctggtcgccggcagccacgccaacgacctgngcaaccagtgcggggggtggacgatcacgtggcaaggaagcagcggcaacaccactgccggcacgacgatccttttcgggatcgaggcc

SEQ ID NO: 91890 - DNA, 542 bp, Zea mays
  unsure (1)..(542): unsure at all n locations
gcgagagagtnatgaaaaaggnagaatgggcgtctgtcaatagtagggggataggaaagtatgctcgncttcggtcaaccgtctcgacccacgcgtccgcacggcgccgccgcttctgccgccgggagccgagcccaagcctaagcgaaagccatggcgagtggttctctgatcgcctctactttcgccagatctagccatgccctccccgctgccgccgcttcggccatctctcaggctcccagatcccagcacaccgcatctcctctactctccggccttggagcagcggctcgtgctttcagctcaagggctctatggaagggagcattcgttgacgctttcctgtctagaattaagaagaacagagaaaatatgaatggcaagaagatttggtctcgtagatcctctattttgccggaatttgttggttcctctgtgctcatttacaatgggaaaactcatgtccggtgcaagatcactgaagggaaggttggccattaatttggagagtgtgcttttacacggagacgaaagccccc

SEQ ID NO: 91891 - DNA, 539 bp, Zea mays
  unsure (1)..(539): unsure at all n locations
gtgagagtgnagaagaatgngaaagggttcngtcatgagggggggaggaaagtacgctcgtatcggttcggaattcccggcctcactggaaagactatcaccctcgaggtggagtcttctgacaccatcgacaacgtcaaggccaagatccagggcaaggagggcatccctccagaccagcagcggctcatttttgccggcaagcagctcgaggacgggcgcacgctggccgactacaacattcagaaggagagcaccctccacttggtgctgcgtctcaggggcggcatgcagatcttcgtgaagactctgaccggcaagactatcacccttgaggtcgagtcttctgataccattgataatgtcaaggccaagatccaggacaaggagggcatccctccggaccagcagcggctcatttttgccggcaagcagctcgaggacgggcgcacgctggccgactacaacattcagaaggagagcaccctncacttggtgctgcgtctcaggggtggcatgcagatcttcgtggagacact

SEQ ID NO: 91892 - DNA, 538 bp, Zea mays
  unsure (1)..(538): unsure at all n locations
gtgagagatnnatgtttgggtggaagggcttccgtctaaaagaaagaagtatgctanactccatcgggtcggaattcccgggtcgacccacgcgtccgagtaatcaccccaaatcctagggttctagtcgcttctcgtcgtttcgttcgtagatgacagagacaatggtgaaggcagttgctgtcctcgccggcactgatgtcaaggtcaccatcttcttttcacaggaaggggatggtccgaccaccgagactggaagtatctctggcctcaagccaggcctgcatgggttccatgtgcacgcgcttggcgacaccaccaacggctgcatgtcgactgggccacacttcaatcctgttggcaaggagcatggtgcaccggaagatgaggaccgccatgccggtgatctggggaatgtgacagcgggagaagatggtgttgttaatgtcaatattactgacagccagatacctcttgctggaccccactcgatcattggccgagcttgtgctggccatgcttgaccggattaccttgg

SEQ ID NO: 91893 - DNA, 523 bp, Zea mays
  unsure (1)..(523): unsure at all n locations
aggaggtnaccgtagagatcctgaattgacgntatcgaatctttttggtatntctccaccggttcgggattaccggctcgacccacgcgtccgcggacgcgtgggtcagcatccacatcggccaggccgggatccaggtcggcaacgcctgctgggagctctactgcctcgagcacggcatcgagcccgatggcaccatgcccagtgataccacggttggcgtcgcacatgatgccttcaacacgttcttcagcgagaccggttctggcaagcatgtgccgagggccatcttcgtcgaccttgagcccactgtcattgatgaggttcgcactggctcgtaccgccaactcttccacccagagcagctcatctcgggcaaggaagacgcagctaacaactttgcccgtggccactacactgttgggaaggagattgtcgatctatgcctggaccgtgtgcgcaagcttgcagacaactgcactgggctgcagggattcttggtgttcaatgctgntggtggtgg

SEQ ID NO: 91894 - DNA, 528 bp, Zea mays
  unsure (1)..(528): unsure at all n locations
ggatgaggaaggaggaggaagagtctgtcgtttagaagtatatgtaggctctcccggntcggtattcccggctcgacccacgcgtccgtgacgatgttgggatcctcaagacaggatgcggcaactcgtacgctccatttcctaaaggttgcttctacaccacctccggtgggctgcagagcttcgagcacccgttgcacgaggtcaaggcggtgccacgcgtggacagccaaggccagatgtgcggctccatcttcaaggtcgacagcgagagcaagaagaagcaggacgctagcatcccccgcgtcggcagtgctgccgactggtccaaccagttctgaccatcttcttgctatccattgtcccgtctactatacgaggtgcagagctgtgtatctgatgaatccatgagacgatttctgctacgtttcttgcacgcttgtcgaacactgtgagactcacatcgcgctcatctacgctacgtgtaactgatactaatgatacgggatgttccaagtggtgggagat

SEQ ID NO: 91895 - DNA, 503 bp, Zea mays
  unsure (1)..(503): unsure at all n locations
gtggattgcaatcgcttgtanntcccntnnnttcngataccggctggacccacgcgtccgccgctgctcgcctcgggtcaaaccctaagcagggagttgatttatccgctgcagccgtgagtaagttgcagtctgagtctgtcaaggatgccatctcccagattgttggggatgccaaggagaagaataggaagttcactgagactgtggaacttcagattggtctgaagaattatgatccacagaaggacaagcgtttcagtggctctgttaagttgccccatatccctcgtgccaagatgaaggtgtgcatgcttggtgatgcccagcatgttgaggaggccgagaagatgggacttgactacatggatgttgaggctctcaagaaaatgaacaagaacaagaagcttgttaagaggcttgccaagaagtaccatgctttcttggcatcagaggccatcatcaagcagattccccgtcttcttgggcctggtctaaaaagc

SEQ ID NO: 91896 - DNA, 512 bp, Zea mays
  unsure (1)..(512): unsure at all n locations
aggagttnncaggctcntgcatgaatggggagataaggcatgctctaccggttcggaattcccgggcactgatgtgcacgaaagccaccagtgtgaagctgttggaagagttgctgacatcatacagattccagccttcctctgtcgccagactgatcttctagtggctgctgctaagactggaaaaattatcaatatcaagaaaggacaattctgtgcgccttctgttatggtgaactctacagagaaagtaaggcttgctgggaatccaaatgtgatggtctgtgagcgtggtaccatgtttggctacaatgatctatttgttgacccaaggaaccttgagtggctgagggaaagcaactgcccagttgtagctgatgtaacacatgctctacagcaaccagctggaagaaagcttgatggtggaggtgttgcaagcggtgggctacgagaactaataccgtgcattgcanggacttctgtttgctgtggtgttgatggtattttcatgn

SEQ ID NO: 91897 - DNA, 513 bp, Zea mays
  unsure (1)..(513): unsure at all n locations
ggagtnagcgagggttgntctcgaaatctgaatataaagcatgctctaccggttcggaattaccggctcgacccacgcgtccgcccacgcgtccggaacattggaagcgggttatgcaaggccatgctggtgccaacttggtgcctcttgttgcttccaaccggattggcagagaaactgttgacactgagcatggcaagagctcgataaccttctatgggaattccttcattgcaggaccaaccggagaaatagtgaagcttgctaacgacaaagacgaggaagtgctggtggcagagtttgacttggatgagatcaagtcgattaggcatggttgggggatattcagggaccggcgccctgaactatacaaagtgctactgacgttggatggcgagaaacaatcataaaccccggtctcacgcttaatagtggtaaggcacaggcaggctccagctccacatcaatgttagatttttttttctccttttttaccctgtccaacgatgccat

SEQ ID NO: 91898 - DNA, 505 bp, Zea mays
  unsure (1)..(505): unsure at all n locations
aggtgcatctgcgttaagtcattatgctaggactntncncntnggttaaaaattccgggctggacccacgcgtccgngctcttctacgtggcggcgttcacgcacgtgctgcacctggccgcgcatgccggggtggggtacaacatggaggcgccgcagacgtacgtggcgtccaacgtggccgggctcgtcagcgtcttggaggtggcggacaagcacgccgaacccgaaaccgctgtcctttgggcctctgactctgtcccgtaccggcttaacaccgagacgcgcccttctccgatgaccaccgcaccgaccgaccggcgtcgctgtacgcggtcaccaagaaggccggtgaggccatcgcgcacgcctacaaccacatctacgggctctccatcaccggcctccgcttcttcaccgtgtacgggccgtggggctcgtcccgacatggcctacttcttcttcgcccgcagcatcatgaccggcgagcccgttacgctgttcc

SEQ ID NO: 91899 - DNA, 506 bp, Zea mays
  unsure (1)..(506): unsure at all n locations
nggaaggcttcatctagagggagagggtagtatgctctaccggtccggaattcccgggcgcactcgcggtagccggcggcggcggaggaggaggaaagcaggcaggccatggcgtcgtcgtcgtcgaccccggcggccgtccgcgagatgcagaaggatctcgaggtccaggccaacgccctcagcaagatccagaaagacatcgccaagaaccaccaggtccgcaagcagtacaccatccaggtcggcgagaacgagctcgtcctcaaggagctggagctgctcagcgatggggccaacgtgtacaagctcatcggaccggtgctggtcaagcaggacctcgcggaggccaaggccaacgtcaagaagcgcatcgagtacatctccgcagagctgaagcggatggatcgggcgctcaaagacttggaggaaaagcaaaacagcaagaaggaatcgatattcaagttgcagcagaggatgcaggctgtacaagctaaggcttagac

SEQ ID NO: 91900 - DNA, 504 bp, Zea mays
  unsure (1)..(504): unsure at all n locations
aggtgtgtctgcaattagaatatatgttggaatcctctacctnttcggaattcccgggtcgacccacgcgtccgagctttctgattttgggctagcgaaacttttgggttcagaaaggagttatgtcacaacgagggtcatggggacgtttgggtatgttgcaccagagtatgcgggcactggcatgttgaatgaaactagcgatgtctatagtttcggaattcttatcatggaaataatatctggccgtgtacctgttgattacaacaggccgccaggggagattaatctagttgagtggctgaagacgatggtcagcaacagaaattctgagggggttttggatccaaagatgactgagaagcctacttctagggcattgaagaaggctttgctagtggctctgcggtgcgtagaccctgaagctcgcaagaggccaaagattgggcatgtcattcacatgcttgaggttgacgatttcccgtacagagatgagcgccgggg

SEQ ID NO: 91901 - DNA, 499 bp, Zea mays
ggtgtgtgtgattggggggaagggggaaatgctctaccgttccggaattcccgggtcgacccacgcgtccgctcctctctcgcatccgcagcctctcgagctctactccatcccctcgatctcgaagcgcgagcagcagcagtcaggcggccatggacgccagcgcagcaggagccggcgggaaggcgaagaagggcgcggccgggcgcaaggccggcgggccgaggaagaagtcggtgacgaggtccgtcaaggccgggctgcagttccccgtcggccgcatcgggcggtatctgaagaagggccggtacgcgcagcgcgtcggcacgggcgcccccgtctacctggccgccgtcctcgagtacctggccgccgaggtgctggagctggccggcaacgctgccaaggacaacaagaagacccgcatcatcccgcgccacgtgctcctggccatccgcaacgacgaggagctcggcaagctgctgtccggcgtcaccat

SEQ ID NO: 91902 - DNA, 498 bp, Zea mays
agtgattctggctccgatatattagctatccctcgtaccgttccggaattcccgggtcgacccacgcgtccgcggacgcgtggggaatttaagaagcataaatgcatacataaaagatatgcttaccacgtggtgctaaaaaccttggatttgctgcgatcgatgccttcccttgttgatgtggatgttccaaacggtggacattttacagtttgcggtgatgtgcatggccagtactttgatttgctcaacatatttgacctcaatggccttccatcagaagaaaatccttacctcttcaatggcgattttgtggaccgaggatctttctccgttgaagtcatactcaccctttttgctttcaagtgcctctacccaaaagctatgtaccttgcaagaggaaatcatgaaagcaagagcatgaacaaaatatatggctttgagggggaagtgaggtcaaagctgggtgagaagtttgttgaactttttgctgaagtc

SEQ ID NO: 91903 - DNA, 504 bp, Zea mays
  unsure (1)..(504): unsure at all n locations
agatntcgtcngtcgtaaagccggaaggcgagaagttagtgctcggttcggaattaccggcccgacccacgcgtccggcacaagggccaggacgtagccgtcaaggtcatccccaaggccaagatgacaacagctgtcggcattgaagatgtgagaagagaagtgagaatattgagttctctgacaggccacagtaatttagtgcagttctacgatgctttcgaggatgaagataacgtgtatatagttatggaattatgtaaaggaggtgaactgctggacaggatattggctagaggtggaaagtactctgaagaggatgcgaaggtcgttatggtacaaattttgagtgttgtatcattttgccatcttcaaggtgttgttcaccgtgatctgaaaccagagaatttccttttctcttcaaaggatgaaaactctcccttgaaggtcatagattttggcttgtctgactttgtgaagccagatgaaagactaaacgacatt

SEQ ID NO: 91904 - DNA, 501 bp, Zea mays
  unsure (1)..(501): unsure at all n locations
aagggtatcgtctacagaaggagaggggtaggaatgtctccggntcggaattcccggctcgacccacgcgtccggcaaccccgtcgtcttccgccatgatccggttcatcctgctgcagaaccggcaggggaggacacggctggccaagtactatgtcgctctcgaggactccgagaagcacaaggttgagtacgaggtgcatcggctcgtggtcaaccgggaccccaagttcaccaacttcgtcgagttccgtacgcacaaagttatctataggagatatgcaggactttttttctctatatgtgtggacatcaccgacaacgaattggcatacttggaatgtatccatctgtttgtcgagatattggaccatttcttcagcaatgtgtgtgaacttgatttagtatttaatttccacaaggtttacttgatattggatgagttcattcttgctggagagcttcaagaaacaagcaaaagggcaattatagagaggatgg

SEQ ID NO: 91905 - DNA, 501 bp, Zea mays
  unsure (1)..(501): unsure at all n locations
atgcttgcgtccacgaacggaggtgtatagtatnactctaccggtctcggaattcccgggtcgacccacgcgtccgaaggatggcgtgctcgagcagatcggtagcgggaagggctatgtggacatgtccactggtgacgctgcaacttcgaccaagattagcgaggcagttaaacaaaaagggggagctttccttgaagctccagtttcagggagcaagaagccagctgaagatggccaattggtcattcttgctgcagggaacaagccattgtatgatggtatgattcctgcatttgatgtactggggaagaagtcattctttctgggagagattggaaatggggcaaagatgaagcttgtggtcaacatggtcatgggaagtatgatgaattctttgtccgagggactctgtttggccgacaaaagtgggctgagcccccaaacacttcttgatgtactggaccttggtgccatcgcaaacccaatgttcaagctgan

SEQ ID NO: 91906 - DNA, 503 bp, Zea mays
tagaggcttcgtcgatgagggaggaatagtatgctctaccggtccggaattcccgggtcgacccacgcgtccgcccacacaggcagttgtcaccctcaaatcggataatcaggtctacttctggaaatgatggtgtcaattccaggagtccgtttgataatattcaacagaagaaattagcagcgcttggagccaatgcagcgcgaaggcctttcaaagattttctcagtacattgacaagaaccaaagaaagtatatcgcgcgcgacacgtcttgctatggaatgtgctaaatttggcattctggtgatgtatgatgcctttggtgttaggctacatgtagggaagcaagcagaggtcttgaaccagattgtgtatgagcttccatcagaacatccactggctgaaacaagaccactgcgagagctgctagggcacacacctccacaggtatttgctggcggagtgcttggatttgcagtagccacatttacagcgatgatc

SEQ ID NO: 91907 - DNA, 503 bp, Zea mays
  unsure (1)..(503): unsure at all n locations
gagaggcttcgtcgacgcgggagttaagtatcgctctaccggtccggaattcccgggtcgacccacgcgtccgagcgcagatcgagtcatcaagctagctagcccggagcacgcctagacacgccagcagcggtggcggctcagctggccgtcgcgtttctcgccttgttgtcctcctctgccttcttggccgtgtctggccagaagttcaacgccatcttcagcttcggcgactccatgtccgacaccggcaacctgtgcgtgaacggtccccccgccggcctgacgctcacccagccgccctacggcgagaccttctttggccgcgccacctgccgctgctccgacggccgcctcgtcgtcgacttcctggccgagaagttcgggctaccgctgctgaagccgtcgaagcagggcggctcagacttcaagcagggcgccaacatggcgatcattggcgcgaccaccatggactcgggcttcttccagtctctgggcatcgn

SEQ ID NO: 91908 - DNA, 494 bp, Zea mays
taggtttctcaatgaaggggggaggagagaatgctcggttcggaattcccggctcgacccacgcgtccggacacatgtatggtgatgcttctatttctctttgaaactgaaacttcaggtgtgcctagctaaaggtttaggcgtgcccattggattcaaaggcttctgtatatctatcgagcacgtttatagatttactgatcagattgataacatcacacacacacgaagttcatcttcaacatgcttagtattattatgcatctgatggtatggtattgtctctgatagatccatttgctgaggctaatgctgaggagtctggtgttggtcttggaacgaaggattatgtgcatatgcgcatctaagagcgcaacgatagaaagagtctgactacagtccagggtctgaacaaagaattcagctataacaagaacctcattgatctgaagaaggaattctgctgcaatggtactgaagttcaggacccagag

SEQ ID NO: 91909 - DNA, 507 bp, Zea mays
  unsure (1)..(507): unsure at all n locations
gagtgagtgtatcntcaatgaggggcgatggacggcatctcccggttcggaattcccgggtcgacccacgcgtccggttttaagggtattggcaaagattctataatattgagttggctgcattcttttggtaagcagttttatagatcagtatctaaatcagattacaccacaatgcgtcttggttttatcatgactcactgccctggaaatccaaaatttgatttccatagatacatggtaagggttttagaggcggattttaagaaagtggtaggcataagctggtacttgtgggtcttcgtggtgatatttctgttgctgaatgttaatggctggcacacatacttttggattgctttccttccccttattcttctgttagccattggcactaagctggagcatgtcatagctcagctagcccatgatgtagctgagaagcacacagcggtcgagggcgatgtgatcgtaaaaccatcagatgaacacttctggttcggcaag

SEQ ID NO: 91910 - DNA, 497 bp, Zea mays
aggtgtcactctttaattgaacaaagtatgcatcaccctcatcggaattcccggctggacgcacgcatccggttgtaagggtattgacacagattctattatattgagttggctgcattcttttgctaaggaggtttataaatcagggtcgaagtcatattacaccacaatgcgtcttggttttatcatgactcactgccctgtaaatccaaaatttgatttccatcgatacatggttagggtcttagatgcggattctaataaagtctacggcatcagctgctacttgtgggtcttcttagcgatatctctcgctcatgactgattatgcttgtcacacatacttttggattgctcaccttccccttattcttctgatagccattggcactaagcttgcgcatgtcatagctcacctagcccatgatgtatctgagaaccacactgctgtcgacagcgaattgatcgtaaaaccatcagatgaacactttctggtc

SEQ ID NO: 91911 - DNA, 499 bp, Zea mays
taggtatcttcatgcgagggggggaggggcgatgctctaccggtccggaattcccgggtcgacccacgcgtccggctgcctccgcctctcgagtctcgtccacccgtcgtcctcctagctcctctactggccggtcgccatgggcaagattaagatcggaatcaacggcttcggaaggatcggcaggctcgtggccagggtcgccctccagagcgaggatgtcgagctcgtcgccgtcaacgaccccttcatcaccacggactacatgacctacatgttcaagtacgacaccgtccacggccactggaagcacagcgacatcacactcaaggactccaagacccttctcttcggtgacaagccggtcaccgtctttggcatcaggaaccctgaggaaatcccgtggggtgaggctggcgctgagtatgtcgtggagtccaccggcgtcttcactgacaaggacaaggctgctgcacatctcaagggtggtgccaagaag

SEQ ID NO: 91912 - DNA, 501 bp, Zea mays
  unsure (1)..(501): unsure at all n locations
aggcttcgtcaaagagggaggggagggaagctctaccggtccggaattcccgggtcgacccacgcgtccggtcgagtgcgtgctgccggtcaacacggaggccacccccaaggcgcagggcgtcttccgacgtcgacatgatcatgctcgcgcacaaccccggcggcaaggagcggtacgagcgcgagttccgcgagctcgcaaagggcgccggcttctccgggttcaaggccacctacatctacgccaacgcctgggccatcgagttcatcaagtgaaccaccgtcgccgcgatgagatggcatggctgccacatgctttgcttgcttggtcctcgtatcgtacgtcgccgtcgtcgtcttcttctggttattgcgctgctacctcgctgctctcgcgtatgcatgtacttttgcttaattttctttcttcatatcatgcactctggctggcctagactgcccccgatccatggtggccggtacgtcttgtcgagctctn

SEQ ID NO: 91913 - DNA, 501 bp, Zea mays
gagctgcatctagggggggggagagggaggctgtaccggtccggaattcccgggtcgacccacgcgtccgctatgcgcgtccagcgtctgctgaggctgaggatggcgtcccgctcgtgctcccgctgcgctgccttggcgccgcacgctgcgctcccgctctcctctctcctcgccccctcgccctctgccgcgcgccctcgatccgcgcccctctcgtgcgcagctcggccgtgcaggggccacgcggcggcgtcagcgttgcacggcgcggcagggcggaggcccccgagcgtggcggcgatgtcgtcgtcgacgccgccgccgggatccgtgcagaagtcggaagaggagtgggaggccatcctcacgccggagcagttcaacatcctacgcctcaagggcaccgagtaccctggaacgggtgagtacgacaagttctttgaggagggcatttataaatgtgctggatgtggaactcccttatacaaatcatcgaca

SEQ ID NO: 91914 - DNA, 508 bp, Zea mays
  unsure (1)..(508): unsure at all n locations
aatgtgttgttcnngattggcgagggtatgggtgaatgcttgtaccggtccggaattcccgggtcgacccacgcgtccgcacggacacacaacttctccatacacgccgtagccatggcttccgctgcgcagaagaagatggcaattgtttgcttgatgctgctggccgtcgtcggccaaatcgtcgctgatgctgatgttaccgtagaacatcccagccgcatctgcaccgaaacggtgattgatcctcgtgttcccaacaacgagtgcatctgctccaagaactgcgcctgtgccggtaagtgcatccttgagtcggctgatgctgtccagacctgctttgtcgactgcgtcctcaagaacgactgcatctgcagcagcaagatcatccccggcgctgacgacccaaaggctaatgccaagtgaagtagtactgctatcatcccgaataatgtcgtacgtatagtacctgctgaataaacctcccatgcaccaacagggagagagt

SEQ ID NO: 91915 - DNA, 495 bp, Zea mays
  unsure (1)..(495): unsure at all n locations
agtgtgtgcatggggggggtggagagattgctccggttcggaattcccgggtcgacccacgcgtccgtgagcttccgtggatactgtgcggacggacccgagcgcgttctggtgtacgacttcatggcgaactcaagcctgtatgcgcatctccatggaccgcattccgcggagtgtctcctcgactggcggaggcgagcatcaatcgccatcggcaccgctcgggctctcttgtaccttcatcgccacgcaacgcctaagataatccacggaagcgtcaaggccaccaacgtgctgctggattcagacttccgggcgcacgctggcgatttcggtctggcaaggcttattcccgacgacggaacggaccacgcaaagatagccagcagcgagagccagcgaggctaccttgctcccgagtacgccgncatgttcggcaaaccaactgcaggctgcgatgtatacagcttcgggatcatactgctggagctngcn

SEQ ID NO: 91916 - DNA, 498 bp, Zea mays
  unsure (1)..(498): unsure at all n locations
ggtgtgtccacgagcggggaaggagggaagtgctctaccggtccggaattcccgggtcgacccacgcgtccgactaaaggcacaagccgacatatggcggctcagcctctcctacctcacgcccctgtcgctgaggtgcgccgtggagcttggcatccccacggcgatctaccgccatggcggggctgcctcagccgctgagctggtcacggcgctgtctctcccctccactaagctgccgttcctccgccgcctgctgcggctcctcgccgcgtcgggcgtgttcaccgtcgacaagcagagcacggaggaggagcggtaccgcatcagccccgtgtcctacctcctggtggacggcatccctcacgaggaccacatgaaccacaccgctctggtgctcacctgcacctcgacgcgctacatcgaggcggngatagggctggcggagtggttcaagagggacgtggtcacgtcaccgttcgaggagctgcacggngc

SEQ ID NO: 91917 - DNA, 502 bp, Zea mays
gggaaaggtttatcaagaggggggggagagaagctgtaccggtccggaattcccgggtcgacccacgcgtccggttggaaccctccgggtcgacattcttgggcctggatgacaacaggttgtgtagatgggatatgcgcgacgccagaggccgggtgcagacaatcggtagctcatcagactcaccagtgctgaactggtcacagggtcatcagttctcgcggggcaccaatttccagtgctttgcaagtactggggatggttcaatcgttgttggttctgtggatggcaagatcagactctattctaagagctcgatgcgtatggcgaagacagcattcccaggccttgggtccccgattacacatgtagatgttacttatgatgggaaatggattctgggaacaactgacacatacttgatcttgatatgcactatcttcaaggacaaagatgggaaagaaaagactgggtttagtggccgaatggggaataggattgc

SEQ ID NO: 91918 - DNA, 503 bp, Zea mays
  unsure (1)..(503): unsure at all n locations
tatgtnttctcnaatgcgggacgaaggggattagcttctaccggtccggaattcccggggtcgcgacatcgccatcctttgccaacaggctgccccacatctacaagaaccctgactcgtatgaccctgatcgggtcggtcctggaagggaggaggacaaggctgcaggcgccttctcatacatctccttcggtggcggcaggcatgggtgcctcggtgagcccttcgcctacctgcagatcaaggcaatctggacgcacctactgaggaactttgagttcgagctggtatcgccattcccagagaacgactggaacgccatggtggttggcatcaagggcgaggtgatggttaactacaagaggcggaagcttgccgtggacaactaagattgtggccgcagtctctagatgcttgcttcttgttgattcaattgttttcacatgtttgtcagcatttgttcagtgcaagttctgctgtacgcaagccagccttgttagggg

SEQ ID NO: 91919 - DNA, 501 bp, Zea mays
  unsure (1)..(501): unsure at all n locations
aagggtatcngaatgggggccgaagggagatgagcttgtaccggtccggaattcccgggtcgacccacgcgtccgcacacatacacaagcacaagcgcactctagcaatggcttctgaggttgtccgccctagcgacgccgagctactaaaggcacaagccgacatatggcggctcagcctctcctacctcacgcccctgtcactgaggtgcgccgtggagcttggcatccccacggcgatctaccgccatggcggggctgcctcagccgctgagctggtcacggcgctgtctctcccctccactaagctgccgttcctccgccgcctgctgcggctcctcgccgcgtcgggcgtgttcaccgtcgacaagcagagcacggaagaagagcggtaccgcatcagccccgtgtcctacctcctggtggacggcatccctcacgaggaccacatgaaccacaccggtctgggggctaactggaacttgacgcgctacatcgaag

SEQ ID NO: 91920 - DNA, 508 bp, Zea mays
aggtttttttctggttgattggaggaagggggaaatcttctaccgttccggaattcccgggctagcaaccagctagctcgggcggcagcaggcagccatcatgtcggaggagaagcaccaccacttcttcaaccgccacaagaaggacgaggagcagcccgccggcgagtacgggtactccgagaccgaggtggtcaccgccaccggcgagggcgagtacgagaggtacaagaaggaggagaaggagcacaagcacaagcagcacctcggcgaggccggcgccatcgccgccggcgccttcgcactctacgagaagcacgaggcgaagaaggaccccgagcacgcgcacaggcacaagatcacggaggaagtcgctgccgcggcggccgtcggcgccggcggctacgtattccacgagcaccacgagaagaagaaggaccacaaggacgccgaggaggccagcggcgagaagaagcaccaccacctcttcggctgaccgtagtaccgg

SEQ ID NO: 91921 - DNA, 502 bp, Zea mays
  unsure (1)..(502): unsure at all n locations
gagggtttcgtgaaagtgggcgacgtacggctctcccggntcggaattcccggctcgacccacgcgtccgatgtagttctgcgatcacatttctgaggaatagaatggataggcctcgaaagcgtggtgcagactcattatccagccgggctgccctgatgcttgatgcagaaagagaaccagaaaagacatggagccccatagttgaaatacattatgtagggggaacttatagaggtagatgtcaagaaggtgtccctgaaggaaagggacgtctaaccttcagtgacggaagcttttatgatggactctggaggtatggtaagagatctggtttggggactctatttcacagtaacggtgatgtataccatggaacgtggagggatgaccttattcatggaaagggctggtactattttcacagcggtgaccgctggtttgcaaatttttggaagggcaaggctaatggtgagggtagattttatgccaatgatgggag

SEQ ID NO: 91922 - DNA, 497 bp, Zea mays
agtatatcctaagggggcacgagggcagtgctctaccggtccggaattcccgggtcgacccacgcgtccggcgcctctacatttcttctctctctgctcctccgcctccgcctgatccatccaagacagggatcgccatgtcggactcggaggagcaccacttcgaatcgaaggccgacgctggggcgtccaagacctacccgcagcaggctggcaccgtccgtaagaacggcttcatcgtcatcaagaaccgtccctgcaaggttgtggaggtttctacctccaagactggtaagcatggccacgccaaatgccactttgtcgccatagacatattcaatgggaaaaagcttgaagatattgttccttcatcacacaactgtgacattccgcatgtgaaccgtactgagtatcagctgattgatatttctgaggatggatttgtgagccttcttacttcagatggcaacactaaggatgatcttagactcccaact

SEQ ID NO: 91923 - DNA, 504 bp, Zea mays
ggtaaaggcttcgtctagggaaagaggagaaaagctctaccggtccggaattcccgggtcgacccacgcgtccgggccccggtaaccttacttacagaaggtgttaaagttagtccagcagttttgcagtctgctggtttgaacttgaaacagatatacacaaggtcattgattgctgcatgctgcttccatgcataccaacaggtgtcatacatgatcctcgccagggtatccccagtcacacattcagtgggcaattgcgtcaagcgtgtggtggtcattgtgacctcggttctgttcttcaggacccctgtttctcccatcaactcactcggtaccgggatcgctcttgctggagttttcctatactcgcaattgaagaggcttaagcccaagcccaaggctgcttgatcatagacctttgcaggtccatccaatagaacttttgaagttatgctatgccattggaatgattagtgagtgccgtagttagaatgatgttta

SEQ ID NO: 91924 - DNA, 501 bp, Zea mays
  unsure (1)..(501): unsure at all n locations
tatgtnntctctggatgtgggacgaagggggaaagctctaccgttccggaattcccgggtcgacccacgcgtccgctattgccctaatcatctacacattcattgcagtttggtttgttggtggcctctctgggttccatctgtatctcatgagcacaaatcagacaacatatgagaacttcaggtatcgctatgatcagcgagacaacccatacaacaagggagtcatggaaaacatcaaagagatcttctttacaacgatccctccttccaagaacaacttctgtggtagggtcgaacaggagcatggtctgaggccccgtccaacgaatggtttcatgagtccaaacatggggagagctgttggcgacattgagatgggtagaaaaccagtggcttgggatgagcctaggatggcggctgaaattggtgatttaggagcaggtctgagcaacctgttggaggacaaggatggcaggtttcgtaccacatcttcagatc

SEQ ID NO: 91925 - DNA, 505 bp, Zea mays
  unsure (1)..(505): unsure at all n locations
tggccctctgcaaaggggggagggaaggaagagattcctccggttcggaattcccgggtcgacccacgcgtccggcgccactgtccagtgcgcgcgtcaagcttgcttagctagccgccatggcctccctcggcgccgtctccgtgaagcccgtggccatcaagggtctcgccggcagctccatctccggaaggaagctcgccgtcgccaggccgtcggcccgctccatccgcaggccccgcgcagccgccgtggtggccaagtacggcgacaagagcgtctactttgacctcgacgacatcggcaacaccaccggacagtgggacctctacggctctgacgcgccctcgccctacaacccgctacagagcaagttcttcgagacgttcgcggctccgttcaccaagagaggtctgctgctcaagttcctgctgctgggcggcggctcacttctggcctacgtcagcgcgtcggcgtcaccggacctnctgccgatcaagaaggg

SEQ ID NO: 91926 - DNA, 503 bp, Zea mays
  unsure (1)..(503): unsure at all n locations
gagggttcnatcacgaaaaaagagggatgagtattctcggtccggaattcccgggtcgacccacgcgtccggagggatgatgctattaaagatcttaatagagctatggagattggggatgagaatgcggttgaaaaatttagtaaaaggactgtcaaggttacaggaaggcataatgatgactgcaagaggctgttaaggttgatgggtgtccctgtagttgaggcaccaggtgaggctgaagcacagtgtgcagcactttgtgaaaatcaccaggtttatgctgtagcttcagaggacatggacacactgacttttggtgcccgaaggtttcttcgtcacttaactgaccttggttataagaaatctcctgtgacagaatttgatgtgtcaaaggttttggaagaacttggactcacgatggatcagttcattgacttgtgtatccttagtggatgtgattactgtgagaatattagaggtatcggaggacaaagagcctt

SEQ ID NO: 91927 - DNA, 498 bp, Zea mays
  unsure (1)..(498): unsure at all n locations
gggggtttnnaattggggggataggggatgatctctacctgtccggaattcccgggtcgacccacgcgtccggtgggttggcttctcctccccctccggttcgggttcgggttcgtgaggttctccggggttcggtttcgtgggtgagcggatcgagatggcggcgtcggatgttgagtaccgctgcttcgtcggcggcctcgcctgggccacggacgaccactccctccacaacgccttcagcacctacggcgaggtcctcgagtccaagatcatcctcgatcgggagacgcagaggtcccgcggcttcggcttcgtcaccttctccacggaggaggcgatgcggaacgccatcgagggcatgaacggcaaggagctggacggccgcaacatcaccgtcaacgaggcccagtcccgccgccggccgtggaggccgcngcngcngccggttccggtggtggccgtggaggcggcggctacggcggtggcgggcgccct

SEQ ID NO: 91928 - DNA, 506 bp, Zea mays
  unsure (1)..(506): unsure at all n locations
acgtntttattccaaagggaggagggaaggaagagattcctccggttcggaattcccggctcgacccacgcgtccgcggccatcgcgctgggcgcggtgctcatggccatcgctgtcgcgggcctcgccggcgcctgcttccgcgccacctggctgctatggctctacctcctcaccatgctcgtgttcatcgtcgcgctgctctgcttcaccgtcttcgccttcgccgtcaccaacaggggcgccggggaagccgtgtcgggggtaggctacagggagtaccgcctcggggactactccacctggctgcggcgccacgtcgaaagccgcaaggactgggcccggatccggagctgcctcgccgacgcgcacgtctgcaggcgcctggaggagagggagagcaaggacgcggcgggtctggctcggctcggcctgtccccggtcgagtccgggtgctgcaagccgnccacgagctgcaacttcacgtacaccggcnggcacgagtg

SEQ ID NO: 91929 - DNA, 512 bp, Zea mays
gagataaaggccttctatctacgagggtggggaggagagaatgctcggtccggaattcccgggtcgacccacgcgtccgcaaccagtacaaggctacgattggggcggatttcctcaccaaggaggtgcagttcgaggacgaggctcttcactctgcaaatatgggacactgctggtcaggaaaggtttcagagtcttggcgttgcattctaccggggagcagattgttgtgtcctagtctatgatgttaattctatgaaatcgtttgataatcttcacaactggcgtgaagagtttctaattcaggcgagcccatcagatcctgacaatttcccttttgttctgttgggtaacaaagttgatgtagatggtgggaacagccgtgtggtgtcggagaaaaaggcaaaggcatggtgcgcctctaaagggaacatcccgtactttgagacgtctgctaaagatggaacgaacgtggaagatgccttccagtgtattgtaaagaatgctctgaa

SEQ ID NO: 91930 - DNA, 505 bp, Zea mays
gtgatgagtttttttagagacgggaggaagcatgctctaccggtccggaattcccgggtcgacccacgcgtccggcagcagcaggaaccctagcaccgccgcatccgcagccatgggtatcgacctcgttggcggtgggaggaacaagaagaccaagcgcacagcgccgaagtccgacgatgtttatctcaagctccttgtcaagctctaccgtttcttggtcaggaggaccaagagcaacttcaatgctgtcattctcaagaggctcttcatgagcaaaaccaatcgcccaccaatctccatgcgccgccttgtcaagttcatggaaggaaaggagaagaacattgctgtgattgttggcacagtcacagatgacaagaggatccaagaggttccagcaatgaaggttactgccctgaggttcaccgagacggcaagggccaggattgtcaatgctggtggggagtgcctcacatttgaccagcttgctctccgtgctccactt

SEQ ID NO: 91931 - DNA, 503 bp, Zea mays
aggtgtctgctaagagggggaatgagagaatcgctctaccggtccggaattcccgggtcgacccacgcgtccgaacaaaagcaaatgaagagtccttaacgaggaaagatatcatggagagagtggataaagggctatcagcttgtgatgaagagacttggcttgaggaatataaccaagatgataataggtatagtgctggcaggggtgcccacttgaatcttaagcgtgcagagaaggcaaggataactgtccaaaagattccaactatgattgacagcttgatagccaaaacttttgcatgggaggatgaaagaaatgtgccatttttatatgatgggattcgtttggttgccattttggaagagcaaaaactcagaagggcacaaagggaggaagagaagagacgcagccgggatcagaggaagctgcacagtttattgcttaaggagaaggagttgattttcgggtccaaacctagtcctagaaagacaagcagcttc

SEQ ID NO: 91932 - DNA, 500 bp, Zea mays
aggctgtgtccacagcgggggatgggagtaattctccggttcggaattcccgggtggacccacgcgtccgcgcaagctttgtccacggttctgacggcctgggaaaccaggatttccctccaccggctggcaagcctatagatcagtccgctgctgccttcctggttgagcaagcaaatctgtaccctggacaagttaccattgttgctctcggtccactgaccaaccttgctctggcagtggagcttgacccttcgttcccgaagaagatagggcagattattattcttggaggtgcgtattcagttaatggaaatgtgaaccctgcagctgaggcaaatatctttggggatcctgatgcggcagatattgtgttcacctgcggtgctgatattttggccgtgggactaaatgtaacccaccaagtagttctaaccgatgctgacagggagaagcttgaacagtgtgatagcaaatatgcccgctacttatgcaagata

SEQ ID NO: 91933 - DNA, 504 bp, Zea mays
  unsure (1)..(504): unsure at all n locations
nagtgattcgtcatgggggttggggaggagagtaacgctctacccggaattcccgggtcgacccacgcgtccgccagaggagcaccctgtgttgctcactgaggctcctttgaacccaaaggccaacagggagaggatgacccagattatgttcgagactttcaatgttcctgccatgtacgttgcaattcaagcagtgctgtcactctatgccagtggacgtactactggtattgntctcgactctggtgatggtgtgagtcacactgtgcccatttatgaaggatatgcccttccccatgccattcttcgtctggatcttgctggtcgggacctcacagactccctcatgaaaattctcactgagaggggttattccttcacaacctctgccgagcgagaaattgtgagggacatcaaggagaagcttgcatatatagctcttgactatgagcaagagttggagactgccaagaacagctcctcagttgaaaagagctatga

SEQ ID NO: 91934 - DNA, 501 bp, Zea mays
  unsure (1)..(501): unsure at all n locations
nggtagtggtcgcaggggggagggagagatgctctnctgnttcggaattcccgggctgagatggctggaatgagccacagaatccgtgagagaactgatgctcttgatgctgctggcaacacaactgctgctattggaaaggggtttgccattggttcagctgctcttgtgtccctggcgctttttggtgcctttgtcagcagagctggagtgaaggtcgtcgacgtcctctcccccaaggttttcattggtttgattgttggagccatgcttccctactggttctctgccatgaccatgaagagtgttggaagcgccgccctgaagatggtggaggaggtccgcaggcagttcaacaccattcctgggttgatggagggaacagccaagcccgactacgcaacctgtgtgaagatctccactgatgcttccatcaaggagatgattcctcccggcgctctggtcatgctgactnccctcatcgntggaaccctcttccgg

SEQ ID NO: 91935 - DNA, 503 bp, Zea mays
  unsure (1)..(503): unsure at all n locations
agtctatcttcatgggcccggaggagggaatgctctaccggtccggaattcccgggtcgacccacgcgtccggcagaagttagcaagcagtgcaacgcgcttccaagaggtgaattcgcctcaaaagcgactgagccacagcttcactgtgttcgcgaaagatatggttgaggcgatatcattctcaaatctgtatgcccctgagcatttgatcatcaacgtaaaggatgctgagcagtgggaggagttcatcgaaaacgcagggtcagttttcttgggccaatggaccccagagagcgtgggcgattatgcgagcgggacgaaccatgtccttccgacctatggttacgcaaggatgtacagcggtgtatcgctgaactctttcctcaaatacatcactgtccaatccctaacagaggaagggctgagaaagctggggccgtacgtcgcgaagatggccgaagtggaggggctagaggcgcacaagagagccgttaccctan

SEQ ID NO: 91936 - DNA, 497 bp, Zea mays
cagttcttctgctaacgaatatattgcatcctctaccggtccggaattcccgggtcgacccacgcgtccggcggaatgggaattgctattctttctacttctcgaggtataatgacagatcgagaagcgcgactaaacagaattgggggagaagttttatgttatatatggtaatggccccacctatagtacccaaattctatctcgaacttcctattttgaaaataaaaatagaaaaataggagaaaaatatatgacagaaaaaaaatagtagagaaaaaaaaaacccgagagaagcaaaagtcactttcgaaggtttagttacggaagccctacccaacggaatgttccgcgttcgcctagagaatgacacgatcatcctgggctatatttcaggaaagatccggtctagttctatacgaatactgatgggggatagggtcaaaattgaaataagtcgttatgattccagcaaaggtcgtataatttatagactt

SEQ ID NO: 91937 - DNA, 500 bp, Zea mays
  unsure (1)..(500): unsure at all n locations
tggggntnnnnntttgaatctatcgtagtactcctctacctgtccggaattcccgggtggacccacgcgtccgcagatgatggttacggcgtggtcgggatggaggcggacgcagacgcggacgcggacgaggagatgatggcgtgcggcggcggcggggagaagaagcggcgcctgagctccgagcaggtgcgcgcgctggagcggagcttcgaggtggagaacaagctggagccggagcgcaaggcgcggctggcgcgcgacctcggcctgcagccgcgccaggtcgccgtctggttccagaaccgccgcgcccgctggaagaccaagcagctggagcgcgactactccgcgctccgncagtcctacgacgcgctgcggcacgaccacgacgcgctgcgccgcgacaaggacgccctcctcgccgaggtagttgtcgacgttatgccgttatacaagctgctggacgagcacgatgacgcgcgcaatggctgaccgcn

SEQ ID NO: 91938 - DNA, 537 bp, Zea mays
  unsure (1)..(537): unsure at all n locations
ggagcttatgtctgatcttcagctactgacctcactgaatnaccggtccggaattcccgggtcgacccacgcgtccgatcataaaggactttgatgaacctggtactcttgcaccaactggtcttttcgttggaggtacagaggacatggtgatccaaggtgaacctggagttgtcatccgaggaaagaagggcactgggggcattactatcaagaaaaccggcatgtccttgattattggtgtctacgacgagccaatgactccagggcaatgcaacatggtggtggagaggctcggcgattacctgatcgagcagggcttctaaaagttcgtcatgttctgttttggtcatttgggcaccaaagtttgcgcctcatttggttctgtaatccgtgagctcgtgcatgtacttggcgtattgcatgcagtgaataatttagcttgggtttgtttgttgggggcagtgttggggacggatttggattggggtttatgcttggcatcgcgtcgtatcgaaactcagctgctgtttcgct

SEQ ID NO: 91939 - DNA, 543 bp, Zea mays
  unsure (1)..(543): unsure at all n locations
aggcgcgtattttcttgatgcttagcttggactgcacgtaccnacnggtccggaattcccgggtcgagccacgcgtccgctttgctctcgcctcgcgcgctccccccccttcctccccgcgcgcatcgtgccgttcgccaccggagggcgccgatggaggtgggcgccgtgcccagatccgccgcggcctgccgtgcggcgcccctgctcccggccgttcgagccgctgcgtgccacctggccctgccccggcgcgcgttctccgcatccgtcgcggcggcaccggcgccgcgccgcctcgccgctcgtcgcgctgcggatggtgacagcgtggagacggcgccggaggcggtccccattgagaaaaggttccctcccttcccgagcgtcatggacatcaaccagatccgcgagatcctcccccacaggttcccattccttttggttgatagagtaattgaatacaaggctggagaatatgcagtggggatcaagaatgttacaataaatgataatttcttcccaggacattttcctgaacgg

SEQ ID NO: 91940 - DNA, 522 bp, Zea mays
  unsure (1)..(522): unsure at all n locations
gggaggtgtgtctgatctcagtcgcgattcgnatggccgtactcnttcggttcggannnccggnggggacgcacgcgtccgatcgtgtacgccctggtcgcgcggggcacggtggtgctggccgagttcgccggggtcgcgggcaacgccggcgccgtggcccgtcggatcctcgagaagctgccgcccgacgccgagtccaggctgtgcttcgcgcaggaccggtacatcttccacgtcctccgatccgacgccgccggcatcaccttcctctgtatggccaacgacaccttcggaagaaggatcccctttctctacctggaggacatccaaatgaggttcatgaaaaactacggcagagtcgcccactctgcgctggcttacgccatgaacgatgagttctccagagtgctccatcagcaaatggagttcttctccagcaacccaagcgccgacacactcaaccgtctccgtggagaagtcagcgagatacacaccgtcatggtcgacaacatagagaaa

SEQ ID NO: 91941 - DNA, 517 bp, Zea mays
aggtcgctctgtccatgtaagaatctgattgtatctgctcgtaccggtccggaattcccgggtgcgacccacgcgtccgcaacttctcatcaaatcagaccctggtgaagttgttaaacctgaccaattcaaggcgagtaacgatgaggggatgccaatttaccagaggcctttcatgaaggggaagctgtacatccatttcacggtggagttccctgactcgctggcaccagagcagtgcaaagctctcgagacagtacttccaccaaggccttcatccaagctgacagacatggagatagatgaatgcgaggagacgactatgcatgatgtgaacaacatcgaggaagagatgcgcaggaagcaagctcacgctgcccaggaggcgtacgaggaggacgacgagatgccgggcggagcccagagagtgcagtgcgcgcaacagtaagcagactatcatcaaggcatttggaggggttgtgccttaaagcgtgggaatgatctctggttttgctgt

SEQ ID NO: 91942 - DNA, 501 bp, Zea mays
  unsure (1)..(501): unsure at all n locations
tggaggtncttgatccacgagagtaacgtacgcacgctctacggttcggattccggtcgacccacgcgtcggtcttcggtacaagcgagcccgggcagcgtgtcgtgccgtacgtgctgtggaggcaaccggggtgcgcgaccccacaccggctagctacgacaacatgctgacgcccagatcgacgccgtgtacgccgncatgaaggccatggggcacacggacgtgggcgtccggatctcggagaccggngtggcgtccaggggcgacgaggacgagaccggggccacggtgcagaacgccgccgcgtacaacggcaacctcatgcacagggtcgccatgagccacgggacaccgctcaagcccaaagtgcgcgtgtacatgtacacgtgctcgctctttaaagcgagcacgtgaacccagcgcacacgtgagagcgcatctacggtctgctctaccacaacggctcgccggtgtacgctctcagcgccggcttcggcg

SEQ ID NO: 91943 - DNA, 535 bp, Zea mays
  unsure (1)..(535): unsure at all n locations
tggtnntgtctttttataagccattatctcatgactcaccggtccggaattcccgggtcgacccacgcgtccgatctcgccgacagggccggcgggaacactgatgagctcaacatggatgtcttctgccggccgtggggctcacagtcacagctgcaagataaggtgcaggggcaggggcagggctctagcgtcaccaagattggactatggggtggaccgggagggtcggcacaggacatcacggcagagcggccaccgcagcgtcttcacagcgtcaccgttcgtgctggcgttgccgtcgactccatcgagttcacctatactgacagcgctgggcagaggcgcgccgctgggcgttggggtggacttggcggcaatgttcgaacgatcgaccttggcaacgccgaggatgtcagggaagtctcgggaacatacggcgcatttgaaggtgccactacgctgacctcgctcaggctcgtcaccagcagcagaacctggggcccctggggggtcgagaacgggacgcgtttct

SEQ ID NO: 91944 - DNA, 538 bp, Zea mays
  unsure (1)..(538): unsure at all n locations
cagctctcttcttatgnttaaggcantatcagtagcactcacnggncttgagttcacgggtccacccacgcgtccgattttatcctctgttgtttcaattaaaaattcttttggtatttcaatgagtgttgagtccgaggaaaaattatcgttgttgttatataccccatttccaatggcaaggatccaattattgaatgataacaagtcttcatactcttcatttgatatattactttgtcgtagtcgcatgttttcagaaaggaatataatgttgacatggttccaaaggtatgaagcaatgatacaagcatttattatttgttcttttgttccattttctataacaggtaatatttgttttggatcgccacctagcacaaccactttaccaccaaaaggaatgtcaagagctttttcatatgtttctcctactatatctctaagggatctatcaaatgcttcaaagcattngttatttgtcattagagcttcatcccatataataagatctgtgtcaataagaagttttgcaaga

SEQ ID NO: 91945 - DNA, 533 bp, Zea mays
tagcctgtcttcgtatgacgaagtatatagcatcgctcaccggtccggaattcccgggtcgacccacgcgtccgccttgatgaaccaaagtcagttttttatgatacacgtgccgataatgatggtgaaccgttggagttctgttctggagaaggcttggtaccagagggttttgaaatgtgtgttcggctaatgcttcccggtgaaaaatctattgtcacgtgcccaccggattttgcatatgataagttcccaaggccagcaaatgttcctgaaggagctcatgttcagtgggaaattgaactacttggattcgaaatgcccaaggattggactggcttaacttttgaagagatcatggatgaggcggacaaaataaagaacacgggtaacagactgtttaaagaaggaaaattcgaacttgcaaaggcgaaatatgataaggtgcttagggaatataaccacgtgcattctcatgatgatgaagagggaaaaatctttgctaattcaagaagttccctacatctaaatgt

SEQ ID NO: 91946 - DNA, 516 bp, Zea mays
  unsure (1)..(516): unsure at all n locations
ggaagggctttgtgctcgtctagctctgattgtatcgctctaccggtccggaattcccgggtgcgacccacgcgtccgctagggtttttgattttagccgccgccgctgctcatctcacatccctcgagaagacgcgtgctcctcgccgatcgatacgatggccgtcttctccgacctccacaccgccgacggcctcaagtccctcgaggctcacctcgccggcaaaacctatgtgtctggtgactccattactaaggatgacattaaggtcttcgccgcggtgccgtcaaagcctggcgctgagtttcctaatgccgcccgctggtacaagaccgtctctgcggctgtagcctcaaaattccttgttaaggctgtggtggtaaacctgcctgcggaaccacttcttccggaacttgttctgccgattaagcctaagattaatataaacctgaaccttttggtgaatgaacctgaggagcacanaaagcgcattgatagaccgtccgcctttccaa

SEQ ID NO: 91947 - DNA, 522 bp, Zea mays
  unsure (1)..(522): unsure at all n locations
aggtagggggttcnttttacgaaagagatgtattgcaatgctctaccggtccggaattcccgggtcgacccacgcgtccgtgcgcctctacatttcttctctctctgctcctccgcctccgcctgatccatccaagagagggatcgccatgtcggactcggaggagcaccacttcgaatcgaaggccgacgctggggcgtccaagacctacccgcagcaggctggcaccgtccgtaagaacggcttcatcgtcatcaagaaccgtccctgcaaggttgtggaggtttctacctccaagactggtaagcatggccacgccaaatgccactttgtcgccatagacatattcaatgggaaaaagcttgaagatattgttccttcatcacacaactgtgacattccgcatgtgaaccgtactgagtatcagctgattgatatttctgaggatggatttgtgagccttcttacttcagatggcaacactaaggatgatcttagactcccaactgatgagactcttgn

SEQ ID NO: 91948 - DNA, 538 bp, Zea mays
  unsure (1)..(538): unsure at all n locations
aagtgtcttgtgatcctatgacancgatgcaggactcaccggtccggaattcccgggtcgacccacgcgtccggtgcgcgcgcaatggcactcgtgtccgcctcctcgtcctccaccaccgccgtcgcggcgctccgcaggaatgggcagcagcgggcgtcgtcgtcgttgttctcctcctcctcctcttcctccttcctcgtcggcaagacgctgctgaggcaggccgaggcagcccggccgtcgttcgccgtgcgcgccgcggcggattccgacaggccgatctggttccccggcagcacccctccgccgtggctcgacggcagccttcccggcgacttcggctttgatccctgnggcctcggatctgacccggagagcctgcggtggaacgtgcaggcggagctggtgcactgccggtgggcgatgctcggcgcggcgggtatcttcatccccgagttcctgaccaagatcggcgtcctcaacacgcccttctggtacaccgccggcgagcaacagtactttaccgacaccaccc

SEQ ID NO: 91949 - DNA, 526 bp, Zea mays
  unsure (1)..(526): unsure at all n locations
actctttctttccttttactgatagactttcttcctnactaaactaatcggcggcccattctaacacggcatcttacatgtgcacccttctctttattaacatcaccaacgactacccttacataaggagttttaccttctatgtattgccatcaccaaaagtctcatacactgttgtgtaaccttacaatgctacactttctgttcaccaactcgttcataacgcttatcaatgtattgtgcttgacaactaatctctttatgacatatgctttctcactctaaagctcgccacccctacctttggctacctgaaccatctcatctctgccaccatgagttgctttacatgctaccttatgttccctgttcatctcaactcttaccttctcaagcttgccataaacctgatccttttccctctccttcacttcttcattgtcatattcttccctcttacctatcgcttatctcaacattaccattttcttaatgtccccaaactgacccatcatattttttactt

SEQ ID NO: 91950 - DNA, 536 bp, Zea mays
  unsure (1)..(536): unsure at all n locations
aggctgtgtccgtattagaaactatatagcatcnctgcaccggtccggaattcccgggtcgacccacgcgtccggccggagaccgacctgtgggtgataagctggcaggggctgcccatctacgacgccgacttcggctggggacggccggcgttcatgggccgcgcgtgcctccagttcagcggcctcgtgtacctcgtcccgggcccggacggcgacggccgcctcgacgtcgtcgtggccatggagcccaagagcctggccagattcaaggagctgttgtacgagctcaaaggtgcaggtgttccgtgcacggcagactgagctgctgcattccgtgcaggttccttggctggctaccggctggcaaaacgaanacctgtttgccggattgttccttgcattgcgtatctacttcgacctttactgcagtactcctagttntctactcgttgtttgtgatcgcaatctggtgagtactgtactctatatgcatntacatggctatctatattattcggagctaaaaaaaaaaa

SEQ ID NO: 91951 - DNA, 540 bp, Zea mays
ggggcgctgtcgtccgattatagaaagatgattgcatcactcaccggtccggaattcccgggtcgacccacgcgtccgctgtcacacacacacacacagacaagtggtttccaaagccaagtgtgtgtactagcaaccagcgagctcgggcggcagcaggcagccatcatgtcggaggagaagcaccaccacttcttcaaccaccacaagaaggacgaggagcagcccgccggcgagtacgggtactccgagaccgaggtggtcaccgccaccggcgagggcgagtacgagaggtacaagaaggaggagaaggagcacaagcacaagcagcacctcggcgaggccggcgccatcgccgccggcgccttcgcactctacgagaagcacgaggcgaagaaggaccccgagcacgcgcacaggcacaagatcacggaggaggtcgctgccgcggcggccgtcggcgccggcggctacgtattccacgagcaccacgagaagaagaaggaccacaaggacgccgaggaggccagcggcgagaag

SEQ ID NO: 91952 - DNA, 541 bp, Zea mays
  unsure (1)..(541): unsure at all n locations
agggctgttgtcngatctacgaatcatgactgcatcnctgcaccggtccggaattcccgggtcgacccacgcgtccgatcagtactgccaaccatttgttctccactcagaaaggcctgcgctggtatggatctttcagcggtgcatgatattttgctcaaaacaggttataaagatgatgagggtgcagaaaacgagctatcctttcaagaatggacccagcaagtgcaagagatgctgaacacaaagaagtttggtgacattgcatttagagacaaggattttaagactgcaattgactactactccaagctagttgcgatgatgtcgacgccttcagctacggtttttgtcaggcgcagtttttcctacatgatgaatgggcaagcagagctcgctctacgggacgccatgcaagcccaggtctgcatgcccgagtggcctacggccttctacctccaggccctggctctttcaaagctcggcatggaaaccgatgcccaggacatgctcaacgatggcgccacgtttgaggccaaga

SEQ ID NO: 91953 - DNA, 538 bp, Zea mays
  unsure (1)..(538): unsure at all n locations
ngaaggcctgtgttccgatctcaccttcatgatagcatcactcaccggtccggaattcccgggtcgacccacgcgtccgctggatctggcatgggcacccttctcatttccaagatcagggaggagtaccctgacagaatgatgttgaccttctctgtattcccatcaccaaaggtctcagacactgttgtggagccttacaatgctacactttctgttcaccaactcgttgagaacgctgatcaatgtatggtgcttgacaacgaagctctgtatgacatatgctttcgcacgctaaagctcgccacccctacctttggcgacctgaaccatctcatctctgccaccatgagtggcgtgacatgctgcctgaggttccctggtcagctcaactctgacctgcgcaagcttgccgtgaacctgatcccgttccctcgcctccacttcttcatggtcgggttcgccccgctgacctcccgcgggtcgcagcagtaccgcgtcctcacggtccccgagctgacccagcagatgtgggacc

SEQ ID NO: 91954 - DNA, 523 bp, Zea mays
  unsure (1)..(523): unsure at all n locations
ggtaaatggcnttncgtccatgatgggagcttattgtattgctctaccggtccggaattcccgggtcgacccacgcgtccggcgagtgtgaacttatcggcacatgcatactggaccccagatccaactttcacaagctgtttaaactacggagctggcattagtgaggtggaaattgatgtgctgacaggagcaacaacaattctaaggagtgaccttgtctacgattgcgggcaaagcttgaaccctgctgtcgacttgggccaggtggaaggcgcattcatccaaggagtaggcttctttacaaacgaggagtacacaacaaactctgaggggttggtcatccacgatggcacatggacgtacaagatccccacggtcgacaccatcccaaagcagttgaacgttgagctgatcaacagcgcccgtgaccagaagcgtgtcctctcttccaaagcatccggcgagcctccgcttcttctagctgcctcggtgcactgcgcaatgagggaggccatcagac

SEQ ID NO: 91955 - DNA, 539 bp, Zea mays
  unsure (1)..(539): unsure at all n locations
tacgtgttttcntctctacatgaaactanggtaggaactcaccggtccggaattcccgggtcgacccacgcgtccgcccacgcgtccgcatctccgccctctgcgaggccaccggcgcgaatgtgactgaggtggcttacgccgtgggcaaggacacgaggattggccccaagttcctgaacgccagtgttgggttcggtgggtcttgcttccagaaggacatcctgaacctggtgtacatctgcgagtgcaatggcctgcccgaggtggccaactactggaagcaggtgatcaagatcaacgactaccagaagagccggttcgtgaaccgcgtcgtgtcgtccatgttcaacaccgttgccggcaagaagatcgccgtcctcggcttcgccttcaagaaggacaccggcgacaccagggagaccccggccatcgatgtctgcaagggcctgctgggtgacaaggcccagatcagcatctacgacccccaggtgacggaggaccagatccagcgggacctagccatgaacaagttcgac

SEQ ID NO: 91956 - DNA, 536 bp, Zea mays
  unsure (1)..(536): unsure at all n locations
agtnctgtgttccgatcatagaacatgattgcatcnctcaccggtccggaattcccgggtcgacccacgcgtccggtcgacggagctccgccacaagtacaacgtgcgctccatcccgatccgcaaggacgacgaggtgcaggtcgtgcgcggcacctacaagggccgtgaggggaaggtggtgcaggtgtaccgccgccgctgggtcatccacgtcgagcggatcacccgcgagaaggtgaacggctccaccgtgaacgtgggcatccacccctccaaggtgatcgtcaccaagctgaagctcgacaaggaccgtaaggcgctcctcgaccgcaaggcccggggccgcgccgccgacaaggctaagggcaagtttactgccgatgacgtcgctgccgccgccgctggtggcgccgncaccggcgcctctctccaggagatcgactagactcttcacggtcatctgatggttgtcgtaccgncttttcctcatctctttagtttttgctaccaaattgtatgtgatagaggtctta

SEQ ID NO: 91957 - DNA, 539 bp, Zea mays
  unsure (1)..(539): unsure at all n locations
agtgtnntgtctgcataagcatcatgatagaagcnctgcaccggtccggaattcccgggtcgacccacgcgtccgtgaccaccaaccacaagaaaagcatcaagaaagaagcatgctggacaatctcaaacatcacgaggtggtaacagggaacagattcaggccgtgattaatgcaaacataattgcacctctggtgcaacttctgcaaactgctgaatttgacatcaagaaagaagcagcctgggcaatttcaaatgccacttctggtggcacacatgatcagatcaagtaccttgttgcccagggttgcattaagccactctgtgatctgcttgtttgcccggatcccagaattgtaacagtttgcttggagggtcttgagaacatcctgaaagttggcgaggcagagaaaaatcttggtgcaggcgatgtcaatgtttacgcacagatgattgatgatgctgagggcctggacaagattgagaacctacagagccatgacaacactgagatatatgagaaggctgtcaagatgct

SEQ ID NO: 91958 - DNA, 523 bp, Zea mays
  unsure (1)..(523): unsure at all n locations
aggaaaagtgcctttgttcctcgtacagcactcattgtattgctctaccggtccggaattcccgggtcgacccacgcgtccgaagatgcagaacggtgtctcttgaatgacttgcacatccttgatcttgaaaccatgacgtgggatgatgtggatgcaataggcacccctccttctccaaggtcagaccatgctgctgcttgccatgctgaccgctatcttttaatttttggtggggggtctcatgcaacatgtttcaatgacctacatgtccttgatttgcagacgatggaatggtcaagacccaaacaacaaggcccgactccaagtccaagagctggccatgcaggtggaactgtcggcgagaactggtacatagttgggggtggcaataataaaagtggtgtttctgaaacacttgtgcttaacatgtcaactctgacgtggtcggttgttagcactgtggaaggacgagtcccccttgctagtgagggcatgactntagtgcatagcanatatgngg

SEQ ID NO: 91959 - DNA, 518 bp, Zea mays
ggatgggtttgtcactgatgggggtgtatagcatgctctaccggtccggaattcccgggtcgacccacgcgtccgactagttctagatcgcgagcggccgccagaccattcgtttctcgcgagccatcgcttgggcatccggaagaaatggccaagtcgaagaaccacacggcgcacaaccagtcgttcaaggcgcacaagaacggcattaagaaacccaagcgccaccgccagacctccaccaaggggatggaccccaagttcctgaggaacctgaggtattctaggaagggcaacaaaaagagtggtgaggctgaagctgaggagtaggaaggaaagcatggctttgtttcctctgtttttagctcagttccacctttaggacctggggttttgctaaagatggaacttaagtggtgttactgtatgatggcaaggaccttttgctgccgaaggttatgttttgaagttcatgctaccttttaaagtacggattaccttgtgcctatgttcaaaaa

SEQ ID NO: 91960 - DNA, 534 bp, Zea mays
  unsure (1)..(534): unsure at all n locations
aggtttgttctgttctatgaatantacctcatgactcaccggtccggaattcccgggtcgacccacgcgtccgataaactgcggattctttctttctcttccattcttacgtttccatattaaagtgtagtttttttacgtaaatttaataatattaatctaatatgcccattggtgttccaaaagtaccttaccggattcccggagatgaagaagcgacttgggttgacttatacaatgttatgtatcgagaaaggacacttttttttaggtcaagagattcgttgcgagatcacaaatcatattacaggtctgatggtatatctcagtatagaagatggaaatagcgatatttttttgtttataaactcccctggcgggtggctaatctcaggaatggcgatttttgatacgatgcanacggtgacacctgatatatatacaatatgcctcggaatagccccgttcatggcctcctttattctgtttggaggaaacccaccaggcgtatagaattccttaagcttggatttt

SEQ ID NO: 91961 - DNA, 536 bp, Zea mays
  unsure (1)..(536): unsure at all n locations
gagctntgtcngtatttgaaactatacagcatcnctgcaccggtccggaattcccgggtcgacccacgcgtccgcccacgcgtccgattcggcttattgatctgcgacagtcagcactgtgtgacaaccatgctgaactatttgaggagcatgaagcacccggatcaagatccttttttacagagataatagcatcagtttcagatataaaatttgcaagggatggaagacacattcttagtcgtgattatatgacactcaagttgtgggatctaaacatggattcaggcccagttgcaacttttcaggttcatgaatacttacgtcctaagctttgtgatttatacgagaacgattcaatttttgacaaatttgaatgctgtctcagcggtgatggactccatgttgcaactggttcttatagtaatttgtttcgtgtttttggttgttctcctgaaagcgtggaggcatcaacgttggaagccagcagaaatcccatgaggcgacaggttgttgatccagcaaggcctgcacgg

SEQ ID NO: 91962 - DNA, 536 bp, Zea mays
  unsure (1)..(536): unsure at all n locations
agtgctgtgttcgatcccgcctcagtacagcatcnctctaccggtccggaattcccgggtcgacccacgcgtccgcggcggcctcgcctgggccacggacgaccactccctccacaacgccttcagcacctacggcgaggtcctcgagtccaagatcatcctcgatcgggagacgcagaggtcccgcggcttcggcttcgtcaccttctccacggaggaggcgatgcggaacgccatcgagggcatgaacggcaaggagctggacggccgcaacatcaccgtcaacgaggcccagtcccgcggcggccgtggaggcggcggcggcggcgggtacggtggtggccgtggaggcggcggctacggcggtggcgggcgccgtgatggcggcggcggctacggcggtggcggcggctacggtggtggcggcggcggctacggtggtggtggcggcggctacggcggtggcaaccgtggcggcggctacggcaactncgacgggaactggaggaactgagcggtggggcccgcgcggccan

SEQ ID NO: 91963 - DNA, 542 bp, Zea mays
  unsure (1)..(542): unsure at all n locations
nggaggggctgtgtccgatgaaagcacatggatgcaccnctgctaccggtccggaattcccgggtcgacccacgcgtccgcgaggaggagctggagtacgttaagatggccatgcggaaggccgtcgcgctcctgccggagcacgcactcgtgggcctcgtcaccttcggcacgcaggtgcacctgcacgagctcggattctccgatctcagcaagatctacgtcttccgggggaccaaggagatctctaaggaccagattttggatcagcttggcctggcgggtgctgggcggccgggcttccccaagatgccacagcaaccgggcgggccacaggtgaatgggatgcatccgccgtccacggccggggtcaacaggttcctgctcccggtgtcagattgtgagattgctctcagcacgttgctggacgagttgcagcctgaccaatggccagtcgaggctgggaaccgtgcgatccgttgcactggtgttgcgctcagtgtagctgctgggttacttggtgcttgcatgcctggaacagg

SEQ ID NO: 91964 - DNA, 518 bp, Zea mays
  unsure (1)..(518): unsure at all n locations
agaggctgntttccttgtatcgaacatgattgtatcgctctaccggtccggaattcccgggtcgacccacgcgtccgagaccactggcccgaacatggttgtagatatgtgcaagggagtgcagtatctcaatgggatcaaggattctgttgtggctggtttccagtgggcatcaaaggagggtgcactggctgaggagaacatgcgtggaatttgctttgaggtctgtgatgtcgttcttcatgctgatgctatccacaggggtggtggtcaggtcattcccactgccaggagggtcatctatgcctctcagctcacggccaagccaaggctgctggagccagtctacctggtggagatccaggccccagaaaatgcacttggtggtatctacggtgttctgaaccagaagagaggtcatgtctttgaggagatgcagaggccgggtaccccgctctacaacatcaaagctttcctccctgtcatcgagtcctttggtttcttcagccaacttgagg

SEQ ID NO: 91965 - DNA, 519 bp, Zea mays
  unsure (1)..(519): unsure at all n locations
ggtaagggctttgtccatgtcagcctcttattgtattgctctaccggttcggaattcccgggtcgacccacgcgtccgatggcgtccaccttcatcggcaactccacctccatccaggagatgttccggcgcgtgagcgagcagttcaccgccatgttccgcaggaaggccttcttgcactggtacacgggggagggcatggacgagatggagttcaccgaggccgagagcaacatgaacgacctcgtgtccgagtaccagcagtaccaggacgccaccgccgacgaggagggcgagtacgaggacgaggaggagggagatctccaggactagaataggctgcttcacattcagtcaccgtcagtcatgaaaaactaatcatttgctgcttttcgtcgtcgtagtagtagtaggtcggtaatcatctgtcgtgggtttgtttcgtttctatcattaatcagcattagtagtagcagctgctgctgcgggggcacaacacnaggnggggataggaactgc

SEQ ID NO: 91966 - DNA, 522 bp, Zea mays
  unsure (1)..(522): unsure at all n locations
ggtaagggcttntgtgcatgtacgaatatgaagtattgctctaccggttcggaattcccgggtgcgacccacgcgtccgcggacgcgtgggcggacgcgtggggcctcggcgtccccgctcccggcctccacgcgcgggtcctcgcccaggtccagctcgctgagcctgggccgggggaccgccgggaacggcccgcgccgtcttgccgcagcagcgcccccacgggcgttcttctcatcgtccccctaccagccgccccaaccggaggggttctcgccacaccgggagtacggcctggtccccatggtgatcgaaaccacctcccgcggggagcgcgcctacgacatcttctcgcgcctgctgaaggagcgcatcgtctgcatcaacgggcccatcgccgacgacacggcctcgcttgtcgtcgcacagctgctcttcctcgagtccgagaacccactcaagcccgtccacctctatatcaactcccccggnggtgtcgtcaccgcggggctcgccatctn

SEQ ID NO: 91967 - DNA, 540 bp, Zea mays
  unsure (1)..(540): unsure at all n locations
nggggtggtgtcgtaatctactgccantacctcaggactcaccggtccggaattcccgggtcgacccacgcgtccgtcctcgagcacactgatgtggctatcctgctggacaacgaggccatctatgacatctgccgccgttgccttgacattgagcgcccaacctacaccaacctcaacaggcttgtgtcccaggtcatctcatccctgactgcctccctgaggttcgatggtgctcttaacgtggatgtgaatgagttccagaccaacttggtgccctacccgaggatccacttcatgctttcctcctatgctccagtcatctctgctgagaaggcctaccacgagcagctgtctgtggccgagatcaccaacagcgccttcgagccatcctccatgatggccaagtgcgatccccgccatggtaagtacatggcctgctgcctcatgtaccgtggtgatgtggtccccaaagatgtgaatgctgctgtggccaccatcaagaccaagcgcaccattcagtttgtggactggggccca

SEQ ID NO: 91968 - DNA, 540 bp, Zea mays
  unsure (1)..(540): unsure at all n locations
taggcctttcgtccnctcgaaagagcatggatgcatcnctgcaccggtccggaattcccgggtcgacccacgcgtccggtgaggcgtgagcgccacacccacacgaaggatcccgaagccgaagagaaccctaccgaggaggcagaaaatccgtaggcgcgcctcatacgattccgagatccgtgcctcttatcggcagccatgatgctgcgcgcggcgggcaggcgactcctcggcgtaggaggcggcgatccagcgcccgcggtcgctgctgctgtggcggcgagcaggagcagaggataccacgagcgggtggtggaccactacaacaacccgcgcaacgtggggtccttggacaaggacgacacggacgtcggaacggggatcgtcggcgcgccggcgtgcggggacgtcatgaagctgcagatccgcgtcgacgaggggtccggcaggatcgtcgacgcgcgcttcaagaccttcggctgcggcttcgncatcgcgttctncttcgtcgcttccgaatgggtcaagggcaagcaa

SEQ ID NO: 91969 - DNA, 520 bp, Zea mays
ggagaggtgcctttttctatgaaggagttgtattgtatcgctctaccggtccggaattcccgggtcgacccacgcgtccgggttttggagtttcctttttcttgctatttggggtatatgcagctagcttttatgctggtgctcggcttgttgaggacaggaagacaacctttcccaaagttttcagggttttcctagctcttgcaatggcggcaattggagtgtcgcaatcaagtacccttacatcagattcttccaaagcaaaatcagctgcatcttctatatttgcaattgtagatcgaaaatcaaggatagacccaagtgaggatgcaggggtaactgttgaggcactacaaggaaacatcgtattccagcatgttagcttcaagtatcctaccaggccagatgttcagatattccgggacctttgcttgacaattcatgctggaaagactgttgcactcgttggagagagtggtagtggcaaatcaacggcaatttcattgctccagaggttcta

SEQ ID NO: 91970 - DNA, 534 bp, Zea mays
ggtgtgtctgcttaacgacaataactcatgaactcaccggtccggaattcccgggtcgacccacgcgtccggtgctttgataacttcggcgacaaggtgaagaattggttgacctttaatgagccccagacattggcttccttttcctacggaactggggtctttgccccaggtcggtgctcacctggactagactgtgcctacccaactgggaattcactcgtcgagccttacactgctggccataacattctcctagcccacgctgaggctgttgatctttacaacaagcattacaagcgcgacgacacccgcatagggcttgcgtttgacgtaatgggtcgtgtgccatacggaacatcgtttctggataaacaggccgaagaaaggtcctgggacatcaacctaggatggttcttagagccagtggttcgtggtgactaccccttctccatgagatcattggctagggaacgactacccttcttcaaggacgagcaaaaggagaagctcgccggttcctataacatgttg

SEQ ID NO: 91971 - DNA, 538 bp, Zea mays
  unsure (1)..(538): unsure at all n locations
cagtctgttgtcncacatagaaatantgatgcactcctcggtccggaattcccgggtcgagccacgcgtccgctcgctagcactagcatagtcgtctctttcttttctgcttccagacattgtccacacgagctagggcactggtgtcgctcgcaaccaaattaaggacgtactgagccatggcatccaagggcgtcctcttcttggctctcaacctcctgttcttcacagtggccaacgcctgcggcagctgcccgaccccaacgccgccggtcgtgccaccgccgccgcctcctgctgctaccccacccccttcatcatccagtgggaagtgcccgctgaacgcgctcaagttcggcgtgtgcgtcaatgtgctcggcctcgtcaaaggcgaggctggcaaggtaccagctgagccatgctgcaacctcatcaaaggccttgcagacttcgaggccgncgtctgcctctgcacggccatcaagggcaacgtnctcggcgtcgtcttcgatgtccctatcaagttcaatgccctcgt

SEQ ID NO: 91972 - DNA, 544 bp, Zea mays
  unsure (1)..(544): unsure at all n locations
cgcgtctgtcgtcnttacgatagaatcattacagtaccnctctaccggtccggaattcccgggtcgacccacgcgtccgtaaacccaagcctcctcgtcctctgtcagactaccactctctccctcgcggactcgcggttgatgtcctcgcggcggattcgcatcttccgcgtcagggacagggagagtactccgtcggacggttggaggagaacagggggagaggagctctgagatggagacggccgcctcggcagcgcgcctggtgaactacccgctcgtcgcggcgctcctcgcgttcgccctcgcacagtcctccaagttcttcaccacctggtacaaagatggccggtgggatgccagacagtttatagcttctggagggatgccatcatcccactcagctacagtgacagcactcgcagtggctgtggcgatacaagaaggctttcatagtgcaacctttgcaactgcactagtctttgcatgcgtggttatgcatgatgctnttggagttcggttacatgccggaaagcangcagag

SEQ ID NO: 91973 - DNA, 511 bp, Zea mays
agggctttgtcaatgtacgacattattgcatgctctaccggtctcggaattcccgggtcgacccacgcgtccgatcgaggcggggatatacatgctgcactgtctacctctcaggctggtcggagccgagggtgcaccgaccagatgcatcctcatcaagtgatcgttcctcggccgtcctgctcttgctgccttgctggaggtggcgacactggaccatgccagctgagctggtgctccgtcgtgggtcgtggccaatatttggctcgcatgcagtcgtcgatctatatggaacagaacactgcatgcctatgtagatacgcttgtatggacaataaaggaaccgcagtacttctgtcgatgaaatacttttgggtgagctggtaatctaagacaccaggcctacaggttacttgtaactgtaagctggaggccctagaaggctaaggctagtggctagggatggatccagatttttatttgaatgctattttttggtcatctttcttgg

SEQ ID NO: 91974 - DNA, 536 bp, Zea mays
  unsure (1)..(536): unsure at all n locations
aggagctttgtctgtgctacgccaatanctcaggagccaccggtccggaattcccgggtcgacccacgcgtccgggcaggccacaaaggatgctggggtgattgctggcctcaatgtgctgcgtatcatcaatgagcggggcgctgctgctattgcctatggtcttgacaagaaggcaaccagtgtcggtgagaagaatgtcctcatttttgaccttggaggtggtaccttcgatgtctccctccttacaattgaggaaggtatctttgaagtcaaggccacagctggcgacacccatcttggtggtgaggactttgacaacaggatggttaaccactttgtccaggagttcaagagaaagaacaagaaagatatcactggcaacccgagggctcttcggcggcttaggacctcttgggaaaaggccaagagaactctggctttcaattgccaaaacaacattgggaatggcttgcttgaccaaggccttggcctctaattcaacattcaccggggccaagtttaagaacttaacc

SEQ ID NO: 91975 - DNA, 546 bp, Zea mays
  unsure (1)..(546): unsure at all n locations
aggggnnnnttcntataactgacagaagattgnatgcatcactcgacccggaattcccgggtcgacccacgcgtccgcggacgcgtgggcggcgcggtcagttgaaccatggcggactccaaggccacctcggcggtcacgctgggcacccgcaagttcatgaccaaccgcctcctggcccgcaagcaattcgtgcttgaggtgatccaccccggccgcgccaacgtctccaaggcggagttgaaggagaggcttgccaaggcgtacgaggtgaaggaccccaacaccatctttgtcttcaagttccgcacccacttcggaggaggaaagtccactggtttcggcctcatctacgacaacctcgaggctgccaagaagttcgagccgaaataccgcctcatcaggaatggtcttgctactaaggttgagaagtcccgcaagcaaatgaaggagcggaagaacagggccaagaagatccgtggtgtcaagaagaccaaagctggtgacgcctggaagatgtaaacgttcgtttacatttgtattact

SEQ ID NO: 91976 - DNA, 541 bp, Zea mays
caggcctgtcgtctgatcacagaaacatgattgcatccactcaccggtccggaattcccgggtcgacccacgcgtccgcccacgcgtccgcacagacaagtggtttccaaagccaagtgtgtgtactagcaaccagctagctggggcggcagcaggcagccatcatgtcggaggagaagcaccaccacttcttcaaccaccacaagaaggacgaggagcagcccgccggcgagtacgggtactccgagaccgaggtggtcaccgccaccggcgagggcgagtacgagaggtacaagaaggaggagaaggagcacaagcacaagcagcacctcggcgaggccggcgccatcgccgccggcgccttcgcactctacgagaagcacgaggcgaagaaggaccccgagcacgcgcacaggcacaagatcacggaagaggtcgctgccgcggcggccgtcggcgccggcggctacgtattccacgagcaccacgagaagaagaagaccacaaggacgccgaggaggccagcggcgagaagaaacac

SEQ ID NO: 91977 - DNA, 542 bp, Zea mays
  unsure (1)..(542): unsure at all n locations
tggggnnntnnntncctcgattgtacatggatcggatcnctgcaccggtccggaattcccgggcctattagtattggaagttcatgcacgtatagctgaagagtctcaccacttccatcatcttgtatcctacctaatctgcgccttccacaacaaccattttctactggagaagcgtggtgctttgatagtccgtcgcctctgcgttcttctgggtgctgaaaaagtatatcgtgagttctccactattcttgagagtgaagttgaccttgattttgcatccgtcatggttcaggctttgaatttgattttgctcacatcaactgaacttggtgagctccgctctcttcttaagaagtcgttagtggattcctgtggcaaggacttgtttcagtcattatatgcttcgtggcgccactctccgatggctacaataagtttgtgtttacttgctcaggcatacagtcatgcgagctgtgttattcagtcgctgggagaagaagacataaatgtgaaatttttggttcagttagataaattga

SEQ ID NO: 91978 - DNA, 516 bp, Zea mays
  unsure (1)..(516): unsure at all n locations
nggaaaggggtttgtcatgaaagaatttattgcatgctctaccggtccggaattcccgggcttgcaatcacaacgaacaaaagctctcgatctcaccgacaccgaggaagaagagatcaatggcgtccgagcagggagtcgtgatcgcgtgccacagcaaggctgagtttgacgcccacatgaccaaggcccaggaagccggcaagctggtggtcattgacttcactgccgcctggtgcggtccatgccgcgccatcgccccactgttcgtcgaacacgccaagaagttcactcaggtcgtgttcctgaaggtggacgtggacgaagtgaaggaagtcaccgcggcctacgaggtcgaggcgatgccgaccttccacttcgtcaagaacggcaagacggtcgcgaccatcgtgggtgccaggaaggacgagctcctggcccagatcgagaagcatgctgcgcctgcgcctgcgtctgcgtctgcctaaaggagatcagatcagtcgtcgccgtaaa

SEQ ID NO: 91979 - DNA, 509 bp, Zea mays
  unsure (1)..(509): unsure at all n locations
ntttgattctcatcgnatngccatnccgcttccggttcggaattcccggggggacccacgcgtccggtcacacacacacacacagacaagtggtttccaaagccaagtgtgtgtactagcaaccggctagctcgggcggcagcaggcagccatcatgtcggaggagaagcaccaccacttcttcaaccaccacaagaaggacgaggagcagcccgccggcgagtacgggtactccgagaccgaggtggtcaccgncaccggcgagggcgagtacgagaggtacaagaaggaggagaaagagcaccagcaccaagccggacctcgggaaggccggggccatcgccgccggcgccttcgnactctacgagaagcacgaggcgaagaaggaccccgagcaagcgcacagccacaggatcacggaggaggtccttgccgcggcggccctggccgccgggggtaccgtttcaccgggccccccgagagaaaaaggaccacagggacccccgggg

SEQ ID NO: 91980 - DNA, 514 bp, Zea mays
  unsure (1)..(514): unsure at all n locations
nagagaggttcntactctgaattatagtattgctatactcgatcggcattgaattcccgggtcgacccacgcgttcggatggtcccaagcttgttagagaattgttcagggtggctgatgatctttctccgtcagttgtctttattgatgagattgatgctgttgggacaaagaggtacgatgctcattctggtggcgagcgtgagattcagagaaccatgttggagttgttaaatcagctggatggttttgattcaagaggagatgttaaagttattctagcaacaaatcgtattgagagtcttgatccagccttgcttcgcccaggtcgaattgacagaaagattgaattccctttacctgatgtcaagactaggcggcgcatcttccagatacacacatcgaaaatgacactggctgatgatgtaaacctagaagagtttattatgtcaaaagatgagttttcaggtgctgacatcaaggccatttgtactgaagctggcttgcttgcttt

SEQ ID NO: 91981 - DNA, 505 bp, Zea mays
gtagattatcgtgtcatcgcaaaagtatgctacgctctactcggtccggaattcccgggtcgacccacgcttcggaccgtagagagagtgagggatcgccgacccgatcctttcttcatcctgcatggccgctgtttccgacaggatgtttctcacgaggacggagtacgaccgtggggtgaacaccttctctccggaggggcggctgttccaggtcgagtacgccatcgaggccatcaagttgggatccactgcgatcggtttgaagacaaaggatggtgttgtcctcgccgttgagaaacgtgtgacctcaccactgctggaaccaagcagtgtggaaaaaataatggaaattgatgagcacataggctgtgccatgagtggacttattgctgatgctagaacactagtggaacatgctcgtgttgaaactcagaatcataggttctcatacggagagccaatgactgtagaatcttcgacacaagctatcttggacttagct

SEQ ID NO: 91982 - DNA, 503 bp, Zea mays
  unsure (1)..(503): unsure at all n locations
nattagaagcttggttacagggaagggaagggggagaaaagtgttaccggtccggaattcccgggtcgacccacgcgtccgaaacttagttctgctagcagatgaagtgtatcaacagaacatttatcaagatgaacgggcatttataagcgcaagaaaggttatgttcgacatgggtccaccaataagcagtgagcttcaggttgtttctttccacactgtgtcgaaagggtactggggagagtgcggacaacgtggtggatacttcgaaatgacaaatcttcctcccaagacagtagatgagatctacaaggttgcatcgatagcactgagtccaaacgttcctgggcaaatttttatgggagtaatggttaaccctcctaaacctggagatatctcgtacctgaagttcgctgctgaaagcaagtccatccatgaatctttgaggaggagagcacgcatgatgacagatggtttcaacagttgccgaaacgtcgtgtgca

SEQ ID NO: 91983 - DNA, 518 bp, Zea mays
gtaggtggagatgttcttgtattgaagagagaaagtattctctaccgtccggaattcccgggaagctagcgcctccctagctctcgtgtcagcaatggccaccaccgctgcgtccagcctcctcaagtcctccggcgcgggctcccggctcccttcggccacgcgcaccaccaccccgtcgtccgtggccgtggccaccccgcgcgccggcggcggccccatccgcgcgtccatctcctcccccaacccgccctacgacctgacgtccttccggttcagccccatcaaggagtccatcgtgtcccgcgagatgacccggcgctacatgacggacatgatcacccacgccgacaccgacgtggtgatcgtgggcgccgggtccgcgggcctgtcctgcgcgtacgagctgtccaaggaccccaccgtgagcgtggccatcgtggagcagtccgtgtccccgggcggcggcgcgtggctgggcgggcagctgttctcggccatggtggtgcccaagcccc

SEQ ID NO: 91984 - DNA, 521 bp, Zea mays
gggagggggaaggttcgtctattagaaagaagatagtatcctcgtccggtccggaattcccgggtcgacccacgcgtccggtgaaaacatccccattgtcctctgcggtaataaggttgatgtgaagaacaggcaggtgaaagccaagcaggttactttccacaggaagaagaatctgcagtactatgaaatttctgccaagagcaactacaactttgagaaacctttcctgtacctcgcaaggaagctggctggtgatccgaaccttcactttgttgaagctgttgctcttaagcctccggaagttaccatcgacatggctatgcagcagcagcatgaagctgagcttgctgcagcagctgcacaacctcttcctgatgacgatgatgatctgattgagtagaaaggatcatgagtcttgaacttgagcaggagttgtgccttgcgtgttttaagttgttctagggtgaactcttgagttctcattgtctggatcatctttttctccttggatgtgttgc

SEQ ID NO: 91985 - DNA, 509 bp, Zea mays
  unsure (1)..(509): unsure at all n locations
agtagcggtgtactacgcccaggagaaagtagtctctactcggccggattcccgggtcgacccacgcgtccgccgagatggggctccaggactgctccgacacggtggtgggcaactggcacctgggggggatcagcggcggcgagaagaggcgggtcagcatcgccctggagatcctcatgaggccccggctgctcttcctggacgagcccaccagcggcctcgacagcgcttcggcgttcttcgtgacgcagacgctgcgggggctggcgagggatggcggccggaccgtcgtagcttcggtccaccagccgagcagcgacgtcttcttgctgttcgactgcctctacctcctgtcaggaggcagaacagtctactttggcaaggcttcagaggcttgcgagttcttcgcgcaagctgggttcccgtgcccgccgatgcgcaacccgtcggaccatttcctgcggtgcataaactcggacttcgacagggtgaaggccaccctgaan

SEQ ID NO: 91986 - DNA, 511 bp, Zea mays
gaggagatgatgttgtatcgacgaggagatggtagtctcgtaccggtccggattccgggtcgacccacgcgtccggtaaaaattatgattgagaagagaatggaatccagtgcaatatctgaaagaaagagtggggatgctcgatcttactttatgaccttggaatactgggaagatttattttgtaagctaaatgagatgagaagatataggagaatagttgggtctcttgcgggctcttgtttatcagctgccatcccacttctctcttccaataaggaaacagcatgccttgtggcccttgacattgtggagagtgctgctatatctattgccaatgttgaggaggcttataagtgtgaatgtcaaagcaaaggagtcattgaggaggccatccagttttgttcatttgacgagcttcttgatggtacagatgccaccgaagatgttgatgaaaataggctactcccagcaatgaacaaactgtggccttacttggttatctgtctaa

SEQ ID NO: 91987 - DNA, 477 bp, Zea mays
tgtgctacactccctcggatcggaattcccgggtcgacccacgcgtccgggagccgaaagtaagcctcagttccgccggcgtgcgaggggttcgatctgggtgagcgtctcacgatgccgccagcccccaagtccggcgacgccctcttcgccagcgtggatcgcgtcaatgcggagctgttcacgctcacgtacggcgccatagtgcggcagctgctcacggatctggaggaggtcgaggaggtcaacaagcagctcgatcaaatgggttacaacattggaacacgattggtcgatgagttcttagcaaagtcaaatgtatcaaggtgtgttgacttcaaggagactgccgatgttattgcgaagcttggcttcaaaatgttcttgggtgtgactgcaactgtgaccaattgggatgttgagggtacaagttgcagcattgtcctcgaagacaaccctcttgttgattctggtgag

SEQ ID NO: 91988 - DNA, 502 bp, Zea mays
  unsure (1)..(502): unsure at all n locations
gatagaaggttnncttataggggggggagggagggaaaagatgtaccggtccggaattcccgggtcgacccacgcgtccgccccgttccagaatatcagccctggtgcaccaaactcgctactacaggttgctgtgaaaaataatcagcagccagtgtggtacttcaatgacaaaattccgctgcatgttttctttggtgaagatggaaaaatggaacgagctggttttcttgaggcctggaaatctttgcctgatgacaatgaatttacaaaggaattcccgggctctgtcatcagcagcatagatgctactgttgagcgcctcgtagcatcaaatgtgttcttcatagccaagcggaaaaatgcgaacatggatgttctgtatctctccgcgaagatgccccgtggaatccccttccttatagaggttacagccgtggttggtgttcctggtgtgaagtgtgcagtcaaaacaccaaatagggagatggttcctctcttc

SEQ ID NO: 91989 - DNA, 507 bp, Zea mays
  unsure (1)..(507): unsure at all n locations
naggagagagttnntgtatgagggcggggggaagaggaaagtgttaccggtccggaattcccgggtcgacccacgcgtccgcgccaacaccctggcctccgagtttccccgggactatgatggtgcgtgcctgcagatgcggctgtcgtacagtcccgcagctcatatattcctcttcctggtgcagtggacggactgcagcctcgcaggggctcttggtctgctgagaatcctcatatacaaggtttatgtggatggcacaacaaccatgtcgactcatgagaggaaagccagcatcaaagaattctatgctgtgatatttccttctttgctgcaactgcaaagggggatcactgatgtcgaggacaagaagcagaaggccgtatgcatggagaagtacagaaagaaagatgacgatggacgggacaccttatctgatattgatgttgaaagggaagaggagtgtgggatttgcatggagatgaacagcaaagttgtgtttgccaa

SEQ ID NO: 91990 - DNA, 476 bp, Zea mays
aaaggtaggatgcaccggtccggaattcccgggtcgacccacgcgtccgcggagcacttcggaggccggacccggcgagaagcgaccgaccgcagccagctcgcgtggccctcttcatccaccatgctgagggtcgcgggcaggcgcctctcgtccgctctcgcctggcgccccgccgacgccgcctcaggctcccggggccctctcgccggtacactacccggccgcgacgacgacgacacacgcgactgcagggcgcgtttcgccatcgaatctcccttcttcgccgctgccagagggttttctgcagagactcttgctccaagaaaccaggatgtgggcttatccgagctcccagcaactgtggcagctgtgaagaatccaagtggaaaaatcgtgtatgatgagtataaccatgagcgctacccgcctggagaccccagcaagcgtgcatttgcctactttgtgctgagtgg

SEQ ID NO: 91991 - DNA, 497 bp, Zea mays
gatggagtttcatttaggaggaagggggagagtatgttgcaccggtccggaattcccgggtcgacccacgcgtccgcggacgcgtgggcggggatgaccgagtcctgtacgcacatgggcagctttggctgcagggacagcacatcattggacgggctgttggctatctgccttatgctgggtggcttacaatcgtcatgacggagaaaccagtcctcaagtatctgctaattggtgcactggggctgctggtggtagcatccaaggagtgacgttaaaggtaggatcgatgaacaggagaaaagatttccgagaggggaaaaagtgtgtagaaacacaaatggtatgttgaagaaagagctattgcatacacgatacacaggtggagaaacagggatattaaatctcataccgtggttaactctaaaaaaaaaaaaaaggggggcgctctataggagacacactttattacacgtgcatgtgacgacttaaatctt

SEQ ID NO: 91992 - DNA, 469 bp, Zea mays
ttgggatgtaccggtccggaattcccgggtcgacccacgcgtccgggacaagctgttagcctgtttggtgttttcgacggtcatggaggatcacgtgctgctgagtatttgagggagcacttgtttgataaccttctcaagcaccctgatttcttgacagatacaaagcttgcgataagtgaaacatatcagaaaacagatacagatttcttggaatcagaagcaagcgctttcagggatgatggttcaacagcttcaactgcacttttggtgggtgaccatttatatgttgcaaatgttggtgattctcgtgccgttatttcaaaagctggcaaagctatggcgctttcagaagatcacaaacctaacagaattgatgagcgaaagagaattgaaaatgctggtggtattgtcatttgggctggcacttggagggtgggtggtgtattggcaatgtcccgtgcatttg

SEQ ID NO: 91993 - DNA, 497 bp, Zea mays
  unsure (1)..(497): unsure at all n locations
gtttataaattctcatgnttccgacccttgcatgctatcgctcttatcccacgtagtatcatgcccgcaattatacatatatttttttttccctccaattcatgaatccatctggaggacattttaaagcctgtcatacaataatctatttctatacctcacataattaccttctcctaccttactagcaatccttaacccttcaagactccaccaccgatcttttctactactgctccttccacatgctctcattcgacgagctcaccctgcaacttgatacctcccatctacagttcctgatggagatcgccaacccccttgtcatcaatgtgagcgacaagatatatcccgtctagcttcttaacctgatctacatacttaatcctactaacaatccctcgaggatcacactcatcacaaagatctattctaacaacataattattaaatttacctaccttattctcactttccaccattctctaaaataaatt

SEQ ID NO: 91994 - DNA, 516 bp, Zea mays
gagaagtgtgtcttcgtataagcaacgaaggatagcatctctcggtccggaattcccgggtcgacccacgcgtccgcttgaggctgtgaaaacactgagagcacagcccaaggctaatgatcaatacttgcccggatgtgtgatagttgatgacagcggcaaagctgttggacctgtattagatggtgatgcagttgtcactatcaacttccgggctgatcgcatggttatgcttgcgaaagcactagagtatgcagattttaacaactttgaccgtgtacgtgtccccaaaattcgatatgctgggatgcttcagtatgatggtgagttgaagcttccaagtcgctaccttgtttccccaccagagatagatagaacatctggggagtacttggtgaagaatggcatccgcacctttgcttgcagtgagacagtgaaatttggccatgtcacatttttctggaacggcaaccgctcgggatactttgatgaaactaaggaagagtatgtagaagt

SEQ ID NO: 91995 - DNA, 476 bp, Zea mays
cccccgcgacacgctccggaattgccggatcgaccgagcgcgtccgagcgaaagggaaggtggccttttcgaagccgctttacggagtgtagcgctagctagctccccgggccggagaggaggatggtgggacgaggagcggcgacggccctcgtgtgggcggcggtggtggcggtcgcgacggtggtgtcgcgggcgcagcagctgcaggtggggttctacgacacgctgtgcccggcggcggagatcatcgtgcaggaggaggtgagcaaggcggcgtccggcaaccccggcgtcgccgcgggcctcctgcgcctccacttgcacgactgcttcgtcagggggtgcgacgcgtcggtgctgctggactcgtcggcgggcaaccaggcggagaaggacgcggcgcccaacgccagcctgcgcgggttcgaggtcatcgacagcgccaagacgcggctggagcaggcctgcttcgg

SEQ ID NO: 91996 - DNA, 470 bp, Zea mays
cccccacgcccctggtttgccgggtcgacccgcgcgtgctaacgaaagggaaggtggccttttcgaagctcttttacggagtgtagcgctagctagctggccgggctctagaggaggatggtgggacgaggagcggcgacggccctcgtgtggtcggcggtggtggcggtcgcgactgtggtgtcgcgggcgcatcatctgcaggtggggttctacgacacgctgttcccggcggcggagatcatcgtgcaggatgaggtgagcaaggctgtgtccggtaacccttgcgtcgtctgtggcctactgcgcctgcacttacacgactgcttcgtcagggggtgcgactcgtcggtgctgcttgactcgtatgcgggcaaccaggctgagaatgacgcggctcccaacgccagtctgcgcggattcgaggtcatcgacagctccaagactcggctggagcatgcctgcttttg

SEQ ID NO: 91997 - DNA, 495 bp, Zea mays
  unsure (1)..(495): unsure at all n locations
ngtaagttnattaagaggggggggggagaggctgctaccggtccggaattcccgggtcgacccacgcgtccggggctttagcgatggtcctgttcatggctggcgccgcgctgctcgccggggctgccggggccggcgcgcagcagggcgtgtggagcatcatcacccggcccatgttccagagcatgctgagccaccgcggcgacagcgggtgccagggcgccttctacacctacgacgccttcatcgaggccgccagcaagttccccggcttcggcaccaccggcgacgagcagacgcgcaggcgggagctcgccgccttcttcggccagacgtcccacgaaaccaccggtggatgggcgactgctccggatggaccgtttgcctggggatactgccgggtgaaggaacagaaacagacggacccaccctactatggacgaggacccatacagctaactcataagtacaactacaggctcgccgggcaagcgg

SEQ ID NO: 91998 - DNA, 511 bp, Zea mays
  unsure (1)..(511): unsure at all n locations
gtaaggtttctgtcacgaaaaggagaaagtaggtgctaccggtccggaattcccgggtcgacccacgcgtccggtttgagttgccatgatacatgtagatcaatcccagttcccctgctgcagcttgtaggatggacgccactggtagagctgaagagaatagcccagaaggacaacgtcgacgcccgagtcgtcggcaagctggagtgctaccagcccctctgctccgtcaaggaccgcagcgctctgagaatgatcgaggacgcagaggagagagggctgatctcgcctggcgccacgacgctggtcgagccgacgagcggcaacatgggcatagccctggcgtacatcgctctggcccgaggctacaggttcgtcgcggtcatgcccgccgagtactcgctcgacaagcagatcctgctgcggtacctgggggccgatttggtgttaaccgatcctgcgcttggcttccagggacagctcgacaagctggaacagctcangaaagaaa

SEQ ID NO: 91999 - DNA, 510 bp, Zea mays
aggaaggttttgcgctacgaatatagtagctgcttcggttcggattcccgggtcgacccacgcgtccggttggcttctcctccccctccggttcgggttcgggttcgtgaggttctccggggttcggtttcgtgggtgagcggatcgagatggcggcgtcggatgttgagtaccgctgcttcgtcggcggcctcgcctgggccacggacgaccactccctccacaacgccttcagcacctacggcgaggtcctcgagtccaagatcatcctcgatcgggagacgcagaggtcccgcggcttcggcttcgtcaccttctccacggaggaggcgatgcggaacgccatcgagggcatgaacggcaaggagctggacggccgcaacatcaccgtcaacgaggcccagtcccgcggcggccgtggaggcggcggcggcggcgggtacggtggtggccgtggaggcggcggctacggcggtggcgggcgccgtgatggcggcggcggctacggcg

SEQ ID NO: 92000 - DNA, 517 bp, Zea mays
  unsure (1)..(517): unsure at all n locations
ngtaaagagatcgtcgctacgtctatcgtnacgctcaccggttcggaattcccgggtcgacccacgcgtccgttccacatttgaaggtcacaagagcaaagttcagtaaaatcaaagaaaaggccaccttggaggcgtggaaaggtctgcccacaacttcctgtaccagggcacattccaagaccatcttatgttggtgcgaaaggattgcctgaactatgcaagggccaattacatgatgctcaaggaattactggaatgagagctgcttgcaaacttgctgcccgtgttcttgacttcgctgggactttagttaagccatccattactacaaatgaaattgacgcagcagtccataatatgatcattgaggctggtgcttatccttctccacttggctatcatggatttcctaagagtatatgtacatcagtaaatgagtgtgtctgacatggggtacctgattcaactcagctgcaaaatggggatattataaatattgatgaaaatgggcccc

SEQ ID NO: 92001 - DNA, 506 bp, Zea mays
  unsure (1)..(506): unsure at all n locations
ngtagaatgttcgttctcagatggaggggggatagatatgcttctaccggtctcggaattcccgggtcgacccacgcgtccgtttccccttacttgggatataactcacttaaggattatttccctgctatggaaatgaggccaaatccacaatgcttgaatccagcatgtgttcacagacagaaagaatatatggaatccaaacctgctagagatgcagcagcgaagactaagatggaagctgaagcatccacagaaaatgaatgtcctgtccacctagacaatgagtggaatattagtgttcttgatgatgaagaaactgagacatcaagcattcgaaacactccagatatcctaccggaaggtcttgtccgtgagcttccagacgctgattcatacgcaagaccagctgctccagtgagttccagcgctattgatgatgatgatgatctcgaggagctccagcgtcaacttgatgccctaaacgcatcttagccttaataagn

SEQ ID NO: 92002 - DNA, 505 bp, Zea mays
gggagatgttccttacgggagggggggggagggaaaagtagtctcggtccggaattcccgggcacacacacagacaagtggtttccaaagccaagtgtgtgtactagcaaccagctagctcgggcggcagcaggcaggcatcatgtcggaggagaagcaccaccacttcttcaaccaccacaagaaggacgaggagcagcccgccggcgagtacgggtactccgagaccgaggtggtcaccgacaccggcgagggcgagtacgagaggtacaagaaggaggagaaggagcacaagcacaagcagcacctcggcgaggccggcgccatcgccgccggcgccttcgcactctacgagaagcacgaggcgaagaaggaccccgagcacgcgcacaggcacaagatcacggaggaggtcgctgccgcggcggccgtccgcgccggcggctacgtattccacgagcaccacgagaagaagaaggaccacatggacgccgaggaggccagc

SEQ ID NO: 92003 - DNA, 474 bp, Zea mays
ttctgttatgcttgtaccggtccggaattcccgggtcgacccacgcgtccgtgccgccgctcccttgacattgagcgcccaacctacaccaacctcaacaggctggtgtcccaggtcatctcatccctgactgcttccctgaggttcgatggtgctctgaacgttgatgtgaacgagttccagaccaacctggtgccctaccctaggatccacttcatgctttcgtcctacgctccagtcatttctgctgagaaggcctaccacgagcagctgtccgtggccgaaatcaccaacagcgccttcgagccatcctccatgatggccaagtgcgacccccgccatggcaagtacatggcatgctgcctcatgtaccgtggtgatgtggttcccaaggacgtgaacgctgctgtggccacaatcaagaccaagcgcaccatccagttcgtggactggtgcccgactggcttcaagtgc

SEQ ID NO: 92004 - DNA, 514 bp, Zea mays
  unsure (1)..(514): unsure at all n locations
naggaaggtctctcgnttcaagccaaaagtagtaancctcactcgttcttctgatcgaccgcacgcgtccggacggctggtcctgcacctactactactatcttgtcaacgcaggtgttacgagatacgcggggtaatgactcggacgcaatctgccgtatcggtcgccgagtacccctgcttgctgctgctgccagcctgggccacgacctaccactccgtcatcacctcttcaaagctagctccgacatctgcactgcctgtcctactcccatcggacgacgtacaggccctgcgccttctgctgtatcaccttcaggaacctcaagatcatccgcaacaccattcgacgacaggaacgccaaactgcaactgcctcaagaacatcaccaggaacgtcagccatctcaacgccggcaacgccggcagcatccacttcaagtgcggcgtcagcatgcgatacaccatcatcaccttcacccactgctccagattgaactaaaacctaaacccc

SEQ ID NO: 92005 - DNA, 516 bp, Zea mays
  unsure (1)..(516): unsure at all n locations
ggggagcttngtctatgattgaagtgaaaagtatgctctaccggtccggaattcccgggtcgacccacgcgtccggaacaggcacagtttctatctgatggatcgtctggtcctggaatgtggattgttcctgtaacagcatgctgtggctcatatgatgcacagaaaaagttcttattgaaagataaaatggataagataaatattaaagagttttctgactctcaaagtgctgatggggagaagaatcaaatcatttggatcaaattgaatattgatcaaactggattttatagagtgaagtatgatgatgaacttgcagctggacttgtaaatgcaatcaaagcaaagaagctctcattaatggataagattggtatcgtggaagattcatatgcgctatctgttgcttgcaagcaaacactaacgtcattgttgcgactgctgaatgcttataatgatgagtctgattacactgtactntcacatgtaacctctgtatgtttaagcatttct

SEQ ID NO: 92006 - DNA, 512 bp, Zea mays
  unsure (1)..(512): unsure at all n locations
gggagggatatataacgacaggagatagtagtctcggtccggaattcccgggtcgacccacgcgtccgcactcccaagccagtaccgagtcctacgagcagtcgcacgcaagtgtcaagagacgaggcggtcgacatggctcgcacgcaatctgccgtagcggtcgccgtggtggccgcggtgctgctgctggcagcggcggcgacgacctcggaggccgccatcacctgcgggcaggtgagctccgccatcgcgccctgcctctcctacgcccgcggcacggggtccggcccctccgcgtcctgctgtagcggcgtcaggaacctcaagagcgccgccagcaccgccgccgacaggcgcgccgcctgcaactgcctcaagaacgccgccaggggcgtcagcggcctcaacgccggcaacgccgncagcatcccctccaagtgcggcgtcagcatcccctacaccatcagcacctncaccgactgctccagggtgaactaaaacctagaccc

SEQ ID NO: 92007 - DNA, 523 bp, Zea mays
gatggaagtctttctttaatgaagggggagagggatgagtaagtatcggtccggaattcccgtgtcgacccacgcgtccggtccagaacattccgtgctacagagactcggattattggaccgttggtgaagcttcttgatgagagggaagcagatgtgtctcgagaggcagcaatttccctgaccaagtttgcgtgcacagataattacctgcacgttgaccattccaaagcgatcatcagtgcaggtggagcgaagcacctagttcagcttgtgtatttcagcgagcaggtggttcagattgcatcactcacccttgtatgctacattgcacacaatgtcccagacagcgaggagctggcacaagcagaaatcctcacggtgctcgaatgggcttccaagcaagcttacatggtgcaagacccagtaatagacaacttgttgccagaagcaaagatcagattggaactgtatcaatctagaggcgcaaaaggctatcattagattagctgctgtgaaaagg

SEQ ID NO: 92008 - DNA, 521 bp, Zea mays
gaggggagagtatcttataatgagggtgaagagagagttgtactcggtccggaattcccgggtcgacccacgcgtccggcgctttcctgtccgactcccagccgtcgtctgctgcggactccgcctccagtttggggtgtttcttgcaagttgctcttgcggtagttcccccaactgtcaccatgcagaacgaggagggtaagactgtggacctctatgttcccaggaagtgctcggccacaaacaggatcatcactgccaaggaccatgcctctgtccagatcaacattggccacttggatgcgaatggcctgtatgatggtcacttcacaacatttgctctctctgggtttgtccgtgctcagggcgatgcagacagctccttggacaggctgtggcagaagaagaaggctgatatcaagcagtagattttacatctagtttaccaagaattggacactgccttagctatgttttgaattcatgtcactatatgcaatgttgtgatttcagctggtacc

SEQ ID NO: 92009 - DNA, 498 bp, Zea mays
  unsure (1)..(498): unsure at all n locations
gataagttcctttacgcaggggagggaggtatgatgccccggactcggaattcccgggtcgacccacgcgtacgaacaaattgtcagaaggaagtgatgtttctcagcgagatcgaatagatcttggaggctgccatccatgcataattccaaaaatgcatggcaccattgttacggctaattgctcatcgaatcaccagcgctcactttcaggttgctgaaagagcgctcttcatgtggaacagtgatcacactagacaacttgatagcacacaaccgccatatgatcatgacacttgttgtttcagagctagagcagaacattcagaatcactggaaccaaaccgacctgaatctggctgttgatgtcaggtatatgatctctgagatggatggtgaccatttctaaccgtgcctgagcatgtacaaggaggactacataagacatgcatcgtagatgctaaccggatattacctgggacaagcttgagtagatan

SEQ ID NO: 92010 - DNA, 503 bp, Zea mays
  unsure (1)..(503): unsure at all n locations
ngtggagtatgactaaggggaagaggggggagggtgagttgttaccggtccggaattcccgggtcgacccacgcgtccgcgttccccttcttcagttctgccgctgctgctgccgctgccaccctccgtccgcgtccagatcccgccaccccaaccgatctgccggcctccagcatggcggcggcggcgggggcgagggcgagggcgaaggcagcgggagccctggcgctggcgctcgtgctcgcgctagcgggggccaactccgagggcgacgcgctctcggcgctgcgccgcagcctcagggaccccggcggcgtgctgcagagctgggaccccacgctcgtcaacccctgcacctggttccacgtcacctgcgaccgcgacaaccgcgtcacccgnctagatcttggtaatttgaacttatctggtcatctggtgcctgagctgggganattggagcatctgcagtacctggaactntacaagaacagcattcaaggaac

SEQ ID NO: 92011 - DNA, 491 bp, Zea mays
  unsure (1)..(491): unsure at all n locations
ttcctttgtgtggccccggtccggaattcccgggtcgacccacgcgtccgatctgaaagaaacccgccaccagctctcgtccttccttctctccaatccaaccgcagtcctttcagcttcagcttcttctgctccttctctggtgaggaggcgtggtgagagactgcgactgcgcgatggaggcgtcgtcgtcggcgttggcgctcgtggccgccgtgctcctcctctcctccccgctcgctgcgtcagatttctgcgtgtgccgttcggaccagccgacggcggtgctgcagaaggcgatcgacttcgcgtgcggcccgcagggcggcgccgactgcacgcccatcctgcatggcggcgggtgctacagcccggacaccgncgncgcgcactgcttctgtgctcgncaacacctactaccagaaccacagggccaggggcgccacctgcgacttcggcngngcagncaccgtctcaccaccgacccagtt

SEQ ID NO: 92012 - DNA, 531 bp, Zea mays
  unsure (1)..(531): unsure at all n locations
ngggagaagtcgttcntagtatgtagagatgtggataagtattctttctccggttcggaattcccgggtcgacccacgcgtccgggatcaagcatcaactcttcagtttcccagctatgctttggagggttcagtttttcagaggtttgacactgacctcatcaagaaagtcagcaccaactgtcttggcatgcaaaatcacaaattttggatatcaaccaagccatatcgagagaacgatgcactatcaagtttcttcaaaatcttgactacatcacctgatgaaaacggcaaggtctatttctcaactgtacaagccaataattattcaatcacttgcacgcaatggcattctgagaaagccatttttgaattgaagaaaccaatgatcccacacagcgaaaatgcagtacaggttactcaaacattttgccaatcattttatcagcccaagcacgcaagtctttcaaaacagccttctgccgacaaagtgctggataacttaatttacaactacagtccgacatttac

SEQ ID NO: 92013 - DNA, 515 bp, Zea mays
  unsure (1)..(515): unsure at all n locations
aggggngagagttcttctaccgaaaagaagtatgtattctcgtctcggattcccgggtcgacccacgcgtccggcagcagcacacccggtcaaccttccacacacgcgcgcacacacacatggcgtcgcaggagaggcaacagcaggcgggagcggcggcggcggcgtcctccgccgtgggcttcgaggactacctgccggtgatggcggagcggctgggcgaggacgggctgatgcgggagctggcgagcgggttccggctgctgatggacccggcgcgcgggctcatcaccttcgacagcctccgccgcaacgcgccgctgctgggcctgggcggcatgtcggacgccgacctccgcgggatgctcgccgagggcgacttcgacggcgacggcgcgctcagcgagacggagttctgcgtcctcatggtgcgcctcagccccgagctcatggacgagcccaggccgtggctcgacgacgccgtcgaccaggcgggccgctttcttttcaacaac

SEQ ID NO: 92014 - DNA, 499 bp, Zea mays
  unsure (1)..(499): unsure at all n locations
tggaagttggtcgtacttgcacaagatagtatgctggctccggtccggaattcccgggtcgacccacgcgtccggctggtgctgtgttggtacaggcatgcagtgctgatgaagatggcatgcttggtggtggtgttcaaagtgatggcaatggacaaaagcacctaagtgccatagcggctaatgacgagtctatcttgtccaataccaatggtgttccaggatttccgccaaagaaggcaacctactcatgcattcaaatgaacggaaaggaagtttttcgctttgctgtccgatgcgtgccacagtccattgagaaggcactccaagaagctggtttgcctgcctacagtatcgactggttgctgttacatcaagctaatcagcgtattattgatgctgctgccagcagattagatatcccatccgacaaggttatttcaaatcttgctaattacggcaataccagtgcggcatccataccattagcattggatgn

SEQ ID NO: 92015 - DNA, 476 bp, Zea mays
  unsure (1)..(476): unsure at all n locations
ttggtattgctctaccggtccggaattcccgggtcgacccacgcgtccgctacaacttactgcttgctctagctagctagctgctcccggcccatatccactgacacgggtaggctagcagcagcagcagcaatggcctcggtgacgaggttcccggccgtggccctcgtcctgctgctcgccgccagcgccttcctggccagcgaggtggcggcgtgcggcggctgcccgaaaccaactcctcctcctccatcgccaccgccgccgtcgcccaccagcacgccgtgccctccgccgtcgtccagctccggcggcaagtgccccaagaacgcgctgaaactgggcgtgtgcgccaacgtgctgggcctcgtcaaggtgtccatcggcaaggtgcccaccgactcgtgctgcccactgctggacgggctcgccgacctagaggccgncgtctgcctctgcaccgcgctcaaggccan

SEQ ID NO: 92016 - DNA, 503 bp, Zea mays
attgagagttctataagagaaggggagggaagagaaatgttctaccggtccggaattcccgggtcgacccacgcgtccggacatcaacctctgaagtttatggtgatccacttgagcatcctcaaactgaggcctagtggggcaatgttaacccgattggtgttaggagttgttatgatgagggtaagcgtgtagcagagacgctgatgttcgactatcacaggcagcatggcattgaaatccggattgccaggattttcaacacctatgggcctaggatgaacattgatgatggccgtgttgttagcaacttcattgctcaggctgtgcgcggtgagcccctgactgtccagaggccaggaacacagactaggagtttctgctatgttgccgatatggttgatggtcttattaagctgatgaatggaaacaagactggaccgattaacttggggaacccaagtgaattcaccatgctggaacttgctgaaaatgtgaaagaa

SEQ ID NO: 92017 - DNA, 527 bp, Zea mays
  unsure (1)..(527): unsure at all n locations
ggtgtggggaggggtcnntctaagtaggaggagggatgagaaagtttgtccggtccggaattcccgggtcgacccacgcgtccggcttctctggtttcagacgcaaccccgcgggtcgcgggatcaaggagccagagagcgggacgcagcgagcgttccgccggagatcgagaccgtagctagggtttgaggcgccgggctgcggtggacgagatgtcgacgccggcgaggaagcggctgatgcgggacttcaggcgcctgcagcaggacccgcccgccgggatcagcggcgcgccgcacgacaacaacatcatgctctggaacgccgtcatattcgggccggatgatacgccgtgggacggtggcacgttcaagcttaccttgcagtttacagaagattacccaaacaagccaccaactgttcgatttgtctctaggatgtttcatccaaatatatatgctgatggaagcatctgtttggatatcctacagaaccagtggagtcctatatatgatngtgctgcaat

SEQ ID NO: 92018 - DNA, 529 bp, Zea mays
  unsure (1)..(529): unsure at all n locations
agagggggggagtnntttcntcgcacgatggaggggggacagggatgaatgtatcggaccggaaggcatggcacagaggcgtcgtccaagctcgcagggttaccggatcggaggagcatacgcgcctaggtcaccacagccgggggtcgcggatcgctaggcaagcttgcgtcgcgcgccctctccgtcggcgggagatggcagcaccagcagcttcgccggctcaacatccacgaataccagggtgcggagttgatggggaagtacggtatcaacgtacccaggggtgcggcggcggggtccgtacaggaggtcaatgacgccttgaagaacatgttccccagtgagaaagagatagttgttaaaagtcaaatccttgctggtggccgagggctgggaactttcaaaagtgggctgcaaggaggtgtccatattgttaaggctgaggaagctgaaagcattgcacgtaaaatgttaggccagattctggtaacgaaacaaactggtccggagggaaagattgtgagca

SEQ ID NO: 92019 - DNA, 519 bp, Zea mays
  unsure (1)..(519): unsure at all n locations
gtggaggcnnagcggttttataccagaacgatagtaaggagtaccgcccggaattccggtcgacgcacgcgtccgggaatacggaaagcgaaagatgatggatctcgccgacccccagcagcagcagcggctgatcgccggcgcggcgctgctgctggcaaccgcggccttcctcaggctcctcctgggctcccgctcccggggcggcaagcgcctgccgcccaccatcccgggggcgccggtgatcggcggcctcgtcaagttcatgcgcgggcccatccccatgatccgggagcagtacgcccgcctcggcagcgtcttcaccgtccccatcatcacccgcaggatcacgttcctcgtcggccctgaggtgtccgcgcacttcttcaagggcaacgaggccgagatgagccagcaggaggtgtacaggttcaacgtgcccacgttcggccccggggtcgtcttcgacgtcgactactccgtcaggcaggagcagttcaggttctttaccgaggcgct

SEQ ID NO: 92020 - DNA, 480 bp, Zea mays
  unsure (1)..(480): unsure at all n locations
tttggggtagtgttccaccggtctcggaattcccgggtcgacccacgcgtccgcacatcctgctgctcgtccactgtcacagactcgtcctcttcgcccccgtcaccggcggcggccaatgccgcgcccgcgacacggaagcggcaggcgttggaggccgaggccgaggccgaggcgggcggtgaggaggaggaggaggaggaggaaggctgtgctggtaataaggcggcgccggccaagaagcgaccgcggggcagcgaggggaagcacccgacgttccgcggcgtgcggatgcgggcgtggggcaagtgggtgtcggagatccgcgagccgcgcaagaagtcgcgcatatggctcggcacgttccccaccgccgagatggccgcgcgcgcccacgacgtcgcggcgctcgccatcaagggccgngccgngcacctcaacttcccggacctcgccggcgcgcttccgcgcgccgcgtcc

SEQ ID NO: 92021 - DNA, 511 bp, Zea mays
  unsure (1)..(511): unsure at all n locations
agtaggagctgggtnnnnccatgcatcgagacgtanagtaatactctaccggtccggaattcccgggtcgacccacgcgtccggtcaaatgtggttattaacctcataggacgagagtatgaaacaaggaactacagcttggaagaagtaaaccaccatatgcctgaacagcttgcaacaattgctaaggagcatgggggtatcataagatttattcaagtttcttgcctaagggcgtcaccgtcttctgaatctagaatgttgaggacaaaagctgcaggagagcaatcagtcttcaaagaattccctgaggctacaatcatgaggcctgctaccatgattggcacagaagatcgaattctgaacagatgggcacaatttgcaaagaattggggtttcctcccgcttgttggtggtggatctactaagattcagcctgtgtatgtaatcgatgttgctgctgctattgtgaactccctcaaggatgacggcactagcatgggaaagatac

SEQ ID NO: 92022 - DNA, 500 bp, Zea mays
  unsure (1)..(500): unsure at all n locations
tggtcggagtgcgtctgcngctaggccgactgcacgacgctaccggttcggaattcccgggtggacgcacgcgtccggtcttcttcctctgctgtggatataaagaaggcctaccgcaaagcagcactaagacagcatggagacaaagccagtgggtttcttgtcagaagtgaaaatatcaatgatgctgtatggagagatataacaaatgaaatactcagggatgctgattatttattcaaaataattgggaaggcatatgctatgctttcagaccctacaacgagaagggaatgataacctggaggtggagtgatagaaaagcagtgcacatgtaacatgagcagcgggagcaatgaaaatgatgacaggacctcttagtgagagcatttaatcatgaagttggtaccgcacaaagcttccatactggagaggtcctaatgtaaattttgtgggctttaccaacgatttgaagccacttgggtttgtccaaacctaaa

SEQ ID NO: 92023 - DNA, 535 bp, Zea mays
  unsure (1)..(535): unsure at all n locations
agtcggagatgtcgttttctgtcgactgcacgttatcagtttgnnagtancgtgctcggtttcggaattcccgggggcgagccacgcagtccgatgtgagaaatgtgaagtatgaagcagcgaaatattcttcgtgaccttagacgaagtacctggcctggtcacattgcataccgtggtgactaacacatcgtacaagttgatcattaaatctgtattggggagcaaaacaaagtgctcaagaatcgtattgctcggtgcacaacttctttagtcctgcgcatgtgatgccacttctggaaatagttcgtactcagcacacttcaccacaagttgttgctgacttgctggatgttgggaagaagattaaaaagacaccaatagtcgtctgcaactgtactggctttgcagttaataagatgttctttccatacactcaatcaacacttttttatgttgaacttggtatggatgcttattaaaattgatcgtgcttgtaccaaaatttgaaaggcctatggtacttttacactgc

SEQ ID NO: 92024 - DNA, 493 bp, Zea mays
  unsure (1)..(493): unsure at all n locations
gggggggagtgtntcatcccatgactagcattacagcatgcttccccggttcggaattcccgggtggacgcacgcgtccgctaccacggagatctgaatgccttgaggtacgacattgtggagctgaagccgactctgctggttggggtgccccgagtgtacgaaaggatttatgaaggtatcttgaaggccattgcggaactcagacctctaagaagggtcatctttaatgctttgtacaaccgcaaactggcaagcatgaaagcaggctactcgcacaaaaccgcttcacctttcgcggacatgctggcttttcgcaaggtcaaagcaaggcttggaggtcgtcttcgcttactgatttcaggaagggctccggtgagtaatgaaatcgangagttcatgaaaatgaccaacttggcatacttcattccaaggtatggtttaacagaaacacttggaccttacactggcttgtacattgaccaccttggcc

SEQ ID NO: 92025 - DNA, 509 bp, Zea mays
  unsure (1)..(509): unsure at all n locations
aggagtgggagggatcnnacattgatgatatgggggtagatagtaatgctcgccagttcccggatcgacccacgcgtccgcgcccccgaagcgtctcggttcgcatagcaaagctgctcttgcaacaagccaaacaaggcantggctgctagccgagacaggggatagattgagagagaggcgcgcagatggcgacgccgtcgtcgtcgctttgctccagcttcgcctccctgcggaccgcctccatcggccacccccgtggcatcgcctcctccacgctcaggaaggcattccatgtgagggcatcagctcgggttgacaagttctcaaagagtgacatcatcgtgtccccttcgattctgtctgcaaactttgcgaagcttggtgatcaggtaaaagctgtggaggtggcaggatgcgactggattcatgtcgatgtcatggacgggcgctttgtgccaaacatcacaattggacccttggtttgtgatgctctgcgtccagtgacc

SEQ ID NO: 92026 - DNA, 503 bp, Zea mays
  unsure (1)..(503): unsure at all n locations
aggagggaggatgtggtatagcaactcgacatgatagcaccgctccggaattccgggtggacccacgcgtccgggccgccatcgcgcgccttctcccggggcgcaccgacaacgccgttaagaaccactagaactcgtggctcaagcggaagctcgccaccgccacggcgacctccagcggcagcgatgctgagcgggcgtgcaagcgcgcaagccctggcccggggagcccgacggcgtcggaccgcagcgacctcagccacggctgcggcgccgcgcaggtgttccgtcccgtcccgcgcgccggaggcttcgacgccatcagcgccgcagacgtgcgccctccgcccccgccagcagtcgcagacgaggacccgctcacctcgctctccctctcgctgccggtgctggaccagtcgccgtcgggcttncaccacgacagcgcccggagccacttncaggagctctnncccctcgtcgtccccgtcgccgaagtctactcc

SEQ ID NO: 92027 - DNA, 499 bp, Zea mays
agagagaggttctggtatgaaatgaagatagatgctaccgctccggaattcccgggtcgacccacgcgtccgccttcaaggatgagaagctttccttttatcaaggttttgatcctgctaatgccaacagtgcaaacatgctgctttggccaggcccaaagggtgcagtcaatcaaagagatgctgatcttctcttcatgtggaagaggtacgagcagttaaatggggggaccgaagagaagctgagggctctcatagagattaaagaaactgttcagcacaggaagcatcttgacagcagtatcgatttcgttgggaggctcgtcttcggatttgagaaagggccttcgatgcttgaggctgttagaacctctggtcaaccattagtcgatgactgggactgtttgaagaggatggtgcggattttcgagtcccagtgtggttcacttactcagtacggcatgaagtacatgagagcgttgcaaacatctgctacaat

SEQ ID NO: 92028 - DNA, 507 bp, Zea mays
  unsure (1)..(507): unsure at all n locations
taggagggcaggatttgttatagacatggggggatgaatgtcaccgctccggaattcccgggtcgacccacgcgtgcgcgcctgtccactttccccgtgcttctccgccgtcgaggccgcgtcccagtgcgaagagagtccgggtcaaatggccaggcgctgggtccggcccgaggtgtacccgctgttcgcggcgacgggcgttgccgtcggcatctgcgggtttcagctcttccggaacatcactggcaacccggaagtcagggtaaacaaagcaaggagggcagctggtgtgcttgagaaccatgangaggggagacgttacgccatgcatggcctaagaagctttgtgcacgacaagacttctgagatcatgcctgcagttaacaagttcttcactgaccctaagtgaagcatgttgattggcatactactactactacttgctactggggattttacactttggttgccactccataatgttgggacatncatgacccttta

SEQ ID NO: 92029 - DNA, 504 bp, Zea mays
  unsure (1)..(504): unsure at all n locations
naggaagaggttttggcacgaatcaggcgtagcgtggcaccgctctcggaattcccgggtggacccacgcgtacggctagtgacagatgctctagatccgctcatcctggcgggctagtgaggtcgtaagcggggatcgaatcaaaagatgctggacaagctgtgggacgacgtggtggccagtcctcaaccggagacgggcctcgagaagctccgcaaggccaccaccgcccgtccgctcgttatcaacatagacgcgaacggcggcagctacaagctggcgcagtcgatgccatcgaccccgacgactccgatgacgccttcatcgtcgtattcatcgacgacgccgcgcggcgcccgcaacatgtggcgcatagtcttgcacacggggatcaacctggccaccaagggcatggtcgctaacctcttggaccggtcgcaggctatctccgtcaacgtctacgactggctctacagttacgagaccaggatcaaccaccgctg

SEQ ID NO: 92030 - DNA, 503 bp, Zea mays
  unsure (1)..(503): unsure at all n locations
ggggcggacagggtgctcnnccccgactnctcgnangtcactatcgtctcggaattcccggctcgacgcacgcgtccgcccacgcgtccgcgagaagaagagatgttacatatataataactactgtgtaggcaggtgcgtctcctgctgggacgaggattcaagaagctagctaagagagaagggcataacgagataataagcagcgcgcgaagatgcaagactgggcgccggtgttcgtctcgctggtgctcttcatcctgctgtcgccgggcctgctgttccagatgccgggcaagtgccggatcatcgatttcggcaactttcagaccaacgccatctccatcctcgttcacgccatcctcttcttcgccttcgccggcatttttcctctcgcccttcgggtgcacatgtaccctcgggtcctaaggcggcgccccgggggcgccctaaccttttttttattgcccggcgcgccattgttctcttctttaaataaacct

SEQ ID NO: 92031 - DNA, 490 bp, Zea mays
  unsure (1)..(490): unsure at all n locations
nggtggaagtgtcttcgncttcaccctcgnatgctctccggtctcggattcccggtcgacgcacgcgttcggtttgagatcctgtgcctttctgggtcatacttggtggtagatgaaggtggcggcgcgcgggcccgaagtggagggcgttgcatagctttgtgtggtcctgacaacagggttattggtgggagtgtaggtggagtcctgatggcagctggagcggttcaggtgatagtggggagcttcatgtacggaggaggttcaaagaagaacaaggtgaaagccgagttggacgcggagcctgaggaggcgaacgccggcgaccaagaggtggcacttgcggagcacagcagcatggcccctcatcctgccatgagtggtggtggcggctgggcatctggcatgatgaggcagatggagtcgagaactcccaacattgatatcaactccatccgcgaagtatttgcctgcttggttgggaggaaac

SEQ ID NO: 92032 - DNA, 500 bp, Zea mays
gggggggaggtgtcttcgcctaccgaacaggatgttacgctccaccggtctcggaattcccgggcgaaagccaagtgtgtgtactagcaaccagctagctcgggcggtagcaggcagccatcatgtcggaggaggagcgccaccacttcttcaaccaccacaagaaggacgaggagcagcccgccggcgagtacgggtactccgagaccgaggtggtcaccgccaccggcgagggcgagtacgagaggtacaagaaggaggagaaggagcacaagcacaagcagcacctcggcgaggccggcgccatcgccgtcggcgccttcgcacttctacgagaagcacgaggcaaaaaaggaccccaagcacgcgcacaggcccaggatcacggaggaggtcgttgccgcggcggccgtcggccccggcggttacgtattcaacaagcaccacgaggaggataagggaccacaaggaccgccaagaaggccgccgtcaaaagaaac

SEQ ID NO: 92033 - DNA, 489 bp, Zea mays
  unsure (1)..(489): unsure at all n locations
gggaagtgtcttcctattgcagggggtagtatgctcgtaccggtccggaattcccgggtcgacccacgcgtccggcggggttcgtcctccagtggcgcctcgcgctcgtgctcctcgccgtgttcccgctggtcgtgggcgccaccgtgctgcagaagatgttcatgaagggcttctcgggggacctggaggccgcgcacgccagggcgacgcagatcgcgggcgaggccgtggccaacctgcgcaccgtggccgcgttcaacgcggagcgcaagatcacggggctgttcgaggccaacctgcgcggcccgctccggcgctgcttctggaaggggcagatcgccggcagcggctacggcgtggcgcagttcctgctgtacgcgtnctacgcgctggggctgtggtacgcggcgtggctggtgaagcacggcgtgtccgacttctcgcgcaccatccgcgtgttcatggtgctgatggtgtccgcgaacg

SEQ ID NO: 92034 - DNA, 507 bp, Zea mays
  unsure (1)..(507): unsure at all n locations
tgagtgagtggtctgagctattgaataccaggcntaggtagtattactcctcgaatttccgatcgacggactccgacgccagagggcagggaacacagccactcgccttcgagaccccggcgcgcgcgagagaaagaggggagaggaggatcttttgttggtgaaaaatattggaggcggagggaaggtgaaggagggggatcggagatgaacgtgttccggctggcgggggacatgacccacctcctcagcgtggtagtgctgctcctcaagatccataccatcaagtcctgcgcaggcatatctctgaagacacaggagctgtatgcacttgtttttgcagcacggtacctggacctgtttgttcattttgtgtctctgtataacactgtcatgaagctggtcttcttggcaagttctttctcgatagtttggtacatgaagcggcataagattgtgcggaggacatatgacaaggatcatgacacctttcgccattacgtttta

SEQ ID NO: 92035 - DNA, 505 bp, Zea mays
gagggagggagaggtctgttataagaatcgggggacgaaagtatcgctccggaattcccgggtcgacccacgcgtccgggcagctaacgacctgcagccaaccatctaccagcgactcagcgagcgagagcagcagacactgggcgcagctagctaggagcagcagcagcggcggcgatggcggcctccatgatctcctcgtcagctctggcggtggcgcctcagggcctgccgcccctcggccgccgcgcctcctccttcgccgtcgtctgctccaagaagaagatcaagaccgacaagccctacgggattgggggtggcctgaccgtcgacgtcgacgccaacgggagaaagggcaagggcaagggcgtgtaccagttcgtcgacaagtacggcgcgaacgtcgacggatacagcccaatctacaacgaggatgactggtctcccaccggcgacgtctacgtcggtggaaccactgggcttctgatctgggccgtcaccctcg

SEQ ID NO: 92036 - DNA, 508 bp, Zea mays
  unsure (1)..(508): unsure at all n locations
naggagagagtgtctctgagctacgtacttagtagtatggtgctaccggcccggaattcccgggccgacgccgagctccgaaggccgcagcatcaggcgcggcccccctcgcgtgtgaccgagatggcgctgccgaatgangggaccgttgattacccgagcttcaagctcgtcatcgtcggcgatggtggaactggtaaaactacatttgtgaagaggcatctcactggagagtttgagaagaaatatgaaccaaccattggtgtggaagttcatccgttggatttcaccactaactgtggtaagatcaggttctactgctgggataccgcagggcaagagaagtttggtggcctcagggatggatactatatccatggccagtgtgcgatcatcatgtttgatgtaacctcaaggcttacttacaagaatgttcctacgtggcatatggacctgtgcagggtctgtgaaaacattcccattgtnctctgcggtaaataagttgatg

SEQ ID NO: 92037 - DNA, 496 bp, Zea mays
aggagggaagagttcttagctaccgaacatagtatgctactacaggtctcggaattcccgggtcgacgcacgcgtccgctgaagactgtgaagctgacactaaaagggaaaaatcctgttacccttgatcaccttggtgggaggggaaacaacatgggctattatatccttcctgacagcctaaacctggagactttgctggttgaggaaacaccaagggtcaagcctaagaagcctacttctgggaagcccttgggacgtgggcgtggccgtggtcgtgggcgcggtcggggtcggggacgttgagcatgctagctgcttttggaaattgcattgcgtgcatctgcagtgtaacctacattcctatcaattgtacgaagtatgcctttgattatgccaccatgtatcaattgcttttaaaaaaaagtaaaacacgggatttcccactttttgtggcacaaacacgtgttcaagaaaaagggcggccgctttaaaa

SEQ ID NO: 92038 - DNA, 490 bp, Zea mays
ggagaaggcgtctccctactgaacatagtatgctctccggtctcggattcccgggtcgacgcacgcgtccgggagttcccttcgaggaaattcgcgccatcactccgagtgttgttgcgaaaatttctgctagaatcagcgaattgatgcgagctaggagccaagactcttgtggttccaggaaacctccctattggatgtgtcccaaaatatctgatgatattcaagagcaataagaaagaggattatgatccacagacaggttgtcttagatggatgaacgagttctcacagtaccacaacaagcttcttgtggagcagctcaagaagcttcgcaggctccatcctggagtaaccatcatctattgctgattactaatggactgctatgggaaatattcctttccctggaacatatgggatcgaatatccccctatgggcttgctttggtgcaaaaggaccctaccgggtgtccccaactacaagctg

SEQ ID NO: 92039 - DNA, 499 bp, Zea mays
  unsure (1)..(499): unsure at all n locations
aggtgggaaggtgtcttcgatgaaatgacagtgatagctgcgcttctaccggtccggaattcccgggtcgacccacgcgtccggggggaagtttgagaatctacaaaagtgtatgtacaacaaagaatttttgagatcattggtatctcgcctgaacaggcagaggagaaatttggctaccttttagaatgcttcgacatgggtgctcctccacatggaggcattgcctatggattggatcggttggtgatgcttttggcgggtgagagctcgatccgagatgtgattgctttccccaagaccacgactgctcagtgtgcactcaccaaagcaccatcagctgtagaaccacagcaactgaaggatctcgccttccccaaaccttacttctgagacgctggtcaaagtgtcatgaccaaaacttcgtgcttttaaggaccggtttagnttgcttctaattttccagtggattgggctaatccattttgcacaaaaaaaa

SEQ ID NO: 92040 - DNA, 502 bp, Zea mays
aggtagggagggtttgtctctgtatacagatagattgtaccgcttcggaattcccgggtcgacccacgcgtccggggcggaccgggcaagcgcggctgccagcgcgcagccggtcggtgcggtgcctggcggggctgagcccggagatgcgggagacactggacaaggtcgtggggtccagcaaggtgttgctattcatgaagggcaccaaggactttccgcagtgcggcttctcccacaccgtcgtgcagatcctgcgctcgctcgacgtgcccttcgagacgctcgacgtgctcgctaacgaggcgctccggcaggggctcaaggagtactccagctggcccaccttcccgcagctctacatcgacggcgagttcttcggcggatgtgacatcaccgtcgaggcatacaagagtggagaactgcaggaaactctagagaaagcaatgtgttcgtagaaaaaaatgaacaataagcagatggcatacaattaatcaaaatg

SEQ ID NO: 92041 - DNA, 498 bp, Zea mays
  unsure (1)..(498): unsure at all n locations
naggaggagggttgatattgaaatacgaaagagatcaccgctccggattccgggtcgacccacgcgtccgagccaccatcgatctgcaagtctcgctacgtagcagtgcaataaaaaaaagcagccggggtggcgggcagcaccatgggcctctcctccacggccttcgccggcaaggccgtgaacgtgccgtcgtcgtccgccttcggcgaggcccgcgtgacgatgcgcaagacggcggcgaaggccaagccggcggcggcgtccgggagcccgtggtacggccccgaccgcgtgctgtacctgggcccactgtccggcgagccgccgagctacctgacgggcgagttcccgggcgactacggctgggacaccgcggggctgtcggcggacccggagacgttcgccaagaaccgggagctggaggtgatccactcccgctgggccatgctgggcgcgctcggctgcgtcttcccggagcttctcgcccgcaacggc

SEQ ID NO: 92042 - DNA, 486 bp, Zea mays
  unsure (1)..(486): unsure at all n locations
cagggtctggnttacgcccatcgnatgctcttcggttcggaatcccggctggacgccacgcgttcgatcccgtcccaagaggagaaactccggttcgtgacgcgggggaaaatggggaagactgcggggcggatgaaggcggtggtgtacgcgctgtcgcccttccagcagaaggtgatgccggggctgtggaaggacatcaccaccaagatccaccacaaggtcaccgagaactggatctccgccacgctcctcctcacccccgtcgtcggcacctaccaatacgccatgtggtacaaagagcaggagaagctttcccacagatactaaatgggatgtcctccaagttgctgcggcttgtcgcagttgaattttccatgatgggttgtataatctgtcaatgtcatttctttgctcagttttagttcaacccattttcaccttttcatatgcatatacggtatctgtgcctggcaaacatatttn

SEQ ID NO: 92043 - DNA, 485 bp, Zea mays
gtgggaggttcttccctagcgggcagatagtatcctctaccggtctcgattcccggtcgacccacgcgtccgggaggatttcacaaaaagccgaaaaggtatggtggcgggaaagctgctactgctgcgggtaacagcctcaaccgagagttcagattaaaaattaaagagcacatgcagcattgtgtggatcaccctgaagaggttagcaagctggccaaagtgaaggcacaggtttctgaagtcaagggtgttatgatggaaaacattgaaaaggtcctagatcgtggagagaagattgagctgcttgttgacaagactgagaatctgcgcttaccagcccaagaattcaaacagcaaggaacaaatgtgaagggaaagaagttggtgcagaacattaaaatcaaactcattgtcctgggaataatcatcgcacttattctgatcattaatctttctggctggcacggtttcaaaaggcatta

SEQ ID NO: 92044 - DNA, 499 bp, Zea mays
  unsure (1)..(499): unsure at all n locations
gggggggaagctgtagtcncatgcaggacagtgatgtctcgctctaccggtccggaattcccgggtcgacccacgcgtccggagccgtacaagggtattgttgactgcttcaaacgtaccattaaggatgaaggggtggcttccttgtggaggggtgacactgctaatgttattcgttacttccctactcaggctttgaactttgcatttaaggactacttcaagaggttgttcaacttcaagaaggatagggatggctattggaagtggtttgctggcaacctggcctctggtggtgctgctggtgcttcctctttagtttttgtgtactccctggactacgcgaggaccaaggtggctaaatacgcgaaagcttgccaagggatgaagttaaaagcaattcaatgggccttgccaatgtctaccggaagacacttcaaatctgaatgtaatggttggccttaaccgtgaattaaccatctccggggttggaatcatt

SEQ ID NO: 92045 - DNA, 495 bp, Zea mays
  unsure (1)..(495): unsure at all n locations
gagaagaagtgtcttccatgatagcactgatgtacgctctaccggtccggaattcccgggtcgacccacgcgtccgcagacaagtggtttccaaagccaagtgtgtgtactagcaaccagctagctcgggcggcagcaggcagccatcatgtcggaggagaagcaccaccacttcttcaaccaccacaagaaggacgaggagcagcccgccggcgagtacgggtactccgagaccgaggtggtcaccgccaccggcgagggcgagtacgagaggtacaagaaggaggagaaggagcacaagcacaagcagcacctcggcgaggccggcgccatcgccgccggcgccttcgcactctacgagaagcacgaggcgaagaaggaccccgagcacgcgcacaggcacaagatcacggatgaggtcgctgccgcggcggccgttcggcgccggcggctacgtattccacgagcaccacgagaagaagaatgaccacaagn

SEQ ID NO: 92046 - DNA, 510 bp, Zea mays
  unsure (1)..(510): unsure at all n locations
tggatggagggtttgtgcctagctacagacttagnatcactacctttccatctcgatgtgggatgcagccaacgtacgctcccacccgttgatggccttgattgtcaccaccttcgatcccttccagaagtctcaagtacaccgccaaccgtgcccatagcccaccactcctccagaatcctcggcaacatcatcaacggcagaacgatcccgctcatacatgtatagccggcctaccgcaacaagaagttcgagacactttcatacctgccaccgctttccaccgacgacctgctgaatcatagtcactacctgctgctcaacgactggatacaccttactctaactaaaacaggtcggattcgtgtaccgtgaaaactccacctacccttgctactacaaccgccagtactggaccatgtctgaatctgcccatatatccgctagcaaccactccacccaatgtactcaaaggaactgcatgatgcccctcaatcctaccacaacacc

SEQ ID NO: 92047 - DNA, 500 bp, Zea mays
  unsure (1)..(500): unsure at all n locations
nagaaggagtcttgaataagaaaaaagatagactgtaccgccccggaattcccgggtcgacccacgcgtccggtcggccatggggaggtacccagagaaggctctcaacgtccttaggagtgttagcctggggatcgaaaggtggtggagagaggagaagcgccaagaggcactggagcttcaaggtgtctcgtcttccttttctgacaagatatcagaggaaatatgcaattcagcagctaaaatggccaacaacttaggagtcgacgccgttttcgtttacacgaaggacggatacatggcctccctgctctcacgatgccgccccgactgcccgatcttcgccttcacgtcttcgacgtctgtcaggagacggctgaacctccagtggggcctcatcccgttccggctcagcgagtccgacgacatggagagcaacctcaaccgcaccttcttcctgctgaaggccaggggcatggtgcagtctggagacctggtga

SEQ ID NO: 92048 - DNA, 496 bp, Zea mays
agaagagggttgggcagccttacgtatcctctaccggcccggaattcccgggccggtgtggccgggcatccaggccaactccgggcacgacgtcctggagggcggcggcttcttcctcccgccgagctcccagaagtccttcccggcgccggcccacccctggtccggccgcatctgggcgcgcacgggctgcgcgggcgccggcgcgcatctccactgcgccacgggcgactgcggcgggcggctccagtgcggcgggctcggcggcgcggcgcccgcgacgctggcgcaggtgaacctccaccacggcaacgaccagacctcgtacggcgtgagcgtggtggacggcttcaacgtgggcctgtccgtgaccccgcacgatggccgcggcaactgccccgtcctcgcctgccgcaagaacctcaccgagacctgccccggcgagcttcaactgcgcttcccggccggcaacgtcctcgcgtgcaagatcggctgc

SEQ ID NO: 92049 - DNA, 494 bp, Zea mays
  unsure (1)..(494): unsure at all n locations
ggaggagtgtgtcttacccacgcactgattgnatgctctaccgtgntcggaattcccggcgggacgcacgcattcgtcgcgtgcgaaccaagcagaccacaacatgaagaagcgtagtcgtcgccggaaggaggggcgcggagcaagatgtcgtggcaggcgtacgtcgacgagcacctgatgtgcgagatcgaaggacagcatctcagcgccgccgccatcgtcggtcacgacggcagcgtttgggcgcagtccgagagcttccccgagttaaagcctgaggaggttgctggtatcataaaggactttgatgaacctggtactcttgcaccaactggtcttttcgttggaggtacaaagtacatggtgatccaaggtgaacctggagttgtcatccgaggaaagaagggcacttggggcattactatcaagaaaaaccgcatgtncctgattattggggtctacgacgaaccaatgactccagggcatgccac

SEQ ID NO: 92050 - DNA, 489 bp, Zea mays
  unsure (1)..(489): unsure at all n locations
agtggagtgttgtcgcctacgaccatcgnatgctctccggtccggattcccggtcgacgcacgcgtccggacgacggcaccgtcaccgagaactactgggagcccgcgagcgacgacgccaccgaggaacccccgcggaggccctaccgcatcgaggtggtcggggtcgtctgcgacgcctacctcgccgtggcgaggggcatccggagggccatcatcacccggcgggccgtcagggtcaggtcccagctgcagtcgcacaagcgcttcgccgccgcgttccagcggtacagccgcctcgtggacggcgccaggctctacagcaccaactccatgggctctgccaagctcatcgcgtggaaggacgggatcggaaacagcctgctggtggagccccgggagttcgactgcctggagaaggtgagcgggctcaacgagcacgccacctccggtcacgacctctaccccgacgggaccaccacttcgggt

SEQ ID NO: 92051 - DNA, 488 bp, Zea mays
gaggatgtgtgtcctacgcagaggggtagtatgctctaccggtccggaattcccgggtcgacccacgcgtccggcttggtgatgcccagcatgttgaggaggccgagaagatgggacttgactacatggatgttgaggctctcaagaaaatgaacaagaacaagaagcttgttaagaggcttgccaagaagtaccatgctttcttggcatcagaggccatcatcaagcagattccccgtctccttggtcctggtctcaacaaggcaggcaagttcccgaccctggttactcaccaggaatccctcgaatccaaagtgaacgagactaaagcaacccgtcaattccaacttaagaaaggcctttgcattggcctcggcctccggaacttggccaatgaagaaaaaccaaatccacagaacattcaaaattaacgttgactttctttgtttccttttgaagaaaaactggcagaatgtgagatgcccttt

SEQ ID NO: 92052 - DNA, 492 bp, Zea mays
  unsure (1)..(492): unsure at all n locations
gttggaaggttgtccgattcctacccccgatgcactncgtacctgttcggaattccgggtggacgcacgcgtccgcccattcctcgcgcggcgaccacccgattcgaagcgtgcggagagaccgaacaagcgggagagatggctcgtaccaagcagactgctcgcaagtccacgggagggaaggctcccaggaagcaacttgccaccaaggctgcccgtaagtctgcccccaccactggtggagtgaagaatcttcaccgttaccgtcttgcaactgttgccctccgtgagatccgcaagtatcagaagagcactgagctgctgatcaagaagctgccctttcataagctcgtcagggaaattgcacaggacttcaaaactgatttgcgttttcagagccatccagagcttcccttccagaaagctgcttgaggcattaccttgtggccctgtttacgacaccaaacctggcgccattcatgctaaatcttn

SEQ ID NO: 92053 - DNA, 508 bp, Zea mays
  unsure (1)..(508): unsure at all n locations
gagagaggagaggtttgagtaatgaaatcgtgggtagactgcaaccgctccggaattcccgggtcgacccacgcgtccggagctcgcacgcttggggcccggcggccgtgccgctggaggcacctggcgcggcggtgctggacgcgaacgacttccgcaagtaccgcggcgtgcggcagcggccctggggcaagttcgcggcggagatccgcgaccccaagaagcgggggtcccgcgtgtggctcggcacctacgacaccgccatcgaggccgcgcgcgcctacgaccgcgccgcgttccgcatgcgcggcgccaaggccatcctgaacttccccaacgaggtgggcacccgcggcgcggacttcctcgcgccgccgccgccgccgccgcatgccgcggcaacgtcccagaacaaacggaagctgatgcacgacgccgaggccacggncacggccggggccggagccggagccgagccagccaagtccgtcaagggccaagcgttcgg

SEQ ID NO: 92054 - DNA, 504 bp, Zea mays
  unsure (1)..(504): unsure at all n locations
agtaggagatgtcgtcttcccctaccgcctcatcggtatgcatctacaggtctcggaattcccgggtcgacgcacgcgtccgcgacccatcataacaaatcaaaccatcacccgatttgtttacccccgaaaatttgccggcggctcgtctcgctcccctgtttgcgccgcccccagatccggcaccgcccgctgctcgaacccgcaccccacgcccgcaggccgggaccggtgggcgcgcgccgggcagtaggagggagaggaagggcggcatggcggcgccgccggcgagggcccgggccgactacgactaccttatcaagcttcttctcattggggatagcggtgttggcaagagttgcctcctgttgcggttctctgatggttccttcactacaagctttattaccacaattggtattgactntaagatacggacaatagaattggatggtaagcgtataaagctacagatttgggataccaacggccaaagaacgcttg

SEQ ID NO: 92055 - DNA, 504 bp, Zea mays
  unsure (1)..(504): unsure at all n locations
ngtaggagaggtttcgttggcctaccgcaacatagnagggtcactacaggtctcggaattcccgggtcgacgcacgcgtccgcacggaggaggcgatgcggaacgccatcgagggcatgaacggcaaggagctggacgggcgcgacatcaccgtcaacgaggcccagtcccgcggcggccgtggaggcggcggcggcggcgggtacggtggtggccgtggaggcggcggctacggcggtggcgggcgccgtgatggcggcggcggctacggcggtggcggcggctacggtggtggcggcggcggctacagtggtggtggcggcggctacggcggtggcaaccgtggcggcggctacggcaactccgacgggaactggaggaactgagcggtggggcccgcgcggtcaagttatcctgttcgctaccgtgttgtttaccctagtccagagtgtttatctttcgtcgtctcgtgttttgtgttgcccatctgtgtttttgattgag

SEQ ID NO: 92056 - DNA, 499 bp, Zea mays
  unsure (1)..(499): unsure at all n locations
aggaggaggtttggctatgatacagaatacatgctaccgccccggaattcccgggtcgacccacgcgtccgtgcagatgcacttcgtgaggtttctgcatcccgagaagaggtgccaggtaggcgtgggggtcctggatatatgtatactgatttggcaacaatatatgagcgtgctgggcgtattgaaggaagaacaggctccattacccagattcctattctaacaatgcctaacgatgatatcacacacccaactcctgaccttactggatacattactgagggacagatatacattgataggcagctccataacagacagatttatccacctattaatgtcctgccatctctttcacgattgatgaagagtgctattggtgagggcatgacacgtcgagaccattcggatgtatctaatcagctntatgccaactatgctattggaaaggatgttcaagccatgnaagctagtcgtggagaggangcactctcgt

SEQ ID NO: 92057 - DNA, 504 bp, Zea mays
cgaatggaagaggttctgtcactcagctcagtgcattagcgcaccgcccggaattcccgggtcgacccacgcgtccgccttttagaccgcaacctcaaaaccctagcttgtccctcctgctcccagatctcttcgactcagggactccctagcacatcaaaccctagctccgcccagccccccaaccatgtcggcgatgatgcaaccgcagatcatcctgctcaaggagggcacggacacgtcgcaggggcgcgctcaggtggtgagcaacatcaacgcgtgcacggcggtgggcgacaccgtgcggaccacgctggggcctcgggggatggacaagctcatccacgacgacaagggcggagtcaccatctccaacgacggcgccaccatcatgcgcctcctcgacatcgtgcaccccgccgccaagatccttgtcgacatcgccaagtcgcaggactccgaggtcggcgatgggacaactactgtggtgcttctagctgcaga

SEQ ID NO: 92058 - DNA, 508 bp, Zea mays
  unsure (1)..(508): unsure at all n locations
nagagagggagttgtctgagtatagcaaacgcggtaaggtggtaccgccccggaattcccgggtcgacgcacgcgtccgcgggatgctggtgcagaagaggggcggcggtggcggcggcgacgacgagccgtcgccgagcgtgaagcccgtgcccaccatccgggtcaaggccaagcacgccggcgtcacgcacgagatctacatcagttccgaggcctccttcggtcagtccagccgtctgctctctctctctcgctcgctcgcgctgacggatgctgctgcgcaggggagctgaagaagctggtggccgccaagacggggctgcaccccgacgaccagaaggtgctgtacaaggacagggagcgtgactccaaggcgttcctggacacggccggcgtcagggaccgctccaaggtggtggtgctggaggatcccgaggcccgcgcgcgccgactcatcggngagcgccgcatcggncaccttcagaatgccgncagggccgtcgcc

SEQ ID NO: 92059 - DNA, 489 bp, Zea mays
tgagaggaagttttataccctacgaacacgtaagctactactggtctcggaattcccgggtcgacgcacgcgtccggtaaaggattacacagacttcgctaaggtgtgctttgagaacttcggtgacaaggtggagaattggttgacctttaacgagccacagacatttacaaccttttcgtacggaacgggagtttttgcccctggacggtgctcaccaggagaaaaatgtgctcagcctattgctaactcactcaccgaaccatacattgctggccacaacatccttcgagcccacgctatgactggtgacctttaccacaagaattacaagggtacaaaacgccccattgggcttgcgtttgacctaatgggtcccgtgccataaggaaatacatttcttgattaacaagcccaagaaaaggcccttgatcaaaaccttagattggtctttgagactttggtcctggtgactaacccttttttatt

SEQ ID NO: 92060 - DNA, 504 bp, Zea mays
  unsure (1)..(504): unsure at all n locations
agttgggaggttcttcgttccctacccgccaaagggatggtatgcctcggtctcggtattcccgggtcgacgcacgcgtccgggccgctctcacttccgctctcctcttcgccgccctcctcgtggccgcccagtacgtgctgcgcttgctccactccttgctgtgggtcccgttccgcctggaacgccgcttccggcggcagggaatccggtggccaccacgaagcctggtctccggtaacgcagccgactaccgcgacctgctagccgccgccaggtccgcgcccctctcctccttccgccacaacggcgtcgtcgcccgcgccacgccgcagtacgcggtctggctggcgcggtacggccggccgttcgtgtactggttcgggccccggccgcggctggtgatctccgacacggagctcgtgaaggccgtgatgaccgacttcacggggggctttgataaagcgggcctcggcggcaacaacccggttgncagggcactca

SEQ ID NO: 92061 - DNA, 491 bp, Zea mays
  unsure (1)..(491): unsure at all n locations
ggagagggttcgtcaactgcccactnctgttgtacgctctactcggtctcggaattcccgggtggacgccacgcgtccgagacgctgtcgtacctgccgccgctgtttacggacgacctgctgaagcaggtggactggctgctgcgcaacggctggataccctgcctcgagttcagcaaggtcggcttcgtgtaccgcgagaactgcacctacccgtgctactacgacggccgctactggaccatgtggaagctgcccatgttctgctgcaacgacgccacccacgtgtacaaggaactgcaggaggccatcaaatcctaaccggacgcctttcaaccggtcaatcgctttgaccacattaaacaaaccccatgcgtcagcttcaatggctaacaacccccgggccacgaataaaaccctcccggcgggcggtccccggccaactaataactagctgcctggctgagctaatagctacctagtgccatgcg

SEQ ID NO: 92062 - DNA, 508 bp, Zea mays
  unsure (1)..(508): unsure at all n locations
agtaagaggagtgnttttgnnngcttgacgcccagcctcactcagtaccgccccggaattcccgggcctagccacactggtgttatggtagggatgggacagaaggatgcgtatgttggcgacgaggcacagtccaagagaggtatggtcacgctcaagtatccgatcgagcatggtattgtgagcaactgggatgacatggagaaaatctggcatcacactttctacaacgagcttcgtgttgccccagatgagcaccctgtgttgctcactgaggctcctttgaacccaaaggccaacagggagaagatgacccagattatgttcgagactttcaatgttcctgccatgtacgttgcaattcaagcagtgctgtcactctatgccagtggacgtactactggtattgttctcgactctggtgatggtgtgagtcacactgtgcccatttatgaaagatatgcccttccccatgccattcttcgtctggatcttgctggtcgggacc

SEQ ID NO: 92063 - DNA, 619 bp, Zea mays
  unsure (1)..(619): unsure at all n locations
taaatggagagatgaagtagagcatgatgatgaagagatgtaagttgatgnnagaagagagtggtggattatttggttagaaataggagagagagagagggantnnntttatgtaactgtatgctatgctctaccggtccggaattcccgggcacacacacacagacaagtggtttccaaagccaagtgtgtgtactagcaaccagctagctcgggcggcagcaggcagccatcatgtcggaggagaagcaccaccacttcttcaaccaccacaagaaggacgaggagcagcccgccggcgagtacgggtactccgagaccgaggtggtcaccgtcaccggcgagggcgagtacgagaggtacaagaaggaggagaaggagcacaagcacaagcagcacctcggcgaggccggcgccatcgccgccggcgccttagcactctacgagaagcacgaggcgaagaaggaccccgagcacgcgcacaggcacaagatcacggaagaggtcgctgccgcggcggccgtcggcgccggcggctacgtattccacgagcaccacgagaagaagaaagaccacaaggacgccgaggaagccagcggtgagaagaaccccaccactt

SEQ ID NO: 92064 - DNA, 604 bp, Zea mays
  unsure (1)..(604): unsure at all n locations
ggatagagagagatgggagaagatggagaagtagggatnaagagtaatagnagaggtgaagagtattacgggaattatgnaagagtagaggcttggtctaagacggagatgtatgcacgacgtaccggtccggaattcccgggtcgacccacgcgtccgccagccgccgtcatgtcgaagcgaggtaggggaggttcggctgggaacaagttgggcgtgtcactgggtctaccggtggcggccacggtgaactgcgcggacaacacgggcgccaagaacctctacatcatctccgtcaagggcatcaagggccgcctcaaccgcctcccgtccgcctgtgtcggcgacatggtcatggccaccgtaaagaagggaaagcccgacctcaggaagaaagtgatgcccgccgtcatcgtccggcagcgcaagccgtggcgtcgcaaggacggtgtctacatgtacttcgaagataatgctggagtgattgtgaatcccaaaggtgagatgaaaggttctgcaatcactggacctatcggcaaggaatgtgctgacctttgggctaagatcggcaatgcaacaaatgcccatggttgagagcttggtg

SEQ ID NO: 92065 - DNA, 516 bp, Zea mays
  unsure (1)..(516): unsure at all n locations
naggggtgggcggcattctgtgattcgcactatcagatagtanctgcatcactccaccggttcggaattgccgggtcgacccacgcgtccgccgcattcgttccaactcctgagcactttgtcctagtcccagacaagccaagcgaaggggagatacgaccatggactccaccggcaccggagcagggggtaaggggaagaagggagcggccgggcgcaaggtcggcgggccaaggaagaagtcggtgtcgaggaccgtgaaggccggtctccagttccccgtcggccgcatcgggcgctacttgaacaagggccgctacgcgcagcgtgtcggcaccggcgcccacgtctacctcgacgatgacctcgaatacctcgccgctgaggttctggagctcgccgagtatgctgtcacggacaaactgaatactcgcattattccgtgccacgtgcttctggcgatcccgaaacgaacaggagcttgagaagctgtggggccgcttgaacattgattac

SEQ ID NO: 92066 - DNA, 611 bp, Zea mays
  unsure (1)..(611): unsure at all n locations
tgtaatggtagnatgtagtagagaaggaatgtagatgagagtagagtttatnntagnagtaatatnagtattaattgtgaggtgttataatagagggtgaaggcttcgtctatagagggaagaagtaatgctctaccgcgtccggattcccgggcagatgtatgggcatgacacgcctccgatgtatgtctgcatgtatgcagcattgatgccgattgccaatggccggtgtttgatgaggtcagcctcaagccttgcgcctcactggcaccacaagctcctctgtggcgcgcggagtcggatgccgcggggggtggtgccggcgccggcgatgtcatgggcctcctcctccgggagcgcatagtcttcctcggcaacgagatcgaggacttcctcgcggacgccgtcgtaagccagctccttctacttgacgccatcgacccggactctgacatccggctcttcgtcaactcaccaagggggatcccttaccgaacaatgggcaattatgatgtaatgcaacttgtgagggcagacctgttcactattggaaagggcataactggatcaaccgtttctataaccctggtgggggcacgaagggcaaccat

SEQ ID NO: 92067 - DNA, 596 bp, Zea mays
  unsure (1)..(596): unsure at all n locations
ttattggaaagagataaattgcaggagtatgagttataggagnggagaatgnagatatgnaaataattatggggatgagaaggtgagtagggaaagtgttntatagaagggaggagagtagtctgcccggtccggaattcccgggtcgacccacgcgtccggctgctagtgtgtcgtccctgatgaccaccacggaatccataattgtagagatccccgaggaagaggcaccggctccagcaatgggtggcatgggtggaatggattactaagtgtcaagcacacccacgatacaacaacatcaaagcagagatgacgaggtggttgtcaggaggatacaattttgaggctgcggacgtaggacctctcaatatctccaagcaatagtggggggataataaacatgagcagtagttgtttgagatctgatgctgtagatcaagattggattctgacaccttgtgctgaaccaactgtaatctgattattacacattttttggcaaaagtaaatcggattgcccttctgttttgcggcttttgcccaaaaaaaaaaaggagctgaagtctgtaactatggaacaactgtgtagcgta

SEQ ID NO: 92068 - DNA, 492 bp, Zea mays
  unsure (1)..(492): unsure at all n locations
naggagggagggttgataaagaacccgcatgatgtaagctcgtaccggtccggaattccggtgctgtctacgacaatatcgtgctcttataatatatatagagttctagaacatttcaaacacgacatggattattgtaactggccaagtacatctaaactcaagcgtaattagacacggtcatcctcatcctggtacatcttgaggatctgcgcgcatctaggaagggcaacgtccttctggaaccccagagcatttgccaaacgaacgtagcatgcaacaccgttgctgctggtaaggaagacgggggccctgtcacgaccagccacaacattggcacaccccttgtccgggctgctcacaaggacggactcgcatagctcatgctcatgctcatcaatgacaaggatgtcgtaggtgccgatgcggtcagtatgcccatcgaagctgcatgtattcgccctggggtctacgatttgcagtcaactctca

SEQ ID NO: 92069 - DNA, 509 bp, Zea mays
agagagagggcttgggcatcgagtatcagcactgagtcgcacttctgtaccggttcggaattgccgggtggacgccacgcggccgccatactctcccttgtggttctagatccactcctccccgtgctcactgctgagcctcggacaggttgagcggggacgccgtggaggggcgagggggagccagattgagccatggcctcctactgggttcttgccctggttcttgcgctgtcggcaggcgcaagcctggcgcgtggctcctagccgtggtggaacgagacgcaagtgtacgccaccaccgccaactgcggtggcggcaacagcgtcttcgtcagcctcacgctcatccagtcggcggcggccaatggagcggtgtgcttggatggaagcttaccaggttaccaccttcacagatggcttggatcaggagcaaacagttggctcgtgaatctcgaaggcggatgcttgtgcattgatcgcagcatcttgggggtttcgaagggcag

SEQ ID NO: 92070 - DNA, 611 bp, Zea mays
  unsure (1)..(611): unsure at all n locations
gttagatgatgaataattgaattnatggttgagagaagaagatgtatagatatgnatagattgntgttggatataagaggnagtagaatagagataaaggttaaagagtgtgtttatgtggggagggagataattgctctaccggtccggaattcccgggtcgacccacgcgtccgatttcaaaggcaatggcagcagattcgtaaatatgcacaaaagctgggtatcagcatcatgggtgacatgcctatatatgttggctaccatagcgcagatgtttgggcgaacaggaaatcatttttgctggacaaaaacggtttccccactttcgttagtggcgttccacctgatgcatttagtgaaacgggtcaactatggaacagtccattgtacgactggaaagctatggaagcagatggtttttcatggtggataaagaggattaaacgtgcccttgatttgtatgatgaattccgtattgaccattttcggggacttgcgggtttttgggcagtcccttctgatgcaaaagtagcactggttggaagctggaaggcttgaccaaggaatagcttttttgacacgctctttaaacttggtggtaaaaataa

SEQ ID NO: 92071 - DNA, 592 bp, Zea mays
tgagatgaggataaagaaggagaatgtgtgggagagaggtaatagtagtagggtatgaaataagggagggtagtactagaggagtgggagttcttctaagaaggagattaatgcacgctctaccggtccggaattcccgggcgtgcgctctccgtgggagcgaggactcgcggccggcggcagcggcaggttctcctagatctccggcatcatcagtaacaaatggctgacggtgaggacattcagccccttgtttgtgacaatggaactggcatggtcaaggctggttttgctggtgacgatgcgccaagggctgttttcccaagcattgtcggacgcccccgtcacactggtgtgatggttggcatggggcagaaggatgcgtatgttggtgacgaggcccagtccagaaggggtatcctgactttgaagtacccaatcgaccatggtatggtaagcaattggaatgacatggaaaaaatctggcgcaaaaccttcaataatgacactcctgtggggcctgaaaagcaccttgtcctgttaccggaggcccaattcaacccaaagcttaccaggaggaagaatacccaaa

SEQ ID NO: 92072 - DNA, 596 bp, Zea mays
  unsure (1)..(596): unsure at all n locations
gtntatgatgtagaaatgatggatttgtttgagtgtgtgatgttataataatgttagnagttatttacgagtttatgtaatagaggagtaaaaggtcttctaagagggcagaggatgttatgctctaccggtccggaattcccgggtcgacccacgcgtccgcccacgcgtccgctcagcgcgacgaaggtaagatgttcctgcggaggatcctgaccggcgggggcggcctggcggccctgagggcggcgcgcgccgtgaaggagacgacggggatcgtgggccttgaggtggtgcctaacgcgcgagaggttctggtagggctctacgagcgcacgctcaaagagatcaaggccgtccccgaagacgagggttaccgcaaggctcgtgaatcctttcaccgggcaccgtcttcagatctgccaggaggaggaggactggaagcgcatcgaggaccgaatcggatgcgggcaggtcgaggagctcatcgaggaggccgaggacgagctcaagctcatcgctaaaatgattgaatgggatccatggggtgttcccgatgactacgaatgtgaagtgattgaagacgacaccccaat

SEQ ID NO: 92073 - DNA, 500 bp, Zea mays
gtggagaagggttatctagagattcgcaagattgcactgctctaccggtccggaattcccgggtcgacccacgcgtccgcaagcacgccttccgttttgggaaggcgaggagaggggaaccccggcccagggagaggggcggcgaggggatcggcggctgaagagatggaggagcgggagaagctcgcgtgcctggccaagcttgccgagcaggcggagcggtacgactatatggtggaattcatgaagaatcttgctaggatggacgtggatatgagtgctgaagaaaggcatttgttctcagctggtttcaagaacactattggagcacagagagcatcatggagaatcatttgttcacatgaccaaaaggtcgcagctgatcggcagactggtgtgatgatagatgcctataagaagaaagtagaagaggaactatcgaacgtttgctatgaaggatcgctaggcattgctattcactgccttcccttggcaataag

SEQ ID NO: 92074 - DNA, 514 bp, Zea mays
  unsure (1)..(514): unsure at all n locations
naggggaggaagaggtttgtttattgtaatatcgccangaattgttattgctcgtaccggtccggaattcccggatcgacgcacgcgtccgcgcccaccgtgatgatggccttgtcggccaccgccgtcgatccgttccaggggctcaggtccaccgccaggctccccgttgcccggcgttcctccagaagcctaggcaacgtcagcaacggctgaaggatccggtacatgcatgtgtggacggcctacagcaacaagaaggtcaagacgctggcgtacctgccgacgctgtcgaccgacgacctgctgaagctggtggactacctactgcgcaacgggtggataccctgcctcgagttcaacaaggtcggcttcgtgtaccgcgagaactccaccttcccgtgctactacgacagccgctactggaccatgtggaatctgcccatgtcactctgcaacgaccccacccaggtgtacaaggagctgcatgaggccattaaatcctacccggacg

SEQ ID NO: 92075 - DNA, 508 bp, Zea mays
  unsure (1)..(508): unsure at all n locations
gagagaagggctctgaggacttagtatacgatcngattcgcattggctgtaccggtccggaattcccgggtcgacccacgcgtccggccaacagcaatctcccgcgccgaatcatcaaggagacgcagcggctcctgggcgaaggagcaccggggattagcgcgtcgccgtcggaggagaatatgcggtacttcaatgtcatgatccttggccccgcgcagtcaccctatgaaggtggagttttcaagcttgaactattcttgcctgaggaatatccaatggctgccccaaaagttagatttctgaccaaaatttaccatcctaatattgacaagcttggtaggatatgcctcgacattcttaaggacaaatggagcccagctcttcagatacgtacagttctactgagcattcatgcacttctgatcgccgcaaacgcagatgattctgtgtcaaacaacattgcgaaccactggaattcaacgaagcctaaactgttgggacagcn

SEQ ID NO: 92076 - DNA, 620 bp, Zea mays
  unsure (1)..(620): unsure at all n locations
gaaatatggatgaagaatataagggagagaggagtagatgtagaggatgatngatgnatgatgattnagtatntattagtggtgtgggtgctnattgatggagatatgatgtcttcatatgagggaggagagggaagtcatctaccggtccggaattcccgggtcgacccacgcgtccggaaggaggttgctgtgtttggctgcaggaaccctgaggagatcccgtggggttcggttggtgctgaatatgttgttgagtctactggtgttttcactgaccaggagaaggctgcagctcacttgaagggtggtgccaagaaggttgtcatctctgctcctagcaaggatgcccccatgtttgtcgttggtgtcaacgagaaggagtacaagtctgacattaacattgtgtccaatgctatctgcacaaccatatttcttgctcctcttgctaaggtcatcagtgacatgttcagttatcgtggggatcttgataacccctggccattgccatcattgttccccagaaaaattggtgatgggcccctcttttaaagactggaagggtagaaaggcttcttgtttcaacatttttcccaacaagtcgtggagcttatgatggt

SEQ ID NO: 92077 - DNA, 614 bp, Zea mays
  unsure (1)..(614): unsure at all n locations
gcatatgagtgggcaagaaggnagggaggagtaaagaagagttgtgtagaggcagagggagnagaagatatgaggagtaagtagaggagagagtggtagaagagatcttcntcacgaaggcgacaggagtgctctacnggtccggaattcccgggtcgacccacgcgtccgtaggctgcgatggctcggtgctcctggacgccgttccgggggtggccaactccactgagaagctggcgccggccaacaacaactcggcgcgggggttcccggtggtggacaaagtgaaggcggcgctggaggacgcctgccccggcgtcgtctcctgcgccgacatcctcgccctcgccgcagagatctcggtcgagctgtccggaggaccaaagtgggcagtgcttcatgggaggctagacagcaagaaagccgacttcaagagcgcggagaacctgccggcgccggtcgacaacctggcggtgctggggcaaaagttcagggggccggggccttcacaccgggggacctgtgggcccttttgggggcttacaacgtttgggcggggcccgtggcaagttcgtcaccgggccggttgtaccactttagccggcaccaacgga

SEQ ID NO: 92078 - DNA, 609 bp, Zea mays
  unsure (1)..(609): unsure at all n locations
taaagtntaggatattaataaattnattgattggtaggtaagtttatgtattatgaattnatgataatatgggagatgagaaatagaggtaggtaagtgtcgtcnctagaaggagatgtacagtcatcgncgtaccggtccggaattcccgggtcgacccacgcgtccggaactccatataccagctcgatatgataaagtttgcgaagaagatgtatccggaggtggatttgatcggtggtaatgtggtgacaattgcacaggcccagaatttgattcaagctggtgtggatggattgcgtgttggaatgggatcgggctcaatttgtaccacccaagaggtttgtgctgttggaagaggacaggcaacagcagtgtataaggtttcatcttatgccaaggatcacaatgtaccggttattggctgatggtgggaatttcaaaactctgggcattattgtgaaaagctttggtcgttgggggaatccctggtattgaagggccaagtttttaactggtaagcattaaacttctgggacctaagaattttaagaccggccgccaggttaaaaattccgaagcatgggctttcttgaagccattaaaaaa

SEQ ID NO: 92079 - DNA, 608 bp, Zea mays
  unsure (1)..(608): unsure at all n locations
tgtgtgggtagnatggatnagtgaagggagtgttgagtgtggaattgaatatanagntagtatagnnagaatatgggaggntagagattagagagtgtggggaggtcgtctaagagggaggaggatgttatgctctaccggtccggaattcccgggctcggcgcggtcgcgggagttctcgctgccggactacgtcacctacctgctgtcggagtacgcgcaggtgctggaccgcctctacgacctcggcgcgcggcgggtgctggtgcagggggtggggcccatcggctgcgtccccgcggagctggcgctgcacagcctcgacggcacctgcgacgccgagctgcagcgcgccgccgagatgtacaacccgcggctcatggcgctgctggaggagctcaacgcgcgccacggcggcggcgaccccgtgttcgtcggcgtcaacatgcagcgcatccacaacgacttcatcgacgaccccaaggcgtacggcttccagaccgccacctacgcgtgctgcggccagggccgcttcaacggcatggggctctgcaccatggtgtccagcctctgcgccgaccgcgacacctacgtgttctgggacgcct

SEQ ID NO: 92080 - DNA, 513 bp, Zea mays
  unsure (1)..(513): unsure at all n locations
gagagaggcagaggctctgaagacttacntccagcccagtacgcgattgccgtaccggtccggaattcccgggtcgacgccacgcgtccgcagcgccccacccccagccagctagtggtgttctctcagcagcgcgcccgagcgtgtggtccctgctaagctctgcgcctcggtaggcaaggaaaatcaaacagatcgtaaatggccggtagcagcgcggagcagctcctctccaggatcgccgccggcgatggccacggcgagaactcgtcctacttcgacgggtggaaggcctacgacacgaaccctttcgacctgcgccacaaccgcgacagcgtcatccagatgggactcgccgagaaccaactgtcgctggacctgatcgagcaatggagcgtggaccacccggaggcgtccatctgcacggcgcatggcgcgccgcagttccggaggatagccaacttccaggactaccacggcctgcctgagttcatagaggcgatggccaaattc

SEQ ID NO: 92081 - DNA, 512 bp, Zea mays
  unsure (1)..(512): unsure at all n locations
gagaaggaaaggtttgatactgaaacttgggcanagatagttattgctcgtaccggtccggaattgccggatcgacccacgcgtccgagaaaagcagttcttcagctaggcaggatggcacatgaaggaggagatcgggggataggaggattcataaggagctcaaggatctgcaaaaggaccctcccacctagtgcagtgcaggtcctgttggtgaagacatgttccactggctagcaacaataatgggtccatctgatagcccatattctggtggagctttcctagttacaatccattttcctcctgattatcctttcaaaccaccaaaggtggcatttcgcactaacgtgttccatccaaacatcaacagcaacgggagcatttgcctcgacatcttgaaggaccagtggagtccggcactaaccatctccaaagtgctgctgtccatctgttccctgctgactgatccgaaccccgacgaccctttggtccccgagatagctcacatt

SEQ ID NO: 92082 - DNA, 502 bp, Zea mays
tggaggagggtcgatcatgaataagatcactcagcactgccgtaccggtccggaattcccgggtcgacccacgcgtccgactacgtgatcggctcggctgccgacccgatgacacacgggtacctaaacgcgctaagcgccaaggccggcgtcctcagcggtcgcgctcgagtaccgcctcgcgccggagcacccgctcccggacgcctacaaggactcatgggagggactcaagtgggtggacacccacgcctccgccgccacgggaggaggaccggccgccgagccgtggctaacccagcacggcgacttatcccgcgtgttcctggccggggccagcgctggggccaccatcgcgcacttcgtagccgtacgtgccggcgagcacaagagcggaggcctcgggatgcggatcaagggcctcctgatagtgcacccctacttcagcggctgcggagacatcggatacgaggggacgactgggaatgcgcgcaaggcgcaa

SEQ ID NO: 92083 - DNA, 606 bp, Zea mays
  unsure (1)..(606): unsure at all n locations
tgttaagatggataaatgcaggcagtcagttgggaggaagagannagatagnnatataatnatnaacattaaggagnaattagtaattaagttaggtgaggtcttcttatggggagagggagatggcttctctcggtccggaattcccgggtgacggctccttgtcagatctctggtcttgtggggtcatcctctacgtgatgcttgttggctgccttcccttcgacgacaggaacctcgtcgttctttatcagaagattttcaagggagactgccagatccccaagtggctttcgcctgccgcgcaggaccttctcaagaggatcctccaaccgaatccgatgaagaggatcaacgtcgcggggatcagggagcacgagtggttcaagaaggactacgtgcctgctgttccgcacgatgatgacgaagacgtccttcctagtccagctccctcgataaaggagccaatcgatgagccggcgcaggacaagtgtactcctatcaacgcttttcagttgatcgggatggcctcttcccttgatctttctggtttcttcgaagaaaaggattcagcgcaaagaaaggattcggtcactttgacccacc

SEQ ID NO: 92084 - DNA, 582 bp, Zea mays
  unsure (1)..(582): unsure at all n locations
ggttgagttgaatgaggaaatgagaaagattganattatatgatatgatctttaggggatgaagtgaagaaggggggatcttttcagaggcaggagtacagttatgctcgtaccgggcactcccggcggagaagaaacttacgaggattcccctagtaacgaggctgaactgatgcggggaaacccgttgattaatatcagaatgctggctccttcagtgttaagagaaggtgggacgacgacgtggtattcaagaatcaagcacgaggagagaccaagacaccgaaacggttcatcaccgacaccatcaggagtgatttcaacggtaaatttcttcaaaggtccatgaagtgacccttccgtcgttcacaattcagcctgaagcccctaatcgttataaggttggcgtataaccgaagaatcattattgggttgcggaatgaaacaagagggtaaccctatgcaaactacttaccaaagttttgcttaacaatgcatatcctacttaaaattgacaatgctatggcttttaccaagaagatgaagcctgggaccaaaaggaggctgttactttgaagcgcc

SEQ ID NO: 92085 - DNA, 598 bp, Zea mays
  unsure (1)..(598): unsure at all n locations
ganagtgatatattagagcaggagagatgatgaaattgtagagaatantgnagaagagnatgagttataggggggatgagttagtgagtaggataagtgtcgtcttaagagggaggaggacggcatgctctaccggtccgtgattcccgggtcgacccacgcgtccggagagggcgagagtcctcccatccacaagttcttagcttttgcgagattgagatccggctggggacagaccgacagaggaaggtgaattgtgggaaagaggacagaaaaatggggattggagatggatcttcaaatgggaaccagcaaccggtgcataaggaaatacgagatgagaccacaccacttcttccagtcaaggtggaggaggacgaggggtttcatgagttcaatggagcttcattctctggggcagttttcaatctgtcgaccaccatagttggggctggaattatggctcttccagcaggtatcaggatgctgggcatcatcccggggattctgttgatcatccttgtggcactgctcacagaggcatccatcgacatgcttgtaaggtgcagccacccaggcaggattacttcttttggtt

SEQ ID NO: 92086 - DNA, 581 bp, Zea mays
  unsure (1)..(581): unsure at all n locations
ggaagatagagttgaagattagggggtagatgatganagtagtatatatattttattggtttgtgtgaagaggaggggctgtctagagggggagagaggctagctctaccggtccggaattcccgggtcgacccacgcgtccgttcactgtctgggatgtcgggggtcaggacaagatcagacctctttggaggcagtacgtccagaacacccagggtcttatttttgttgtggacagcaatgaccgtgaccgtgttgttgaagccagagatgagctccacaggatgctgaacgaggatgagctacgtgatgctgtgctgcttgtttttgccaacaagcaagatcttcccaatgccatgaatgctgctgagattactgacaagcttggattacactccctgcgccagcgacactggtacatccagagcacttgtgccacaactggcgagggtctgtatgagggcctggactggctggccagcaacattgcgagcaaggcttgaggcctaccttgaaatttaactgcgaactgactaagagctccggatgtatcatggaaacttaagacagaatcgcaattg

SEQ ID NO: 92087 - DNA, 504 bp, Zea mays
  unsure (1)..(504): unsure at all n locations
agagaggagggtttgtcctacgttatagactanatcggcactgccgtaccggtccggaattcccgggcaactgactagtactcagccgccgcaatcagggacaggtagctcgagcgcgcgctccacctgctcgcagcgcgaggcatgccaagtggaagaagaagaggatgcggaggctcaagaggaagcgccggaaaatgaggcagagatctaagtaggcgcatcttgtgacgaggatggcgagcttctcctgcatcatggctgaggctcgttgggatgatggtctccctttgcagacgtcctttgctgtagacgtaggcgatgtaaaccgtgctttttgattcattctagcatgttctgagactgggtttatattggaattcgaggataattatatgatgctctaagttaaatcaaaaaaaaaaaaaaagggcggccgctctaaaggtccaaggctacgtacgcgtgcatgcgaacgtattacttctataatatggcacctaa

SEQ ID NO: 92088 - DNA, 509 bp, Zea mays
  unsure (1)..(509): unsure at all n locations
nagggtggaggatttgactatgaaataccgactgagtatctatgctctaccggtccggaattcccggatcgacccacgcgtccggcacagtactaccagctgatcctccttgtctatgaaggttacaagaacatcgtggaaagctgacaatataacgcgaccgctctgaatcaaggtctggacaagacggacaagttcaacatcgagtccaaagacaacggcgtgccgctgctgggcttgtctctgaaggacagaagccggcacagcgagttcgagatcttagacttgctgcgccgattcggatggatcgtgccaggctacacgaagccccccgacgcgcatcacgtgaccgtgctccgactattcatccgcgaggacttcagccgcacactcacggagcgcctggtgctagacatcgagaaggtgctgcacgagctagacgcgctgcacgcccgcgtacgcagccgcgacctcgccgagcttgtcgcggcttagtccaagcttaaggg

SEQ ID NO: 92089 - DNA, 501 bp, Zea mays
  unsure (1)..(501): unsure at all n locations
agaagggagggtttggcactgaataccganatgntgccactgccgtaccggtccggaattcccgggtcgacccacgcgtccggcccgctcacacaagacaccatctccctgcctgcgatccgatgcgtccaaggttttgggccgccgtacggtcctaccaccgctgtgcctaataattggcggctagctagctagctagctgcagctgctgcgatcctggatcggcacagccggttcttgatgtggagggagcggcggcggacgctgctcctgctggtggccggcgcggcgctgggactgatcggtgccacgctcgcgagcgcgccaccggaggccgagctgaaggtcgggttctaccatgcgacgtgccccatcgcggtagacgtggtcctcgcccagatgaggctcatcctcatggaggacgccacggtcgagccgtccctgctccggatgcactaccacgactgcttcgtgcagggctgcgaacggtcgatcttgctc

SEQ ID NO: 92090 - DNA, 618 bp, Zea mays
  unsure (1)..(618): unsure at all n locations
gttaaagaagattagtaatgaagtnatagattatgggaatattatgtagagntgaggtatgaagattnagtattatatatatgttgtgaatgtgnagtaataggatgataagtattcttcttaagagagggaggagataatgtctctaccggtccggaattcccgggtcgacccacgcgtccgcggacgcgtgggcttgtggtttcccaagatgtcttctccaagcaagcgccgggagatggacctcatgaagctgatgatgagcgactacaaggtggatatggtgaacgatgggatgcaggagttctttgttgaatttcgtgggcctaacgaaagcatttatcaaggaggtatatggagggttagagtagaactgccagatgcgtatccttacaaatccccatcgattggtttcatcaataagatatatcacccaaatgtcgatgaaatgtctggttcagtctgtttggatgtcatcaaccagacatggaccccaatgttggatcttggcaatgggttcaagtctttctttccaaactttttgttattatcctaatccttttgatccataaaaggagaatgccgctgccgtgattaatccttaaccgccttgttatt

SEQ ID NO: 92091 - DNA, 608 bp, Zea mays
attagggtaatgaggggaagagaagggatgaagagataagaagagaggagatatagtgaagaggataactaatgagggaagaggtggaagaggtggaagcttgtcttcagtgggaggaggtattgctctaccggtccggaattcccgggtcgacccacgcgtccgggagaaggagcacaagcacaagcagcacctcggcgaggccggcgccatcgccgccggggccttcgcactctacgagaagcacgaggcgaagaaggaccccgagcacgcgcacaggcacaagatcacggaggaggtcgctgccgcggcggccgtcggcgccggcggctacgtattccacgagcaccacgagaagaagaaggaccacaaggacgccgaggaggccagcggcgagaagaagcaccaccacctcttcggctgaccgtagtaccggccggcgcgcgaccgagctagctagctccggcgcacacaaccacacacctggttaattctgtactgcatgcgtgtgtaatttggagggtcacaataatgaatccctttccggaccttggtaactgcttgcttggggtgaatgaaagtgtgaaactgacggagaagagtggtgg

SEQ ID NO: 92092 - DNA, 628 bp, Zea mays
  unsure (1)..(628): unsure at all n locations
tgatattcgtaagatgagagnagagaatgggtggagtgattagatagtatggatatntatgnntgatgtagaattagtatagagtgtggnagatgngtttgagatgttggaagtgttcgtctttagagagaggagagtaggttacgctcggaccggtccggaattcccgggtcgacccacgcgtccgctgataaggaagttctgggtgaaggggacactgcaaagcttgagattcagattgagttggacaaagagaagaaaatcctctccattcgggataggggtattggtatgaccaaggaagatcttattaagaaccttggaacgattgctaaatctggcacttcaggaacaggagctgctcgagtctcttgtcgaagctgatacgagaaggcaggaaagagctaaaaagatggaagaaaagaaagtgtatctgcaactatacgaagcaatggaggcgttggtcaagatcaatctggagacgaacaagatcatggacttcatcaagtttgacgtcggcaacgtggtcatggtgactggcgggaggaacaccgggcgtgtaggagtcatcaagaacagggagaagcacaagggcagctttgagaccattcaagtgctgctgggagct

SEQ ID NO: 92093 - DNA, 505 bp, Zea mays
  unsure (1)..(505): unsure at all n locations
tggaggtagggtttnagcatgatgctacgtatactccgcatgccgtaccggtccggaattcccgggtcgacgccacgcgtccgaacaaaggttagattaagtgatatggagaaaaacctggaaaacctcacatgtaagtgggctgacagtgagaaatcaaatagcttgagtgagacacagttgaagtgtatggctgaatcctacaagtcacttgaatcaaggaaacttgaattagaaaatgagatagaagtgctaaggtccaaaatagatgctttaacagctgaactctctgatgaaaggcaaagtcatcaggacgacttagttaaatacagagatctcgaggagaagatggaaaggtatgagatggagaggagttcaatgcttgtggatggggacccagacaccaagtcaaagcaggataaagagataggggctgcagcagagaaactggcagagtgccaggagaccatattgattcttggccgtcagctgcaagctatgcgtc

SEQ ID NO: 92094 - DNA, 508 bp, Zea mays
gaaggatgggttgtgcatgattcccgcacatgactgcactgctcgtaccggtctcggaattcccgggtcgacccacgcgtccgagcagaactctctcgacctcatcggcgttggcggagcgcgtgttgaccggagatggcgccgagcgggtggaggaggagcgcggcggcgcgggtcgcctggcgcccggccacggtttgcctgtggctcgcgctcgccgccgccgcactgacgctcgcccaggctaagaaggacctgacggaggttacccacaaggtctacttcgacatcgagatcgacggcaagcccgcatgccggattgtcatggggctttttgggaagactgttcctaagacggcagagaacttccgagctctttgcacaggagagaaaggggttggcaagagtggcaaagccctccactacaaggggaggaagttccacagaatcatccccagcttcatgctccaaggaggtgacttcactctcggggacgggaggggtggtg

SEQ ID NO: 92095 - DNA, 517 bp, Zea mays
  unsure (1)..(517): unsure at all n locations
tggaaatggagctgactctgaatgggcccgnctccagctnanatacagtacttccctcaccattctcggaattagcgacactacccacgcgttcgggatcatcactcaaagaagttattaacgaacacaacccttaaatcatcagagatattgttaccctaaaaatcttaatctagcattgctttgagatctaatggtataacatgtagatatactaggacacccttgaatactaacatatatatgcacccatattacaacacactaacatgctctctgcatacttaccttaacccaaagacatacatacagatatattagtcaaattatattcacaactttccatgttcctaccatgtacgttgcaattcaagcatgtctttcactctatgccattggacttactactattattgttctcgactctggtgatagtgtgagtcacactgtacccatttattaaagatattccctttcccatgccattcttcgtcttgaacttgctaatccggaacct

SEQ ID NO: 92096 - DNA, 495 bp, Zea mays
  unsure (1)..(495): unsure at all n locations
nggaatgtatctgataaagtagaggaaaagtagtctctaccgcntcggaantnccgncgggggggacgcggccgccgcgccncggncnnctcgctcgggcgtgtgcaggcagccatcatgctcggatggagaagcggccaccgggttcttgaaccaccacagcagggacgaggagcagcccgtcggcgagtacgggtactccgagaccgaggtggtcaccgccaccggcgagggcgagtacgagaggtacaagaaggaggagaaggagcacaagcacaagcagcacctcggcgaggccggcgccatcgccgccggcgccttcgcactctacgagaagtgaggtgcgcaccagatccggcatgttcctagagacgaagcatgatgaagtagtaacgatgatagaggagaggatatctgctnggacatttcttccaccagagaatggtgaagcattcagatattacactaccaggatggtgagaaatagggaccccc

SEQ ID NO: 92097 - DNA, 505 bp, Zea mays
agggatgttcttcgttactagaacatagtatgcacgctcgtaccggtccggaattcccggggcgagccacgcgtccgggaagcggcagttctcgtgattgggctgctaaggtccgatgctcctgggagttgaaggtgtaattgccaagagctttgagcgtatccacagaagcaacttggtggggatgggaatcattcctctgtgcttcaaagctggtgaggatgctgattcgcttggcctcactggacatgagcggtacagcatcgatctccctaccaacctcagtgagatccgtcccggccaggatgtgactgttactaccgacaatgggaaatctttaacttgcatcgttcgctttgacactgaggtggaccttgcgtacttaaaccatggaggcatcctcccttatgcaatccgcaactgggcagtctgccataactgaggcaaggtcaaacaaccgtttgacccaaattggcaatggacggtctaagtgttcaaaggttta

SEQ ID NO: 92098 - DNA, 518 bp, Zea mays
  unsure (1)..(518): unsure at all n locations
agagggggaagtgggttnaccacagcatcagctaggatgccccgctcggaattcccgggtcgacgcacgcgtccgatttctcctaaatttcagatcaaatcctcctcctcctcctcctccccctccccctctcggaggattctgcccagcagcgcggcgatccgcctcgatccggaatggagcgcgtcttctccatggaggagatccccaacccctactgggccccgccgcaccctcaaccggcggccggcggcgctgttgctgcaccaggtggagtaggaggagcgggggacgcggcgggcgcgatgaaccggtgcccatctgagtggtacttcgagaagttccttgaggaggccgtgctcgacagtccgggtcccgtcgccggcgtgggtagaagcagcggacaagctggagttgacgcggcggatagcaagccgctgggcgccgcggcgccggcgtccgtctcgagctcggtcgttgaccccgtcgagtacaacgcgatgctcaagcagaagctg

SEQ ID NO: 92099 - DNA, 527 bp, Zea mays
  unsure (1)..(527): unsure at all n locations
ngagttggtgggtaggggnnntaatggtttattttgagggtgagagtatgtttgtaccggttcggaattcccgggtcgacccacgcgtccgccatcatccgcgacgggctcaaggctgaccccaagaagtaccgcaagatgaaggagaggcttgtcggcgtctctgaggagaccaccacgggtgtcaagaggctctaccagatgcaggagaccggcgccctcctcttccctgccattaacgtcaacgattccgtcaccaagagcaagtttgacaacctgtatggttgccgccactcgctccctgatggtctgatgagggccactgacgttatgatcgccggtaaggttgctgtggtctgcggatacggtgatgtcggcaagggttgtgctgctgccctcaagcaagctggtgcccgtgtcattgtgaccgagatcgaccccatctgtgccctccaggctctgatggaaggtctttaagtccttcccttggaggacgttgtctctgaagctgacatcttcgtgaccac

SEQ ID NO: 92100 - DNA, 532 bp, Zea mays
  unsure (1)..(532): unsure at all n locations
ggttgggggtgtnntagaaagtgttttnnaattgtgatggggggaaaggggatgagttgtccggaattcccgggtcgacccacgcgtccgctatagaccacagccagtcagccacatcactagctatctgtgcagaggcaatggcgtccaaggttgagctggtggtggaggtcaagtccccggctgacaagctgtgggcggcgctgcgtgactcgacggagctgttccccaagatcttccccgagcagtacaagagcatcgagaccgtcgagggcgacggcaagtcggccggcaccgtccgcctcctcaagtacaccgaggcggtgccgatgctgacgttcgccaaggagaagcttgagacggcggacgacgagaacaaggtggtgtcgtacagcgtggtggacggcgagctggcggacttctacaagaacttcaagatcacgcttaaagtgacttcggccaaagccggaggcgaaggcggcgccgtcgtcagctgggccatggagttcgacaaggccaacgaccaggtgcc

SEQ ID NO: 92101 - DNA, 503 bp, Zea mays
  unsure (1)..(503): unsure at all n locations
gtaagatgttgatgaagagaggaggagatgagatgtcccggtccggaattcccgggtgctggtagggacctcactgattccctcatgaagatcctgactgagaggggttactctttcacaaccactgcggagcgggaaattgtgcgtgacatcaaggaaaagcttgcatatgtcgcgctcgactacgaacaagaactcgagaccgccaagagcagctcatcagttgagaagagctatgaactgcctgatggacaagtgatcacaataggcgcagagcgcttcagatgcccggaggttctcttccagccatccttcattggtatggaagctccaggaatccacgagacgacctacaactccatcatgaagtgtgacgttgatatcaggaaggacctgtatggcaacattgtcctcagtgggtgatccaccatgttccctggcatcgncgaccgcatgagcaaagagatcactgcgctcgcgccaagcagcatgaagatcaaggt

SEQ ID NO: 92102 - DNA, 531 bp, Zea mays
  unsure (1)..(531): unsure at all n locations
agtatcacaagaagtgtatgagaaaactttcttcnttcccgactctctgctcgncatctatacnatcggtccaaaataccggaggcaagcaacncatgcatctccnaccttttacaattgcgtttatctaactaatacgtcacaatctcaagggacggatttctattgctacaagccttatcctacatccaactattccaaactcactgcatcaagttataaatagaagcctctcatcaatcattccaagaaatgtacataacgcagttctagaacgattgctttctctttctagggcacaagtctcagactatatcctgaatgataaaaatcccattgggtcgttgaaactaccaagattgagaagtattctcgattaaagcaaaagtcttcatctgcagttccctgcagaggatcttggcttccagtaataccctttacaaccaaaatgttcctcataaacaaccttttctttatttctttcaacttaatttgatggacattatcagacttcatttaatctgaccattt

SEQ ID NO: 92103 - DNA, 479 bp, Zea mays
  unsure (1)..(479): unsure at all n locations
aggaaaagtgtgtaccggtccggaattcccgggtcgacccacgcgtccggcgccggcctgttgcaattttcaataccgaacttagcgtggagaatttcaaggcagcgatgtctattcctacaacccttggccttgatccaactgttgcaaactcagtgcatcaagttataaatagaagcctcggatcaatcattccaagaaatgtgcagaaggcagttctagaaggattgttttctcttggtagggcacaagtctcagactatatcctgaatgagaaaaatcccattgggtcgttgagactagcaagattgagaagtattctcgatgaaggcaaaagtcttcagctgcaggtccctggcagaggatcttggctttcagtaagaccctttacaaccagaatgttcctcanaaacaaccttttcttatttctttcagcttagttgatgggacatgagcagacttcattaatctgaccatcn

SEQ ID NO: 92104 - DNA, 518 bp, Zea mays
gattgtgtggtcctagaggaagaatactgaacgctcgtactcgtccgtaattcccgggtcgacccacgcgtccgccaaggagtatttgatattcctataatttatttaggagtgtcgactctagtgaggctgaaaaccctgggaacaacctgtatgtgactggtttgtcggctcgtgtaacggatcgagatctggagaagcacttctccactgagggtgaggtgattgatgcaagcgttgtgtatgatccttggacaagggaatcacgggggtttggtttaggtaccatggctgctgataaagattcatatcgctgcatcatatatatggactggtctgtgttgcatggtcggatcataactgctgagatgggtgttatcatatgactgggatgcatttaacggtgcttaaactatctgtgcctactatgatgatatgtcatattaagtctgtgactacgtttactccttaacatctgaagatgctctgtacatatggatgattttttttgtccgctt

SEQ ID NO: 92105 - DNA, 529 bp, Zea mays
  unsure (1)..(529): unsure at all n locations
ggggggttagtnaagggagaggcgtttttatggggggggggaggaggagaattctgcccggaattcccgggtcgacccacgcgtccgggagcaggcgatcgagtacgtcaagcaggcggtccaggaggacaatgccggcaactacgtcaaggcgttccctctctacatgaacgcgctcgagtacttcaagacccatctcaagtacgagaagaaccccaagatcaaggaggccatcaccgccaagttcaccgagtacctccgccgcgccgaggagatccgggccgtcctcgacgagggcggcgcggggccgggggccaacggaggtgacgcagccgtcgccacgcgccccaagaccaagggcaaggacggcgacggnggcaacggaagggatgactccgagcagtccaagctcaaggcggggctcaactctgccatcatcaccgagaagcccaacgtcaagtggaacgacgtttgctgcctcgagagcgccaagcaagctctgcangaggccgtcatattgccggtcaaa

SEQ ID NO: 92106 - DNA, 497 bp, Zea mays
  unsure (1)..(497): unsure at all n locations
gtgaaatgtgtcggtcaaggtcgatcgctanagcgtacggttcggatttaccanccggacgcacgcgtcccaggtttgtcaacctcttaacatctgttttggttaaccagccggtccgatccgctagcgagcgagcagctcgatggctggcctgaccgtgtccacgaagaccgcggcggccgtcggcaacaagcagcgcgagggcgctgatgtcatcacgggcgcggaggcctgcttcgcgcactccaagcagatgctgcatgctctgggcttaccggtcggcgtgatgccgctgtggaggctggaagagtgcggctgggtacgcgagaccgggttcgcgtggatgcagctcaaagcccactacgagcactacttccgctgaacagacactcgggtgcgctacgaccccgatgtcaccgggttacctgatgacggtcggatgaatcgcattgaccgatctgcgcactaagcangttattgctttggtgcccatcgac

SEQ ID NO: 92107 - DNA, 501 bp, Zea mays
gggaagaggctctgttaagagggggcatggtatgctctaccggtccggaattcccggggcgagccacgcgtccgcattcggccattccttaacatccttgttgcaagcggcgccagcttgctcgcgctctcgggcagctgctacgctaaagcaagtctagtctctagaggaggaggcggagggggaggccatgggcaaggacgacgtggtccagagcggcgcgggcggcggggagttcgccgccaaggactacacggacccgccgccggcgccgctggtggacgcggcggagctgggttcgtggtcgctgtaccgcgcggtgatcgcggagttcatcgcgacgctgctgttcctgtacgtgacggtggcgacggtgatcgggtacaagcaccagacggacgcgtctgcgtcgggggccggggcggacgcggcgtgcggcggcgtgggcgtgctgggcatcgcgtgggccttcggcggcatgatcctcgtgccggtctaccg

SEQ ID NO: 92108 - DNA, 505 bp, Zea mays
  unsure (1)..(505): unsure at all n locations
nggaaagttttttcttgaggggcaaggtgagagatacttctaccggtccggaattcccgggctctctcctcggtttcctctcccaccaccaacccccagatcgcagcgatctccgccgccgccctctctgggatgccgcgcgacaaagtcaggcgtagaggctccaggaggaggagggaggcgcagcagggcgggtgggggagatgttcctctgggactggttctacggggtgctggcctccctcggcctgtggcagaaggaggccaagatcctcttccttggcctcgacaacgccggcaagaccacgctgctccacatgctcaaggacgagcggttggtgcagcaccagccgacgcagcacccgacgtcggaggagctcagcatcggcaagatcaagttcaaggcgttcgacctcggcggccaccagatcgcgcgccgcgtgtggaaggattactacgcaaaggttgatgctgtagtataccttgtagatgcatatgataaggg

SEQ ID NO: 92109 - DNA, 504 bp, Zea mays
  unsure (1)..(504): unsure at all n locations
tggagaagattngtttaggagggaggagatacggtattactcgttccggaccggaattcccggggtcggccgcggcctggaggcgatcgtgaggagcggagccgtggacgtggtggtgcccggggtgctcccgatcggctgcttccccatctacctcaccctctacggcacctccaacgccgccgactacgaccgcgacggctgcctcagcggctacaacggcctctcctcctaccacaacgcgctgctgcggcggagcctgtccggcctgcggaggacgtacccgcacgcccggatcatgtacgccgacttctacacccaggtcacccacatgatccgggcccctcacaacttcgggctcaagtacggcctcaaggtctgctgcggcgccggcgggcagggccagtacggctacaacaacaaggcgcggtgcggcatggccggngccagcgcctgcgccgacccgggcaactacctcatctgggacggcatccacctnaccgn

SEQ ID NO: 92110 - DNA, 532 bp, Zea mays
  unsure (1)..(532): unsure at all n locations
ngatgnnngaggtntaggggagagagatgtnctatgagggttgggggaaaaggtaatcctctccggaattcccgggctgatatacctccggatgagtactcgtggaggaagtatgggcagaagccgatcaagggttcccctcatcctaggggctactacaaatgcagcagtgtgaggggctgtccagctaggaagcacgtggaacggtgtgtggatgattcggcgatgctcatcgtgacatacgagggcgagcacaaccacaccggaatgccagctcagtcagcagcagcagcagcagcacaggtgtagccgtgtagtcgtagagaactcatcatcagttcatcactgcacccccgcctccccctccttgaggacgaagtggcaccaccaacatggcctctgttggtcaccaggtcgtcgagatgtctggtcctgcttgcgcccacaagatctgtaacgagaatggaatgtgggtgtacacaagactttctaatccatttgtgggggcagctggctgtcgctcaagattatt

SEQ ID NO: 92111 - DNA, 499 bp, Zea mays
  unsure (1)..(499): unsure at all n locations
ngggagttcttaatgtggggaggatgtatgctctaccggtccggaattcccgggcaaagacactcgaaggcagcgaagcccgagccttcccttccctccaatcgatcacccgctccgatccgctagcgagcgagcagcgcgatggcttccctcaccgtgtccacgaagaccgcggcggccggcggcaacaagcagcgcgagggcgcggaggtcatcacgggcgcggaggcctgcttcgcgcactccaagcagatgctgcaggcgctgggcttcccgggcggcgtgatgccgctgcgggggctggaggagtgcggctgggtgcgcgagaccgggttcgtgtggatgcggcagaaggccccctacgagcactacttccggggcacgggcacgcgggtgcgctacgacgccgaggtcaccgcgtacgtggaggacggccggatgaagcgcatgaccggggtgcgcaacaagcaggtcatgctctgggtgcccatcgtcgaaa

SEQ ID NO: 92112 - DNA, 506 bp, Zea mays
  unsure (1)..(506): unsure at all n locations
nggttatgttttttgaagagggaggagggatgagattgctgtaccggtccggaattcccgggtcgacccacgcgtccgcaaatccttcgatcgcacagcgccgcccgccctcacgcagctctctccgatggggcggacgaagcagacggcgaggaagtcgaccggcggcaaggcgccgcggaagcagctggccaccaaggcggcgcgaaagtcggccccggccaccggcggcgtgaagaagccgcacaggtttcgccccggcaccgtcgcgctccgcgagatccgcaagtaccagaagagcacggagctgctcatccggaagctgcccttccagcggctggtgcgggagatcgcgcaggacttcaagaccgacctccggttccagtcctccgccgtcgccgcgctgcatgaggccgtcgaggcgtacctggtgggtctcttcgaggacaccaacctctgcgccatccatgccaagagggtcaccatcatgcctaangacattcagc

SEQ ID NO: 92113 - DNA, 502 bp, Zea mays
aggttaggttggtcctcacgccaaaggagtacgctctacaggttcggaattcccgtccaacgcactcgaaggcagcgaagcccgagccttcccttacgttcaatcgatcacccgctccgatcctctagcgtacgtaacatcgcgatggcttgcctcaccgtgttcacgaagaccgcgacgcccgacggcaacaagcagcgcgagtactcggacgtcatcaccgtcacagacgcctgcttctctcactccaagcagatgctgcacgcgctgggcttcccgggcggcgtgatgccgctacggtggctggaggactgcaactggatgcgcgagaccgcattcgcgtggatgcggcataaggccctctacgagcactacttccgctgcacgggcacgcgggtgcgctacgactccgaagtcaccgcgtacgttgaagacgtacagattgaacgcatgacacgagtgcgcagcaagcacgttatgctcttgctgcccatcctcgaaa

SEQ ID NO: 92114 - DNA, 499 bp, Zea mays
  unsure (1)..(499): unsure at all n locations
gttagttgngtgatgaggggggggggagagtattctcggtccggaattcccgggctccatctccccttctctggcctccggagccacgctgagagatggaggcgaatcccaagaacaccttcacgaggaagtgtatgacgggaagcccgggaaggacggccggctggcggtcggaccggtgttccggagcgttctggccaaggatgggttcccgcagcttgagcctgacatgaagacatcatgggacgtgttcagggtagcagcagtcaagtatgccgacaaccggatgctcggatggcgtccgttcaaagatggagtgccagggccctacttgtggaaatcatacaaggagatctacgacgaggtgctgcaagcaggctctgcgttgcagaagctgggagtgcagccaggttcccgggtggggatctacggagcgaactgtcctcagtggataatggcaatgcangcttgcaatggctattggctaatctgtgtcccc

SEQ ID NO: 92115 - DNA, 534 bp, Zea mays
  unsure (1)..(534): unsure at all n locations
ngtggggnggagttnnnnaagggaaaaggggtcntgtaagagtggggggggggtagggttatatcggtccggaattcccgggtcgacccacgcgtccgatcccgtcgcatcccatcccactaccacccatctcgtcgtccgccgattcgatccggggcttccaacccaggggcagtgatggcgacgaagaggagcgtgggcaccctcggcgaggcggatctgaaggggaagaaggtgttcgtgcgcgccgacctcaacgtcccgctcgacgatgcccagaagatcaccgacgacacccgcatccgcgcctccgtccccaccatcaagttcctcctcgagaagggcgccaaggtcatcctcgccagccacctgggtcgtccaaaaggtgtcaccccaaagtacagcttgaagcctcttgttccacgcttgtctgagctccttggagttgaagtcgtgatggccaatgattgcattggtgaagaaagtgagaagttggctgccgctttgccaagaggtggaagtctgctcctagaa

SEQ ID NO: 92116 - DNA, 503 bp, Zea mays
  unsure (1)..(503): unsure at all n locations
cggtacggtctgagttcccgactctcgctacgctctacnggatcggaatacccggccgaagacactcgaaggcagcgaagcccgagccttcccttcgcttcaatcgatcgcccgctccgatccgctagcgagcgagcagcgcgatggcttgcctcaccgtgtccacgaagaccgcggcggccggcggcaacaagcagcgcgagggcgcggaggtcatcacgggcgcggaggcctgcttcgcgcactccaagcagatgctgcaggcgctgggcttcccgggcggcgtgatgccgctgcgggggctggaggagtgcggctgggtgcgcgagaccgggttcgtgtggatgcggcagaaggccccctacgagcactacttccgcggcacgggcacgcgggtgcgctacgacgccgaggtcaccgcgtacgtggaggacggccggatgaagcgcatgaccggggtgcgcaacaagcaggtcatgctctgggtgcccatcggcnagatn

SEQ ID NO: 92117 - DNA, 507 bp, Zea mays
  unsure (1)..(507): unsure at all n locations
nggtagttcttttagaggggggatgtatggcagagctgtaccggtccggaattcccgggtcgagccacgcgtccgaggaagctgaatcgacctattaagcggcgaatgtatccatttttgctgcaacatggggaatgctacgctggcatagatgggtacctgttaacttctgcttggcgatttgctagagtgatggtctagatatatagcgctactcgaatgtatgtggaatgctaccgtataacgcacatttgggtgcaatgactgttgcattgctgcatgaatgatatcgctggtacataatacagaaatacgggcggttgttctagatgatccaagattacatgctcgtgcatgcgatttgctagctattgtatagtgtcacctacatgcaattcactggtcgtcagtgtacaacaatctggagctgataaaaccatggcggtactgcaacttaattgcgttgacaaacatgacgctttaaccagctgtgcggaataccaagtg

SEQ ID NO: 92118 - DNA, 506 bp, Zea mays
  unsure (1)..(506): unsure at all n locations
nggttagtgatcttagtttcacgcccctatgctacgctctacaggttcggaattcccggctggagccacgcgtccgaagttccccactgactacatacctactgtgttcgacaatttcagtgcaaatgtagttgggggtggcaccacggtgaatgtgggcctttgggataccgctgggcaggaagattacaaccgcctgaggcctctaagctaccgaggtgcagatgttttcgtgcttgcattctcacttgtgagccgagctagctatgagaatatcatgaagaagtggataccagagcttcaacattatgcacctggggtgcccgttgttttggcaggcacaaaattggatcttcgtgaagacaagcactacttgatggaccatcctggattggtgcctgttaccactgcacagggggaggaacttcgtagacaaattggtgctatgtattacattgaatgcagctcaaagacacagcagaatgtcaaagctgtgttcgatgctg

SEQ ID NO: 92119 - DNA, 505 bp, Zea mays
  unsure (1)..(505): unsure at all n locations
ggtaggttgttcgatgagggggggaggtgagagtatgctcgtaccggtccggaattcccgggtcgacccacgcgtccgcgcgtcgcccccgccgcctgccggggcgggaggaggtcctcgccggccgcgcgggaggccgccggggtccaagaacaagccgaagccgcccgtggtggtgacgcgggagagccccaacgcgatgcgctcccacgtgctggagatcgccagcggcgccgacatcgtcgacgccatcgcgggcttctcccgccgccgccagcgcggagtctccgtcctcagcggcacgggcgcggtcaccaacgtcacgctgcgggagcccgcgggggccggcggggcagcggccgtcgcgctgcgcggccggttcgagatactgtccatgtccggggctttcctcccggcgccggcgccgccgggggccacggngctcaccgtgtacctggcgngggggcaggggcaggtggtgggcgggagcgtcatgggggagctc

SEQ ID NO: 92120 - DNA, 503 bp, Zea mays
ggttagatgtgtgaagaaggggggaagatgagaagtctcggtccggaattcccgggtcgagccacgcgtccgaagttccccactgactacatacctacggtgttcgacaatttcagtgcaaatgtagttgtggatggcaccactgtgaatttgggcctttgggataccgctgggcaggaagattacaaccgcctgaggcctctaagctaccgaggtgcagatgttttcgtgcttgcattctcacttgtgagccgagctagctatgagaatatcatgaagaagtggataccagagcttcaacattatgcacctggggtgcccgttgttttggcaggcacaaaattggatcttcgtgaagacaagcactacttgatggaccatcctggattggtgcctgttaccactgcacagggggaggaacttcgtagacaaattggtgctatgtattacattgaatgcagctcaaagacacagcagaatgtcaaagctgtgttcgatgctgc

SEQ ID NO: 92121 - DNA, 502 bp, Zea mays
  unsure (1)..(502): unsure at all n locations
ngtaggttcttcgatgaggggaggagtagagatcgctgtaccggtccggaattcccggggtgcggcacgcgttctgctgccgcgaccctttctacgagtgggccatgtacctcattgtcgatgcgccatgggcgccaagatgcttgtacaggaagcccaagattgtccagcacatattgtgttgaaatgaacgaacacacggtatccatatcaccattggcacacaatgacatagtgtaagtcatgttcttatgatgtaacctaccgatgtctcgttgtaactatggacagagaaaggtccaagttcaagcatggccccatatccaaaggatgaacagccaggccctgcagatacatggtcattgttggttacctgcaacactatactgagagctatggatatgttgaacgtgtgtacagctgtgagaacatttataccgaggcatgctgctattggagatcataagcatcgcagcataactgtgcatagacttccgattcc

SEQ ID NO: 92122 - DNA, 534 bp, Zea mays
  unsure (1)..(534): unsure at all n locations
ggatgggntgaggnnnagaggtnnaaaggggtgntgtaaggggggcggggaggtagggatattctctccggaattcccgggtcgacccacgcgtccgctgtcacacacacacacacagacaagtggtttccaaagccaagtgtgtgtactagcaacgagctagctcgggcggcagcaggcagccatcatgtcggaggagaagcaccaccacttcttcaaccaccacaagaaggacgaggagcagcccgccggcgagtacgggtactccgagaccgaggtggtcaccgccaccggcgagggcgagtacgagaggtacaagaaggaggagaaggagcacaagcacaagcagcacctcggcgaggccggcgccatcgccgccggcgccttcgcactctacgagaagcacgaggcgaagaaggaccccgagcacgcgcacaggcacaagatcacggaagaggtcgctgccgcggcggccgtcggcgccggcggctacgtattccacgagcaccacgagaagaagaaggaccacaagga

SEQ ID NO: 92123 - DNA, 529 bp, Zea mays
  unsure (1)..(529): unsure at all n locations
nggtgnnggagtnnnngagggggagcgggtgngtatgaggggaggggggaaagtttaatcggtccggaattcccgggtcgacccacgcgtccgaagcgccacacacacgccgacgcgaaccaaccaaccagctggtagtaggttcgccgcgctgacgatgatgcctcgccgcgcccttctcttcgccgcggtgctcctcgcggcctccgccgccgcggtctccgggttccacctgggaggggacgagagcggtctcgtgaggggtgtgctcgccgcgctccgcgagcgagccgaggccgaagacgccgctcgcttcgccgtcgcccactacaacaagaaccaaggcgccgctttggagtttactaaggtgctcaaatccaagcgggaagtggtgaccgggaccctgcatgacctgatactggaagcagctgatgctggaaaaaagaatgtgtacagagcaaaagtttgggtgaagccgtgggaagatttcaagtctgtcngtgagtttcggcttgttggagactctgaa

SEQ ID NO: 92124 - DNA, 509 bp, Zea mays
  unsure (1)..(509): unsure at all n locations
nggtagatgttaatgggggaaggttgtatgcactctcgtaccggtccggaattcccggggcgagccacgcgtccgaagtgagtgagaaagagagagagaggagggaaaatgctgcgccacgccgaccggcgagtcgtttaccgcgccgtcgctccgtccaccgcgcgccgggcgctcgccacggcggaggtgcccgccgaggccgtcgaggactccacgttcgtcgaggcctggaaaaaggtcgaccccaacatcgagcccccagcgacgcccctctgcctcatgcagacgcgcccgcccacgccagctaccatgcctaccaagctcaccgtcgacttggtcctaccctacaagtccgagatcgccaacaaggaggttgacatggtaattgtaccaactacaactggtcagatgggtgacttgccaggccatgattgcacaattgcagagctcaagcctggaggtcttatcaatacatgcaggaaacagatgtgagccagtacttcgtg

SEQ ID NO: 92125 - DNA, 506 bp, Zea mays
tggagtaggactggactatgacagggatagtatgctctaccggtccggaattcccgggtcgagccacgcgtccgtgctttctcatatgaggtgggagtgcagatggttgagatttacaacgaacaagtgctgtatcttttatcaaatgatattgcacaaaaaagacttggaatttggagtacatctcagcctaacggacttgttgtccctgatgcaagtttacatccagtcaaatcaacattggatgtgctagagttgatggaaattgggcaaacaaatagagcagttggatcgacagctctgaatgaaaggagcagtcgatctcacagcattctaactgtgcatgttagaggggtggatttgaagaatggttctacttccagaggatgtctacatctgattgatcttgctgggagtgaaagagttgagcgatctgaagcaattggagatagattaaaagaagcacagtatattaacaaattcctctctggtctgggtgatgtgat

SEQ ID NO: 92126 - DNA, 517 bp, Zea mays
  unsure (1)..(517): unsure at all n locations
gggggttatggtggtgtattagaggggaggcatgttaaaggcattgctcgtaccggtccggaattcccgggtcgacccacgcgtccggctgaactagagtcggcattctctggattgaatgtgcttattgagacatactgtggggacattcctgctgagtcctacaagaccctcacgtcattgagtggtgtgactgcttacggttttgatcttatccgtggagccaagacccttgatcttatcaggagcagcttcccctctgggaagtacctcttcgctggtgttgtggatggacgcaacatttgggctgatgatcttgctgcatctcttagcactcttcagtctcttgaggccgttgctggcaaggacaaacttgtggtgtcaacctcctgctcactgatgcacaccgncgttgatcttgtaaatgagactaagctggatgatgagattaagtcatggcttgcatttgctgcccaaaaggttgtcgaggttaatgcccttgcgaaggctttggcag

SEQ ID NO: 92127 - DNA, 508 bp, Zea mays
ggggtatgttgatcgatgaggggaggaggatagcattgctcgtaccggtccggaattcccgggtcgacccacgcgtccgcggacgcgtgggttcatggctttccttcaactcaaaagatggagtgcatgttgtgagtggtgattcgttaattgaatgcgctactattgctgacaagtgtgcaaaggttggtgcagtcgggataaattgcacacctccaagatttattcatggactgatactctccattcgaaaggtcacagacaagcctattctgatatatcccaacagtggtgaaagatatgatggtgaaaaaaaggagtgggtggaatccactggtgtgtcagatggtgattttgtttcgtacgtaaatgaatggtgcaaagatggggctgcgcttatcgggggctgctgcaggacaactccaaacactatcagggccatacacagaactcttaaccaaggctgccacaagcatcagttacctgtaagctgtaacatagatctgtg

SEQ ID NO: 92128 - DNA, 506 bp, Zea mays
ggatagttcgtgatgagggaggtgtagagaatgctgtaccggtccggaattcccgggtcgagccacgcgtccgcaggtaagcagcagcaggaaccctagcaccgccgcatccgcagccatgggtatcgacgctcgttgccggtgggaggaacaagaagaccaagcgcacagcgccgaagtccgacgatgtttatctcaagctccttgtcaagctctaccgtttcttggtcaggaggaccaagagcaacttcaatgctgtcattctcaagaggctcttcatgagcaaaaccaatcgcccaccaatctccatgcgccgccttgtcaagttcatggaaggaaaggagaagaacattgctgtgattgttggcacagtcacagatgacaagaggatccaagaggttccagcaatgaaggttactgccctgaggttcaccgagacggcaagggccaggattgtcaatgctggtggggagtgccttacatttgaccagcttgctcttcgtgcc

SEQ ID NO: 92129 - DNA, 532 bp, Zea mays
  unsure (1)..(532): unsure at all n locations
ggtggggagagtnnnngagggggagggagtgtgtaagggggggagggggaaagttggtatcggtccggaattcccgggggccgagctggtcaaggcctgcaccaccatcatctggatcgcgtcggcgctccacgcggccgtcaacttcgggcagtacccgtacgccgggtacctcccgaaccgcccgtccgtcagccggaagccgatgccggcgccgggcagcgacgagtacgcggagctggagcgcaagccggagaaggtgttcgtgcgcaccatcaccagccagttccaggccctcgtcggcatctcgctgctggagatcctgtccagccactcctccgacgaggtgtacctcggccagcgcgacaccaaggagtggacgtcggacgccaaggcgcaggaggcgttcaagcggttcggcgcgcggctgaccgagatcgagaaacgcgtcgtcaccatgaacgcggaccctcgcctcaagaaccgcaacggccccggccgagttcccctacacgctgctctaccccaacac

SEQ ID NO: 92130 - DNA, 481 bp, Zea mays
atggagttattctctccggaattcccgggtcgacccacgcgtccgcgagaagcagatcctgagatccggcaccggccccaagccgataaagggccagaaggtcaccgtgcactgcaccggctacgggaaggatcgtgatctgtccaagaaattttggagcaccaaggaccctgggcagcagccattcagtttcagcattggtcagggttcagtgatcaaaggatgggacgagggagttatgaccatgcaagtgggtgaagttgctcgtatccagtgcacgcctgattatgcttatggagccggcgggttcccagcctggggaattcaaccaaactcagtgcttgtgttcgagattgaagtcctcagtgcccagtaattcgcatctgtcagctatggaaacgttggccatgcttctcaagtaatgaaataattccgttgtcacctcatgctacatacagcagattggtgttacgagttaaat

SEQ ID NO: 92131 - DNA, 502 bp, Zea mays
  unsure (1)..(502): unsure at all n locations
nggggaaggctgattatgggggaagaaggaatgagtattctcggtccggaattcccgggatctgcttgcagtcaagaaggatcttgaaccagaatattcatgcagagttgttcaacgcatccatgaagatgtgccagaagaagtccttgctttggacaaaagagttgagtgtaactccaggattgccgttgcactttcattaatggatgagtgcttccttccgattattgaccagagaactggcatcaacttgatacgaaatgttgcgtatagctgtggatcaaattttgcccggttggatttccgtggattctatatatttattttagaacgtggagatgaaataatagctgcagcatctgtccgaatacatggaaccaagttagctgacatgcctgtcattggtacccggaatatgtataggcgacaagggatgtgccgccgacttggagattgaatccaaatgatcctcagctctctcaatgttgagaagttgatcatt

SEQ ID NO: 92132 - DNA, 510 bp, Zea mays
  unsure (1)..(510): unsure at all n locations
ggaggagtatgtgttaaggagggcaagagggataagtatnactcgttccggttcggcagncggagggacggacgcgtctatctcagcttgctgcgctgcactaccctgccctgccatcatatcgtacgtgagcgcgggcgagcgagagcgagggagaggcatggctgctccgaagctcgcgacgctggcgctggccgtgctcctggcggcgaccgtggtggctcccccggccgcggtgcgcgcggcgatgtcgtgttccaccgtgtacagcacgctgatgccgtgcctgccgttcgtccagatgggcggggccatgccgtcccagccgtgctgcggcggcatccgcagcctgctgcagcaggccaacaacaccctcgaccgccgcaccatctgcggctgcctcaagaacgtcgccaacggcgccaacgggagcggcacctacatcagccgcgccgacgggcttgccagcatgtgcagccgtcgcctggcgtacaagatcagcaccaacgt

SEQ ID NO: 92133 - DNA, 525 bp, Zea mays
  unsure (1)..(525): unsure at all n locations
nggagtngttagtnnnnagagggggagatagtctgttagagggatgggggggaaagttatattggtccggaattcccgggtcgacccacgcgtccgcaaaacggacatgtcagccatgccttgaaagtcatggatctgatgcttcangagggccatgatcctgatgttttcacctacaatactgttatcaactgcctcagtaaaaatggagagcttgatgaggccaagggaattgtaaatcagatggtggatggggttgtttgcctgacaccacaacgttcaacactctcattgntgctctgtgctcacagaatcgacttgaggaagcattggaccttgcacgtgagctaactgtgaanggactntctncagatgtctatactttcaatattttgataaatgccctttgcaaggtangagatcctcatcttggcatccgattgttgaagagatgaaaacaatggatgcgcttctgataaagtacatacaacattttgaatggatatctttgcttcatgggaagct

SEQ ID NO: 92134 - DNA, 496 bp, Zea mays
  unsure (1)..(496): unsure at all n locations
ggatatggctttgttatgaaaggtagtatgcatctnctgttcggaattcccggctcgagccacgcgtccgcagtgttgccagcctgtggttcatgtcacttttcatctgcatttttgctacgagcatgctggaaatgagatggagtggtgtaggcatcgatgactggtggagaaacgagcagttttgggtcattggaggcgtgtcttcacatctctttgctgtgttccagggactcctcaaggtcatagctggtgtagacacgagcttcactgtgacatccaagggtggagacgacgaggagttctcagagctgtacacattcaaatggacgacccttctgatacctccgacaaccctgctcctactgaacttcattggagtggtagctggcatcttcaatgcgatcaacaacggatatgaatcatggggccccctgttcggaaagctcttctttgcattttgggtgatcgtccatctttacccgttccttagggg

SEQ ID NO: 92135 - DNA, 511 bp, Zea mays
  unsure (1)..(511): unsure at all n locations
nggggatagatttctgtcattgaggggggaggaggtttggctatgtctcggtccggaattcccgggctccgcgcattttccttgcaaccgattgcctatccccctcccaaccaaagaccgatggcgcccaaggccgagaggaagcccgcggcgaagaagccggtggaggaggagcccgcggccgagaagacgaccgccgggaagaagcccaaggcggagaagcgggtccccgctggcaagtccgccggcaaggagggcggcgagggcaagcgtggcaagaagaagggcaagaagagcgtggagacgtacaagatctacatcttcaaggtgctgaagcaggtgcacccggacatcggcatctcctccaaggccatgtccatcatgaactccttcatcaacgacttcttcgagaagctggccggcgaggccgncaagctcgcgcgctacacaagaagcccatcatcacctcccgctagatccagacttccgttgcgcttgtgctcctaggcgt

SEQ ID NO: 92136 - DNA, 499 bp, Zea mays
gggaatgttgatcatgagggggaggtaaggaatgctcgtaccggtccggaattcccgggtcgagccacgcgtccgcttgagggaaaaaaaataaagggagaagctctcctgagaagcatatagcaccagcggaacacgggaacggcggaagcaaacaactagaaattccccagcccggttctttgcgtgcggttgatctcgtcggaggcccggccgcggttccccaatccgccatcgaattcgatggcggccaacgccgggaataagatccgcaacgccaagctggttcttcttggagatgtgggcgctggcaaatctagcttggttcttcggtttgttaagggacagtttgttgaattccaggaatcaacaattggagcagccttcttttcccagaccttagcggtcaatgatgagactgttaagttcgaaatctgggatactgccgggcaagagaggtatcatagcttggcttccatgtactataggggtgcagctg

SEQ ID NO: 92137 - DNA, 508 bp, Zea mays
  unsure (1)..(508): unsure at all n locations
nggatgttcatcaatgagggggganagtaaggcatcgctcgtaccggtccggaattcccgggaagggatctccggtccccgggccccggctcctcccctcccgattccaatctggtctcaccgggcctggcggcgagggagagatggggaagaaccaggcgtacaaggcgatgcagcgggcgcggctggggtcctcgtccggcgcgccgggcgccgccgacgcccccgaagacggcatggaagaggaactgaaaaggggtgagctggaggctgacaaagacaaaatgatgagagagtatagagctcaactggatgctgaaagagctcaaaagctagcaaacggaagaaatcactcaaggtcaaactcaaaatcatcatcttccaagaaagagaggaaggataaggacgcaaagaaaaaaaaaaaaaaagggcgggcgctctaaaggatcccaggctacgtacgcgtgcatgcgacgtcatagctcttctatagtgtcacctaaaatca

SEQ ID NO: 92138 - DNA, 509 bp, Zea mays
  unsure (1)..(509): unsure at all n locations
ggggaagggtnnntaactgattcatgcnatntccannncccntnnnntnnnnnnnggngggggggccacgcgtccggtcgcgaggcaaggccatcgtccgccatgacgctctccctctccacctctttggtcgccatccccgccgccgcgaggaccaccgcccgcaccctacgctccgtcgtcccctcccaggggatgcgctgctcgatgcgcaagaaggggttgcacccggagatctacgaggacgcgaaggtgtactgcaacggcgagctggtgctggtgacggggggcaccaagccggagtacacggtggacgtgtggtccggaaaccacccctactatgtcggcgacacctcggcgctcgtggtcatggacagccagatcgagaagttccgcaagaagtggggccacatcaaggagtactggcccgaggaccagtggagggagatgcacccagacggcgacccggagttcgagcccgagggggacaactgattgatggctccccc

SEQ ID NO: 92139 - DNA, 512 bp, Zea mays
tgtagtggggagaggttgtccatccgaaaagtattctcataccggtctcggaattcccgggtcgacgcacgcgtccgcggacgcgtgggtcgaaatctacccagttaactttggaaatgagatgttctagttgatgcacagggttcaaagtagtagatctgagaagggcacttctcaaaatctacacaccaaaaagatttaaacaaatcttccacggaatggtgagagaacgaagaacacaaaaaaaaaaaagggcggccgctctagaggatccaagcttacgtacgcgtgcatgcgacgtcatagctcttctatagtgtcacctaaattcaattcactggccgtcgttttacaacgtcgtgactgggaaaaccctggcgttacccaacttaatcgccttgcagcacatcctcctttcgccagctggcgtaatagcgaagaggcccgcaccgatcgcccttcccaacagttgcgcagcctgaatggcgaatgggacgcgccctgtagcggcc

SEQ ID NO: 92140 - DNA, 515 bp, Zea mays
  unsure (1)..(515): unsure at all n locations
cggnagtaggaaggaaaagtccgacagcactagcaatttcgcttcagtcctgaattccagggtcgacccacgcgtccggcgtaagaagaagacgtacaccaagcccaataagatcaagcacaagcacaagaaggtgagactcggccgactgcaattctataatgcggacgacgccactggcaaggggacccgccttcgcaaggagtgccccaacacagagtgcggcgcgggcgtcttcatggccaaccacttcgaccgtcactactgcagcaagggcggccgtacctatggctacaaccagaaagcgcaatttggttgccccaaatttgctttattcgccaacctatcaagcattcaaatggtgggtacttaaattggatgccatttaaaaccgcctgagggctaaaacctaaatggagccgtaggatcgtaataatttggccccccttttaagagagtattaatgggggttcaaaaggacccctaaaaaaatgtggccctcagaaaaaaaaaag

SEQ ID NO: 92141 - DNA, 509 bp, Zea mays
tgagagagcgtgagttcatcgatcagaactgactgctatgactcaccggtccggaattcccgggtcgacccacgcgtccggggcgacaacatgattgagaggtccaccaaccttgactggtacaaaggcccaaccctgcttgaggctcttgaccagatcaccgagcccaagaggccttcggacaagcccctgcgtctgcccctccaggatgtgtacaagattggtggtattggaactgtaccggttggtcgtgtggagactggtgtcatcaagcctggtatggtagtcacctttggtccaactggcctgactactgaggtgaagtctgttgagatgcaccatgaggcgcttcaggaggctcttccgggcgacaatgttggcttcaacgtgaagaacgttgctgtcaaggatctcaagcgtgggttcgtggcctccaactccaaggatgaccctgccaaagaagctgccaactttaccttccaggtcattatcttgaaccaccctgggaa

SEQ ID NO: 92142 - DNA, 522 bp, Zea mays
  unsure (1)..(522): unsure at all n locations
cgaagagggtgtctgatgncttgcatcgtttagctacgcgtaacttgctcctgaattcccgggtcgacccacgcgtccggcgatggtgtcaagggcaccatctttttcacccaagtgggagatggccctaccactgtcaccggagagagtgtctggcctcaagcctggcctccatgggtttcatgtgcatgcgcttggtgacaccaccaatggctgcatgtcaactggaccacactacaatcctgcgagcaaggaacatggagcaccagaagatgagaaccgccatgccggtgatcttggaaatgtgacagctggagcagatggtgttgcaaacattaatgttaccgacagccaaatcccactgacttgggcaaaactaatcatttggcagaactggtggttgttcaacctgaccccctttatctttggaaaaggtggcccctaactttataagagaccccggaaacccttggggccctttttctttggggggaatattggactctcaagggttaactgaat

SEQ ID NO: 92143 - DNA, 526 bp, Zea mays
  unsure (1)..(526): unsure at all n locations
agaggggaaagcgggtctgagcacctgacatggaggtaggcatgacactcctcnncttcngnnntcgngggncgacccacgcgtgcgactgccaacagccttcagaagccttggtacctggtccttggtaaccatgactacacgggaaacgcgctcgcgcagctcgaccctgccattcgcaaagtggatagccggtacaccgccattgccaagtccttcattgtcaactcagggattgcggattttttcctcgtcgacacaacgccgttcattgtccactactggaacaacaccaagttcgattggagaggcgtcgctcctcgagacacctacatcgcgaatctcctcaaggacttgaagtgtgcactgacagcgtccaaggctccctggaagatcgtcgtgggtcaccaccccatcagcagcgcctgcgggcatgggaacaacactgagctggaggagttgcttctcccggtcctcaggacacacggngttgacatgtacttgaatggccatgaccactgccttn

SEQ ID NO: 92144 - DNA, 521 bp, Zea mays
  unsure (1)..(521): unsure at all n locations
ngtgtgagggtnnaagtnaaagggtcattatgggggggcgaacgtatgctctaccggttcggaattcccgggtcgacccacgcgtccggattcttgaggcgaagccccggtgcgtaagagtctgccatggccagcgagaatgaggtctttgggttcgaggaagtcgccaagcacaacgtcaccaaggactgctggatcatcatcgccggcaaggtgtatgacgtcactccgtttatggatgagcatcctggtggagacgaggttttgctagctgtaaccgggaaagatgctacagctgatttcgaagatattggccacagtgattccgcaagggacatgatggagaagtaccacatcgggcagatagatgcttcaacaatcccagcaaagcgtgctcatgtgcagccccagcaagcacccagccatgcagacaaggataatgaacctcccatcaagatcctacagttccttgtgcccattatgatcctgggccttgcatttggtatacggcagtacaccaa

SEQ ID NO: 92145 - DNA, 505 bp, Zea mays
  unsure (1)..(505): unsure at all n locations
gaaagggcttgggtgctgcntcacgtctccctacgcatgtactaccggtccggaattcccgggtcgacccacgcgtccggaggtgctggccaccaatggtgacactcatcttggaagtgaggactttgaccagaggatcatggagtacttcatcaagttgatcaagaagaagtacagcaaggacatcagcaaggacaaccgtgctcttggaaagctgaggagggaagccgagcgcgccaagagagccctcagcaaccagcaccaggtccgtgttgagatcgagtccctctttgacgggaccgatttctcggagccgctgacccgtgccaggtttgaggagctgaacaacgacctcttccgcaagaccatgggccctgtcaagaaagccatggaagatgctggccttgaaaagagccctttccacgagaacgtcctgttggggaaaacccccattttcaaaggggccagatcttcgggggatattctttgacgaagagggccccaa

SEQ ID NO: 92146 - DNA, 516 bp, Zea mays
  unsure (1)..(516): unsure at all n locations
tgtggatggctgtagttcatcgatcaagcantttgattgcacgcactcatccggtccggaattcccgggtcgacccacgcgtccgggatattggtcgttgcctgaaatgcgaatgctttgtcactgatgtatttggacgatctagtgaaggggtatccgctgtgactgctcctattttgccaggaaggcctaaaattgaaaagctggagattgaaggaagaggtttccacactgacctatatgccgttcagggtacctatagcggaggcaaagaaggcaagagtaaaatacaatggctcagatcgatggttggaagccctgatcttatctncatacctggcgaaactggaagaacgtatgaagctaatgttgatgatgtanggtataggcttggtgcaatttatacacctggtagagaggatgggagttaaggacaacctggttcttgtttaacagaacaaattgcatttgaacctgaacttttccagggaaggaaacaaaaaccccatgattggc

SEQ ID NO: 92147 - DNA, 508 bp, Zea mays
  unsure (1)..(508): unsure at all n locations
agaggagttgtctgatctacgctatgtanggnatcactcaccgctccggaattcccgggtcgacccacgcgtccgcaccaagcagagcaagccagtgaggtctctcagagcgtagccagccagctacaatggcggtgagcgcgctagccaactatgtccaggtctacgtcatgctcccgctggatgtcatcactgtcgacaacacgttcgagaaggaggacgagacgagggcgcagctgaagaagctgacggaggcgggcgccgacggggtcatgatcgacgtctggtgggggctggtggaagggaaggagccgggagtctacgactggagcgcctacaggcaggtgttcaagctggtgcaagaggccgggctgaaactgcaagccatcatgtcgtgccaccagtgcggcggcaacgttcgggacgtcgtcaacatcccgatcccgaatgggtgccggaccttggcaaaagcaaccccggaattttttaaccaaaccgagggggctgc

SEQ ID NO: 92148 - DNA, 535 bp, Zea mays
  unsure (1)..(535): unsure at all n locations
gagggggagaggttnannnggtnaaaagcgttttttatgcaggggtcgggggggagaggagagtattaccggtccggaattcccgggtcgacccacgcgtccgcttctcttctccactaccacccgcccgcccgccttctcctccaccactgccccgtcgtggaataggggcaagttcaggcatctcgcttctgtcctggtcgaggggatcggagaagaatgggctcggaggcggactgcgacaggatcaggggcccgtggagccccgaggaggacgacgcgctgcggcggctcgtggagcggcacggcgcgcgcaactggacggcgatcgggcgcgagatcccggggcggtcgggcaagtcgtgccgcctgcggtggtgcaaccagctgtcgccgcaagtggagcgccggcccttcacggcggaggaggacgcggccatcgtccgcgcccacgcgcgcctcggcaaccgctgggccgncatcgcgcgcctnctncccggccgcaccgacaacgccgtcaagaaccactggaact

SEQ ID NO: 92149 - DNA, 537 bp, Zea mays
  unsure (1)..(537): unsure at all n locations
nggtgggggggggngggtnnnaagaggtgtggttagaagggaggggggggaggggaaatgttgtaccggtccggaattcccgggtcgacccacgcgtccggcagaagccaccgatcggcgtgccgcgtgcgtgaggcgatcggagcatcccgtgccgaggaggaagacaaccggcgacgcggggggaacatggggaagacgccggtgcggatgaaggcggtcgtgtacgcgctgtcgcccttccagcagaaggtaatgccggggctgtggaaggacatcaccaccaagatccaccacaaggtcaccgagaactggatctccgccacgctcctcctcacccccgtcgtcggcacctaccaatacgccatgtggtacaaggagcaggagaagctttcccacagatattaaatgcgctgcccttgacagacagcactcggagttttcatgatgggtttcataatcctcccatgatgatttaacatttgtttgatcaatttcagttcaacgccttttcatcgttccatatgcatatatggt

SEQ ID NO: 92150 - DNA, 506 bp, Zea mays
ggaaaagctgtgttatgataagcatatattgcatgctcaccggtccggaattcccgggtcgacccacgcgtccgaagacaatctctgcctgctcaaatgaagtatctgaaggttgtaagtgtccagtgggtttcaaaggtgatggagaaaaaagttgtgaagacattgatgaatgcaaagagaaactttactgtcagtgcaagggttgcagctgcaagaatacatggggaagctacgagtgcagctgtggtgatgacaatatgctatacatgagggagcatgacacttgcatcagcaaagagggaactgccactactgttggctggagcttcctctgggttattttctttggacttgtttttgctggggttggagcatacgccgtgtacaaatacaggctgaggagctacatggattcggagatccgggccatcatggctcagtacatgcctttggatacccatgaaggacccaacccactttaggttggcccccccaattttttt

SEQ ID NO: 92151 - DNA, 526 bp, Zea mays
  unsure (1)..(526): unsure at all n locations
gttggtnnaggnaagtnnnagaggtgngtatgagggaggggggagagatgctgtaccggtccggaattcccgggtcgacccacgcgtccgcacgccgccactgatctgctctgttgctggtgactaggagcagtagcgagagggattctggatggccaagtcgaagaaccacacggcgcataaccaatcgttcaaggcgcacaagaacggcatcaagaagcccaagcgccaccgccagacctccaccaaggggatggacccgaagtttctgaggaacttgaggtactcaaggaagggcaacaagaagagtggcgaggctgagtccgaggagtaagatgatggtgattgagtttgtggcgacaaatgcatctcttgtatcgctaagagtcttagctgtgaacttagttctcacttctgtgtgactgtgatcaaaggagatccatcagttggtaccgaagtgtattttatgtcttgttggttacctggaatttaattaanaccatcagttgtatccttttgagaattg

SEQ ID NO: 92152 - DNA, 534 bp, Zea mays
  unsure (1)..(534): unsure at all n locations
ggagggggggggtnnnnagggggaaaagcgctgtttatgagtgggaggggggagggaagatttgtcaccggtccggaattcccgggtcgacccacgcgtccgacactgctgtctcccacggcctgtggctgaacatccctgactatgatgcacccacccagctggtcaagcctaaggagaggaacgaaaggtacgttgatgctgtcatgacaatccccaagggaaccttgttccccatgtgcggcatgaaccttgccttcgacagggatctcattggccctgccatgtacttcggtctcatgggtgatggccagcccattggtcgctacgacgacatgtgggccggatggtgtgtgaaggtcatctgtgaccacttgagcctgggagtcaagactggcttgccatacatctggcacagcaaggctagcaaccccttcgttaacttgaagaaggaatacaagggcatcttctggcaggaggacatcatccncttcttccagaacgtgaccattcccaaggattgcaacaccgtcc

SEQ ID NO: 92153 - DNA, 511 bp, Zea mays
  unsure (1)..(511): unsure at all n locations
aatggtgangtgactgctcacgcncatgantcgcactgacttaccggtccggaattcccgggtcgacccacgcgtccggtacatgtcttgatgttagtaattagtagagtatctgaaactgcccattcccgatgtcataacggaaaaaatccttatatgaatatgactgtaagctgaaatcgaataacaaaagtagctcaaatatacaaatggtgacctgtattttcatgttctgctaggtatgacgaattggctagcaagagcaatgttgaatacattgctggaggagccactcaaaactctatcagggttgcccaatggatgcttcaaattcctggtgcatcaagttacataggttgcatcgggaaggataagtttggtgaggagatgaaaaaaaatgcacaagctgctggtattaatgccctttatcatgaggatgataatgctcaaacgggccaatggcctgtttggttttttgggggaaaagggacatttatggtaaattggtggg

SEQ ID NO: 92154 - DNA, 509 bp, Zea mays
agaagaaggcgtgagttgctggtcagtctccgttcgcattgacttaccggtccggaattcccgggcttggacatctatcccgctcttggcctattgcacattgcctgccatctgcttgctgacagggaaatttatcacgccagaggttaacaatgttgccagcctgtggttcatgtcacttttcatctgcatttttgctacgagcatcctggaaatgagatggagtggtgtaggcatcgatgactggtggagaaacgagcagttttgggtcattggaggcgtgtcttcacatctctttgctgtgttccagggactcctcaaggtcatagctggtgtagacacgagctttactgtgacatccaagggtggagacgacgaggagttctcagagctgtacacattcaaatggacgacccttctgatccctccgaaaaccctggttctaacgaacttaattggaagggtaccttggatttccatttgcttcaaaaccggttttgaattttggg

SEQ ID NO: 92155 - DNA, 505 bp, Zea mays
agaggttctctgatgcaagtttccgacagtcatagcaactgctcctgaattcccgggtcgacccacgcgtccgcaagaaggaggccgagaacaagttcaagcagatctcggatgcgtacgaagtgctgagcgacccggagaagcgcgcggtgtacgaccagtacggcgaggagggtctcaaggggcaggtgccgtcgtcgggcgccggcggtgcggtccccggcggcgcaaccttcttctccaccggcggcgacgggccgacggtgttccggttcaacccgcgcaacgcggaggacatcttcgccgaattcttcggtggctccagccccttcggcggtatgggcggcggtggcattggcggcagcggcatggggggtgggatgcccggcttgcggacggcgggacaagggttctctcgtcctttttcggggacgatattttgggttttggtttgggggggggcccgtacgtgcacggtttgccacccgtaggccgggcccttaaa

SEQ ID NO: 92156 - DNA, 534 bp, Zea mays
  unsure (1)..(534): unsure at all n locations
ggtgtgttgagttnaagagctnaaagtggtgtgtgatgatatttgacaatatagtaatgctctaccggtccggaattcccgggtcgacccacgcgtccgcgaactactaaagcatgttttgcactgtctttatatagtgatgccatcaatgggccctgcatgttaggttatggttcagttttggacaggaacagttagtgcattctttgatggaacagcaggctaggtatgttagggaaaaaaatttggtgcagcactgctgcaaaccagagtggttgcagcccctcacaaaaagaaggatagaccccacccgtattttttccgtatgttagttacgcacgcggtagaccctagtgttgtttcatgcatggatcagtcttatggattcttgtattatatctgttcccccattaaccagtgctgtcaaagttttgggctaaaaaaaaaaaaaaagggcgggcgctctagaggatccaagcttacgtacgcgtgcatgcgacgtcatagctcttctatagtgtcacctaaattcaa

SEQ ID NO: 92157 - DNA, 514 bp, Zea mays
  unsure (1)..(514): unsure at all n locations
agtnnaaggggaagctgngttaggcggggggaagaggtatgctgtaccggtccggaattcccggggtgaggttctccggggttcggtttcgtgggtgagcggatcgagatggcggcgtcggatgttgagtaccgctgcttcgtcggcggcctcgcctgggccacggacgaccactccctccacaacgccttcagcacctacggcgaggtcctcgagtccaagatcatcctcgatcgggagacgcagaggtcccgcggcttcggcttcgtcaccttctccacggaggaggcgatgcggaacgccatcgagggcatgaacggcaaggagctggacggccgcaacatcaccgtcaacgaggcccagtcccgccgcggccgtggaggcggcggcggcggcgggtacggtggtggccgtggaggcggcggctacggcggtggcgggcgccgtgatggcggcggcggctacggcggtggcggcggctacggtggtggcggcggcggctacggtggtggtg

SEQ ID NO: 92158 - DNA, 525 bp, Zea mays
  unsure (1)..(525): unsure at all n locations
nggagggtgagttnggaggggagatggtgtgttatgaagggggggggaggtatgctgtaccggtccggaattcccgggtcgacccacgcgtccgcccacgcgtccgaccaagtccaccgccgtcgagaccaccgtcgagagggtgatcttcgacttccggttcctggcactcctcgccgtcgccgggtcactcgccggctccgtcctgtgcttcctcaatggctgtgtcttcatcaaagaggcgtaccaggtttactggtcgagctgtgtcaagggggttcatacggggcagatggtcctcaaggtcgtcgaggccatcgatgtgtatcttgctggaacagtcatgctgatatttgngatgggtctctacggcctcttcatcagcaacgctcccgcgggtgttcctcctgaatccgaccgtgccctgagcggctcgtcactggtcgggatgttcgctttgaaggaaccgcccgagtggatgaacatcacctngcttgacgagctcaagacaaaagtggggcacgt

SEQ ID NO: 92159 - DNA, 516 bp, Zea mays
  unsure (1)..(516): unsure at all n locations
tgaagagccttcaagtctcagctcagangtgattgtatgactcaccggtccggaattcccgggtcgacccacgcgtccggtttttctttctggttattatatctgccgcaggatgtatattttgatgatgaatctgcagagggagtaatctcctcccttcgccttggagacgaccaagaaaggtttattctttttatatttgatttgactactgttcttccttttgtaagcacatttggtgtttgatacaagaattggctaatgaagatgtcatttgcagtggctcgctctttacaaattccaactggtttgcatttgacgaggacaaggcactgaatgatggtttggttagcccagaagcttccccatctccaaattcagaaatatctgcactaaaagaggttgataaaccatttctgggccaagtaattatttgacccaaaaggttcttaaaccaactttcccagtctccaaacaaagcccaaaccaaaagattgggttacccccttttgggaa

SEQ ID NO: 92160 - DNA, 513 bp, Zea mays
  unsure (1)..(513): unsure at all n locations
ttgagggccgtgagtgctggctacgcctcttancgcactgacttaccggtccggaattcccgggtcgacccacgcgtccgcgagtcgcgacagagagagaggcggagttgcggagaagatgcagagcagcagcatgaagagggagatcagcgaggcccacgacaccattcgcttcggcatcaacgccggcgtcaaagccgacctcgccccgccgcacccgctccagtctaccatccaatcggagaccaagttctgggcggacaagaagaagttcgggacagatgccatatacggatccgncctcaacatccgcaaggatctcgatgcccaaatcctctccagggtccaaaggcccccttgtgctttgccgtcatctttgcttggataccaagcactgacaagttccttggatgattttggattggaagattatcttaacatgccctatgattctgacaagttccggtaacctgacttgccccctggaaagggagggtcccccttggtttggcc

SEQ ID NO: 92161 - DNA, 524 bp, Zea mays
tgaaaagagccttgagttgctgggtcagctccctaccagcatgactgttccggtccggaattcccgggtcgacccacgcgtccggtcaagcgtgaaaagatcaggaggaaccagctgatctaccaggacaagccgcggctcaagactgggttggagatgctcaggaccagcatgtacatagaagacagcttgtcacaggtgacgctgccgttcttcgtcctgcacggcgaggccgacacggtgacggacccggaggtgagccgcgcgctgtacgagcgttcggccagcgcctacaagaccatcaagctgtacccggggatgtggcacggcctcacagccggggagccctacaagatcgtggaggccatcttcttcgacatcttgtccctggctcaaccacccgcagtcggaccttggccctttttggaacgccctttttacctggaaactttgcgccaatgtccgcccaatttcatttaaaggccatggtcccttcttttgagaatatgacccaccaatttgcg

SEQ ID NO: 92162 - DNA, 515 bp, Zea mays
  unsure (1)..(515): unsure at all n locations
nggagacgggttgatgcaacnncgatctganagtagtactcaccggtccggaattcccgggtcgacccacgcgtccgatcgtgtgcacatgcacaaataggtgataaaggcagatgatgttgttggaccagaagtgganaagttggtgtctgcattgccaaacggtaatgttgtgctccttgaaaatgttagattctacaaggaggaagagaagaatgacccagagtttgcaaagaagcttgcctctttagcagatctttatgtgaacgatgcctttggaactgctcacagagcacatgcgtcaactgagggagttaccaagttcttgaagccctcagtcgcagggttccttttgcaaaaggagcttgattaccttgtaggagctgtttcaaaccccaaacgaccatgagctgctattattgggggctccaaagtggtttctaacatcgggtttttggaaccactatgggaaaattgcgaccttcttttttgggggtgggggtaaaaatcccccg

SEQ ID NO: 92163 - DNA, 510 bp, Zea mays
  unsure (1)..(510): unsure at all n locations
tggggagagccgttgagtaactgggtaagcctcngtccgcactgacttaccggtccggaattcccgggtcgacccacgcgtccgggagagggcatgggtcctgtcaaaaagactgccagagccctaggagaatcattgtttgacaaagagcttggaaaaccaattgggcagcttattgtcatttgtggccggaacaaaacgctaagctcctcactgcaggcagttgaatggaaaataccagtaaaggttaggggatttgaaacccaaatggagaagtggatgggagcttgtgattgcattataacaaaagctggaccaggtaccattgctgaagccttgataaggggtcttcctataatccttaatgacttcatacctggacaggaagttggcaacgtaccttatgttgtggacaatggtgcagtgggttctcgaaaaagcccagggaacctgttgctttttgccccctggtttggcccaattttaaggatttggaaaaaatgcccacaa

SEQ ID NO: 92164 - DNA, 515 bp, Zea mays
gagaggtgtcttgatgctagctctgattgcatgactaccgctccggaattcccgggtcgacccacgcgtccgggcacggtctaccggggcacctacgatggacaggacgtcgcagtgaagcttttggattggggagaagatggttttgccacagaggctgaaactgctgctttacgaacatcatttaagacggaggttgctgcttggcataagctcatccaccctaatgttacaaagtttgttggtgcatctatggggaccacagaccttaagattccatcaaacaattccaatggtgctgcacgtacaaatttgccagcaagagcatgttgtgttgggggagagtatcttgctgggaggaacttgaagcaatatttggataaagaatagccgacggaaagcctgcttataaaggtggggtcccaactttgatttggatttgggccaaggatttggccttttggacctccaaaaagattggtccctcgggttttgaaaaaggggaaacctccccg

SEQ ID NO: 92165 - DNA, 525 bp, Zea mays
  unsure (1)..(525): unsure at all n locations
ggagttgtagtntagaggggagggagttatatgggggcgggagaaggtatgctcgtccggtccggaattcccgggcaagtggaaaaccctcaagaaccggaggctacaaaactggggtactctttgtcttcttcgcacttggtggttttggcttggagattgctttagcttcctcctttccttgacacggtgtcggattgagcaggaggagtggtgcatgagaaggggctcctgccgcaggccttgccttcatggctaacaaggataaccgacagaatctgccagtggactggtttatttccttctgcaatcaatcacgtgctgataaatgagtatcatccctacccaaagggatcatgccacaccaagatggtcctgcctactaccctgtcgttgctatcatatctcttgcttcacctgtcgtgattaatttcacaccccatcaaaagcttaaagagcagcaggacactgatccacaggacttactggcccatgagttgccttcgccagctgagacagagaacc

SEQ ID NO: 92166 - DNA, 532 bp, Zea mays
  unsure (1)..(532): unsure at all n locations
gtgttatggagtttngagtntgaaagggtttgttattgtggaggggggggaaagtattgctctaccggtccggaattcccgggtcgacccacgcgtccggaatcgtctgccaactacgcaggccgtggtggtcgtggtgaccgcggcagggggcgtggtgcccgtggccgctggcgcggccgtgctggaccttcgtcccgcatcagcgacaatcgtggtcgtggctcaaacgcacgaccgccctgccagatctgtggcaaggagggtcataccgccatccgttgctggcacaggaatgacgacagctacaacactgatcctcccatggtggcaatggcggccacctcctcgaccaaaattgatccaaattggtacgtcgacacgggagcaacagatcacatcactagtgatctcgatcgactgatgcttcgtgaacgctatcatggtggtgagcaagtccaagtcggcaatggtgcaggaccgtcagacgaagagaaagctcctggaaggacaatctaagaacggcctctac

SEQ ID NO: 92167 - DNA, 527 bp, Zea mays
  unsure (1)..(527): unsure at all n locations
gtgttnagagtnnaaggggtgagggtttttattgggggtggggagagggtatgctgtaccggtccggaattcccggggctcttggaagcatgttcttgggtacattctggttagggagaagaatggttctcgggtgattgccgggccaggcgcatagcatcattatcacctcaaatggagatgtatattcgtttggagcaaactgctccggtcagcttggccttggggattcagaagaccggttcaagccatgtgttattaggtctctacaaggcatcagaatcacacaagctgcagttggttcgagatgcacaatgcttgtgagtgacacaggaagcgtctactcatttgggaaggaggatttcagggtcgcagaactagttgacggtgctcattttcagatcacaactcctaggattgaggagtcactgaaaggtgtgtttgtagttcaagcagccatagggggttacttctctgcagttctgtccagagagggtcgagtgtacaccttctcatggggcaaagcc

SEQ ID NO: 92168 - DNA, 525 bp, Zea mays
tgaaagcctgactgctagtgcctaagctaagcatgtactattctcgatcttgaattcccaggtacacctacgcttacatgaaacgaccataaaacttcaaatttttgattctgctatccaagagcacttcatcacaaggactggcatcttctaccgtggagctgatggaatcattattgtatatgacgtgacagaccaataaagctttaataatgtgaagcaatgattgaacgagatagacccttatgcaagtgataatgttaacaaactccttgttgagaacaagaatgaccttactgccatcaaagttgttgcaactgatacagcaaatgcctttgcttattaaatagtcattaccattaattgaaacaaattccaaaatagccattaacagtgaaactaacctttatagcttttgctttctacctttaaagatttaatatttgcaaccaaccaatccttttcccatctctatattccaatatacccttccaatattcctagttcataccctttaaaaaaatg

SEQ ID NO: 92169 - DNA, 514 bp, Zea mays
  unsure (1)..(514): unsure at all n locations
aggaaagctttcgagtccacgaataagcaagtattcgtatgactcactggtccggaattcccgggtcgacccacgcgtccggcgccatgacccccacaagcttctggaaggatgccttattgctggagttggaatgagggcatgagctgcttacatctacattagaggtgaatacgtgaatgagcgtctcaaccttgagaaagctcggcaggaagcgtatgcagctggacttctgggtaagaatgctngtggctctggttatgattntgatgtgcatattcattttggtgcctgtgcgtacatctgtggggaagagacccgcctactagagagcctgaaaggaaacagggcaaacctaagctgaagccacttttccagccaatggctggctctaacggttgcccacaagggcgactattgaaaaactggggctttttccccaaatatttttagccggcggcaaagaatgtttaagaattttgcgccgaaaaaaccttttaagcaccctattttt

SEQ ID NO: 92170 - DNA, 511 bp, Zea mays
agagaagggtctctgatgcctagcctgattgtcatgacaaccgctccggaattcccgggtcgacccacgcgtccggcaagatgggaagaccataaaacttcaaatttgggatactgctgggcaagagcgcttcaggacagtcactagcagctactaccgcggagctcatggaatcattattgtatatgacgtgacagaccaagaaagcttcaataatgtgaagcaatggttgaacgagatagaccgttatgcaagtgataatgttaacaagctccttgttgggaacaagagtgaccttactgccaacaaagttgtggcaactgagacagcaaaggcgtttgctgatgagatgggcatcccattcatggagaccagtgccaaaaacgccatcaacgtggaacaagcccttatgggttatggctggatcccttaagggtaggattgcccagccaacaagccggggccaaggaagggccatgacccgggaaatccggggggaaacccgtaaaaa

SEQ ID NO: 92171 - DNA, 514 bp, Zea mays
ggggagaaaagtgtttggttgtggggggggggagaggtatgctgtaccggtccggaattcccgggtcgacaggcctgagcccccaatatcaaaggaaatgatagcattgaaagactcggggatatctaacagcaatacctgatcactacttcgcaattttgtggggcgcattttaggacctagaggtaattctctaaagcgagtagaagcatccactgggtgtcgtgttttcattagaggaaagggctccatcaaagattcagggaaggaggacaaactacggggaaaaccgggctatgagcacctgagtgatccgctgcatatcttgatagaggccgagttccctgccagtatcatcgatgcaaggctgagacaagcacaggagattatagaagaattgcttaaaccagtggacgagtcccaagatctctacaaaaggcagcagctcagggagctggcaatgctgaactcaaccctgagagaggacagccctcatccggggagtgtctctcca

SEQ ID NO: 92172 - DNA, 523 bp, Zea mays
  unsure (1)..(523): unsure at all n locations
gtaagtnntntgnccatgagtatcgagacgtacagtatgactcaccggtccggaattcccggggtggatcactggtattattaagaggccaaagatttctggagcacagcttgtagccatcctacctctggctattgttcagagctatgggcaatctcttcaccaacatgagccttgggaaagttgcagtgtcatttacgcacaccatcaaggctatggagcctttcttttctgttattctttctgcaattttccttggcgagctacctactatttgggtagtatcttctcttcttccaattgttggtggtgttgcattggcatctcttactgaggcatcctttaactggggctgcttttggagtgcaatggcttcaaaagttacctttaaatcccgatatgtattgancaaagaagctcatggttataaaaagagaattctttggaacactttaaatcttttcttttaatataacgggtgattgaaattttcccttttgggcccgttaaacaccttttataa

SEQ ID NO: 92173 - DNA, 518 bp, Zea mays
  unsure (1)..(518): unsure at all n locations
gaggacgtggtctagagttccagctcgtatcgtagtcgtaaccgctcctgaattcccgggtcgacccacgcgtccgcgacgtggtggacaagtgctccgccgactgccaggactgcgaggcgtcgccggccggcgacggcgtcgtgggcggagactttatcttaagcctgaccgagcccccggtctgcacaccgaggccgtgggactgctgcgacagcgtggcctgcacaagggactacatncccaactgcatgtgcctggacaaagtggagtcgtgctcgagcaactgcgaacggtgcgaagttctggatcattcggacccttctcggtttcaatggcgagacatcttccacggctatcctgggcccaagtgcaggacatggatcagtacgagcaactagcttaaggtcagctactttggttaaaataacgtatcgcaaaggcgcgccgggtacttggtaagataacgtaccgtcacaaattaaaattaaaaggggttttcggacaaaagctaaaat

SEQ ID NO: 92174 - DNA, 553 bp, Zea mays
  unsure (1)..(553): unsure at all n locations
atgaagggnnnttanttacagagnngcgttgcagngcattttctaccggtctggaattccaggagtcgatcactgatattattaagaggcccaagatctctggagcacagcttgcagccatcctacctctggctattgctcatgctatgggcaatctcttcaccaacatgagccttgagaaagttgcagtgtcatttacgcacaccatcaaggctattgtaacctatcttttcggttattcatttttacaaattttccttggccaactacccaaccaatatggttagtacttttcattctttccaatcagtgggggaatttcaattttgcatcctttaatttagggcatcctaaaacctaggcttggcttttttaattccaattggttttaaaattttactcttaaatatccccaaaattttttttacacaaaaaaccatattgttttaaaaaaaagaaacatttttaaaaacccctaaattgttcattttataatttaaaaaaaagggacatattttctattttttctcccccttaaaaacaaatatataaa

SEQ ID NO: 92175 - DNA, 514 bp, Zea mays
  unsure (1)..(514): unsure at all n locations
ggaaggggnnngaaggtgattaagtaggggggagagagtaatgctgtaccggttcggaattcccgggtcgacccacgcgtccgctcgccttccgaggaaactcaccagcccaccacagacccgagcggaagaagccatgtccgggcgcggtaagggtggcaaggggctcggcaagggcggcgcgaagcgtcaccggaaggtgctgcgcgacaacatccagggcatcaccaagccggcgatccggcggctggcgaggaggggcggcgtcaagcgcatctcggggctcatctacgaggagacccgcggcgtgctcaagatcttcctcgagaacgtcatccgcgacgccgtcacctacactgagcacgcccgccgcaagaccgtcaccgccatggacgtcgtctacgcgctcaagcgccagggccgcaccctctacggcttcggcggctaagctgatgggctcctcgcgatgttcctcccttctgcaaatgcgacgttttcttgccgtgcccacaat

SEQ ID NO: 92176 - DNA, 532 bp, Zea mays
  unsure (1)..(532): unsure at all n locations
agttaaggggcgagtgggttgttgtgtcgttgctaccagcaccgatcgnaccggccggaattcccgggtcgacccacgcgtccgcaacggtatcgacggcaatccaatcctaccatggctcaagacattctccaacggcactccatcgagggaaacggccgttgctcccaccgctgctgatccacggcggctcaatcagcgctccggtaacccctcctctaagctcgccgtctgcccggacgccccggatgaagacggactgggacgaagcggccgtccagcctccatggcacggcgcaagcagccccacgatagtgaactccacgccgcccagccccggtcggcccatcgcgcctgacccggcatggctcgccggcatccagatctcgtccaccagtccaaactccccgacattcagcctcgtctccaccaacccgttcggcgtcttcaaggagtccatcccggtcggcggcggcgactcgtcgatgaggatgtgcacgccggggcagagcggcgcctgctcccccgcgat

SEQ ID NO: 92177 - DNA, 520 bp, Zea mays
  unsure (1)..(520): unsure at all n locations
agttagtacaggtgttnttttacgattacagatacgtgcgaccggtccggaattcccgggtcgacccacgcgtccgctcggcgctccctcttctgactccttcgaggtactcccatcgctatcgaccgggtcctcgagcgcgggagatggcggatcaggagaccccagttgcagttgaggcccctaccccggtccttggggagccgatggacctgatgactgctctgcagcttgtcatgaagaagtcgggtgctcatgatggccttgttaagggtcttcgtgaggctgccaaagccattgagaagcatgctgctcagctttgcgtgcttgcggaggactgtgaccagcctgattatgtcaagctggtgaaggctctttgctctgagcacaacgttcacctggttactgtgcctagcgctaaaactcttggcgaatggtctgggctttgcaagattgattctgagggcaaggcgaggaaggttgtgggttgctcctgtgttgtcgtcaaggactatggcga

SEQ ID NO: 92178 - DNA, 531 bp, Zea mays
  unsure (1)..(531): unsure at all n locations
aggttagggagtgnngttttacgtctgagnctacaganacctccgcatgccctaccggtccggaattcccgggtcgacccacgcgtccggagcaaatttgcggcgtgtatctagcattgaagctcttcattcagcaactaaggcgcttccacgagactttgttaggttagatcaagacattttatcccctcgagcgggaaagaaggagctgtacacataccagacacttgatttctgggaacagatcaaaaccccagggatgtctttgagatgctctgggttatatctctctcagtttcgccatacctctcctcatcttttagcctcaggagatggcaaaagaactgccactattgttggcgatgtctatatccatccatctgccaaggtgcatcctacttcaaagattggcccaaatgtctctatatcagcaaatgcacgcgttggagctggtgccaggcttatcaattgcataattctggatgatgttgaaattatggaaaatgctgttgttatacattcaattgtagn

SEQ ID NO: 92179 - DNA, 536 bp, Zea mays
  unsure (1)..(536): unsure at all n locations
agtttagtnccagaggcttctgctgacctgaagcanccgcacatganctgtactgacataccggtccggaattcccgggtcgagccacgcgtccggcgcgctcgtcagcaagccggcgaccagcactagggacgtattcggcgatgggcgcgtgaccaggcgcaagactggtggcaagcccaagccagcggggtccggcagcccctcgtacggagccgaccgaatcctgtacctgtgcccgatgtgcggtcagccaccaagctacctgaccagcgagttccccaggggactacggctgggacaccaaggcgctgtccgccgacccggagactttcgccaagaaccgcgagattgaggccagccactgcctgtggaccatgctaagcgcgctcggttgcatgacaccggagctgctcgtactgaacgtcgtcatgatactctaggccaattggatcaaggccgggtgacagatctttagcgaaagccgacttgactacctaggtgatcctagcctgatccacgcgcatagcatcctg

SEQ ID NO: 92180 - DNA, 530 bp, Zea mays
  unsure (1)..(530): unsure at all n locations
agtgagggcagtgtgttctgtgccagccgcaccgccacncatcgcactgacataccggtccggaattaccgggtcgagccacgcgtccgtctccagatcaaccatggttacataacattattaaggctccacatgtcaattagctgtagaactgtggacgccagacttcaacaattctctctgatgaacaagtccaataagcatgcacttagggtcatagctgagcatctttcactagaatacgctgctgacatataggatatatttgccaagatggatcttaacaaggatcaaatgctcaatttctatgagctgaaccttggtctgcataaatctggtcaccaaatacctcatgcacatgttcaaatactaatggaagctgctgatgctgatggaaaccggtccttggattatggagaatttggtacactatctgtgcatctaacaaagattgtaaatgatcagcatcttcataaagcatatgcatactttgaccggaaccagagtgtgtatattgaaatctatgaact

SEQ ID NO: 92181 - DNA, 513 bp, Zea mays
agtaagggatcagagtataatcacgatacagcatcatgccacggcccggaattcccgggtcgacccacgcgtccgtgctatagcacacaagctgatgtatggagcataggtgtaattgcatatatacttctttggggcaatgggccattttgggcacgcaccgaatctggcgtattccgttcgggtctcaaagccgatcccagttacaatgaggcaccatggccttctctgactccagaagcaatagattttgtcaagcgattgctgtgcaaggatccgcgtacaaggactactgcagctcatgctttaaatcatccatggatcagaaattattatgacattaatctgccgtttgacattcttatattgcgacttatcaaagcttatattcgatactcatatttactgaaagctgctctgagagctctgtcaaagaaccttaaccgtagacgaactattatacctgaaatcacaagggatctctattggaaccaaacatgaatggatgcatca

SEQ ID NO: 92182 - DNA, 522 bp, Zea mays
  unsure (1)..(522): unsure at all n locations
agtnagggtagtgggtacgaatatggaatcttccgccaaatantgttatgctctaccggtccggaattcccgggtcgacccacgcgtccgcccacgcgtccgctcccataagaaaaatcgccaaatacgccattcatcttcttggcccgggtttcagaacgtgcggcagtttagccaggatggtggcgatcgagaaccagaaccagagccaggccgcggtggcggtggcggcggaggcggtgccggcgccggcgccgcggatccccaaggaggcgcggcgcctgctgcacgagctggcggcggcgtgggcggacgtggccgactgccgcgcgctggaggtcgtgccgctcaagggggccatgaccaacgaggtctaccaggcgcgctggctcactgcaggccctgccggccaggaggaggagcccagggcggagagggaggtgaggaaggtgctcgtgcggatttacggcgacggcgtcgacctcttcttcgaccgcgaggacgaggtgcgcaccttcgatn

SEQ ID NO: 92183 - DNA, 527 bp, Zea mays
  unsure (1)..(527): unsure at all n locations
agtgagggcagtgtgtctgatttacgaactagcagatacgatgcaccggtccggaattcccgggtcgacccacgcgtccggaagttttgagggtagagcagttgggtgattacgacgaagagagatgggcctcctcgacaagcggtgggacgacaccgtcgcaggcccgcgcccggacaccgggctcggccgcctccgcaagcagcctgtgcgtcccgccgccgtcaagatcagtgatccggccggggacgctgcggcgttcgtgccgccctcgccggcttcgggtagcgaggagacgccggtgaaggtgacgcgcagcatcatgatcaagcgccccgcggggtacccgtcgtcgccgaggagcgcggcaagcacgccgncggcctcgccactggggactacggccgccatctcgccgtttgccggcgccggtggtcgcttcagaaggaaatcatcgtccgacgcatacgagagggcgaccccaccagggacgaccagccaccctcctcccttcgacgtgtgaactg

SEQ ID NO: 92184 - DNA, 530 bp, Zea mays
agttagttagagtaggttctgtttcacgcactaaaagatatgctccgatacggtccggaattcccgggtcgacccacgcgtccgcgccgggaacgtgaagaaagacgcaagagactaaagagagagcagcaggatgatgggtcaaggctacattcgcagcagattagggttgattatgctcctcaacccaaaaggcatagtcgcatcaaagaggcacctcagggctggttggactgtcctgcatttggggagccaatagataaaatcataccatctaaagttcctctcgatgaaacattcaatgagtcagtgcctcctgggaagcgatactcctcaaagcaactagttaacaaacaaagaaaagctggtcgtgaaataggtctggtgattgatttgacaaataccaccaggtattattcaccagctgaatggacgaagcaaggtactaagtatgcgaagattgcatgcaaggggagagatgcggtacctgacaatgaatctgttaataagtttgtctatgaggcaatgat

SEQ ID NO: 92185 - DNA, 522 bp, Zea mays
  unsure (1)..(522): unsure at all n locations
agtagggccgtggtcttctaccganacccgcatactactgcatgcctctaccggtccggaattcccgggtcgacccacgcgtccgctggaggccggcagggccaacgagtgggtggtgacggcgaagctcggcagcgccatgaagatggaatcggctaacaaagcggggctcaggaagcagttcatgaggatatgggagaggctgcacgtcacggagctcggggtggcagccttcctcttctcctgcggctggtacgatcttgcgtacgggagggaccatttcttcatctacctcttcttccagtctgtcgcgtttttcatcgtcggcgtcggctacgtcggcaccatcgtcccgcagtcgtagcggaagcgtgtccagatcatccgcttctctctggttttcgcattgtgtcttgggtaagtttcgtagtggatgaccggtttgaggtaaagatcatgcatgcggtcctctcttccatcgtctntttttggggaccggccgtgtgtgcttcgtcgaccttc

SEQ ID NO: 92186 - DNA, 537 bp, Zea mays
  unsure (1)..(537): unsure at all n locations
naggtaggtncgagtgtgtctgatcgactgangtcccgccatngatcgcacgtacttaccggtccggaattcccgggtcgacccacgcgtccgctcccataaataaagcagctccttcgggggctgcgaactactcctcgtcgccaaaaccctatcggtgcttctttgccatggcgagcagcgctagccaggctagccttctgctccagaatcagctcaaggatcttgcgaagaaccccgtggatgggttcttcgccgtgcttgtatacgacagcaacatcttcgagtggcaggtcatcatcatcgtaccgcctgacaccctatatgatggaggctacttcaatgcaataatgacctttccccagaactatcccaacagcccgtcatcagtaagatatactcctgagatgtggcatacgaatgcgtatcctgatggacgtgtttgcatttctattcttcatccacctggagaagatcccaatggccatgagcttgcatgcgaacgatggacactagcgtcaaccgatgaaaggatcg

SEQ ID NO: 92187 - DNA, 529 bp, Zea mays
agttaggcgagtggtctgatacaagaacagcagatacgtatgaacggcccggaattcccgggtcgacccacgcgtccgctttgtccgcgtggacgcggctgacttgcgaacccaccggaccaaccaggacttggagcgtgcggcgtcggagttcgccggcggtgaggagcagaagaggaagggaaccaaacaaagatgggctgctccatctcggggctcaacgcgctctacgacgcggccacgggcggcggcgacgtctggatcaacgagcgccgcttccgcgtccttcgccagatcggcgagggcgggttcgccttcgtctacctcgtcagagagcaccagcccgcctccgatgcggcgttcgctaggcgtgaccccgcccacgtctcagaggatggaacgtatgccatgaagaaggtgctgatacagagcaaggagcagttggatctggtgagggaggagatccgtgtgtcgtccttattcaatcaccccaaccttctgccgcttcttgatcatgccataatagccg

SEQ ID NO: 92188 - DNA, 539 bp, Zea mays
  unsure (1)..(539): unsure at all n locations
aggtgagtncaagtgtgttctgatttaacgcanacccgccaattantgtaatgcctgcaccggtccggaattcccgggtcgacccacgcgtccgaaggaaactgcagtgaagtcgccggcgccgccgcgacaggaggaaggagcagcagcggcaggggaggcccggcgatctcttctgttgcgtgcggcgagggagtaaaaggagccgcgacaggatgcactcctttgggcaccgcgccaacgcggtggcaacgttcgcggtcaccatactggccgcgatttgcttcgccgcctccttctccgacaacttcaacaccccgacacccactgcctccgttaagatcttgaatctaaactggttccagaaggaggccaacggcaacgacgaggttagcatgacgctgaacatttcggccgacctttcgtctcttttcacgtggaacacaaaacaggtgtttgtttttgtggcagcagagtatgagactccacagaatgctttgaatcaagtttccctttgngatggcattatacctgcaaag

SEQ ID NO: 92189 - DNA, 543 bp, Zea mays
  unsure (1)..(543): unsure at all n locations
aggtgagggctnaggggttctgctgtatcgtatgaccccgccaaacaatcggtactgactgcaccggtccggaattcccgggtcgacccacgcgtccggctcgaccgcacaactgcaccgaggggggaggagacctaaaaactactacatcttggagctacgcatctagctaaagatcgagaggggtaaataaggacgagtgggcgctagctagaagagcagctgcaggtactaccatcatcgtcgtcgtcgtcgtcgccaggatgaccgtcgtcgacgccgtcgtctcctccaccgataccggcgcccctgccgccgccgccgtaccggcggggaacgggcagaccgtgtgcgtcaccggcgcggccgggtacatcgcctcgtggttggtgaagctgctgctcgagaagggatacactgtgaagggcaccgtgaggaacccagatgacccgaagaacgcgcacctcaaggcgctggacggcgccgncgagcggctgatcctctgcaaggccgatctgctggactacgacgccatctgccgcg

SEQ ID NO: 92190 - DNA, 520 bp, Zea mays
  unsure (1)..(520): unsure at all n locations
atgagagggttctcgagtctgaaacgagcgacggggggaaagaatgtatcggcccggaattcccgggtcgacccacgcgtccggtcacactttacatataattccagattctagacaagtcaatgctgatgagttgcagcctggcgtctgctatttacagatcactgctgttgatcctgtaatggaggatgaggacttgggtagcaggagggaaaggattttttctttatttactggtactgtacgtgcacgtgtttttgaccgttttcttttcgatacaccattcacaaaaaatggaaaaacacaaggtggtctagaagaccagtggaagaggcgtaccgtgctccagacagagggttcctttcctgctttggtgaaccgtctgctagtcaccaaatctgaatctctggagttctctcctgttgagaatgcgattggaatgatcgaaacangaacagctgcattgagaaatgaactagaagaaccacggagttctgaaagtgatcaactcccaaggctt

SEQ ID NO: 92191 - DNA, 514 bp, Zea mays
  unsure (1)..(514): unsure at all n locations
nagaagtnacagtggtcaatacgacatacccgcatatatggtatgctctaccggtccggaattcccgggctgtatcgtccgacgaaggtgcatggtgttggccatgggtcacggcagggaacagagacgagcaggtcggcgctctgcccccagctcattgatcctgtcctcgctataaggtagtcctgcggtggcctccgaatttcactcgatcgaacacgacatgaagcggccacgcggcgccagtccccctctggctgcgatgaccaatccgaacgatgatggttacggcgtggtcgggatggaggcggacgcagacgcggacgcggacgaggagatgatggcgtgcggcggcggcggggagaagaagcggcgcctgagctccgagcaggtgcgcgcgctggagcggagcttcgaggtggagaacaagctggagccggagcgcaaggcgcggctggcgcgcgaacctcgcctgcatccgctccaggtcgccgtctggttccagaaccgccgc

SEQ ID NO: 92192 - DNA, 525 bp, Zea mays
aggtagttggagaggtcatattaccgatcagccgcaaagatacgaacggtccggaattcccgggtcgacccacgcgtccggtacaaacatatatcgtgccctgaagtgccgtgagccagagagtaatgaactcttgtcttacatgaagattgtgtataacatctgtccgtacttgaagtttggctatatggctgccaatggggcaattgcagaggcattaagaaatgaggacaggatccatattattgatttccagattgcccaagggacacagtggataacactgatacaagcgctagctgcaaggcccgggggtccaccacacgtgcggatcactggaatagatgacccagtgtcagagtatgcccgtggtgaaggtctggaccttgtagggaagatgttgaaaagcatgtctgaggaattcaggatacctttggagtttacccctctgcccggtatttatgcaactcaagttacaaaagaaatgctggacattaggtcaggcgaagcacttgctgtcaactt

SEQ ID NO: 92193 - DNA, 530 bp, Zea mays
agttagtcaagtggtctgatatacgattagggggaagtactgaacggtccggaattcccgggtcgacccacgcgtccgaaacggcactgtccccgcaaagaaaagcagacccgtcgccgacgcgtgccttctcgttgagcccgatcttgtgggacgtcaccggattccaaaatccgttaggcaatggcgccccctctgctctcgccaccgatgctccccgacgcgctcgcgacgctgccacggactttcttctgctcccgcccaacgcggcaactgcccaccgtccggctcgccgtagccgtacgtggcgaccggtggagctggagtgcgcggataagggatctcacggtatttgccactttcacggaagcggatcgtgaaagggatgaagaggatgtcgccgacgattactattccgttctgggtgtgatgccagatgcaaccactgaggaaattaagaaggcatactacagttgcatgaaggagtgccaccctgaccttagtggggaccaccctgacgtgacaaactt

SEQ ID NO: 92194 - DNA, 533 bp, Zea mays
aggtaaggccagtggtgctgtgacacgaactagcagctaggtatcaccggtccggaattcccgggtcgacccacgcgtccgagcttcttcactgacctccttgttgtcggcgaaaaccgccaaacttttgatctagaaggtgatagtggaagccttattatcctgactggccaggataatgagaagccgtgtcccattgggataatatggggtggcacagcaaaccgtgggaggctaaagcttaggtgtgaccatggccctgaaaattggaccagtggagttgatcttggccgccttctggatcgtcttgaacttgaccttatcataaccaatgaatcactcaaagatgccgtgcagcagcaaaggctcgcgttggtggctgcagctaactctgctgttggggagtcgtcgacagcagctgttcctgccccagaagaaaaggtggagatcttcgagcctctggggatcaaaatcgagcagttgcctcggcacgatgtttcggcctctacggaaggggatgaggcagctgtgat

SEQ ID NO: 92195 - DNA, 529 bp, Zea mays
  unsure (1)..(529): unsure at all n locations
agttagtnaaagaggctcgtgtgactgaggacccgacacatgactgcactgacgtaccggtccggaattcccgggtcgacccacgcgtccgcggagggcttccgctcgctcgcggagggcgaggaggtggagttttccgtctcggagggtgacgggggccgcactaaggccgtcgacgtgaccggccccgacggatccttcgtcaggggcggcggaggcggaggaggaggcggcggcggctacggctcccgcggcggtggcggatctggcggcggcggtcgcagctactgtggtagctggggcggcggccggagatccggcggcggtggcggtcccggcgcgtgctacaagtgcggcgagcccggccacatggcaagggactgccctagcgccgacggcggaggcggctatggcggatgcggctacggtggcggcggctacggaggacgaggaggaggcggtggctgcttcaagtgcggcgagcctggccacatggccagggactgctccagcggcggccgcgggtacc

SEQ ID NO: 92196 - DNA, 539 bp, Zea mays
  unsure (1)..(539): unsure at all n locations
agttaaggccagaggtctgattacgatntacccgcaaaggatagtactgcctgcaccggtccggaattcccgggtcgacccacgcgtccgaacggtcgacatggctcgcacgcaatctgccgtagcggtcgccgtggtggccgcggggctgcggctggcagcggcggcgacgacctcggaggccgccatcacctgcgggcaggtgagctccgccatcgcgccctgcctctcctacgcccgcggcacggggtccggcccctccgcgtcctgctgtagcggcgtcaggaacctcaagagcgccgccagcaccgccgccgacaggcgcgccgcctgcaactgcctcaagaacgccgccaggggcgtcagcggcctcaacgccggcaacgccgtcagcatcccctccaagtgcggcgtcagcatcccctacaccatcagcacctccaccgactgctccagggtgaactaaaacctagaccacgcgcgacgacggccgcctgatcgatcgaccaaccattccgncgtcgccgccggccggatca

SEQ ID NO: 92197 - DNA, 526 bp, Zea mays
  unsure (1)..(526): unsure at all n locations
agggtagttccagtgggtctnattaccgattaccgatcactagcgaacggtccggaattcccgggtcgacccacgcgtccgacgtcctcctcttgtgatcggcaatcttggcaccaccacggcctttcgctcaaggagccagccgtgtgccggccgaccagcccagaggcgtcgaggccgcggctattgacagttaggtccgggtcggagccagccgtcgaggcccgatgggcagcaggacgacgctgcccctattaataaagccgccatgcgtgtgcccggcactgcacaacatccatcgtccatcgacccacccaacctgctgctccggcccgcgcttcgcctgggtaccggcgtccgccgcgccccgtaccgtctcgtccaggaacaggaagagcagtaacccatgcacccattcatcggggatcaccaggggtcaggggagcaagatgtcgactgccaccgtcccaagattgcccgctcccagatccggggcaagctatcactatcagacgaccggggctcc

SEQ ID NO: 92198 - DNA, 531 bp, Zea mays
  unsure (1)..(531): unsure at all n locations
agttagtcgtagtgtctgtgnccgggctgcagctccattgcacttcctgaattcccgggtcgagccacgcgtccgacgtcctcctcttgtgatcggcaatcttggcaccaccacggactttcgctcaaggagccagccgtgtgccggtcgaccatgccagaggcgtcgaggccgcggctattgacagttatgtcgtgatctgagccatccgtctaggcccgattggcagcaggactacgcttcccctatttataaagccgccatgcgtgtgcccggcactgtacaacatgcatcgtgcatcgacccacccaacctcatcctccggccctcgcttaacatgggtaccggcgtcctccgcgccctgtaccgtgtcgtccaggaacatgaagagcactaacccatccacccattcatctaagatcaccaacggtcaagggatcaagatgtcaactgtcaccgctccaagattggccgctaccaaattcgtggcaagctatcactattagacgaccgtaggttcggcggacaact

SEQ ID NO: 92199 - DNA, 529 bp, Zea mays
  unsure (1)..(529): unsure at all n locations
aggtagttgcgctgtcgtctttgnccccnttccagtnnngctagtacagacctaccttacctgaactagccggtcgagccacgcttgcgctctacaaactccggctcaaactttcgccctagccctacagatcttcaattccccagggcgccggccgatctaccttgacgcgcaggctcggtctcttcctaaagcgtcgcgctcggttgtttgacaggagaggaggaagattagggagtgcatctacgtccacatcgttcatgccggcatccaagtcggcaacgcgtgctgggaactttactgcctcgagcacggcatccagcctgatggccaagtgcctggagataagaccgccggacatcacgatgatgccttcagcaccttcttcagccagactggtgctggaaagcacgttccccgtgcaatcttcgttgatctataacccactgtgatcgatgacgtgcgcactgtcacgtaccgccagctctttcaaccttgacagctcatcagtgtcaaggaggatgccctt

SEQ ID NO: 92200 - DNA, 535 bp, Zea mays
aggtaggcctaggtgtgtagtctacgattagcagataccgtcgcaccggtccggaattcccgggtcgacccacgcgtccgagttcatcactgataccaaggccgctattgctgaaacttacaaccgcacagattcagaatttctgaaagctgatagcactcaaactcgagatgctggctcaactgcctcaacagctattattgtaggtgatcgtttgcttgttgcaaatgttggagattctagagctgttatttctaaaggagggcaggcgattgcggtttcaagggatcacaaacctgatcagacagatgagaggcaaagaattgaggatgcagggggctttgttatgtgggctgggacatggagagtgggtggcgttctcgctgtctctcgagcatttggtgataaactcttgaagccgtatgttgttgctgaccctgaaatcaaggaagaggtggtcgacagctccctcgaattcctcatccttgctagcgacggactctgggatgttgtcactaatgaggaagctgttgcc

SEQ ID NO: 92201 - DNA, 534 bp, Zea mays
  unsure (1)..(534): unsure at all n locations
ggttagttttcagagagtctcgtgctgattgatagaccagcatcatcntcgcatgccctaccggtccggaattcccgggtcgacccacgcgtccgcttcacaaacgccggcgcaaactctcgcccgagcccgacagatcttcaattccccattgcgccggccgatcgaccttcacgccagtctcggtctcttccgaaggcgtcgcgcgcggttgtttgagaggagaggaggaagatgagggagtgcatctccgtccacatcgggcaggccggcatccaagtcggcaacgcgtgctgggaactttactgcctcgagcacggcatccagcctgatggccaagtgcctggagataagaccgcgggacatcacgatgatgccttcagcaccttcttcagccagactggtgctgggaagcacgttccccgtgcaatcttcgctgatctagaacccactgtgatcgatgaggtgcgcactggcacgtaccgccagctcttccaccctgagcagctcatcagtggcaaggaggatgccgct

SEQ ID NO: 92202 - DNA, 534 bp, Zea mays
  unsure (1)..(534): unsure at all n locations
agttagtttaagtgtctgctgactgantttacgnnaccatacnatcgatcttccattctggaacgagcccatcgggcgagttcatcactgataccaaggccgctattgcttaaacttacaaccgcacagattcagaatttctgaaagcggatagcactcaaactcgagatgctggctcaactgcctcaacagctattattgtaggtgatcgtttgcttgttgcaaatgttggagattctagagctgatatttctaaaggagggcaggcgattgcggtttcaagggatcacaaacctgatcagacagatgagaggcaaagaattgaggatgcacggggctttgttatgtgggctgggacatggagagtgggtggcgttctcgctgtctctcgagcatttggtgataaactcttgaagccgtatgttgttgctgaccctgaaatcaaagaggaggtggtcgacagcttcctcgaattcctcatacttgctagcgacggactcttggatgttgtcactaatgaggaaacctgtgcct

SEQ ID NO: 92203 - DNA, 523 bp, Zea mays
  unsure (1)..(523): unsure at all n locations
naggggagtnttcagaggtntaataaagacatatgtgggggaggaagagctagcttgtaccggtccggaattcccgggtgttcgtttgcggatgatagtaatgtttattactgtgtgggaactgcatatgttatacctgaagaaaatgaaccgagcgaaggccggattcttgtatttgcagttgaagatggaagcttgcaattgatcgtggagaaagaaaccaaaggagcagtttattcgctgaatgcattcaatgggaaattgttggctgctatcaaccagaagattcaattgtataagtggatgtcacgcgaggatggttcacatgagctgcagtctgagtgtggccaccatgggcacatacttgccttgtatactcaaacacgtggtgacttcattgtggttggcgatctgatgaaatcaatatccttgctggtgtataagcatgaggaaagcgcgattgaagagcgtgctagggattacaatgcaaactggatgactgcagttgagatgcttgatgatt

SEQ ID NO: 92204 - DNA, 519 bp, Zea mays
  unsure (1)..(519): unsure at all n locations
aggtagttnancagagagtatgagaccagcatagcagctatgctgctccggcccggaattcccgggatccacactaacgaacgaactcttgctccgatcacgagctagctgaggtcgacgatggcggctgtgctgaacagcgggaagacgccgcaggcggtggtggccgtgctggtggcggcggcgctgctggcttcgtccgcttcggcggcgatcacctgcgggcaggtggggtcgtcgctggcgccgtgcatcccgtacgcgacggggagggccagcgcgctccccgcgtcgtgctgcagcggcgtcaagagcctcaacagcgcggcgcggaccagcgcggaccgccaggcggcgtgccgctgcctcaagagcctcgccaacagcgtcaagagcgtcaacatgggcaccgtcgccaccatccccggcaagtgcggcgtctccgtcggattccccatcagcatgtccaccgactgcaacaagatcagctaagttacgacgaccaagctaataagccta

SEQ ID NO: 92205 - DNA, 541 bp, Zea mays
  unsure (1)..(541): unsure at all n locations
agttcttttggcgggctctgactgctgcngctccggagcccttcgcactgacgtaccggtccggaattcccgggtcggcccacgcgtccgcgggttcgtgaggttctccggggttcggtttcgtgggtgagcggatcgagatggcggcgtcggatgttgagtaccgctgctgcgtcggcggcctcgcctgggccacggacgaccactccctccacaacgccttcagcacctacggcgaggtcctcgagtccaagatcatcctcgatcgggagacgcagaggtcccgcggcttcggcttcgtcaccttctccacggaggatgcgatgcggaacgccatcgagggcatgaacggcaaggagctggacggccgcaacatcaccgtcaacgaggcccagtcccgcggcggccgtggaggcggcggcggcggcggtaacggtggtggccgtggagccggcggttacggcgttggcggccgcgttaatggcggcggcggttacggcgttgccggcggctacgttgttgccggtgcgggttcgttgtt

SEQ ID NO: 92206 - DNA, 515 bp, Zea mays
  unsure (1)..(515): unsure at all n locations
nagttaggggnccagaggtctgatacaagcaatccgaaaaaatttatcggcccggaattcccgggtcgacccacgcgtacggaaaaacttggagctggctctgatggaagggtgtcttctgcagtacttaaggatggatctgtagttgaagctgatacagtaattgttggtataggagcaaaaccagttgtcagcccgtttgaagctgttggagttaaccctaaagttggtggaatagaggttgattccttgttcagaactagtgtacctggcatctttgcaattggagatgtagcagcgttccccctgaagatgtacaatagaattgctcgagtggaacatgtggatcatgctcggaagtccgcacaccactgtgtagagacgctcctaacattccagacaaaagcgtatgactaccttccatacttctactcgagggtttttgagtacgatggaagttcgaggaaagtctggtggcagttttatggcgacaatgtcngcgaagcagtcgaagt

SEQ ID NO: 92207 - DNA, 514 bp, Zea mays
  unsure (1)..(514): unsure at all n locations
aggtagtnnnaagagtcgtcaacgcggaagggggaaagtttgtaacggcccggaattcccgggtcgacccacgcgtccggctcgatcctagcttctcttccaagaagcgcagcgcccatggccatggccacgcaagccggcgccggcacgcgccacctgctggccgccgcctgggcgccggcggcgaagccgcggcagctgagctcgcagctcgcgctgccgtcgtcgtcctcccgcgggccggccccgctccgcgcgtccaccgaggaggcggtggaggcgcctaaggggttcgtggccccgcagctggaccccagcacgccgtccccgatcttcggcggcagcacgggcgggctgctccgcaaggcgcaggtggaggagttctacgtcatcacgtggacgtcccccaaggagcaggtgttcgagatgcccaccggcggcgccgccatcatgcgggagggccccaacctcttgaagctggcgcgcaaggagcagtgcctggcgctcggcacaa

SEQ ID NO: 92208 - DNA, 528 bp, Zea mays
  unsure (1)..(528): unsure at all n locations
gggtagtnncgagtgggtcgtgtgactgaagtacagactcagtccgaacggtcgggaattcccgggtcgacccacgcgtgcgcagagaaactctttgttctgttagacatgtacgagataatgtgcgagcttcaaacagagattgataccatggtcgttggagaatcaggttcgcaaatgcgcgactctgcactgagtttaacaaaatgcttagcacaaacagcacaaaagactttcagtgattttgaagaagctgttgaaaaggatgcaacaaagaatattcatactgatggaacagttcatcctttaacaagctatgtgatcaactatgttaagtttttgtttgactaccagtcaactctaaagcagcttttccaggagttcaaggaagatgggacaggttctgagctggcagctgtaacaatgaaaatcatgcaagccttacaaaataatttagaagcaaaagcaaaacaatacaaggatcctgcattgatgcacatatttttgatgaataacattcactatatn

SEQ ID NO: 92209 - DNA, 527 bp, Zea mays
agtttagggccccgtgtgtcttgctaaagcactagcgcgtattatgcaccggtccggaattcccgggctcagaaggcaagaagtttgctctgcatcttgttccatctggtattctccatgaagggacactgtgtgttgttggcaatggagcagtcatccatgttccagggttctttggagaaattgatggtcttgagtccaatggagtccgctgcggtggaaggatactggtatccgaccgggcacatctgctgtttgatctgcaccaggctgtggatggacttagggaagcagagcttgaaaattcatttatagggacaactaagagaggcattggtccttgttactccagcaaggtaactcgaaatggactgcgggtttgtgatttacgacacatggacacttttggggataagcttgacatcttattcaaagacgctgcttcgagatttcaaggctttcagtacagcaaaagcttgctcaaggaagaagttgagagatacaagaagtttgctgatcgcttggag

SEQ ID NO: 92210 - DNA, 540 bp, Zea mays
  unsure (1)..(540): unsure at all n locations
aggtgaggcgagtgggtctgttgttcgttgnttcaaaantccagtacggtnctggaattcccgggctcagaaggccggacgtttgctctgcatcttgttccatctggtattctccatgaagggacactgtgtgttgttggcaagggagcaggcatccatgttccagggttctttggagaaattgatggtcttgagtccaatggagtccgctgcggtggaaggatactggtatccgaccgggcacatctgctgtttgatctgcaccacgctgtggatggacttatggaagcagagcttgaaaattcatttatagggacaactaagagaggcattggtccttgttactccagcaaggtaactcgaaatggactgcgggtttgtgattcacgacacatggacacttttggggataagcttgacatcttattcaaagacgctgcttcgagatttcaaggctttcagtacagcacaagcttgctcaacgaagaggttgagagattcaagaagtttgctgatcgcttgggacccttcatttgtgac

SEQ ID NO: 92211 - DNA, 545 bp, Zea mays
  unsure (1)..(545): unsure at all n locations
agttagtggcgaggggtcttgtgttcggtactctacgctcgtaccgtcacgacctaccggtccggaattcccgggtcggcccacgcgtccgcttcggggttatctgtcagcctctcacacagttattgaagaaaggtgtgcacttcagttgnacgtctgaacatgacaccggcttttccaccctcaagcaagctcttacgtcggctcctgtgttatcattaccagattttgcttatcccttcacagtggaaacggacgccagtgcagtcggtattggagctgtattgatgcagcatgggcacccagttgcattcctcagcaaggctttgggccctaagacccgtggtctctccacttatgaaaaggaatacatggcgattattgtcgcagtccagcagtgacgttcctacctncaacatggcgaattcacaatcctnacggaccacaaaaggcctactgaactgaacgagcagcgcctgcacacgccctggcacacataatctttaccaaacttttgggcttggattaccgcatccaattcagaa

SEQ ID NO: 92212 - DNA, 513 bp, Zea mays
  unsure (1)..(513): unsure at all n locations
aggaagggncagagtatgatcaaagccacacgacttggctgtcacggcacggaattcccgggtcgacccacgcgtccgccgggctgatcgcatggttatgcttgcgaaagcactagagtatgcagattttaacaacttggaccgtgtacgtgtccccaaaattcgatatgctgggatgcttcagtatgatggtgagttgaagcttccaagtcgctaccttgtttccccaccagagatagatagaacatctggggagtacttggtgaagaatggcatccgcacctttgcttgcagtgagacagtgaaatttggccatgtcacatttttctggaacggcaaccgctcgggatactttgatgaaactaaggaagagtatgtagaagttcctagtgacagtggtattacattcaatgttgcacccaagatgaaggcgcttcaaattgctgagaaagctagggacgctctcctaagtggaaagcttgaccaggtacgtgtcaacctgccaaatggtga

SEQ ID NO: 92213 - DNA, 547 bp, Zea mays
  unsure (1)..(547): unsure at all n locations
aggtagtngcgagtggtttctgtgtcacgcttacacgccatcgatcgcaccggccggaattcccgggtcgacccacgcgtccgctggtctttgagtcgtcaacctatgggaaagtccttgtgcttgatggtattgttcaattgactggtaatgaggaatgtgcgtaccacgaaatgattactcacctcccactctgtgcaattccatcccctaaaaaggttgtggttattgatggtggtgatggaggtgtacttctagagatttccagacacagttcaatggactctattgacatatgtgtaattgatcagctggatattgatatctgcaaggaatacttcccacattaggctgatggatttgaagatgctcgtggtcaacttcatgttggtgactctgtggagttcttgataaatgcttctgaagggacatatgatgctatcaatgctgatttatctgacccaataggtcctgctcatgaacatgtggagaatcctctttttgagaccatcgcttgagctatgaggcctggtggggttctttttac

SEQ ID NO: 92214 - DNA, 526 bp, Zea mays
agttagattgagaggctctgcgctgaagacccgcatatatctcactgactaccggtccggaattcccgggtcgacccacgcgtccggagcttgtctctgatgacgagtggcttaatggtgaattcatcacaactgtccaacagcgtggtgctgcaatcattaaagcgagaaagttctccagtgctctctcggctgctagctctgcttgtgaccacattcgtgattgggttcttggaacacctgagggtacatttgtttccatgggtgtgtactctgatggttcatacggtgttccttctggactcatttattcattcccagtaacatgcagtggtggtgaatggaaaatcgttcaaggcctcccgattgatgagttctcaaggaagaagatggatgccactgcccaagagctgacggaggagaagacgcttgcttactcatgcctcgagtaaattctaccacacccagagagcaattgccaccccaatgttttgaataaaaaaagaaactccaactcgattcatag

SEQ ID NO: 92215 - DNA, 532 bp, Zea mays
  unsure (1)..(532): unsure at all n locations
agtntagtggcgagaggcttctgtgtcagtncacacggcattanctcactgacaaccggtccggaattaccgggtcgagccacgcgtccgcgcagagaatccccaagcaaacatacagggtctaaggagaggacaggagaggagaggagatgtggggtctttgacaccatggctaccgtgcaaatgttctgggtcgtgatgttataaaacgtgacgaggttcgcaacgacactggtagaggctggctacaactactagatcgtgcccatgaacttcggcaccgacaagcacaacatcaccctgcatctagatctcgacccggatcgtaatgttccagatatgcatgattatgactgggccctttttgaatcactatcaatttgaacggacgctgattgcataaacaagcccaagcttattatggaacgaaaccttgacgacgctagaacgtgggatctgaagatctatggctgaggctaatcagcacatcgatactctgcattgcaacactttacccgtctcttatacgtcg

SEQ ID NO: 92216 - DNA, 552 bp, Zea mays
  unsure (1)..(552): unsure at all n locations
agtagtggcgcggggttctaccgactgaggctatccgcacangtacgtactgacgtaccggtccggaattcccgggtcgacccacgcgtccggactaatacaactcaaccatggaaggcctcagccacttcagtatgctgtcaacgcagctttccgtgcttctctatacagcgactatcttgaagctgcagacacgcctgggtggtactgcggacctaacttctacaccacagaagtcctccgcaagtttgccaggtcacagctcgactacatccttggcaagaacccattgaagatgagctacgttgtgggtttcggaaacaagtacccgaagcgccctcatcacagaggcgcgtcgatacctcacaacggcgtcaagtatgggtgcaaaggaggttacaagtggagggcccaaaaaaggcaaaccctaacatccttgtcggagcaatggtggctggccccgacaggcgcgatggctacaaagatgtccgcacgaactacaactacaccgagcctactctcgcagcgaatgctggtcctggttgcagcgct

SEQ ID NO: 92217 - DNA, 514 bp, Zea mays
agggagggacagggtatgataaagcatagcagatatgttgcaacggcccggaattcccgggtcgacccacgcgtccgaaactgcttgaactggaagcgaccctagtccaaaccaccgcaccgacaccgactccgagcgccgccgggccgcgctacctccgctcctctcttcgcccctgccggcgtcgaggccgaagcgaaggcgagcatgcatcacgaccccaaccccttcgacgagggcagcgccgaggacaaccccttctcaaatggaggagccggaggcggcaagcagcagtacggcttccggccgactgagcccgtcgggttcggcggcgctagcaggggcgacgccgtcgttgacgtcccgctcgagaccatgggggactctcggagcaaggtgaaggagctctcgtcgtgggaatcagatctgaagcggcgagaggcggatatcaagaggaaggaagaggcgctgaagaatgctggcgtgccaatggaggagaagaactggccaccat

SEQ ID NO: 92218 - DNA, 517 bp, Zea mays
  unsure (1)..(517): unsure at all n locations
agtaaggnttcagagtttgaaacacgacatgaagctatgaatgcaccggcccggaattcccgggtcgacccacgcgtccgctccatcttccacaacgaggagaagctccgcgaggctctcaagttctccaacgcctgcggcgccatgtgcaccaccaagaagggcgccatcccggcgctgcccacggtcgccaccgcccaggacctcatcgccaaggccaactagatggccgcacgccccgccgttccaccacgtcactgtcccccgccgccccgcccctcgtcgtcgacgtcctcggtttcggttcattaggtagatcgagtcttaccgtccgttttttggctcttaccctagaacggttggtttgggtaaataaagtaagcttccgtgagaattctcccccgggccttcaataaaaggtggccatccgtgggggaagccataccttttttatattatattatattatatttatagctggaaccanttggggtttaaaacatcgctagtcccgtgt

SEQ ID NO: 92219 - DNA, 514 bp, Zea mays
  unsure (1)..(514): unsure at all n locations
ngaggaggagagtggtctgttcagaggaggggaggggacagtagtcgtctccgaatttccgggtcgacccacgcgtccggctacgctaaagcaagtctagtctctagaggaggaggcggagggggaggccatgggcagggacgacgtggtccagagcggcgcgggcggcggcgagttcgccgccaaggactacacggacccgccgccggcgccgctggtggacgcggcggagctgggttcgtggtcgctgtaccgcgcggtgatcgcggagttcatcgcgacgctgctgttcctgtacgtgacggtggcgacggtgatcgggtacaagcaccagacggacgcgtctgcgtcgggggccggggcggacgcggcgtgcggcggcgtgggcgtgctgggcatcgcgtgggccttcggcggcatgatcttcgtgctggtctactgcaccgacggcatctcggggggccacatcaacccggccgtcaccttcggcctcttcctggcgcgcaaggtgtcn

SEQ ID NO: 92220 - DNA, 523 bp, Zea mays
gaggaggagaggttctgttaaagacacgcgggggcgaagagtagtcttctaccggtccggaattcccgggtcgacccacgcgtccgaggtcctgaagcaggtgcaccccgacatcggcatctcctccgaggccatgtgcatcaggaactccttcatcaacgacatcttcgagaagctcgccgcggaggccgccaagctcgcccggtacaacaagaagcccaccatcacctcccgcgagatccagacctccgaccgcctcgtcctacccggcgagctcgccaagcacgccgtctcggagggtaccaaggccgtcaccaagctcacctcgtcttagcccccttgtagtaggcgtcgttgctgtctgcttctcaagcaagcactgtgatgtgcgcgttctcatggtactagtggaggttggctcgagtgtgcaagcgatgcagcggctgatgactgtggtatgaatctatgcatggtggtcatgcacagatatggttatttgaatgttatgtgatccctagaagga

SEQ ID NO: 92221 - DNA, 511 bp, Zea mays
gaggaggagcgatgtcgttaagaggagggggggaaagtgtaatcctcccggaattcccgggtcgacccacgcgtccgattaaagcaagccatgtggaggagggctttagcgatggtcctgttcatggctggcgccgggctggtcgccggggctgccggcgccggcgcgcagcagggcgtgtggagcatcatcacccggcccatgttccagagcatgctgagccaccgcggcgacagcgggtgccagggcgccttctacacctacgacgccttcatcgaggccgccagcaagttccccggcttcggcaccaccggcgacgagcagacgcgcaggcgggagctcgccgccttcttcggccagacgtcccacgaaaccaccggtggatgggcgactgctccggatggaccgtttgcctggggatactgccgggtgaaggaacagaaacagacggacccaccctactatggacgaggacccatacagctaactcataagtacaactacaggctcg

SEQ ID NO: 92222 - DNA, 521 bp, Zea mays
  unsure (1)..(521): unsure at all n locations
ngagggaggaacagagcttgtctacgggcgacggggggggaggagaggaagttgttcaccggtccggaattcccgggtcgacccacgcgtccgctgtgtttggtgaaatctaccctgatccagtaagagttgtatcagttggtcgcaaagttgaagatctgcttgcagatcctgatagcaaagagtggctatccatatcgactgaactatgtggaggtacacatatcacaaacacaagagatgctaaagcatttgcactcttatctgaggagggtattgcaaaaggagttacgaggataacagccgtgactgctggatgtgccacccaggctatggagttggcgtcatctatcgattctgatatcaataaagcatctcagttggaaggagctttgttggaaaagaaaattgcttccatcaagagtgggctggatgcagctgctatccctgctgcgagaaaagctgatttgagaggcaaggtttcaaagttagaggacgaacttaggaaggcaaagaagaaa

SEQ ID NO: 92223 - DNA, 530 bp, Zea mays
  unsure (1)..(530): unsure at all n locations
ttaggttagtcatgcacacgacagtactgctgcaccggtccggaattcccgggtcgacccacgcgtccggtctatctcagcttgctgcgctgcactaccctgccctgccatcatatcgtacgtgagcccggccgagcgagagcgagggagaggcatggctgctccgaagctcgcgacgctggcgctggccgtgctcctggcggcgaccgtggtggctcccccggccgcggtgcgcgcggcgatgtcgtgttccaccgtgtacagcacgctgatgccgtgcctgccgttcgtccagatgggcggggccatgccgccccagccgtgctgcggcggcatccgcagcctgctgcagcaggccaacaacacccccgaccgccgcaccatctgcggctgcctcaagaacgtcgccaacggcgccaacgggagcggcacctacatcagccgcgccgncgcgctgcccagcaagtgcggggtcgccctgccgtacaagatcagcaccaacgttaactgcaacacgattaattaaatga

SEQ ID NO: 92224 - DNA, 529 bp, Zea mays
catgtgaaaacgacagatagaaagtatcactcggtccggaattcccgggtcgacccacgcgtccggatgattattttgatggatactacactgaagaaatgattgaatctcaggttgaccaactcgtccttgaggaggttgtacgagaaaggttccctaaattggccaaacatatggaattcttgggagttcaagtgggatggataactggaccatggtttctttcaattttcatcaatatgcttccatgggaaagtgtacttcgcatttgggatgtcatcctttttgaaggaaatcgcataatgttgttcaggacgacacttgctttgctggatttatatgggcctgcactagtgaccacaaaagatgccggagatgcaattacactactgcagtctcttgctggatctacatttgacagcagccagcttgtattgacagcttgtatgggctttcaatcagttagagaaatgggattgcaagagttaaggaaaaagtacaggcctgaaattttaactgcaatggagga

SEQ ID NO: 92225 - DNA, 529 bp, Zea mays
  unsure (1)..(529): unsure at all n locations
gagtctgattaagcacggagaaggtacggaatgctgcaccggaccggaattcccgagccagagcgtccgcagaagggtaaggtcggaatagtcctggacttcaactggtacgaggctcttacaaactcagctgatgaccaagcagcagcccaaagagccagggacttccacattggctggtttgttgatccattgataaacggacactatccacagataatgcaagatctcgtgaaggagaggctgcccaggttcactcctgagcaggctaaactggtgaagggctcggcagactacatcggtatcaacgagtacacatncagctacatgaaggggcagaagctggtccagctggcgcccagtagctactctgccgattggcaggttcaatatgtttttgcacgcaatggcaaaccgattggaccacaggcgaattctaagtggctctacatcgccccgacggngatgtacgggtgcgtgaactacctcaaggagaagtatgggaatccaacgatctacataacggaga

SEQ ID NO: 92226 - DNA, 538 bp, Zea mays
  unsure (1)..(538): unsure at all n locations
agagtccgttttcggaaaatcgtctcgnatgcatgttcctgaattcccgggtcgacccactcgtccgcataaggatgatgacggattcttcctggactttatctgggactatgctcttacacacttaggtgataccaagcagcacgcgggagggtctatgactttcacattgcctgcgaagttcatccattgataaacggacactatccacagatcatgcatagatctcaatgaatcgatcaggtctgcctcagcattcactacctgaacatgctaaactggagaatcgctcccctagactacatatgctatcaacgagtacacatccatctacatgaatgatcaaaaactgtatcacctgactcccaataactactctggccattgacacgatcactatactgctgtacacaattgcatacccattggaccacatgcgaattctaagttgctcttcattgcccctacaatcaattcgagtacgtgaactccctacatgagaaaacggacatccatcattttcaaacgcataccgaaa

SEQ ID NO: 92227 - DNA, 530 bp, Zea mays
gagggagggaaagaggtgctgttaaggggagatgggggggcggaagagattgttcgtaccggtccggaattcccgggtcgacgcacgcgtccgcgaggatggccccctcgtgcgcgagaagatcttgtatgccgtgaagcaatactgggttggtggtaagcagacggctgtagcttgaagcaagcacgtttcatgaggctctaacatgaggaattctgcaaccaaaccttacccgacaaacaaggattagcttaaatgatcaacccttgtagggcttgttcggttacaacaattcagaagcggattggaggggattaaatccttttctagttaaaaatgactagaagaggatttaaacctcaccaatccccttatggattggtgtaaccgaatatgtccgtagggggtagcactgaagcagccaggataccgtgctcgctggtgatcactgcaaccacataatcttctttggtcgtgtactcttttcaaaaagcttgtatctttggaaatttctttacggtcctcgtacc

SEQ ID NO: 92228 - DNA, 497 bp, Zea mays
gaggagaacatggtcgagttgattctagactgaatgcatacctccccttccaacgccgctgcgaccacgcgaacctggcatgtgaaaataccttgatccattacaatgcatcaatgatccgaaatgggaacacttcttgcagagcctgataccaagagtgcctatccatatccactgaactatctataagtacacatatcacaaacaccagaaatgctaaagcatttgcactcttatcttacgaaggcattgccaaaagaattaagaggataacagccctgactgctggatgtgccacccaagctatggaattggcgtcatctatcgattctcatatcaataaaacatctcaattggagggaactttgattgaaaagaaaaatgcttccatcaaaaatcggctggattcaactgctatcccttcttcgagaaaaacttacttcataagcaaggcttccaaactataagacgaacctagaaggccaaaaaaaaaataa

SEQ ID NO: 92229 - DNA, 528 bp, Zea mays
  unsure (1)..(528): unsure at all n locations
nagggagtantagaggtttgattaaagcgaacgggggggnggaaagtagtgctcgtaccggtccggaattcccggatcgacccacgcgtccgtcggcttctcgcacgcgcggcgaccggcttcaaccccaactctgctgcttgatcctcggacacttcgaacgggacgagaaggaatcggacgccagatgagactaaccgacctaggatccatcgacgcgtgaagatgtgttcgcccgccgagtgctaccaatcacgtccacctataagcacggcatatgggacactgtgtttctataccaccgtgctagttcagctccagattatgcacccatgatctctctactcagattacccctaggtgttcaagaagctcgagatatggaggctattgacacggttcattattctggcaccattttccatgaaatatggtatccgcctgctgatgatagctaggtatggtgtcatgatggaaaagggtgcatatgataagcggactgcagatttcttatggatgatgatgttt

SEQ ID NO: 92230 - DNA, 512 bp, Zea mays
  unsure (1)..(512): unsure at all n locations
nggggaagacaggcttgtcaagtgagagggggggggagggagtgatgtaccggtccggaattcccgggtcgacccacgcgtccgcgtcgaagcatgatgctgatgggaaagattatagaagtgatttcagacaaaaacagaggacatactcaggtccagtcctgcagtctggtccgaataatagttcgatgactgaaaggggccacattattgaaagggatgcaggagttcaatctgtatctgataaacaaaagaatggtacaagaagagccaataatcttagtggtcctttgtcacttccaactcgtgcttctgcaaatagtctttcaagagccaataatcttagtggccctctgtcacttccaactcgtgcttctgcaaatagtctttctgctcctattcgatcttctgcaggttatgtaggctctttgggtgataaacctaagcgcactatggtggaaattaaaggccgcttctcagtgacatctgagaatgtggaccttgcaaaggtt

SEQ ID NO: 92231 - DNA, 537 bp, Zea mays
  unsure (1)..(537): unsure at all n locations
ggaggagctgtggaaacgacagatagaaagtttcccggtccggaattcccgggtcgacccacgcgtccggcgggagcggcaaggcgaaggcgtcgtcgtgggcggcggcgatgagcgtcggcaccgtggaggcgctcaaggaccaggccggcctgtgccgctggaactacgcgttccggcaggcggcgcagcagcagcagcagcagcgcgccaggaggccagcaggcgcgagcggctcagtcggccccggcagcggcagcggcagcgcgcacgcgccgcctgcttctgctccctcgggctgcgccgcggcggcgaggaggagagccaggcagcagcaggaggaggagctccggacggtcatgtacctcagcaactggggtcccaacaactagctacgaactaccagtagctggtgatcgagcaggcgaagcgaagctgggcgggcaacaacctgagatgactccgagggcccgtgtcaagcaaccttgcctctagctagctatgctagtaggcgctgncgcttactctaatctgctg

SEQ ID NO: 92232 - DNA, 519 bp, Zea mays
  unsure (1)..(519): unsure at all n locations
nagggagaacagggttggcctatgtattacgactaatgcgtcacctcctcccgaattcccgggtcgacccacgcgtccgcttgtttctggttcttttatgatgattgacgcaacaacaaaaatgcacttcatcgattatggcggctacctcgactgacataatgcctacctttgggtatgcttcttcttttctttaatctttcgcggttctatgtactaatggtcatcttgctaaattcacatgtgcacctttctattggcacctatacttttgtaccatttttctggattaatctactattaaaaatgccaaaatatataacgatccaaaaacgtgataggtttttttcggtagctagctttgttaatatgctggaaccaaatatttttaagaaactcactttaaatgatggccgtaaagaatatgttaactgctatacaatgctattttggtggtgaacttagaaccactggacctcattctattgaagggcgacatttgctctaggatgctaacac

SEQ ID NO: 92233 - DNA, 520 bp, Zea mays
  unsure (1)..(520): unsure at all n locations
nagggtagancagggtgcgcttagggggtggggggggagaggtagtcgtcccggaattcccggcgagactttagcaacaatcgaaaatgtgtttgcggtgatagaaggaaaagaggagcctgacagatatgtgatcataggcaaccatcgtgatgcttggacatttggagcagttgatcctaacagtggaacagcagccatgcttgagatcgcggagaggctgtccaagctacaagcgaaagggtggaggcctagaagaacaataatcctatgcagttgggacgcagaagagtttgccctgatagggtctactgaatgggccgaggagaacatggacactctagcttcaagagctatagcttacctgaacgtggacatatcagtgtttggtcctgggggtcttatgccccgtgcgacccctcaacttgatgaattgatcaaagaagcaagtaaaatggtaccagatcctgatgaaccatctcanaccttgtatgacaccatgatgcgccatcattcaccg

SEQ ID NO: 92234 - DNA, 530 bp, Zea mays
  unsure (1)..(530): unsure at all n locations
naggtnatggaacaggggtcnnnctatagatgatagcggggtaaaaagtaagtatgctaccggtccggaattcccgggtcgacccacgcgtccgggtcgatatcccagtagacagatatccaacatacaattttgttggccgcatgcttggggcaagaggaaattccttgaagcggatggaggcaaatacggattgccgcgtgctaataagaggtcgtggcagcataaaagatccagcacgggaggaaatgatgcgagggaagccaggatatgagcatatgaatgaacctctccatatattggttgaggcagagctacctgttgacatcattgatgctcggctgatgcaagcccgcgagatccttcaagatctgctaaagcctgtggatgaatcccaggacttcttcaagaagcagcagctgcgggagctcgcgatgcttaatggcaccctgcgtgaggaagggatgcagaggttcggttcagcgtaccctttccacaacagccttggaatgaagagagccatgacaagg

SEQ ID NO: 92235 - DNA, 513 bp, Zea mays
aggggagataagcttgcgaaggggagggggggggggagagagttgttctcggtccggaattcccgggtcgacccacgcgtccggaaataaagtagctatcatagctatttcagtagtggttcctgtgttagtactaattgtgctacttcttacatatttcatctggtggcagaaaagaaagcctattgtgcaaccagtacccacacatggctcaacaagagatccagaacctgataatgcttcaggaataaaaaaaagttatggctacaacctgaatataactgagaatcggcagttcacatacaaagagctggagaagttcactaataatttcaagaagttcataggacaaggaggttttgggcccgtctactatggccgtttggaagatgacactgaggttgctgtcaagatgcgttctgaatcatcgtcacatgggcttgatgaatttttagctgaggttcagagcttgacaaaggtgcatcacaggaatctagtgtctatgattggcta

SEQ ID NO: 92236 - DNA, 515 bp, Zea mays
  unsure (1)..(515): unsure at all n locations
tggaagaacagggtcgtgtatgaatagtgagngaaagtagtcggctccgaatttccggctagactttagcagcaatcgaaaatgtgtatgcggtgatagaaagataagatgagcctgacagatatgtgatcatgggcaggcatcgtgatgcttggacatttggagcacttgatcctaacagtggaacagcagccatgcttgagatcgcggcgaggctgtccaagctacaagcgaaagggtggaggcctagaagaacaataatcctatgcagttgggacgcagaagagtttgccctgatagggtctactgaatgggccgaggagaacatggacactctagcttcaagagctatagcttacctgaacgtggacatatcactgtttggtcctgggggtcttatgccccgtgcgacccctcaacttgatgaattgatcaaagaagcaagtaaaatggtaccagatcctgatgaaccatctcaaaccttgtatgacaccatgatgcgccatcatncaccg

SEQ ID NO: 92237 - DNA, 530 bp, Zea mays
gatgtagttgttaaagacggatgggaagttgtcccggtccggaattcccgggtcgacccacgcgtccgcatgatgtttttgacatgggtcgtacaaaataggcacttcttgtaatggagttctgtgagaagtctttggttagtgcaatggagagcagaggtagtggttactatgaggagaagaaggtgcttttgattttcagagatgtctgcaatgctgcctttgctatgcatggacaatcaccgccaattgcacatagggatctgaaagctgaaaatgttcttcttggttgtgacggtgtatggaaaatatgtgattttggaagcacatcaactaatcacaaatgctttaacaaaccagaagagatgggcattgaggaagatgtcatcaggaagcatacaaccccagcctacaggcccccagagatgtgggatctctacagaagagaagttattagcgaaaaagttgacatttgggcttttgggtgccttctatatggaatatgctacttcaagtctgcatttgatgga

SEQ ID NO: 92238 - DNA, 516 bp, Zea mays
  unsure (1)..(516): unsure at all n locations
agtaagggcatgattgctagggaggggggggtaagagtatactgcccggaattcccgggcttggttgtatccaagtactatgcaagggttaccctcaagaggcttgccgatcttctttgcctgactttgcaggaggcagagaagcatctctcagacatggttaactcgaaatctctagtggcaaagatcgacaggccgatgggagttgtcagcttccggacgacccataacagcaatggcacactgaactcatgggccacgagccttgagaagcttctggacctcgttgagaagagctgccacgagatacataaagagaccatgatccacaagacggcgtttaaaagtntaacctctttggtttaggtcttgaaacccgtgctgtgcatgagttaccgtaacaagagggttttttttgttggtggttgggcacggccagttgtccccgcaaattggcttggactcgctaaaggttttccggatcccaagactctgatccataaactaagcccgaaa

SEQ ID NO: 92239 - DNA, 443 bp, Zea mays
agtaagggagtggctaggaagcgaggaagaaggtgcaccgtccgaattccggtcgacccacgcgtccgacagtcatcaactaacgaacgaactcttgctcgatcacgagctagctgaggtcgcgatgcggtggctgaacagcagaagacgccgagcggggtggcggctggtggcggggcgctgctggcttgccgttcggcggatcacctgcgcaggtggggtcgcgctggcgccggctcctgacgcgacggaggggcgagcgctccctgtcgagctgaacggcttgtagcatggaaggcggattgtacagcgcagagcttatgtgaggcctagccttagggcctcttgagacggtagttcctgcaggatccgggctggggatgctcggtgctatattttggacgtgattcttacttttcttgaaatgatttttttgtttggtt

SEQ ID NO: 92240 - DNA, 538 bp, Zea mays
  unsure (1)..(538): unsure at all n locations
tatgtgttaaacgaacgataggtatgcattctccggtcctgaattcccgggtcgacccacgcgtccgccagggtacgccttcgaggaactgaacccggttcagtggcggtgcagcggcacgcccaggggcctgataccagtggccaacggcagcgaggagatggaggtgctcgtgaccgtcgacgtgctgcgccgggccaaggcggacgtcgtggtggcgtcggccgaggaggtcgtcgtcgcgcgccacggcaccaggatcgtcgccgacgcgcggctgcaggacgccgtcggccagcagttcgacctcatcgtcgtaccgggtggcatgccgggcgtgaagacgacgctggcagacaaggtggagctcatggcgctgctgaaggagcaggcggcggcgggcaaggcgtacggcgccatctgcgccgtcacggcgcatgtgctggagccgcacggtctcatccggggcagcatgaatgcgacgacgtgcgcgttcagtgcggaccggtccatcgagtgcnggagcatggtggtggtn

SEQ ID NO: 92241 - DNA, 514 bp, Zea mays
  unsure (1)..(514): unsure at all n locations
gagagagacaggcttgctatgggatgggggggaaacggtattcgtcctcggaattcccgggtcgacccacgcgtccgaggaaattntcttgggcgttcttcggcttcattgtcacaggttcgaattcgtcaaccggttatggcaattggccaaggaaggaaaagccaagaaaaaattccaatcttcgggaagacccttaccgggaagaccattacccttgaagtggaaagcaacgacaccgtcgacaacgttaagggccaaattcaagaccagggaaggattcccccagattaaccgaggctggatatcgcttgccaagcagctggaggatggacgcacgctggctgactacaacatccaaaaggagtcaactcttcatttggtcctcaggcttaggggtggaaccatgatcaaggtcaaaactctcactgggaaagagatcgagatcgacattgaacccactgactcgattgacaggatcaaggagcgtgttgaagagaaagaaggcattccc

SEQ ID NO: 92242 - DNA, 519 bp, Zea mays
  unsure (1)..(519): unsure at all n locations
agggagggtntaagggttncctaagaaatgggggaaaacggtagtcttctaccggtccggaattcccgggcaagcacaagcgcactctagcaatggcttctgaggttgtccgccctagcgacgccgagctactaaaggcacaagccgacatatggcggctcagcctctcctacctcacgcccctgtcactgaggtgcgccgtggagcttggcatccccacggcgatctaccgccatggcggggctgcctcagccgctgagctggtcacggcgctgtctctcccctccactaagctgccgttcctccgccgcctgctgcggctcctcgccgcgtcgggcgtgttcaccgtcgacaagcagagcacggaggaggagcggtaccgcatcagcccccgtgtcctacctcctggtggacggcatccctcacgaggaccacatgaaccacaccgctctggtgctcacctgcacctcgacgcgctacatcgaggcggggatagggctggcggagtggttcaagagg

SEQ ID NO: 92243 - DNA, 532 bp, Zea mays
tagctgttacacgacaagacagtactgcatcaccggtccggaattcccgggtcgacccacgcgtccgctggaacgccgtcatattcgggccggatgatacgccgtgggacggtggcacgttcaagcttaccttgcagtttacagaagattacccaaacaagccaccaactgttcgatttgtctctaggatgtttcatccaaatatatatgctgatggaagcatctgtttggatatcctacagaaccagtggagtcctatatatgatgttgctgcaattttaacttctatccagtccctgctgagtgatccaaacccaaactcccctgcaaactcagaagcagcaagactgttcagcgagaacaagcggtagtacaaccgcaaagtccgtgagatcgtggagcatagctggacagccgactagtgcataaggatgctcgtcgtgcccgataggggcacaataagaaagcgtgaaaaaaaacacacgcactccttgtgtttctggttcgccaggctttgtcgaacattgaagaa

SEQ ID NO: 92244 - DNA, 524 bp, Zea mays
aactaggttttcgaaatcccgcccactcgactctgaattaccgttcgaccactcttccttcgagcgccgtcatattcctgccgaatgattctctttgaaactctgtcacgttcactcttgctgggttttatacacaatatgaccccaactctccatcacctgctctactagtcactacaatgtactatccacatatatatgctcatacatacatctatccgcatatcctacacatccagtggagtcctatatatgatgttgctacacttctaacttctatccacaccctgctaagcgatccaaacccaaactccacttcaaactcataatcagccagactgttcatcgacaacaaccgctaatacaaccgcaaagtccgcgaaatcttatagcataactctacatcccactaattcataaggatactcctcgtgccccattgggtctcactagtaatgcttgacaatatacctacccactccttgttttaacgattttcccagcttttcaaaacaattaataat

SEQ ID NO: 92245 - DNA, 521 bp, Zea mays
  unsure (1)..(521): unsure at all n locations
tggggagaacagggctctgcgaagaggggaggggggggaagaggggtaattgtcccggaattcccgggtcgacccacgcgtccgagcggctgcaggagcgacccgccgtcgacggcgtgctctcggacctcacctgcgacagcgacggcaaggtgagcgagttcatcggcgggaggcacagcctgccgctgcacgagctgcccacccacgccacccgcggctactacctgggcatgttcctcgggggcgcctaccaggaggccctcggcgggctgcacaacctcttcggcgggccgagcgtggtgcgcgtgtcccagtgcgacgggccccactgcttcgccgtgacgcgcgccgccgcgggcccgtcctgcgccgacgtgctccgcgcgatgcagcacgagcccgaggtgatgtacgaggtgctgaagcagaggaccgacggcgccacggtcgncgncctcgcccgggccttcggcgcaatgccgtacctggtgttcgaccccgaggccgncgtgatgtcc

SEQ ID NO: 92246 - DNA, 515 bp, Zea mays
  unsure (1)..(515): unsure at all n locations
aggaagtantagggtcncgattgagaggggggaaacgtaatcttctaccggtccggaattcccgggcgcgtctatctcagcttgctgcgctgcactaccctgccctgccatcatatcgtacgtgagcccggccgagcgagagcgagggagaggcatggctgctccgaagctcgcgacgctggcgctggccgtgctcctggcggcgaccgtggtggctcccccggccgcggtgcgcgcggcgatgtcgtgttccaccgtgtacagcacgctgatgccgtgcctgccgttcgtccagatgggcggggccatgccgccccagccgtgctgcggcggcatccgcagcctgctgcagcaggccaacaacacccccgaccgccgcaccatctgcggctgcctcaagaacgtcgccaacggcgccaacgggagcggcacctacatcagccgcgccgncgcgctgcccagcaagtgcggcgtcgccctgccgtacaagatcagcaccaacgttaactgcaacc

SEQ ID NO: 92247 - DNA, 520 bp, Zea mays
  unsure (1)..(520): unsure at all n locations
aggggagacagggtcncaatgggggatggtgggagggggagaaatgttgtcaccggtccggaattcccgggtcgacccacgcgtccgtgatgacatctggtgaggctgtcaagtacaagagctccttggacgcgttccagcagattcttaagaaggaagggcccaagtccctgttcaagggtgctggtgctaacattcttcgtgccattgctggtgctggtgtgctttctggctatgaccagctccagatcctgttcttcggaaagaagtacggctccggcggggcttaaatggagaaatatgatgacgaacaagagcagtgtgtgttcccggtccttttcaatcaggatctggtgaagcttttgcctatcatatcgtagaaattaataattcatgtagagggaggattcttccaacaatttgctttggatggagacttagatctccaaacactgcgaactatcctactaagtggtgacatcggtacccaaaaacatttatggtcatagagtctgtcctt

SEQ ID NO: 92248 - DNA, 530 bp, Zea mays
tacgtagaaacgacgcgataggaaagttgtattggtccggaattcccgggtcgacccacgcgtccggtcggccctcctgtcacaacaatagaagcacggctggagtcggtccctgaaatgggctacgacgcactgtcagacacgccccggggcgagatctgcttgaggggccacaccatgttctccgggtactacaagcgccctagcctcactgaagaagtgttctcagatggctggttccatacaggtgatatcggggagtggcaatccaatggcacgatgaagatcatcgacagaaagaagaacatcttcaagctgtcccagggggagtatgtggcagttgaggtcctggaaagagcatacctgcagtcaccccttgtggcatcggtctgggtctacgggaacagcttcgagtcgttcctcgttgccgtggctgtccctgagaggcaggctctcgaggaatgggcagcagccaacagcaaggccggcgactttgcagagctgtgcgctgatcccaagcgaggacctac

SEQ ID NO: 92249 - DNA, 533 bp, Zea mays
gggctaagaacgagggggatgggaagtatgtcacttggtccggaattcccgggtcgacccacgcgtccgggtaaatctgagggaggtccatctgggcgacattggatattagacccattagatggcactgagggtttcataaggggagatcagtatgcagttgcacttgaactacttgatgagggcaaggtgttctgggtgtgttgggatgtccaaatcttccattaaaatcaacatacaagaacaatagcagctcttttggggatcgaataggttccctcttttttgctacaattggttgtggagcgcaagttgaggccttagaaggatctgagccacaaaagattagtgtttgctccaccaataatccagttgacgcctcattctttgaatcctttgaagcatcacactccaagcgtgatttaactagctccattgcagagaaacttggtgtccgagctcctcctgttagaatggatagccaagcaaaatatggtgccctagcacgtggtgatggtgccatttttctgcgg

SEQ ID NO: 92250 - DNA, 541 bp, Zea mays
  unsure (1)..(541): unsure at all n locations
ngataagcggtgttaaagccaggaaggacgtagtcctcgtccggaattcccggggagagatcatactgctcgagaggaaaggctactataggtgtgatgccccttttatcagatcgtccaaaccggtggtcctgtgtgcgatcccagatggcaggcagcaggcctcgcttagctaggcatggtgaccaccttttgggcacatggaattcctgagttggcgatgagtattgttgcattgtacattttaatattgtactgtgattaggctttactcgcggtggatgtctttcaccgctagatggccagaggcatatcctgccaaccaagcagagcagccattttgattttggtctatgatacttttaccaaaaaaaaaaaaaaagggcggccgctctagaggatccaagcttacgtacgcgtgcatgcgacgtcatagctcttctataatggcaccctaattcaattcacttgccgtccgtttacaacgtcgtgactgggaaaaaccctgcgttacccaacttaatcggcttggaagacatcc

SEQ ID NO: 92251 - DNA, 521 bp, Zea mays
  unsure (1)..(521): unsure at all n locations
ngagggatggggcggtctctgataacgaacgcggcggggaagacggtatttgttccggaattcccgggttcccgctggcttcctcttttcaaaaccctcgctaatctcgtgccccgtcccacccacctctagcttcgaatcggagcgcctcgcctccgcattctagggtttccccgcctacggcgccggccatggaggcggtggtcgtcgacgcgggctctaagctgctcaaggccggcatcgcggcgcccgaccaggcacccccactggtaatgccgtcgaagatgaagctggatgttgaggaccaggagctggctgacggcgcggtggtagaggaggtggtgcaccctgtggtgcgcggcttcgtcaaggactgggacgccatggaggacctactcaactacgtcctgtacagggacattgggtgggagattggggacgagggccagattctcttcaccgaacccctcttcacgccaaagactcttcgggagcaattggtgcagcttatgtttgaaaat

SEQ ID NO: 92252 - DNA, 515 bp, Zea mays
  unsure (1)..(515): unsure at all n locations
gagggaganaaaggtcncaatgcagggatggggggggggggaatgttgtaccggtccggaattcccgggtcgacccacgcgttcgcgccagttgaggtcctctgtaaatcatatccatcagagtttactgcatacttgcattactgtagatcactacgattcgaagataaaccagattactcctatttgaagagactcttccgtgacttatttatccgcgaggggtaccaactagattatgtatttgactggaccattatgaaatatcctcagtttagagataaacgcaaaattcagtctagcggcaagatgagtgggttggcaggcccttctgcagaaaggactgatagaactgcagctgaagctttgtttagaaggactggatctggttctggtcacaatcgagagcacaccaagcacagaagtcttctggagtcactgatgccatccaaagcttgtgattcggataaagcaaggccacaatcatcgtcgcgcaacgggagcacattaagaga

SEQ ID NO: 92253 - DNA, 515 bp, Zea mays
agggtgcagagttgttagagagaggggggcgaaggtagtctgctaccggtccggaattcccgggtcgacccacgcgtccgcaccttcaaagatgagaacttcaaattggttcacactggacctggagtgctgagcatggctaatgctggcccgaacaccaatggcagccagttctttatttgcactgtcaagacaccttggttggacggaaggcatgtcgtgtttggccaggtcctggaagggatggatgtcgtaagtctgatcgagtcgcaggagaccgacagaggtgaccgcccgaagaagaaagtagtcatcagcgagtgtggggagcttccagtggtctaagtgttactcatctgttgtcggtcttacctaacctcggatggatggcgatatttcccccacctgaacttgtcgtgctaccctttccgtccttgacccccaccctggtagtattggaaaattattcgaaatggaataaaggccccaaatctgagggcatactgttgcttttc

SEQ ID NO: 92254 - DNA, 522 bp, Zea mays
agggaggaaaagaggctgcgttacaggggaaggcggggagagggagaaaggttttaccggtccggaattcccgggcagataaggaagaggaggagggcaggatgtcgcaccgtaagttcgagcacccgaggcacggctccctcggcttccttcccaggaagcgctcctcccgtcaccgcggcaaggtgaagtcattccctagggatgaccccaagaagccttgccatctcactgccttccttggctacaaggctggcatgactcacattgtccgtgaggttgagaagccaggatccaaactccataagaaggaaacttgtgaggctgttaccatcattgaaacccctcctcttgtcattgctgggctcgtggcatatgtgaagactccccgtggcctccgcacactcaactctgtttgggcccaacatcttagcgaagaagtgaggagaaggttctacaagaactggtgcaagagcaagaagaacgctttcacaaagtatgctctcaaatatgaaaatgatg

SEQ ID NO: 92255 - DNA, 533 bp, Zea mays
agacgtgaaagcgggcgacgggagagattcactcggtccggaattcccgggtcgacccacgcgtccgcaaccaatgatgttggtattgctaaggatggtaccaaaagggaaactttccaacctggtgtagaactaagagggcgaataacactgcttgctgagggttgccgcggttcgttatcagagaaaataataagaaatcacaagctcagagagagaaggcaagggcaacatcagacatatgctcttggaattaaggaggtttgggagattgaagaaggaaagcacaatccaggttctgttattcatactgttggatggcctttggatactaaaacatatggaggatcattcctgtaccaccttgatgatagacagttggcaattggtctggttgttgcgttgaattatcgaaatccgtttctgagtccctatgatgaattccagaaatttaagcagcaccctgctgttagaaaacttttggaaggtggaacagctattcagtatggtgcacgtactctcaatgaaggtgg

SEQ ID NO: 92256 - DNA, 523 bp, Zea mays
  unsure (1)..(523): unsure at all n locations
ngagggagancagggtttanaattgcgatacgggggagaaggggggattttgtcaccggtccggaattgacgcacgcgtccggctcctggcgcggcccaacgtgaagctgttcaacgccgtggcggtggaggacctgatggtgcggcggnggcgcgtcggcggcgtggtcaccaactgggcgctcgtgtccatgaaccacgacacgcagtcgtgcatggaccccaacgtgatggaggccaaggtggtggtcagctcctgcggccacgacgggcccttcggcgccaccggcgtcaagaggctccaggacatcggcatgatcagcgccgtgcccgggatgaaggcgctcgacatgaacgccggcgaggacgagatcgtgcgcctcacgcgcgaggtcgtgcccggcatgatcgtcaccgggatggaagtccccgagatcgaccgcgccccgaggatgggcccgacgttcggcgccatgataatcttcggccagaaagcggngcacctggcgctgaanggactgtg

SEQ ID NO: 92257 - DNA, 521 bp, Zea mays
  unsure (1)..(521): unsure at all n locations
gagggtgacagggtctgattggtgaaggggggggggggaggaatcttccggaatttccggattgacggatggacccacgcgttcgctctgctctaccccacctcccggtccggcagcagagagcgggggtgcagagagatcgagatccggaggccgcgagtgggagcgccaccaccagcgactgcggcaatggcgggcacggtgacggtcccggggtcgtcgaccccctccacgccgctgctcaaggacgagctcgacatcgtgatcccgacgatccgcaacctcgacttcctggagatgtggcggtccttcttacagccctaccacctcatcatcgtgcaggacggcgacccgaccaagaccatcaaggtgcccgagggcttcgactacgagctctacaaccgcaacgacatcaaccgcatcctcgggcccaaggccttctgcatctcattcaaggactccgnctgccgctgcttcggctacatggtctccaagaagaagtacatctacaccatcgacga

SEQ ID NO: 92258 - DNA, 527 bp, Zea mays
  unsure (1)..(527): unsure at all n locations
ngagggagaacaggttttnnnnatctaatctaaggggaagaacggtaagtcttccaccggttcggaattcccgggtcgacccacgcgttcggcagccatggcttcatcggtggccgacgcggcgagcacattcctgggcaccgcgctgggggaccccgtgccacagaacgggcgcatcgtggcccggttcgggttcgggttgggcggcaaggcgaagcctgctccgaagaaggtggcgaagacatcgacctnctctgaccggccgctgtggttccccggcgccgtggcgcccgactacctggacggctagctggtcggcgactacgggttcgacccgttcggtctccggaagcccgtggagtacctgcagttcgagttggacttgctggaccagaaccttggccaaaattaaggccggcggattaattggcaccgggtttaaggccctccaaggtaaatcccacccgttggaacctttaacgcgaggtgttgggtctacaggggtttcgagaggtgagagcttatcc

SEQ ID NO: 92259 - DNA, 533 bp, Zea mays
cagtaagtaccgacaagatagtagtgcatcaccggtccggaattcccgggtcgacccacgcgtccgctcgcagatccaagcggagaagctgcgtcgtggcctgaccctgtccgtcctctccggtcggcgagagcaagaagagatcccgcgccgtcctcttcttcaccttcaccttcacccatggcggcctgcaccttcagcggcgactagacggcgcccttcttcggcttcctcggcgccgccgccgcgctcgtattctcctgcatgggcgccgcctactggacggccaagagcggcgtcggcgtcgtctccatgggcgtcatgcgccccgagctcgtcatgaagtccatcgtacccgtcgtcatggcgggagtactccggatctacggactcatcatcgccgtcatcatcttcacgcggatcaaccgcaatgccaagcgctactttctcttagacggctacgcgcacctcttctccggactcgactgcggtctcgctggcctcgctgcccgcatggccatcggcatcgtcgg

SEQ ID NO: 92260 - DNA, 542 bp, Zea mays
  unsure (1)..(542): unsure at all n locations
gggacggtcnntcgccgggatgccccgantcactatccctccgaattcccgggtcgagcgacgcgtccgagcagaccagacgagagacctctcgcgttccgtcctcctccctgcccctgctgccgttcccggtcttcctcagttctcccgcccgctgctgccctccgtccgcgtccagatcccgccaccaaccgatccggcgccctccagcatggcggaggcgaaggcggcgggagccctggctcttgcgctcgtgctcgcgctcgcgggggccaactccgagggcgacgcgctctcggcgctgcgccggagcctcagggaccccggcggcgttctgcagagctgggaccccacgctcgtcaacccctgcacctggttccacgtcacctgcgaccgcgacaaccgcgttacccggctagatcttggcaatttgaacttgtctggtcatctggtgcctgagcttgggaaactggagcatcttcagtatctggaactttataagaataacattcaacgaacaattccctctgagcttggcaact

SEQ ID NO: 92261 - DNA, 538 bp, Zea mays
  unsure (1)..(538): unsure at all n locations
gggaagtttgttacgaacaagacggtacttttctcccgtcctgaattcccggaagcggttgggagcattctggatgccgcgcctcgtcttacctcatcagtcattcctgccctcaccttctcaggcatctggggatacttggaggtatttgggctgataggattggtggtgctcttgcatggagttctttgctttcttctagaagccgtgataggagcatcctccaccatgatatccgtgctcaagaagattatgttagcaagcttaccgggcacaaatctgaggactatggcgcatcacagtgtatgtctgcaattgctggctcctatggctatattgctccaggaatgcatatacccctaaggtcaatgagaagagcatgtctacacctttggtgtcgtgcttcttgagctggtcaccggaaagaagccagtatgtgagttttgggacggcgtcaacattgtccatcgggtcaagtcgatgacaaacacatacaaggagcangtgatcaagatcattggccctaggctgtcgaccc

SEQ ID NO: 92262 - DNA, 543 bp, Zea mays
tggaagtttggacggggggggcgggtgggcagttggtatcggtccggaattcccgggcgtcgactaattcaaaaaaataggtgccttgttgcagtagaagggttttatgagtggaaaaagaatggatcagagagagagccatactacatacatttccaagatcataggcctcttgtctttgcagccttgtatgatgcatggacaaattcagaaggagagatcacccatacattcactattttgactacacatgcctcaacttctctaaattggcttcatgatagaatgcctgttatcttaggcagtaaggactatgttgatgcttggttaaatgatgtttctgtaaaacttgaagaaattactgcaccttacgaaggagctgatctggtttggtatccagtgacatccgcattgggtaaagcatcatttgatggacctgagtgcatcaaagaggtacatatcggagctactgataagcctatttcaaaattcttcaccaagaaatcgactgcctacgatctatcagggaagtatgagaatatg

SEQ ID NO: 92263 - DNA, 539 bp, Zea mays
  unsure (1)..(539): unsure at all n locations
ggagtagggttttnaacggggaagaaagtaattctcaccggtccggaattcccgggtcgacccacgcgtccgagcagaccagacgagagacctctcgcgttccgtcctcctccctgcccctgctgccgttccccggcttcctcagttctcccgcccgctgctgccctccgtccgcgtccagatcccgccaccaaccgatccggcgccctccagcatggcgggggcgaaggcggcgggagccctggctcttgcgctcgtgctcgcgctcgcgggggccaactccgagggcgacgcgctctcggcgctgcgccggagcctcagggaccccggcggcgttctgcagagctgggaccccacgctcgtcaacccctgcacctggttccacgtcacctgcgaccgcgacaaccgcgtcacccgcctagatcttggcaatntgaaactgtctggtcatctggtgcctgagcttgngnactggagcatcttcagtatctggaactntataagaataccattcagggacaatccctctgagctgggaa

SEQ ID NO: 92264 - DNA, 541 bp, Zea mays
  unsure (1)..(541): unsure at all n locations
nggacggttgaacgggggggaggggaggaggttttggtccggaattcccgggtcgaccgacgcgtccggcggattgcccccaggcggccccactcactccgctgttgatatttcgtttggttctcctttgggtgttgtccgtcgccgaggccttcttcccctcgctccccagctccagcaggcagatcagatccatccaaccacgaacaggaaggaaggtaggaggcctgaagggctgggctgaagttgaaccatgagtgccgtcgcggtttcgtcgtcgctgaacccgaacgcgccgctcttcatcccggcggcgctgctgcaggtggaggacttctcgccgcagtggtgggacctcatcaccaccaccggctggttccgcgaccactggtcccgcgagcacgcccacctggatgagatagccgagcaggtcgagttggtcgccctccttgcctacgatgaggatgaggacctcttctacggcgagcagggccccggcgccgncgccggccttaagacagattcggtgctcaaggcgctg

SEQ ID NO: 92265 - DNA, 538 bp, Zea mays
  unsure (1)..(538): unsure at all n locations
ngtgaagtcngcacggggaggatgcgaagtaatatttctccggaattcccgtcagcggggacaagcatccgggatgctgtggagcaagttgcttggatttaacttgttactgccgatcatgggcaatgctgaggatgtggtgaaaagggacaaatctggcaagccgttgctcgacaggaatggtggtatccagattctaacctcgcatacccttcaaccggtgccggttgccattggaggccctggtcttcaccccggagtgaaattccggaacgacattcaaatccctgggctcgccaatgtagccgcaactgtgatgaacctccatggatttgaagcccctgctgactacgagcaaaccctaattgaagtggctgacaactaaatactggccagctatgtccaattttggttctatagttttgagaaaggatatggccatgccattcaataatttctgtttgcaagcacggtgctcaaacttaccaaaacattgagaaacgccctttgacttggatttagatgctctatttatacc

SEQ ID NO: 92266 - DNA, 533 bp, Zea mays
ataaggtcgtatccgaataggtagtatcgctctaccggtccggaattcccgggtcgacccacgcgtccgccattctcagccgccgccaatcccttcccgtgctccgcaaccgctgagtgagaagaagagagggccggcaagggcgatggcccggctatcggcatcgatctcggcacgacgtactcttgcgtcggcgtgtggcagcacgaccgcgtcgagatcattgccaacgaccagggtaaccgcaccacgccctcgtacgtcgccttcaccgactccgagcgcctcatcggagatgcggccaagaaccaggtcgccatgaaccccatcaacaccgtctttgatgccaagcgtctcatcggcaggaggttcagtgatgcgtctgtccagagtgatatcaagctgtggcccttcaaggtcatttctgggcctggtgagaagccaatgattgttgtccagcacatgggtgaggagaagcagtttgcagctgaagagatctcctctatggttcttatcaagatgcgtgagattgg

SEQ ID NO: 92267 - DNA, 548 bp, Zea mays
agagaagtgtgaaaggagggcgacggatagaagtttttctccggtccggaattcccgggtcgacccacgcgtccgactcgagctcgagccctagcactgtgctgaaacacatgcctgagatctgagtcacgtgcgcggacgattcgttcgggtggagcggagacgagaggaactggggcataccgaaggccttcttctgcggatgggtaaacctctgctacacatctgcggcgtcgatgatgacgcctttctgacacagcatgacatgcaactgaacaatgctattctcgctgaggagaagcacttgcctatgtatgactagttggttagcaagagcaatgctgaatatattgccggacgagctacgcataactctatcagggatgcccaatgacatgcttgaaactcctgatgcaacaagttacatgggatgcatcggaaaggacaagtctggcgatgaaatgagtattaacgctcaacctgcacgagtcactgctcattcctacgaggatgagactgctcttactggcacatgtgctgtatgtgtt

SEQ ID NO: 92268 - DNA, 541 bp, Zea mays
  unsure (1)..(541): unsure at all n locations
gatggagacggttgaccgaagggcgaagtactgtattnnccnnnnnnnnntnnnnnnncggnncgggcgacgcgtacggcgatggcgacggcgacagcacggagcggaaggccatgaaggagctgggcctccggcgggcgcggcacttcgggtggtccaacacgtacgtgttcaccaaggccatgggggaggccgtgctgggccagcagctccggggcggcgacgtccccgtggcggtgatgcggcccagcatcatcaccagcgtccggcgcgacccgctgcccgggtggatgcagggcacccgcaccatcgacagcatcatcatcggctacgccaagcagaacctgtcctgcttcctcgccgacctccgcctcgtcatggacgtcatccccggggacatggtggtcaacgccatgatggcggccgtggtggcgcactcggaggcgttcgcgccgccgctgccgcangtggtggtgtaccacgccacctcgtcgctgcgcaacccggncacctacgacgtgctctaccagtccggacgccc

SEQ ID NO: 92269 - DNA, 549 bp, Zea mays
  unsure (1)..(549): unsure at all n locations
gggggggggagtatgaaccgagggggatgcacggaaatcttcaccggtccggaattcccgggtcgacccacgcgtccggcaattgggtaccaagacctgtacatgatgcttaccatacaaaaacaaacggacctaaaggggaaccaagattggaactgaacctgtgggatttcagcacagaacctgatgattgtgtccttgatttaactctcagtctgaagccaagtttttctggaacagaccttggtaagcatgttccacgacgtacagaagaggaaattctcctgtacccgggatttgagaatacccctgtgaagtccggtatgtcccttgcgttaatttgctgagtctttttttttttttggattgtttcgtcgctcttgcccaccacagctaaatgtcaagcatggtatcacatttgctaaccctgaaaagggggctaacaattattgacatattattgacgccatgtcaggtttttggcctctggtgccatctgatcgtnccgttggtgatgttcctgccataccatcctggcagcaggcgtac

SEQ ID NO: 92270 - DNA, 551 bp, Zea mays
  unsure (1)..(551): unsure at all n locations
ngggagagggagtgtcaacgacagcaatcggaagtaatctctcttnctnnattcncgncaggcaggcacactaacgaacgaactcttgctccgatcacgagctagctgaggtcgacgatggcggctgtgctgaagagcaggaagacgccgcaggcggtggtggccgtgctggtggcggcggcgctgctggcttcgtccgcttcggcggcgatcacctgcgggcaggtggggtcgtcgctggcgccgtgcatcccgtacgcgacggggagggccagcgcgctccccgcgtcgtgctgcagcggcgtcaagagcctcaacagcgcggcgcggaccagcgcggaccgccaggcggcgtgccgctgcctcaagagcctcgccaacagcgtcaagagcgtcaacatgggcaccgtcgccaccatccccggcaagtgcggcgtctccgtcggattccccatcagcatgtccaccgactgcaacaagatcagctaagttacgacgaccaagctaataagcctaccgaacgtacacgtacgccccgcgcgctgcacgag

SEQ ID NO: 92271 - DNA, 556 bp, Zea mays
  unsure (1)..(556): unsure at all n locations
ggagtggaggagtgtgaatcaagaagggatcggaaagtagtccttcgtccggaattcccgggtcgacccacgcgtccgagaacatcccaatcccagcaacatctgcaccgaaacggtgattgatcctcgtgttcccaacgacgagtgcatctgctccaagaactgcgcctgtgccggtaagtgcatccttgagtcggctgatgctgtccagacctgctttgtcgactgcgtcctcaagaacgactgcatctgcagcagcaagatcatccccggcgctgacgacccaaaggctaatgccaagtgaagtagtactatcatcccaaataatgtcctacgtatagtacctgctgaataaacctnccatgcaccaacagggagagagtctgtacgtcttctttgtaatcatgaaccgcttgtacgtgtaatatataataaaccactcttcaccttacacataaaaaaanaaaaaaaaaanaaaagaaaaaaaaaaaaanaataaaaaaaaggggcggccgtctagaggatccaagcttacgtacgcgtgcattcgacgtac

SEQ ID NO: 92272 - DNA, 533 bp, Zea mays
aaggtgttacacgacaatagatagtattgctctaccggtccggaattcccgggatttcatgatcttgctgaactcttccgaatcggtggaaagtgtccagatacgaactacttgtttatgggagattatgttgaccgtggttactactctgtcgaaactgtcacacttttggtggctttaaaagttcgatatcctcagaggatcaccattctcagaggaaaccatgaaagccggcagattactcaagtgtatgggttctatgacgaatgcttaaggaagtatggaaacgcaaatgtctggaaaacctttacagatctatttgattacttccccttgactgcattggtcgagtcagaaatattttgcttgcatggtggattatcgccatccattgagaccctcgacaacatccgcaactttgaccgtgtccaagaagttcctcacgaaggtccaatgtgtgatcttctgtggtctgatccagatgatcggtgtggttggggtatttctcctcgtggtgctggttataccttcgg

SEQ ID NO: 92273 - DNA, 512 bp, Zea mays
  unsure (1)..(512): unsure at all n locations
cgaaggtttacagacaagaagtatctcaccggccggaattcccgggtcgacccacgcgtccgagcgacactggttcggtttgaacctggttctggcttgggagttttgcggaggaggctgttgcatggccgacattccttacatgggcgtcgcttcgggaacagaactgncatgctggatatgctccgtatgatctctacttgcagaaataccccaggtgatntctgcgtttgcgactgcatgaactgcgatacgagctttgctatgtgccagtatttacagaaacttagacttgagttttggcttttgagcctttggatggttcttccggtccagatagtggtaccattagttgaacgaaatatttggaaatgttgttccacagtagatatcggatggacaataggatataagtactggatagagacacaagttgtcgttaacatcngttcttacttcgctattaatgtttttgatgacgtcagacattaatgtggatggatggaaggatn

SEQ ID NO: 92274 - DNA, 543 bp, Zea mays
  unsure (1)..(543): unsure at all n locations
ngggtaggaagtcatcaagagggggaggagggaagagaagtcttgcaccggaattcccgggtcgacccacgcgtccgaaaaactttagccagctatcaagacatggctccacttgttgctgctgccacgaatcacactggccatagaagccacatagtaggacccaacaatgagaattttccaaggcaccaaccttgttcatcacaaaacagaaacaagagactcatgcttaggtcacgagcacaaaggataagcagtcagctgcttgcaagccgaaagcttatgccatggcaaatccctaaaagggactggtttcctcctagcttcatctttggtgccgncaccgcagcataccaaattgagggcgcctggaatgaagatgggaaggggccaagcaattgggatcacttctgccacaattatccggattggatactggacggaagcaatggggacactggagccaattcctatcatatgtaccctgcggatgtcaaattgcttaaggaaatangcatggacgcgtccagattcttcatcttt

SEQ ID NO: 92275 - DNA, 551 bp, Zea mays
  unsure (1)..(551): unsure at all n locations
ggggttagaagtgtgnaagggggggggcggaggggaagtattgttccggaattcccgggtcgacccacgcgtccgcggacgcgtgggtgcagttgcaagataccgtacgaaatatcaggctgctcagaagggtaaggtcggaatagtcctggacttcaactggtacgaggctcttacaaactcacctgatgaccaagcagcagcccaaagagccagggacttccacattggctggtttgttgatccattgataaacggacactatccacagataatgcaagatctcgtgaaggagaggctgcccaggttcactcctgagcaggctaaactggtgaagggctcggcagactacatcggtatcaacgagtacacattcagctacatgaaggggcagaagctggtccagctggcgcccagtagctactctgccgattggcaggttcaatatgtttttgcacgcaatggcaaaccgattggaccacaggcgaattctaagtggctctacatctgcccgacggggatgtacgggtgcgtgaactactctaaggaga

SEQ ID NO: 92276 - DNA, 535 bp, Zea mays
  unsure (1)..(535): unsure at all n locations
gttagttgttcaccgaatatgtacgcatcgctctaccggtccggaattcccgggtcgacccacgcgtccgctgccattcacaaggtattatgcaccgagatgtgaagccccacaatgttatgatagatcatgagcttcggaaactccggctgatagactggggccttgctgaattctatcatcctggcaaggaatataatgtccgtgttgcctccaggtacttcaagggtcctgagcttcttgttgacttgcaagattatgattactctctggacatgtggagtctgggctgcatgtttgctggaatgatttttcgtaaggagccatttttttacggtcatgacaaccatgatcaacttgttaagatagccaaggtacttggaacagatgggctgaatgtctatttgaacaagtacagaattgagcttgaccctcagctcgaagcccttgttggaaggcatagcangaaaccctggacaaagtttattaatgcagacaaccaacacctagtgtctcatgaggccatagatttccn

SEQ ID NO: 92277 - DNA, 533 bp, Zea mays
  unsure (1)..(533): unsure at all n locations
ntgtatttatacatagaaaatagtacgtatctctctaccggtccggaattcccgggtcgacccacgcgtccgcatgtgcctgccatacttgtcgcgaccaaccaaccaaccaaaacacactcaactcagtgtgggcgttagtgtacccataaacataggatctgtgcttcacagccgtccccctcaccctgccaaatatggattcacgcgctctccgccgggaaaccccccatgggggtcccctcaccatgcgcccgcttcgggcgccactccgtgtgcgccttcacaatatcggctcctgtttccagctggagcaggtggtcgcactggatggtggagtctgtgtcgccgtctacgcattcacccgcgacggtggtgagcgactgcagcacgctgtcgcgtccgcactccttcctgtaatccagcgtcatgcttgcgagctcgtgcttctccaggatcgcgatcggagcactctcaagaatccaaccgatgtacttgacgttattcacgtgctggttgacatcaaggtcacn

SEQ ID NO: 92278 - DNA, 536 bp, Zea mays
gggaggggaagtgcttaaagcgggggaaggacagaagcatgctccggaattcccgggtcgaccgacgcgtccgttccagagcatgctgagccaccgcggcgacagcgggtgccagggcgccttctacacctacggggcggtcatcgaggccggcagcaagttccccggcttcggcaccaccggcgacgagcagacgcgcaggcgggagctcgccgccttcttcggccagacgtcccacgaaaccaccggtggatgggcgactgctccgaatggaccgtttgcctggggatactgccgggtgacggaacagcaacagacggacccaccttactatggactaggacccatacagctaactcatacagtacaactacaggctcggcggaccagcactgcacctgcacctgcctgacgaccctgacctggtggctagagaccccctggtagccttcaagacggccatctggttctggatgacgccgcatttgcccaagccctcgagtcacgccgagatgaccggggacctggaggcactc

SEQ ID NO: 92279 - DNA, 549 bp, Zea mays
ggaggggggagtctgaacgagggggacggtagaagtctctcccctgaattcccgggtcgacccacgcgtccgaagggaagggaaaaggctatcgttctcgtcagtcgtcacgagagccgcgacggcgcgcatggcggcgacggcagcggcgctccggtgctgcttccccggatcctccggtgtcggtagtggcttcgtcaagcccaactcctccaggcgaggctggtgcgcagcggccgtggcggcgccgtcgcgggaggcggaaccggtttcgtcgctggggcaccgcacccgcgtcgacttccccatccttcaccaggaatttgatgatgccaaattagtttacttcgacaatggtgcaacatcgcagaaaccatgtagtgtgatgaaaacattagatgagtactaccgatcgtacaattcgaatgttcatcgtggtatccatgcactcagtgcgaaggctactcatgcatatgacgatgcaagaagaaaagttgcaaattttggcaacgcagctgatagcagagagattggttcactcgtaatgcc

SEQ ID NO: 92280 - DNA, 543 bp, Zea mays
  unsure (1)..(543): unsure at all n locations
ggagatgaggtgttaaaagacagatagatagtagtgctgctaccggtccggaattcccgggtgctgggaagcacgttccccgtgcaatcttcgttgatctagaacccactgtgatcgatgaggtgcgcactggcacgtaccgccagctcttccaccctgagcagctcatcagtggcaaggaggatgccgctaacaatttcgcccgtggccactacacaattggcaaggagattgttgatctgtgccttgaccgtatccgcaagcttgctgacaactgcaccggcctccagggcttcctggtcttcaatgccgttggtggtggcaccggctctggccttggttctctcctccttgagcgcctgtctgtggagtacggcaagaaatccaagctgggcttcactgtgtacccatctncccaagtgtcaacctctgttgtggagccttacaacagcgtcctctncactcactcactcctggagcacactgatgtctctatcctgctcgacaacgaggccatctatgacatctgcaggcgctccctcn

SEQ ID NO: 92281 - DNA, 540 bp, Zea mays
agatgaacgtagttttcgaaactcgtacgcatgtactatatcctttcctgaattcccggatcctccgaagcgctcaacccgtgcatacttcgttcatctagattcctctggcaacgctgacacgctcactcgtgcgtggcactctacacatgattacccacacaatccaccaactgttctatatgtctctaacatgattcatccaaatatatatacttttggaagcatcttcttagatatactacacaaccagtggagtcctatatatgacgtcgctgcaattttaactagtatccagtacctgctgagcgatccaaacccaaactcctctgcaaactcataaacagcacgactgttcatctagaacaagcacgagtacaaccgcaaactccgctagatcgtggagcataactggacagtctactaatgcataaagatgcttcttcgtgcccgatactgtcacattcttaaatgctgagaataaacacacccactcccttgcgttcctacttcggcaagctttgtcaaacattaaataac

SEQ ID NO: 92282 - DNA, 556 bp, Zea mays
  unsure (1)..(556): unsure at all n locations
ggggtgtggaagtgttcataagcaggcgatcggaaagtaggctcncttncggncctgaattcccgggtcgacccacgcgtccgcagccgcgtcgcaccgcatcgcattctacgattcgaagctctctctgctcgcagccatggcgaagaattacccaaccgtgagcgccgagtacagcgaggccgtcgagaaggccaggcgcaagctccgcgccctcatcgccgagaagagctgcgcgcccctcatgctccgcctcgcgtggcactccgcggggacgttcgacgtgtcgtcgaggaccggcggtcccttcggtactatgaagtgcccggcggaactggctcacggcgccaacgcggggctggacatcgcggtgcggctgctcgagcccatcaaggaggagttccccaccctctcctatgccgatttctaccagcttgccggagttgtggccgtcgaggtcaccggtgggcctgagatccncttncacccccgcagggaggacaagcctcagccgncacctgagggccgtcttcctgatgcaccaaggggtctgacc

SEQ ID NO: 92283 - DNA, 543 bp, Zea mays
tgaggacgttttacgggggaggagggagggggggtatgtattggactggaatgtcccgggtcgacccacgcgttcagcatcaccgctagaggacacgtgcggctagccgatcgatacgatggccggcttctccgagcgtgcaaccggcgacggctcaagtcccttcaggctcacctcgccggcaaaacctatgtgtctggggactccattactaaggatgacattaaggtcttcgccgcggtgccgtcgaaacctggcgctgagtttcctaatggccgccgctggtacgagaccgtctctgcggctgtagcctcaagattccctggtaaggctgttggtgtaaatctgcctgcgggatcagctcctgcggcagctgctcctgcggatgaagctgaagatgatgatgaccttgatctttttggtgatgaaactgaggaggacaagaaagcagctgatgagcgtgcccggcgttgcaaagcctctttctaaaaggaaaggaagttgtaaaatctttcgtccctatgggatggcaaaaccatggga

SEQ ID NO: 92284 - DNA, 551 bp, Zea mays
  unsure (1)..(551): unsure at all n locations
ngtgggtaagtgtgaaaggcggggcgatgagaagtaagttctggtccggaattcccgggcaactatggactatcatcgtggtgctggtgttgaggtgcgtattgcccgcattttcaatacatatggtcctcgtatgtgtctcgatgatggccgtgtggtcagcaattttgttgcacaggcactacgaagacaaccaatgacggtttatggtgatggaaaacaaactcgaagtttccaatatgtttctgatctggttgctggattgatggctctaatggagagtgatcacattggtcctttcaacttgggaaacccaggagagtttaccatgttggagctagcacaggttgtgaaggaaacaattgacccaatggcaaccattgaattcaaacccaacacagctgatgatccccatatgagaanagccgatatcaccaaagctaagcgactgctacattgggagccaaacgtctctctagagaaggccttncgctaatgggcaaagacttncgtcaaaggatctncgatgagtaatcgaggcgattctacaa

SEQ ID NO: 92285 - DNA, 551 bp, Zea mays
  unsure (1)..(551): unsure at all n locations
ngggggaagcttgaacggggggggacaggaagtaggtatcggtccggaattcccgggatgctcgtagggacaaagcttgatcttcgagacgacaagcagttctttgtggaccatcctggtgctgtccctatagtactgctcagggagaggagctaagaaagcaaataggcgctccatactacatcgaatgcagctcgaagacccaactaaacgtgaagggcgtcttcgatgcggcgataaaggttgtgctgcagccgcctaaggcgaagaagaagaaaaaggtgcagaggggggcgtgctccattttgtgatctaatcatcggtagatgaagaaacaagggcgaaggtgccatggctttatcatcgtcgcgtcttgcttcagtggaacggcatgaatggtccccaccccctctaggtttactggcggctcggctgcagcgagttctcatctctttgtcgaggcattgagcgatatgtttgtttcattttcctccttcctgccttgtgattatctggtgtgtgtgtgggtgtgtgactgacgaagtcgccgc

SEQ ID NO: 92286 - DNA, 532 bp, Zea mays
  unsure (1)..(532): unsure at all n locations
gagctgtgtacaagcacataggatagtattgctgctaccggtccggaattcccggggactctcccatgcggtatgtcgatatcggcatcccagcgaacaacatggggaggaacagcattggatgcctgttctggcttttggccaggatggttctgcagatgaggggcactatcctccctgggcacaagtgggaggtcatggtggatttgttcttctacagggacccagaggaagcaaaggagcaggaggaggaagctgctgttgcccctgagtttgccgcaatcactgattaccaaggagctgatcagtggggtggtgaccagtggacctctgatgtgactgcgccgcctgttgctcctactggtgctgattggggtgctgctccagctccggttcctaccggtgatggctgggatcaagctggggcccctgcacctgtggtggacggcactgtacctnctctggttgctcctactgggtgggaccaagcagccccgtcaccgactgcccaagggctggagtaggcgttgtc

SEQ ID NO: 92287 - DNA, 531 bp, Zea mays
  unsure (1)..(531): unsure at all n locations
tactagttaaaagacaatagaagtagtgctgcaccggtccggaattcccgggtcgacccacgcgtccgcacgaattcaccaaccaaactccactgtctccaactctccatcgcgtctgctacgcctctggtgcaggacgaccaatggcttccaggaagttcttcgtgggtggcaactggaaatgcaacggtactggcgaggacgtgaagaagatcgtcaccgtgctcaaccaagccgaggtgccctctgaagacgtcgtcgaggtggtggtgagtccgcctttcgtttttctgcagcaggtcaaggggctgctgcggctggacttcgccgtcgcagcgcagaactgctgggtgcgcaagggcggcgccttcaccggcgagatcagtgctgagatgctggtaaacctgcaagtgccctgggtcattttgggacattctgagcgcagagctctgttgggtgaatccagtgattttgttgctgataaagttgcatatgcactcactcatagtctcagggtaatngcttgcattg

SEQ ID NO: 92288 - DNA, 537 bp, Zea mays
aaaggtgaacatcagccaatggatagtatcgctgctaccggtccggaattcccgggtcgacccacgcgtccgaattaatgttccccgctcaagatttctcccggtgaaggctacatctgatttattgcttgtgcagtctgatctttacaccttggttgatggctttgtcatccgcaatccatccagagcgaatccagctaacccttcgattgagcttggacctgagttcaagaaggttgccaatttccttgctcggttcaagtccatccccagcatcgtcgagcttgacagcttgaaggtttctggtgatgtctggtttggttctggaattacgctcaagggcaaggtgacaatcaccgtcaagtctggagtgaagttggaggttccagatggagctgtatttgaaaacaaggatgtcaatggccctgaggatccttaagctatgcttgccgtcaccaagtttttccaaggattttgtcataggagccgccaacccaaatcaactccacttggctttaccttttgaaatcttgtgcc

SEQ ID NO: 92289 - DNA, 536 bp, Zea mays
ccttctgtacccgaacatagtacgtcctctcttcggttctgaattcccgggtcgacccacgcgtccgcttctccctcttgccggtcccgaataaagagcagcagcgcaagaggtcggtagagcgagaagaaggcaatggcggccgagagcttccttttcacctcggagtccgtgaacgaggggcaccccgacaagctgtgcgaccaggtgtcggacgccgtgcttgactcatgcctcgcgcaggaccccgacagcaaggtggcctgcgagacctgcaccaagaccaacatggtgatggtgttcggcgagatcacgaccaatgcgaccgtggactacgagaagatcgtgcgcgacacctgccgcgagatcgggttcacctacgacgacgtgggcctcgacgccgaccgctgcaaggtgctggtgaacatcgagcagcagtcccccgacatcgtgcaaggcgtgcacggtcacttcacgaaacggcccgaggagatcggcgcgggcgaccagggccacatgttcgggtacgccaccga

SEQ ID NO: 92290 - DNA, 540 bp, Zea mays
gaggaagttgatgaggggagggggggcagtatgtatcggtccggaattcccgggtcgacccacgcgtccggtgcaggggcaggggcagggctctagcgtcaccaagattggactatggggtggaccgggagggtcggcacaggacatcacggcagagcggccaccgcagcgtcttcacagcgtcaccgttcgtgctggcgttgccgtcgactccatcgagttcacctatactgacagcgctgggcagaggcgcgccgctgggcgttggggtggacttggcggcaatgttcgaacgatcgaccttggcaacgccgaggatgtcagggaagtctcgggaacatacggcgcatttgaaggtgccactacgctgacctcgctcaggctcgtcaccagcagcagaacctggggccccttgggggtcgagaacggtacgcgtttctccgtcacggcgcccatcggcagcagcatcgtgggattctatgcgccgtgcggtaacaatgctcgtcgacgctatcggtgtttacttgcttcagagttaat

SEQ ID NO: 92291 - DNA, 545 bp, Zea mays
ggaggagtgatctacgggggggacggagggtagttttcaccggtccggaattcccgggtcgacccacgcgtccggcacagtcatccacactaacgaacgaactcttgctccgatcacgagctagctgaggtcgacgatggcggctgtgctgaacagcaggaagacgccgcaggcggtggtggccgtgctggtggcggcggcgctgctggcttcgtccgcttcggcggcgatcacctgcgggcaggtggggtcgtcgctggcgccgtgcatcccgtacgcgacggggagggccagcgcgctccccgcgtcgtgctgcagcggcgtcaagagcctcaacagcgcggcgcggaccagcgcggaccgccaggcggcgtgccgctgcctcaagagcctcgccaacagcgtcaagagcgtcaacatgggcaccgtcgccaccatccccggcaagtgcggcgtctccgtcggattccccatcagcatgtccaccgactgcaacaagatcagctaagttacgacgaccaagctaataagcctaccgaacgtac

SEQ ID NO: 92292 - DNA, 553 bp, Zea mays
  unsure (1)..(553): unsure at all n locations
gagaacagcgtcacggagggggaacgaacggcgagtttgttttggtccggaagtctcgagccacgcgtccgcgacctgctcgccaagaccggggtctccccgcgggacatcgacatcctggtggtgaactgcggcctgttcgcgccgacgccgtccttcgcggacatggtcacgcaccggtacaggctccgcggggacgtgcgcaacgtgcacctcgccgggatggggtgcagcgcggggctcgtctccgtggagctggcccggaacctgctgcangtggcgccgcggggcacgcgcgctctggtggtgtccacggagaccatcacccccaattactacatgggcgaggagcgcgcgatgctgctggccaactgcctggtccgcatgggcngcgcggcggcgctgctgtccaccgaccgcgccggcgcgcggttccggctggcgcgcgtggtgcgcacgctgcgcngngcgtcggacggcgcgtaccgctgcgtgtaccaagaggaggacgagcgcggaaacgtgggcatcaacctgtccaaggacctgatga

SEQ ID NO: 92293 - DNA, 558 bp, Zea mays
  unsure (1)..(558): unsure at all n locations
ngtggatgtnnngtacgaaagagacaganctcgtttccccctncntnccgnnntcggccgggcgtcccgtccggctgctcgcctgctcctcctcctagggaaaggacagcggcggcggcggcgagaagttgggcctgaagcccggacgctttctcccgagataccgcaatactgctagagcactgtcactaatgtttgcctatgacaatggagtcacctacaactgccgatggtggtgaactggagagctacttctccttgggtttgacagtatcccactcacagaaagataatgctgaatttccaaaggttctgttgcttctctcagcgtatcttgacaagacagttcagcagaatgaagagttactagactgcagtaaaataaaggagtcgaccactatctttcatggtcagagggtgcctgaacttagtataaagctgcatgcagagcgtattttcaagtatgcaaagtgcagcccatcttgctttgtgctagcacttatctacatggagagatatctacaacaaccaaacttttacctgacggcatttagtgct

SEQ ID NO: 92294 - DNA, 557 bp, Zea mays
  unsure (1)..(557): unsure at all n locations
ngggaagtcgtgtaccgatgcgacgtatggaaggatcgcatcgtctggacttcccgggtcgagcgtcccgggatagatccccgggctccacgccttcacaaccattccgcccgatcccgacccgctttggggacgggattgccgaccggcggtgctgcaccttcctggagatcctcttcgccatcatccttccggccctcggcgtcttcctccgattcggctgctgcagaatagagttctgcatctgcctgctgctcacaatccttggctacgttcccggaatcatctacgcgatctataggcctggtgcgtctcgactctgaccaccacgagagggaatactacacccttgcttagagcatctggttgtgccaagcgggcctgcacagatgagtcgaaatcagtattttttttctcatgtggattgtctgacatggcatatacggcaatgggtaaccaagtgttgtgggctatatctctgttacccaactcgtgagctctctttattgtgctccagatattcaatctgtgatagtgatacctcacgagaataatat

SEQ ID NO: 92295 - DNA, 546 bp, Zea mays
ggagagaagctggaaaacgcgagggagaagtaggaactgcccctgtattaccgtgtcgagcgacgcgtccgagcatagtcgactatatcttttctgcttccagacattgtccacacgagctagtgcactggtgtcggtcgcaaccaaatgaaggacgtactgagccatggcatccaagggcgtcctcttcttggctctcaacctcctgttcttcacagtggccaacgcctgcggcagctgcccgaccccaacgtcgccggtcgtgccaccgccgccgacgtctgcctctgcacggtcatcaagggcaacgtcctcggcgtcgtcttcgatgtccctatcaagttcaatgccctcgtcaactactgtggcaagtgcgtgcccaagggctacatgtgtgcgtaagctccgcgcggttacacgctcgtagccgttcgcgtgcgtaattaagcatgcacctgcatggcacacatgtattgtgcgcctgctgatctctcctgtctcatttgtgcaccttaagttctacagtcctagaaccatattccaggc

SEQ ID NO: 92296 - DNA, 544 bp, Zea mays
  unsure (1)..(544): unsure at all n locations
taagtatgtttaccccgcaacatggatagtatnactctaccggtccggaattcccgggtcgacccacgcgtccgaagagatccaaagggcctctataagcttgctcgtgcaggaaaaataaagggttttacaggagtagatgacccttatgaagcaccactgaattgtgagattgagatcaaagaggtagatggtgtatgccctccgcctgctgagatggcagggcaagttgttacttaccttgaggagaaaggcttcctgcacgagtaggctgaatccaagcaacatctggggaagatttcagtaagactagcgcagaataagtcaaaggcgctggcagttacggtatagcagttgcatagattggcctcaatgccttagtattttctttccgtacttgctcttccacaggctccatgcaatttcattcagatgagcctggatggttcctaatttctttgacctctagagtagattacttgtaatgcaactctgataactacttggggcagtatcgatgtggcaatcgcaaaacaaaaaaaaa

SEQ ID NO: 92297 - DNA, 563 bp, Zea mays
agtagggcacatgaggtctgagttcgtccttatggtacctcgcgacggtcctgaattcccgggtcgacccacgcgttcgcccctcccaaagctcgccccgctcccagctagggtttcctcttcccatccacagccgccggggcgccgtcggggaggacagcgccgtcacgatgttggagttgcgtctggtgcaggggagcctcctcaagaaggtcttggaggcgatccgcgagctggtcacggacgccaacttcgactgctccgggaccgggttctcgctgcaggccatggactcgagccacgtcgcgctcgtcgcgctgctccttcgcgccgagggcttcgagcactaccgctgcgaccgcaacctctccatgggcatgaacctcaacaacatggcccagatgcttcggtgcgctggccaccaggacattatcaccatcaaggctgacgacggctccgacaccgtcactttcatgttcgaagtcgccaagcaagattagatcgccgatttcgagatgaaactgatggacattgatagcgagcaccttggaatcccggattcg

SEQ ID NO: 92298 - DNA, 516 bp, Zea mays
  unsure (1)..(516): unsure at all n locations
gttagtnntcagagtctgttaagaaacccgccaaagaggtatgctctaccggtccggaattcccgggtcgacccacgcgtccgctgtcacacacacacacacagacaagtggtttccaaagccaagtgtgtgtactagcaacgagctagctcgggcggcagcaggcagccatcatgtcggaggagaagcaccaccacttcttcaaccaccacaagaaggacgaggagcagcccgccggcgagtacgggtactccgagaccgaggtggtcaccgccaccggcgagggcgagtacgagaggtacaagaaggaggagaaggagcacaagcacaagcagcacctcggcgaggccggcgccatcgccgccggcgccttcgcactctacgagaagcacgaggcgaagaaggaccccgagcacgcgcacaggcacaagatcacggaggaggtcgctgccgcggcggccgtcggcgccggcggctacgtattccacgagcaccacgagaagaagaaggaccaca

SEQ ID NO: 92299 - DNA, 560 bp, Zea mays
  unsure (1)..(560): unsure at all n locations
agtagtgaccgagaggtttgatttcgttctcatgctatcatcccacttcctaattcccgggtcgaccgacgcgtccgggccactaacactagttatcacatccaccataacgaccatggctaccacctcagctttgctagctgttgtctgggtagccagcctccttgcaggcacggtgttcagtgatgatatcgtacccatccatatacccttgttggatcggttccaagcctggcaggccgaatacaaccgcacatatgcgaccccagaggaattccagcaacgcttcatggtctatagcgagaatgtcaagttcatcgagaccatgaaccagcctgggagctcatatgagctcggtgagaaccaattcgctgacctcaccgaagaagagttcaaggacacgtatcttaataagcttgacaacgtggcctcgtccccttaagccatggcactgaccgtcgataccatgaatagaacaagcacatctggcggcagcaacaccaacgaggctcccaataatgtggactggatgaccaatggagcagtgactccngtcaaaa

SEQ ID NO: 92300 - DNA, 573 bp, Zea mays
  unsure (1)..(573): unsure at all n locations
taggagtctcttgaggtttngtttactgatactataagaatagtactgcacgcctctaccggtccggaattcccgggtcgacccacgcgtccgatcccagcatccgagagagctccacaggccaggtccccatcgccgcggcgcttgcggccacctcgcccccgcccggtagtagcctcgccgccgttgccgagatggggttcgtgtccttcgtcgggagggtgctcttcgtcgccgctttcctcctctccgcctaccaggagtttaatgaattcggtgctgatggtggaccagcagctaaggcccttcggcccaaattcaacgtgtttgtcaaaaatgtatctgctcatctgggagtagctgtgccacacattgagttgaagcatgtgattgctgctacaattggtcttaagggtcttggaagcctcctttttattttgagcagctctctcggtgcttatctcctgctgctgtaccttgctttgatcactcctatcatccatgacttctacaactacgatatggagaaggcagaatttgcaggcctctttgcgaagttcacccaggatttgg

SEQ ID NO: 92301 - DNA, 563 bp, Zea mays
  unsure (1)..(563): unsure at all n locations
agtagggcncnttaagtctattaagatntatcagccaaagaatgtaatgcctctaccggtccggaattcccgggtcgacccactcgtccgcaaggataactgcccggtacggacattcagaggacacaaaaatgaaaagaactttgttggcttgtctgtgaacaatgaatatattgcttgtggaagtgagacaaatgaggtttttgtttatcacaaggctatctcgaaaccggcagcaagccatagatttgtatcttctgacccggatgatgccgatgatgatcctggttcttatttcattagtgctgtctgctggaagagtgatagccctacgatgttaactgctaacagtcaggggaccataaaagttcttgtacttgctccttgatgttatggagggcgttcaagaggttcacagtactgtccagttgtttcctttcgtgtcattatattcccccaaaattgggaacggtggcataattgatctccggttagggaatgaagttttgcagatggtcagctgacgtagggttttgaggtatcagaatgtgcatagtcatgtt

SEQ ID NO: 92302 - DNA, 577 bp, Zea mays
  unsure (1)..(577): unsure at all n locations
tagtgagtacccntaagagtgtgtttacgtatntatcagaatagctactgtatgcctctaccggtccggaattcccgggtcgacccacgcgtccggtcacacacacacacacagacaagtggtttacaaagccaagtgtgtgtactagcagcgagctagctcgggcggcatcaggcagtcatcatgtcagaggagaagcaccaccacttcttcaaccaccacaagatggacgaggagcagcccgccggcgagtacgggtactccgagaccgatgtggtcaccgacaccggcgagggcgagtacgagaggtacaagaaggaggagaaggagcacaagcacaagcagcacctctgcgaggccggcgccatcgtcgacggcgccttcgcactttacgagaagcacgaagcgaataaagacccctagcacgctcacaggcacaagatcaccgaggaagtcgcttccgcggcagccgtgtgcacctgcgggtacgtattccacgagcaccacgagaagaaaaaggaccacactgacacccatgaggccagagggctaaaaaaacgccaccacctcttttggt

SEQ ID NO: 92303 - DNA, 571 bp, Zea mays
  unsure (1)..(571): unsure at all n locations
gagtagggcccntggagagtctgattcacgaatctaaaagactatgtactgtacggtctggaattcccgggtcgacccacgcgtccggggttaggaaggcggcggccagcggcgagaggaggaggggtgggtcagccatgacggggaaggcgaagccgaagaagcacacggcgaaggagatcgccgcgaagatcgacgcggcgacgacgaaccggggcggcggcaaggccgggctggcggaccggctggggcaggacaagggcgggcatgcgaagctggcgtgcccgctctgccgcaccccggcgcccgacatcaagtccatgcagatccaccacgaggcgcgccaccccaagctccccttcgagccggagaagctcctcaacctgcactccttcgtccccgctgctgctgttgccgtcgtcgtcgtcgtcgtcgtcgctgccgaggccaccaccttcaagcccaagcccggcgttcgcggcagcctcaagaagtaagcttggctgcttggttggcttcgccggctggatggggcacaattcccttcgggttcaatcccattcgncgaccc

SEQ ID NO: 92304 - DNA, 563 bp, Zea mays
  unsure (1)..(563): unsure at all n locations
acgtagggctcgtggaggtctgagtccaggtctaccagacaccgatccgcacgacaggaattcccgggtcgacccacgcgtccgggcggctgtgctgaacagcaggaagacgcctcaggcggtggtggccgtgctggtggcggcggggctgctgggttcgtccgcttcggcggcgatcacctgcgggcaggtggggtcgtcgctggcgccgtgcatcccgtacgcgacggggagggccagcgcgctccccgcgtcgtgctgcagcggcgtcaagagcctcaacagcgcggcgcggaccagcgcggaccgccaggcggcgtgccgctgcctcaagagcccgccaacagcgtcaagagcgtcaacatgggcaccgtcggcaccatccccggcaagtgcggcgtctncgtcggattccccatcagcatgtccaccgactgcaacaagatcagctaagttacgacgaccaagctaataagcctaccgaacgtacacgtacgccccgcgcgctgcacgagtgatgaaaccagggaagaaaataaataaagctagctgtattgccagga

SEQ ID NO: 92305 - DNA, 561 bp, Zea mays
  unsure (1)..(561): unsure at all n locations
aggtagtccccnttgaggtctatttaacgatcatcagcatatattgtatgactcaccggtccggaattcccgggcgtgaggttctccggggttcggcttcgtgggtgagcggatcgagatggcggcgtcggatgttgagtaccggtgcttcgggggcggcctcgcctgggccacggacgaccactccctccacaacgccttcagcacctacggcgaggtcctcgagtccaagatcatcctcgatcgggagacgcagaggtcccgcggcttcggcttcgtcaccttctccacggaagaggcgatgcggaacgccatcgagggcatgaacggcaaggagctggacggccgcaacatcaccgtcaacgaggcccagtcccgcggcggccgtggaggcggcggcggcggcgggtacggtggtggccgtggaggcggcggctacggcggtggctggcgccgtgatggcggcggcggctacggcggtggcggcggctacggtggtggcggctgcggctacggtggtggtggcggcagctacggcggtggcaaccgtggcggcggcta

SEQ ID NO: 92306 - DNA, 566 bp, Zea mays
  unsure (1)..(566): unsure at all n locations
nagtagtcccntaaagtgtgttacagaantatccgcataataatgtatngctctaccggtccggaattcccgggtcgacccacgcgtccgctggttgcaacggtcatggcgacgtcgtctcgtcgggtgcccttgctgctgctgtgcctgggcgtgctggtgtcctgctccttcgcggcgggcagcttggaccaggagctggacatcacgtggggcgacgggcggggcaaggtccttgacaacgggcggctgctgacgctgtcgctggaccgcacgtccggctccgggttccagtcccggcacgagtacctgttcggcaagatcgacatgcagctgcggctggtgccgggcaactccgccggcaccgtcaccgcctactacctgtcgtcgcagggcggcgcgcacgacgagatcgacttcgagttcctgggcaacgtgtccggcgagccctacacgctgcacaccaacgtgttcacgcggtggcaggggcagcgggagcagcagttccgcctctggttcgaccccaccgtcgacttccacacctactccatcctctggaaccccac

SEQ ID NO: 92307 - DNA, 522 bp, Zea mays
  unsure (1)..(522): unsure at all n locations
aggttagtnnttnaaggagtcttgttacgacatacgggggggaggatggtaagctctaccggtccggaattcccgggtcgacccacgcgtccggattagttacttcaatgcaaaatttttcaggaacagtattaatgtgtggtaccagttcattccccagctgatcttcttgaacagcttatttggctacctgtccttgctcattattattaagtggtgcacggggtcgaaagcagacctataccacgttatgatctacatgttccttagcccaacagatgatcttagtgagaaccagttgtttagtggccagaagacagtgcagcttgttctacttctgcttgctttagtgtctgtaccttggatgttgattccaaaacctcttcttttgaagaaacaacatcagcaaaggcatcaaggtcaccagtacgctatgcttcanggcattgatgaatcagtgggagcagaattgggggaacatcatgaggacgcacatgaccacgtagagtttgagttcggtga

SEQ ID NO: 92308 - DNA, 567 bp, Zea mays
  unsure (1)..(567): unsure at all n locations
nagtaggtcctcntnagagtgtatgtccagctctacagataccatcgtaccgtcatgaattcccgggtcgagccactcgtccggaagaaaaggagatagagtacaggttacagacaggcagagagcaaagatgtgtggtggtgcgaggctcgcggagctcatcccgaccacgccggcgcgccgcggcggcgcggcgtggcccgccggcaagtgcaagcggcggaaggcgaacgacttcgaggccgcgttccgggagttcgacgaggactccgaggaggaggaggaggacgacgagggggtggtggagagcaagcccgccttcgtcgtcgtcgcctcgtccgcggcgacgcagcccagggcgcgccatgagcagcggagccggcgccgggcgcccgaccagcatcagtacatgggcgtccggcgccgtccgtggggcaagtgggccgccgagatccgcgaccccgtcaagggcgttcgcgtctggctcagcacctttcccttcggcgatgccgtcgcgcgcgcctacgaccacgccgtgcgccacatccgcgggcccagggccaaacc

SEQ ID NO: 92309 - DNA, 562 bp, Zea mays
  unsure (1)..(562): unsure at all n locations
aggtagggcccgtggaggtctgatcctgcatctagaagctatgcatggtacggtctggaattcccgggtcgacccactcgttcgcggacgcgtggggttagaatggatcctcgaaacaaagaagttaatctcgatagtttaatgtatggtacaaggggtggactaacagaacaagaactaataaaacaagaagcagaatacatttaccgttaccgttacaatggtggtggggcaactcaagtttggctaagttctggaagatttgttgtaatagatctttcagcgggcccttgtacatatgggaaaatagaaactgaagaaggcagtgtcagctataggtcaatgccacggctgtcacaaataatcttcccaagaggacttgctgccccaagtgctagttcaacgcaagatattttcattgggcagctcggaggtgcaattgcaactaccattgagcatgtgatagctcctgatataagatttgaaactgttgacatggcagtgaggttgcttgtacctattatngtgctacagaaccacaataggtacaacattcttcaan

SEQ ID NO: 92310 - DNA, 564 bp, Zea mays
  unsure (1)..(564): unsure at all n locations
agtagtanccatgaggtgtgatcacgantacaagcaagtactgcacgcctcaccggtccggaattcccgggtcgacccacgcgtccgcctgaaccggactaagctgttcccccctgctaatttcaagatcgtgggtgcatcagcgctgaagccggactatgcctgtggccagccggtgcctgtcagcccaaccgcgttcccagacccgagcgggcttgactcgacgacgcttgctgtggcaacatggcaggtcgtgtgcaacattaccacgacaaagggggccaagcccaagtgttgtgtgaccttctcggcgtactacaacgactcagtgatcccctgcagcacctgcgcttgtgggtgccctgcaaacaggcgagggccaacgtgcagcaccaccgcacaatccatgctgctgccaccggaggcgctgcttgtgccattcgacaaccggtcacagaaggcgttggcgtgggctgagctgaagcattacaatgtgccccggccgatgccttgcggtgacttctgtggcgtgagcatcaattggcatgtctcaacggactacaa

SEQ ID NO: 92311 - DNA, 502 bp, Zea mays
agaaggttcaggcttgaaaacgcatccgactagatgtataggcccggaattccgggtcgacccacgcgtccgctgaccatctatcacttcgaccttcccagctctgcagatgaatacatcggcctgcgagtccgagaatcatcgatgattttaccgcttacgcagacgtgtgcttccggagcttctgcgacagggtgaagcactggatcacggcgaacgagcccaacatcgagcccatcggcggctacgaccaacgctacctaccgccgctccgatgctgctacccgtttggactgggcgtcacctgcacccacggcaacttcacgacggatccgtacgccgtcgtccaccacctactgctcgcgcatgcgtcggctgtgttcctctacagacgcaagtaccagggcgagcaaggaggacggattggactgacgttgctggcctggtggtatgagccagcgacgcagaaacccgacgatgtagaagcagctgccagagcaaa

SEQ ID NO: 92312 - DNA, 520 bp, Zea mays
  unsure (1)..(520): unsure at all n locations
aggggaggggnnntagagtctgttacgaanacgggggagagatggtatgctgtaccggtccggaattcccgggtcgacccacgcgtccgcaaagaagctctctctttcgcgcaatgtcatctgctccaagtgcaagggcaagggctcgaagtctggtgcctcaatgaggtgccctggttgccagggctcaggcatgaaagtcactattcgtcagctgggcccttccatgatacagcagatgcagcagccttgcaatgagtgcaaggggactggagagagcatcaatgagaaggaccgctgcccagggtgcaagggtgagaaggtcattcaagagaagaaggttcttgaagttcatgttgagaaggggatgcaacacaaccagaagatcaccttccctggtgaagctgatgaagcgcctgatactgtcactggagacattgtattcgtcctgcagcagaaggatcactccaaattcanaggaaagggtgaagatctcttctatgagcacaccttgtctctt

SEQ ID NO: 92313 - DNA, 569 bp, Zea mays
  unsure (1)..(569): unsure at all n locations
agtttagtctcntttagatgtgtgtttacgatactacaagcatacgatggtacggtccggaattcccgggtcgacccactcgtccgtgctgccttcgcttccctggtcagctgaattctgacctccggaagcttgcagtgaacctgatgcgcttccgacgtctgcacttcttcatggttggatttgctccactgacctcgcggggctcccagcagtaccgcgctctcaccgtgccagagctgacccagcagatgtgggactccaagaacatgatgtgtgctgctgaccctcgtcatggccggtacctcacggcatctgctatgttccgtgggaagatgagcaccaaggaagtggatgaacagatgctgaacgtgcagaacaagaactcttcctacttcgtagagtggatccccaacaacgtgaagtcgagtgtgtgtgacattccaccaattggcctgaagatgtccttcacattcgttggcaactcaacctncatccaagagatgttccgccgcgtcagcgagcagttcacggccatgttcaggaggaaggctntcttgcactggtac

SEQ ID NO: 92314 - DNA, 550 bp, Zea mays
  unsure (1)..(550): unsure at all n locations
agtagggccgtaggtctgtgttcgttnctgtcaatcccatggcacgttccgaattcccgggtcgacccacgcgtccggcgccgtcaccgcgcacctctggcgttgcatgtgcgtctcgcgcgggctcgccccgggctcgggcactcgggtccgcgtgccggccaacgtccgccaccgcctgcgcccgccgctcccgcggagctacttcggcaacgccatcgtgcgcgacctcgtgaccacccgggtggaggacgtcctggaacgcccgctcgggttcgtggcgcatgcgatcaaggacgcggtggaccgcgtcaatgacgcctacgtgcgctccgtggtcgactacctggaggtggagtcggagaaaggcagccaggcggcgcgcgggcagctcatgccggagtccgacctgggggtggtcagctggctcgggatgcccatgtacgacgccgacttccggtggggcaacgccgcgttcgtagagcggcgcatatgttcggcaacggcacgggctacgttacgcaacgcgccaactgggccaccgcgttcc

SEQ ID NO: 92315 - DNA, 558 bp, Zea mays
  unsure (1)..(558): unsure at all n locations
tagtagttctcttaggtcagttatagatctaaaggtagngattgcattgtcntgaattnccggatcgaccggatcgttccacgcgtccgcttagcagctggtgaccagaagtgtgcatctacaattgaaatgcttaaaggcattgtgaaagaggacagcactactaactctgctaaacaacacatggccttattatgtctgggagaaattgggaggaggaaggacctcagcaatcatgttcaaattgagaacatcgtcattgaatcgtttcaatcaccttttgaggagattaagtccgcagcatcctatgcacttggaaacattgctgttggcaacctctccaagtatttaccatttattttggatcagattgacaatcaacagaagaagcaatatctgatgctccattcacttaaagaggtaatcgtgcgacaatctgttgatcatactggccagagtgagctacaggattcanacattgagaagatattggcattgctcttcaatcactgtgaaagtgacgaggagggagttcggaatgttgttgcacagtgttta

SEQ ID NO: 92316 - DNA, 557 bp, Zea mays
tagtaggggcctagagtctgttttcgtactcccactcccatccgcacgtcttgaattcccgggtcgacccactcgtccgcggacgcgtgggcccgtcctgtccttccacccggcggcttaaaccctagttctcactcccatcggcgcttgagctccgccgctgcagatggagttctggggtctcgaggtcaagcctggttccactgttaagtgtgagcctggatatggctttgtgctgcacctttcccaggctgctcttggggaatcgaagaagagtgataatgccttgatgtatgtcaaaattgatgatcagaaacttgccattggaaccctctctgttgacaagaacccacacatacaatttgatctgattttcgataaagagtttgagctgtcgcacacatcaaaaactaccagcggtttctttactggcttccaagtttaaccggccattcgagggaagaatgaattgattcttggatcttgagaagaagacgaggagctggatggtcccattgtcaagggaaaatgccaaacttgtgagaagaaaccgaaag

SEQ ID NO: 92317 - DNA, 566 bp, Zea mays
  unsure (1)..(566): unsure at all n locations
naggtgaggcgcgtagaggtctgatcacgattacaagcaagtantgcacgactcaccggtccggaattcccgggtcgacccacgcgtccgggaaaaaacactttgatcactcattcatcgtgaagctccttaatcttcttgactccgaggatcgaagagagagggattgcttgaaaactattctgcacagggtatatgggaagttcatggtacaccgtcctttcatccgcaaagcagtgagcaacatattctaccagtttgtctttgagactgatcggcacaatgggatcgcggagctgctggaggtctttggcagtgtcattagtgggtttgcattgcctctgaaagaagaacacaagatctttctttggagagttctgattccgttacacaaaccaaaatctgttggtgtgtatcttcagcagttgacctactgtgtaacacagtttctggaaaaggacccaaagcttgcaagctcagtgataattggtttgttaagatattggccgataacaaactgtcagaaggaagtgatgtttctcagtgagattgaagagatcttggag

SEQ ID NO: 92318 - DNA, 515 bp, Zea mays
  unsure (1)..(515): unsure at all n locations
agtaagggntctagagtctaaatagagaatgggggaagacggtaagctgtaccggtccggaattcccgggtcgacccacgcgtccgtccacaccccccgagctcagcttacctccactccagctccaatcacagtcgtgaccagagcgagagctagctagagggccgtgaaaatgccgatcaataggatcgccctggggagccaccaggaggtgtaccacccgggcgccctcaaggcggcgttcgctgagttcatctccaccctcatcttcgtcttcgccggccagggctccggcatggccttcagcaagctgaccggcggcggcccgacgaccccggcgggcctgatcgcggcggcggtggcgcacgcgttcgcgctgttcgtggcggtgtcggtgggcgcgaacatctccggcgggcacgtgaacccggccgtgaccttcggcgccttcgtgggcggcaacatcaccctgttccgggggctcctgtactgggtggcgcatctgctggggtccc

SEQ ID NO: 92319 - DNA, 570 bp, Zea mays
  unsure (1)..(570): unsure at all n locations
naggtagggcccgtagaggtcntgttcacgcactatcaagctatgtatttgcacctccggaattcccgggtcgacccactcgtccgaaaccgccaagtgatcatgcctcttgttgttccagcgctagagcagaacattcagaatcactgggaccaggcggtcctgaatctgaccgtgaatgtcaagaaaatgttatctgagatggacgacgatctcttctcgtcatgcctggccaagtacaaggacgaagaagaaaaacgcgcgtcgctagaagcgaagcgtagacttacgtgggagaagctcgagtcagctgcagctttccagccagtgactggccatacagccgtcctagtaggccaccggccgtcagcaaatctgatcgccaccatgatctagctcatgcatgtatgccgaacaagcgaaagtggtgctcttccccccttttggtgaagcgcagcangtgtaatggtctctattttgctcctggttattattattattttccttttgcttgcatgggtaatcagtgtaatagtaaagtgtaactatttccggatgtttatgttcttc

SEQ ID NO: 92320 - DNA, 558 bp, Zea mays
  unsure (1)..(558): unsure at all n locations
agtgagggccntagagtctaatccacgctctacacgcaatgtantgcacggtctggaattcccgggtcgacccacgcgtccgcgcagccgagggcatgtacacgggccagttcgtctactgcggtcgccgcgccaccctctccatgggcaacgggctgcccctccgcgggatccctgagggtgccgtcgtctgcaacgtcgagcaccacgtcggtgaccgcggtgtcttcgccagggcctctggggactacgccattgtgatcagccacaaccctgacaacggcacatcgaggattaagctgccctctggcgccaagaagattgtccccagcagctgccgtgctatgattgggcaggttgctggtggaagcaagactgagaagccgatgcgtaaaggtggttaccccgtccacaaggtccgtgtggagaagaacagcttgcccaaagtgccttgtgtggccatgaaccctgtggagcattcccacggaagatgtaaccaccaacacatcggtcacgcctttactgttcgncgagacgctccccctggccagaaggttt

SEQ ID NO: 92321 - DNA, 554 bp, Zea mays
  unsure (1)..(554): unsure at all n locations
agtgagggccttagagtgctattcagctcacacgacaagtanagcatgacctgcactcccgggccgaggcattcgtacgatcgggtggctcgtggtcagagtccatctgctgatcgaggatgccgagctctgatccgtcaaggaccacttggtcaccactgattacatgacctacatgttcaagtacatctccgtgcacggacaatggtagcacagcgacatatccctaacggtctccaatactcttctattctgcgagatgccagtcaactactttaggatcaggaactccgaagagatcccgtggcgtgaggctggtgctgagtatgtcgtgaaggtcatcgacttgtaacttacatggacaaggttgtggacatttgaagggtggtcccaaaaaagtggtaactcttgaccaatcctagatgcaacgatggttggtgatgatttcaatgaggacaatgacctcttcgatgttaacaattgctttcaaagctagctgtacctacaaatggcattcttctcaatgcttaagtcattcatgaaaactttgtcat

SEQ ID NO: 92322 - DNA, 557 bp, Zea mays
  unsure (1)..(557): unsure at all n locations
agttagacacntagagtctaataaagatctataagcaaatactgcacgtctctaccggtccggaattcccgggattcgtttgcttttcgtcttcgtcctctctttgcccagctgtcggtcgcccgcgccgtcgtcttcgctccggcggccgggctgcgaaaccctagcgaggcgagcgagagagaaactagcggccatgttcagctacaggaaggctggcccggacctcgaggccggcgggtcctcgctgctgtacccggggatgacggagagccccgagctgcggtgggcgttcgtccgcaagatctacgtcatcctagccgtccagctcgccatgacggccgcggtctccgccttcgtcgtcaaggtgcccgccgtctccaacttcttcgtctcctccaacgccggggtcgcactctacatcttcctcatcatcctgcctttcctcgtgctgtgccctctgcgctactaccaccagaagcatccggtcaatctgctgctgctcggcctcttcaccgtcgccatcagctttgccgtcggcatgacatgcgctttca

SEQ ID NO: 92323 - DNA, 560 bp, Zea mays
  unsure (1)..(560): unsure at all n locations
agtgagtcccttagagtcntaaacacgcatctataagcaatttactcgaaggactctaccggnccggaattcccgggtcgacccacgcgtccggcgccgcgcctctccggcgcgggcctgcacaggctgctggccgacgacgtggtgttcgcggcgctcaaggacagcgcggccatggggtacctggctcccgagtacgcgacgacggggcggtccacggacaagcagggcgacgtgtacgcgttcggcgtggtggtgctgcaggtgctggcggggcggcgcgccgtgtcgccgccccacctccagcagggcggcggcggctgcgggcggctggacgacctcgtggacccgcgcctgcgcgggcggttctcgcgcgccgaggccgccaagctcgccggcgtcgcgctgctctgcaccgacgaggcgcccgcgcagcggcccgccatggccgccgtgctgcagcagctcggcaccagcagccagtgatcgtcgtggtcggccggtacggtggtgggccggagtcggagctcgctggctacctggccggatggtgactgctt

SEQ ID NO: 92324 - DNA, 521 bp, Zea mays
agtaagggaacagaggtgtgataaggccaacaccgccaagaaagtaatgctctaccggtccggaattcccgggtcgacccacgcgtccgcgtcacgcccccaacacccccacaacccgaagcagcgaaagctcccctaacccgctccgcgcatccgatcgcaaggaagaagagggagatgagctactacgggcagcagccccccgtcggcgtcccgccgcagcaaggctacccgggcaaggacggctacccgccagcggggtacccgccggccggcgcagggctaccctccgcagggctacccgccgcagtacgcgcagccgccgcctccacagcagcagcagagcagcgggccttccttcatggagggatgcttggctgccctctgctgctgctgcctcctggacgcctgcttctgagagtgagaggggccgaccgacggattcgacacggcgacaagtgaaactactagctttctatgcgagggagagagagagagagctggaactggattgagcctgg

SEQ ID NO: 92325 - DNA, 524 bp, Zea mays
  unsure (1)..(524): unsure at all n locations
agttgagggaatcgaggagtgctanaatcgacgttacggggggacagatgagaaagcttgtaccggtccggaattcccgggtcgacccacgcgtccgcacagatttgaaatggcggtgatcgagatatatgatcaatctagggcgggcaataaagaggtcacgaagctcatactagggaagcataatcttttggcaccaattacatcttatgcccgccctgaggtggcagtaaaatcccagtcatactttttcacccattcagtaaaagcaatggcagttacacaaacggctaaggggatcacttccaagcagcttctgttgggtactattggtgaccaggttttggcacttgataagcgctatcttgatccacgccgttcagtgaacccgacacagcaagaaaaagaagagggcattataccattaacagattctttgcctataataccccagtcctttgtgacgcactctcatcaagtggaggccctgcgagccattgtttctattcctgcaaagttggagc

SEQ ID NO: 92326 - DNA, 519 bp, Zea mays
agttagtttatctaggagtctcacatcgacacaacccgcgaaaacagtaatgctctaccggtccggaattcccgggtcgacccacgcgtccgtaatgcttttcctgttcaacattatttacactagagtctgtagcaacagtagctacatggataggtgtaccacagccttgctccagactctagtgtaaataatgcttttcctgttcaacatttcagtccgaggcatacacaagccatgccagactttgctcgtgtatacaacttcctgggaagcatatttgatccagagacaaatgggcatttgcagaagttgaaggaaatggatcccattgatgctgaaacggtactgttgctgatgaaaaatctgtcaatcaacctaactagtccaaactttgaggagcataggaggttgctctcttcggatgcctcaagcatggatcaaaagtcgggctcttcccgggttcatctcccgttcatgataacgagcaagtgagagaagcagctggctggcctgaag

SEQ ID NO: 92327 - DNA, 565 bp, Zea mays
  unsure (1)..(565): unsure at all n locations
agttagggcncntagggtctgttccagctctacagatagcatccgcacgtctntccggtccggaattaccgggtcgacccacgcgtccggggatatcctctggcattagagaatattcatcttgacaagaaattatctatatgtgaagatatgtctgacaagggctatagctcagttcggtagagcaactcgtttacacgtgcgccaatgcttttcaagggaactttttatgcaatgaacataattgaccttgttgcaaaatcaatgtcttacttcatggattcgaaagaatagaagaacagtagcctgacaatgacaaacagctggttcagtccgattcaggtgccaattaaggtgcttactcaaatagaactcctattgatttgctagttgataaggtaaatatccagcccactcaatgctaggcgtaatgaggataagggcctccaaaaaacttcttttcgttctatgaactttaaggtgtatgaagtctcatagtaaactcttgcagcggaacgatagagactccatttcacttaggttgatttaatttacgcctgaggca

SEQ ID NO: 92328 - DNA, 562 bp, Zea mays
  unsure (1)..(562): unsure at all n locations
agtgaggaccgtagagtcagtttttcgttactcccacctccctaccgtaccttccnctcccgncttgactagccgggtcgacccacgcgtgcgtggatatcctgtggcattagagaatattcatcttgacaagaaattatctatatgtggagatatgtatgactagggctatagctcaggtcagtagagcaactcgcttacacgtgcgccaatgctttacaagggaactttttatgcaatgaacatagttgaccttgttgcataatcaatgtctaacttcatggattcgaaagaatagaacaacagtagcctgacaatgacacacagctggttcactccgattcaggtgccaattacggtgcttactcaaatcgaactcctattgatttgctagttgataaggtaaatatccagcccactcaatgctaggcgtaatgaggataaagacctacaaaaaacttctgttcgttctatgaactgtaaggtgtatgaagtctcatagtaaactcttgcagcggaacgatatagactccatttcacttaggccgatttaatttaggcc

SEQ ID NO: 92329 - DNA, 564 bp, Zea mays
  unsure (1)..(564): unsure at all n locations
agtagtttcccttagagtctatgctgaggctacaganatcgatgcacgacctaccggtccggaattcccgggtcgacccacgcgtccgcgactgtggccaccctcctcggccgcctgtacttcaactccggcggcaacagcaagtggatgggcacgctgacgcagtctggcggctcgccgcttctggtcgtcccgctcctcctgtcgccggcgcgctcggcggaggagcgccggccggcggcgctcaagatggttgccatctacgcgggcatcggggtcatgatcggcttcgacaacctcatgtactcgtacgcgctgcagtacctgccggtgtccaccttctcgctcgtggccgcgacgcagctgggcttcaacgccatcacctcgcgcctcatcaacgcgcagcggttcacggcgctgatcgccaactccgtggtcgtgctcaccttctccgtcgcgatcctcggcgtcagatcctcctgcgacgagacctacagcaacgtgccgcgcggcaagtacccactggggttcgtactcgtgctggccgactcgacggtgttcgcg

SEQ ID NO: 92330 - DNA, 554 bp, Zea mays
  unsure (1)..(554): unsure at all n locations
agttagttccatggttcnnacatgatactaccgatcccttcgcatgacctaccggtccggaattcccgggttgagcctttgattagtaagcaatggtttgttacgatggagccattggctgaaaaggctctccatgctgttgaaaaggggcaattaaccattcttccggagagatttgagaagatttataatcattggctaacgaacataaaggattggtgtataagtagacaattgtggtggggtcatcgtataccagtttggtatattgttggaaagaaatgtgaagaagactatattgttgctagaaccgaagaggaggcacttgcagaagctcatgaaaaatatggaaaatcagttgaaatatatcaagaccctgatgttcttgatacttggttctcaagtgctctgtggcctttcagcacgcttggttggcctgatctttccaaggaggattataagcatttttatccttcaactgttctggagacaggccacgatattttgttcttctgggttgcacgaatggtcatgatgggaatngagttcacagg

SEQ ID NO: 92331 - DNA, 517 bp, Zea mays
  unsure (1)..(517): unsure at all n locations
agtaagtnntaaggagtctgttacgtaaaccgcnggaagatggtatgctctaccggtccggaattcccggggtgtgagtcacgcatgaacactcaaaatggtgaccgtccattttttgattttctggaatcatccctcagacatagagcagaaatggtggctttggaagctgcacggaagataacagagatggatgttacaagccgtgaattggcaccagcaattactttgttacagttatacttgagttcatccaagcctgtgcttcgatttgctgctgtccggactctcaataaggttgctaggacacgacctctggcggtgacaaactgcaatgtggacttggagagtttgttgtcagaccagaacaggagtatagcgaccctggcaattactactcttcttaaaactggcaatgaatcaagtgtggatcgtctcattaaacaaattacccttttcatgtctgacatagcagatgaattcaagatagttgttgttgaagctatacggtctttgt

SEQ ID NO: 92332 - DNA, 519 bp, Zea mays
  unsure (1)..(519): unsure at all n locations
agtttaggnntcagagctctaataccgccactaccgcaagtatgtaatgctctaccggtctcggaattcccgggtcgacacactcgtccgataacttatcaccgtctgtagaatgctcttatgtgacatgtgagaagattcgtccttcgggctctgatgctgtccaggatgcttgaacttatgatatcgaagatgcttagaactctactggtgtacagacctcatctgcttgtgaagctagtctcgatgaaatgcacaatgcttgtgcgaaattctcatacaatcacagatgattgctgaatgcattcatccgtaaaaaccctggattgctgctgaagtcattctcgctgatgttgaaaattcctcgcctgattgattttgacaatcaacgtgcatattttcggtctaaaatcaagcatcagtatgatcatcatcatcatagccctgctagaatctctgtgcatcgtccatatattcttgaggactcctacaatcagcttatgatgcgatctgctcagg

SEQ ID NO: 92333 - DNA, 502 bp, Zea mays
  unsure (1)..(502): unsure at all n locations
agtntaggtgttttaatcatgantacgtagcaatcgcactgctgtaccggttcggaattcccgggtcgacccacgcgtccgccgacgacatcgtggacttggctcacggcaagcggctgtgggagctagccaaggacaagtatgagccgctgtggatcaaaggcggtgggcactgcaacctggagacgtacccggagtacatcaggcacatgcgcaagttcataagcgccatggagaagctggccaaggacagcagcaaggcggcccaggcgccgccgccgtcgagcatggccgccgaagaaagacacaccaagtgcttgagattcgggaagagatgagatgccggcgacctggacctgggaaggaaacgcggtgcagcagcaaccctagttcgtgtatcatccgtgtgagattgagttcagacttcagagtagagagtagacagagtggagtgacagacagacctgtggctgctgtagtatgctgtacgtgctggagttca

SEQ ID NO: 92334 - DNA, 502 bp, Zea mays
  unsure (1)..(502): unsure at all n locations
ggtnttttagaggggctgtagaatcgattagttcactcagtactgccgtaccggtccggaattcccgggtcgacccacgcgtccgcaaaggatctcttctgtcagtattgaggcaatttgctcgtttgaagaatgacaaacaagctatttctgtcgggtttgttgggtaccccaatgttgggaagtcatcaattattaacacactacggtcgaatagtgtctgcaaggttgctccaatacctggagagacaaaagtgtggcagtacatcactctcactaaaaagatattttagattgattgtcccggtgttgtatatgaaaacaatgattcagaaactgatataattcttaaaggtgtggttcgggtgacaaatttggcggatgctgcttaacacattggtgaagttcttaagcgtgttaaaaaggagcatcttcaaagagcgtaccaaattcaagattggtcttatgataaccattttcttgttcagctgtgcaggaccac

SEQ ID NO: 92335 - DNA, 532 bp, Zea mays
  unsure (1)..(532): unsure at all n locations
agaggaggtctgtctgaagcctggcaccgctcgngatcgcattaatcgcctgaattcccgggtcgacccacgcgtacgcgcttgcagccgccgccgcgtccgcctcgccaagcgcagcagccgccgcagcacatcgctctgttgaggtcagccatggcggaggtggagcagcaacaggacacgccgaagctcttcaaccgctggaccttcgatgatgtccaggtgaacgacatctcgctgaacgactacctcgctgtgaacgcgacgaagcacgcgatgtacctgccgcacaccgtggggcgctactccaagaagcggttccgcaaggcgcagtgcccgatcgttgagcgccttacaaactccctcatgatgcacgggcgcaacaacggcaagaaggtcatggctgtccgcatcatcaagcataccctggagatcattcacctgctcaccgatgccaaccccattcaggtcgtcgtcgacgcgatcaataacagtggaccccgtgaggatgccacccgtattggtttcgctg

SEQ ID NO: 92336 - DNA, 529 bp, Zea mays
agtaggaggccttgcgttctagttagggacgttcggtaactcgtccggaattccgggtcgacctacgcgtccgccaggagatacagcgagcgagcgaccaaagccatggctctccgcaccctggcatcgaagaaggtccgatccttcccgttcggcggcgcgggccggccgttggcggcggcggcgtctgcgaggggggtgacgacggtcacactccccgacctctcctacgacttcggcgcgctggaaccggccatctcgggggagatcatgcgcttgcaccaccaaaagcaccacgccacctacgtcgccaactacaacaaggcgctggagcagcttgacactgccgtctccaagggcgacgcctccgctgtcgtccagctgcagggcgccatcaagttcaacggcggcggtcatgtgaaccattcaatcttctggaagaacctcaagcccattagcgaaggtggcggggagccgcctcatgggaaacttggctgggccatcgatgaggattttggttcgtttgagg

SEQ ID NO: 92337 - DNA, 605 bp, Zea mays
  unsure (1)..(605): unsure at all n locations
tgtnttnttgaggttaagaggttcngctattagacataatgatatattatatgcattgcttcgtaccggttccggaattcgccgggatctattacacaactctcatacatcatgtccaccttgcaaagggttcgttgatgcctgatgtagacagcacagtcgttatctgtgtgaggggatcgttgtgattcaaaaacgtgcgaagatactaccattactcgtacttggactaccgttctgtgcatagtctgaaggctgctatcaatagaggactactttagctaatgggatgcagactgactatgagactgatagctgacaatgaaacttccttgctcgaaaatggatggcattcccattcggtatttgggaaagaattcgacactattcagaaaaagctacatcatttgacaaaggaattgcttcgaacttggaagatacatgtgtaagtatacctcaaacggttgaacaattgttcaaagaaagctgtcaagggaagacaggaccgggtaccttcattcaaaaggtgtgaatttgtcacaagtgaatcaaaggattgctttacttnccttaagtgggacaagttaattatgaaaagcggatgg

SEQ ID NO: 92338 - DNA, 501 bp, Zea mays
  unsure (1)..(501): unsure at all n locations
ggtaggagaggggttagtgtatgtagtaaagcaatgatagcattgctctaccggtccggaattcccgggtcgacccacgcgtccgcgcatgctccgcctgctcgcctcctacgacgtcgtccggtgccagatggaggaccgggacggccggtacgagcgccgctactccgccgcgcccgtctgcaagtggctcacccccaacgaggacggcgtgtccatggccgccctcgcgctcatgaaccaggacaaggtcctcatggagagctggtactacctcaaggacgcggtgctggacggcggcatcccgttcaacaaggcgtacgggatgacggcgttcgagtaccacggcacggacgcgcgcttcaaccgcgtgttcaacgagggcatgaagaaccactcggtgatcatcaccaagaagctgctggacttctacacgggcttcgagggcgtgtcgacgctggtggacntgggcnngcggntnggcgccacgcttgaccccat

SEQ ID NO: 92339 - DNA, 529 bp, Zea mays
agggagagcctttcggccctgccaccgctcgagatcgcattcagttccggaattcccgggtcgacccacgcgtccgcgtccttctcttgccgacttcctcgcgttcatttcttcaccccacccgccccccaacgccaaatctaggagcaaaggtccggaaccttctagccgcacctagggtttggattggcgccgagcatggcgtacgtcgaccacgccttctccatctccgacgaggacgacctcgtcggcggcgccatggggggcccgcgcggggcgcccgtgaaggagatcgccttcgccgccgcgctgctcgccttcggggcgctcggtaccatcggtggcctgctaatggccgtcaaccgcgtcggaagggaccgcgcgcacggaattttcttcatgatgttgggcattgtaatgttcatccctgggttctactacacaaggatcgcctactatgcttacaaaggttacaagggcttctctttttcgaacattccaccgatctgaaagagtgtgctgctgcctt

SEQ ID NO: 92340 - DNA, 503 bp, Zea mays
  unsure (1)..(503): unsure at all n locations
tgtttatntagtaaagaggtcgagttagcatagaagtaatctcgaactgcttcggaattcccgggtcgacccacgcgtccgcccacgcgtccgcttccgtgatgcccaagagaaggtcctcccgtatgctgactacatggtcggcaacgaaactgaggcaaagatctttgccaaagtcagaggatgggagactgagaatattgaggagattgctttgaagatctctcaacttcctttggcttcaggcaagcaaaagaaggttgctgggaatacctaaggtgcttattcaatgggtggtggttaagattggaaaggggaaaccttccctgggaacctaatggccaaggggaaacttggtgacaccaacggggcaagtgaagctttcggtggaaggtttcttttacaagtgggtctaagccagggccttgaaaaatgccttaaggccaggtggtattccggaaacgttatcattcaacggccgggctggacttacccggagaagc

SEQ ID NO: 92341 - DNA, 504 bp, Zea mays
  unsure (1)..(504): unsure at all n locations
gagtcaggggagtggtgtgatgccagttacgccagncactcnattaccgctccggttcggaactgcggggccgacccacgcggccgcgcgatgctccgtctgctcgcttcctactacgtcgtccggtgccagatggagggccgggactgccggtacgagcgccgctactccgccgcgcccgtctgcaagtggctcacccccaacgaggacggcgtgtccatggccgacctcgcgctcatgaaccaggacaaggtcctcatggagagctggtactacctcaaggacgcggtgctggacggcggcatcccgttcaacaaggcgtacggtatgacggcgttcgaataccacggcacggacgcccccctttacccggtgtttcaacaaggcctgaaaaacccctccgtgatccttacccaaaaactgctggacttttacacgggctttaaggccttttcacccttgtggacattggccgcagccttggctccacgcttcacgccatta

SEQ ID NO: 92342 - DNA, 499 bp, Zea mays
tgtattttaggatatagggtgtggtattgaatacgaataatttgatcctcccggaattcccggtcgacccacgcgtccggattcctggaccaagtcattacagcttggtcctttattttgtctcaaactccttgaagaaaggatcgctgttgcagcgttttgccgatggtgatgatgattttagaaacagcagactgaagcttatcccatctgttccaaaggggtcttggatagtgcggcaaagtgttggaagcacaccttgcttgctggggaaagccgtggactgcaactatttgcgtggtcctgactacttaaaagtggatgtaaatatcggttcgtccgcggtagccaacggggtcctggccttgtggttggccgttgttacaactttggtagtcaccttggcgttcttattccagccaaccacttccaacaggttccaaaagcagttcttaggccctgcccggttgtaaaacatggaactttttgcggccgggtt

SEQ ID NO: 92343 - DNA, 531 bp, Zea mays
taggagagttgtctagtcctagcttagatcgtagtcgtatactcgtccggaattcccgggtcgacccacgcgtccggacgacggcatcgagcaggtcctcggcaccatggacccgtcgacgcacaacgtgacgcgccacctgtggccgtggacgaagtcccaggaggctggcttcgcgcactgcgctctgagggcccgggagagctgcgagtgggtggggttcatcgacgtcgacgagttcctccacttccccggcaaccagacgaccctgccagacatcctgcggagctactcgaacaggccgcgggtgggcgagctgaggacagcatgccacagcttcgggccctcggggcggaccagaatccccaagcaaggcgtgacgacgggctacacctgccggctcgcggcgccggagcgccacaagtcgatcgtgaggcccgacgcgctgaacccgtcgctcgtcaacgtggtgcaccacttccacctgagggaaggcgcgaggtacgttgacgtcgggcagggcgccatgct

SEQ ID NO: 92344 - DNA, 501 bp, Zea mays
gagatagaggtttttgtcctgacttgtacgtattctcataccgctccggaattcccgggtcgacccacgcgtccgtgtaaatgcctcaacagcacatgtggcacttcaccaatggcaggctaatactccagcatggtcagggaacacctatccttgtacatcatggtagaaattccacaaattcaaccagaggcgcactcatgcgcattttcaaaggatctgctggttctgcagaagattatgggttcccaagggctatagcatttgctgctactgcaatccgcatgtcagcagttgttagctgaagacatgtgacaaagacataattactggtcgacacgttgatggctcattgaagatgatatccatacatggagcgaagacaattgaaactgcttttgagcatattgattcagtgacaatgcatgcgcctgtaaccggattcaactaccttggcaccaggtctaaagataccacaagtatactttggaagaatcatga

SEQ ID NO: 92345 - DNA, 531 bp, Zea mays
  unsure (1)..(531): unsure at all n locations
gagtggcgtgctttggtcctagctaagcacgtacgtaactacncgtccggaattcccgggctttaattttcagaatatccgggataaatgggctggccaaaggggaaatagaaacaaaattacaaaagctaggacacctgatgttgaagataggggtgaacccagtacaaaagattccactgctgcagcaatgaacatttctggagaaggccctttcataaataataaaacaaattggttagcaatacagaggcaattgtcacacttggagaggcagcaaactagtctcatgaacatgttgcaggatttcatgggagggtctcatgacagcatggttacattggagaacagagtacgtggtcttgagagagttgttgaggaaatggctagagaaatatcactctcctcaggcaggagaagtggtggtccagcgttgggctttgattcatctnctggcagatcatctaaacacaatggtttccatgaatattctaattcgaaatatggaaagaagtgtgatggacgaatggg

SEQ ID NO: 92346 - DNA, 534 bp, Zea mays
  unsure (1)..(534): unsure at all n locations
aggagggtgcgtgncgtgcctcgcatccgctcgnatcggcantactcgtccggaattcccgggtcgacccacgcgtccggacatgagtgtttactacccgtatacggaaaccgacaagagactcactgccttccatcctgaaatcgaggagctcatctacagcgacgtcgagaactccgagcacaagttcgtgctgaaggacaagaagaagccgatcatcttctcgatggcgcgtctcgaccgcgtgaagaacatgacaggcctggtggagatgtacggcaagaacgcgcgcctgagggagctggcgaacctcgtgatcgtcgccggtgaccacggcaaggagtccaaggacagggaggagcaggcggagttcaagaagatgtacagcctcatcgacgagtacaagttgaagggccatatccggtggatctcggcgcagatgaaccgtgtccgcaacggggagctgtaccgctacatttgtgataccaagggcgcattcgtgcaacctgcgttctacgaagcgttcggcctgac

SEQ ID NO: 92347 - DNA, 527 bp, Zea mays
  unsure (1)..(527): unsure at all n locations
tagtaaacggctctggtctatgaatgggaagtatagtacacctctccggaattcccgggtcgacccacgcgtccgagagatcacaaaagctggttttgtggaacctacccctatccaatcgcaaggttggccgatggcattgagaggccgcgaccttattggcattgcagagacaggatcagggaaaactcttgcttaccttttacctgccattgttcatgtgaatgcgcagcctattctttcccctggcgatggtccaattgtcttggtgttagctcctacacgtgaacttgctgttcagatacagcaagaagcaaccaagtttggtgcatcatcaaagataaaaagtacttgcatatatggtggtgtgccaaaaggtccacaagttcgtgatcttcaaaaaggtgttgaaattggtatagctacaccaggacgactaattgatatggatgaatcacatcatacaaacttgcgaaaggtcacatatctggtttagatgaacanaccggatgcttgacatgggattn

SEQ ID NO: 92348 - DNA, 534 bp, Zea mays
  unsure (1)..(534): unsure at all n locations
agtgggctgtgtctgttcccagcncagctcggcactgacgtaccggtccggaattcccgggtcgacccacgcgtccgcccacgcgtccgctgttacttctccctccgtcgccactcccctcccattcaccgccaccgggaattccataccgtgctccgccacctctgctgagagcgagaagagatggcaggcaagggtgatgggccggcaatcggcatcgatctcggcacgacgtactcttgcgtcggcgtctggcagcacgaccgtgtcgagatcatcgccaacgaccagggtaaccgcaccacaccctcgtacgtcgccttcaccgactccgagcgcctcatcggagatgcggccaagaaccaggtcgccatgaaccccatcaacaccgtctttgatgccaagcgtctcattggcaggaggtttagtgactcctctgtccagagtgatattaagctgtggcccttcaaggtcattcctgggcccggtgagaaaccaatgatagttgttcagcacaaggtggaggagaaacaa

SEQ ID NO: 92349 - DNA, 501 bp, Zea mays
  unsure (1)..(501): unsure at all n locations
nagttaggaggggttgtgctacgcatagaagtaagtgcatacccgtccggaattcccgggtcgacccacgcgtccggttgattgctgggtatgatgacaatggcccacagttgtatcaggttgatccctcaggagcatacttctcctggaaggcatcagccatgggaaaaaatgtgtcaaatgcaaagacatttcttgaaaagagatacacagaggatatggagcttgatgatgccatccacactgcaattttgactttgaaagaaggatatgaggggcaaatttcctccaacaacattgaaatcggaattattccaactgaccctgaattcaaaggtctaagcccatcaaaaatcaaggatttcttggaagaagtggaataagttggctggtgatgatttactggttcaaaccagaatagcagcatcacttatgagcagccagcctgaaacttgtcttgggtttatcactctgtaaactgaattgctccagcgacatgtg

SEQ ID NO: 92350 - DNA, 493 bp, Zea mays
agttagaggtgttggctacgaatagtagtatgtgcactcgttcggaattcccgggtcgacccacgcgttcggaagcgagcaaatactgttgagctgatgaagaagatgccccaagtgcgaccgcatctgcgccgagaagcgagcaaatactgttgagctgatgaagaagatgccccagatgctgctcgactacaagaaacgtaggtgggagaagaagatgaaagtggaggagagcggcaagaattgataccacgcggctcgtccagggtgcttctcttcctaaataaggtccaaactttatccaggagttttgcaggacggctagattctgacgcgtcattcccttggtggattccttctctcctgtgaagcgactttggacgcactatcctgattgtgatgctttcaaacacttgtgccactggatcgggatttcagtgagccccaattttgcagcactagtattttgttgagacaaatcagctataagcat

SEQ ID NO: 92351 - DNA, 505 bp, Zea mays
gggttaggagggtttaagcacttactacgatgacttacgcatgccgtaccggttcggaattcccgggggagaagcaccaccacttgttcaaccaccacaagaaggacgaggagcagcccgccggcgagtacgggtactccgagaccgaggtggtcaccgccaccggcgagggcgagtacgagaggtacaagaaggaagaagaagaagaggcagcaataaattaatcttaagcagctgtgggagcagcagtagtagtatcagttcaggtccagtagcggaaaaggcaggcagggcaaagatttgggaggcctttttgcaatccatctgccccatcataacccacttcgatctatccatgttagcagtacgtgtccgtccgtcctatagcatcatgcaggatgcaaaggttgccctgtgctggtgaatctttctgctatatactattctatttaattaacatataaaaaaaataaatgttaaagatgattaatgtcaaaataagaat

SEQ ID NO: 92352 - DNA, 502 bp, Zea mays
  unsure (1)..(502): unsure at all n locations
gagtttagagggcttatagctcgtagtaaganatatatcattgctcgtaccggtccggaattcccgggcaaagattgatcctactgcagctggtgcggtgtatgatagagaattcattgtttgttctttggacctactatcaggacttgcagaaggtcttggcgctggtattgaaagtcttgttgcacagagcaatttgagagatctacttttgcaatgctgcatggatgaagcagctgatgttcgacaaagtgcccttgcacttcttggagacctttctagggtttgcccaatacatttgcatccacgccttcaagaatttcttactgttgcagcgaagcaactgaaccctcaatctgtgaaagatgcggtatcagtagctaacaatgcttgttgggctattggagaattagcaatcaagattggcaaagaaatagcgcctgtggtgatcaccgttgtttcgtgcttggttcccattctaaaatccccagagggttcgaac

SEQ ID NO: 92353 - DNA, 529 bp, Zea mays
  unsure (1)..(529): unsure at all n locations
tagttagcgttgtctagtcctagcttaggacgaaattgnatacccgtccggaattcccgggtcgacccacgcgtccgcctgtctgtccatcagttggttgagaatgctgatgaatgcatggttcttgacaatgaagcactttatgacatttgcttccgaactctgaagctgacgacccctagctttggagacttgaaccacttgatcagtgcaacgatgagtggtgtcacttgctgcctccgcttcccaggacagcttaactctgacctgcgcaagcttgcagtcaacctgatcccgttccctcggctccacttcttcatggtcggctttgcgccactcacctcgcgtggctcgcagcagtaccgtgcactcactgtccctgagctaacccagcagatgtgggatgccaagaacatgatgtgtgctgctgacccacgccatggtcgatatctcacagcctttgtcatgttccggggcaagatgagcactaaggaggttgatgagcaaatgattaatgtccagaacaaga

SEQ ID NO: 92354 - DNA, 504 bp, Zea mays
  unsure (1)..(504): unsure at all n locations
tagttagggaggtagtctgtgnccggctcgacgccanctcgaactcgttcggaattcccgggtcgacccacgcgtccgggcttctcctccccctccggttcgggttcgggttcgtgaggttctccggggttcgggggcntgggtgagcggatcgagatggcggcgtcggatgttgagtaccgctgcttcgtcggcggcctcgcctgggccacggacgaccactccctccacaacgccttcagcacctacggcgaggtcctcgagtccaagatcatcctcgatcgggagacgcataagtcccccggctttcgctttggcacctttttcaacgaagaagccaatccggaccgccttcaaggccttaaccggaaggaacctgaccggcccaacattaccggtaaccaaggccaatcccggggccggccttgaagccgcagctgccgccggtaccggtgtgggccttgaagccgccggtaccgccgttgccggccgccgagattgcct

SEQ ID NO: 92355 - DNA, 508 bp, Zea mays
  unsure (1)..(508): unsure at all n locations
tagtagagggaggggtantagcactcgccacgtcacattgccatgccgtaccggtctcggaattcccgggtcgacccacgcgtccgcccccgcattccacctcgcggagatccagtccagccctagggtttcgccagcggcgagccaaactccacgagcgggggaagaggggaaagcagggacgacgagggggcagccatggggcagcagtcgctgatctacgcgttcgtggcccgtggcacggtcatactggccgagtacacggagttcaccggcaacttcaccaccatcgccttccaatgcctcatgaagcttcccggaaggcaccaccagttcaactaacactggcaacggcacaatttcaaataacttgtggaaaaacgaatcaaaaaacggggtggtggtggtgaatcggttgggccaccaattcctaatggtttcatggatagggttaagggaggtttcacaaaaaggtattgttgtgggaaagctgctactgcttgaactg

SEQ ID NO: 92356 - DNA, 503 bp, Zea mays
  unsure (1)..(503): unsure at all n locations
agtggttagggctanagcatgatcagaatgtatttgcactgctctaccggtccggaattcccgggtcgacccacgcgtccgccgtccacggccactggaagcacagcgacatcacactcaaggactccaagacccttctcttcggtgacaagccggtcaccgtctttggcatcaggaaccctgaggaaatcccgtggggtgaggctggcgctgagtatgtcgtggagtccaccggcgtcttcactgacaaggacaaggctgctgcacatctcaagggtggtgccaagaaggttgttatctctgccccaagcaaagatgcacccatgtttgttggtggtgtcaatgaaggcaaggtccacttggatggtaaccatggtttcaattgttagttgaacaaaaaatggcttggttcccttggtaaaggcattcatgaccaccttggcattggtgaagggttgaagaccaccggtcattgcattacttgcaacccggaaaactgtgcc

SEQ ID NO: 92357 - DNA, 498 bp, Zea mays
  unsure (1)..(498): unsure at all n locations
gagtaggaggtgttggccctgctcgtacgtatgctcataccggttcggattcccgggtcgacccacgcgtccgcgaggcccagtcccgcggcggccgtggaggcggcggcggcggcgggtacggtggtggccgtggaggcggcggctacggcggtggcgggcgccgtgatggcggcggcggctacggcggtggcggcggctacggtggtggcggcggcggctacggtggtggtggcggcggctacggcggtggcaaccgtggcggcggctacggcaactccgacgggaactggaggaactgagcggtggngcccgcgcggccaaagtatcctgttcgctaaccgggtggttaaccttaatccaaatggttaactttggtcggcttggggttggtggtggccatctggggttttgaatggaaggcgctttggggcaattggtaatgcttggttcaatcttgggttcagcagaaccattgccttaaccaccattgactgg

SEQ ID NO: 92358 - DNA, 500 bp, Zea mays
  unsure (1)..(500): unsure at all n locations
nggtttagaggggttnagcatcgattttcgataaatagtatncctcgccggaattcccgggtcgacccacgcgtccgagccggggtacggtcctaccaccgctgtgcctaataattggcggctagctagctagctagctgcagctgctgcgatcctggatcggcacagccggttcttgatgtggagggagcggcggcgggcgctgctcctgctggtggccggcgcggcgctgggactgatcggtgccgcgctcgcgagcgcgccgtcggaggccgcgctgaaggtcgggttctaccatgcgacgtgccccatcgcggaggacgtggtcctcgccgagatgaggctcatgctcatggaggacgccacggtcgcgccgtccctgctacggatgcactaccacgactgcttcgtgcaaggctgcgacaggtcgatcatgctccagtcgaggcaaaaagggaaagcagaacgggacgcgctggccaacccgtacatgcgagggt

SEQ ID NO: 92359 - DNA, 510 bp, Zea mays
  unsure (1)..(510): unsure at all n locations
gagtttttgagaggcttgtcgctcgtcatcaacgcnattatatgcattgctcgtaccggtccggaattcccgggtcgacccacgcgtccggcgaaaccgaaagagaggcagagcttggcaatggagctcccgtggggaatgctgctgccgctgctgctggtcctctccgtctcgtcctcgtcatcgtcgtcggctgctgccacgctcgccgtcagcgctccgcccccactgcctgttcctcctcctcgtcatgctcaagacgccgaaggcatgctcatcaacggcaacttcgagacggcgccgcggaagctgaacaagaccctgatcgtggggcgccactcgctgccggggtggacggtgcaaggccacgtggagtacgtctcgggcggtccccagcccgggggcatgttcttcgcggtgccgcacggcgtgcacgcgctgcgcctcggcagccgcgcgtcggcgtcgcagaacgtgacggtgcggccgggggcgctgtacgcgctcacg

SEQ ID NO: 92360 - DNA, 532 bp, Zea mays
  unsure (1)..(532): unsure at all n locations
gtgtggcgttgtctgatccacgcataagatagtatcgttacacncgtccggaattcccgggtcgacccacgcgtccgcgcgctagctagttctattgccgcaccccatatcttcaggagggactcgttctttcagctaagtacactgcacgcaatggccaccacggcgaccgaggcggcgccggcgcaggagcagcaggccaacggcaacggcgagcagaagacgcggcactccgaggtcggccacaagagcctgctcaagagcgacgacctctaccagtacatcctggacacgagcgtgtactcgcgggagccgtagagcatgaaggagctccgcgaggtcaccgccaagcacccatggaacctgatgacgacctccgccgacgaggggcagttcctgaacatgctcatcaagctcatcggcgccaagaagaccatggagatcggcgtctacaccggctactccctcctcgccacggcgctcgccctcccggaggacggcacgatcttggccatggacatcaaccgcgaga

SEQ ID NO: 92361 - DNA, 507 bp, Zea mays
tagatagggggcgggtgtctgatgccaactcccgacgcatccccaactgcgttcggaattcccgggtcgacccacgcgtccggatctggtggatggacagcgacgcgctcttcaccgacatgtcgttcgagctgcccctgtcacgcgtacgacggccacaacctcatcatccacggctaccaggacctcctcttcgagaagcactcctggattgcactcaacaccggcagcttcctcttcaggaattgccagtggtcgcttgacctcctggacgcgtgggcgcccatgggacccaaggggttcatccgcgatcaggcgggcaaggtactcacggcaaacctcaagggccggccagcatttgaggccgacgaccagtcggcactgattaacctcttgctctcgcaaaaggccaagtggatggacaaggtgttcattgagaattcctactacctgcatggcttctgggctgggttggtggataagtatgaggagatgatggggaatcac

SEQ ID NO: 92362 - DNA, 501 bp, Zea mays
  unsure (1)..(501): unsure at all n locations
agtttttaggnnntnnnncactgagcatcgtcacatcgtatactctccgtttcgaatcccggtcgacccacgcgtccgcacacacacagacaagtggtttccaaagccaagtgtgtgtactagcaaccagctagctcgggcggcagcaggcagccatcatgtcggaggagaagcaccaccacttcttcaaccaccacaagaaggacgaggagcagcccgccggcgagtacgggtactccgagaccgaggtggtcaccgccaccggcgagggcgagtacgagaggtacaagaaggaggagaaggagcacaagcacaagcagcacctcggcgaggccggcgccatcgccgncggcgccttcgcactctacgagaagcacgaagcgaagaaggaccccgagcacgcgcacaagcacaagatcacggaagaagtcgctgccgcggcggcccgtggcgccggcggctacgtattccacgagcaccacgaggagaagaggaccacan

SEQ ID NO: 92363 - DNA, 533 bp, Zea mays
  unsure (1)..(533): unsure at all n locations
gagtagcggtgtcntgagcctcagcttagtatgtaatgctataccgctccggaattcccgggtcgacccacgcgtccggaccaacaagtctcaggagggatcccagttctgtagaggatttggtggcattggtggcatgttgcgctaccagctggatatccgttcttttgatgagctttctgatgatgacgatgtgtatgaagactctgactagcaatcagccaatctcatgcctgtgctggcccatggaaggacgcaacagctcgacctcaccatacctacgcaggagcacacgaaaagcaactatccaaggattaatgggcatgggccagcgtcgtcctcttcaagaggagcttaagactaagatgattttgagtcacaatcatgggagtaacgtgacaagaagataccctactatatcacaattattccagtaatgcgtcgagaagataccgttgtttaagtgcacaaaccaatacagtgacgtgccaagaaagtaccgtattttaaagatgtttaattttcagtattcc

SEQ ID NO: 92364 - DNA, 531 bp, Zea mays
  unsure (1)..(531): unsure at all n locations
gagagggnnnnntnnnntnctgagctcagtccgttancgcactancgncctgaattcccgggtgaggatgaagagaccgacggctcttctgctgcgtgttgccgcatttgccttgaggctgagtctgagataggtgatgagctagtatcaccttgcatgtgcaagggaactcagcagtttgttcaccgttcttgtcttgaccactggcgatctgttaaggaaggatttgcattttcacactgcacaacttgcaaagctcagtttcatcttcgagtggaaacctgggaggataactcatggcgtaaaatgaagttcacggtctttgttgcaagggatgttctactcgtatttcttgctgtacagcttactattgctatcatcggtgcgattgcatactttttagacagggatggaagtttccggaacagttttagcgatggttgggaccgcttcttgtcaaagcacccaatacccttctactattgcataggtgttgtgattttctttgtgctgcttggattcttcggcccg

SEQ ID NO: 92365 - DNA, 555 bp, Zea mays
  unsure (1)..(555): unsure at all n locations
ngagtaagatttttatngtataaatgnnatattatttaaatatggaattatattagtagagaggggtgagtcngcttacgtctaccgcgaggtgacgtcatgntgntccgattcccgggtcgacccacgcgtccgatggcaaggtcatcgtcgtcgagtgcgtgctgccggtcaacacggaggccacccccaaggcgcagggcgtcttccacgtctacatgatcatgctcgcgcacaaccccggcggcaaggagcggtacgagcgcgagttccgcgagctcgcaaagggcgccggcttctccgggttcaaagccacctacatctacgccaacgcctgggccatctagttcatcaagtgaaccaccgtcgccgtgatgagatggcatggctgccacaaaccttgcttgcttggtcctcgaatagtacgtcgccgtcctcgtcttcttctgggtattgcgctgataacttgctgctcttgcgtattcatgtactttttcttaaattacatttatttatattatgcactcttgataggctagcttgaacctattcaat

SEQ ID NO: 92366 - DNA, 526 bp, Zea mays
  unsure (1)..(526): unsure at all n locations
agaggcgtatgtctgatgctagggactgaagctcatgcagtnccncccganttggatccgggacgccgacgcgtccgatccagccaggcgcggcgtgcttcgagcccaacaccatggtcgcgcacgcctcctacgccgggaacgactactaccagcgcaagggccggtccattggaacctgcgacttcgccggcgccgcctacgtcgtcaaccaggcaccgaagatgggcaagtgcgacctcccatcgacgacggtctgagctgaagcagcagcggcgaggaccgtaacgtcagcggccatctcgaggaacaaaggaatcgatggcatgcagcagcagctcagctcatcagtcgccctagagactggagactctgggggacgccggaatctttgcccaccctttcagactttctttaccgctgcagctgcagctttgactccagccggagcgacgccgtaaaacgaacatcgctgtactaggcggtagctgtacgccttcctttntgcagctttggctaatggtgg

SEQ ID NO: 92367 - DNA, 532 bp, Zea mays
  unsure (1)..(532): unsure at all n locations
gagagagggcctagtgtgatgagctcagctcgcgatcgcactgaccncaccggtccggaattcccgggtcgacccacgcgtccgtctacagcccctctgctgcagcaagaaggaaagaagctagcgcttatagcttgtcagccatggccaccgccgccgcgtctagcctcctcaagtcctccttcgcgggctcccggctcccggccgccacgcggaccacaccggcgtccctcgtggtggccaccggcccgcgcggcgccggcgcggggcccatctgcgcgtccatgtccatgtcctcctccaacccgccctacgacctgacgtccttccggttcagccccatcaaggagtccatcgtgtcccgcgagatgacccgtcgctacatgacggacatgatcacctacgccgacaccgacgtcgtcatcgtgggcgccggcttcgcggggctgtcctgcgcgtacgaactcttcaaagaccccgccgtgagcatcgccatcgtggaacagtcggtgtcgcccggcggcggcgcgtg

SEQ ID NO: 92368 - DNA, 536 bp, Zea mays
  unsure (1)..(536): unsure at all n locations
nagtaggagggcgtcacgtgactgaataagcagangttagcattgaccacaccggtccggaattcccgggtcgacccacgcgtccgagcaaggaagactgccactagcccaagttcaggatggcgatgaaggttcaaatttatcagctgaggaaaagcatctgaatgagacattcataaaggacagtatccctccctggttggcaggatctggttacattggccttgcagcaatatcgattgcaaccgtcccaatgatctttccgcagatcaagtggtaccttgtcctctcggcatacgttgttgctcccctcctcgctttctgcaactcatatggcactggactaacggactggaatcttgcgtctacatatggaaagatcggcctcttcatttttgcatcatgggttggtcagaatggcggtgtgattgctggcttagcagcctgcggtgttatgatgtccatcgtgtccactgcagccgatctcatgcaggacttcaagaccggttacctnacactctcttcccctaggtcca

SEQ ID NO: 92369 - DNA, 531 bp, Zea mays
  unsure (1)..(531): unsure at all n locations
agtagagagcctcgagtgccctgcacccgcncgnatcgcactaatcttctggtctggaattcccggatcgacccacgcgtacgcaaaaaaaaaagaagccgttggagcgcctccctctcaaacggcactcttttcactggcccgctcctccgctccctcctgcatacaaatcgtccgccaacaattccccaaaccctactccaccacgcgatcaccgaccgacgcctctccgacgagcaactcaaccccccaccgcgcacgcgagagccggatccccacgatggcgacgatccagcaccaggcgaaaccggccgtggcggcggcaccgagcacgactactggcggtgggcaacgcgcgatggacctctacgagaagctggacaaagtcggagaggggacctacgggaaagtgtacaaggcgcgggaaaaagcgaccgggcggatcgtggcgcttaagaagacgcggtttcccgaagacgactaggggcttccccacaccgcgatgccggaagtcttcctgctgcggatcca

SEQ ID NO: 92370 - DNA, 532 bp, Zea mays
gagtagaggccttatgtcatgacaagaacatgatatgcacgctccaccggtccggaattcccgggtcgacccacgcgtccgggcctccccggcggcagcattcctggcagcagcattcccgggttcagcatgcccggcagcggcagcagccttcccgggttcagcttgcccggcagcggcagcatgcccctcttcggcggcggctccccgggcttcagcggcttcggcggcatgcccgggtcccccaccgccggctccgtccccgagcacgccaacaagccctgaactccgtctgtccgtccgatccgtcgctggagcgaggtcgggctagccagcgtgcgtggtagtagagtgatggtactgtagtacgtcgtcgtcttcatgcatgcgtggttcgtggtttcccctagctccatacgagcagtagttgggccttgcacgtaccgtacgtctagctagctatatatatagcttgtgttctactgctttttagtttaattacctgcctgcattggagagttggatctgtttc

SEQ ID NO: 92371 - DNA, 531 bp, Zea mays
  unsure (1)..(531): unsure at all n locations
taggagagtcctctgtctctgataagaacgtgattgactgctctaccggtccggaattcccgggtcgacccacgcgtccgcttcatcatctggtacacgcatgacagtttcctgggaattgacctggctagtgatggtcatacacttgtatcgtactcccagctctcaaactgggacaagtgctcctcatgggagggcttcaaggtgtcaccattcaccgcaggagcgaggacattcagcttcgatgcaaatccatgcgattacttccagggtggcaagattaaagcaacgaccctctccctgtcagtcttggtggccattgagatgttcaactcactgaatgccctgtcagaggacggcagccttgtgagcatgccaccatgggttaatccgtggcttcttctggccatgtcggtttctttcgggctgcatttcttgatcctctacgtgcctttcctcgctcaagtgtttgggatcgtgcccctcagtttgaacgaatggctcttggtggtggcagtggccttccccgtn

SEQ ID NO: 92372 - DNA, 534 bp, Zea mays
  unsure (1)..(534): unsure at all n locations
aagaaatatcagtgtnataagatanntataagtagataaggaataataatatatatattatatagagggtgtgttaagggagggaggtactgtcaacccgtccggaattcccgggggagaaggagagggatgcacaccacttgcgggggctgcttcctcctgcagttgtgcctcaagaactccaaattaagaagatcatgcacaacctgcggcagtaccaggtccctttgcagcgctatatggccatgatggaccttcaggagaagaacgagaggcttttctacaagcttttaattgataacgtggaagaactgctttctgtggtttatacaccaactggaaggtgagccttccaaaagtatgggtccatcttttgaccaccacaggggctgattgtcaactttgaggacaaggggaaggtcctaaaatttctaaaggacttgccccgatagaacattcaaagtaatctgggtacttgatgtgaacgaatcttgggacttggaaaattggttctcaagggaatggaaatcctgt

SEQ ID NO: 92373 - DNA, 526 bp, Zea mays
  unsure (1)..(526): unsure at all n locations
gagatataaagagttaaagaganagaaatataaagagagaagaagataatatagggtaagggtcctttagaaagagattacagtatgctctaccgttcggattcccgggtcgacccagcgtccgctccactcgccgcaggccgccgggcgccgccgaggggatcggagcaagatgttcttccacatcgtgctggagcggaacatgcagctgcacccacgacactttcggccgcacctacgcgacaagctcgtttccaagctcatcaaggacgtcgagggcacctgcagcgggcggcacgggttcgttgtggcgatcacgggtgttgaagacatcggcaaggggctaatactgggaggcaaaggatacgtaaccttgcccggtaggtaccantgacgtggctttagacccttcaagggccagatccttgaagctgtcgtgaccatggggaacaagaagggcttcttttcagaagcctgaaccgagcaaataattgtagacaaaccatagatccaagacatatggaaa

SEQ ID NO: 92374 - DNA, 533 bp, Zea mays
  unsure (1)..(533): unsure at all n locations
tagtagggncntangttaatggttacgcncagttccgcactgacgtaccggtccggaattcccgggtcgacccacgcgtccgtgacaatatcagagccttgcttgttgattctacagggaggtattgcctatcgggatcatcggattcaatgataagactatgggatctaggacagcagcgttgtgttcattcttatgctgtgcatactgattctgtttgggcacttgcaagcactcctgcatttggtcatgtctacagtggtggaagagatcaatctgtatacctaacagatttgtccacaagagagagtcttttactctgcacaaatgaataccctgttctacagttgtctctgcaagatgacacaatatgggtggcaacaactgattcttctgtttatggatggccagctgaagggcgcacaccccaaaaagtcttcgaaaagggtgcctcattcttagctgggaatttgtcattctcaagggcaagagcatctttagaaggatcggcacctgtccctgtatacaaagag

SEQ ID NO: 92375 - DNA, 534 bp, Zea mays
  unsure (1)..(534): unsure at all n locations
gaggtggagttttttgtggcttgccactgntcgnattgcagtancgncctgaatttccgggtcgacccacgcgtgcgagagatcacagaagctggttttgtggaacctacccctatccaatcgcaaggttagccgatgggattgggaggccgcgaccttattggcattgccgacacaggatcacgcaaaactgtcgctgacgttcctgctgctgctgctgatgtgaatgcgcaggctattcattgccatgaccatagtgcaattctcttcgtgttagctgctacacatagacttgctaataacatatagcaagaaccagggcagaactgctgcatacttcctgactgaccgtacttggatatatgtgcactgtgccaaaaggtgcacaatttcctgatctttacaaaagtgttgaaattgctatagctacaccaatgacgactaagggatatgtatgaatcaaattatacagacttgcgaatggtcacatatcttggtttagattaagcagaccggatgcttgacattggattt

SEQ ID NO: 92376 - DNA, 532 bp, Zea mays
  unsure (1)..(532): unsure at all n locations
gatgaggattttatggaaagagtnagaggagaagagagggaaaggatagtgagagaaaagaggctgncgtacgaagcaggagtactctcatancgtntcggaattcccgggtcgacccacgcgtccgagtacgtggaggagcagccatggcttcatcggtggccgccgcggcgagcacattcctgggcacccgcctggcggacccggcgccacagaacgggcgcatcgtggcccggttcgggttcgggttgggcggcaaggcgaaacctgctccgaaaaaaggggccaaaacatcgaacctcttttgaccggccgtttgggttccccgggccctggcccccgaattccttgaagggttggttggccgccaattacggtttcaacccgtcgggcttcggaaggccctggaggaccttcaattccaggtggacttgcttgaacaaaaccttgcccagaattaaggccgccggattattgggacccgggtcgaggtcttccaagtcaaattcaacccgttgcaaccctacaacga

SEQ ID NO: 92377 - DNA, 531 bp, Zea mays
  unsure (1)..(531): unsure at all n locations
gagtagagtgcttttagncctacncaagaacgcatcgcactgacgtaccggtccggaattcccgggtcgacccacgcgtccgcgagaagccgaagaaaattcgaagacgaggagcagctacactgcggacggacttcgggcatggagggccagttccaggttggcaaggaggaggtcatccaagcatggtacatggatgacagtgaagaggaccagaggcttcctcatcatcgcgagcccaaagaattcattcctctcgacaaactttccgaactaggaatattaagctggcgcctaaatgctgatgattgggagaatgatgagaacctcaagaaaattcgtgaagccaggggttactcttacatggacatttgtgatgtgtgcccagagaagttgccaaattacgaggctaagataaagaatttctttgaagaacacttgcatactgatgaagagatacgctattgccttgagggcaagcgctactttgatgtgagggaccaagatgatcagtggatccgtgtaacggta

SEQ ID NO: 92378 - DNA, 533 bp, Zea mays
  unsure (1)..(533): unsure at all n locations
nagaggcgtctctgagctacgcataagcaagtagnatcactgnccgtactcggtccggaattcccgggtcgacccacgcgtccgccagagggtggcttcaattcaacatcagcttgcatctttgaaacttaaagatgcaccagtcgttggtgcctttaatcctgtgaagggagagatagtcctctcacaatttagccttgacaactcctggaacagagctatgattgttaatggacctcgctctgtagaatctctaaacgacaagtttgaagtattctatattgactatggcaaccaagaggtggttccctacagtcgtctacgacccgtggacccatctgtttcctcttctcctgctcttgctcagttatgcagccttgctttcataaaagtgcccagtcttgaggatgactttggtcaggaagcagcagagtatctaagtgaatgtttgctcagtagctcaaagcaatatcgggcaatgattgaagaacgtgatgcttctgggggaaaatcaaagggacannntnnnnnnt

SEQ ID NO: 92379 - DNA, 540 bp, Zea mays
  unsure (1)..(540): unsure at all n locations
gtgggagattaaaggattagattnagaattagattaagtaataagatgatataatggtaagggctancttaaagaaaggagattaatgaatgctcgtccggtccggaattcccgggtcgacccacgcgtccggctggaagctccagttgttgttgttacaggtgcatctagagggattggtaaggcaactgctctagcccttggaaaagcaggatgcaaggttctggtaaactatgcccggtcctcgaaagaggctgaagaggtctccaaagagattgaagcatctggtggtgaggctatcaccttcggaggaaatgtttcaaaagaagctgatgtagagtctatgatgaaagcagctctagataaatggggaacaatagatgtgctgggtaaatatgcagggatacaacaaacacttggttaataagattgaaaaatcttaatggcaagaactaattgaacctgaacctactgtggatcttcctttgacacaaggttgaacaaaagtattgttaaaaaaagaaaagggaaaaattttta

SEQ ID NO: 92380 - DNA, 533 bp, Zea mays
  unsure (1)..(533): unsure at all n locations
gagtaggagccgtctcttgactgggccagtnaggttcgctactgcctcccggtccggaattcccgggtcgacccacgcgtccgaatgtttacatgcagttctcatctcaccaagagcttaccacagaccagagctcgcatggaaggaattctgatcaggagtctgaacccaaccgaatcctcttagttactatccaccacatgatctatcctataacggtggaggttctacatcaagtattcaaagcttatggatttgtggagaagattgtcacatttcaaaagtcagctggttttcaagctcttattcagtttcactcgcgccaagaagctgtggaagcatttggttctttgcatggaaggaacatatatgatggttgctgccagctagatattcaatattcaaatctcagtgaactgcaagtccattacaacaacgaccgatctagagatttcacanatccatcattacctacagaacaacgccctatggcctcttagcaagcttatcctgatccagctaatctctatgcn

SEQ ID NO: 92381 - DNA, 533 bp, Zea mays
gggggtagggcgtttgtgactgtttacgccgagtaagcactgacgtaccggtccggaattcccgggtcgacccacgcgtccgatggcaggttcaaggacattttccaggaggtgtatgaagctggttggaaaaccaaatttgagagctgccggcatatggtatgagcaccgccttatcgatgacatggtagcatacgcacttaagagtgaaggagggtatgtctgggcttgcaagaattatgatggagatgtgcagagcgatttcttagctcaaggttttggctcattgggtttgatgacttcggtactggtgtgccctgatggaaagacgatcgaagctgaagctgcccatggtactgttacccgtcattaccgtgttcaccagaaaggaggtgaaaccagtacgaacagtattgcctcaatctttgcgtggacaagaggacttgcacacagggcaaagcttgatgacaatgctagactacttgacttcacccagaagcttgaggctgccttgcgtggagccgtccagtctt

SEQ ID NO: 92382 - DNA, 560 bp, Zea mays
  unsure (1)..(560): unsure at all n locations
cgtaaagaagagctaaatggcaggacagatnatagaagtgattagatgaaataataaagatttggagatgagggagtgtgannactatcagaggggagggggtatagattcatcactgctccggttcggaattcccgggtcgacccacgcgtccgaaaagacaggctacaaggatgatgagggaactgcaaatgagctctcttttcagatgtggacgaatcatatgcaagatacgttgaactcaaaaaagaaaggtgacaatgcttttcgacagaaggattttactgctgccattgattgctattcccagtttattgaaagtgggacaatggtttccccaaccatttatgctcgacgttgactgtcatatctgataaatggcttgaaaaggaggctttaatgatgcaatgaaagctttgagaaaattcacaaattggaaaaggcattttatttagaggcgcaccttttttttaataaggttggaaatgaaaccacaaaacactttagggttgtttgaacctaaaccaaaaatcaacggtggacattgatttgaacattta

SEQ ID NO: 92383 - DNA, 578 bp, Zea mays
  unsure (1)..(578): unsure at all n locations
cgagtagatgagtaaaatgtnaggattattntagagatatagattataggagtagatagatgtattgagagatgagcgtgggtgnanactatggggggatgggagagaattattgcaatgctcgtaccggtccggaattcccgggtcgacccacgcgtccggccagtaccgagtcctacgagcagtcgcacgcaagtgtcaagagacgaaacggtcgacatggctcgcacgcaaatcttgccgtagcggtcggcctgggtggccgcgtgctgcttctggcaacggccgggacgaccttcgaaggccgccataacttgcggccaggtgagctccgccatcgcgccctgcctttcctacgcccgcggcacggggtccggcccctccgcgtcctgctgtaacggcgtcaggaacctcaagagcgccagcagcaacggcggcgacaggccgcgccgctgcaactgcctcaagaaacccggcaggggcctcagcggccttaacgccgggaacgccgccaggattcccttcaagtgcgggttaagaatccctaaacctttgggcttttcacggaatggtttaga

SEQ ID NO: 92384 - DNA, 536 bp, Zea mays
  unsure (1)..(536): unsure at all n locations
gagaggcgctgtcntgttcctagcctaagcacgaaatagcactgactacaccggtccggaattcccgggtcgacccacgcgtccgattcagtttgttcagccaaatttatcgctcaagggaaatggctggtagtgggaaatagtgatggatacatatatgtctacacttacactgacactaagcttaaggaggccaagaaattcagagctcatgacaactctgtcgacgtgttggctgtccacccaaccgaggcgtaccttctttcatcatctgcttatggcaaaacaataaagctttggagctggggcagtgactcgatcatgaactgggtgcaaattaaaacatttaacgtgaaacctacatatccggatggagtgcgcagtctcaggtttaacccaagggacaccaacacttttgcttgtgttacgtatgaagatagagtaaaggtcggggacataaaaaatccttctggtcttaccaccatactgaaggggccattgaaagctgattattgcttctctcatactcatccgca

SEQ ID NO: 92385 - DNA, 531 bp, Zea mays
  unsure (1)..(531): unsure at all n locations
gagtggggcctctcttctagctcagcaggtanatcactgctccaccggtccggaattcccgggtcgacccacgcgtccgcgggggccaaggtggagaacaacaggttctgcgtctccgtccacttcagacgcgtcgacgaggaagatgtggggcgagctgtcagagtcggtgaggggcgtgctgcgggggtacccgaggctgcggctgacgcacgggcggatggtgctggaggtgcggcccaccatcaagtgggacaagggcaaggccctggagttcctgctcgagtcgctcggcttcgcggactgcagcagcgtgctgcccgtgtacatcggcgacgaccgcaccgacgaggacgccttcaaggtcctgcggcgccgcggccaggaccagggcgtcggcatcctcgtgtccaagcaccccaaggagacgagcgcctnctactcgctccaagggcccgccgaggtgatggagttcttgctgcggctcgtcgagtggaagcgcctctccagggcaaggctcangctgcaatn

SEQ ID NO: 92386 - DNA, 554 bp, Zea mays
  unsure (1)..(554): unsure at all n locations
ggtgggggaggtaagtnaggatatggtgagaggagagagagaggatgggtgtagaagagagcgtnattnncctacgattacgagattatgcacgctctaccggtccggaattcccgggtcgacccacgcgtccgccagcaccgncgncgacaggcgcgccgccatcacctgcgggcaggtgagctccgccatcgcgccctgcctctcctacgcccgcggcacggggtccggcccctccgcgtcctgctgtagcggcgtcaggaacctcaagagcgccgncagcaccgncgncgacaggcgcgccgnctgcaactgcctcaagaacgccgccaggggcgtcagcggccttaacgccggcaacgccggcagcatccgctccagtgcggggtcagcatcccctacaccattaggacttgcaacgactgtttcagggtgaactaaaccctaaacaagccccaatgaaggcccctgtatgatcgggcaaccctttcgggcgttccgccgggcgggttattgatccgcgggaaggagaattctatcaactacgccgggga

SEQ ID NO: 92387 - DNA, 520 bp, Zea mays
  unsure (1)..(520): unsure at all n locations
gagatgttgctgatgagtagattnagatgaagtatagtgagggaagagtttagtattatagagggtacattacgtatagcactgactgcagncgtccggctggattccgggtcgaccagcgtccgagaagttgaaagttggatttggttcatgtcccaattaaagaagctgttggggaacatggagtactcgctatttgttcagacgcttaaaaaggattaatgcatgcagtgacacattgtttcccttatgctgagaagagggagtgcttccgacatctcatgggcaactatgtcaaaagctactcaggttccgaacacatgttttcagttgcaaaggcatacacagagggaaagtttttagccaccttttaagcaaattagaattgttccttaaaaagcttgatatttggatcaactttacaaaatttctttggtaccagaatgggtttaaccccttttttgaatgtggttacgttaccaacaacatgggtttaagtcttttaacactggggtgaggg

SEQ ID NO: 92388 - DNA, 532 bp, Zea mays
  unsure (1)..(532): unsure at all n locations
aggaggnncntcgtgtcctcaattagatagtagtgctatactccgtaccggtccggaattcccgggtcgacccacgcgtccgatggatcagccatttatggctgctatcaatagccagcctttcgtggaggatattgagccagggaagaaagccagtggggacatgcctgcgacaacaggaagcggatgcttcgaatgcaacatctgccttgattttgcatcagaaccagtggttactttctgtggtcatctctactgctggccttgtatctacgagtggctgcgccctggggtggagtcagctgccagcgacaacagcagttcggcaaggcggcaatgtcctgtatgcaaggcaacactctcaacggacacccttgtgccactatacggccgtggaggcaactcaaagaagtcacttgatggcatggccatcccgcgccgtcccatggtacaccgggagactgttgaggagcaacagaatgcacagagcaatgtcaatgaccagcactaccaccagagcatggaagacaac

SEQ ID NO: 92389 - DNA, 515 bp, Zea mays
  unsure (1)..(515): unsure at all n locations
nttgaaaactaaggcgacgcattgacgtcccggtccggaattcccgggtcgacccacgcgtccgggtctggtgccaattgttgagcctgagatccttgttgatggccctcatgacattgatcgcgggcgcttacgtcactgagaccgtccttgctgcctgctacaaggcgctcaacgagcaccatgtcctcctggagggtaccctcctgaagcccaacatggtgactccaggctccgactccaagaaggtgactcctgaggtgattgctgagtacaccgtccgtaccctccagaggaccgtccctgctgctgtgcctgctgttgtcttcctctctggtggacagagcgaggaggaggccacccgcaacctcaatgccatgaacaagctcagcaccaagaagccgtggtccctgtctttctccttcggccgtgccctccaggcgagcaccctcaaggcctgnngctgcaaggtggagaacttggagaaggctagagcttgccttctcgccaggtgn

SEQ ID NO: 92390 - DNA, 520 bp, Zea mays
gggagagtgggtaagatgagttgtctgactattgacgtcggagggaggttggtatacttctccggaattcccgggtgctgtcacagcgtggctgaccagcagatccgtcgttggcggaacccacgctcgccggctgcgaatgcatgtgtaggctgctctgcgtcggcacggacaattggacgagctagactctgcgtcgccggcgatggggtgctccttctcagggctgaacgcactgtacgacaccgtcggcggtcggggtggtgacgtctgggttaacgactaccacttccgcgtgctccgcaggctcggcgatgccggccctgcgggctcgtcggtcttcctcgtcaaggaggtcgtcgccgccgcaaccgcctccgacggcacggctgggtcagagcccggcgcctcagggatcgccgggaagaaaggcatcgacccatcacacatctcagctgacgggacatatgctctcaagaaagttcttgttcagagtgatcagcacttagagcttgttcaa

SEQ ID NO: 92391 - DNA, 500 bp, Zea mays
  unsure (1)..(500): unsure at all n locations
ggggtatggacgatttgttctatgaacagagtgtattgctataccggtccggaattcccgggtcgagccacgcgtccgttcttctctctctgctcctccgcgtccgcctgatccatccaagacagggatcgccgtgtcggactcggaggaggaccacttcgaatcgaaggccgacgctggggcgtccaagacctacccgcagcaggctggcaccgtccgtaagaacggcttcatcgtcatcaagaaccgtccctgcaaggttgtggaggtttctacctccaagactggtaagcatggccacgccaaatgccactttgtcggcatagacatattcaatgggaaaaaagcttgagatattgttccttcatcacacaactgtgacattccgcatgtgaaccgtactgagtatcagctgattgatatttctgaggatggatttgtgagccttcttacttcagatggcaacactaaggatgatcttagactcccaactgatgagn

SEQ ID NO: 92392 - DNA, 512 bp, Zea mays
cgagagtggatgaaggagccataagctagggctcgtatagaggggaagttatgtattcgctctaccggtcctgaattcccgggtcgaccgacgcgtccgcaacagaagagcggcggctcgtattgaggatgagcaggccgaggacgagttgtgccaaaggtcaatgggtatctcgggtgactcgatgcacaatcagccgatccaccggtggaaagcataaagcctggaggaagaaacgaaagtattagcttggtcgtcagccaaccaacaccaagttgtcaagcaataagacagttaggaaggtccgtgttcgtggaggtaatgtgaaatggatggctcttcgccttgatactggtaactactcatggagaagtgaagctgttaccctcaagacccgtatgctcaacttggtctacaatgcttaaaacaattatctttttaggacaccagacccttgtaaaaattccaattctccaagtgaaactttcccattttaaaccatggtttacccc

SEQ ID NO: 92393 - DNA, 503 bp, Zea mays
  unsure (1)..(503): unsure at all n locations
ngggtagaaatgtggtagggagggggtatatgcatnactcctnccnnttcggaattcccgggtcgggccacgcgtccggaagaagacgagtgtcaagtgaacctgaaacttgcggtgtcactggctggtagcgtgagtgtgagtgagtgatcgagctagctgagctccgatcctcgctagctaggataccgccataccacaagtcttcttcacaagtttaggagtgacagcaacaagagatcgatggcctctgccaccgtgctcaagtcctacttccttcccaagaagtccgaatggggcgccaccaggcaggccgccgcgcccaggccgaccaccgtctccatggtcgtccgcgcctccgactacgccgatgagctcgtgaagaccgcgaaaacgatcgcgtcgccggggcggggcatcctggcgatggacgagtcgaacgcgacgtgcgggaagcggctggcgtccatcgggctggagaacacggaggccaaccggcaggc

SEQ ID NO: 92394 - DNA, 508 bp, Zea mays
  unsure (1)..(508): unsure at all n locations
gagttagganaggatctgcttatgaggtggggggaagggagtatactcgtccggaattcccgggtcgagccacgcgtccgcgcccgagcatgaaagtcctgtggggttcgttcgaggcggcggcggcagcggcggtggcgtgcgaggtgaccgacagcctgcgcgcgttcgagatgtcgatgaacacgtgggcggagtggctggagcgccacgtcgaccgcgcccgcaccgggctcttcttcacgagcatttcgccgacgcacctgcactccgacgagtgggaggaggcggccgggtccgggagcggcgccggctaccaccgatgctacggcgaaatggagccgatcacggcggatgggcaccgtgggcgggacacggacccggcgttcgcgcgcgcggtggatgcgcatgtggcgcggctgggcgcgcgcggcgtcgccgtgcgggtgctcaacgtgacgcagctgtctgagcaccgcaaggacgcgcacccgtacgtgcaccggcg

SEQ ID NO: 92395 - DNA, 500 bp, Zea mays
tggtgatagggagcccaaatgttgtcatggatttgtcggggggaagagagtcatgtcccggtccggaattcccgggtcgaccgacgcgtccggtgaccttgggtccgctctgcatgcagtatgggaggatgaccgtgccatccaggagtttcagacagcaattgatcgtaaacctggccatgttgatgccttatataatcttggtggattgaacatggacgcaggtcgttttgtacgggctgcggagatgtatactcgtgtgctgagcatccgaccaaaccattggcgtgcacagctaaacaaggcagtggctttgcttgggcagggtgagtctgaggaggccaagaaggcactcaaggatgcgtttaagatgacacaaaaggtggaagtgtatgatgctatctcacatttgaagacattgcaaaagaagaagccaaagccttccaaaagaaaaagatgacggtcaaaggggagcaagcttatggtggtgtgggaagggg

SEQ ID NO: 92396 - DNA, 522 bp, Zea mays
  unsure (1)..(522): unsure at all n locations
nggggggggaaggggnccgggctgntgaatgtggggaagaagggggggagggaagatgttctggaattcccgggtcgacccacgcgtcgcggggagacatgccgcaacattggtttcgtgtcgaacgatgtcgggcttgacgctgaccactgcaaggtgcttgtgaacattgagcagcagtcccctgatattgctcaaggtgtgcacggccacttcaccaagcgccccgaggagattggagctggtgaccaggggcacatgtttgggtatgcgactgacgagacccctgagctgatgcccctcagccatgtccttgccaccaagcttggtgctcgtctcacagaggttcgcaggaatggaaacctgnccctggctcaaggcccgatggggaagaccccangtgacaagtggagtacccgcaacgaggggtggcgccattgggtnccatncgtgtgcacacaagtncttaatctttaccccancacgaacaagaccaagtaccaacgacgaggatttggcctc

SEQ ID NO: 92397 - DNA, 505 bp, Zea mays
  unsure (1)..(505): unsure at all n locations
ggagagaggggggagaagccaaggattgnatggagcacgttcggggagaggaaatgttttaccggtccggaattcccggggtaaatggtcgaccaacaaagttacacatggattccacctggtggaaggcaagtccggccatgacatggaagactaccatgtggcagagtacaagtatgtgaagaatcatgagcttggtctctttgccatttttgatggccatttaggagataaggtgccaagttacttgaaagctaacctttttagcaacataatgaaagagcctctcttctggtctagccctcaagaagcaataaagaatgcatactgctctacaaacaagtatattctagaaaataccaaacaacttggaccaggtggttcgacagcagttactgctattggagttgatggtaaggacatgtggatagcaaatgtangcgactcttgaactggtgggtgtgaaaaaaggtctggttagcaacttaatggtgaccattgaaga

SEQ ID NO: 92398 - DNA, 505 bp, Zea mays
  unsure (1)..(505): unsure at all n locations
gttgagagtntagaaaggctgtaccatgactgggggaaggatgtatngctcgtaccggtccggaattcccggggctgcccacgcgtccgcaagcaggctggcgagagatatggatccttcgaccgtgcaaggcaagaccggttcgtccagcgatgggtggacgcgctgacagaccctcgcgtgacccatgaacaccataccatttggatctcctactggtcccagtgtgacgccgctcttggccagaagctggcttctaggctgaacctgaagccgaacatgtaagatcgacgaggaagaaagcaggcaccggtggccaaggttgcaacgcaacatggagcgtgtgatgtttacaccaatataattgaataaacaggggatgtgcgcgtcgtcctacttatgctgatgctgatggtcggtgatcggttatatatactggaacttctggtgtatgctcttctcttctggaaagacgtaatgtaacgaagaagaatgtgtcattggn

SEQ ID NO: 92399 - DNA, 505 bp, Zea mays
  unsure (1)..(505): unsure at all n locations
ngggtagggtatggtggttaagaagggaaggggaaggaggtatactcgtccggaattcccgggtcgagccacgcgtccggagatgagctgacccttgagggtgtcaagcagttctatgtgaatgtggacaaggaggactggaagctggacacactgtgtgacctgtatgagaccctggccattacccagagtgtcatctttgtcaacacccgccgcaaggtggactggctcactgacaagatgaggagcagggaccacaccgtttctgccactcatggtgacatggaccagaacactagagacatcatcatgagggagttccggtctggctcctcccgtgtgctcatcaccactgacctgcttgctcgtggtattgatgttcagcaggtgtccctggtcatcaactatgatcttcccacccagccagagaactacctgcatcgtattggtcgtagtggtcgttttggtaggaagggtgttgccatcaactttgtgacccgcgacc

SEQ ID NO: 92400 - DNA, 502 bp, Zea mays
  unsure (1)..(502): unsure at all n locations
agttaaggaaagatctgatcagtgggaaagaagaggtatttgtcatacctcgtccggaattcccgggtcgagccacgcgtccgctggattgctcacagataccctgtgcattttttagtggttgaggttaatgttaaggtggagagtgcaggcacacgtaacgtgcacaataatgatttctatgctaaagagaagttgctcaaatcaatgcgtgattgtgatccttcgtctgtgcgccactggattgtaagagttgttttcttgttttaattttttttgttattcctaccattaaattgggcattcaatacctgttcattatccgaatgcttatgcaatccaataatgatggaaaataactgacttggctgctctcttgagttgtggcaacggaagttctaggccccgttgcagcactacactgcgctaatggaccttcagaaatgagaagctattntacaagctccagattgacaatgtcgaagagccgctgtcctataan

SEQ ID NO: 92401 - DNA, 495 bp, Zea mays
  unsure (1)..(495): unsure at all n locations
gaggggnaaggagttgtatgtgggaaggggggggggatggtaatggttcggaattcccgggcgagtcctacgagcagtcgcacgcaagtgtcaagagacgaaacggtcgacatggctcgcacgcaatctgccgtagcggtcgccgtggtggccgcggtgctgctgctggcagcggcggcgacgacctcggaggccgccatcacctgcgggcaggtgagctccgccatcgcgccctgcctctcctacgcccgcggcacggggtccggcccctccgcgtcctgctgtagcggcgtcaggaacctcaagagcgccgncagcaccgncgncgacaggcgcgccgnctgcaactgcctcaagaacgccgccaggggcgtcagcggcctcaacgccggcaacgccgncagcatccccttcaagtgcggcgtcagcatcccctacaccatcagcaccttcaccgaatgctccagggtgaactaaaacctagaccacggcccc

SEQ ID NO: 92402 - DNA, 508 bp, Zea mays
  unsure (1)..(508): unsure at all n locations
ggagttagagagaagccatagcgttgcgcctagcttttccgcaacggnatgtatttcctcttccggtcctgaattcccgggtcgaccgacgcgtccgggactagttctagatcgcgagcggtccggttttttttttttgttgaaagctaaccgaacaagccataactcttcagatatactggcgctccacttcatggctccatcgagttagactgttagagtaattttgattggccgaagcggcggtctctgccctggaaggagcgcaacgcttccaggtactcagcctccccaaagtcaggccacatcttgccggtgaagaacaactccgagtacgccgactgccacagcaagaagttgctgagcctcatctcgccgctggttctgatgaccaggtcgggacaggagaactcgccggcggcgctcgtcgcgagcttgccggcgatgaccgactcgtccatgtcgtccggactgagccggttcgccttcgcctcccgggccagacttt

SEQ ID NO: 92403 - DNA, 504 bp, Zea mays
  unsure (1)..(504): unsure at all n locations
gataggagtcttggagaagcaaggttgntttatgatagcggggggacagagtgcttccccggtccggaattcccgggtcgaccgacgcgtccggatagagcttagaagttggaagtaataatttcttggttgattgtatccttaaccatttcttgttttttgacacgaggaactcatcatgaatccactaattgctgctgcttccgttattgctgctggattggccgtagggcttgcttctattgggcccggagttggtcaaggtactgctgcaggacaagctgtagaaggtattgcgagacagccagaagcagaaggtaaaataagaggtactttattgcttagtctagcttttatggaagctttaacaatttatggactggttgtggcactagcgcttttatttgcgaacccttttgtttaatcctaaaaaagaaaatgagtcctttagattagatacttttttctttttttagtacattggcatttgcttatgtaaatttt

SEQ ID NO: 92404 - DNA, 508 bp, Zea mays
ggggtaatgaaatggtgtctttgtgaagggggggaaatagtatagtcgtaccggtccggaattcccgggtcgagccacgcgtccggactaagagttttacctcagagtgccctcatgttgagaggtatttctggaccatggttaaccaaccaagcttcaaaaaggtcattggtgacgttaagcaggcagaagctgtgccacttgttccacagaaggctgctccagccaaagtgcagaagcctaaggaaaccaaaaaggaggctccgaagcccaaggtaactgagaaatcagcagaagaagaggaggcaccaaagcctaagccaaagaaccctcttgatttgcttcctcctagcaagatgattcttgatgattggaagaggctgtactctaacacgaaaaccaacttccgtgaggttgctattaaaggtttctgggatatgtacgacccagagggctactccctgtggttctgtgactacaagtacaatgatgagaacacagtgtcgtt

SEQ ID NO: 92405 - DNA, 504 bp, Zea mays
  unsure (1)..(504): unsure at all n locations
ngagttttagaaatggttgtgaatcgatagggggaagatagtatcgctcgtaccggtccggaattcccgggtcgagccacgcgtccgacgcgatgctggaattcgagaggctggtgaaggtgaggcaccaggtcgtggccgggaccctgcaccacgtgaccgtcgaggtgaaggaggccggcggcggcgaaaagaagctgtacgaggccaaggtgtgggagaaggcgtgggagaacttcaagcagctgcagagcttcgagctcgtcggagacgccgcggtcgcctgaggcgcacaggcttttcgctggaggctggagtacaacaatgaaagaatttaactgtcatcccactggaaaagtatgatataatgaataaaccagcgtcttaccacatgtattgtaccctaatgagatatttgacccctgtaatagaatgagatgtgctaaggaatctgaaagtcttcttgctttttgttgccaaaaaaaaaaatnttaagaaaaanta

SEQ ID NO: 92406 - DNA, 513 bp, Zea mays
  unsure (1)..(513): unsure at all n locations
nggagttaatggaatgggtgtnctatgaagaagggggggagagaagatagtgctcgtaccggtccggaattcccgggtcggcccacgcgtccgcgaccagaaagttgtggatgagaaccttgagaagctgaagaaggtgctagaggtgtgcgaggcacgccggaccaagtgcaagtaccttgctggagacttcctcagcctcgccgacctgaaccatgtgtctgtcactctctgcctgttcgctacgccctacgcatctgtgctcgacgcctacccgcatgtgaaggcctggtggtctggtctgatggagaggccgtctgtccagaaggtcgctgccctgatgaagccatctgcttgaaacggttgccctgtcaatcggtgaatggaataagccaagtctgttctgggttgtttgcttgttcagtgatgtgtcttctatgacgaaagttgagtgcctatgtgtgagcatgcttgcttgtaacgagacattgaattgttcggaaatgagcattc

SEQ ID NO: 92407 - DNA, 468 bp, Zea mays
ctagtgtatacctgtccggaattcccgggtcgagccacgcgtccggcttctcaaccggataggtagcagcggagcaggtagaacgctgcacaatccccttggccgcggccaagatggtgaacgttcctaagaccaagaagacgtactgcaagaacaaagagtgcaagaagcacacactccacaaggtgactcagtataagaagggcaaggatagcctgtctgcccagggaaagcgccgttatgaccgcaagcagtcaggatatggtggtcagaccaagcctgtcttccacaagaaggccaagaccaccaagaagattgttctgaagctgcagtgccagagctgcaagcactactcacagcacgccatcaagagatgcaagcattttgagattggtggagacaagaagggcaagggcacatctcttttctaagcttctcgtccacctgtctggttgttgagttgaagct

SEQ ID NO: 92408 - DNA, 499 bp, Zea mays
  unsure (1)..(499): unsure at all n locations
tgtttagttagggtggtgctcagcgagaggagtatagtcatacccgtccggaattcccgggtcgagccacgcgtccgagccagtcagccacatcactagcgatctgtgcagaggcaatggcgtccaaggttgggctgggggtggaggtcaagtccccggctgacaagctgtgggcggcgctgcgtgactcgacggagctgttccccaagatcttccccgagcagtacaagagcatcgagaccgtcgagggcgacggcaagtcggccggcaccgtccgcctcctcaagtacaccgaggcggtgccgatgctgacgttcgccaaggagaagcttgagacggcggacgacgagaacaaggtggtgtcgtacagcgtggtggacggcgagctggcggacttctacaagaacttcaagatcacgctgaaggtgactccggccaaagcgganggcgagggcggcgccgtcgtcagctgggccatggagttcgacaaggccaaccn

SEQ ID NO: 92409 - DNA, 500 bp, Zea mays
  unsure (1)..(500): unsure at all n locations
agaaagagagccttggggcctttcccaatgacacggacggntgctctgctccggtcctgaattcccgggtcgaccgacgcgtccgacaacccagcgccggcagtcgccgtcatggatcgatcgccggaaaactaacccctagacgatgtctggatccgtcgggggggacaagaagcccgctgagggcggctcccacatcaaccttaaggtcaagggacaggatggcaatgaagtgttctttcgcataaagaggtccacccagctgaagaagctgatgaacgcttattgtgaccgccagtctgtggacatgaatgccattgcgttcctgtttgatggccgcaagcttcgcggcgagcagacccctgatgagctggaaatggatgactgcgaccagatcgacgccatgcttcaccagacccgaagcagcgttcctagcaccaccctaaaacctcgttttgcttctcctactgcgtggtattaaacaaaagggaaaaaagggt

SEQ ID NO: 92410 - DNA, 503 bp, Zea mays
  unsure (1)..(503): unsure at all n locations
gagtntaagaaatggtttagtacgtaagacgggggaacagtattgctcgtaccggtccggaattcccgggtcgagccacgcgtccggccatgttctccatgttcggattcttcgtccaggccatcgtcaccgggaagggccggctcgagaacctggctgaccacattgccgaccccgtcaacaacaacgcttgggcctacgccaccaacttcgtccccggcaagtgagggaggcgccgccggtgacctttaggtgtccggatgcatgtgagcgcacgctggttttcggtttgtaccatgatgtaaactattgttcaatcgacaaggaataattgtgttcattgtcattatttttcaaaaaaaaaaaaaaaaaaagggcggccgggacatcacagcacaaatcatctctgctagtatagcaggtgatatggttcttgcttctgcttactcgcatgagttgccacgatatggtcttgaagttggtctgaccaactatgcagctgc

SEQ ID NO: 92411 - DNA, 506 bp, Zea mays
tgagtaagggaagcctgtgtcacgacaggcggagggatagtatcgctcgtaccggtccggaattcccgggcacgcactcgggtaaagctatctcgagctagctagctgctgtaagccgttgccatggccaaaatggtgttggtctgcgtgctcggctccttcctcctgatgcccttggcctccctagccctgacgcaggacttctgcgtcgccgacctgacctgcagcgacacgccggcggggtacccgtgcaagtccagcgtcaccgccaacgacttctacttccacggcctggccggccagggcaaaataaacccactcatcaaggccgccgtgaccccggccttcgtgggccagttcccgggcgtcaacgggcttggcatctctgcggccaggctcgacatcgaggtgggcggcgtcgtgccgctgcacacccacccggcgggctcagagctcctcttcgtgacccaaggcaccgtcgccgtcggcttcatcagctccggctc

SEQ ID NO: 92412 - DNA, 469 bp, Zea mays
  unsure (1)..(469): unsure at all n locations
atattgtagtactcgtccggaattcccgggtcgagcacggctntcctcctgcctttggaaattcttaaaggccggttagtttgaaggggatggaaaatttggttcgggattaagggcccgtggttccaattttaaccgattgtcgggggattaaatctgacctggaccttgctctaatccggtttgctaatgatgtcagttctgaaagctcacattgaggttatgagacgagcaaagccaggcatgaaggaatatcaattagaaagtatcttccttcaccatgtttatatgtatggaggttgccgacattgctcttatacatgtatatgtgctactggagataatagtgctgntctacattatggacatgcngcagctccaaatgaccggactttgaatgatggagacatggcactaatggatatgggagctgaataccatttctatggatctgatttcacatgctcat

SEQ ID NO: 92413 - DNA, 501 bp, Zea mays
ggtagagactagttgtgcctggctcgtacgtcatggctataccggtctcggaattcccggcgcgggccacgcgtccgcgcgcctcgatcctcctcgccccgcctgcctctcctgccctcccccgcacctgcagctgcggagagcggggcaagctagctgcagaggagcgagacagcaggaggaggatgaggacgagaggaagaagagatggcgggctgtgatggagccaagtcgtcggcgtccatggaggaagaggcatgcgcggagaagaagtacggagggatggcacccaagaagcccttgatatccaaggaccacgagcgcgcctacttcgattctgcggactgggtgctgggcaagcaagccgcgaacagcagcagcaacagcacgaggaccgcatccgccgttgagtctctgaaacccaagctgaagcactgatgagactgaactcgctaaccgggctggtcctttctccctgtccagagaacgccggaccaccag

SEQ ID NO: 92414 - DNA, 506 bp, Zea mays
  unsure (1)..(506): unsure at all n locations
ngggtttttaaggaagggtggcgtagaaggaggggggaggtactgtagtactcgtccggaattcccgggtcgggccacgcgtccgaggtcattgagcattacaatttcgcaccgttgactgccgttttgtctgtgaactacgctcgatagattcctgctgacgtatgagttccctgaaggcagagcttggatgactcagctcttggcagtggcttgcttgtctttggcttcgaaaatcgaagagacttttgtgccactccccttggatttgcaggtagccgaggcaaagtttgtttttgagggaaggaccataaaaaggatggagcttctggtgctaagcaccttaaagtggaggatgcatgctgttactgcttgctcatttgttgaatactttcttcataaattgagtgatcatggtgcaccctccttgcttgcacgctctcgctcttcggaccttgtcttgagcaccgctaaaggtgctgaattcgtggtattcagacccctcc

SEQ ID NO: 92415 - DNA, 505 bp, Zea mays
  unsure (1)..(505): unsure at all n locations
nagttnntaagaaggtttctcatgaagaagaaagataanattcattactcgtaccggtccggaattcccgggtcgagccacgcgtccggtgaaatatcacagggatgagcaaagggatgtttccaggattgtggcctgggaagggaaaccatacagggttaagcatgaatatgaagggcaatggaatgataagaagacccgcctgacaacgtgtgaccctcatgctcaacgtatcattacttcgtccgagtctcctcaggaggtcgaagttggcaaggatatcatatttacttacgatgtggatttcaaggagagcgacatcaagtgggcatctcggtgggacagctatctattgatgacagatgatcagatccactggttctctattgtgaattctctcatgattgttctcttcctttctggaatggttgcaatgatcatgcttcgtaccctttaccgggatatctctaagtataaccaacttgagactcangaagaggcccag

SEQ ID NO: 92416 - DNA, 499 bp, Zea mays
  unsure (1)..(499): unsure at all n locations
agataaggaggtttgagnttgcaatgtcgccagtacgattatcatccccatacnnaacagcgggcggagacacacgtccncgttttacaaaatccttgctttagtttcatggnanagangaagcacaactgcacctgttcaaatgtaagggatccttgcacacctannaaatcttaatattccaataacatttccatatacaactatnttattgtcttcacattgttttacctatatacaatcacaaatagcttccttgccgattatgttctcngcgaaggaggatttgggaccgtttacaagggctacatagatgaaaatgtcagggtggggctgaagtcactgcctgttgcagtcaaggtgctcaacaaagatggacaccaagggcacagagaatggcttaccgaaattaactgcctggggcagttaaggcatccaaacttggtgaagttgatcggaaattgctgcgaaaattaccatcggctgcttgtctaccaag

SEQ ID NO: 92417 - DNA, 516 bp, Zea mays
  unsure (1)..(516): unsure at all n locations
ggattagaggtttaagtgntntaagatgtgtctaaggncctttgctccagctaacgaatcagcgaccgtataattcccgggtcgacccacgcgtccgctcccgctccggcttccgcttccgttcctgttgctctcctgtgttcgggttcccgggtaagcggatcgtgatcgccgcataggagtgtgaggtaccgtgcttcctcgccgcctcaactgagccacggacgaccacttcctccacaacgccttcagcacctacggcgaggtcctcgagtccaacatcattctcgatcggtagacgcacaggttccgcaacttcagcttcctcaccttctccactgatgatgcgatgctgaacgccatccacggcatgaaccgcatggaccttgacggtcgcaacatcaccgtcaactaagtccaatccctgctcttcctttgaagcagccccagcttccgcttaccgccgttgacctttaagctgcctttactggtgcgacttaacccctcttaattttt

SEQ ID NO: 92418 - DNA, 507 bp, Zea mays
  unsure (1)..(507): unsure at all n locations
ngaggtnaaggaagcgttgtctatgaaaaggggggagggaagatagtgctcgtaccggtccggaattcccgggtcgagccacgcgtccgcttgttacaaaatcctgccaagaatgccattggagataggaagcacaaccgcaccggatcagatataagggatccttccacacctaggaaagctgaagatgccaagaacatttccatatacaacgatgtgattgtcttcacattgtttgagctagagacaatcacaaagagcttccgtgccgattatgttctcggcgaaggaggatttgggaccgtttacaagggctacatagatgaaaatgtcagggtggggctgaagtcactgcctgttgcagtcaaggtgctcaacaaagatggacaccaaaggcacagagaatggcttaccgaagttaactgcctggggcagttaaggcatccaaacttggtgaagttgatcggatattgctgcgaagatgaccatcggctgcttgtctacgag

SEQ ID NO: 92419 - DNA, 497 bp, Zea mays
  unsure (1)..(497): unsure at all n locations
nagtttaggagatgtggggtagagagggggaggagngtcatcctctccggaattcccgggtcgggccacgcgtacgcgtccgatcgattccgtgttatggtggaggagagtcattcttttggggtgcttggcgagtgtgggcgtggccttgcgtgaacattatggagttcctattgaaaaaattgatatcatcactgctggaatgggaaatgcattagctactgatggtggctcttgtacaggaagtgtcagagttgctgatcatcagcgtctaagcagctctgggtatgttttctctgcatctctgccaccttatcttgccagtgctgctgtttctgctgttaactatctcgaggaaaatccctcagttcttgcaaacctaaggagcaatattgctcttttgcataaagaactatcagatacttcagggcttgaanattccagccatgttctgtcacctatcggcttccttaagctgaataagtcgacttgttctt

SEQ ID NO: 92420 - DNA, 505 bp, Zea mays
  unsure (1)..(505): unsure at all n locations
aggtntaaggatggtgntataagaaaaggggaggaaagagagtatagttcgtaccggtccggaattcccgggtcgagccacgcgtccgattgaattttggaataatgtatatggatttgatatgagctgcataaagaagcaggcgatgatggagccgctggtagatacagtggatgcaaatcagattgtcactaactgccagttactgaagacaatggatatctccaaaatgaccccaggtgacgcgtcctttactgtaccattcaagctggtagcagagcggaatgattacattcatgctcttgtcgcatacttcgacgtgtcgttcaccaaatgccataagctgatgggcttctcaacagggccgagatcgaaagccactcactggaagcanactgttctctacctggaggatgttataactatctgtcanggggaaagcctgagtggttccatgacagtcacacccaataagagtaaccctcgagatatcgacattaagctt

SEQ ID NO: 92421 - DNA, 467 bp, Zea mays
  unsure (1)..(467): unsure at all n locations
atatagtactactcgtccggaattcccgggtcgagccacgcgtncgctccgacttctaatgggccacaggcctcaggattgggaacccggattcggaaaacgttggggagtccagggaggggccatggattctccggaccaaggccccaaggtggcacaagcagctgcagtgctggtgcctcaatttcaggggcagggtgacagtcgcatctgtgaagaacttccagctcgttgctgccacgcagcccgctgctggagcaccaaccccatcacaggctaccccagtgccgcccgagcacgagaaggtgatcctgcaatttgggaaggtggctaaggacatgttcaccatggactaccgttacccactgtcagccttccaggccttcgcgatctgcctgagcagcttcgacaccaagctggcctgcgaatgaagccaccagtcatggctcaaagtcaaggacgatctg

SEQ ID NO: 92422 - DNA, 501 bp, Zea mays
  unsure (1)..(501): unsure at all n locations
agttaagggtatgttggctatgcggagggggggtagtagcattagctcgtaccggtccggaattccggggtcgggccacgcgtccnggtgacaaactggctggggttccgcttccgcaacccgctcgcgcgcctcgacatggacgccgggtcctggcgcctgaggaaatacgggctgaggtacgatgacctgtacgacccctatttcgacctggacatcaaggaggcgctcgggaggctgcctagggaggtggtcgacgcccgcatccagcgcctcaagcgcgccatggacctctccatgaagcatcagtacctccccgaggacctgcaggcacagcaggtcccattcagaggatatttgagtgacatgttggctctggtgaaaaaggaaagcgctgagcgtgaagcactgggagcccttccactttaccagagaacgcttncctaaattgctggctaaacatggctgcaagtcttctctttacgccaaatcagaatgcat

SEQ ID NO: 92423 - DNA, 510 bp, Zea mays
  unsure (1)..(510): unsure at all n locations
ggggtnggagttnagaaagctgtattacgacggggggggaagatgatacttcgtaccggtccggaattcccggggaagagtaattttggcaaaagaagagctgggatcggatgttgatctcgactcacttgccaatatgactgatggttattcaggaagcgacctgaagaatctgtgtgtgaccgcagcgcattaccccattcgagaaatcctagagaaggaaaagaaggagaagagtttggctaaaacagaaggtaggccagagcccgcgttgtatggaagcgagcacatccgtcctcttagcatagacgacttcaaatccgcccatgagcaggtttgcgcgagcgtttcatccgactcggcaaacatgaacgagcttctccaatggaacgacctgtacggcgaaggcgggtcgaggaagaggaaagcgctgagctacttcatgtgacggcgagagacataaaaccagaaggatcacaaccgcgccataaagccagaaagtatcgcagt

SEQ ID NO: 92424 - DNA, 501 bp, Zea mays
  unsure (1)..(501): unsure at all n locations
gaggggaagagtgntnnnnnttcgtagctgacgttatcagtagactgctaccggtccggaattccggcntcggccncnaagnncccganaaaaataacaatggcttaggtcttatgactatcctggaggatgctgttagaggtggatgtccaaggctaatagtggcagaggacattgagcaggaagctcttgcaacccttgtggttaataggcttagaggtgcattgaagattgctgctattaaggcccctggttttggagagcgcaaaagtcaatatcttgatgacattgctactctcactggaagcactgtcatcagagaagaagttggattatccttagacaaggcagacaatgcggtcctaggaactgctgctaaggttgtagttaccaaggattcaacaacaatagtgggagatggcactacacaggaggaagtgaacaaaaaggtgacacanatcaagaaccagattgaggctactgaacaagaatatgagagag

SEQ ID NO: 92425 - DNA, 498 bp, Zea mays
  unsure (1)..(498): unsure at all n locations
ngtttgaggagtaaggaaggtttgtgtctcactcctcgtatgtcataccttcggattcccgctggggcacgcgtccggcaaaatctgcacgagagacagaggacgagattgccgatgcggaggacgccgccgggtcggtccgacgggccggcataaccgactaccgcaagaagctgctcaactgcanggagctcgagtcgcgcgtcggcaccgtgagagaaagccttaaaaatgcaaagagggattttaccaagactgaagacgacttgaaatctctgcaaagcgtggggcaaataattggaaaggttctccgacctcttgataatgaacgctttattgtgaaagccaacagtggtccccgatatgtggccggttgccaaagtaaagtacacaaagagaagttcacatcagaaacaagcgcttgactactcaatacgacctcgacagacattaaaccagtangatcacaaccggaccataaaaccagaaggaatcgca

SEQ ID NO: 92426 - DNA, 504 bp, Zea mays
  unsure (1)..(504): unsure at all n locations
gaagttcgaggaggccgaaggtttgggcctgacttcagactaggnatgcacctcaatctcctnatcgggctctgcattcaggcgccacgcacattcgtcgtcagtcccagaggatcttgtgctcagggaacagatctggcgcaacaagcctccgtggcgcattggcagagcatcatcaagatcttgacaaattctctcgatgttctgaaatcaaattacgtgcctccgttcctgatctgcaagatgttcacgcaagtcttctcgtttatcaatgtgcagcttttcaacagccttctgctgcggcgtgagtgctgctcgttcagtaacggagagtacgtgaaggctgggctggatgagctagagcattggtgcttttggctgactgaagagtacgcatgatctgcatgggacgagctgaagcatatcangcaggcagttaccctcttgatacttgacgacaagcatagcccngagtctcgccgaagatcaacagacgactttttt

SEQ ID NO: 92427 - DNA, 520 bp, Zea mays
  unsure (1)..(520): unsure at all n locations
gagagtgagcntagcgcggggntnnnnnncctgagtanctcccgacgngatcgcattantccccccccnctgaattcccgggtcgaccgacgcgtacgctaaagtctaccaccacccgccttctctggagttcgatctgggtgctcccccagacatgtcgggccgcggcaagggaggcaagggcctgcgtaagggcggcgcgaaacgccaccgcaaggtgctccgcgacaacatccagggcatcacgaagccggccatccggaggctggcgcgcaagggcggcgtgaaacgcatcttccggctcatctacgaagagaccccccgcgtgctcaagatctttctcgaaaacgtcattcccgacgccgtcacctacaacgagcacgccccggggcaagacccgtacaacccttggcgtcggctacccgcctaaacgccaagggccgaacctttaccggttccgccgctaaggcccctagctaagccatgcttgaaccggcccccaatcttcgggtcttgggcc

SEQ ID NO: 92428 - DNA, 520 bp, Zea mays
  unsure (1)..(520): unsure at all n locations
taggagggttcttccncctcggatgaccggtnacgntcgaacgtcctgaattcccgggtcgacccacgcgttcgaccgcgcggcgccggtccctgtcccggtcccggtcctggcgcccgccgtgtccgtgcagaggtgggccgagcgcgggtactccgttgtcaccgtgcagtgcggcgaccggaccaagctgctgttcgacgtggcgtgcacgctccacgacatggactacgtcgtgttccacggcaccgtggacaccgcggccggtcgcgcgcgccatgagttctacatacggggcgccgacagcagccccatccggtccgaggccgagcgcgagggtcttacccaacgtcttcaagcagccatcgagcggaggtcgcttgaaggcgtgagggtttagctgtgtgccgccgaacgggccggccttgttttcgaggtgaccctgacgttccgctagaacggggctttggtggcccaagccgaggttttgaccaaagggcgaccaggcttttcaagtgtt

SEQ ID NO: 92429 - DNA, 520 bp, Zea mays
  unsure (1)..(520): unsure at all n locations
tgtagccgtgttctgagcatagatataaagactagagatganctcagctcccggaattcccgggtcgacccacgcgtccgagctgaagaggaggaggaggaggaggagaagcagcagcgcagccggaggagggagagcgaagatgcgccgcgtcgcgctgttgctcgtcgccgccgtgtgcgcgctggcggcgccggctgccgcggtcgtcactgacggtcttctcccgaacggcaacttcgaggatggcccgcccaagtcggcgctggtgaacggcacggtggtgtcgggcgcccacgccatcccgcggtgggagacgtccggcttcgtggagtacatcgagtcggggcacaagcagggggacatgctgctggtggtgccgcagggcgcgcacgcggtgcggctgggcaacgaggcgtcgatcctgcagcgcctggccgtggcgcgcggcgcctactacgccatcacgttcagcggcgcgcggacgtgcgcgcatgcngagcggcttgacgttgtcggt

SEQ ID NO: 92430 - DNA, 519 bp, Zea mays
atggaggacttgtctgggctacgccataaagcactaggcttagctgcaccggaattcccgggtcgacccacgcgtccggccggcgccgctgcagtgtccatagccacctcaggagactgagatggggggttttgtcaaggcccacgagagcaatgcgtacttcaagcgtttccaggtgaagttcaagagaaggcgcgctggcaagacagactacagggccaggataaggctgattaaccaagacagaaacaagtacaatacacccaaatacagatttgttgtgcgatttaccaacaaggacatcacagcacaaatcatctctgctagtatagcaggtgatatggttcttgctatgtgcttactacgatgagtaggcacgatatgggcttgaagacagtctgaccaactatgcacgtgactactgtactggactcatgcagactggcttgcgataccgagtcgaggcttaattgcaggcctggaatgcaagatggacgcaactgctatgcttttgaacat

SEQ ID NO: 92431 - DNA, 520 bp, Zea mays
  unsure (1)..(520): unsure at all n locations
aggtggtttgtttgatgccatgcncatgacgtatcgctgcactcggcccggaattcccgggtcgacccacgcgtccgaccgcgcggcgccggtccctgtcccggtcccggccctggcgcccgccgtgtccgtgcagagctgggccgagcgcgggtactccgttgtcaccgtgcagtgcggcgaccggcccaagctgctgttcgacgtggcgtgcacgctccacgacatggactacgtcgtgttccacggcaccgtggacaccgcggccggccgcgcgcgccaggagttctacatccggcgcgccgactgcagccccatccggtccgaggccgagcgcgaggttctcacccaccggcttcaggcagccatcgagcggaagtcgcttggaggcgtgaggcttgagctgtgcgcgccggaccgggcgggcctgcttgtcgaggtgacgcggacgttccgcgagaacgggcttgtggtggcccaagccgaagtgtcgaccaatggcgaacaggccttcaacgtt

SEQ ID NO: 92432 - DNA, 516 bp, Zea mays
gagtagcaggcttttggctagcatttgcattatcgtattgactgcaccggccggaattcccgggtcgacccacgcgtccgctcttttgctcctccgccagcttcatggtggacgacatgcccatcagggacttccgcaacctggagagcaagggggtggcgttccccaagagccagccgatgcggctctactccagcctgtggaacgcggacgactgggcgacgcatggcgggcgcgtcaagaccgactggtcccacgcccccttctccgcctcctaccgcgggttcaaggccgacgcttgcgtcgacgtcacgggcggtcggacccgctgcggcgccaccgtcggcaccgatggcaccggcgcccccgcctacgtcggcggcgccggggactggtacaaccaggaacctgacctcaccctgcagcaaccgatgcgcttggttcagcgcaagtacatgatctacaactacttgaacgaacccaagcgcttacaacaaggccttcccgtccagtgcc

SEQ ID NO: 92433 - DNA, 519 bp, Zea mays
aggggttatttgcgctagctacacgactattactgcattgactctaccggtccggaattcccgggtcgacccacgcgtccggatgacttctggtgaggctgtcaagtacaatagctccttggacgcattccagcagatccttaagaaggaaggccccaagtccctgttcaagggtgctggtgctaacattcttcgtgccattgctggcgctggtgtgctttctggctacgaccagctccagatcctcttcttcggaaagaagtacggctccggcggtgcttaaatggagaaaaatgatgacgaacaagagcagttcgctcccggtccaacccagtcaggatctggtcaaggttttggctttcattatgaagaaattaattatttattgaagaaaattttttcaacattccgtttgggccgaaaccttggtcttaaaacacatgtaactggtctaattaggtgtggcattggttcccaaaaccatggtcattaggttggggctaagcttgcctttggttg

SEQ ID NO: 92434 - DNA, 519 bp, Zea mays
aggaggcgttttgagcctagctttctgacttagtagtagtgactctaccggtccggaattcccgggtcgacccacgcgtccggaacatgtcagtcccatatttgttggtcgagagatacacagtgaaaaggtaacttggggtagaatttctatggttgatgctgagagaaggttgctggcaaatgctctacaagacatggacaatcagcattttattttgctatctgatagttgtgtacctttgcacaattttgactatgtatatgactacctgatgggtgcaaatctcagttttattgactgcttttatgatcctggaccgcatggaaattttagatattcaaagaatatgttacctgaagtcacagaggctgattttaggaagggttcacagtggttctcagttaaacgccaacatgcgttgatgatcattggcaataggctttacttatccaaggtcaagctttatttggaggccgggattgaagaattgtctaacttggtatgctgattgacatt

SEQ ID NO: 92435 - DNA, 516 bp, Zea mays
  unsure (1)..(516): unsure at all n locations
atgagcggtatctgcgctacgaatccagacatgatatcacgactcccggaatttccgggtcgacccacgcgtccgaatagtctctccaatcttgatcaggatctctcgaattatgcccaacacacggtgcctatatgctctggtcctcaagaatggctgtggtgtgaatcttggtgtggaaatgccacaaaagcaagagcaaagaccattgatctatgcaacaatccaatgacaaaggagccaaagcttcagggtgctagaagaatagttccggagtggactggtcttgacagtgaagcacggcagttcactgcacgaatcttgggtgatgatgtcgagcctgcagatgccacacctncgccatcggaagcaccgaagcctgaagatgatcaggatgtgaaagatgagctatgatcgcaagatgtttccaggcttggtcttactgaatgaaaagttggtgactcgacagtcatcaattcaaaacacatgcacacagctagtggagcgcatagggat

SEQ ID NO: 92436 - DNA, 515 bp, Zea mays
  unsure (1)..(515): unsure at all n locations
agtaggcggtattgcctaagacatgggagacgagataactcgtcccggaattcccgggtcgacccacgcgtccgaagcagctcgctcgagacggcgtgcaggggaggaacgagttcttggtcgaggtgctcatgcttacagtgctcaaccatcgcaaccttgtcagcttggtcgggttctgcgcgcagggggacgagaggctgctggtctacgagtacatgccgttcggaagcctggagagccatctgtttgacgtgcctctcggcaagaaaccactcgactggaacacgcgcgtgaggatagccgtgggagtcgcggaaggggtttcctacctgcacaacgtagccgacccgcctgtgatctaccgcgacatgaaggccgncaacattctgctgggcgaggacttcagcccgaggctctccgaactccggctcgcgaaggtcgngccggttggagacaggactcacgtgtncacgagagtcatgggcacctatggctactgcgcttctggattc

SEQ ID NO: 92437 - DNA, 524 bp, Zea mays
  unsure (1)..(524): unsure at all n locations
atgggggaagcgtttcgtaagaggcggggggggtgatgggagtgctgctaccggtccggaattcccgggctcgcgctggccgccgtggcgacggaggtggccgcggcaggaacgacgtacacggtgggcgcgccggacgggctgtgggacatgcagaccgactacgcgcagtgggtgaagagcaagaccttccgccccggcgacaccatcacgttcacgtactcgccggagctgcacgacgtggtggaggtgacgagggccggctacgatgcctgctccagcgccaacaacatctccgccttccgcaccggcaacgacgccgtgcccctcaccgccgtcggcacccgctacttcctctgcggcctcacgggccactgcggcaacggcatgaagatccgcgtcgacgtcgtcgccgccgcggcctcgccgtccgcgccgggccccgncgctgccgncgcggcgccgccgacgacctcgtcgccctgcatcgtcggagtcgtcgccgcctcgctactgctgctttt

SEQ ID NO: 92438 - DNA, 513 bp, Zea mays
  unsure (1)..(513): unsure at all n locations
gagtgggggaaggncagatggtttgaagnactttatcagctagtacgtaccagtcntccttcttgaattgcgggtcgccggcgcgtacgtccccttgcaagtatagtctcgttttctggttaagacgatgggcaaggacgacgggatcgagagccgcgctggcgggggcgagttcgctgccaangactacacggacccttccccggcgccgctgatcgacgcggctgagctggggtcctggtcgctgtaccgcgccgtgatcgccgagttcatcgccacgctgctgttcctgtacatcacggtggccaccgtgatcgggtacaagcaccagacggacgcgtttgcgtcaggtgccgacaccgcgtgcggctgcgtaggggtgctgggccatcgcctgtgcccttctgcggcatgaactttgtcctcctctactggacccgcccgcattttttgggggccccattaaccccctccggtacccttcgggcctctttcttgacgccgcaaaagagt

SEQ ID NO: 92439 - DNA, 462 bp, Zea mays
cgataaggggaaggggcggtttgtgtagttatcgcagatagacgtgctcctctgaattccgtcgaccgacctacgcgccacccacccacccactctttaggcttctcgcggcgtccaagcagggagagtgatccgctgggccggcgggctccggaccgcgactctttcgcgccccttcgcagaaggctacatccgtcaccacctactccgacctacaagatcggcgatacgtcgatgtaatgtgaacggcgccgtcacaaagggatgccgcacaagttctaccaccgacgcaccggtcgcgtctggaacgtcaccaagcgcgccatcggcgtcgaagtcaacaagcaattcaatgggcccattatcaggaaacctatccctgtccctattgaacatgtgcaaccgttccgctgcacataaaaatttccccctgacgaaagccaataattgaacaaactcttg

SEQ ID NO: 92440 - DNA, 520 bp, Zea mays
  unsure (1)..(520): unsure at all n locations
atgagcaggcatctgcgttacgtcattccgaactacncttacgtgacacttcagtatccgggcaggcaactatgccagtccactgttcctcacagcagctctaacctaatgcattggacaaagttgaatctgagattaaggctattgttgaggcttccaagaagagcccgttgttttctcaattcataaacgacttgtcagtctcaaaatcgaccagggtgaaggctatacccgaaatatttgctgacgctgggttttcagatgttacacagaatctcttggctgtcctgacggacaatggcacgctgaaatatactgaacgcattgcggagagatttgctgatttgactatggaacatatcggggagatcaaagctgtaggccagacagttatgtcacttgacaatgacggggagaatgaactgcaggaaaactttgacgatatccttcgggaaacacaaaatattcttggtgtacataaggatgacttcagccttaacggaagaatgaccaatggaat

SEQ ID NO: 92441 - DNA, 523 bp, Zea mays
  unsure (1)..(523): unsure at all n locations
agaagccagcgtctggncctaacccccgctaacgtacgacaatccggtatggatcccgggcagaaggagaggggtgcacaccacttgctggggctgctttctgcttcagatgtgcctcaagaactccaaagtaaggagatcatgcacaacctgcggcagtaccagctacctttgcagcgctatatggccatgatggaccttcacgagaggaacgaaaggctgttctacaagctgctaattgataacatgcaggagctgcttcctgcgggttatacaccaactgtaggtgaggcctgccagaagtatttgtccatcttttgacaaccaccaaggctgcatgtcatcttgatggacaacgtggaaagtcctaggaagttctaacgaaacttggcccattagaacattccaagttatctgggttactgatggttgagcgaatcttgggacttggaaaatttgggttctcagggaatgggaattccctgtatgcaaacttgctctatacacttgtcttggaggaagn

SEQ ID NO: 92442 - DNA, 528 bp, Zea mays
agaagcaaagcttatactcactcaaccgacttagtagtattacttcaccgcgtgctgaattaccgggagaggagtactgcccccatcatcatctacctcgccaaaggaattgaggcctcgctggatccactcccacggatcataagtcccacgcagatgattagcaatgcaactggagttccattagaaaaatattctttatcttggccggacctaaataatggctctggaaatttacaaccaagaaatatccaaatccccgtattggtggagctgacaaatggaaaaggccccttgcaaagtttttgaggcagcctcatttaatggggtgggataacagggaactcataactcatgaagtcatgggtggctaaaaaaaggtctatgctattggtgctggaatggaaactgcactaaccaacaagagtgccaccagcaaatctggttactttgcactttgccatttgaaatgatctacataaaaaaccctttggaagaagacctttaaaaacttgttggacccttatc

SEQ ID NO: 92443 - DNA, 523 bp, Zea mays
  unsure (1)..(523): unsure at all n locations
nggaggccaaggctttcgtaggaacggggggagatagattgctgctaccggtccggaattcccgggggagaaggagagggatgcacaccacttgcgggggctgcttcctcctgcagttgtgcctcaagaactccaaattaagaagatcatgcacaacctgcggcagtaccaggtccctttgcagcgctatatggccatgatggaccttcaggagaggaacgagaggcttttctacaagcttttaattgataacgtggaggagctgcttcctgtggtttatacaccaactgtaggtgaggcctgccagaagtatgggtccatctttcgacaaccacagggtctgtatgtcagcttgagggacaaggggaaggtcctagaagttctaaggaactggccacataggaacattcaagttatctgtgttactgatggtgagcgaatcttgggactnggagatttgggttcttagggaatgggatttcctgtaggcaaactngctctatacactgctcttggaggagtn

SEQ ID NO: 92444 - DNA, 509 bp, Zea mays
  unsure (1)..(509): unsure at all n locations
tgtagttgagagcaggccaaagatttaangttgnnnttctagcntgatncttcacctatgctctctcaatcgcaacaccgggccgaaaggcccacgaacaaaggaacacatggatnccaccttttggattgcaagtccgggcatgacatggaggactactgtgtaacanantacgagtatgtgaagaatcatgagcttggtctctttgccatttttgatggccatttaggagataaggtgccaagttacttgaaagctaacctttttagcaacataatgaaagagcctctcttctggtctaaccctcaataagcaatctagaatgcatactgctctacaaacaagtctattctacaaaataccaaacaacttggaccacctgcttcgacagcagctactgctattgcagttaatcgctaagacatgtggatagcaaatgtatgcgactctccaactgcattgtgtgaaacacgctctgcttaacagctaactgatgaccatgacccccc

SEQ ID NO: 92445 - DNA, 527 bp, Zea mays
  unsure (1)..(527): unsure at all n locations
agggagccgtgttcntggccacgccattaagaataggctgcatctgcgccggaattcccgggtcgacccacgcgtccgcgacgccagctgcccagttcttcgccggcgacgagcactccaccagacgagaggggattccgagatgccgagggccaccagcgacgcgaagctcctgatccagtccctcggcaaggcgtacgctgccacaccaacaaatctcaagattattgacctctacgtgggttttgcggttgccactgcccttattcaggttgcttacatgggattggttgggtcgtttcccttcaactccttcctctcaggagtcctttcatgcataggaactgcagttcttgctgtttgcctccgcattcaagtgaacaaagacaacaaagaattcaaggaccttccntcagaaagggcctttgctgatttcgtcctatgcaatctggtgactcacctggtgatcatggaattttctcggataagcaactgctgcaacaatgtgggttaagggtcttgtagcc

SEQ ID NO: 92446 - DNA, 523 bp, Zea mays
  unsure (1)..(523): unsure at all n locations
agagtgccggctttgagctatgtcataacagantagttgnatctcgctccggaattcccgggtcgacccacgcgtccgctacgcggtacgcgcacacagccaaaccattctccccctccgccgcttcgtcgccgcagtacgcaccgggcaagatgaagacgatcctggcgtcggagacgatggacatcccggagggcgtcacggtcacggtggccgccaagctggtcacggtggaggggccccgcggcaagctcacccgcaacttcaagcacctgaacctcgactttcagctgcaagaggccggccgcaagctcaaggtggacgcctggttcggcacccggcgtaccatggctcgcatccggaccggcctcttccaagtgccagaccttatcaagggggtcacccaagggctaccgctacaagatgaggttcgtctacgcccacttncccattcacgccttcatcaccaacaagcacaaccgccatcgagatcaggaaacttcttcgcgaagaggaaggtcag

SEQ ID NO: 92447 - DNA, 525 bp, Zea mays
  unsure (1)..(525): unsure at all n locations
gaggtagcaggattgctaaagcatgacgggaggaatgtattcgtcccggaattcccgggtcgacccacgcgtccgggtaaaatgaaacctgaggaggccgttgtagcaaccttatcttccctgccagatgaagttgtcgatacagttgggactgtactgccttctgaagattctgtttcagagaggaagagaaaattggaatttctggagatgcaggaagagcttatcaaggaagaggagaaaaggcaagagaaagaagacaaggcaaaactggaggagccaaaggctactgaagaagatttggctttgaaggaaatgactgagcctactgttagggagaaagaggaactaaagaaagcaaaaacccacgataagaaagagcagctttgtaatatcagtcaagcattggctgtgcttgcatctgtntcttctgttaccaaagagcgancagagtttttaagccctgtcaacaaggagatagaactatataataacatgctcgcaaaagagggtacagattgtgaa

SEQ ID NO: 92448 - DNA, 525 bp, Zea mays
  unsure (1)..(525): unsure at all n locations
agggagcactgctttntaggcctgggcctccgacntgaattgcacttagcgctccaatttccgggtcgacccacgcgtgcgctacgcggtacgcgcacacagccaaaccattctccctttccggcgcttcgtcgccgcagtaggcaccgggcaagatgaagacgatcctggcgtctgagacgatggacatcccggagggcgtcacggtcacggtggccgccaagctggtcacggtggaggggccccgcggcaagctcacccgcaacttcaagcacctcaacctcgacttccagctgcaggaggccggccgcaagctcaaagtggacgcctggttcggcacccgccgcaccatggccgccatccgcaccgtcatcttccacgtncagaaccttatcaagggggtcaccaaaggctaccggtaccagatgaaggtcgtttacggccaatttcccaataacggcttcattgaccaccggaaaaacggcattcgaattcaaaaccttcctcgcgagtaagaaggtcaga

SEQ ID NO: 92449 - DNA, 531 bp, Zea mays
  unsure (1)..(531): unsure at all n locations
aggtatgtgaagctgnncttactgaaagggggggagatagtagtgcttgctaccggtccggaattcccgggtcgacccacgcgtccgcggagtggactactgggcagctccgggttctgcggctgtccccgcagcgcacggcaaagcgccagctggttcagctcgaggagaccaatgggaaaaatacatcctactcaccacagactgtgtttgtatcacgtgcaaattgttcaggatgaaagggagctcaagaagcagaagcggaagcaatccaacagagagtccgctcgcagatcccggctgcgcaaacaggctgagtgcgaggagcttgggcaacgtgctgaggctctgaggtcggagaactcctcgctcagggccgagctcgagcggatcagaaaggagtacgaacagctactttcacagaacgctttccctaagggaaaagcttgggggctgccagtagtgattcgctttctgatatgaacgaacagaacgacggcgacggatactgcggctacagaagcagcctga

SEQ ID NO: 92450 - DNA, 516 bp, Zea mays
  unsure (1)..(516): unsure at all n locations
tgtagcaggcttntagatcgaatgcggggagatagtattgctgctaccggtccggaattcccgggtcgacccacgcgtccgacgacatccactctcctaggattccctccaccgaggagatcgcagaccgcgtcgagaagatgctcgccgtgctcgacaccaacatcctctgggtgaaccctgactgtggtctcaagacacgcaagtacacggaggtcaagcccgccctgaccaacatggtctcggccaccaagctcatccgcacccagcttggcagcgcgaaatgaaggcggttgatagctccatggtctgataacgcggaatgggccagtntgtttggaatatttgggtggtacccccttgtccatggtgttaagtgtaagttagcctctcattggtgggatacgccggttccaggaggggtctaaggttggaagtgtgtgttatctttgggcctatgttctgggggtatgtgtgttctttggttattaaccggaatgaaatacgcaggcttgg

SEQ ID NO: 92451 - DNA, 491 bp, Zea mays
  unsure (1)..(491): unsure at all n locations
naggggaagaggttggcctagcagcggggagaagtatgcttcaccggtccggaattcccgggtcgaccgacgcgtccggtgacactgcaccagaccacccggctccagcgagatccagacccaaaacctcacctcgcagggaacctctgctcggaggggaggggaagggaagcaatggcggccaacggaggcgggtaccgggcggaggacgactacgactacctcttcaaggtggtgctcatcggcgactccggcgtcggcaagtccaacctcctctcccgcttcaccaagaacgagttcagcctcgagtccaagtccactatcggcgtcgagtttgccacccgcagtctccaagtcgacggcaaggtcatcaaagcccagatttgggacaaccgccgccaagaaaggtaccgtgcaatcacaagtgcctataaccgaggacccgtaggggcactgctcgtctacgatgtcacccgtcgggccacgttttt

SEQ ID NO: 92452 - DNA, 498 bp, Zea mays
  unsure (1)..(498): unsure at all n locations
ggagccacgcatgtatgtgctatgtaggtggagggggggatagtattcgttccggaattcccgggtcgacccacgcgtgcggggtcataatggagaattggctgaagggaccataaggagcgtggggctggatcccattatggatgtcgtgcaatcaccttgtggctggcctttggaattcgagaagaaacagcaggagatcattgacctgtggcatggatgcaacgtttccttggtccacaggacttactttttcctgctgttcaaaggggacccagccgacgccatttacatggaagtggagcttaggaggttatcgtttctcaagaacacatactccaacggaagcatggggtatgatatggtggcaggcagcttgagcacttctttggtttcaagtgcaaagaaactgcaacgcgagagggagatgctctgcaagcagatgcagaagcggctgacgatccaggaacgggagagcctgtacaccaagtggggggn

SEQ ID NO: 92453 - DNA, 500 bp, Zea mays
  unsure (1)..(500): unsure at all n locations
naggggnaagatgcgttgngctcagcttctgtaatggatagtagtgcttgcaccggtccggaattcccgggtcgaccgacgcgtccggtggtttgcctacagccttccatggcagggcctgaaagctgggaacaagaaacagaagtatggaaagatcagcgaggggaaagttgctacttcaattgaggctctctgccgtggatatcctaccgaatttgcttcttacttccattactgtcgctcactacgctttgaagatccaccagactatcaatacctgaagagaatgttcaaaaaaccttttattccggaaaggtttcaagttgaatatggttttgaactggacaattctaaagtaccaacatgcccaaataaccacggctccgccacgtgcaattgctccagcagtaggacaaagctctgggatggctcctgtggcaaacaacaatagacattcangcactgaaaagggaaggagaagccggtggtcagggtgtttt

SEQ ID NO: 92454 - DNA, 533 bp, Zea mays
  unsure (1)..(533): unsure at all n locations
agaggtcagcagatgcgtctggnccttttcatgttcncgnttccancatcgctcggtatacgagacggccggcgccccacgccggggcttagacttcgacctctagccctgtttctattccatgaatgctgtaaataaccctgggttggtgaccattgatgtgagcccagacgacggatttagctatgcaagctacgacgtcatgggcttgaacccggactctttctcttatggtgacctccctaagagggtgctgacgtgctttgttccaactgagttctctgttgccgtgaccatcttccgagatcgtgacaatgcgaaaaccttggggactaaactggatgctgaggcctattctttcaccaacattgttgaacaggcgctggcccctgggggactggtcatctatcacaagctaactgcaacggtccaaacgacccaatggatcgcccattttagacccttcatgaaattcgctttggacaattgaaagtaatttattacaaagtgatacttcctggaaacttattctt

SEQ ID NO: 92455 - DNA, 523 bp, Zea mays
gagtttgcgggctgtgcctacgcatacagactagttgcaccgctccggaattcccgggattcccagcggccggcggcgacctccacgtggtgccattcgccggctacgagcacccgcccaccaggatccaggtttgtgctgcgagagcgcctatccattcaccatgattaatttcgtgctcctgatcagccgccagggcaaggtgaggctcaccaagtggtattctccttacacccagaaagagaggaccaaggtcattcgcgaactcagtggactcattcttacacgagggcccaaactctgcaattttgttgagtggagaggttacaaggtcgtataccggaggtatgctagcctgtatttctgcatgtgcattgatgccgaagacaatgagcttgaagtccttgagatcatccatcatttcgtcgagatactggaccgctatttttgcagtgtatgtgagttggatttgatattcaattttcataaggcctactacatactggatgagattcttatggtg

SEQ ID NO: 92456 - DNA, 528 bp, Zea mays
  unsure (1)..(528): unsure at all n locations
ngagggagccaaggtcccgtatagatagcggggaaatgggagagcttgcaccggtccggaattcccgggtcgacccacgcgtccgctgtgacttcgacttcgagccctgtggctactccatgaatgctgttcatggccctgctttgtcgaccattcatgtgaccccagaggacggcttcagctatgcaagctacgaggtcatgggcttcaacccgggctctttctcttatggtgacctggttaagagggtgctgaggtgctttggtccaactgagttctctgttgccgtgaccatcttcggtgatcgggacaatgcgaagacctgngggacgaaactggatgctgaggcctatgcttgcagcaacatggttgagcangtgctgccgtttggtggcttgctcatctatcagagcttcactgttacggncgaaacgacccatgggtcgccgaggtcaggtctgcatgacntcgctggtgacattgtcaagaatcgctcanagagtgatgctccctgggaagctgatgctg

SEQ ID NO: 92457 - DNA, 516 bp, Zea mays
  unsure (1)..(516): unsure at all n locations
taggagacagagctctgtctagtctcgccaagatagtagtgctctaccggtccggaattcccgggcacgggttgcccggctagaagctcgtctgtttgaagcaaaaggtgaatgggctgaagctgaaagagcctacgcgctgatcctggaaaacaatccatttgaccagattgtccacaagaggaaaattgctatcgcaaaagcacaaggtggtatgtcgatagtgattgattatctcaataagtatctggaattgtttatggctgatcatgatgcttggagagaacttgctgaaacatacagttccttacaaatgtacaagcaagctgccttttgttatgaggagctaatattagcccaaccaactattccactatatcatatagcctacgctgaagttctgtacactatgggtggcttggaaaatctncaaacagctaagaagtattatgcatcaacaatccaattaactggaagcaagaatacagagccctttttggtgtatggctggggact

SEQ ID NO: 92458 - DNA, 503 bp, Zea mays
  unsure (1)..(503): unsure at all n locations
gggtaaggggnnaaatgagcttgtgctcagcttgggggagggatagtagtgctgcaccggtccggaattcccgggtcgaccgacgcgtccgcgacaagtccgacgaggacatgttccagctgatcgccaccgctgcctgcggggactcgctggcgtccaaggcggaggtgttcgcgtgcaccgtcggccgcaagcccagcaaggccaagtactacctcgacgacgcggcggaagtggtgaggctgatgcaagggctctcctacgtctcataagagctggcgcttgcgaaccagcgggatgaagacgaagactcctctttggacgacgtgtgggaataagaaagaaccttccctttccgtgctgcttctgcggtaatgtctggttgtgttgttggctcggctggaactttcgcccaataatttaagggtgtaaatgagggatgcttttcagcgtaatggattggcagtggtctagtctcgaaaagctgcttgaaatttaaagtn

SEQ ID NO: 92459 - DNA, 540 bp, Zea mays
  unsure (1)..(540): unsure at all n locations
gtgttatgaggttnagcacaagcgtgtgcgctacgtcataaccgactatnagtagcactcccggaattcccgggtcgacccacgcgtccgcacagctagcccaatcccaaagcaatcttccatggcgccggcgaccttgctactggcgagactggccgtggcgtgcgcgctggcgctcggcgccatggcgcagctgtcgccgacgttctacgacgcgagctgccccagcctgcaagccatcgtgcgggccgggatggccgncgncgtgcagcaggagccgcggatgggggccctcatccttcggcctttcttccacgactgcttcgtccaagggtgcgaccccttcgtgcttcttgacgacttggccgagcttgccggggaaaaaaaccgcggggccaaaggccacttccttggccggtttccagggaattgattccatcaggtccaaagtggaggccgcctgccccggacccggttcttgcgccgacatatttgcctttggcgggcgcgacggcgttaacctgttaaccgtctacctgg

SEQ ID NO: 92460 - DNA, 541 bp, Zea mays
  unsure (1)..(541): unsure at all n locations
tagggagaagtttatgcaggctttgcgataagaaacaccgatattatatcacgactccaccggtccggaattcccgggtcgacccacgcgtccgaactgaagcatcaagtgcagctgcagaatctgaaggagaggatggtgaacatgaatgggaatcattggatacactgaggaagactagacctgataaagagctcaaagaaaagctgagaaagtcaagccagaaagagataactctcaaggatgacattccattgagggatagggctgagctgtatgaaacgtacctgatgttctgcatcactggggagactactaatgtatcatttggaacagctatctctacaaagaaagatgattcagagtttttaatgctaaagcaattgggtgacatacttggtttaactcgcaaagaagctcaagatgttcacattaagtttgcagagaaagcttttgtgcaacaagcggaagtaattcttgctgatgggaaattaacagaggctaaggctgaccagcttgctaagattcanaagcaggtcgg

SEQ ID NO: 92461 - DNA, 514 bp, Zea mays
  unsure (1)..(514): unsure at all n locations
ngaggaggggtnaaggggnnaaagaggcttgttatgagacggggggggggacgggagtgctgctaccggtccggaattcccgggtcgaccgacgcgtccgcttgcctccgatccccaattcctccttcggatctcgcattcagcgcagcgcaggtgtgaaggaagggggacgcggaggaagatggggctcgcgttcgggaagctcttcagccggctcttcgccaagaaggagatgcggatcctcatggtcggcctcgacgccgccggtaaaaccaccatcctctacaagctcaagctcggcgagatcgtcaccaccatccccaccatcggtttcaatgttgaaactgttgagtacaagaacattagcttcactgtcttggatgtcgggggtcaagacaaggacagacctctttggaagcattacttncaggacacccaaggtcttatttttggtgtggacagccatgtaccgggacccgtgttggttgaaccccgagaataaccttcacaaaga

SEQ ID NO: 92462 - DNA, 525 bp, Zea mays
agtagagagtgctcttggttcactcaaagaatttaactcactgactccaccggtccggaattcccgggtcgacccacgcgtccggacaaaaccagaccatcaaacaggtgccagtgccctttcgcatccgccgaattggggaccaccttaataatgatcaagcctgacggcttccaaaggggcctaattggtaaaaccataagccgttttaaaaaaaagggtttttacttaaaggccttaaacctgtgaaccttgaaaaggcctttgctgagaagcactacgccgatctcgccttcaagcccttctttcagggcctcgtggactacatcatctctggccctgtggtggccatggtctgggagggcaagagcgtcgtcacaactggccgcaagatcattggcgccaccaaccccctggcttttgagcccggcaccatccgtggcgactttgctgtcgacattggcaggaatgtcattcattggaaatgacaacatttagagtgctaattaagagaatgcccctgtg

SEQ ID NO: 92463 - DNA, 518 bp, Zea mays
tgttagtaggcctactcgcttagttatgaatatatagattgctgctaccggtccggaattcccgggtcgacccacgcgtccggccgcgcgcacacccaccgagagctcgggctttctttctccgttcctccctcgcgcgctcagggtttcacgatggaggccgaggcggcggccaagagggcgcgggagggcggtgaggacgccaccgcgccggtggcggtggccgaggcggcggtcgccggtgctggcgagcaggcggggatctccgccgtcatcccaagatggttctccgagatcagccccatgtggcccggtgaggcgcactccttgaaggtggagaaagtgctgttccaaggcaagtcagactaccaaaatgtgatggtttttcaatccttcacgtacgggaaggtgcttgtcctcgacggagttattcaggtgacagaaaaggatgagtgttcctaccaagagatgattacttaactggcccttttgttcattaaagacccaagaaggtgttg

SEQ ID NO: 92464 - DNA, 520 bp, Zea mays
gagttagcagtgtttttgggcctagcttactgtctagactcgcatctgctcttgaattcccgggctcatggagacaaacgtcagttttgttgactgctttgatgatcctggtccacatggagcaggtagatattctgagcatatgctacctgaaattgtgaagaaagattggagaaagggtgcgcagtggtttacagtgaaacggcagcatgcgattcttattctcgcggacaccctttactatgggaagttcaagcgttactgtaagccaggaaacgaatggcataactgctattcagacgagcactacttgccaaccctctttaacatggttgatccgactggaatctcgaactggtcggtgacgcatgtcgactggtccgaagggaagtggcatcccaaagtctacagggctgcggacacaagcttcgatctgctcaaggacatcgcgtccatcgacgagagcgtccacgttagcagcaacgcgaagcatgtcgcgcagaggaggccgtgcgtgtgg

SEQ ID NO: 92465 - DNA, 549 bp, Zea mays
  unsure (1)..(549): unsure at all n locations
ttgattgtagggaggcgtggntnnnnacgatcgatgnatctgacgcattatttcattgactctaccggtccggagattcgacccacgcgtccggctggctctccgccgccgtccagcagtccttccagggcgccttcgccgccccggtccctgtgcagcggagcaacggcaagtggatgcgggtggacaacgtgcgtagcgcggtccccctcgtgtccttcctggagcacggaagctgcaacaggacgcggggggcgccggccttgctcataaggtccgtcgtgcaagagccggtcgaggacgaggacatgcagccgggcggcggcgctcgggccacggccacggccacgacggcggcgtgcggcctgccggccgagccgacggtgcgcctcgtcggcccggaagggaggtgcgtggacgtgccttacggctactactacaacggcaaccaggtgcagctgtggagctgcaagtncaccagcgccgtgaaccagctctggacgctcaagagggacggcaccatncggtccaacggcaaatgcctgacca

SEQ ID NO: 92466 - DNA, 525 bp, Zea mays
aggggagaagggccttctcggactgggctagctgacgtcgcattgaccacaccggtccggaattcccgggtcgacccacgcgtccgacctgaaagaggtggtggaagccaacaaggaagaccgtctcaggaaagcgatggaggcacagacaatcatcgccgaagagctgaaacggtttgaggcgtggcgggactcgctggagaccgttccaaccatcaagaagctgaggtcttacgccgacaggatccgggcctcggagctcgagaagtgcctgcagaagatcggggacgacgctctcaccaagaagacgaggagagccatcgaggagctaagcaccggcatcgtgaacaagcttcctcatgggccggttcaacaactggaggtccaacgcggtaaccagcggaacctttgacaaaacccttgagaacatgcccgctttaaatcggatggttcggcctcgaaaccgaaaaggctattgttgagcagaaaatcagggccaagttgaaaaaaatccaaaactgagga

SEQ ID NO: 92467 - DNA, 549 bp, Zea mays
  unsure (1)..(549): unsure at all n locations
nggtngggagggagccgtttttnnnnncgatcgaaacactaaagcacatcgtatanactcctccggtccggaattcccgggtcgacccacgcgtccgtcggaatagtcctggacttcaactggtacgaggctcttacaaactcacctgatgaccaagcagcagcccaaagagccagggacttccacattggctggtttgttgatccattgataaacggacactatccacagataatgcaagatctcgtgaaggagaggctgcccaggttcactcctgagcaggctaaactggtgaagggctcggcagactacatcggtatcaacgagtacacatccagctacatgaaggggcagaagctggtccagctggcgcccagtagctactctgccgattggcaggttcaatatgtttttgcacgcaatggcaaaccgattggaccacaggcgaattctaagtggctctacatcgccccgacggggatgtacgggtgcgtgaactacctcaaggagaagtatgggaatccaacgatctacataacggagaacgga

SEQ ID NO: 92468 - DNA, 501 bp, Zea mays
  unsure (1)..(501): unsure at all n locations
gggganggaggaggccagggttgttatgtcgagttggggagaggagaatcttctaccggtccggaattcccgggtcgaccgacgcgtccgggcgcagagaatccccaagcaaacaaacagggtagagggagaggagaggagaggagaggagaggttgggtctggggcaccatggctccgatgaagctgtacggggcggtgatgtcgtggaacgtgacgaggtgcgcaacggcgctggaggaggctggctccgactacgagatcgtgcccatcaacttcgccaccgccgagcacaagagccccgagcacctcgtccgcaacccgtttggtcaggttccagctctgcaggatggtgacttgtacctcttcgaatcacgagcaatctgcaagtacgctgctcgcaaaaacaagccagagctgttgaaggaaggaaaccttgaagaggcaacaatggtggatgtttggatccaaggtggagctaaccagtacaccggttgnaacc

SEQ ID NO: 92469 - DNA, 519 bp, Zea mays
  unsure (1)..(519): unsure at all n locations
gggagtagtgagaaggcaggctatgtgcatgattttggggaaagtagtagtcctctcaattctcggtcgacccacgcgtgggcttcacctcgccagacgagctcctcgaggaagagtgctacgacgagcagctgccggagaagaagcgcggtctcaccccagaggaggtgcttctgctggagaggagcttctaggaggagaacaagctggagccggagcgcaagacggagctggcgcgcaagctgggcctgcagcctcgccaggtggccgtctggttccagaaccgccgcgcccggtggaagaccaagcagctcgagcgcgacttcgaccgcctcaaggccttccttgaacactcttccaaccggaccacgacgcccctcctccaggacaacaacccgnctcggctcacaaggtggggtccnttaaccgagaaagcttgcagaaaaaggaggatgcgacggaagggccgggccaaccggttgacaacggcgctccccgccgtggaacgttccaaggggc

SEQ ID NO: 92470 - DNA, 563 bp, Zea mays
  unsure (1)..(563): unsure at all n locations
gagttaggagtgncttctgatgtctagtcctcccagcaataatcagtcatcaactcgtatccgaattcgccagtgtccgacgctacgacgtcacggcatgacagggtacatgcaggctatccactctcacgcgtatactaatatcaaatgcatcacgatcagcgagtgctagatgatagcctactcttggcctcggcaccatgcacctccatgccactggctaaagcctgcggcaggcaatatatccctacgcattaggccgatactgggagatcttaagagactgtcagtgcaccgtcgagctattacaatggtcttgcgtcagtgttcttcaacacaaatgatgacgccatccgcaatctattcagcactggcaccgagaatgagttccacatgtccactctatttgtgttcttcactgcgatttactgccttggccttgagacatacggtattgctgttccatctggactcttcatccctgttatacttgctggggctacgtacgggcgcatagtggggacccttcttggtccaatttcagaccttgatcctggactatn

SEQ ID NO: 92471 - DNA, 507 bp, Zea mays
  unsure (1)..(507): unsure at all n locations
ngagtttaggagctgtgtacacgccggggggaaagtagtgtcgtaccggtccggaattcccgggtcgacccacgcgtccggggaaccccacgcaggcgcagctccgggacatcgcggcgcaggagaagctgaccggacccttcgacttcccgcgcttcctcgacctcatgcgcgcccatctcaagcccgagcccccttcgaccgcccgctccgcgacgccttccgcgtcctcgacaaggacggctccggcaccgtcgccgtcgccgacctccgccacgtcctcacctccatcggcgagaagctcgaggcccacgagttcgacgagtggatccgcgaggtcgacgtcgcgcccgacggcaccatccgctacgacgacttcatcctccgcatcgtcgccaaatgatcccgtcccttctccctcgagtctccgattcgccgatccaccgnccccgcgctcttcgtctgtaatgacttcgtctcccgtccgccgtgatttgattttattta

SEQ ID NO: 92472 - DNA, 499 bp, Zea mays
  unsure (1)..(499): unsure at all n locations
agggagaaggtgtataagaaggggagaaaagtaatcttcttcggaattcccgggtcgacccacgcgtacggcaagggcccctgctcaagcgatctgagacgttacggaaatggaatgagcgttgggtcatattggacccgacatcaggaaagatggaatacaaactccggagaaatgaaactgccattctaggggaccattctgtttgacgcctcgagcaccattactttatctcctgtgaactttcaagggatgccaaaatataatggctgctgcttctacatcggaactcctcaaaagaaggattactttctttgtgctgaaactcctggtgctgcgaaatcttgggtatctacattacatgcaactcagttagtcttacgagctcataaagaggcagtaaattctttggctgggaatggctctccagctacattaggcacagttgctactgcagttgctaatgctaatgcaacagccatggaagctaccaaggagn

SEQ ID NO: 92473 - DNA, 511 bp, Zea mays
aggtagtagtgtgtctgattatcaaacgcccactagcagtattactcgtaccggtccggaattcccgggtcgacccacgcgtccggctccatacaagatccttctcaccgtcacaatatcaatcatcacatcagcgtgcggctatgggctaccttggctcgccccatgcactccgtgccctgctgatgctgtggaggaaatggccctaccattggccgctctgggaattttaagaactttcagtgcccgccgggctattacaatggtcttgcgtcgttgttcttcaacacaaatgatgacgccatccgcaatctattcagcagtggcaccgagaatgagttccacatgtccactctttttgtgttcttcactgcgatttactgccttggccttgtgacatacggtattgctgttccatctggtctcttcatccctgttatacttgctggggctacgtacgggcgcatagtggggacccttcttggtccaatttcagaccttgatcctggac

SEQ ID NO: 92474 - DNA, 492 bp, Zea mays
  unsure (1)..(492): unsure at all n locations
ngagggatgggttttgatagggggggggggggnaaggaaatttgtcttcggaattcccgggtcgacccacgcgtccggccacgtcgctggaatccatggtggactttgccaccgccagcctcgggaccagccacgtgagggccgcgtcgacggtcgtggggagggagggctcgccgaggcaggagtacaccgtgacaggcgtgaagcgggcgggcggcgggcgcctggtggcctgccacgcggagccgtacgcgtacgccgtgttcgcgtgccacttgacgcagcagacgcgggcgtactcggtgtcgatgctgggcagggacggcacggccgtggacgctgtcgcggtgtgccacgccgacacgttcggctggaaccccaagcacgtcgtctggacccgcggcggctgagagtggtcgccgtttgcatgcactggtcatgacgccgncgtttgcttagattatgtttggatagtttcgaattatcagactt

SEQ ID NO: 92475 - DNA, 504 bp, Zea mays
  unsure (1)..(504): unsure at all n locations
agtagtagtcttttgttcagccaccgcntatcgtagaccgatcgattcccgggtcgacccacgcgtccgcggacgcgtgggcggacgcgtggggtttccgcgtcggctagtttggacgcatggcggctgggggagagtagagaccacagcgcgcgaggcgaggagaataagctatgggcgcgccgagtgtcagaaatggacgtcggaagaggaggatgcgctccgcgccggcgtgcgcaagcacggcgccggcaaatggcggaccatccagaaggaccccgagttcagcccggtcctctcctaccgctccaacatcgacctcaaggacaaatggaggaatttaagtttcagtgcaagtggactgggatcaagtaaactgcgggttccaaagataactggaccctcatctttcccatcatctagctcgcagcctctgcttcttccagcggcaaacaaatttactgaaactacactgactgcaaatgctcataaaaagccacaggg

SEQ ID NO: 92476 - DNA, 508 bp, Zea mays
ggggtagatccttcctcacagacccggggagaagtagagtgctaccggtccggaattcccgggtcgacccacgcgtccgagagtatagaagcacgtacgaaacagttgctgcctttatatacccagattgcaatggggtttgctgaattgcatgatacttccctaagaatggcagctaaaggtgtgattaagaaaatgttgtagactgggaagaatcacgctcgttcttctataaaaggctacggaggaggatcgcagaagatgttcttgcaaaagaaataaggcagatagtcggtgataaatttacgcaccaattagcaatggagctcatcaaggaatggtaccttgcttctcaggccacaacaggaagcactggatgggatgacgatgatgcttttgttgcctggaaggacagtcctgaaaactacaaggggcatatccaaaagcttagggctcaaaaagtgtctcattcgctctctgatcttgctgactccagttcagatctgca

SEQ ID NO: 92477 - DNA, 512 bp, Zea mays
ggtgtagatgcctctgggtcatcgccacacgtatcgtagccctcggctcggaattcccgggtcgacccacgcgtccggcgaccccttggctcgacggcaagcacgtcgtcttcggccaggtcgtccgagggcgtggacgtcgtcaaggccatcgagaaggttggcacccgcaacggctccacctgcaaggtggtacaaagttgcgctgactgcggacagttatgctagatctttcttatctggtttgttcggacgatctccctacatcatcttgcactccaaattgcgtccgatcctttggatctatttacgctccaattgatcttagagctcatcatagaatggtacctttcttttgaagccacaacaggcagcactggatgggatgacgatgatgcttttgttgcctggaaggacagtcctgaaaactacaaggggcatatccaaaagcttaaggctcaaaaagtgtctcattcgctctctgatctttgtgactccagttcaaatctgcc

SEQ ID NO: 92478 - DNA, 506 bp, Zea mays
  unsure (1)..(506): unsure at all n locations
ggtaggaagttttataaagacaggaggtatcgtcaaactcgtaccggtccggaattcccgggtcgacccacgcgtacgcaagagggagatcatacagcttggtgtaccgttatttcaacctaccacagaggatgctaattgtcacacagaaccaatcccccttgtcctgcaggctgtcattgaccaccttgtntcctttggcgtttaataccagaaagcaggaaaccaaatagtgtcgtcatcaacttcttcgatgaggatgaacattcgcagccctacttcaagcctccccatcttgacaaccccatttgcactcttctgctgtctgaaaccacgatggcatttggcaggtcacttgtcactgacagcaacggtaactacaaaggacctctcacactttcactaaagcaagggtccttactagtgatgcgtgggaacagtgccgacatggcgcgacatgtggtgtgcccctcgtccaaccgcnccttgagcattactttcgcagg

SEQ ID NO: 92479 - DNA, 504 bp, Zea mays
ggtaagaaggttgttcatacgaacacgaatagtacatcgcttcggaattcccggtcgacccacgcgtccgtgcactattggttttacgtcaagcaatacgtagagtaactcccaatataggagtaggaacgagacgtaataaaaaaggatcgacgcggaaagttccgattgaaataggatctaaacaaggccaagagcacttgccattcgttggttattagaagcatcccaaaagcgtccgggtcgaaatatggctttcaaattaagttccgaattagtagatgctgccaaagggagtgggggtgccatacgcaaaaaggaagcgactcatagaatggcagaggcaaatagagctcttgcacattttcggtaatccatgaacagaatctaggtatgtagacacatggatccatacatctcgatcggaaaagaatcaatagaaggagaatcggacgatatctttttcgaaacaaataacatgataaaaaaagggcggacgctctt

SEQ ID NO: 92480 - DNA, 494 bp, Zea mays
  unsure (1)..(494): unsure at all n locations
nagggtaaagaggtcgattatagaaagggaaggggaagtattcttcctcggaattcccgggatgaagatcacaggattggactatcaaatcgagaagagtggactgttgtcagctgagatatcaggaataacagaggacgggaagaattggagagttgcagctgacattaagaaaagaacttgtggatgtggacagtggcacatctatggaaaaccttgcactcatgctatagctatattcgtgaaacttacaaaccttaacattgaggactttgaggatgactactattcaattgagaggttcataatggcttatcaatttgtggtcgctccgatgggtgacaagactcaatggccaaaatttgaccctgagtttaaaatggttccttcaaagctagaaaggcctgctggtagaccaagaaagaaaagaatcaaggctagtgcaaaagcaagaaaaagacgcccatatcagtgcaaaacgcgttttcagtttg

SEQ ID NO: 92481 - DNA, 489 bp, Zea mays
aggctagaggctcgtttacgaacggggggaaatagtaatcccttcggaattcccgggtcgacccacgcgtccgggccgctttgtcattggtggacctcacggcgatgctggcctcactggccgcaagatggtcatggacacctacggtggctggggagcccatggtggtggcgctttctccggcaaggacccaaccaaggttgaccgcagcggagcctatgtcgcaaggcaggctgccaagagcatcgtcgccagcggccttgctcgccgcgccatcgtccaggtgtcttacgccatcggcgtgcccgagcctctctccgtgttcgtcgacacgtacggcaccggcgcgatccccgacaaggagatcctcaagattgtcaaggagaacttcgatttcaggcctggcatgatcatcatcaaccttgacctcaagaaaggcggcaacgggcgctacctcaagacggcggcctacggccacttttggaggga

SEQ ID NO: 92482 - DNA, 492 bp, Zea mays
ggagtagagtgtttgataagtggggggggggcgagagatattttctccggaattcccgggagaattcgctggaggcgcttttttcgaagtcggagagtacacctagtacgaaaaggtcaagctcccacctaggctatgcgtcttggggggtcttaccttcatgggtaaaaacgagatgcccgttatctttccgtattctgcgtcgcttaagaaactggacctgcagtacactttcctcaccactgaagatcactgtcagcttatcgctaaatgccccaacctaatggttctcgaggtgaggaatgtgattggggatagaggactggaagttgttgccgatacatgcaagaagctacgaaggctgagaatcgagaggggggacgatgaccccggccaagaagagcatggaggaatctctcagataggcctgacagccgtaactgtcggcttgccgggaactggagtacatagcggcatacgtatccgacatcc

SEQ ID NO: 92483 - DNA, 507 bp, Zea mays
ggttagagaggtgtctccagccgacggggaaagtagagtgctaccggtccggaattcccgggtcgacccacgcgtccgtagacgacttgttgcatcgattcttgaagagatcgagcttcttttgcaccacgaggttgacgatgtcttgcaactgcggatcaagctgcggttgcagctcaagctgcaagtgcggccaagaagtaccctgacctggaggagacgagcaccgtcgcgcaagccaacgtcgtcctcggcgtggcccctgagaagaacgacgcgcccgagttcgtcgaggtcgcggcggagttcgaccaggccgcccacggctgcaactgcagcggcaactgcaagtgcaacccctgcaactggtgatcacatcgatcgactaccatggatatgattattatctatctagcttgtgcgaggcgttgaacaataataagcgaggccgagctggctgccatacataagtattgtgaggtgtgtgtgagagagagagaaactatg

SEQ ID NO: 92484 - DNA, 509 bp, Zea mays
tggtagggaaggtttattaaagaaagggggggagaaagtagtgctcgtaccggttcccgggtcgacccacgcgtccggcaaagccaggaccctcccgggcccggtgaccgatcccagcaagctgcccaagtggaactacgacggctccagcaccggccaggcccccggcgaggacagcgaggtcatcctgtacccgccaggccatcttcaaggacccattcaggaggggcaacaacatccttgtcatgtgcgattgctacaccccagctggcgagccaattcccaccaacaagaggtacagcgccgccaagatcttcagcagccttgaggtcgctgccgaggagccctggtatggtatcgagcaggagtacaccctccttcagaaggacaccaactggcccctcgggtggcctattggcggcttccctggccctcagggtccttactactgtggaatcggcgcggagaaatcgttcgggcgtgacatagtcgacgcccactacaaggcc

SEQ ID NO: 92485 - DNA, 510 bp, Zea mays
  unsure (1)..(510): unsure at all n locations
nggtagtagatgtatccacgatcggggagaagtagagatgcaccggtctcggaattcccgggtcgacccacgcgtccgggcttctcctacctctcttaccaagttctcttcgggttagggttacttagggtttggtggaggtgcaatggcagctgctgatgtggagtaccagctgcttcgctcgacgggcttgcacttcagacaccagcaacgaagtcctcgagaatgcctacgtctgctactgctagatcctcgactccaatgtaataaaccgaccgcgagacggtgaggtcttacggcttcggcttcgttaccttctactacgagaactacatgctagacgctatcgagaacatgaacggcaacgatctcgacggccgtaacatcatcattaaccaggcctagttccgtggcaatggcggtcacttcggagactaccttcgcgctcggctcngcaaaggctatgatgatgcaccgcctgacggcgagtatggcaccggaggcatctcc

SEQ ID NO: 92486 - DNA, 507 bp, Zea mays
  unsure (1)..(507): unsure at all n locations
nggtaggaagtgntacgaggatggggagaaaggacatcttctaccggtccggaattccaggctcgacccacgcgttcggcgcgtgcgctgctgggagtacaggcagcagccgtacatcgtccgcctgaccaggggcacccgacccgacaaggcccgtcgtctcggctacaaggccaagcagggatatgttgtcataccgtgtccgtgtgaagcgtggtggcaggaagaggcctgtgcccaagggtattgtctatggcaagcccaagcaccagggtatcacccagctcaagttccagaggaacaagatgtctgtcgctgaggagagagctggacgtaagctcggtggactgagggttcttaactcctactgggcgaatgaggatagtacctacaagtactttgagatcatccttgtggacgttgcccacaaagccatcaaaaccgacccgaggatcaactggctatgcaaccctgtgcacaagcaccgtgagctccgtggcctcacct

SEQ ID NO: 92487 - DNA, 491 bp, Zea mays
ggagaagagagcttgtaaggggggggggggaaagggtatacctctccggaattcccgggtcgacccacgcgtccggcgaaggcgaccctccctccttcgctccttccgcgccgcctcccggccgtcgccgccgtggtgaagtactcgcaggagccgggcaaccctaccaagtcggctaaggccatgggcagggatctgagggtccacttcaagaacacaagggagacagcctttgcgcttcgcaagttgtctttgaccaaggctaagcgataccttgaggatgttattgctcacaagcaggcaattcccttccggagatactgtgggggtgttggtcgcaccgcgcaagctaagtcgcgccactccaatgggcaaggccgctggcccgttaaatcagccaggttcatcctggatttgctgaagaatgctgagagtaacgctgatgtgaaaggcttggatgtggacaacctctatgtttcacacatccaggt

SEQ ID NO: 92488 - DNA, 495 bp, Zea mays
  unsure (1)..(495): unsure at all n locations
naggggagagagctcntttaaagaaagtggggaggggagaaaagttgtaccggtccggaattccagggacgacccacgcggacgatacccctatacccaaagcgatagctttgaagatagcggaacggcagatctggatgagggactcgctctggcagctaactacacagcacgcaatggccaccacggcgaccgaagcggcccgctcgcgcttctcccctgttcgcgcagccaagttggaagctgtgctgtctattggtgctcatctaatcccacacccaagaaaggctgcaagtggcggagaagatgctttctttgccaatagcgatgctggcggagtatttgccattgcagatggtgtctcgggatgggcagaaaagaatgtcaatccagctctattctctcgagagctcatgagaaacagctctaatttcctcaatgatgaggcggtcagtcatgatcctcagattcttctcatgaaagctcatgctgcaa

SEQ ID NO: 92489 - DNA, 511 bp, Zea mays
gagttaggaagctgattacacgacagggggggaaacagtagtgctcgtaccggtccggaattcccgggtcgacccacgcgtccgggaacccacaaaaggatcaaggatgaaattgagcttggcaatggcctgccagatagcagaagcactcggcaatgtctccaggcagtaaaagacgccgggtttgaggttgtttgcgagataaggatcttgctgaagattctcccttgccttggtacttgcccttggatccaagccgattctccctgagtagcttccgtttgacctctgtgggacgcatgattacccgcacaatggtcaaggccctggagtacgttggtattgctccgcagggcagtgagagggtctctaatttcctggagaaggctgcagaagggctggtagagggcggaaagaaggagatcttcacgccaatgtacttctttcttgttcggaagcctcttatggaatgagctcttggatcaccttttcagagagagaacgcaagtgc

SEQ ID NO: 92490 - DNA, 507 bp, Zea mays
tggtagggagacttgttcacgaacgacgggtagtgtaacactcgttccggttcggaattcccgggtcgacccacgcgtccgggtgaagccgccgccgctgcagtgtccatagccaccgcaggagactgagatggggggttttgtcaagacccacaagagcaatgcgtacttcaagcgtttccaggtgaagttccttgagaaggcgcgctggcaagacagactacagggccaggataaggctgattaaccaagacaaaaacaagtacaatacacccaaatacagatttgttgtgcgatttaccaacaaggacatcacagcacaaatcatctctgctagtatagcaggtgatatggttcttgcttctgcttactcgcatgagttgccacgatatggtcttgaagttggtctgaccaactatgcagctgcctactgcactggccttctgttggctcgccgtgtgctcaagacccgtggtttagataaggaatatgagggcaatgttgagg

SEQ ID NO: 92491 - DNA, 509 bp, Zea mays
  unsure (1)..(509): unsure at all n locations
cagtagttatatccacgttgaccccagactnatcgtcacatccttccgatttttaatctgcgacctacacctacgcgtgctcgtgaagctgatctccctgctatgttttatagccacctcatgagactcacaggcgggttttcttaataccgaccagagcaatgcctactttaagccttttcacgttaatttcatatgacaacgctctcttccaagacttactacacggccacgataatgcttattaaccaagacaaaaactagtacaatacacccaaatacaaatttcttgtgccatttaccaacaacgacatcacaactcaaatcatctctactaatataacaagtcatattcttcttgcttctgcttactcgcattaatttccacgatattatctttaaacttgtcttaccaactatgcaacttactactacactggccttctctttgcttctcccatgctcaacacccatgcattatataatgaatattaaggcaatttttattt

SEQ ID NO: 92492 - DNA, 482 bp, Zea mays
  unsure (1)..(482): unsure at all n locations
cgcgcagtagcatcgctccggaattcccgggcaaaagcaacaaggcaggagcacaagcaagaaccacacctcctcccttcgactgtgatcatgtcgtcttgctgcggcggcaagtgcgggtgcggctccagctgctcctgcggcagcggatgcaacggctgcggtatggtgaacctgacgtggagaccgccgccaccagcagcgtcaagaccacggtcctcgacgcgccgaccaccaaggccagcgccggcggcttcgaggcggccaccgagggcggcggctgcgactgcaacacctgcaagtgcggcaccagctgcagctgctcctgctgcagctgcaactgagccggcccggctcggcgatggcgcacgagagtcgagaggacgacgacgaggaggcgtataataaatataatagcggcgttcagtanataagatcctgtcaactgcacccgtcattatccatggtcgctcgctcctcgn

SEQ ID NO: 92493 - DNA, 510 bp, Zea mays
  unsure (1)..(510): unsure at all n locations
nagttagttctcctgtccttcattcgaccccctatcgctatatcgtatccctttcgaattgccggcgcgacccacgcgttcgggtgaagccgccgccgctgtattgtttatagccaccgcaggagactgagagggngggttttgtcaagacccacaagagcaatgcgtacttcaagcctttccaagtgaagttcacttgagaaagcgcgcttgcaagacatactacagggccaggataaagcttattaaccaagacaaatacaagtacaatacacccaaattcagatttgttgtgcgattaaccaccaatgccttcacaacacatatcatctctgctagtttagcaggtgatatggttcttgcttctgcttactcgcatgatttgccacgatatggtctttgaagttggtctgaccaactatgcaactgcctactgcactggccttctgttggctcgccgtgtgctcaagacccctggtttagataaagaatattaaggcaatgttgacg

SEQ ID NO: 92494 - DNA, 508 bp, Zea mays
  unsure (1)..(508): unsure at all n locations
agggttgggnantngaggggtaaagaggtctgttacgcggggggggggaaatgttaacctctccggaattcccgggtcgacccacgcgtccgagttgattgagaatggagaagactgccagctggatagatataagtcatctgagaaatgaggacggagtcgatggctatggtcccgcctcattactcagccttctagctttgctccagttaagggcctttacctctatggtggtgttggtacagggaagacgatgcttatggacttgttctatgaacagctgccatctaattggagaaaaaaacgtattcactttcatgatttcatgttgaacgtacatagtcgtcttcagatgcataaaggtgtttcagatccccttgatgttgtagcagctgagatttcagatgaggccatcatattatgtcttgatgagtttatggtaactgatgttgctgatgctatgattctgaaccggctgttcagacaattgttcagcaaaggcattatt

SEQ ID NO: 92495 - DNA, 498 bp, Zea mays
  unsure (1)..(498): unsure at all n locations
gagggtaagagtgctcgnttacaaagagggagggggtagaggtattttctccggaattcccgggtcgacccacgcgtccgctgcactcatctcttctcgtttagaacctctataatgtcccccactcgccagtctcaggatcggctgtagccatggacgccagcggagccggtagcatggggaagaagggtgcggccgggcgcatggcaggcattcccaggaagatgtcggtgacgctgtccgtcaaggccgagctgatgttccacgtcggccggatcgagcgctacctgaagaaggtccggttcgctcaacgcgtgatcactgtcacccgcgtttaccttgaccgcgtcctggagtacctagccgtcgaggttatagagttggcctgtatcgcggcgaatgacttcaagatgacgcgcatcatactgagcgacgtgctactggcgatccgcaacgacgaggagctcaangagctgctggcaggcgtcaccatcgcgc

SEQ ID NO: 92496 - DNA, 492 bp, Zea mays
  unsure (1)..(492): unsure at all n locations
naggttttgagtaggtctgttaccgcacccgccntatagctaacctctcgattcccggtcgactacgcgtccggtgcagggaacttttagtggctgttgccagtggatgggataagcatgtggttatcagggacaagataattccccaggcttggaaggatgaacctgtggcaaggattcttgagctctgcattctacatattgctatggctgagatggcatcaaaaggaacaccccacaaagttgtcattaatgaggcagtagatctggcaaagcgattttgtgatggtggtgcccctcgggtaatcaacggatgccttcgaacatttgtgaaggatcatgttgatgttgcaggcacgagccaagaagctaaatcaaaatcatgattttttgcaaatactcatacaacaaaatggtggctgaagtaaagaagtacggagagaaccttgctgtcttgagttcaagcgaataccttctgtctccaaagtttaa

SEQ ID NO: 92497 - DNA, 475 bp, Zea mays
gggcgtagtctcgtaccggtccggaattcccgggtcgacccacgcgtccgggtgggttggcttctcctccccctccggttcgggttcgggttcgtgaggttctccggggttcggtttcgtgggtgagcggatcgagatggcggcgtcggatgttgagtaccagcatgcttcgtcggcggcctcgcctgggccacggacgaccactccctccacaacgccttcagcacctacggcgaggtcctcgagtccaagatcatcctcgatcgggagacgcagaggtcccgcggcttcggcttcgtcaccttctccacggaggaggcgatgcggaacgccatcgagggcatgaacggcaaggagctggacggccgcaacatcaccgtcaacgaggcccagtcccgcggcggccgtggaggcggcggcagcggcaggtacggtggtggccgtggaggcggcggctacggcagtggcgggcgct

SEQ ID NO: 92498 - DNA, 508 bp, Zea mays
ggtagggagactttctaccgaaacccgactatagtacatcctaccggtccggaattcccggtcgacccacgcgtccggcgagaagcccagaaggtgagaagatagatagagagagagagagtgatcggtacagggatcaccgctgtgcctgcgcgtgctgcttcaccgaatcgagtcagaccctgtccgaatctctgagccaagggatggcaaccggtagtgaggcctccaatgcagctgaagctgtggttgactggcataaacaggacagcaagaggatgctccatgcggtttaccgtgttggggatctggaccgtacaatcaagtactacacggaatgctttgggatgaaactgctgaggaaaagggatgttcctgatgagaagtacaccaacgcctttcttggctttgggccagagaacaccaactttgcagttgaatcgacatacaactatggcgttgaccagtatgatattggaacgggctttgggcatgtcgcaattgctac

SEQ ID NO: 92499 - DNA, 504 bp, Zea mays
  unsure (1)..(504): unsure at all n locations
tgttagagaggtttgtcaagagcccgacctatcagtagttctcgttcggaattcccgggtcgacccacgcgtccgacaagcagagcagagcagagcagcgtcgtgcgtccgagaagaagacgactcacaagagcagaacgagcaccgatcgatggcagtgatggccggggcggcgtccatggaggtggagcagggacctcccgggcttccggttccatcccaccgaggaggagctcctcggcttctacctctcccgcgtggtccacggcaagcagctccacttcgacatcatcggcagcctcaacatctaccgctgcctcccaaggaggacatggtgatctgcaagatctacaggaaggccacgccactgaaggagctcgagcagagggcctctgccatggaggagatgcagacgcgcatcggcggggctagagcaacatccctggtccaggccgncggctccaccggcgacgactacctgtcgtccgacgacacaagcttcct

SEQ ID NO: 92500 - DNA, 493 bp, Zea mays
gaggaggagtgtcttgataccgacaaagactagggtgaaccgctccggaattcccgggtcgacccacgcgtccgctcgagtcctcgcagtcgctcactgcgtgcgccaaaagcagcagcagctccagccggggccgtgtgcactctccagtctccaccactgctccgcgcgcgccggatcgagggagggcaggcggacgaggaggagggatgagtctattcgggcttggacgaaaccagaagacattccgccccaagaagagcgctccatcaggtagcaagggagcacagctccgaaagcacatagatgccactctcggcagtggaaaccttagggaagctgtgaggttgcctcctggagaggatatcaatgaatggctcgcggggaatactgtggattactttaaccaagttaatatgctgaatggaacactcacagaattttgaacacctgaaagctttccaacattgacagctggcccaaagtccgattc

SEQ ID NO: 92501 - DNA, 489 bp, Zea mays
taggaggagtgtcttgatacagaaagacgcaaatttgtacctctccggattcccgggtcgacccacgcgtccgctggttttttcagtgaggatagcgttaaattaggtgatctggatgtgaatgatcagggatttagtgaagctacaaaggagccaggccttaccttcatggttgcaaaatttgatggcattcttgggctaggctttcaggaaatatctgttgggaatgcaacacctgtgtggtataacatggtaaaacaaggtctcatcagtgaccctgttttctctttctggtttaaccgacatgctggtgaaggagaaggtggtgaaattgtgtttggtggaatggattctagtcactacaagggtgatcacacctatgtcccagtcactcagaagggatactggcagtttaacatgggtgatgtcctggttgatggaaagtccactgggttttgtgctggtggttgtgcagcaatagcagattct

SEQ ID NO: 92502 - DNA, 505 bp, Zea mays
  unsure (1)..(505): unsure at all n locations
gaggttngggagtcagttngaaacagacgatcgcgggggggaaagtattcctcccggaattcccggcatctacattaacagctctccttcaacgatcattctaaactacttggacggcaatctcaactacaccgagcataggattagggtacgcaagcatcttgcatggtcatcagcctccaaatgctgggctggcttacctcaatggtccttcacttattggatctgctggactgccccaagttgaagcaaaatatcctgcttcgctattcaaacagcagctcgtggatctaattgaaaaggcttatggcatgataagtgacagcgtgaagaacgagctaaaccctctgctcgaatcgcgtatacaggatccacgaacttctgactcgagtatcgcagaacgcaatcttaatgccatgggtcatcagaaccaactgacatattgtctgggcatagtgaaaattctgactagctacttgcatgtactgagggcaaatcacgttcc

SEQ ID NO: 92503 - DNA, 510 bp, Zea mays
agtaggacgattgatcaccatgtccacaatagtagtctcttctggtccgaattccgggtcgacccacgcgttcgggttccaccttctcgtccactacgtgttgaaaccctatcgacccaccatggcttgggtcccagtcaccgctcggttgtccttcttttagacccagctggcgtactccgctgccgttgcttgacagtcgccttcctgatgttcccagcgccatacggggacgcctccgcaccggcgatgctgaatacagtcgacttcgtggtctctaacgtggacgacctcatgaactggccgcgtaaggtctcgatctggcccatgacctatcggctcgcctgcttcacgatgcagatgatgcacgccggcgcgtcccgatacgacttcaaccggcttagcatcatgttgcgtcccgttgcgcgcccattccaattgcatgatcgtcggccagcattctaaccaacaacatgggttccggccttctgcacggtttatgcccaaatt

SEQ ID NO: 92504 - DNA, 480 bp, Zea mays
ctccgctcggcactgccccggtctcggaattcccgggtcgacccacgcgtccggggagacagacgcgtatacccaggcgttggttgaggaggaggagaagaaggggaaggtgatggcttcctccgggtacgccttatggtccaagcggtggatccgttccgaggtgtgcatacggtgttcgtgccgatggccgtggccctgggtatctgctcgtaccagcttgtgcgcaacatcacgggcaaccacgaggtgcgggtgaccaaggagaagatggcggacggcgtcctggacaaccacgactagggcgagaggtacgccatgcactgcctcaggaagttcgtccgcgggaagaagccctagatcatggctttcatcaacttcttcttcgtcgacccttccaaggacgattaagctagattccgtcatggatggatgagtatgttttaccaatcattagctgccggtggcgcgcctttattt

SEQ ID NO: 92505 - DNA, 514 bp, Zea mays
  unsure (1)..(514): unsure at all n locations
ggtaggatacttgtctnctttctagctcgcccgcataaggtagactgctaccggttcggggcggcacacgatcttccacgagcgggtgcctccagaagctatatatctcgattcacgtctgctccactattcaggaagtctaagatgcactgctcttgaagcgtgtgcacatccattctttgatgagttgcgagagccacaattggccgtggccaactggaccgccatttcctacactgttcaactttaaacaggaactatcaaatgcctccacggagctcatcaacaggctgaccccagaccatgctaggcggcatcttgggctcactttattgcccaccactggaccatatgcgaaggctctatggtgtttaaaccttgctcgttctgattcttcgttgtgccataggcattgcaaggtgtagaatctgaccattattggaaagccaaacacgagctggcgccaatgtgttgcataaggaaaggcggtttgtaggggttaccagcctttgcc

SEQ ID NO: 92506 - DNA, 500 bp, Zea mays
aggtaaggagagtgttatgattcacgcatcaccgaacaaagtagtgtctcacgattccggctcgagcacgcgtccgatggaatcgtctcgctcgtggctgccttactcgtgctgcttgccctcgccgccgtttgctccaggcgcagcgcacaaaaggagtacgtggctgacaacgccgggatgttggcaggcggcatcaaggacgtgccggcgaacgagaacgacctccagctccaggagctcgcgcgcttcgccgtcaatgagcacaaccaaaaggccaatgctcttctggggttcgagaagcttgtgaaggccaagacacaagttgttgctggcacgatgtactatctcactattgaagtgaaggatggcgtagtcaagaagctttatgaagctaaggtctgggagaagccatgggagaacttcaagcatctgcaggaattcaagcctgttgaaaagggtgctatcgcctaaggatctgtcgtctccctgtgcaattg

SEQ ID NO: 92507 - DNA, 514 bp, Zea mays
tggttaaaagtatcttataaaagccacggcagataggtatgtctcggtccggaattcccgggtcgacccacgcgtccggttcgagaagtttggcatgtctccatccaaaggagttttgttctatggtcctcctgggtgcggtaagaccttgttggcaaaggcaattgccaacgagtgccaggctaacttcatcagtgtcaagggtcctgagttgcttaccatgtggtttggtgagagcgaagccaacgtccgtgaaatttttgacaaggctcgtcaatctgctccttgtgtcctcttctttgatgagcttgactcaattgctactcagagaggaagcagtgtgggtgatgctggaagtgcggctgatagagtgcttaatcagctactgacagaaatggatggcatgaatgccaagaaaactgtgtttattattggagctacaaacaggcctgacatcattgaccctgctctgcttgaggccaggcgttttgaccagctgatctacattccactc

SEQ ID NO: 92508 - DNA, 510 bp, Zea mays
  unsure (1)..(510): unsure at all n locations
nggtttaggatcttcaagaggggaggggacggtattatcggtccggtaattcccgggtcgacccacgcgtccgatgcctgatatgaacatgcatgctgccataccctcagaagaagactcatgttttaaggatatgcacacagttaaattgaacaaaggacctggagaagatagtatcaagcgacaattacaagctgttgctgaaggggtagccgcatcagttcttcagccaccctttcctgaaaaaacagtggtgttctctggggatcacatcgattcgcatggagcagaagttgatgtcaagttccaggatgaaaggaacaatcagtcagacaaaataagtcaaggggttcaagttttagatgacaacgataaccttcagataataaagaacagtgaccttgaagaattgcgtgaacttgtttctggaacctttggtactgtttaccatggaaagtggaaaggttcagatgttgctattaagaggatcaacgatcgatgctttgttgg

SEQ ID NO: 92509 - DNA, 511 bp, Zea mays
  unsure (1)..(511): unsure at all n locations
nggttaaagttcatgtcacacgcacaagaaagtagtctcgtactcggtccggaattcccgggtcgacccacgcgtccggtaactgcgacttgcatacgggttcctgtgatgcgcgcacatgctgaaagtgtcaagctacagtttgaaaagccacttgatgagcgcgtatgctcctcaagtaggccttaatgagaactcaaagagagagttctgggaaggcctggaggacatggttagtagtgtgccagttggcgagaagctcttcataggaggagatctcaatggccatgatactgcaagagaaattttgagagcagctcctggtgttaccattattgatgaccgagcttccaatcgctttcctacacctctggaggtatcagacaaagatgacgtagcagtgggtaggattcgtcaggacttgtccctggatggtaaccgagggttggacatatttgtgtgtggtgatcagatacctaaggccccggactcaatggccttcataatgctg

SEQ ID NO: 92510 - DNA, 493 bp, Zea mays
gaggagtaatttctgtttaccgaaggggcgatgcgatagtaatcactcgctccggatattcccggctcgacgcacgcgtcccattgggctcatccaactgcgcgtactaccggctatctacctcgggcggcatcaagcagggatgatctcatacgagaggcagcaccacttattcaaccaccacaagaaggactaggagcagcccgccggcgagtactggtactccgagaccgatgtggtcaccgccaccggcgagggcgagtactagaggtacaagaaggaagagaaggatcacaagcacaagcagcacctcgaccaggccgtcgccatcgccgccggcgccttcgcactctacgagaagcacgatgcgaaaaatgaccccgagcacgcgcacaggcacaagatcacggatgaggtcgcttccgcggctgccgtcggcgcctgcggctacgtattccacgagcaccacgagtagaagaaggaccacatagac

SEQ ID NO: 92511 - DNA, 501 bp, Zea mays
taggtatagaggcttatacgggttttgtgggaagtattgctcgtccggaattcccgggtcgacccacgcgtccgccgcgacaaaggttacctttcctttagtttggaccaatacctgctgcagtcaccctgtgtgcggtgagtctgagcttatccaggagaactaccttggtgtgagaaatgcagcacagaggaagctactggatgagctgggcatcccagcagaagatgccccagttgaccaattcacccctctgggccgaatgctttacaaggcaccatctgatgggaaatggggggagcatgagctcgactacctgctgttcatcgtccgggacgtgaaggtgcaaccgaacccagatgaagtcgctgatgtgaagtacgtgaaccgcgaggagctcaaggagctcatccggaaagctgacgctggcgaggatggggtgaagatctccccctggttcaagcttgtggtggacaacttccttaagggctggtgggaccc

SEQ ID NO: 92512 - DNA, 513 bp, Zea mays
gtgtagatgattttgtacaacgcacaaggatagtagcttcggtccggaattcccgggtcgacccacgcgtccggccccgcattgaggcatggaacagcgacacccttccgatctacgagcccggcctcggggagggtgtgaagcagtgcaggggcaggaacctcttcttcagcactgatgttgagaagcacgtcgctgaggctgacatcatcttcgtctcggtgaacacccccaccaagacccgtgggcttggagctggcaaggctgccgacctcacctactgggagagcgctgctcgtatgatcgccgatgtctccaagtctgacaagatcgttgtcgagaagtccaccgtccctgtcaagaccgctgaggctattgagaagatcttgacccacaacagcaagggcattaactaccagatcctttgcgacccggagttccttgcagagggcactgctattgaggacctgttcaagcctgacagagtgcttaatcggtggccggtagaccccc

SEQ ID NO: 92513 - DNA, 515 bp, Zea mays
gagtaggagttcatctacggagggggagggaaagaaatgtcgtaccggtccggaattcccgggtcgacccacgcgtccgctgcaagtctcgctacgtagcagtgcaataaaaaaaagcagccgcaatggcgagcaggaccatggccctctcctccacggccttcgccggcaaggccgtgaacgtgccgtcgtcgtccgccttcggcgaggcccgcgtgacgatgcgcaagacggcggcgaaggccaagccggcggcggcgtccgggagcccgtggtacggccccgaccgcgtgctgtacctgggcccactgtccggcgagccgccgagctacctgacgggcgagttcccgggcgactacggctgggacaccgcggggctgtcggcggacccggagacgttcgccaagaaccgggagctggaggtgatccactcccgctgggccatgctgggcgcgctcggctgcgtcttcccggagcttttcgcccgcaacggcgtcaagttcggcgaggccctt

SEQ ID NO: 92514 - DNA, 451 bp, Zea mays
  unsure (1)..(451): unsure at all n locations
atagtaagtatggtccggaattcccgggcaagagtatggatgccgcaatgataaatttcaaaaatacgagggctatatatgaggagcttgggaagtatggcagtagagaaaatcaactggtatgccgtcagcgcatcgacgaagtggagcctatgattgatttctgttcacataaactaggtggatcatatttacaagcacatgaactcctggatactgctaatgatcttctcaaggcgaagatggaggctgtattgtctgagacangatcacagcatgcagcttccatgactgagnttaactggctaggtcgaacttttcctattacaaatgcatagacccgtgtctctattttgaaagcccatcagcttgagagagacttgagtgctgcagccacagaatcagttgctgctgacaaaaagcttgctatattggataaaatattttctgc

SEQ ID NO: 92515 - DNA, 484 bp, Zea mays
  unsure (1)..(484): unsure at all n locations
nggacagtcctcttaaaaagagggagggagggtacgtagtctcggtccggaattcccgggtcgacccacgcgtccggccaaccatctaccagcgactcagcgagcgagatcagcacacactgcacgcagctagcgaggagcagcagcagcggcggcgatggcggcctccatgatctcctcgtcagctctggcggtggcgcctcatggcctgccggccctcggccgacgcgcctactacttcgccgtcgtctgctccaagaagaagatcaagaccgacaagccctacgggattgggggtggactgaccgtcgacgtcgacgccaacgggagaaacggcatgggcaagggcgtgtaccagttcgtcgacaagtacggcgcgaacgtcgacggattcagtccaatctacaacgaggatgactggtctaccaccggcgacgtctacgtcggtggaaccactgggcttctgatctgggccgtcaccctc

SEQ ID NO: 92516 - DNA, 513 bp, Zea mays
ggtttagagatgatgttcatgaacaagtacgctactacaggttcggaattcccgggcgagggcgtgcctaacgacgagatcgtctccgacctcaaggttctcgttatcaagcccgtcatcccagacagggtgcggggtctagacgacggtggtgcacctcaacccgtctgggcgcttcgtcatctgcgggccccacggtgactcctgtctcaccggccgcaagatcatcatcgacacctacggcagctggggagcccacctcgttggcgccttcttcggcaaggaccccaccaaggtggaccgtaacggggcctacgtcgccaggcatgacgtcaagagcattgtggccagcgggcttttccgacggttgctcgtgcaggtgtactacgccatcggcgtgcctgagccactgtcagtattcgttgactcctacagcacacgggaccattctcgacaaggtaattccttagatcgtcaaggataacttcacttcaggcgccggatgatcaccat

SEQ ID NO: 92517 - DNA, 518 bp, Zea mays
  unsure (1)..(518): unsure at all n locations
nggttagtagtttatgtacaagacagagagaaaagtagtagctcgtaccggtccggaattcccggggtaacatatgctggctttgcggtcttcaactgccctataaggggtgactctggtgctgttttacaagagctcgtacaatcttcccatgacttggtcatgatcaccggagaccaagcgttgactgcctgtcatgttgctagccaagtacatatatcttccaaacctgttttgatcttgacacggataaagactggcggttttgagtgggtttcgccagatgaaactgatagagctccatatagtgctgtggacgttgcagtgttatcagaatctcatgacctttgtattaatggggactgttttgaaatgctacaaagtactgaagctgttctccaggttatcccttatgtaaagtttttttcacgtgttgctccagaacaaanagaacttgtactaactacattcaaaaatggttggaaggtgacactgatgtgtggaaattgaaccaatga

SEQ ID NO: 92518 - DNA, 483 bp, Zea mays
  unsure (1)..(483): unsure at all n locations
gaggaagtctttatcacccgaacaaggtagcgatgactcggtctcggaattcccgggtcgacccacgcgtccgggagttatgacagtgctgatcccgaggtacaccaccatccccaccaagaaggagcaggtgttgtccacctactcggacaaccagcccggtgtcctgatccaggtctacgagggtgagaggacccggacacgcgacaacaacctgctgggcaagttcgagctctccggcatcccccctgcaccccgtggtgtgccacagatcaccgtgtgctttgacatcgacgccaacggcattctgaacgtgtctgccgagggacagacaacggggcaaaaaaacaagatcacaatcaccaacgacaagggccgtctcttccaagaggagaacgagaaaaatggtcangacccctagaagtccagtcttaggattatgagctcaagaagaaagtggtaggcaagaactctcttgagaac

SEQ ID NO: 92519 - DNA, 423 bp, Zea mays
tagagttttcacgacagagtatcgtccgattcccgtcgacccacgctccggcgtggacgttctcgggaacgaggtgcacgttgcacccaacgtcagtgctgcgggtggtaggcatgcgggctctcgcgcgctcctttgcaccccatcaagccaaggtctcactttcctactcccatcgcgctcgagtctcgtaatgctgtgcccgctcgcaggcttcaaatccctgacgattcatccattccattcattccatacagcacactcacagcaaaacgttcttttaccctccgatccagttataggctgtcgacagatttggcttagtcgccggcgcctcgcctgttaataagtcatactatattgctagttaatctttaacatgcggtttagcattcgtgcctctgaatgttatttttctttttt

SEQ ID NO: 92520 - DNA, 521 bp, Zea mays
ggtttagtatgtttatgtacgaggggggcgggaaggtagtgtcgtaccggtccggaattcccgggtcgacccacgcgtccgagcagaactctctcgacctcatcggcgttggcggagcgcgtgttgaccggagatggggccgagcgggtggaggaggagcgcggcggcgcgggtcgcctggcgcccggccacggtttgcctgtggctcgcgctcgccgccgccgcactgacgctcgcccaggctaagaaggacctgacggaggttacccacaaggtctacttcgacatcgagatcgacggcaagcccgcaggccggattgtcatggggctttttgggaagactgttcctaagacggcagagaacttccgagctctttgcacaggagagaaaggggttggcaagagtggcaaagccctgcactacaagggaagtaagttccacagaatcatccccagcttcatgctccaaggaggtgacttcactctcggggacgggaagggtggtgaatctatctaccgct

SEQ ID NO: 92521 - DNA, 508 bp, Zea mays
aggttagagttcatctaacgccggaggaggatagtaagtgctcggaccggaattgccggctcgacccacgcgtccgcaggagcattcgagaagccgaagaaaattcgaagacgaggagcagctacactgcgggcggagttcgggcatggagggccagttccaggatggcaaggaggaggtcatccaagcatggtacatggatgacagtgaagaggaccagaggcttcctcatcatcgcgagcccaaagaattcattcctctcgacaaactttccgaactaggaatattaagctggcgcctaaatgctgatgattgggagaatgatgagaacctcaagaaaattcgtgaagccaggggttactcttacatggacatttgtgatgtgtgcccagagaagttgccaaattacgaggcttaagataagaatttcttttgagaacacttgcatactgatgaagagatacgctatttgccttgagggcagcggctactttgatgtgagggacca

SEQ ID NO: 92522 - DNA, 522 bp, Zea mays
tgtggtttagtagtttgtgatagagggggagggaaggtagtctcgttccggaattcccgggtcgacccacgcgtccgacaatgcacatcttaaggccatgcttgagaagctccgggctaagcaccccaatgtgaggatcatatatggcgattactacactccagtcgtccagttcatgcttcagcctgagaagtttggttttgccagacaactgcccagggcatgttgtggggcgccatcgactcctgagagagcagcttacaacttcaatgtcacggccaaatgcggtgagcctggtgcaactgcctgtgctgatccgacaacccattggagctgggacggcattcacctgacggaggctgcctaccgccatatcgccaaaggctggctatacgggcctttcgcggaccaaccgatcatccaatcctcatgatcatgccgttcctgctgtagagtttatcatagtagcattgatagtgagagcaaaaatgggaccggggaaagtaggtctttcatacagtt

SEQ ID NO: 92523 - DNA, 479 bp, Zea mays
  unsure (1)..(479): unsure at all n locations
gagaaagttgctataggggacgggagatagtaatcctacccccggtattcccgggtcgaccgcacgcgtccgatgtcacacacacacacacagacaagtgggttccaaagccaagtgtgtgtactatcaggcaggtatctcgggcgggaggaggcagccatcatgtcagaggagaagcaccaccacttcttcaaccaccacaagaaggacgaggagcatcccgccggcgagtacgggtactccgagaccgaggtggtcaccgtcaccagcgagggcgagtacgagaggtacaagacggaggagaaggagcacaagcacaagcagcacctcagcgaggccggcgccatcttcgacggcaccttcgcactctacgagaagcacgaagcgaaaaatgaccccgagcacgcgcacatgcacaagatcacngatgaagatcctgccccgcagtcgtctgctactacggctacgtatttcacgaa

SEQ ID NO: 92524 - DNA, 476 bp, Zea mays
gaggaagttcttgtagtgggacggggggagggaaatatacgtccggaattcccgggtcgaccgacgcgtccggtgattttgtcacgtctgaggacaaggaaggtttgattgctaagcttcaggaggttggggggtggctctatgaaggtggcgaggatgaaactaagggggtttatattgctaagctagaagaacttaaaaaagttggtgatcctattgagctgcgcttcaaggaatgggagattagaagttctgctgttagccaactggtatactgcatcaatagcttcagagaagctgcacagtctaccgaccagaagtttgaacacatagacatgtcagaaaagcgaaaggtcattaatgagtgttcggaaacagagacttggctatagagaaaagcagcagcaggatgctctgccaagcatgctaatccggttctccttgctgctgaccttaaaaagaaagctgaaacactt

SEQ ID NO: 92525 - DNA, 522 bp, Zea mays
agaggtttagacgtttgtgtcaccagaccacgatagtaactctcgctccggaattcccggcgcgttcagcaaccgctcccgtggacacggcaaggcagggccgggcctctgcgcacggcatccggccggctacagcccggagccgtggccatggcggcggccagccccgcccctagtcgacctcggctctccggtgagctgccctccatatcctggccgctcagtcgttcgccgcgccgatcgcccaggaagatctgcgatgctctcgtcgttgccgaggttggtggccgagtgaggctccctcttctccctttatccctcttcctctctggctgctccctccctccccacaggttcttccccggcgagtagccctgtctgccccctgccaagcagttcgtctcctcccggcgagcccctgcgcggctccccttccctccgatgtgtggccccagcgcatggccatggccgagtccctgcagtcgtgccccctgcacgttctgtgtgcgcacgcgccgttgg

SEQ ID NO: 92526 - DNA, 510 bp, Zea mays
gggttagagcatcttattctctcgacacatagtatgtgctactaccggtccggaattcccggcagaggattggtagagatcccgattcaatttcaagagcatatatcaaaacattttgtaaaaattctagaaaactgagggtttctaggtatcggaggtttgaggaggaatttagctctccgcttgtctctgagattcacaggtatttcaccgatgaagactacagttacgcaacgaacttctatattctactacatgctgttgatcgattggctgccaattatagcacattgcctggaatcttcgacaggctgaagactgttgcggcttcagtggcacgtgagatgggtttgaatggagcatccttattcgaagacctgattaccgagatgtgccgcttcgggggtgcggagattcattcagtggctgctttttgtcggggagttgctttcccaaaaataatttaacttgtcacccaccacattttggccgttccccggacaattatat

SEQ ID NO: 92527 - DNA, 523 bp, Zea mays
gggggttagaagtttgtctatcagcaaagaggaaggtaagctgcttccggttcggaattcccggggcgagccacgcgtggtgggatgattgccgatggcaagtcgcttttttcaatcaatgggaagcctatcggaccgctttgttgggacttccagcttcagcgagtacaccgtcatgcatgtgggttgtgttgcaaagatcaaccctcaggctccccttgataaagtttgcgtccttagctgtggtatttctaccggtcttggtgcatcaattaatgttgcaaaacctccgaagggttcgacagtggctgttttcggtttaggagccgttggtcttgccgctgcagaaggtgcaaggattgctggagcgtcaaggatcattggtgtcgacctgaaccccagcagattcgaagaagctaggaagttcggttgcactgaatttgtgaacccaaaagaccacaacaagcccgtgcatgaggtacttgctgagatgaccaacgggaggggtccgcccgcagtgtgt

SEQ ID NO: 92528 - DNA, 510 bp, Zea mays
  unsure (1)..(510): unsure at all n locations
nggttggagttcnctgacggaatggggggggagggtagtgctcgtaccggtccggaattcccgggtcgacccacgcgtccggtcgaattcctccatctaccgcgccggccgacgaggcccgagggggaggaggatgctgggctccgcgaggaggcagcttggatccggtcccatgctacgacaggttttgcgaaagctccgtccggcagccgcggctgaggtagcgaggggctactccgctgctgcgaacgagatgactgtccatgatgcattgaactctgcactggatgaagagatgtctgctgatccttcaggatttctgatgggagaagaggttatagagtatcaaggtgcataccagatttctaagggctagcttgacaattatggtcccaataggattcttgacacacctattacagaagcctgctatactggcattgggcttgcagcaaattactaaagtctaatggcctgctatacaattactgacatttacctattcttagc

SEQ ID NO: 92529 - DNA, 476 bp, Zea mays
aggtctatttaagggggggaggggtaagtagcctccggtccggaattcccgggtcgacccacgcgtccggtgcgcgacacctgccgcgagatcgggttcacctccgacgacgtgggcctcgacgcggaccgctgcaaggtgctggtgaacatcgagcagcagtcccccgacatcgctcatggcgtgcacgggcacttcacgaagcggcccgaggagatcggcgcgggcgaccagggccacatgttcgggtacgccaccgacgagacccccgagctgatgccgctcagccacgtgctggccaccaagctgggcgcgcgcctcaccgaggtgcgcaagaacggcacctgcgcctggctgaggcccgacggcaggacccagggtacggtggaatacgtgaactaggccggccccatgttgcccgtccgcgtgcaaacggtgctcatctccacccaacacgtctagaccgttaccaacaa

SEQ ID NO: 92530 - DNA, 506 bp, Zea mays
  unsure (1)..(506): unsure at all n locations
tggtttgagactttcacggggggggagggagaggtagtctcggtccggaattcccggcgcagagaatccccaagcaaacaaacagggtagagggagaggagaggagaggagaggagaggttgggtctgggacaccgtggctccgatgaagctgtacggggcggtgatgtcgtggaacgtgacgaggtgcgcaacggcgctggaggaggctggctccgactacgagatcgtgcccatcaacttcgccaccgccgagcacaagagccccgagcacctcgtccgcaacccgtttggtcaggttccagctctgcaggatggtgacttgtacctcttcgaatcacgagcaatctgcaagtacgctgctcgcaaaaacaagccagagctgttgagggaaggaaacctcgaggaggcagcaatgggggatgtttggatcgaggtggangcttaacagtacaccggtgcacttgattccatcctnttncaggtcctcattaatnctatgcttgg

SEQ ID NO: 92531 - DNA, 516 bp, Zea mays
  unsure (1)..(516): unsure at all n locations
gggtnggagagtaggagtttttctacgggggcggagggagagtaagtctcggtccggaattcccgggtcgacccacgcgtccgaccaccaccttcctgctcctccccttcatcttcaccacaaccccttcctcccctcctgtcagtgcccctccctgcaagacttccgaggtatggcgccaatgctgcggaagcgcccgacgatgtactgcggcgcggacgacgtcggcgtcggaggcgaggaggcgagctgcggcgcgacgaacgaggacgaggtgtcggacgacggctccctgcaggccgtcgggcccggggagaagaagcggcggctgaacgtggagcaggtgcggacgctggagaagaacttcgagctcgggaacaagctggaggcggagcgcaagctgcagctggcgcgcgcgctgggcctgcagccgctgcaggtggccatctggttccagaaaccgtncgcgcaggggaagacgaaacagcttgagaaggactacgacgcgctgaagcc

SEQ ID NO: 92532 - DNA, 521 bp, Zea mays
gggaggtagaaggttttaagagggtgggggggcggaaatgtgctttcggtccggaattcccgggtcgacccacgcgtccgtgaatctgatgacagtactgatttggatcttctattggctgagggtgagggagcagggaatttgaagaagaaaagggggccaagaaggggggatgatttcacattccttgaagccctagtaaaggcggacttctggctactgtttgttgtttacttttgtggagttggcacaggggtcactgttctcaataacctggcgcagattggaatgtctgttggtgctaatgacacaactattttgttgtgcctctttggcttctgcaactttgctggtcgtatccttggtggatctgtctctgaatatttcgtaaggtcaaggatgctccctcgtcctttctggatgatgtgcacacaaataatcatggtggtaacgttcctgctcttcgcgactggtcttcatagcttgatttatgtttcaactactctcctggggatatgctc

SEQ ID NO: 92533 - DNA, 521 bp, Zea mays
  unsure (1)..(521): unsure at all n locations
ggtaagaatgttgttacagacggggagggaatggtagtcttcttccggttcggaattcccgggtcgacccacgcgtccgggtgggttggcttctcctccccctccggttcgggttcgggttcgtgaggttctccggggttcggtttcgtgggtgagcggatcgagatggcggcgtcggatgttgagtaccgctgcttcgtcggcggcctcgcctgggccacggacgaccactccctccacaacgccttcagcacctacggcgaggtcctcgagtccaagatcatcctcgatcgggagacgcagaggtcccgcggcttcggcttcgtcaccttctccacggaggaggcgatgcggaacgccatcgagggcatgaacggcaaggagctggacggccgcaacatcaccgtcaacgaggcccagtcccgcggcggccgtggaggcggcggcggcggcgggtacggtggtggccgtggaggcggcggctacggcngtggcgggcgccgtgatggcngcngcngcta

SEQ ID NO: 92534 - DNA, 488 bp, Zea mays
  unsure (1)..(488): unsure at all n locations
gaagcggtttatttgacaagccgggcgacggataagtaagtatcggtccggaattcccgggtcgacccacgcgtccggtcctgttcctcacagcagcagccatggcggccgagccggagaagcaggcggccccggcgggacaggagacggccgtgcacatcgtgtacgttgaccgccccgaggacgccgaccctgaggagttccacatccgcaccctcacccccgtcctcggcagcgaacagaatgccagggacgcagtgctctaccactacaagaacgccgccagcggcttctccgcgaagctcaccccccagcaggtcaaggatctcaaggagcaaccaggtgttctccaggttgtgccgagccagacttaccagctacatggtcctgggtctggcactcaccagggcacgacacaacactttgggccttatgtgaaggcgtatgagaatcaggaggatggggtttaggatggctgtatggcacan

SEQ ID NO: 92535 - DNA, 513 bp, Zea mays
ggagggttagagcgtcttcaatcgcagacgattatggcacactcgtaccggtccggaattcccgggtcgacccacgcgtccgggagaaaaacgctcggaaatttcgtctgatcactcgatatttgttggcgattgggctgttgatgttactgatgcgatgttgctggaacttttttctaacaaataccgatcggtgaaaggagctaaagttattattgatgcaaacacaggccgttctagaggctacggctttgataggtttggagatgataatgacaaaattcatgcaatgactgaaatgaatggcgtttactgttccacaagaccaattcgtgtaagaccagcgactgctagaagatctcaaggtgattctggcacttctccaccaaagcaatctcatgttgactctactaacaagacggtatatgttggtgggcttgaccccaatgttagcgaagatgaactgaggaaagcatttgcaaatatggtgatcttgcctctgtcaaaattccc

SEQ ID NO: 92536 - DNA, 478 bp, Zea mays
  unsure (1)..(478): unsure at all n locations
aagtctttagtttacgacgacgatggtaggatccctcggtccggattcccgggtcgacccacgcgtccggggctttagcgatggtcctgttcatggctggcgccgcgctgctcgccggggctgccggcgcgggctcgcagcagggcgtgtggagcatcatcacccggcccatgttccagagcatgctgagccaccgcggcgacagcgggtgccagggcgccttctacacctacgacgccttcatcgaggccgccagcaagttccccggcttcggcaccaccggcgacgagcagacgcgcaggcgggagctcgccgccttcttcggccagacgtcccacgaaaccaccgttggatgggcgactgctccggatggaccgtttgcctggggatactgccgggtgaaggaccagatcagacggatccacctactatggacgaggacccatacagctaactcataagtacaactacaagctcn

SEQ ID NO: 92537 - DNA, 529 bp, Zea mays
  unsure (1)..(529): unsure at all n locations
agttgtagtaggctanagtacgagaccgcagattaagtactgctctaccggtccggaattcccgggtcgacccacgcgtccggaaccaaggagcaacttggttatactgtggactctagcccaaggatgacttaccggatgctggcctattgttttcgagttatgtcctccaaatacagtcctatttatctgcaaagtcggattgataacttcattgatggtctatctgctctgctggacgagctcagtgaagagacttttgagcaccatagaagtggtttaatagctgataaactggaaaaggaaccttcacttagctaccaaactagtgattattggtctcagatcgctgataaaaagtacatgtttgatatgtcaaaactggaagctgaagagcttaagacagttcaaaaagctgatgttatagcttggtacaacacatacataagatcatcgttcccaaagcgaagacgtctagcaattcatgtgtatggtttgcaactaaatattgctgaggcttggtaactcc

SEQ ID NO: 92538 - DNA, 528 bp, Zea mays
  unsure (1)..(528): unsure at all n locations
agtttagttagagtttntatacgattaccagcaaagatagtactgctgtaccggtccggaattcccgggtcgacccacgcgtccggccatgggtaaagacaagccttacccctggatctgtggttgctaccgagtacttgaaacatagtggccttcaagattatctgaaccagcaagggttccatgtcgctgcgcatggctgcgccacttgtgtgggcaactctggtgacctggatggatctgtatccgctgctatcacagaaaatgatatcgttgctgctgcggtgctgtcggccaaccgaaacttcgaagggcgtgtgaaccctctcactcgggctaactaccttgcctcgccgtctctggttggtgcctatgctcttggcggcactggtgacattggttttgaagaagaacccattggaattggaaagggtggcaaggaaattttcttgaaggacatatggccttcaaaccaagagatcgatgaaggtgtggagtccaacgtgcaaactcacttgttcaagaaag

SEQ ID NO: 92539 - DNA, 487 bp, Zea mays
  unsure (1)..(487): unsure at all n locations
aggagaggctcnatacggaagggggggggaagtagtgctgtaccggtccggaattcccgggtcgacccacgcgtccggaagctagcgcttatagcttgtcagccatggccaccgccgccgcgtctagcctcctcgggtcctccttcgcgggctcccggctcccggccgccacgcggaccacaccggcgtccctcgtggtggccaccggcccgcgcggcgccggcgcggggcccatctgcgcgtccatgtccatgtcctcctccaacccgccctacgacctgacgtccttccggttcagccccatcaaggagtccatcgtgtcccgcgagatgacccgtcgctacatgacggacatgatcacctacgccgacaccgacgtcgtcatcgtgggcgccggctccgcggggctgtcctgcgcgtacgagctctccaaggaccccgccgtgagcatcgccatcgtggagcagtcggtgtcggcgggcggcgc

SEQ ID NO: 92540 - DNA, 529 bp, Zea mays
  unsure (1)..(529): unsure at all n locations
agtttaggagtgtttgttcacgcacagaacgtacttctgtaccgctccggaattcccgggcgaatgcttaaggaagtatggaaacgcaaatgtctggaaaacatttacagatctatttgattacttccccttgactgggttggtcgagtcagaaatattttgtttgcatggtggattatcgccatccattgagaccctcgacaacatccgcaacttcgaccgtgtccaagaagttcctcatgaaggtccaatgtgtgatcttctgtggtctgatccagatgatcgatgtggttggggtatttctccacgtggtgctgggtatacctttggacaggatatatcagagcagttcaaccataccaatagcctaaagcttattgctagagctcaccaattggttatggagggtttcaattgggctcatgagcaaaaagtcgtgactatatttagtgcacctaaatattgctaccgctgtgggaacatggcatcaatcctagaagtggatgattgcagggaacatactttcatn

SEQ ID NO: 92541 - DNA, 533 bp, Zea mays
  unsure (1)..(533): unsure at all n locations
tagttaggttgagggtgtggttcacgcacacgcatagcaatgcactcgctccggaattcccgggggaaagctgaggagggaagccgagcgcgccaagagagccctcagcaaccagcaccaggtccgtgttgagatcgagtggctctttgacgggaccgatttctcggagccgctgacccgtgccaggtttgaggagctgaacaacgacctctttcgcaagaccatgggccctgtcaagaaagccatggaggatgctggccttgagaagagccagatccacgagatcgtcctggttggtggaagcaccaggattcccaaggtccagcagcttctgcgggactacttcgacggcaaggagcccaacaagggtgtcaaccctgatgaggcttgtgcctttggtgccgctgtgcatggaagcatcttgagcggcgagggttgtgacgagaccaaagatatccctctncttgatgtggctcccctgaccctgggtatcgagaaccggtcgtggagtcatgaccaagttgatcccgaan

SEQ ID NO: 92542 - DNA, 535 bp, Zea mays
  unsure (1)..(535): unsure at all n locations
gagtttagtagagcttnnagtccgagacacgaagatgacttcactgacgtaccggtccggaattcccgggtcgacccacgcgtccgaggtcatccactcccgctgggccatgctgggcgcgttgggctgcgtgttcccggagctgctggcccgcaacggcgtcaagttcggcgaggccgtgtggttcaaggccgggtcgcagatcttcagcgagggtgggctggactacctcggcaacccgagcctgatccacgcgcagagcatcctcgccatctgggcctgccaggtcgtgctcatgggcgccatcgaggggtaccgcgtcgccggcggcccgctcggagaggtcgtcgacccgctctaccccggcggcagcttcgacccgctcggcctcgccgacgaccctgaagccttcgcggagctcaaggtgaaagagctcaagaacggccgtctcgccatgttctccatgttcgggttcttcgtccaagccatcgtcaccggcaagggcccgctcgagaacctngccgaccaccttggc

SEQ ID NO: 92543 - DNA, 529 bp, Zea mays
  unsure (1)..(529): unsure at all n locations
tagttagcagtgtttgtttcgactcngatgtacatgcatcttctccggaattcccgggtcgacccacgcgtccgagatcttcttcatcgcctggtcaccggcggcgtcgaggatacgggccaagatcctgtactcgacttcgaatcagggcctgcggcggctgctgtactgggtccactacgaggtgcaggccacctacccctacgagatgggcttcgacgtcatcagaggccgttcgcaatgagcgtgatctgcgtatgtgtgatgagctgagcctcccgatgatgcctgtcggtctgacgaggcttctcgtgtgttcgctttaccccccagttttaccaccggttattcctagagatggtgcagtgcaacgtcttcgtgtgctgatgcttatggttggagttaccgggttagaatgcttattgagtggcagccgattaattgaacgtacagcttcgcgacgtacaattccactgattcttgaattatatttaattgatgaaatagatgccatttggccccaaccttt

SEQ ID NO: 92544 - DNA, 530 bp, Zea mays
agtgaggaggctatgaatgagacagcagtataatgcactgacgtaccggtccggaattcccgggtcgacccactcgtccgagacagcgtatgattgctccattccgttagcaccactagttgctgatgttatatgttgccggcaagttaatagcttgatgaatattttccaagctgcatatggcagtggaaatggtaccctagttctcaatcaggcttcagcaaatgcttgtttctctgacattatgaacatccttgcaagcaaaggggcaaacaccaacatccctgagttatgtactctgaggccatcaaatcttactgatgtttcttgtactgtgaaggatattagctcttttgagaaaatagtcaacatcagtaaactccaagatgcatgcagcaatgttgacccactgaaagagggttgtatgccaagtttgccacctgctatagcaaaaaccgctattcacatattccctggtggggcttacatggtttggaggttctaggatgccatgagagttcctgtgggga

SEQ ID NO: 92545 - DNA, 532 bp, Zea mays
  unsure (1)..(532): unsure at all n locations
agttagcgaggcgtanagtacgatacacgcattttatgtactgctctaccggtccggaattcccgggtcgacccacgcgtccggcctggtgatctggttggagtcaataaagatagctaccttatactagatacattgccatcagagtacgattcacgagtgaaggcaatggaagtggatgaaaagcccactgaagattataatgacattgggggtcttgaaaagcagattcaagagcttgtagaggcaattgtactgcccatgacacataaagaccggttccagaagttgggtattcgtcctccaaaaggggttcttttgtacggaccaccaagaactggcaagacactcatggctcgtgcatgtgctgcacagacgaatgcaacgtttcttaaattaactggtccacaacttgtgcagatgtttattggtgatggagcaaagcttgtccgggatgcattccagcttgccaaagagaaagctccttggattatatttattgatgagatagatgccattggcaccaaacgtt

SEQ ID NO: 92546 - DNA, 499 bp, Zea mays
  unsure (1)..(499): unsure at all n locations
nagtnttagagtgggtgntgtacagacgtggggggggggaaagtagtgctcgtaccggtccggaattcccgggtcgacccacgcgtccggcacaccaaggagagtacgtggaggagcagccatggcttcatcggtggccgccgcggggagcacattcctgggcacccgcctggcggacccggcgccacataacggtcgcatcgtggcccggttcgggttcgggttgtgcggcaaggcgaagcctgctccgaagaaggtggcgaagacatcgacctcctctgaccggccgctgtggttcccctgcgccgtggctcccgactacctggacggctcgctggtcggctactacgggttcgacccgatcggtctcggttagcccgtggagtacctgcagtacgagttggactcgctggaccagatcctgtacaagaatgtggccggcagcatgatcggcacgcgtttcgagttctccgaacacatttcatcgcggtgcaggccc

SEQ ID NO: 92547 - DNA, 533 bp, Zea mays
aggttagcagtgtgtgtgatccacgcataagatagtaattgtataccgctccggaattcccgggtcgacccacgcgtccgcaaagaagttgagctttaagaggaacgtggtgtcattgtcatcagagctcaagggtgtgaggagcaagcttgcttcctaggagcagctgtttgtaagggaatctcaaactggaaagcttgcggagacaaaaacaaggagcatggaagaggaagtaatcaagctgcataaatgcttacaggacaaggatgaacaactgcattcattcacaagtagcacggaacaggaacccaactgaaccttcaacttgcttgttctgggagatctgtgagcaagcgagtgctcctcataatgggtattcgacatgagccccatccctgccacagacttgggaaaggcacaatgatttttatggtgacatgaatacattcctcttcaaattatatctttaagcatccatttttcgccctactggtgcaaacaagaatttgcaatgggtaggttactggctgcac

SEQ ID NO: 92548 - DNA, 482 bp, Zea mays
aggtagagatgttgttcagccaacgactagttgtataccgtaccgttcgcattcgacccactcgtcactagaccatctcttattgatagagatctgaatatagccatttgtaacaattcatcagtgtgaggtccattaatcactggaagacaactactgtggctttttaagcgacaggatcgtaaaggattacacagacttcgctaaggtgtgctttgagaacttcggtgacaaggtgaagaattggttgacctttaactagccacatacatttacaaccttttcgtacggaacgggagtttttgcccctggactgttctcaccatgagaaaaatgtgctcaacctattgctaactcactcaccgaaccatacattgctggccacaacatccttcgagcccactctatgactgttgacctctacaacaagaattacaagggttcagactgccgcattgggcttgcgtttgacctaatgggtc

SEQ ID NO: 92549 - DNA, 499 bp, Zea mays
  unsure (1)..(499): unsure at all n locations
ggaggtagagagctcnagtcacgcatgggggggaggaggtagagctcgtaccggtccggaattcccgggtcgacccactcgtccgatacccgagtacccaacgcgctagctagttctattgccgcaccccatatctggatgagggactcgttctttcagctaactacactgcacgcaatggccaccacggcgaccgaggcggcgccgtctcatgagcagcaggccaaccgcaacggcgagcagaagacgcggcactccgaggtcggccacaagagcatgctcaagagcgacgacctgtaccagtacatcctggacactagcgtttaccctgctcagccctaaagcatgaaggagcttcgcgaggccaccgccaagcacccatgggacctgatcactaccttcgacgacgagcttcaggccctgaacatgctcatcaagctcatcgacgccaataagaccaggtctatcgagccttttactgagctgctatgccctaacc

SEQ ID NO: 92550 - DNA, 531 bp, Zea mays
  unsure (1)..(531): unsure at all n locations
ggttaagcnagggtctgattcacgaatagatagtagagtggaaccgctccggaattcccgggtcgacccacgcgtccgcaaagttagacgagatggaaatggtcgatggtttcgagatagctctcaagaaactaaccgaatggctgggggagaatattgacaagaacaagactaggatattttttgcaggatcgtcaccaacacattcctgggctagcaactggggtggagaagacaagaacaagtgccttaacgaaacagagccgatctacaaaaccggatacaaagctgcaactacagactacagcttgatggccaaagctaagcactactttcgaacattggagccgaaaggcatacatgttcaaatactgaacatcaccgagctgtctgactaccgcaaggacgggcatcctacggtgtacaggaaacagtttgctcctctgacgaaagaagcaatcgcagacccagccagttacgcggattgcacgcactggtgccttccccgagtttctgatgtctggaacgagt

SEQ ID NO: 92551 - DNA, 536 bp, Zea mays
  unsure (1)..(536): unsure at all n locations
nagtntttgcgagggttgtgtcatgactaccgccagtatatgtactgctcgtaccggtccggaattcccgggtcgacccacgcgtccgggacaagaacgatactaggaagaagaagaagaaggcgccgtgggaagaagaagacagggacgaaggcagcaaggtgactctttcagggctcctcaacttcatcgacgggctgtggtcggcttgcggcggcgagcgcatcatcgtgttcaccaccaaccacatggacaagctggacccggcgctgatccggcggggcaggatggacatgcacatcgagatgtcctactgctgcttccaaggcttcaaggtgctcgccaagaactacctgggcgtgcaagatcatgacggcgagctgttcggggacattcgtcggctgctggaagaagtggacatgactcccgcggacgtggcataaaacttgatgcctaagtccaagaccaaggacgccgattcctggcntcggatgcttcgtaaagcgctcgaggaggccaaggaagcggcgttgtta

SEQ ID NO: 92552 - DNA, 536 bp, Zea mays
  unsure (1)..(536): unsure at all n locations
gagttttagtcgagggtgtgagtcagcctacggaagtaaagtggctccgctccggaattcccgggtcgacccacgcgtccggcgaccaccaccagcacgccatcgcctacgaagacaaggacggcgacctcatgctcgccggagacgtgccctgggatatgttcatctcttcgtgcaagaagctcaggataatgaagggctctgcctctgaggccaggtgatcgctgatccatacataaacagaggctacagacacgccacctgggaacgcggatccaagagcacacacggatcgtacttgacgaggaaagagggaggagcagtgtggcttgagctctccagtgttgtacaaagacatgtttctttctgaacccaaaagggagaaagatgtatgaagcgtgtatataagatcttagctagcagtttggtttcatttgtatgagcgatcgaaggctgtaaaaaatgaacaaaaaaaaaaaaagggcggccgctctaaaggatccaagcttacgtacgcgtgcatgcgacgtnataag

SEQ ID NO: 92553 - DNA, 535 bp, Zea mays
tagttttagccatggtttggttctacctccagaacgtagagtgcatctgctccggaattcccgggtgcgcagagaatccccaagcaaacaaacagggttgagggagaggagaggacaggagaggagaggttgggtctgctacggcatggcgtccgatgaagctgtacggtgcggtgatgtcatgtaacgtgactaggtgcgcaacggcgctggacgaggctgtctccgactactacatcgtgcccatcaacttcgtcaccgcctagcacatgagccccgagcacctagtccgctacccgtttggtcaggtatcagctctgcaagatggtgacttgtacctcttcgaatcacgagcaatctgcaagttctctgctcgcaaaatcaagccatagctgttgaaggaaggtaacctcgatgaggcagcaatggtggatgtttggatcgaagtcgaagctaaccagtacaaccgtgcactgaatcccatcctgttccaggtcctgatcagttctatgcttgggggaaccaccgaacataa

SEQ ID NO: 92554 - DNA, 539 bp, Zea mays
  unsure (1)..(539): unsure at all n locations
taggtntagctcagagctgnagtactataccgaaagtactanagtactgctctaccggtccggaattcccgggtcgacccacgcgtccggccaaagaccccagggcagcaggaagcaatagaagcgagcgaggcagcggcgtggggcgaggagtggaggacaccgatccccgccggagagcgcgtccatcccaaatggcgactgcagcttcgcccgccgctgcctttccccacatcctctccctctactcctaatcccctcccaatcccccccccccccctctctctcttcctcgccagctggttcgttccgcacccgtcgtcgcattgggtgccgaggagggacgcaatggagcagtacgagaaggtggagaagatcggggagggcacgtacggggtggtgtacaaggcgctggacaaggccaccaacgagacgatcgcgcctaagaagatcccgctggaacaagaagaccaaggccgtccgttcaccggcattcgcgagatctcttttcctaaaggagatgaccaccgcaacattgt

SEQ ID NO: 92555 - DNA, 534 bp, Zea mays
  unsure (1)..(534): unsure at all n locations
gagttttagagggctaaggttcaggctaaagcagtattactcactgctctaccggtccggaattcccgggtcgacccacgcgtccgctcctcgtcgtcgcctcgctgtctcctccgccgttgcctgcgatcccgatcatggagggcggcagtaccaacctcgacgcggctatagagtcgctcctgaacgtggagaagcagatgaggctggcaggcgatgtcgccggcacgcggaaggccgtcatcgacatcgtcgagctctgctacaagaccggcgcgtggaagacgctaaacgaccagatcgttctcctctccaagaggagaggccagcttaagcaggccattactgctatggttcagaaagcaatggactacattgatttgacaccagacattgacacacgagtcgagctaatcaaaacactgagcagcgtctctgctggcaaaatttatgttgagatagagagagcaaggatgatcaaaaagcttgcanatatcaaagaggagcatggaaagattgacgaggctgcttatt

SEQ ID NO: 92556 - DNA, 537 bp, Zea mays
  unsure (1)..(537): unsure at all n locations
tagttttaggttagagcttgtgcatgagaccagcagtntattggactgcctctaccggtccggaattcccgggtcgacccacgcgtccggactcgcctctgaaagttcggagccgccggcccgtccgtctacctctccgcctgcggtccggaaggccaatagttttcaagtggcaatggccgaccaggctaaccaacccactgtccttcataagctcggtggccagttccacctgcgctcgatcatctctgaaggtgtacggtcccgtaacatatgcccatctgtctcatcttatgaaaggagatttgccacaaggaactacatgacccatagcctttggggcccttcaatgtctgttagcggtggcatcaatgtcccagtgatgcagaccccgctctgtgctaatgctcctgctgagaaaggaagcaagaacttcatgattgatttcatgatgggcggtgtttcagctgctgtttcaaagactgctgcttgctccatcgaacgtgtgaagccgcttattcaagaactagattagat

SEQ ID NO: 92557 - DNA, 501 bp, Zea mays
  unsure (1)..(501): unsure at all n locations
gagtatggagttttctgagttcgtatcccgcncgatcgccatgctgtaccggtctcggaattcccgggctcgacccacgcgtccgtcaagcaagcaagcagcgagttcatacttactacgcagccaggcagccatggggccgagcgcgatgatggcctggtctgcgaccgccttcgctcccatacagtgtctcacgttcaccgtcagcctctccgtagccaggcgctcctccataagcctatgcatcgaaagcatctgctccaggacatattccatgcaggccccatcgattttaggggacatctcacagaccaccacgtgactgactacacgattcactgattccagtgtattttcacccgcatatttttgaacattgatctgaatccaatttttccaagtgctccaaccgtgaagggctgcaggttccctatgattgattcacatgaaggctacgattgatctatgtggcaaattggtcccccctatatattatctgac

SEQ ID NO: 92558 - DNA, 503 bp, Zea mays
  unsure (1)..(503): unsure at all n locations
nagttnaaggagtgctctgattcacgaaacgaggggagggaaagtagtgttgtaccggtccggaattcccgggtcgacccacgcgtccgcaactcgagaaaccagccctactttcatcattgggaagtttgacggaattggtgctctgggatttcctgaaatttctggagtaggagcccctccaatttggcagagcatgaaacagcacatactggtctcaatggaagtgcactctatgggactcaatagagacccggaatcaatgacgcaatacatgcgtcaaagcgattttgtgatggcagtgcccctcggatgatccacggatgccttcgaacattcgtgaaggatcatgttgatgttgcaagcacgagccatgaagctaaatcaaaatcatgattttttgcaaatactcatacaacaaaatggtggctgaagtaaagaagtacggagagaaccttgctgtcttgagttcaagcgaataccttctgtctccaaggtttaan

SEQ ID NO: 92559 - DNA, 498 bp, Zea mays
gagtagtagaggctgtgtcacgtaccccgccattatagtcattgctcgtaccggtccggaattcccgggtcgacccactcgtccgagcaccttcacgtcaaagagtttgagcatctggactgggctgcgaggatgagggtcagcatggtcgtcgcatactgccttcaatacatgcaccatgagctcagtccacctatggcgatccacgacgtgcggtctgacacaaccttcatttcagatgattatgctgccaagattgcagatgttggtgtatggaacgagcttgctgccaaagcgaaggctggacaggaggactgctgcagccgtgctgaatctcctccggatctcccaagcaacgcctactgcttcggcgcgctcatgatcgataccatatccggttgggttcctgacccgtatgatcacaaacccatatgcagctgggcttctgagcatctgaaagactaggactacggcaagctcgtggacgcgttcttttag

SEQ ID NO: 92560 - DNA, 538 bp, Zea mays
  unsure (1)..(538): unsure at all n locations
naggttttagcgagggtgtgagtccagcctacgagcgtacgtagcatccgctccggaattcccgggtcgacccacgcgtccggaaagagaaaaaggaaaggaaaggacgaaggatcggctgcgaggtctatggcgtcgacggcggggtacctggctcggcggtcggcgcagaaggagcgggtgcgcctgctctaccgcagggcgctcaaggacacgctcaactgggccgtccaccgtcacctcttctaccaggacgcgtcggatcttcgggacaagttcgaggccaaccgacacgtggataacctggacgtggtcgataggctcatcgacgatgcggaggctcagtacaggaactttcagcaccccgatccctacattgttccatgggcaccaagcggcactaaattcacaagaaacccngcttcacctcaagggatcgagatcatctacaattatggcaaggaggaccaagtaaacaagagtcctgcaagcggggggcagaaacttccacagtttcaaatcacttcctggttaatcg

SEQ ID NO: 92561 - DNA, 534 bp, Zea mays
  unsure (1)..(534): unsure at all n locations
aggttttgctgccttntagngtcgttactacgactctacgtcactgacgtaccggtccggaattcccgggtcgacccactcgtccgaagataatgtattggcaagaatgttagaccataaggaagctatcatatctcattgaggttgggctagcctcttcctaggattccataccttgggcctttatgttcataacgacgttatgcttgcttttggtactccagaaaagcaaatcttgattgaacctatatttgcccaatggatacaatctgctcatggtaagactacatatgggttcgatatactcttatcttcaacgaatggccccgctttcaatgcaggtcgaaacatatggttgcccggatggttgaatgctgttaatgagaatagtaattcgcttttcttaacaataggacctggggatttcttggttcatcatgctattgctctaggtttgcatacaactacattgattttagtaaagggtgctttagatgcacgcggtttcaaattaatgccggataaaaaggattt

SEQ ID NO: 92562 - DNA, 494 bp, Zea mays
  unsure (1)..(494): unsure at all n locations
gaggagaagagctgtgtacgatcccgactgatcgtactgctcgtaccggtctcggtattcccgggtcgacccacgcgtccgctctactaccacatgatcccctagtacctagacctaggagtccatgtacaacggcgtggtgcaattacacatggtccgcgactaaactctatgcctgcaaaacatgatggcattcttagactaggctttcacgaaatatctgttgggaatgcaacacctgtgtggtataacatggtaaaacaaggtctcatcagtgaccctgttttctctttctggtttaaccgacatgctgatgaaggagaaggtggtgaaattgtgtttggtggaatggattctagtcactacaagggtgatcacacctatgtcccagtcactcagaatggatactggcagtttaacatgggtgatgtccatgttgatggaaagtccacttgggtttgtgctagtggttgtgcaacaataacatattcttn

SEQ ID NO: 92563 - DNA, 538 bp, Zea mays
  unsure (1)..(538): unsure at all n locations
gggtttaggtgacttanatgctgacntaccgacgtatactgcatgactctaccgatctcgcgattcgacccacgcgtacgcgtccgaagaagagggaagagcaccaaggaccttcggcgcccgttcaggatccacatcttcgggagcgagttcttggttgacctcttcctcttcggaccacctccaaggctcttggtgtagcttgccactctcaccaatcaagttttcatgtctgatctcgacattcagatcccaactgccttcgatcccttcgctgaggccaatgctggggactctggtgcggcagcagggtcaaaggactacgtacacgtgcgcattcagcagcgtaatggtcgcaagagcctgaccaccgttcaaggattgaagaaagcgttcaactacagcaagatcctcaaagatctcaagaaagagttctgctgcaatggtacaatggtccaagacccagaacttggacaggtcattcagcttcagggtgatcagagggagaacgtgtcgaattttctagtccaggccgggg

SEQ ID NO: 92564 - DNA, 518 bp, Zea mays
  unsure (1)..(518): unsure at all n locations
agttagggtgncttcnattttctcactcgtaatgtaatgtactactcgtaccgattcgcaatttccagccacgcgtacgatgcatttccccagcttcatccaagtgttgatatcaaaacaggtctctctccacttagggggagattgtctaactatgctgactcaagtcctgaattgttaccagagttcttgcaagttgaagcttttgctaagttcagtaatgctattggaaaggtgatagaagcccaacctgacatgccagttgttggagccgtaactctatatctatcgctattgacttttactctacgtgtacatactgaccggcttgattatgatgaccaagtgctctgtgcatgtgtcaagaaactttcaggcacatcacatctagcagatagcacggcaacgaagcacatttgtgcacttattagtgctaccctagaaaaatataacaatattgttactgcattagaacttttcaactatccctcggtcatggattatcttgactatgctac

SEQ ID NO: 92565 - DNA, 529 bp, Zea mays
tgagtagtgggagttagggaatttgtctacgtaccgacagctacgtcattcagttccggttcggaattcccggggcgagccacgcgtccgtctcagttggatagactgtcttgcgtgagagggtcactgttaataacactatgtgccagaagagctgtttgaagtgctgccatggagggtgcaccatcagcccttctaactacagcttcccctcgtgcgcaatgtagttagaagggctggtggtgcaagcaccaccacatccagctgatcaaggagaaggggaacttcagccagcttgagaatgaccacgagaagacatcacaggctgggtcactggaggacgatgaacaagagtattgatcactgagcacaaccacagatgaataatgaatcctcttgcatttgcctagagcactatgtatttctgtggcgtggttcgatttcagttttaccaatggaggtcatgtgtggtcagaggacaatgattatgctgtcttggatctccattgtaaacgttgtaacctttaag

SEQ ID NO: 92566 - DNA, 523 bp, Zea mays
  unsure (1)..(523): unsure at all n locations
aggtaagagtcttcngtctaccgacgggggagggaattgtcattgctcgtaccggtccggaattcccgggtcgagccacgcgtccgggaacacctgaggcccttgccttgagaggaaaggctgcagtagcgcaggccagactggcaaatcggctctggcagaagaaattctctggcccaaggtgggaggcgttggccaagaaaggtgccaagaaacaaaggttgttgtgggcatccaccggtgtcaagaacccagcttatcctgacactctttatgtggacagtctcatcggacctgacacggtcaacacgatgcccgaccaagctttgcaagcattcatagaccacggcaccgtttcaaggacagttgatgcgaatgtgtctgaagcggaaggtgtatacagcgccttggagaagcttggcatcgactgggaagaggttggaaagcagcttgagctggaaggcgtggactccttcaagaagagctttgacagcctactcgtgagcctgcangagaagggcaa

SEQ ID NO: 92567 - DNA, 480 bp, Zea mays
agggtttactaaacaagcccggggggatagtattgctctaccggtccggaattcccgggtcgacgcactcgtccgttcatatttgggcctgatgtgagatctgtgtttctcactatgttcctcatcatcgcaggagtggttgtcttgggtgtgttcgtcgcaaggcatctcataaatgatttccccgatagctggggaatctcagtgatggtagtagtggttgtcttcactgtttatgatttgacgctgcttctttgtacctctggtagagatcctggtataatacctcggaatactcatcctcctgaacctgaatccattgatgggatcaatgatacaggtgttcagactccacaacaatttcgtttgcctcgcacaaaggaagttgttgtaaatgggatcagtgtacgggtaaaatactgggatacttgcatgttgtaccgaccacctcgatgctcacactgttccatttgcaataac

SEQ ID NO: 92568 - DNA, 454 bp, Zea mays
  unsure (1)..(454): unsure at all n locations
gcgtagtctccccggtctcggaattcccggggggagccacgcgtccgccaaagccaagtgtgtgtactagcggccagctagctcgggcggcagcaggcagcgatggtgtcggaggagaagcggcagcacttcttcaaccaccacatgaaggacgaggagcagcccgccggcgagtacgggtactccgagaccgacgtggtcaccgccaccggcgagggcgagtacgagaggtacaaganggaggagaaggagcacaagcacaagcagcacctcggcgaggccggcgccatcgccgacggcgccttcgcactctacgagaagcacgaggcgaagaatgaccccgagcacgcgcacaggcacaagatcacggatgaggtcgctgccgctgcggccgtcggcgccggcggctacgtattccacgagcaccacgagaagaagaaggaccacaaggacg

SEQ ID NO: 92569 - DNA, 477 bp, Zea mays
  unsure (1)..(477): unsure at all n locations
taattctatataagggggggggggacgtaacgtctaccgntccgaattccgatcgacgcactcgttcggatcaatgctgtgctcaaaaaagtgggagcctaatgctcacaagataatggaacatcggatgaagtattacaggttgagaaaagagatggatgaaaacatatcccatcgtgatccgcttcgtcaacgttcacatgcgcaggctgcttacgacaaggccaatacgaatgaacaatcgtcaagtcgctcatcaggaggtgcatcttccataagctttcctggacggatgcctcctggcggttttcctagaaggattcccagttgaggtttcccctggggttgcatgccttgaggtttccctggtggtgttcccggtaatgttcatatgagtaaaatgctgaatgaccctgacctgatggcaacattcactgacccaaaggtcattggcagtttacaagatgcaataaacaa

SEQ ID NO: 92570 - DNA, 518 bp, Zea mays
  unsure (1)..(518): unsure at all n locations
ngggttaggggtatttagttacagaagggggggagacaggtatactcgtccggaattcccgggtcgagccacgcgtccgctttgcagaaagatcaagtgcattgaaggcagttaaaggaagtgaaaaatatgaaatggatggtcaagtactgggagtgtccatggccaaaccattggcagataagaaacctgatcattcacacaggcctggaggaggccctaattatccccttcctccctatggtggtggtggctacatgggagatccatatggtgcttatggtggcggcggtcctgcatacaaccagccaatgatatatggcagaggaccagcaccggcaggaatgaggatggtgccgatggtgcttcctgatggccgccttggctatgttctgcaacaacctggtggaatgccgncttcgtccncaccgcggaagggtagtgaccgaagagacagtggcagangtggcgaagggcacagtcagcgatatcgcccttactagcttttccctaatggc

SEQ ID NO: 92571 - DNA, 517 bp, Zea mays
  unsure (1)..(517): unsure at all n locations
ggtagaatccttattccgtcaccgccctgatctcactgcagtaccggtcctgaattcccgggtcgagccactcgtcctcttggataaagtaaaggtcccaaagtaccaagaaattgtaaacatcctactgggaggtgtcaccacgcgcggtggtcaagtccttgaagttgatggagaaaaagctgttgtacaggtttttgaaggaacttctggaatagacaacaaatacacaacctttcagtttacaggctaggttttgaaaactcctgtctcactcgatatgcttgggctcatttttaatggttctggaaaacctattgacaatgggcccccgatattacctgaagcctacttggatatctctggaaattctattaatcccaatgagagaacctatccagaggaaatgatccaaactgngatattcaccatngatgtgatgaaactcaatgctccgtggccaaaaaaatccccctattttctgcttcttggcctcccttacaattgaaattgcttc

SEQ ID NO: 92572 - DNA, 519 bp, Zea mays
  unsure (1)..(519): unsure at all n locations
ggtatatgctgtgtgttcgtgagccgcgggtacgtctctactttaccggtctctgaattcccgggtctagccactcttcctgcttctcctccccctcctgttcgggttctggttcgtgaggttctcctgggttgggtggcntttttgagcggatcgagatggctgcgtcngatgttgagtaccgctgcttcgtcggcggcctctcctgggccactgactaccactccctccacaactccttcatcacctactgctaggtcctcgagtccaagatcatcctcgatcgggagactcataggtccccccgctttcgtcttcctcacctttttcactgaatattcttttcttaacgcccttcaaggcattaaccgcctaggacctgaccggcctaacaataaccgtcacctaggccaatcccctctgcggccttttagccgcctccgcgccggttccgttgttgccctttaatgctgcggtttccgcttttgctgccgcctttattgcgccgtcggttactcg

SEQ ID NO: 92573 - DNA, 524 bp, Zea mays
  unsure (1)..(524): unsure at all n locations
ggtattagtggtgagtagtacgaccgaagtagtaatgctcactgctcgtaccggtccggaattcccgggctctgttggaggaggtggtggaagcagcaggggaagaaggcaaaggaggggagaagatgtagtccaccgactgaaagtttctgtgggggagctttacaatggcacctcaaagaagctctctctttcgcgcaatgtcatctgctccaagtgcaagggcaagggctcgaagtctggtgcctcaatgaggtgccctggttgccagggctcaggcatgaaagtcactattcgtcagctgggcccttccatgatacagcagatgcagcagccttgcaatgagtgcaaggggactggagagagcatcaatgagaaggaccgctgcccaaggtgcaagggtgagaaggtcattcaagagaagaaggttcttgaggttcatgttgagaaggggatgcatcacaaccagaagatcaccttccctggtgaagctgatgaagcgcctgatactgtcacttgaaaan

SEQ ID NO: 92574 - DNA, 494 bp, Zea mays
cgtaaaaggttagtatccagcagaagagcacgtattcttctaccggtctcggaattcccgtctgcgacgcactcttcctcaaggcaaaaaagatctctgaggtaggattacttcactggcatcaaggatgaaagcaagattgtcgttaagggtcaagaagagcttgacattgatgtgcttgtgcatggcgagcctgatagaaacgatatggttgagtacttccgtgagcagctctccggttttgcgttcactgccaatttctgggttccaatttatgtttaaggttccttaatccttcgatcatttacggtttcctttatacttcgtatcctcatttaccctttttctggctttaatatttaacttacttttactttttggccaatttaacttatttttttatttgctcattttcccttttttatacttatattttttttttgaatttcctattttaatttttatatattttacaattaatttttttttttttt

SEQ ID NO: 92575 - DNA, 515 bp, Zea mays
  unsure (1)..(515): unsure at all n locations
tggttaggatggtgtttttacgacacgaaaagtangtcacttcttttccggtttncaatngctcgtgctgtttctcctcgcggcgctgttcacgtccacggttaggatccggctcctggctcggcccaacggggaggtgttcaacgccggggcggtggaggacctgatcgttcggcgggggcgcgtctgctgcgtggtcaccaactgggcgctcgtgtccatgaaccacgacacgcagtcgtgcatggaccccaacgtgatggaggccaaggtggtggtcagctcctgcggccacgacgggcccttcgtcgccaccggcgtcaagaggctccaggacatcggcatgatcagcgccgtgcccggtatgaaggcgctcgacatgaacgccgtctatgacgagatcgtgcgcctcacgcgcgaggtcgtgcccggcatgatcgtcacctggatggaagtcgcctagatcgactgctcccccaggattgggcccgactttcggggcctgtttatctccg

SEQ ID NO: 92576 - DNA, 523 bp, Zea mays
  unsure (1)..(523): unsure at all n locations
nggttagaagagtatagtgctcaccgaacaaagtatcgtcactgccngtaccggtccggaattcccgggtcgagccactcgtccgcagactcttgtgaagagcgccattgtacaagttgatgctgctccattcaagcagtgggacctcactgactggggagtggacatcggtaggaagaagaaggtgcctgttgctaagaaggatgcgactgagggacaagagggtgaggctatagctgaggaaacaaagaagagtaaccatgtgcagaggaagattgagaagcgccagcaggaccgtgcactcgacactcatattgaagagcaatttggcagtgggagattgttggcctgcatttctgcccgtcctgggcagtgtggccgagctggtggctacatccttgagggtaaagagctcgagttctacatgaagaagctccagaggaagaagggcaagggtgttgcatcttagagcattcttttagctagaactgcaaaatatcttctacctggggggatttggtgg

SEQ ID NO: 92577 - DNA, 519 bp, Zea mays
  unsure (1)..(519): unsure at all n locations
tgggtaagagtgtctgttccagcggcggggaggattgtactgctcgtaccggtccggaattcccgggtcgagccactcgtccgcggactcgtgatcgaggacaggatgctcaccaccaacctgctgtccgctgaggtctgcaagctcggcgccgatgcgttcttggcacataggatctcctctgtcaatgccatctccgctctctgcgaggcaacctgatccaatgtctctgaggtggcttacgccgtgggcaaggacacgagaattggccccaagttcctgaacgccagtgttggcttcggtggctcatgcttccagaaggacatcctgaacctggtgtacatctgcgagtgcaacggcctgcccgaggtggccaactactggaagcacgtgatcaagatcaacgactaccataagagccggttcgtgaaccgcgtcgtggcctccatgttcaacaccgtcgccagcatagagatcgccctncctcgctttggcttcaagaaagtacacggtgacacc

SEQ ID NO: 92578 - DNA, 521 bp, Zea mays
  unsure (1)..(521): unsure at all n locations
ttagtattaggtgtgtagatcgtaaggctgtactcgactgctgttccggtcctgaattcccggggttcgttatgacgagcggaggtacctctccttctcatccatggcttctaccaatggccatcgtattatgagccatcccatcatcgtcagcttgcgggtcctacatatcaaatctctcatccatatctntctattctatcataatgacctcctgattgagggtcgcattatcggattctatgagtacatgaacttggtcctcgaagactctgatgaaatcaacgtcaagaaaaacactatgaaatcactgggccggatactcctcaaaagtgacaatataactttgatgactaacaatatcaagtgaaaattcttatggcatgaactatgttttgtgcttcctttgattattctgtacacaatttactccatccattcctccaaacttaaattatgtatcattgtaattgtggtttaatgatattttaataactcccttaatatactaacattttaat

SEQ ID NO: 92579 - DNA, 485 bp, Zea mays
gtagatatactgtcacgagcgcgggggacagtattctactaccggtccggaattcccgggtcgacgcactcgtccgctggaggttactgagatcttcaactgttctcaagatgatttgttaactgaagacatgaggatacttgacacgcatggtgaagttttcatttggattggtcagtatgtggaatcaaaagagaaacagaaggcatttgacattggccagaaatacgtggagcatgcaaattctattgaagatctttctccacatgtaccactatataaagtcatggaagggaatgagccatgcttcttcaagacgtacttttcttgggataacacaaaatctttggttcatggaaattccttccagaagaaactctcgctgcttttttgattgccttctgagggttcacctatgagctcttgtaattggtggccaactcataaggcttctgcattagcagctttattattcgcatttcatc

SEQ ID NO: 92580 - DNA, 518 bp, Zea mays
ggtttagagtggtctgtaaccgacgagagggcggtaagttaataccggtccggaattcccgggtcgagccacgcgtccgctccacaggatgctgaacgaggatgagctacgtgatgctgtgctgcttgtttttgcgggcaggcaagatctggccggtgccatgaatgctgctgagattactgacaagcttggattacactccctgcgccagcgacactggtacatccagagcacttgtgccacaactggcgagggtctgtatgagggcctggactggctgtccagcaacattgcgagcaaggcttgaggcctaccttgaatatcaactgcgaactgactaggagctccggatgtatcatggaaactcaggacagaatcgcagttgcaatctgttagatgtcttctaccggcactatatatttttttttgtttgatgtgtaatgatgttactgttcaacgcttattaccctactatactgttggatgtcctttggacctgttcattttccacaaggatt

SEQ ID NO: 92581 - DNA, 513 bp, Zea mays
  unsure (1)..(513): unsure at all n locations
tggtaagagtgtttgttaccgacgaagaagtatgctactccggtccggaattcccgggtcgagccacgcgtccgtgcagcgcggcgagttcctctgccggccgtgggtctcagcggacgcccggaagctcatgggggagctgctggacgggacccgagcacgcgcatcaccgtcgctcgcctcgtcgagacgccgtggtaccggaagccgttgcccgtcctgccgccgctcaacctcaaggagccaaccccggacgcgcgccgcgccacctctgacaaggaagagcccgaggtgctgaacgcgttccacctcatctctttctcggagggcttcgacctgtccccgctcttcgaccagggccgtggcggcggcgtacggaggtctagcgcggtcggcatccgtttcgtgacgcgcgaggccgncagcagcgtggtctcccgtctggagtcgctggtcaccggccgccgtaccaacatgcgcgtgacaaagagcggttgccgggccgtccgttgg

SEQ ID NO: 92582 - DNA, 482 bp, Zea mays
gagtaaggtcttgtagtaatcagggggagagagtagtcttcctccggatattcccgggtcgaccgcacgcgtccggtgattctctcacgtacgaagacaaggatggtttgattgctaggcttcatgatgtcgaggacgggctctatgaaggtggcgaggatgaaactaacggggtttatattgctaagctagaagaacttaaaaaagttggcgatcctattgagctgcgcttcaacgaatgcgagattagaagttctgctattagccaactggtatactgcatcaatagcttcagagaagctgcacagtctaccgaccacaagtttgaacacatagacatgtcagaaaagcgaaaggtcattaatgagtgttcggaaacagacacttggctaatagacaaaaagcagcatcacgatgctctgtcaaagcatgctaattcggtactccttgctgctgaccttaagaaaaagctgaaacactca

SEQ ID NO: 92583 - DNA, 513 bp, Zea mays
ggttgagggttgttcagccagacaagtattgtagtacctttccggaattcccgggtcgagccacgcgtccggggatgtgatgctgtcatcgtcatgcccgtgacaacaccagaaatcaagtggaaatgggtggagaggttgggtgcgacagtggtccttgagggggactcatatgatgaagctcagtcatatgcaaaattgcgttgccagcaggaaggccgcacatttgtacctacttttgaccatcctgatgtcatcactggacatggaactatcggcatggaaattgttcggcagctgcaaggtccactgcatgcaatatttgtacctgttgaaggtgctggattaattgctggaattgctgcctatgtaaaacggtttcgcccagaggtgaaattaattgaagtggaaccctaagatgcaaatgcaatggcattatccttgtgtcatggtaatagggtcatgttggatcatgttgatggggttgcctgatgggataactgtcaaaccatt

SEQ ID NO: 92584 - DNA, 521 bp, Zea mays
ggttttagcgtgtgtttcagaagggaggggagattgttattgctcgtaccggtccggaattcccgggtcgagccactcgtccgtccgttcaccagctcgttgagaacgcatactagtgcatggtgctcgacaacgaggcggtctatgacatctggttgcgcacgctcaagcttgccacaccaacctttggtgatctcaaccaccttatctctgcaaccatgagtggtgttacgtgctgccttcgcttccctggtcagctgaattctgacctccggaagcttgcagtgaacctgatccccttcccacgtctgcacttcttcatggttggatttgctccactgacctcgcggggctcccagcagtaccgcgctctcaccgtgccagagctgacccagcagatgtgggactccaagaacatgatgtgtgctgctgaccctcgtcatggccggtacctcacggcatctgctatgttccgtgggaagattagcaccaaaggagtggatgaaccagatctcgaacct

SEQ ID NO: 92585 - DNA, 517 bp, Zea mays
  unsure (1)..(517): unsure at all n locations
nggttgaggttatgtttacagacgcggagtatgtagtaccggtccggaattcccgggtcgagccacgcgtccgcagaaacgagagggccggagcagcggcagtcccggcgatcccgccgccggtcgcccgcatacgttcctcgtggctggcttcgtttctctttccaacaatcaagatgagccgtggcggtagcgcgggtggtggtcaaagttctctgggttacctctttggaagcggtgagccccccaaaccagcagtggcaccagctgtaagtgctccacctgctgctgcaggtgctccacctgctgagaaaccacctgctgcaaagcctgatggcaccagtcagattgctgctggggttaccagccaaaccaataactaccacagggccgacggtcagaacaccggaaacttccttacggaccgttcttcgaccaaggtccacgctgctcctggcggtggctctttcctgggatacctggttgggtgcaactgatgccggtcaaccaagctttc

SEQ ID NO: 92586 - DNA, 519 bp, Zea mays
  unsure (1)..(519): unsure at all n locations
nggaagagatgtgtngctttctnagcctctcgctccgccacttcatttccggttcggaattcccgggtcgagccactcgtcctagattgagatcctgtagaagaagggtctctcctactctgagatcatcaacgggagcgtgattgagtcgggggactcgctgaacccgttcatgctcgcccgtggggtctccttcatggtggacaactgctccacaacgtctcgcctgggatccaggaagtggtcgcctcgcttcgactacatcctgactcatcatgcctttgtggcggttgacaaggactccccgatcaaccaggacctcatcagcaacttcttgtctgaccctgtccatggtgccattgaagtctgctcctagctgaggcccaccgtctacatctctgtgcctgccatcgcctactttgtgcgcccggagctccgtcagtctttctagattgaggcattgatcggtaagttagaggtttagagtatgataggtttcgtttcctttttttaactatc

SEQ ID NO: 92587 - DNA, 523 bp, Zea mays
  unsure (1)..(523): unsure at all n locations
tggtttaggggctttgtttaagaagggaggggagatagttattgctcgtaccggtccggaattcccgggtcgagccacgcgtccgcgccgccgccgccgtttcgcgcacggtaccctagccctcgtcagcggcggcttggaggtcatccagccatggcgttcaagcggaggaatggcggacgcaacaagcacgggcgcggccacgtcaagtacatccgctgctccaactgcgccaagtgctgtcccaaggataaggctatcaagcggttcttggtgaggaacattgttgagcaggctgccgtgagagatgtgcaggaggcctgtgtacatgatggatatgttctacccaaattgtatgcaaaggttcatcactgtgtctcatgcgcaatccatgcgcacattgtccgtgtccgctctcgtgagaacaggaggaaccgtgagcccccgcagcgcttcagacgccgggatgatggcccaaggcctggtcagggcccgccgngcccaggcggtgcagcttctgcaa

SEQ ID NO: 92588 - DNA, 490 bp, Zea mays
  unsure (1)..(490): unsure at all n locations
ggagtagatagtggttnctgtaagaggggcgggggacggtaggtttgtaccggtccggaattcccgggtcgacgcactcgtccggtggagtgtcgcttagcagcgattgttcttgccatcaaacttgggatggataggaaagaggctatctcctgcgttacaaccctctccgatgttgaggggctatgtgtttcttttgctgggagagaaggttcatctgatcctgcagtagctgtgaagaaacttctgcatgaggacccatatacagctggagaaatagagaaaattacaggagaaggcctgacatctgtcttccagggctctcagacgtcattggaagttataaaagcggcaaagcactacaagctatttcagcgtgcgacccatgtctactctgaagcaaggagagtttatgctttcagggatactgtctcttcaaaactcaatgaggaaggcaagcttaagaaacttggtgatcttatgaacgagt

SEQ ID NO: 92589 - DNA, 479 bp, Zea mays
aggctatcgtatacgacgcgggggggacggaaagttttaccggtccggaattcccgggtcgagccacgcgtccgcccacgcgtccgctagaagggaaacgagatgaccctgatttccgcaggacacttgcgtggaaagcattccggcatgttgcttcctatgattctgctatctcggagtggttgtggaagcaatctaataaagattcatttcctcccagctttactgtgcccctcacaatgaagtctacacttcgctatggtgagaatcctcatcaaaaggctgccttttatggtgacaggagtctttctctagtaaatgctggcggtattgcaacagcaattcagcaccatggaaaggaaatgtcctacaacaactatctggacgcggacgcttcgtggaactgcgtctcgggatttgagaaccccgattgcgtcggggttaagcaccacaattcgtgttgcgtaacgtctgggcac

SEQ ID NO: 92590 - DNA, 507 bp, Zea mays
  unsure (1)..(507): unsure at all n locations
gggtagaggttattgctgtaagggagatcgnattacgttaccgttctcgaattcccggtgcgagcactcatccgtagcgtgcgtgcctgacggcatggtatgtgcactacgctccgtgatcgtggcgttccattcaccggggggggtgcaacgaccataatccaaatggcccgcaagcgcaacttggataagaacaatgaggccaatgggagccagctctagaccaacatgaaggccatgatcatccagagagcacgccgaggccaagcatcccaagacagacgtgtaccagtgcttcccccatctgaagaagtgaaaggcctgaacttagcaaccaatgctgatttgaccagcgggcgttccttgtgttgagggtgttcattccgtgttatcttcccgtcagtcatgcgtcctgtcctatgttaacctacataataaagtgatgtcatgtccacttctagtgaaaactctgtctgatgctaaaacccttgttggtttcacaccaat

SEQ ID NO: 92591 - DNA, 525 bp, Zea mays
tgagtttaggagtggtttattgtcctgtcacgacaagtactggactggccgtaccggtccggaattcccgggtcgagccactcgtcctcggagaaggtgaagcctcatcctctggtgatcactctcctgactcatgtggaggacgggatccccaggtgggagatcgtgcccaccaagcaggacgtcatcgactccgccttcaaggaccccgtcaagcgtgaaaagatcaggaggaaccagctgatctaccaggacaagccgcggctcaagactgcgttggagatgctcaggaccagcatgtacatagaagacagcttgtcacaggtgacgctgccgttcttcgtcctgcacggcgaggccgacacggtgactgacccggaggtgagccgcgcgctgtactagcgttcggccagcgcctacaagaccatcaagctgtacccgttgatgtggcacggcctcacagccgttgagcccgacgagaacgtggaggccatcttctccgacatcgtgtcctggctcaacacc

SEQ ID NO: 92592 - DNA, 487 bp, Zea mays
agtgagtggagtagtttattgtcatcgcacatagtatgtacgtgctaccggtccggaattcccggctcgacgcactcgtccggccttttcattatctttcccattgtgactgtgatggtgtaatatgcagcatgtgactgggttgtctgggagggaagactgggcttcggatcactggtaccatcctacaacctgggttcatacttgacctagatgtcaaaagtatttagttttaactattgtgtgctaaactatgtacgtggcatgaaagttaaggctgatcgtgatgagtcgtatccttatgctgctatgcttgctgctcaagatgttgcacagcgttgcaaggtatttgtagtgaagcctgcaatttcgtctgtgtatccaaagatgatgtttgcttaattaaattgaagcttacgattatgtaaggctgcttacgttgctgtgggcagataagtgacttggtcttgtgtcttcatgagctcgc

SEQ ID NO: 92593 - DNA, 492 bp, Zea mays
  unsure (1)..(492): unsure at all n locations
aggtnnntnnctaaatgacagacggaganagtaatgctctaccggtccggaattcccgggtcgacgcacgcgtccgcaatgacagagatcgtgttgttgaagcaaaggatgagctccacaggatgctgaacgagtatgaattgagggatgctgtcttgctcgttttcgcaaacaagcaagatctaccaaatgcaatgaacgctgctgagatcaccgataagcttggtctccattccctgcgccaacgccactggtatatccagagcacttgtgctaccacaggagaaggtttggtgggannnnnnnnnnnnnnnntnnnnntnnnntnnnnntttnnnnnnnnntttnnnnnnnttntttttttttttttttttnttttttttttttttttttttttttttttnttttttttttttttttttttntnntttgtttttttttttttttttnttntttttttntttttttttttnttttttttttntttttttt

SEQ ID NO: 92594 - DNA, 548 bp, Zea mays
  unsure (1)..(548): unsure at all n locations
agtgagaagagctctgttctcgtactgctncgtcacgcctacacgtccggaattcccgggtcgacccacgcgtgcgccatgcaactgtggcttctgttttcgtgcgcctagcagatctgtacaataagacggcgaagctgagggggtcaaaatcctactgtgaaaacgccctaaaaatctaccaaaagcctattccagggacttctctggaagaaatcgccactggtttaactgacgtatcagccatatatgagacgatgaatgagcacgagcaagcgctcaagctacttcagaaggccttaacactgtacaacaattctgccggtcagcagagcacgattgctggcattgaggctcagatgggcgtgctgcactacattatgggcaactatggcgaagccctacgacttccttcaacagcgcaattgcaaagctccgtactttgtggcgaagacgaagtctgccttcttcgggaattgccctgaaccatatggggctggcatgtggtcacaggtattcgataaacgaagcaacctaattgttcgagg

SEQ ID NO: 92595 - DNA, 540 bp, Zea mays
aggggggcttagtctgaatcctatttagggtcgctcgcgtatgagttaccggaccggaggttcgagctacgcgtacgcgcacttcgtgtagatcataccagagttgtagacataatgcgcaaggctggtcagttgcatcttgtgaggccatatatggttgcagttcacagtcacaatgtctgtgctgagaatgaagccttgaatgagctttatgttgaagaggaggactatgagagactccgtgaatcaattgacatgcatgacaactttgaccagatcggtcttgcccagaagcttgagaagcatgaattgctggagatgaggaggattgccggctacatttacaagaaggctggcaggtggaagcaatcgatagctctatcgcagaaagacaacatgtacaaggattgcatggagacatgctgacaatctggtgaccgcgaattgtcagaggacttgcttgtctattgcattgagcatggtaagaacgaatgcttcgcttattgactcttcatttgctatgacctgattcgaccggat

SEQ ID NO: 92596 - DNA, 550 bp, Zea mays
  unsure (1)..(550): unsure at all n locations
aggtgagtgagggcgtctggtgcctgcatctgtnncgtaccgcctacacttccggaattcccgggtcgacccacgcgtacgcgcttgacgtgcgctacataccggcgaggagacgaatggagggagttttgagaagcataaatgggtcggaaagccgctcctgtcaagaagggtgatgccaaggcccaggccttgaaggtggccaaggctgtgaagtctggggcaggcaagaagaagaccaagaagattcgcacatctgcaacatttcaccagcccaagaccctgaagaaggccatggacccgaagtacccaagaatcagcactactgcaagaaacaagcttgatcagtaccaaatcctcaagtaccccttcaccacagaatctgcaatgaagaagattgacgataacaacactatggtctttattgttgacctcatagcagactagaaactgatctagggctgcagatcaagacgatgtatgacattcacgcaaagaaggtcaacaccctgatcaagcctgatgggaagaataaggctatgtgaaactg

SEQ ID NO: 92597 - DNA, 550 bp, Zea mays
  unsure (1)..(550): unsure at all n locations
acgggaggagagtggtcncgtgcatgtattcgctncgtgaccgcatngacgtaccggtccggaattcccgggtcgacccacgcgtccggtgcgcgtgactgcatcttccgttttcagagctcagagttttcgttgtttgtttcggatgacgacctgtcgcaccgcgaacgcagccgccgtcgtccgtctcctgctgctgagctctttctgcgccgtcgccgccattgcctgcgaccctcctaatggcgccaagttcgggtacaccggctccgtcggtcccgaccactggggcgcactgagccccagcttcaggcagtgcgcgacagggacgaagcagtccccgatcgacatctacacggtccaggcggtctccaacccggcgctgcagccgctccacagggactacaccgtggccaacgccaccctcgtcgacaacgtcgtcaacgtcgcgctgcgcttcgacggcgacggcggcgccgggagcgtgagcgtcagcaggaagctgtacacgctgaagcaggtgcactggcacttcgcttgcgagcacacc

SEQ ID NO: 92598 - DNA, 529 bp, Zea mays
  unsure (1)..(529): unsure at all n locations
nagatggccaagagttatgcctttggttgggtaggttgcactgacgttccgacttgaatgaccggatcgccgactccaacgcacatctggaccatggtcactgttaagggttctagtgtcatttatgctaatacaggtagaggcttattatataggtgagagcttggaaactatgcagagtatagtggtgctcctaatgaggaggaggttctgaattattctagagttgttcttgattgtgcaactgctgatcctgatggccgcaagagagcccttctcattggaggtggcatagctaacttcactgatgttgctaccacattcaatggcatcatccgagccttaagggagaaggaatccaagttgaaggcttcaagaatgcacatttatgtccgccgaggtggtccaaattaccaatctggactggctaaaatgcgtaagcttggtgcagaactcggcgttccaattgaggtgtatgggccaaaagcgactatgactggaattttcaaacaagcaatttaattcatag

SEQ ID NO: 92599 - DNA, 544 bp, Zea mays
  unsure (1)..(544): unsure at all n locations
aggagaagctccgtctaaaannttgcaaaagtactagactgcagtaacatactcgaatttccatgtcgacccacgcgtgcatccctagtccaagtatatcaacttagcacgtttgcttaatcacattgatccgctcgtcacgcggaacgggattactgcatagggccaatgtgtgaacgttgaatcctcaacaattccttcatccccaactccaaatgttgctgaaacacataccccatctgctgatgacgaggactatgatcatgctcacctttttggttaggagacctaacattacaagaatgcttcttaacatcgtgctgcagcttccaatgcttcttacaacaataaacaatcttataagtcatcagttttactagatattaaaccatgtgactattatacttacatttccaatcttgatgaatctattaagaatgtccatattaaaagtacttcatcttatcgcattcaaacttgttccattccgattttgtatcaaaaatcttaaaacattatgaccaaattctactaacatttcttg

SEQ ID NO: 92600 - DNA, 543 bp, Zea mays
  unsure (1)..(543): unsure at all n locations
aggggaggagtggtctggtctacgcaaagaatgtattgctaacctctccggaattcccgggtcgacccacgcgtccgcagacgaataatctcttcttcacctcactaacaccagctagcaactctttctctcctgcaatagtggccgctcgctcctcctcctcccagccgcagctggtcgcggcggcggcggtcctggcagcggcgctgctgctgctggcggcgggggccgggacggcgtcggcggcggtgagctgcggcgaggtgacgtcgtcggtggcgccgtgcctcgggtacgcgatgggcagcgcggcgtcgccctccgcggcgtgctgcagcggggtgcgctcgctcaacagccgcgcgtcgtccgcggcggaccggcaggccacctgcaactgcctcaagagcatgacnggccggcttcgcggcggcgtcagcatggccaacgccgncaacatncccggcaagtgccgcgtcttcggccgcgtgcccatcaagcccaccgtcgactgcaccaagatcaactgatcgatggaacccc

SEQ ID NO: 92601 - DNA, 544 bp, Zea mays
agtgtgagcgccgtctgaggccctgcaaccgcttgcctccgctatgactcactcaacttcaattccggcctacgcctgcgcgtctggtccaagtatatcaacgtagcaaggtggtttaatcacattgatgcgctcgtgaggcggaactgaattactgcaaagggccaaggtgtgaaggttgaatcctcagcaattccttcagccccaactccagatgttgctgaagcacaggccccagctgctgacgaggacgacgatgatcatgttgaccttttctatgagtagaccgaagatgagaagaaggctgctgaagagcgtgctgcagctgccaaggcttctggcaagaagaaagaatctgcgaagtcatcagttttacttgatgtgaagccatggcacgatgagactgacatggccaagcttgacgaagcttttaagagtgtccatatcgaaaggctgctcttgggcgcatccaagctttgtccattcggatatggtatcaagaagctgcaaatcatgatgaccataatcaaccatcttgtctctg

SEQ ID NO: 92602 - DNA, 535 bp, Zea mays
  unsure (1)..(535): unsure at all n locations
atgagtnctcatagagttctgtgctagcntcacaganangtacgttacttggtcncttattcccgggtcgacccacgcgtcgggcgcggcgaagggggagaagcgcaagtggttccccgacgcgcggtggctgccgccgacaggcgttcagggggggaccctgtggtacgggaacggcgatccgaccacgccgctgtggccgtcgtgcgcggctggggacgactgcgagcggctgagcatggaggagctggacggcagcgaggagatgccgggcatcccggcgctgccagtgtcggccagggacggggagacaatcctcaaggcgatgggcggcgatgtcgcgccacccaagtggcagggcggcgacggcgcgcccgtgtaccggctcggccccggcccggccgtgttgaacctcacctacattggaaacgagactttagcaacaatcgaaaatgtgtttgcggtgatagaaagaaaagaggagcctgacagatatgtgatcataggcaaccatcgtgatgcttggacatttgan

SEQ ID NO: 92603 - DNA, 545 bp, Zea mays
  unsure (1)..(545): unsure at all n locations
taggaggccatagagtctgagccagccttcccagcctagcgatcgtactgaccctaccgtactcgaatcgaccgatgcgaaggaggcgtacacatcgcngagcaaccagtgactgcatccggggctcgacacagggagcacatctactgggcacccgggctgccgaacccggggccgcagaacgggcgcactccggcccggttcggcttcgcgttgggcggcaaggccaagcctgctccgaagaaggtggccaacacatcgacctcctctgaccggccgctgtggttccccggcgccgtggcgcccgactacctggacggctcgctggtcggcgactacgggttcgacccgttcggtctcgggaagcccgtggagtacctgcagttcgagttggactcgctggaccagaacctggccaagaatgaggccggcggcatcatcggcacccggttcgagtcctccgaagtcaagtccaccccgttgcaaccctacagcgaggtgttcggcctccagcggttccgcgagtgcgagctcatccacggtcc

SEQ ID NO: 92604 - DNA, 546 bp, Zea mays
  unsure (1)..(546): unsure at all n locations
gagtgagacgtctcngttgcttgcactcgttcgctccgcctacacgtactgaatttcagtgtcgacccaggcgtacgatcttaatgagacccgcatgctgatgctaaatcagcgatcccataattcttctaatgcccactagtgtgcggtcagattgcattttacttatagactgatgtatctactctatggacaggcgtcagcagatcatgacgatgacgaatatgatttgcacatcaattgaacaaactctctttaggagaataaggataattaaaaacgaactgcccttgtcaatgcttataacaagaagaaagaatctgggaaatcgtcagttttactagatgtgaagccatttaacgattacactgttatgtacaagctcatacaagctgttaggagtgtatagatggaacgacagttaatttactcatccaagcttgacaaagttggatatggcataaacactgctgtactcatgttgaccatcttggatgacattgccttttttgacactgtcatatagaccaaatctccgctcagacc

SEQ ID NO: 92605 - DNA, 544 bp, Zea mays
gagtgagtacgtctctggtgcctcaaccgttcgctccgcatgcacgtactgaatttccgtttcgggccaggcctacgctttcgcatagactcactgctgatgcttattagagttaccagtattggcctaatgctcactggggagcggtcagaatgcacttcacttacaactcatgtagctacctatggacagtcccgagatgccatcgagctatgaccatgatgatgtgccaccacaactggcacaaacactctataggataatagggctgctcaaaaacgtactgtgcctgctaatgcttctggcaagaataaagaatctgggaaatcgtcagttttacttgatgtgaagccattctacgatgacactgacatggccaagctcgaggaagctgttaggagtgtccagatggaacgactgctatagggcgcatccaagcttgtcccagttggatatggcattaacaagctgcaaatcatgatgaccattgtcgatgaccttgcctctgttgacactctcatcgaggacatctctgcgctcagcc

SEQ ID NO: 92606 - DNA, 538 bp, Zea mays
atgtggagtcgtcggagttggaactgctcgtaccgcatgacttactgaacttgaattcccggcgcgaccgacgcgtccgatggctattattggtattcaactgttgctttttgcattgcttattgtaaacatgcaaagtctggttcaagctcttggaagaaggaggttggaaatgcaactcaggcgccgtgatgttgaatagtggatgagccataggcgactgcctgaagatttgagaaggagggttagacgagccgaaaggttcacctgggcagctactcaaggagtgaatgaagaggagcttttgagtaatttacctgaagacatccaaagggacatacgtcgccacttctttagattccttaataaggtccgattattcaccttgatggattggcctatattggatgcaatatgtgacaaattaagacaaaacttgtatattagtggaagtgacattctttaccaaggtggcactgttgaaaagatggtcttcatagtgagagggaaactggaaagcatcagtgcagatggcaac

SEQ ID NO: 92607 - DNA, 538 bp, Zea mays
tgggggagggttggtctcatgtaagaatgttatcgtatgacttactggtccggaattcccgggtcgaccgacgcgtccgatggctattattggtctgggactgttgctttttgcattgcttattggaaacatgcaagagtgtgctgcaagctcttggaagaaggaggttggaaatgcaactcaggcgccgtgatgttgaaaagtggatgagccataggcgattgcctgaagatttgagaaggagggttagacgagccgaaaggttcacctgggcagctactcaaggagtgaatgaagaggagcttttgagtaatttacctgaagacatccaaagggacatacgtcgccacttctttagattccttaataaggtccgattattcaccttgatggattggcctatattggatgcaatatgtgacaaattaagacaaaacttgtatattagtggaagtgacattctttaccaaggtggcactgttgaaaagatggtcttcatagtgagagggaagctggaaagcatcagtgcagatggcag

SEQ ID NO: 92608 - DNA, 548 bp, Zea mays
  unsure (1)..(548): unsure at all n locations
agtaagtagaggcttctgttcatggtcacgcctcacttcggcacngacgtaccggtccggaattcccgggtcgacccacgcgtccgcagcgagcgagagcagcacacactgcacgcagctagctaggagcagcagcagcggcggcgatggcggcctccatgatctcctcgtcagctctggcggtggcgcctcagggcctgccgcccctcggccgccgcgcctcctccttcgccgtcgtctgctccaagaagaagatcaagaccgacaagccctacgggattgggggtggcctgaccgtcgacgtcgacgccaacgggagaaagggcaagggcaagggcgtgtaccagttcgtcgacaagtacggcgcgaacgtcgacggatacagcccaatctacaacgaggatgactggtctcccaccggcgacgtctacgtcggtggaaccactgggcttctgatctgggccgtcaccctcgctgggatcctcggcggcggcgccctcctcgtctacaacaccagcgccctctccggctaaggatatccaatgcat

SEQ ID NO: 92609 - DNA, 532 bp, Zea mays
  unsure (1)..(532): unsure at all n locations
gagagccttagagttggnacgggcccagctacgatcgcactgacgtaccggaccggaattgccggaccgaccgactcgaccgcgcacgcatgcgcacacgcaagtgtcaggatacgaaacgggcgacatggctcgcgggcaatgtgccatatcaggggccgtggtggccgcggtgctgctgctggcaacggccgcgacgacctcggaggccgacatcacctgcgggcagctgagctccgccatcgcgccctgcctctcctacgcccacggaacacggtccggcccctccgggtcctgctgtagcgacgtcacgaaccttaagagcgccgccagcaccgccgacgacaggcgcgccagctgcaactgactcaagaacaccgccaggcacgtcagcagcctcaaccgccacaacgccgtcagcataccctccaaatgcagcagtagcataccctacaccatcagcaccttcaccgactgctccaaggtgaactaaaacctagaccacgcgctactacgggcggctgatcgatca

SEQ ID NO: 92610 - DNA, 525 bp, Zea mays
  unsure (1)..(525): unsure at all n locations
tagaggccataggttgactagcttaaagatagtactgcaccaccatagcagcctacttctgcaggaccagcgcatactaccggtacaggaaacactgtgggtcctgcagactccccaccatctacaccatccacggatactgctgaggatggacggggaatgggtggtaatatgcgccacgttccaaagaacttaatgatttatggtgcggatggaactgggcttgcctcctcttcaaatcaaatggatgacctggagcagtttggtgatgtgggctctttggatgataatgttgaatccttcttatccaatgatgatggagatcccagggatatttttgctgcactcaaaagaagtcctgcagaacctaacccagccgcttcgaaaggttttactttcagtgaagtcaactgttggcgcacaagcaacagcaaaattgtttgctgacacttcgtttcagatggcaagattttggctagtgcaagaccatgaaagaatggctgactttggaacatgcaaaatttn

SEQ ID NO: 92611 - DNA, 542 bp, Zea mays
  unsure (1)..(542): unsure at all n locations
gttagttaagggtcnagtcaccgataagantgctcgcgcaacagctccggaattcccgggtcgacccacgcgtacgcccacgcgtccgctcgcactcgcccaacctcgaatgccaagctagcaagagaggcctcgatcgcggaagccagcggcaaagcaagcacgcccgtgtctacaggcagctctttccatatggcgcccaagaggagcagcgaggagcgcgcggcggcggagcaggagcagccgaggctccgcggcgtgcggaagcggccgtggggcaggtacgcggcggagatccgggaccccgtgaggaaggcgcgcgtgtggctcggcaccttcgacacgcccgagcaggccgctcgtgcctacgacgccgccgcgcgcaggctccgcggtccgagcgccaccaccaactaccccggcgacgtcgttcgagaagcgccgtgcacggccccggctctggctgcgagcgcgagcggcagcaccgagtcgtcgtcgtcgtcgtcgtcaagggacgacggccaacccgcaccgncgctgct

SEQ ID NO: 92612 - DNA, 552 bp, Zea mays
  unsure (1)..(552): unsure at all n locations
tgagttaggtgaggcgctancgttcatggttacgcctcactancgcactngacgtaccggtccggaattcccgggtcgaccgacgcgtccgcggccaatctagcatccgcgcgcggggtctgagagcagagcggcagggcgccatggcggcgtgggtggcgctgagcagcgggcaccggatgccggcggtggggctgggcgtgtggcggatggagaaggcggacatccgcgggctcatccacgcagcgctccgcgtcggctaccgccacctggactgcgccgctgactaccagaacgaagctgaagttggtgacgcgcttgcagaggcattccagaccggactcgtcaagcgggaggacctgttcatcacaaccaagctgtggaactcagaccatgggcatgtgcttgaagcctgcaaggacagcctgaagaagctgcagctagactatctcgacctctacctcatccacttcccggtagccactcggcacaccggagtcggcacgacttctagcgctttgggtgacgatggcgtgctggacatcgacaccn

SEQ ID NO: 92613 - DNA, 540 bp, Zea mays
  unsure (1)..(540): unsure at all n locations
agtgggagggttgtccctgaccgttcgctccgcatngacgtaccggtccggaattcccgggtcgacccacgcgtccgcacacacacacagacaagtggtttccaaagccaagtgtgtgtactagcaaccagctaggtcgggcggcagcaggcagccatcatgtcggaggagaagcaccaccacttcttcaaccaccacaagaaggacgaggagcagcccgccggcgagtacgggtactccgagaccgaggtggtcaccgccaccggcgagggcgagtacgagaggtacaagaaggaggagaaggagcacaagcacaagcagcacctcggcgaggccggcgccatcgccgccggcgccttcgcactctacgagaagcacgaggcgaagaaggaccccgagcacgcgcacaggcacaagatcacggaggaggtcgctgccgcggcggccgtcggcgccggcggctacgtattccacgagcaccacgagaagaagaaggaccacaaggacgccgaggaggccagcggcgagaagaagcaccac

SEQ ID NO: 92614 - DNA, 547 bp, Zea mays
  unsure (1)..(547): unsure at all n locations
gagttagaggaggctcncgtcctacgtccgttcgctaccgctatgacgtaccggtccggaattcccgggtcgacccacgcgtccgatggggaatgcgttgtttaaactcaacgaatggaaggaggtacttgagtgcaaggttgaggtggagacagaaatgttatccccatttgacttggcggctagttggagagctcatcaggagtattttcagccttcaagggtgcgagggactcacgatgtcactatcaaccctgggttagaaggcagggccaagaatggcttcgcttctggtttgaagcttgatttagacaagtatgtagttccaacaccaaacatgggctcaggtgttgtttatgcagctagtttgactgaaaatccacgctcattattgcaaactgcgagttcctcatacaatgataccacaaaggacattttgcacaactcaactaaaggcgattcatccttgaatcactatgttaacactatgaagagcacaattggagggcatgcatcgtcactggaagaacaacaggcaatgtttgtn

SEQ ID NO: 92615 - DNA, 531 bp, Zea mays
  unsure (1)..(531): unsure at all n locations
naggagggccatgaggtctgccctagctctaaagataccgtcgtaccggcgcggaattcccgggtcgacccacgcgtcggcctcaaggtgcttgatctccacaggaaccagcttgatgggggcattccagtcacacttgggcagctcacaaaccttgttctggtagacctctcggagaatcaactgactggggcaatacctccacagcttgggaacctctctaacctgacacatttcaacatgtccttcaataacctatctggcatgattcctcctgagccagtcttgcagaaatttgattacactgcctacatgggcaaccagtttctatgtggctctccattgcccaataactgtgggaccgggatgaagcaccgcaaacgagtgggtgtgcctgtcataatcgccattgttgctgcagccctcatacttattggaatatgcattgtttgtgctttaaacatcaaggcttatacgcgtaagagcacagatgaggacatgaaggaagaagaagaggttcttgtgtctgaa

SEQ ID NO: 92616 - DNA, 539 bp, Zea mays
  unsure (1)..(539): unsure at all n locations
tatgatgccataagtttatgcctttttntcagttaggtcngattcaccgtactctactttactcgacccactcgatggacacgaactttctgtactaacaaccaactaattcgggcttcancaatcagccatcatctcacgtganatgctaccactacttatgcaaccaccacaataacaactaatatcatcccttctaccaataccattactcctacacctatttcctcacctacaccttcaattactattaccataagtacaataatcatcataatgatcacaatcacaaacaacacctcttccaagccatcaccatctcctccagctccttctcactctacnagaagcactaagcgaataaagacccctagcacactcacaagcacaagatcactgaagatgtctctgccacggcggccgtcgactcctactgctacgtattccactagcaccacgagaaaaacaatgaccacaatgactcctatgaagccaacgactagaaaaagcaccaccacctcttctgcttaccctaatac

SEQ ID NO: 92617 - DNA, 545 bp, Zea mays
  unsure (1)..(545): unsure at all n locations
gggggaggagtcgtcagttcctagctccgatncgtacccgcatgcacgtccggaattcccgggtcgacccacgcgtgcgctccagcgtcgtccgccgccgccgaaggacggaaggagaagagggtacggccgtctccttgcgggcatgggccacgagaagaagctgtccaacccgatgcgggagatcaaggtgcagaagctcgtcctcaatatctccgtcagggagagcggcgaccgtctcacccgcgccgcaaaggtgctcgagcagctcagcaggcagacccccgtcttctccaaggcgaggtacacggtgcggtcgttcggcatccggcgtaacgagacgatcgcctgctacgtcacggtgaggggctgagaaggccatgcaactgcttgagagccgcctaaaggtcaaggagtaccagctgctcaggaggaacttctgcgacaccgggtgctttggtttctgtatccaggagcacatcgaacttggtttcgaggacggaccgtcaacacgcatctacggaatggactactacgtaccgctg

SEQ ID NO: 92618 - DNA, 549 bp, Zea mays
  unsure (1)..(549): unsure at all n locations
agtatttggaaggctcntcgncatgcccacgttcggtacggctacgacgtaccggtctggaattcccgggtcgacccacgcgtccggcagatcttcgtgaagacacttactggcaagacgatcacccttgaggtggagtccttagacaggattgacaacgtcaaggccaagatccaggacaaggagggcattccaccggaccagcatcggctgatctttgacggcaagcaactggaggatggtcgcaccttgcctgactactacattcagaaggagagcaccctccacctggtgctcctactcacgggtgttatgcaaatttttgtgaagacattgactggcaagaccattaacttgcaggtggagtcgtctgacacaatcgataatgtcaaagcctagattcaggacatgcagggcattcacatcggaccagcagcgcctgatctttgctggcaagcatctggaggatagtcgtaccctattcgactacaacatccatactgagagcacaagtcacttggtgctgactgtgctaatagagatgcattt

SEQ ID NO: 92619 - DNA, 532 bp, Zea mays
gaggagcacatagagttgtcccatgccttcagctcaggtcgtaccggcactgaattctcgggtcgacccacgcgtggggactagttctagatcgcgagcggaaatcgagcgggcgaattgaatccggtcccgttcggggtcggccggcgagcgagcggggtccggccggctgggcattggttcgtgctcgctcgatcgatcagaaaatggctcatcgtgtgaacaacgagtacgactacctcttcaagatcgtgctcatcggcgactccggcgtctgcaagtccaacatcctctcgcgattcacgcgcaacgagttctgcctcgagtccaagtcaaccatcggcgtcgagttcgctacccgcaacctgcatatagaccggaagactgtcaaggcacagatatgggacacggcaaggcaggagaggtaccgcgccatcaccagcgcctactacaggggcgcggtcggagcgcttctagtctacgacatcacaaagaagcaaagcttcgacagcgtccagaggtggctccgata

SEQ ID NO: 92620 - DNA, 551 bp, Zea mays
  unsure (1)..(551): unsure at all n locations
tgaggtnagaaagtggtcntgactcagtntaagaatgcttagctattcacttacggaatttccgggtcggcccaggcgtacgcgccctcgtcggcatctcgctgctggagatgctgttcagccactccttcgacgaggtgtacctggcggagctctacaccaaggagtggacatctgacgccaaggctcagtaggacgtgcaagcggatcggctcgcggatgaccgagatcgacaagcgcgtcagtcacacatgaacgcgtaccctcggctaaagaaccgagacggaccagccgagttgccgtacacgctgctctaccccaacacctgcgacaccaaaggcgacgccgacggcatcaccgccaagggcattccaaacagcatatgcatttgagttctgtctgagctgaggacgtacggtcgtcgcactagttgctagcgtttgcccgttccgttccgtgaagcgtggttctcacttgcgcggtattgagcaaatagtccagtactccttatcgaagttggtacgttaggactgttgtaataatgctctatt

SEQ ID NO: 92621 - DNA, 538 bp, Zea mays
  unsure (1)..(538): unsure at all n locations
nggagggagggtctgatcctagctagatcgctcggcaacacttccggaattcccgggctatagttgaaaagttttctcaagagaagttatggtaccttgaccagatgttcaatgttttatctctggctggaaatcatgtgaaggatgacatatgtcatgcccttattgttgtactaagtaatacatcagagcttcaaggatattcagtgaggtcattgtataaggccttacaagaatatggtaaacagggaagtttactaagagtagctgtttggtgcattggtgaatatggtgaaatgctggtgaacaatgttggcatgctggatggggaggagccaattaaggtaacagaatcagatgctgtggatgctgtagaggtcgctcttaaccgctactcagcagatatgacaactggagcaatgtgtctggttgctcttctgaaactctcctgacgatttcctttgacatcagagaggataaaacaaatagttgcccagaataaaaggactgttgtcctttgactacagcaaagatcaat

SEQ ID NO: 92622 - DNA, 547 bp, Zea mays
  unsure (1)..(547): unsure at all n locations
gaggtgagggagtggtctggccttagtttcgattcgctacgcatgacttaccggncttgaattcccgggtcgacccacgcgtccgtacaactcaaccatggaaggcctcagccacttcagtatgctgtcaacgcagctttccgtgcttgtctatacagcgactatcttgaagctgcagacacgcctgggtggtactgcggacctaacttctacaccacagaagtcctccgcaagtttgccaggtcacagctcgactacatccttggcaagaacccattgaagatgagctacgttgtgggtttcggaaacaagtacccgaagcgccctcatcacagaggcgcgtcgatacctcacaacggcgtcaagtatgggtgcaaaggaggttacaagtggagggacacaaagaaggcaaaccctaacatccttgtcggagcaatggtggctggccccgacaggcgcgatggctacaaagatgtccgcacgaactacaactacacggagcctactctcgcagcgaatgctggtctggttgcagcgctgatctcta

SEQ ID NO: 92623 - DNA, 551 bp, Zea mays
agttaagtagagggtctgtgctccgtaccgtttcgctgcagcattgacgtaccggtcttgaattcccgggtcgacccacgcgtccgcccgaccgatcctcgcctgctgcagccatggcgacctccgcggcgctctccaccgccggcaatgccacccagctctgccggtcccgcgcttcgctgggcaagccggtgaaggggcttggcttgagcataggccgcgagcgcgcccagcggagcattgcgtgccaggcggcgagcagcatctccgccgaccgcgtccgcgacatggagaagcggaagctgatgaacctcctgctcctcggcgccatctcgttgcccaccgtcggcatggtcgtcccctacggcgccttcttcgtccctgccggctccggaaacgccggcggcggtacctacgcgaaggacaagctgggcaacgacatcacggtggaggcgtggctcaacacgcacggtcccaacgaccgcacgctcgcgcaggggctcaagggtgaccccacgtacctggtggtggagcaggacaagacgctggcg

SEQ ID NO: 92624 - DNA, 540 bp, Zea mays
  unsure (1)..(540): unsure at all n locations
tagtatacttagagtctatgnttttnttttcagttcccttcgtatttacgtactccactctgaattgccgactcacggctactatagcattgattacacctcactcaattttagttatctatacaagagactttacagtgcgagacctgtcctcatcacatcgtggttcaagcatanactacaatgtctacatcgtgccaaattttatgatggcaaatatcacattgcttctaacccttatccacacttatctaacaaagtacttctcattcaaagctgtttattacaactatattttcatctaaagtaatatttacaatttccctctcccttatatttaggctctaaactcccctttaatagctctattacataaacacaaaacaagcaacttcttcatttatttccaatattacaatgaacctgatccatggacacatcaatgattaaaccttactatgttacaactacagaacttatatcaaaatatctttttaagttattattacactctatttcatttgacattcactttgctct

SEQ ID NO: 92625 - DNA, 536 bp, Zea mays
  unsure (1)..(536): unsure at all n locations
gaggagcncgtagagtctgactcagtcttaggggggagtgacggattgcttctgaattctcgggtcgacccacgcgtgggccccgacaagggcggtgaccccgagaagtttaaggagctcgcacaagcctatgaggtttggggtgatgcagagaaacgtgagatttatgatcagtatggtgaagatgcccttaaggaaggaatgggcggtggaggatcccatgttgatccatttgacatcttctcatcattttttggaccctcttttggaggaggtggtggaagcagcaggggaagaaggcaaaggaggggagaagatgtagtccacccacttaaagtttctctggaagatctttacaatggcaccttaaagaagctctctctttcgcgcaatgtcatctgctccaagtgcaagggcaagggctcgaagtctggtgcctcaatgaggtgccctggttgccagggctcangcatgaaagtcactattcgtcagctgggcccttccatgatacagcagatgcaacagccctgcaatgn

SEQ ID NO: 92626 - DNA, 538 bp, Zea mays
  unsure (1)..(538): unsure at all n locations
agtagtgcgtcttganttcgaccgcnagtcacgcaaccctctcgaattaccggtccacctacgccgacgctccaggtccatctttcccttcttactcctttgttttcaacccgttcacccacctgtcacatgctcagcgtaaccgcccaccatggcctgcctcaccgacctcgtcaacctcaacctctctgacaccacataaaagatcatcgcccagtacatatggatcggtggatctggcatggatctcatgagcaaagccaggaccctcccggacccgctgaccgatcccagcaagctgcccaagtgtaactacgacggctccagcaccggccagtcccccggcgaggacagcgacgtcatcctgtacccgcatgccatcttcaaggacccattcaggatggtcaacaacatccttgtcatgtgcgattgctacaccccagctggcgagccaattcccaccaacaagaggtacaactgccgccaaaatcttcaacaaccttgaagtcgctgccgaaaaacccctgtattgtatcca

SEQ ID NO: 92627 - DNA, 548 bp, Zea mays
  unsure (1)..(548): unsure at all n locations
agtcgggagtcgtcagttcctcgcaccgctncgtanccgcatngacgtaccggtcctgaattcccgggtcgaccgacgcgtccggccacatcctcccctccttcctccttgggttcccagcccgtgcgcccgcctgtcgcaggcgcagcgcagccgccggccatggcctgcctcaccgacctcgtcaacctcaacctctcggacaccacagagaagatcatcgccgagtacatatggatcggtggatctggcatggatctcaggagcaaagccaggaccctcccgggcccggtgaccgatcccagcaagctgcccaagtggaactacgacggctccagcaccggccaggcccccggcgaggacagcgaggtcatcctgtacccgcaggccatcttcaaggacccattcaggaggggcaacaacatccttgtcatgtgcgattgctacaccccagctggcgagccaattcccaccaacaagaggtacagcgccgncaagatcttcagcagccctgaggtcgctgccgaggagccctggtatggtatcan

SEQ ID NO: 92628 - DNA, 530 bp, Zea mays
taggatgccgtgagtctagtccagcactctagctacctacgtaccggctctgaattcccgggtcgacccacgcgtcggaccatgcgccgtccgtggaggcactcgggcccagggtccgccgtcgcggcgcgccacggcggcgcggagctatgcctccgcggggtcggggacctcctgccgcgacgcttcgcccgccgcgcggccggttccgaggaccttgtaatgcggctccagattcaccggaagcttgacaggcacacgggctgcgtcaacacaatgggcttcaatgaggtcggtgacaccctcatatcggggtctgatgatcagaaagtgatgctgatggactgggacactggcaccgtcaaattagagtttcattcaagacatggcggcaatgtgttccaggcacggttcatgccctgctcagacgatcggaccattgtcacttgtgctgctgatggcaaagagaggcttgccaagatacacgatgctcgaaacgtgtccacaacattgcttggtgaacatgaggg

SEQ ID NO: 92629 - DNA, 528 bp, Zea mays
  unsure (1)..(528): unsure at all n locations
naggaggccgtgtgtttgttctagcacacacgatatcgtcggaccggcccggaattcccgggtcgacccacgcgtccgcggacgcgtgggcggacgcgtgggcgaaggatcccgaagccgaagagaaccctaccgagggggcagagaatccgtaggcgcgcctcatacgattccgagatccgtgcctcttatcggcagccatgatgctgcgcgcggcgggcaggcgactcctcggcgtaggaggcggcgatccagcgcccgcggtcgctgctgctgtggcggcgagcaggagcagaggataccacgagcgggtggtggaccactacaacaacccgcgcaacgtggggtccttggacaaggacgacacggacgtcggaacggggatcgtcggcgcgccggcgtgcggggacgtcatgaagctgcagatccgcgtcgacgaggggtccggcaggatcgtcgacgcgcgcttcaagaccttcggctgcggctccgncatcgcgtcctactccgtcgctttcgaaatgggta

SEQ ID NO: 92630 - DNA, 535 bp, Zea mays
  unsure (1)..(535): unsure at all n locations
taggagccnatgggtctaatccagcnacttctagtccctccgactgacgtaccggcccggacggccagctcgggtggttcgacgagaacgaccagctgcagcaggtctccgtgcacgcgctcgccgccggcaagaagggcatcctgttcggcgtccccggcgccttcaccccgacctgcagcaaccagcatgtgccaggcttcatcacacaggctgagcagctcaaagccaagggtgtagacgagatcctgcttatcagcgttaacgaccccttcgtcatgaaggcgtgggcgaagacctaccccgagaacaagcacgtgaagttcctcgccgacggatctggagcgtacaccaaggcgctcgacctcgagctcgatctcacggacaaaggtctgggcgtgcgctcgaagaggttcgctctcctggccgacgacctcacggtcaccgtcgcaaacatcgaagaaggcgggcagttcacgatctctggcgctgaggagatcctgaaggcgctttanaagccgcagcaacgatcggn

SEQ ID NO: 92631 - DNA, 585 bp, Zea mays
  unsure (1)..(585): unsure at all n locations
gtgggggaagagggagagagttggggtggttttaagtcatgatncttgattgcactgacgtaccggtccggaattcccgggtcgacccacgcgtgcgatcattatgtagcattcatagataaaaagtgacgtggcaaaatccaaaacttgacagtacggaacaggatccaggacaaaacagaacccaaaatttgactcccgcagttcttagctataatatagatatcgcatttagacatgcacccgacgagtagagctctccactcaaaccatcctaagcctctactgtctcagttggggcctcgagcacaagacccttggtgggctttgccagcaggtcggtgtactgctggaacggggccatggagaacttggtctggctccagaattcaggagtgaggaagccgtaagtcttcatcaggcagtcgaaggttgccttgacgaagttgccaagggtcttaatggagccacgggatgaagtgaagacatgctcaatgccagcggactgcaacaccttctttggcacgcgccccggaaccattccaaaacccctgggaacctgcaacattcgcacaagtgccggac

SEQ ID NO: 92632 - DNA, 563 bp, Zea mays
  unsure (1)..(563): unsure at all n locations
aggtattaagatagcagtggttcgatttttgcaccgctncttattnctcatcncgtccggaattcccgggtcgaccgacgcgtacggggatccccgatggggatttatccccggggataacggagatggggaagaaatgtcccccggagcgttcgtggggatccgcgcggggaagttttttcatcgcggggactgggatgggtagccaaaacccgacggtgaattccccgttgccatctctacttgccagtcgagatggaataaaataaatgtcaggcgcacgtactgacgtgttattacgatatttctcccctacagataaatgctctgtttattccctgcctaacttatctaacttttctatttaaagttgaagttagttatttaattcgaacaactaatcttaaatgaaatatggtatagttagccacaaatcagacagacctaaaaactcggtcagcaaggtggccaatggtattattatttaaaaaacttgatcttgcgaatttacactggcccattggatattacaattgttaataagatggtctcacccatgttta

SEQ ID NO: 92633 - DNA, 572 bp, Zea mays
  unsure (1)..(572): unsure at all n locations
atgaggggagaggaagagagaaggaggggtctaatttagttacgagtgtgatctcatnctttccgattcccggtcgaggacgcggacgcgagtcaccttcaaagaatgcaatatggtgcatgtgcctcgtttcttgggttggtttgctggctcggctggaatgtcatagcaggtactacagcttggatcaagggggaaggtgttaagatctggttattggcaataatttacttcatatctggtgttcctggagcatatgttttgtggtatcgtcctctgtataatgcaatgaggactgatagtgcattgaagtttggattgttcttcttgctttacttgttccatattcttttctgcgtgtttgctgctgaggctcctcctgctgtatttgagggataatcattggcaggaattttgccagcaattgatcttatcagcgtgaatgctttgggtgggatattctactttgttggatttggattgctttgtctagaaatcgtgctcaacatttgggtcattccgccagtgtgcctgttcttccctggaaagtgaaaggcttgctagattaaact

SEQ ID NO: 92634 - DNA, 578 bp, Zea mays
  unsure (1)..(578): unsure at all n locations
gagaaaagagaagtatgagagtntgtgggtgttcgatttcacgtcagaacgttatngtactgnctgtactggnccggaattccgggggcgacggacgcgtacgcggacgcgtgggtttggctgctgctgagccatcatactttatcgcagaagaaccggaagaggacaacattcttgataccagaacatatgatgttagcataacgtatgacaagtactaccaaactccacgtgtctggctaactggatatgacgagtcaagaatgccattaatgcctgaacttgtgtttgaagacatcagccaagaccacgcacgaaaaacggtgactattgaggaccatcctcacttattggctgggaagcatgcatcagtgcacccatgcaaacatgcagctgtgatgaaaaagatcatcgacgttccaatgtcggggggagtggaaccagaagttgacaagtaccttttcatatttttgaaaatcatagcgacagtcataccgactattgaatacgattatacaattgaccttgaccttgggcatacaaggtgattaattagtggctttaaaccttgcacttgt

SEQ ID NO: 92635 - DNA, 538 bp, Zea mays
  unsure (1)..(538): unsure at all n locations
naggagtncacatagagtcgtgctgccgggttacaagcatgtgaagtactgaccgtatctgtctggaattcaccgatcgaccgactcaaacggctcgatcctaacttctctttcaaaaagggcatcgcccatgggcatggccacgcaagcctgcggcttcacgcacggcctgctggccgcacactgtgcgccggcggtgaaaccgcggcagctgagctcgcaactcgcgctgccgtcaacgtactaccgcgagccggcccctctccgcacgtccaccgacgacgctctggaggcgcctaaggagttcgtggccccgcagctggaccccagcacgccgtacccgatcttcggcggcagcacgggcggtctgctccgcaaggcgcacgtggaggagttctacgtcatcacgtggacgtcccccaaggagcaggtgttcgagatgcccaccggcggcgccgccatcatacgggacggccccaacctctttaagctggcgcgcaaagagcaatgcctggcgctctggaccaggttgagctac

SEQ ID NO: 92636 - DNA, 534 bp, Zea mays
  unsure (1)..(534): unsure at all n locations
naggagcacnttgagtgtgtgcctcngcttagcctagtattnactgacgtaccggtccggaattcccgggtcgaccgacgcgtacgcgcatctggaccatggtcgctggtggtggtgctagtgtcatgtatgctgatacagttggaggcttgggatatgcgtcagagcttggaaactatgcagagtatagtggtgctcctaatgaggaggaggttctgaattattctagagttgttcttgattgtgcaactgctgatcctgatggccgcaagagagcccttctcattggaggtggcatagctaacttcactgatgttgctaccacattcaatggcatcatccgagccttaagggagaaggaatccaagttgaaggcttcaagaatgcacatttatgtccgccgaggtggtccaaattaccaatctggactggctaaaatgcgtaagcttggtgcagaactcggcgttccaattgaggtgtatgggccagaagcgactatgactggaatctgcaaacaagcaattgaatgcatcn

SEQ ID NO: 92637 - DNA, 587 bp, Zea mays
  unsure (1)..(587): unsure at all n locations
atgtgggttgataagagattntagagggatgcagtgattctgattctagcgacgcgatgtagttgtattcnctttctgaattcccgggtcgacggacgcggacgctttccggttccgccgcctgatcgaagggaacgagcaagggatagccatggcgagcgagcgcacgggggtnagcgatgctgagcatcaccagaagcagagcctgatggacaaggctaaggggttcgtcgcggagaagatcgcgcacatccccaagcccgatgccacgctggacggcgtgacattcaagggcctgagccgggagtgcatcacgctgcacagcagcgtgaacgtgtccaacccctacgaccaccggctccccatctgcgaggtgacctacacgctccggtgctccggcaaggaggtggcgtccggcaccatgccggaccccggctggatcgcctgcagctgctccaccgcgctggagatccccggcaaggtgccctacgacttnctcggctccctcgtcaaggacgttcgccggtactgggacattcactatcaacttccagtcggcttaccgttgaccttcccaattgagggac

SEQ ID NO: 92638 - DNA, 573 bp, Zea mays
  unsure (1)..(573): unsure at all n locations
gaggattatnaatgagcnnaatgaggtgattcangttttagcgaccgactgtantgctctacccgtctggaattcccgggtcgaccgacgcgtacgcaaaaaagtttgcttctatgctggtgagctttatgagcaagtgttaccctggtgaagatggtactgcaattgcacgtggggtcctaatgtatctatctcaagggaacctgagagatgcaaatttacttatggatgagatgaaggaacaactaaaatctgttaactcggattttccgaaaacagatttgattcagttcatcatgtatcttttaccaacgcttgagagagatgcttatcctctttttaggacacttcgacagaagtataagacaagcacagatcgtgacactgtgtttcaggagttactggacgaaatagctgcaaaattttacaatatacaacgccagaaccctttagaaggacttttcagcgaaatgttcaagatataatgcatgagaaaagaattttatgtccatgctgtcatcaaaaccattggcttaaatatacaagttcttccaccggagcttatgatccata

SEQ ID NO: 92639 - DNA, 535 bp, Zea mays
  unsure (1)..(535): unsure at all n locations
gaggaggccatagagtgtgtgcctgcncttagcatagtaagcattgctctaccggtccggaattcccgggtcgaccgacgcgtacggtggaggagcagccatggcttcatcgggggccgccgcggcgagcacattcctgggcaccgggctggcggacccggggcgacagaacgggcgcatcgtggcccggttcgggttcgggttgggcggcaaggcgaagcctgctccgaagaaggtggcgaagacatcgacctcctctgaccggccgctgtggttccccggcgccgtggcgcccgactacctggacggctcgctggtcggcgactacgggttcgacccgttcggtctcgggaagcccgtggagtacctgcagttcgagttggactcgctggaccagaacctggccaagaatgaggccggcggcatcatcggcacccggttcgagtcctccgaagtcaagtccaccccgttgcagccctacagcgaagtgttcggccttcagcggttccgcgagtgcgagctcatccacggccgg

SEQ ID NO: 92640 - DNA, 565 bp, Zea mays
  unsure (1)..(565): unsure at all n locations
atgttaaagagatggggggggtgaatgtctgttacgcctgtcatcgcatgcccgtccggaattcccgggtcgaccgacacggacgtgctcagcagaaaaagctcaaccttcctgtccgtcccacaaccacaattggttcattccctgatacggtngaactgangaggggtcgacgtgaatacaaggcaaagaagatcaccgaggacgaatacatcagtgccatcaaggaagaaatcagcaaggttgtcaagatccaagaggagcttgacattgatgtgcttgtgcatggagagccagagagaaatgacatggttgagtacttcggtgagcaattatctggttttgcgttcactgccaacggatgggtgcaatcctattgatcacgctgtggtaagccacccattatctatggtgatgtcagtcgggcgaaccccatgactggtttctggtccaagatggcacagagcatgacccctcgttccatggaaggaattgtgactgggtcggtcacaattctgaacttggcattcgttaaggacgatccagcttaggttggaaacatgct

SEQ ID NO: 92641 - DNA, 571 bp, Zea mays
  unsure (1)..(571): unsure at all n locations
gaggtatatatgtaggtnaggagagggattgngtttacgcattaagaancgtaattgtantgactgttctgaattcccggttcgacggacacggacgatctcaggtttggggggaaaaggcctggctggtcgcaaaccgctctctgttgatttgggagtttggaggcgctcgagtggtcaggtaaaccatagtttactgaccaatggctcgtactaagcaaactgctcgcaagtccactggagggaaggctcctaggaagcaacttgccaccaaggctgctcgtaagtctgcacccacaactgggggagtaaagaagcctcatcgttaccgccctggaactgttgctcttcgtgaaatccgcaagtatcataagagcactgacctgctcataaggaagctttcgttccaaaggcttgtcaaggagattgcccaggatttcaagactgatctttcgttccagagccatgcagtgcttgaacttccagaagctgcngatgcttaccttgttggtctatttcaggccctaatctttgcccattcattgcaacgcttaacatcattcccaagccc

SEQ ID NO: 92642 - DNA, 543 bp, Zea mays
  unsure (1)..(543): unsure at all n locations
gaggaggcncnttaagagtgtggcctcagtttaaggagggaggtatcttactgactcgtaccggnctcggaatgaccggatcgacggacgcgtacgcctacacctccagaccaaactatagatggataatgagctgaaggattttcttggggtctggaaggtcatctggagacctcgtggactttatggcgacgaggatacaaacggccacgttgacaacatgtgctgcttcatcaaacccggtgtgatcctgctgtcgtggaccgacgacgagaaggattatcagtacgaacggtcggtcgaggcgctgtctgttctctcccagtccgtcgacgcgaaagggcggcagctccaagtggtgaagatccacgtccccgggcctctgtacatgacagaggaagaggcacagggcgttgtttcatcgggacattctgtgccgaggccagcgggcacgagattggccgactcgtacgtcaacttctacatcgccaatggtgggatcatagcgccttccttcggcgacaggtgggacgaggaggcgtn

SEQ ID NO: 92643 - DNA, 581 bp, Zea mays
  unsure (1)..(581): unsure at all n locations
atagtggataaagatgattaagaganatgccagaaggtctgattctagcgtaagggactcaattgtcattcncttccggaattcccggcctgggcctgcaagttggtttgaaaccagcaatgaaggttttaggtgtgggctgtggaataggtggaccactgatagggattgcaagatttggctgaacttcagttaccggattgaataacaacgaataccagataaccaatggaaaggagctcaaccgtttaacaggaattagtggaacatgtgattttgtcaaggcggacttcatgaagatgccgttcgatgacaacacttttgatgctgtttacgccattgaagcaacatgtcatgcacctgatccagttggttgctacaaggagatatatcgtgtgtagaagcctgaccagtgctttgccgtgtacgagtggtgcattacggatcactatgatcctaacaatgcaacccacaaaaggatcaaggatgaaatttaacttggccaatggctggcatatattaaaaacactccgaaattcttcattcataaaagacgccagggttgacggttgttggaaaaa

SEQ ID NO: 92644 - DNA, 569 bp, Zea mays
  unsure (1)..(569): unsure at all n locations
agagttaggagggggagaaggtgngtttatgataagaacgtaactgactgactgttccggnttcccgnntcgacggacncgtacgagaaggaggagaaggccgagaagaaagatgagaagaagctggtggcacctggatgcgtggggcatgctcttttatcagagcaaaagctccgagctgtacttgagaatgctcgccagatactaaagatcactgatgaatttggatcctttgatcggtactgctggggttatctgaaccacaagcctatagtaagcaagttccgctatccaagacaagttcctgtgaagagccccaaggcagatataatcagcaaagacatgatgagaagggggttccgaggtgtgggcccgactgtcatatattccttcatgcaagctgcggagctgacaaatgatcacctagtcagttgcttccggttcgagcattggaaagccgtttcaactctttgcgcatgcgaacattacagggcaaaacacgaaagggggatcttgaaaaatattgagtgacaaccaaagatgatctaccaggagggaattcgaaacct

SEQ ID NO: 92645 - DNA, 572 bp, Zea mays
  unsure (1)..(572): unsure at all n locations
gatgttntaaatagacgggaggaggttctgttttagctcaagatcttagtngtactgncgtnccgaactccaattccggggcgacgcacgcgtccgggaagcaggagcttatcacatggtctgagttcctggatagaatgtcgtcaactgggtgtcgatcaaacttgacggatctggctcagcatccattgtttgagcagataaaagagctcagtgaagacataattgttcccgaatactgttacgctggtggaggtgaactccaatcacttaatgcttggtttggtccagagggtacagtgacaccattgcaccatgatccgcatcacaacatcttagctcaagtattgggcaggaagtatattagactctatcctgctttcatagctgaggacttgtatccacacacagagactatgttaagcaataccagtcaagtagattgtgacaatattgatttgaaggaatttcccagggttgaaaacctggaattcattgactgtattttggaagaaggccaactgctttacaatcccacaaaattgttgcacttcatcagaacattcttcaac

SEQ ID NO: 92646 - DNA, 581 bp, Zea mays
  unsure (1)..(581): unsure at all n locations
attgggtgataaatatattagagtnatgacaaagctcgtgttacgataaagaattatactgattgncgtaccggttcggaattcccgggtcgaccgacgcgtacggcatatttctgttgaattatgcgattgtagcaggtagcgggaaaactaattgggggttggggtcacccactcgagtcggaggataaggttgtcataaccatacccgttgagcttgttgatggccttctcggcgtcctctctgtgaacaaagttcacaaacccaaaccccctgctcgaatcgcatatttctgttgaattatatcagtatgtttgtttgaattactggtacctgagtcatgaatttatcttgttggtaaaacctgttatgtgtggtttggttggtcgagaataactatactcacttcttttaaaaaaaaaataatttaaaaatgatgattaatatatatattgacaatatttaaaataaaaagggcggccgctttaaaggatccaagtctacgtacgcgtacatgctaagtcattacttttctttaagataacctaaattagatatactgccctgagtttacaaacga

SEQ ID NO: 92647 - DNA, 566 bp, Zea mays
  unsure (1)..(566): unsure at all n locations
atgttatagtagatgtggagggtctgattccgtatccgtcttagtcgtactancgtnttaattccnaattcggggcgacgcacgcatacgtactgctgttcgtggaacaaggggtcagcattgcacctgagtacctttcaacaggagaatggtctgagaaaactggtgtatttggctatggaattacacttttagagcttattacaggacagcgggccttcgatctagcttgccttgctaatgatgatgatgtcatgcttctagattgggtcaagggattgctcaaggagaagaaactggagagtctggtcgaccaagatctagaacacaactacgtcgacgttgaagtggaatctctggtacaagtcgcactactatgcactcagagcaacctcatggaacgccctaagatgtcagaggttgngaggatgctcgaangcgatggtctcgccgagagatgggaggagtggcagaaaagcggaatagtgccgcaagatgtctaactagtgccttatcgaactttggaatgaattcttgaatttgccgacaaccttcaccttaacagc

SEQ ID NO: 92648 - DNA, 537 bp, Zea mays
  unsure (1)..(537): unsure at all n locations
gaggagccagtagagttgtctcagctcataagaacagtattgcactgctctaccggtccggaattcccgggtcgaccgacgcgtccgcggacgcgtgggcgcacgcaagtgtcaagagacgaaacggtcgacatggctcgcgcgcagtgtgccgtagcgggggccgtggtggccgcggtgctgctgctggcagcggcggcgacgacctcggaggccgccatcacctgcgggcaggtgagctccgccatcgcgccctgcctctcctacgcccgcggcacggggtccggcccctccgcgtcctgctgtagcggcgtcaggaacctcaagagcgccgccagcaccgccggcgacaggcgcgccggctgcaactgcctcaagaacgccgccaggggcgtcagcggcctcaacgccggcaacgccggcagcatcccctccaagtgcggcgtcagcatcccctacaccatcagcacctgcaccgactgctccagggtgaactaaaacctagaccacgcgcgacgacggncgnctgatcgatcg

SEQ ID NO: 92649 - DNA, 589 bp, Zea mays
  unsure (1)..(589): unsure at all n locations
atgggggtttaagagatcatagagtaagggagggggtctgattttgtatccgtctgtaatcgcattcncgtccggaattcccgggtcgacggacacggacgaaaaccatcagatctagcagaactctcgcgaccgcatcggcgttggcggagcgcatgttggccggggatggcgcggagcgggtggaggaggagcgcggcggcgcgggtcgcctggcgcccggtcacggtttgcctgtggctcgcgctcgccgccggcgtactgacgctcgcccaggctaagaaggacctgacagaggttacccacaaggtctacttcgacatcgagatcgacggccagtccgcatgcctgattgtcatgtggctttgtgggaatactgttcctaagacgggatanaaactttcgagctctatgcacaagagaaaaaggggtttgcattaatggcaaaacccttcactacaagggaaagtatgttgcaacaaatcatccccagcttcatgcttccaagaaggtgactttacatctcagagactggaaggggtggtgaaatttatctaaaggttggaaatttgcgggtggagaacttcag

SEQ ID NO: 92650 - DNA, 573 bp, Zea mays
  unsure (1)..(573): unsure at all n locations
gagaatatatgaggatggagagggtgtcgtattgctaaagcacgtagactgcattgactgttccggatttccgnntcgacggactcgtacggatgagttcaaggtgcgtttggatgcagctttgactaaaatccctgaacgctcagatgcagacagtgcagaggccaaggaaggtgtaaaggcaacctggatggcagacggaacacagtggccaggaacatggtttgaccctgctgaaaaccataagaaagggcaacatgctggaattgtaaaggttatgttgaatcacccgggcgatgaacctaggtttggtggaccagcaagtgctgaaacccctctggacttcagcgcacgtgacgtgcggctcccaatgctcgtctatatcttccgtgagaagaggtcaagctatgaccaccaaaagaaagcaagcgccatgaaacgtcaactgcggatctctgcgcttttgactaaagcttccttcatcatcaagtttgatggtgacccactacgttaccacttacaagcctttcgagctgccaagtgcgtgatgcttgaacctgagggaaggcaaga

SEQ ID NO: 92651 - DNA, 539 bp, Zea mays
  unsure (1)..(539): unsure at all n locations
naggagcctcatgaagtctgatcctgcnacttcagcctcatgattgtattgctcgtaccggtccggaattcccggatcgaccgacgcgtacgatccattcaagccgccgaccttcatgctactcacgccaagtggacgctttgagagtcataggaagatttgttcgggcatatccaattaccaccctgatcactggcagccatcatggagtgtgcgcacagcgttggtggccttcattgcattcatgccaaccaaccctgctatgcattgggctcattggattacaaaaaggaagatagacggacactcggtataaaatcacctgaagcaccgtctaaatttgtgtactcagaacgacctaaactaattgatgagatccatgagcaaatgctcagtaaggctgctactgtcccccaaacgctaccaaatgtgccacacgaggagtctaacgaattacccgcatctgacccttctggcgagcatgcagacaacgtagatgaaggcgacaacacatatgattatgtatcagactcgtctag

SEQ ID NO: 92652 - DNA, 532 bp, Zea mays
  unsure (1)..(532): unsure at all n locations
gagagccntaggtttgtccagcactcagctcactacgnactgacgtaccggtccggaattcccgggtcgaccgacgcgtacggtgtgtactagcaaccagctagctcgggcggcagcaggcagccatcatgtcggaggagaggcaccaccacttcgggaaccaccacaagaaggacgaggagcagcccgccggcgagtacgggtactccgagaccgaggtggtcaccgccaccggcgagggcgagtacgagaggtacaagaaggaggagaaggagcacaagcacaagcagcacctcggcgaggccggcgccatcgccgccggcgccttcgcactctacgagaagcacgaggcgaagaaggaccccgagcacgcgcacaggcacaagatcacggaggaggtcgctgccgcggcggccgtcggcgccggcggctacgtattccacgagcaccacgagaagaagaaggaccacaaggacgccgaggaggccagcggcgagaagagcaccaccacctcttcggctgaccgtaatcn

SEQ ID NO: 92653 - DNA, 582 bp, Zea mays
  unsure (1)..(582): unsure at all n locations
gacaagtagaaaagagaattattgagtnaatgccaagcgtctgcatctcacgcagagacgtaattgcatacncgtccggaattcccggntcgaccgacgcggacgccaagatccaggacaaggaangtatccggccggaccagcagcgactaatctttgcggngaggcaggtcgaaaacggccgcgccttggccgactacaacatccagaaggagtccacccttcaccatgttcttcgccttcgcggtggcatcattgaaccttccctacaggcgctcgccacgcagtacaaccaggacaagatgatctgccgcaagtgctatgcacggctgcaccccagggctgttaactgccgcaagaagaagtgtggccacagcaaccagctgaaggcagagaagaagatcaagaactgaagcttgccaaatcggtgccttgcatggagtgcgtcaacaagaacaaagttcaaaggctttggaactgcataggctgcttcaacgtttttcacttctaaactcggtggtcctggtcaagggcttaacatgacctaaatcgtttcagaatctaataatattagtactaaaa

SEQ ID NO: 92654 - DNA, 565 bp, Zea mays
  unsure (1)..(565): unsure at all n locations
ataatattatggggccaaggtctgacacgaaccactcgaatcgnactgncgcactgaattcccggttcgacggacacggccgctgggcaatccacaaacagcttacgcgcataagccttatcctgaccgtactcagtccttggccatgtcatacccatatgggggatccatactactgtagcgctgtggcagcagcttatggtacgtatgctatcatgcacactcagctggttggcatggtctcgtactctcgagtgccaatgtagatcgagccatacgctgaagagcccatctatgtcaactcgaagcagtaccacgctattatccggaggagacatctatgtgcaaagctagacgcctataacaagctcgttaagagccgcaagccgtatctacacgagtattggaaactgcacgctattgatagagctacgggaacatgcaggcgtttactgaacacgaaacaattaccctaagacctcagcagtatcgagttcttggacaactcactgcgtccccgggaacagcatctgaggactatgtacgaacattgaccaaccttgcc

SEQ ID NO: 92655 - DNA, 534 bp, Zea mays
  unsure (1)..(534): unsure at all n locations
naggagacataggtctgacttagcttaaaagatagtactgactgctctaccggtccggaattcccggagaaacggctactatggaggagattccacctcgctcaaccttaagcagctctggaagaggtttagaggggaagacaggcccccagcacatcgaggtgcaagcagagactacaatgtggacatggtgccaaagtttatgatggcaaatgggacattggttcgaaccctcatccacactgatgtgacaaagtacttgtcattcaaagctgttgatgggagctatgttttcagcaaagggaagatttacaaggtccctgccactgatatggaggctctgaagtcccctttgatgggtctattcgagaagcgcagagcaaggaacttcttcatttatgtccaagattacaatgaagctgatccaaggacacatcaaggattagaccttactagggtgacaactagagaacttatagcaaaatatggtttaagtgatgatacagtggatttcattggacatgcacttgctcn

SEQ ID NO: 92656 - DNA, 583 bp, Zea mays
  unsure (1)..(583): unsure at all n locations
tgtagtaaataaattatgatataaggaatgggaggcttgnattatgatntcagctgactccgcactgncgtaccggncctgaattcccggggcgtcggacnctacctccctccctctcccctctctccggcacaggcaatttagccctcgattcgaccccgagtcttgcgcccactaccgggattgcctgcgccaagcgcggatctgaacgctgcgatccaagtagtcgctcgaatccgccatgaaagaggccaaatccaatggcgccgacaaggccgatgccaagctggcggcgaagagcaaggtggcagacaagcccgccaagggcaagaaggggaaggacggcaaggaccccaacaagcctaatagggctcccagcgctttcttcgagttcattgatgaatttcacaaggagttcaaggagaaaaaccctaagaacaagtctatcactacagatgtaaaagcttcttgctaccagtggaaaatcctgaaccagtccgaccaagcttcctaattaaccacaggctacaagctcaaactaaaatacaacaaagacattataagccaccacaaagccaaaagc

SEQ ID NO: 92657 - DNA, 540 bp, Zea mays
  unsure (1)..(540): unsure at all n locations
gaggatgccgtagagtcttgtccatgcncttcagtctacctacgtactgactgtaccggtccggaattcccgggctgtcgagtacaagaacattagtttcactgtttgggatgtcggtggtcaggacaagatccggcccctggggaggcagtacttccagaacaggccaagcctcatttttgttgtagacagcaacgacagagagcgtgttgttgaggccagagatgagctccatcggatgctgaatgaggacgagctccatgatgctgtgcttttggtgtttgcaaacaagcaagatctgcctaatgccatgaacgctgctgaaatcaccgataagcttggcctgcactccctgcgccagcggcactggtacatccagagcacatgtgctacctctggtgagggtttgtatgacgggcttgactggctttcgaacaacatcgctaacaaggctcgaagcatctaggcatggcttcaatcagtggaagcaaactgcctctaccattacagctatgaagtatatagtcgtgactgtgtcag

SEQ ID NO: 92658 - DNA, 538 bp, Zea mays
  unsure (1)..(538): unsure at all n locations
gaggagcncatagagtctgatttatgatctaggaggaagtacgtattgctctaccggtccggaattcccgggtcgaccgacgcgtccgtgtccatgtttcaatatgttccatcccttgtgattattgacagatgggtggttgagaatcaggttggcaagaagacccttgctattgatgattgtgattccagacaatctgtctatgtgtatggatgcaaggattctgtccttcaagtaaacggcaaggttaacaatatcactgttgacaaatgcactaagtttggaattgtattcaaggatgttgtagcagcttttgagattgtcaactgcaatggcgttgaggtccaatgtcagggtacgtcaccgacaatatcaatcgacaacacatctggatgtcaattatacttaagcaaagattcgctgggagcttcaattacttctgccaaatctagcgaaatcaatgtgatggttccaagtggtggcgctgatggtgattgggtggagcatgcattgccctaacagtacatccatagtttcn

SEQ ID NO: 92659 - DNA, 566 bp, Zea mays
  unsure (1)..(566): unsure at all n locations
atgaaagagaacggccaggggtcagaggtcgagtccagcctgtagatgcaacacttccggaattcccgggtcgaccgactcggacgcccacgcgtccgccagactaccccctggctgcaggctcctgcaactgcaatgtcagcactgggnaggctctccggcaggggcgacagtgtctccggcctcatccgcctccgccgtcagatggcccccgcgctcgcggcgccgtcgcaccacgccgctgggacgttgaactgcgccgccttgcccgatgccgccccgctcgtctggggacgccagctccgcccgtcgctcctcctccccggcacactgctcccgtcgtcgtcacaaagcgccaggaggcacacgccacggcgagccgccgcagccgcataggaggccaagtctgggggtatcctggagaaagtccccgccctggtcactggcgtcttctttttatgggggactttcttaacgtaatattcaacaatctgaacatgaggactacaactactgccctatcaaaccttaggacctgaggcggtagtaaggggggaggatacttc

SEQ ID NO: 92660 - DNA, 568 bp, Zea mays
  unsure (1)..(568): unsure at all n locations
atgtaatagagtacgtgaggcctgattcatgattaacgttctcatcgcactgacgtaccggtctggaattcccaggtcgaccgacncntacantatggtccgttttcctagaggtaatgggtaatggaagactcttcaccttgatacggattgctactcatgaaggggtgaanctgttacccacataacccatatactcaacttagtctactatgcatcaaacaatgagcttgtgaggacacaaacccttattaagaagtccatgtgacaagttgatgctgacccattcaagcagtggtacctcactcactatggagttgacattaataggaataataaaacccctgcttcagataaggataattctgatggacgaaatantaatgcaacattttatgaaaccaaaaataataaccatgtcacgaagtaatcttaaaatctcaaagaaggacgtaccacttacccacacattcaagaacaaatttgctatatgacagtttcttgcattccttattttccctccttatacaatttgatcaatctgaggagtcccatcttatagttaaaa

SEQ ID NO: 92661 - DNA, 570 bp, Zea mays
gtgggttaatggggtagtggagggctgattcatgatttagcctctcatcgcactgccgtaccggtccggaattcccgggtcgacgcacgcgtacgacggcggcggcggatcccagtgcggccactagacacgcccgcaccacggcggcgggggcggcgccccgactgtgaggcagcagacgtacaggatctactgcaaggctggagaggaccagtacagcctcgcctcccgcgactgcaaggtctgcctagtgcgcacggaccgtgatgacgacgcgcagcactggatcaaggacatgaagtacagcaccagggtgaaggatgaggaaggctaccctgccatcgtcctcgtcaacaaagccactggagaggctctcaagcattcccttggccagttacaccctgttcttctgacccgtcataatccatacttcctggacgagtctgtcctgtggacagaaagcaaggacctttgggaatggttccgcttgattaagaatggtcacaacatctaactgaactttgaagctttacattgagacacaggccattgtggtgtgcgccaacggac

SEQ ID NO: 92662 - DNA, 532 bp, Zea mays
  unsure (1)..(532): unsure at all n locations
tagaggcctggattgagctagctttccactccctcctaccggccnttactgcccggactgcccggatcgacggacgcgtccggagaaaggtgttcttcacaaatagtgggtcagaagcaaatgactcacaggttggactagtgtggtattataatagggcactgcgaacgccacacaagaacaaatttattgctcgctcaaaatcgtaccatggatcaaccttgattgcagctagtctatcaggtctgccagcgcttcatcagaagtttgatctaccagcaccttttgtcctgcacacagactgccctcactactggcgattccgtcttcctgatgagacagacgaacagttttgaactagacttgccaataattcggagaatcttgtcctcaaacaaggacctgaaacaattgctgctttcattgctgaacctgtgatggacgctggtggtgttatccttactccaaaaacctattttgagaagattcaggcagttctgaagaagtatgacatcttggtaattgcggatga

SEQ ID NO: 92663 - DNA, 534 bp, Zea mays
  unsure (1)..(534): unsure at all n locations
gagagccgtgttcnnccaactgatacctacnnntcatggattgtctttactncctcggctgacaggtccgacggacgcgtccggatggatactatatccatggccagcgggcaatcatcatgtgtgatgtaacctggaagcttgcttacaagaatgggggtacgtggcataaggacctgtgcagggtctgtgaaaacatccacattgcactctgcggtaataaggttcatgtgaagaacaggcaggccaaagccaagcaggttactttccacaggaagaagaatctgcagtactatgaaatttctgccaagagcaactacaactctgagaaacctttcctgtacctagcaaggaagctggctggtgatccgaaccttcactttgctgaagctgatgctcttaagcctacggaagttaccatcgacatggctatgcagcagcagcatgaagctgagcttgctgcagcagctgcacaacctcttgctgatgacgatgatgatctgaatgaatagaaaggatcattgaccttgaact

SEQ ID NO: 92664 - DNA, 539 bp, Zea mays
  unsure (1)..(539): unsure at all n locations
gaggggtttggagagctctaagctcaggcttcactcgttagcgctatacnacgtccggaattcccgggtcgacccacgcgtacgcgagaaacacttggagtggcgtactgaagcgcctttttatacattgggtcctttgacaactgatatggcacctggttatgatcacatcacttaaaccatcggtgctgccaacattacagctcttggcactgaactttactgctatgtaacaccaaaggaccaccttggttagcccaatcgtgatgatgtcaagactggtgtaatatgctacaaaatttctactcatgctgactattatgcaaacgtgtatccatatgcacatgctctacatgatgctctttgcatggcaagggatgagtgaagaatgctcgaccaacttgcttcatctatggatccatgaactgctatagactttcatgatgaagcattgccctctcatggtgccaaagttgcacatttctgctcaatgtgtggacccaagttctgttcaatgaaaattactgaggatatcaggn

SEQ ID NO: 92665 - DNA, 533 bp, Zea mays
  unsure (1)..(533): unsure at all n locations
gaggggnaaggagaggtgtggtcatgaaggcaggggtatagtaatacctctccggaattcccgggtcgacccacgcgtacgcatgcgttggtggttggagactacaaaggggcagttaaccagtgtcttgcttctaatcgtatggctgatgctttggttatagcccatgccggtggttctgctctctgggaaagcacaagaaaccattatctcaagaacagtatctcgccctacttaaaggttgtctctgctatggtgggcaatgatttaatgagttttgtgagtacctggccactaagttcatggaaggaaactcttgctctgctttgcacatttgcacagaaagaggagtggcatattttgtgtgacacacttgcgtctaagcttctgaatgtcggtgatacactagctgcgaccctctgttatatttgtgctggaaatattgacaaagcttgtgaaatatggtcccgcaccttgaaatctgaagatggtgggaagacttatgttgatcttctccaggatttgatggaaan

SEQ ID NO: 92666 - DNA, 489 bp, Zea mays
  unsure (1)..(489): unsure at all n locations
tagtaaagcgtgntgtttgaggccaactcccgacgcatgctatacccgtcgaattcccgggtcgacccacgcgtccgcaaagctcctgctcgctattccgaggatccttggactcgctgaatagctcccgttgcgactcgctgcagttaaagactgccgtggaacgtgcatattccctgaagcacagccgttcccacacaagaacttcgatgacgaggctgccttcctgaatcgcttattcggtggcctcaagtgcggcggcaatgcttatgtgagtggtgactctgccaagcccgggcagaagtggcacgtctactacaccgctgagcaccctgaggagcctgtcggcactctggagatgtgcatgactgggctggacaagaggaaagcttgtgtcttgctcaagaccactgctgatggttactcgctgagcgccaaggatatcaccaatctctctggtttctcggacatcatgccagagatggagag

SEQ ID NO: 92667 - DNA, 485 bp, Zea mays
  unsure (1)..(485): unsure at all n locations
nagtttagagtgggtctagcctgcattcctgtcctgcgctcatacctgttcggaattcccgggtcgacccacgcgtccggaatcattctctgctttcaatagcgtctataacaattcgggcctttttggaatttatgcagggactagcccagacttttcatcgaaggctgtggatttggcagcaggggaactcctggagattgcgacacctggaaaagttacacaagaacaacttgatcgtgctaaagaggcaaccaaatctgcagttctgatgaacttggaatcaaggtctatagcatctgaagatattggaagacaggttcttacttatggggaaaggaagcccatcgagtatttcctgaaaacagttgaagagatcactttgaatgacattttgtcaaccgcaaaagagatgatgtctacaccactcacaatggcatcgtgggggcgccgttattcatgttcctagctacgagtctgttacn

SEQ ID NO: 92668 - DNA, 533 bp, Zea mays
agtgaagttgtgtgatcatgacaggaggaagtattgctactacccgtccggaattcccgggtcgacccacgcgtccggctgttgttttgagtgtgaaacttgaggaccaagatgcgtttgaacgcgatttctgccagctgaagccttattacatggatacatgtggcataattcccgcctcgccagaggagtacccaattttgggactcaatcttctgaggctgtgggtcagaatagaattgccgaattccacactgagctggagcttttacctgtcaaggcactcgagcatccttgcatcaagcatgctgtagagcttgagcaatccttcatggagggtgcctacaaccgagtgttaagcgctcggcaggctgtgccacatgagacctacgtttacttcatcgaccttctcgccaaaacagttagagatgagatcgctgggtgcagcgaaaaggggtatgattctctatctgtgagtgatgcaaagcaaatgcttatgttcagttctgaccaagatctgcacgagtacatca

SEQ ID NO: 92669 - DNA, 535 bp, Zea mays
aggagaagttgtgtgttcatgacaggagggggatagtagtagcctcgtccggaattcccgggtcgacccacgcgtccggaagaaatcgaattcgagctgtcaacttgtgtggttcgaagctaattaagaaaataagtgggcaaagcaacagactgacttcaatgcatgggtttcaggaatgtgctgcattagaggagttatacctcatccataatggaatccaaaagatggaaggcctctctactttgcataacctccgcattttggatgtttcagctaacaagctaacgactatagaaaatatcgaaaccttaaccaggctggaggacctgtggttgaatgacaaccaaataccatctctagagggtatagagacagctttggctggttcgcgggagaagttgacgacaatctatctcgaacgaaatccctgtgcaaaaacttcagattactcgtcgacgttgaggaaaatatttccaaatctcgaacaaattgattcagatatcatagcatgataactagctaatccctgccg

SEQ ID NO: 92670 - DNA, 532 bp, Zea mays
  unsure (1)..(532): unsure at all n locations
nagggtaatgagtttttgtcctagctagcacgnatgcgtaaccgctccggaattcccgggtcgacccacgcgtccggcagctgccgcgggagcaggtgcaggtggccaccaagttcgggatacggcatgacgagagcggcacgcggaccgtgtgcggccggccggagtacgttcgcgcctgctgcgaggccagcctgcgccgcctcggcatcgactgcatcgacctctactaccagcaccgcattgacaccacaactcccatcgaggagacgattggcgagctcaagaagctggtggaggagggtaaggtcaagtacatcggattgtcagaggcgagcccggacaccatcaggcgtgcacatgctgtgcacccaatcaccgcggtgcaaatggagtggtctctctggtctcgcgacattgagcccgaaattgtgccgctctgcagagaattgggcattggaattgtaccatacagtcctcttggccgtggattttttggtggaagaggagtgaaagaacaagtgtctgctga

SEQ ID NO: 92671 - DNA, 534 bp, Zea mays
  unsure (1)..(534): unsure at all n locations
aagatgaagtcttgtgtcatgagggaaaaggagtacgctgtacctcgtccggaattcccgggtcgacccacgcgtccggtctcccaatttttggcattggtgttggacatagcacatatgacaaagcttcggtccactggtatgtgcaatctcatatccagattaacgagtaccgtgatcgtataattttgcctaggctgacacaacagtttgggcggcctgttaccagctgtataaaagtgctggatatgactggtttgaagctatcagcactaagccaaataaagatgttgacttccatatcgacagttgatgatctaaattaccctgaaaagacagagacctattatgtagtcaacgttccatacatattttctgcttgttggaaggttgtgaagcccttattgcaggagaggacaaaaaagaaggtcaaagttttgactggctgcgggagagatgaacttctgaagatcatggactactcatcactcccccatttctgccgccgggagggctctggatcatcgaagcatn

SEQ ID NO: 92672 - DNA, 535 bp, Zea mays
gaggggtagaagaggtggtttatgaaggagagggtatagtagctacctctccggaattcccggggagatgtttcctgcccacaaggtgattctttcagcccggtctcctgtttttagggcacaactttttggcccaatgaaggatggggacatgaagtgtataaagattgaagacatggaggctccagtattcaaggccttgctccatttcatgtattgggatgagttgccggatattgaagagcttactggtgtaaatacaacttgggtatccaccttgatggctcaacatttactagctgctgcagaccgttatgcattggagagatcgaagttgctctgtgaacttaagctgagcgaagatgttgcaatatatacagtggcaaatactttggcactggctgaacagcaccactgttatcagctcaaaactgtttgcttgaaatttgtagctctggctgaaaagttgaaagctgtcatgcaaaccgatgggtctgattatttgcaacaaagctgcccatcccttctgaccgag

SEQ ID NO: 92673 - DNA, 528 bp, Zea mays
aggggagaaggctccgttcactcgagggatatagtatgctctaccggtccggaattcccgggggaaccccaagtgaccgcccaaccggaagccaggtctctgttgaaaactgtagcttatgatgtatgttggggatgaggaaggccttgttcgtttacgtcggattgcaaccggaatcattccagctaatcaaagtttatataaattagagaagtaatccggctaggaatcgttccaacccaccaatccgatagaaacgaacaaggcctaactggttatcttgaactgacgttcatgtggcatcgcaatggcacatgaacatacggcgttccatgagtttgttaaccggaatatgaacctaccacctgcggtatttgatccctgaatgttgagtttgcacttctgcttaaaaaaaaaaaaaaaaggcggccgctctagaggatccaagcttacgtacgcgtgcatgcgacgtcatagctcttctatagtgtcacctaaattcaattcactggccgtcgttttacaacg

SEQ ID NO: 92674 - DNA, 534 bp, Zea mays
ggtggagaagaggtgtgatcagctaagaatatgacgcactgctctaccggtccggaattcccgggtcgacccacgcgtccgagctaaggagagtgtgatcaccaacagctagtgctagtcccccttccttccatccatccatggcatgcgtcagcaccttccagagctgccccattgccagaagagcaaagatcaacacgaggtccaggggctgcagcagtagcgtggcgaaggggtcatcaccaccagccttccagttccagtgcagggcgtcgactttcgcggcggacaccagcctccggctcgagctggacgagaaccccgaggcgatcatctcgggggcgtggcccgggaactgctccctcctcagctacgacgacctccgcgcctacctcgagtcgcaggagacggcggcccaggcagacggtcagcagcgcggcgtggcgctcctgagcgagaccatgtccacacccgtgctggtggccacagcagaccagaccctggaggacgtcgagtgccacttcgaggccgtgg

SEQ ID NO: 92675 - DNA, 484 bp, Zea mays
  unsure (1)..(484): unsure at all n locations
agctaatggagtggatctgtggctgntgcccagcccccattcntacagcncttgaatttccggatggacgcacgcgtcctctgcctcctccggctgcatctctgcccatccgagcccaaacctcttaccacttctcagggctctggtaatccacacggcacacgccatcaacgcaggcaaggacaggttcgaactgcctgatgatccgcacacatgatccgcattacgcgtctgctgcaagagcctcacgaacctctagaaattctgcagcaatctggtgaagggccccaagggtacgcgtactcaacgtcaaaggcctccgtgccgtattcccttaccaatgtgccttcacatcaccaccaggaaatcttcctgtggccaaggtaccaacacctgggatcgctttgaaatgaggattcacaaaaaggtgatccaactcgttagtacaccaaacgttttcaagcagatcacctaaatcaccatt

SEQ ID NO: 92676 - DNA, 537 bp, Zea mays
  unsure (1)..(537): unsure at all n locations
agttaggagccagtggttgtgtctcagcctccgctcgnatgngtatacccgtccggaattcccgggtcgacccacgcgtacgctttccccgtcggcgcctactcagatttaattcggacgccgccgccgccgctgacccagggggtcttgatggcgcccgctgtagaagccgttaaggagacaggctcgttccagaaggttcctgccttgaacgaaaggatactgtcatccatgtccaggaggtctgttgctgcacacccttggcatgatctggagataggtcctggtgctccaaccatattcaactgcgtcattgagataccaaggggcagcaaggttaaatatgaacttgacaagaaaactggactgatcaaggtggaccgtgtgctgtattcgtcagttgtttaccctcacaactatggattcattcctagcactctctgtgaagacagtgatcctttggatgtactggttataatgcatgagcctgttatcccatgctgnttcctacgtgcgaaggctatcggccttatgccg

SEQ ID NO: 92677 - DNA, 530 bp, Zea mays
  unsure (1)..(530): unsure at all n locations
atgtagacggttttgncctagctaagcatgtagtgctatacacgtccggaattcccgggtcgacccacgcgtacgcccttagaagcgaccttggcccgtgaggaagccaatcagccagagacagaacaatccatcggccatgaacagcctgttctcgagctcatggaagcgcgacggcggggacatcgagtccggcggcgtggagatgtctgcgccggcgggcgccgcggcgggcgcgagcctggacaggttcttcgaggacgtggagtccatcaaggacgagctccgcgacctggagcgcatccagcggtcgctccacgacgccaacgaggggggaaagtcgatgcacgacgcggcggccgtgcgcggcctacgcgcgcggatggacgcggacgtggccgcggcgatcaagaaggccaaggtggtgaagcttcgcctcgagtcgctggaccgcgccaacgccgncaaccggtccgtgcccgggtgcagaccgggcttcttcaacgaccggaacccggctttcgtcttgg

SEQ ID NO: 92678 - DNA, 538 bp, Zea mays
  unsure (1)..(538): unsure at all n locations
ggaggaaggagtggtgtagttccagctaagaacgngatagcactgctctactcggtccggaattcccgggtcgacccacgcgtccggtggtttccaaagccaagtgtgtgtactagcaaccagctagctcgggcggcagcaggcagggatcatgtcggaggagaagcaccaccacttcttcaaccaccacaagaaggacgaggagcagcccgccggcgagtacgggtactccgagaccgaggtggtcaccgccaccggcgagggcgagtacgagaggtacaagaaggaggagaaggagcacaagcacaagcagcacctcggcgaggccggcgccatcgccgccggcgccttcgcactctacgagaagcacgaggcgaagaaggaccccgagcacgcgcacaggcacaagatcacggaggaggtcgctgccgcggcagccgtcggcgccggcggctacgtattccacgagcaccacgagaagaagaaggaccacaaggacgccgaggaggccagcggcgagaagaaacaccaccacctt

SEQ ID NO: 92679 - DNA, 537 bp, Zea mays
gagtataagcgagagcttgtgtcagcatggagaagtaatggtatacgctctccggaattcccgggtcgacccaggcgtacgcaggtgttagcagtcgaccggttcctcggagcacgatgaagtttgttgctgcctacctgcttgctggcctcgctgggaacgccagcccctgcgctgacgatttgactgccattctggagtcagttggctgtgaagttgacaatgaaaagatggaactcctgctgtcccaactgagcggtaaggacatcaccgagctcattgccgcgggcagggagaagtttgcttcagtcccatgtggtggcggcggtgtcgctgttgcggcagctgcacctgctgctggcggagctgcttctgcagctgaggcaaagaaagaagagaaggtggaagagaaggaagaaagcgatgatgatatgggcttcagcctcttcgactaggctgcacagtcatcacagtattgttttgggcagttgaaccagaggaaaaccagagtcatgtttagattttaagctttgttta

SEQ ID NO: 92680 - DNA, 536 bp, Zea mays
agttatgagagcgtcgtgttccacctaaagaattgtgatgcactgctctactcggtccggaattcccgggtcgacccacgcgtccggtttcgaccagatcatgcttttatgggaagttctgtggtcccattatttgtcagaagattgccacttgtacttgtgcgtagcaatcttgaaaaagtatcgtcagcggataattggggagcagatggacttcgataccctccttaagttcatcaatgagctcagtggtcagatcaatcttgaccgggctatccaggacgcggaggcattgtgtactattgcaggagaaaatggggcttcctgcattccacctggaaccccaccttcaatgcccgtcgagaccgatggtggcatgtacgtgcaagaagacgaggtcttgtgagatatcggtcaccctagaaaataattgcatagaagcatcgcaagtttttatccagtagtgctttcgtcgacgtcataaatgtgatccgttgtaagtttggaagaatcatgaaaacctagagttgggttgt

SEQ ID NO: 92681 - DNA, 539 bp, Zea mays
tagtcttagccattcgtgtgacttgtaccgccctatgatgcactgctctactcggtctcgaattccctggtcgacccacgcgtccgtttttttttaatattataaaagtaaatatttagaactccagctccaaactaacagagacaggtttgttcgcatcgacgaacttaaacaaaaatgcatgttgcacgactacaggtagcgataaatgccatagcacaaatactgatcgccgcataagacagactacagggccaggataaggctgattaaccaagacaaaaacaagtacaatacacccaaatacagatttgatgtgcgatttaccaacatggacatcacagcacaaatcatctctgctagtatagcaggtgatatggttcttgcttctgcttactcgcatgagttgccacgatatggtcttgaagttggtctgaccaactatgcagctgactactgcactggccttctagtggctcgccgtgtgctcaagacccgtggtttaaataaggaatatgaaggcaatgttcatgtcactt

SEQ ID NO: 92682 - DNA, 540 bp, Zea mays
  unsure (1)..(540): unsure at all n locations
aggatgagccagaggtttcgctcagcttaagaantatgacgcattagctctaccggtccggaattcccgggtcgacccacgcgtccgccgatccccaattcctccttcggatctcgcattcagcgcagcgcaggtgtgaaggaagggggacgcggaggaagatggggctcgcgttcgggaagctcttcagccggctcttcgccaagaaggagatgcggatcctcatggtcggcctcgacgccgccggtaaaaccaccatcctctacaagctcaagctcggcgagatcgtcaccaccatccccaccatcggtttcaatgttgaaactgttgagtacaagaacattagcttcactgtctgggatgtcgggggtcaggacaagatcagacctctttggaggcattacttccagaacacccagggtcttatttttgttgtggacagcaatgaccgtgaccgtgttgttgaagccagagatgagctccacaggatgctgaacgaggatgagctacgtgatgctgtgctgcttggttttgccaacn

SEQ ID NO: 92683 - DNA, 481 bp, Zea mays
  unsure (1)..(481): unsure at all n locations
aggttgaggncatgagtcctggcatcgatatatgtcggggaacatagcaatcgctcgctaccggtccggaattcccggatcgacccacgcgtccgaatcgaaatcgatccgatctccgcttgcgctgaagcctgatctccaccgggttcgcagcangggcgcaggacctcgatcacgaggaggcaggggagcagcatccacaaccacaagccatggcggcgagggccaacatccccactaacaactccgccctcatcgcaatcatcgccgacgaggacaccgtcactggcttcttgatggccggcgttggcaatgttgatctgcgcaagaaaaccaactacctcctcgtcgacaacaagacgacagttaaacaaatcgaggatgcgttcaaagaatttactacgagggaggatattgctattgtgctcatcaatcagtatattgccaacatgattaggtttcctggtggatagctacaaca

SEQ ID NO: 92684 - DNA, 565 bp, Zea mays
  unsure (1)..(565): unsure at all n locations
aggttgagttaaaagaggtctgttcatcaatgatttgcctaggatagnattgctcgtaccggttccggaattcccgggtgcgacccacgcgtnccgcaaacacttgtcgccgccactgtcctcacatggtaagggccgtccattgtgtctccgggttcggtgcgtnngtgctgcgaagcgcattcgtggtgtgactgcgctgccatccatcatgccctgggctcgtctctttcctcgatcattanngccaaggagctnnngctcaatgggcatgaagggtgagtcgtcgtcccgcttgcgaaggagaatctgcanntgtcgggccggccctcgtcccgtcagaaaggattgaagtaccttcgctttccttccgcaagcgggatgaaacaccaaagccctgtcccaacgggccccattccactttcggcgccnccccgccaagattcctgtggcggcaccatatccgcggggaggatttcccgcaacaagaaccaaatagggtgggaaggccggctttttggccaaggcctcaagaactttacaaagggccgttcccgccttcctt

SEQ ID NO: 92685 - DNA, 536 bp, Zea mays
  unsure (1)..(536): unsure at all n locations
ntganaaaagtggtgtcgtctagctagaagagtagtgatgcactgctctaccggtccggaattcccgggtcgacccacgcgtccgcacaacacaataatacagcaaaggaggctagcagaagtgcaggattaataagctaagctaggagaaattaagcaaagcataggcacagccatggctacctcctctggttcttgccttattattagcctgttggtggtggtggtggcggcggcgctgtcggcctcaacggcgtcggcacagctgtcgtcgacgttctacgacacgtcgtgccccagcgcgatgtccaccatcagcagcggcgtgaactccgccgtggcgcagcaggctcgtgtgggggcgtcgctgctccggctccacttccacgactgcttcgtccaaggctgcgacgcgtccattctgctgaacgacacgtccggggagcagacccagccgccgaacctaactctgaacccgagggccttcgacgtcgtcaacagcatcaaggcgcatgttgaggcggcgtgcccgggcg

SEQ ID NO: 92686 - DNA, 534 bp, Zea mays
  unsure (1)..(534): unsure at all n locations
agggttngagtggtgtgatctagctagaaggatatgatgtatctgctctaccggtccggaattcccgggtcgacccacgcgtccgcactcccatccagccgccaccaggtgcagagtctttcgtcatctcttctccggcgaagaacgcccagtcgcccaccagatcacttgttaaactttgttgaggggtgatggcggtttctttcgcaaacctcaacaccgaggcagggcttaaaaagcttgatgagtaccttctcactcgcagctacatcactggctaccaagcttccaaggatgacttggctgtctacacttcgttttcgtctgctccctcgtccaagtatatcaacgtagcaaggtggtttaatcacattgatgcgctcgtgaggctgagcggaattactgcagagggccaaggtgtgaaggttgaatcctcagcagttccttcagccccaactccagatgttgctgaagcacatgccccagcttctgangaagaggacgatgatgatgttgaccctttntgtgaggaga

SEQ ID NO: 92687 - DNA, 540 bp, Zea mays
  unsure (1)..(540): unsure at all n locations
tgttgagcaagtaggttcggtcagcttaagcagtgactgcattgctctaccggtccggaattcccgggtcgacccacgcgtccgaaggagtcgtcaaggatgctggtggaagcaaggttgcaacattgacggggaagtgggatggaagtgtgcattgtgtcatcaacaatgatgcctctaaggtgaactctcatggtccacatcagagttctggttccactttgctatgggagaaaaatgagcctccagtcaatcctacccgctacaacttgtccgcatttgcaataacactaaatgagttaacaccagagctcgaggtacacatggaacatacatatatcccataatctgagttctgttagctcttaacctaaaaggctacgacacatcttttacgctcttgttaaggagaagctgccaccgacggattcaaggctgagaccagatcaacggcacctggagaatggggagtacgagaaggccaatgctgaaaaactgcgcctcgagacacagcaacggatggttgtacacattttacan

SEQ ID NO: 92688 - DNA, 477 bp, Zea mays
  unsure (1)..(477): unsure at all n locations
aggtgagtagaggttatcccctgccattgtacgatagcattgctctaccggtccggaattcccggtcgacccacgcgtccggaggagcacaggaagttcctggacgggctaaggcagctgggcaagggcgacgggaggggcatctccaagggcttcgtcaccaccaggacggcgacgcatgtggccagccacgcccagaagtacttcctccggcagaccaaccccgggatgaagaagcgccgggcgagcctcttcgacgtcggtatcgcggactacaaggacaaccaggtgccaggccctcagagcatcgtcactgccaaaccggcgcctacgcangagataatccacaccgaccgcggcgacgtccccataccaagacgatatagaggccctcgagagattttagggcagtaacatgcaggttaatcaactgactgactactactatttcaacaaggactcccatgttcccgcggg

SEQ ID NO: 92689 - DNA, 532 bp, Zea mays
aggtgggaagaggtttgagctagtctaagcagggaatggtatacacgtccggaattcccgggtcgacccacgcgtccgccgttcgcctcttctcctccctcctgccgggtccttaataaagagcagcagcgcaagaggtgggtagagcgagcgagaagaaggcaatggcggcggagagcttcctgttcacctcggagtccgtgaacgaggggcacccagacaagctgtgcgaccaggtgtcggacgcggtgctggacgcctgcctggcgcatgaccccgacagcaaggtggcctgcgagacctgcaccaagacgaacatggtgatggtgttcggcgagatcaccaccaaggcgagcgtggactacgagaagatcgtgcgcgacacctgccgcgagatcgggttcacctccgacgacgtggggctcgacgccgaccgctgcaaggtgctggtgaacatcgagcagcagtcccccgacatcgcgcatggcgtgcacgggcacttcacgaagcggcccgaggagatcggcgccgc

SEQ ID NO: 92690 - DNA, 536 bp, Zea mays
  unsure (1)..(536): unsure at all n locations
gagggggagaagagctgtgtatgcataagcatatactgacgctctaccggtccggaattcccgggtcgacccacgcgtccgccgacgccgacgacgcgattcgtctccccagcagctttggcgctggtggtcgaccgtggagttgctgcgactccgctatcaaggacgcctccctgccggcgtggcgctgcaacgacgtggtggacaagtgctccgccgactgccaggactgcgaggcgtcgccggccggcgacggcttcgtctgcggtgactttatcttaagcctgaccgagcccccggtctgcacaccgaggccgtgggactgctgcgacagcgtggcctgcacaagggactacatccccaactgcatgtgcctggacaaggtggagtcgtgctcgagcaactgcgaacggtgcgagtttctgtatcattcggaccctncttgttccaatgccgagacatcttccacggctatcctggtccaagtgcangacatgggtcagtacgagcaactagctcaactcagctacttggta

SEQ ID NO: 92691 - DNA, 545 bp, Zea mays
  unsure (1)..(545): unsure at all n locations
gagggtnaggatgcatctgtgcctacgctcaaagattatcgtacgctccccgaatttccgggtcgacccacgcgtccgaaccaagcagaccccagcagaagaagcgaagtcgttttcggagcaggaggaagagcgagcagcaaggtgtcgtggcaggcgtacgtcgatgaccacctgctgtgcgacatcgaaggccagcacctcagcgccgccgccatcgtcggccacgactgcagcgtctggtcacagtccgagaacttgatcgagttaaagcctgaggaggttgctgacatgattaaggactttgacgaacctgttaactacaggccaacatggtccaaggggaagaggtatccagtacacagggatccttgtctggaccacaacaaccatgcgaaaggtgagagtttcgatctgggcaagtacatttgacagcactttgaaggcccatcgttggtcccataggatcctttaataaagcagttcgctgaagagctgcttgcatatactgatgcctttaacaaagtcttatactttttgtatag

SEQ ID NO: 92692 - DNA, 531 bp, Zea mays
agggggtagagctgtatatagagggggggtataagtacgctctaccggtccggaattcccgggtcgacccacgcgtccgcacacacacagacaagtggtttccaaagccaagtgtgtgtactagcaaccagctagctcgggcggcagcaggcagccatcatgtcagaggagaagcaccaccacttcttcaaccaccacaagaaggacgaggagcagcccgccggcgagtacgggtactccgagaccgaggtggtcaccgacaccggcgagggcgagtacgagaggtacaagaaggaggagaaggagcacaagcacaagcagcacctcagcgaggccggcgccatcgccgacggcgccttcgcactctacgagaagcacgaggcgaagaaggaccccgagcacgcgcacaggcacaagatcacggaggaggtcgctgccgcggcggccgtctgcgccggcggctacgtattccacgagcaccacgagaagaagaaggaccacaaggacgccgatgaggccagcggcgagaag

SEQ ID NO: 92693 - DNA, 551 bp, Zea mays
  unsure (1)..(551): unsure at all n locations
gagggtcttgccgtgtgtcnnatgcatgattacgactgcactangctannagcgttccggtctggaattcccgggtcgacccacgcgtccgccgcgatcgaagctcctcacaaaccgttatcgtcgccatggcagccgccgngcctgaaagcgtcctaaaggaagtgctgccatctcccctgacctccgcctccgagccccttccctttttcgatggcaccaccaggctgtacgttgcctatcattgcccgtacgcgcagcgcgcttggatggccaggaactacaggggtttgcaggacaggtttaatatagtcgccatcgatcttgctcacaggccaacatggtccagggagaaggtttatccagaacacagggcgctttctgtggagcacaacacccaggtgaagggtgagagtttggatctggtcaagcactttgacggcacctttgaaggcccatcgttgttccaaggggatctcttaaaaaagcatttctttggggacctgtttgcattaccggggccttttaaaaacgctttacctttggtattg

SEQ ID NO: 92694 - DNA, 479 bp, Zea mays
agtttagagatggtttatgcaactcgacgcactgcatatcgttcgattcccgggccgatcctaaggacggaggaacccctcgatagcgcgatcacgcgcgtcatccgaaaggaatcggttaagatggccgagcctgacgtggcagcagacggcgacgttaggaagtcctgtggtggacgtggggctacttcatgagaggcgtgttcctgtaattctgtactcacttagttctctctgcatgcgtctataattgagttcaatagatacacttgccagcacactatcgccagatactttagctatattcccttactttctcgacacgtttctccaattataaaaagggagctctaatttagaggatccaagctaacgtaccctttcatggctttacataacttttatatagtggtaactaaatttgaattgaattgtccactgtttttaaaacatttttttctttggaaaaacttttcgtt

SEQ ID NO: 92695 - DNA, 486 bp, Zea mays
agtttaaggctgttttgtcctgcatagtatgtactgctcataccggtctcggaattcccgggtcgacccacgcgtccgaggagtcgtggctgatgttggtccaggaatcaatgggttccaagccggagatcaagttgttgcgtatgctcaactcatttaacggaggtgggcttgcggagtatgctgtggcatcagaaaatctgaccgtcaagaggcctcctgaggtatctgctgccgaaggcgcagggctgcccatcgccgccggcactgccctccaggcgctcaggaccatcggcgccaagttcgacggtactggcaaggccatgaacgttctggtcaccgcggcatcaggtggcgtcggcctctacgccgtgcagctcgcgaaacgggctggtctccacgtcactgccacctgcggcgcgcgtaacgtagagctggtgaagagcctgggcgccgacgaggtgcttgactacaggacgccggagg

SEQ ID NO: 92696 - DNA, 532 bp, Zea mays
  unsure (1)..(532): unsure at all n locations
agaataagtagtaggtttggatgccgttgngctgagtactntgnattngtcgttccggtccggaattcccgggtcgacccacgcgtccgataaagtttctgaattccttgagaagcatgattaggacctcatctgccgagcccatcaaggggtcgaagatggatatgagtttttcgctagccgccaactcgtaacaatgttttcagcccctaactactgtggagaatttgataacgctggtgccatgatgagtgtagatgagacattgatgtgctccttccaaatactgaatcctgcgaggaaggtgttgggtggttcaactaataacaaatctggcttcaagtcatcgagaggatggtgacaattgcaagcctgatatcaggttggttggtgagcagcatgccgtggtcgacggggggttgttccatcataatcatattacatcggctgcaactgacaggccccatgcaatttctcttcatgttggatcaacattcttggaatgtattaattactgggcggatcagaaaag

SEQ ID NO: 92697 - DNA, 536 bp, Zea mays
  unsure (1)..(536): unsure at all n locations
tgagagagggagtaggtttggatgctgaatgccattagtcattctgnattgntcgttccggtccggaattcccgggtcgacccacgcgtccgagcatagataccgcaaggatagcttttgctccgatgttgaacagctttggctcgggctagagtaccaagaagagtgccgcggcgatgatggattacacatctttggaggcagcgacagaaaacttcagtgagagcaatgtccttggattaggtgggtttgggtctgtgtacaaagccaattttgatgggaggtttgctgctgcggtgaatagactggatggtggggcacatgattgcaagaaggaattcgagaatgagctagacttgcttgggaagattcgacatgcgaacatcgtgtaccttgtaggcttctgcattcatgaggagaaccgtttcgatggttatgaactgatggagagtgagtcgttggattcgcaacttcatgggccattacatgggtcaactctgaactggcttattcggatgaagattgctctcgacaca

SEQ ID NO: 92698 - DNA, 541 bp, Zea mays
  unsure (1)..(541): unsure at all n locations
gaggggnagagtgtgtgtgtgccctgcattcgttcgatcaagtcataccgctccggaattcccgggtcgacccacgcgtccgccagcttctgcattttgcggtgtcggacgtgagcgatgacgtgcggaggaccgctgtgttggctctgggcttcgttctctacaacgagcctgaacagacacccagaatcgtgtccctactgtcggaatcatacaatccacatgtccgttacggtgcagctctagctgtcgggatctcctgcgccggaacaggattaagtgaagccatctccttactggagcctctgacatcagacgtcgtcgactttgtacggcagggcgcgctcatcgccatggcaatggtgatgatccagaccaacgagtcctacgatccacgcgttggagcattcatgcgccagttggaaaagataatcctcgacaagcacgaggatgccatgagcaagatgggcgccatactggctttaggcatnctcgacgccagtggcaggaatgtcaccatcaagctcaagtcgaggtcaaa

SEQ ID NO: 92699 - DNA, 540 bp, Zea mays
  unsure (1)..(540): unsure at all n locations
gagtcttagagtgcgttgaggcctgcacctcgccnnatccgcaacagctccggtattcccgggtcgacccacgcgtccgcgacggagaagaaggacgacgcggtggtgcagccgcagaccttcccgcccttcgaccgcctgggcgggggcgcgtccccggcgttcggcggcctccccggcggcagcattcctggcagcagcattcccgggttcagcatgcccggcagcggcagcagccttcccgggttcagcttgcccggcagcggcagcatgcccctcttcggcggcggctccccgggcttcagcggcttcggcggcatgcccgggtcccccaccgccggctccgtccccgagcacgccaacaagccctgaactccgtctgtccgtccgatccgtcgctggagcgaggtcgggctagccagcgtgcgtggtagtagagtgatggtactgtaatacgtcgtcgtcttcatgcatgcgtgtgtcgtgggtttccctagctccatacgagcagtagttgggccttgcacgtaccgtacgtct

SEQ ID NO: 92700 - DNA, 493 bp, Zea mays
  unsure (1)..(493): unsure at all n locations
atgttaaggagtaggtttcttgccctgccactccgtcccatcacnactgncgntaccggtctcggaattcccgggtgcgacccacgcgtccgggctcgtaccaagcagactgctcgcaagtccacgggagggaaggctcccaggaagcaggttgccaccaaggctgcccgtaagtctgcccccaccactggtggagtgaagaagcctcaccgctaccgccctggaactgttgccctccgtgagatccgcaagtatcagaagagcactgagctgctgatcaggaagctgcccttccagaggctcgtcagggaaattgcacaggacttcaaaactgatttgcgtttccagagccatgcggtgcttgccctccaggaggctgctgaagcataccttgttggcctgtttgaggacaccaacctgtgcgccatccatgctaagcgtgtgaccatcatgccaaaggacattcagctggcaaggaagatccgcggcgagg

SEQ ID NO: 92701 - DNA, 491 bp, Zea mays
  unsure (1)..(491): unsure at all n locations
agtttagagagcttgtagccggtacccgcccctcagcactgctgttccgattcggaatcgccgggtcgacgtcacgcgttcgcggacgctttaatgttaacccatttgttgtcaggagtggtcatgatgagcgggggcgggtancagatacgcggatgttcgactatcacaggcagcatggcatcgaaatccgaattgccaggattctcaacacctatgggccaaggatgaacattgacgatggccgtcgcgttagcaacttcattgctcatgctgtgcgtgacgaaccccttactgtccagaagccagtaacacagactaggagcattctgctatgtcacccataatgatgatggccttactaagatgatgaactgacatcaaccactggaccgattaactttggggaacccaggtgaaattcacccatgcctgaaacttgctcaagaatttaaaagggattgccttaaccccaactttttaccggtggc

SEQ ID NO: 92702 - DNA, 477 bp, Zea mays
  unsure (1)..(477): unsure at all n locations
agggaaggagtgttttgaccatgtatatgaacaatccgcacaccgtacaattcccaatgcgcgcacgatncaacgtgcgctgacacgttcatgttaacccaacaggagtcaggagttgtaatcataacggggancgtgtatcagacacgctgatattcgactatcacacgcagcatggcattgaaatccgaattgccacgattttcaacacctatgggccaacgatgaacattgacaattgccgcgttgctagcaacttcatcgctcaagctgtacctgcccaaccccttactgtccaaaaccccataacactaaccacgaacttctgctctgtaacctatatcgattaaaccctcaatgagaggatgaaccgcaaacgccaactggaccttttaccttgcccaaacctcaggaagaatgccctttgataactttaaacccgcttctgaaccttataacttctaagcaaactcctaa

SEQ ID NO: 92703 - DNA, 531 bp, Zea mays
gtggaggagatgctgggacgttgatagcctgagtacgtagcattgtctttccggtccggaattcccgggtcgaccgcacgcgtccgtggggttgttcttattcctgagggtctggtggagagtattcctgaactatatgctctgctgcaggaaatccatggcctccatggcaaaggtgtttctgttgagaatatctcttctcagctttcaccctgggcatctgcactctttgagtttttgcccccttttatcaggaagcagctacttctccatcctgaatctgatgattcagctcaactttctcagattgagacagagaagcttctagcccagttagttgagactgagatgaacagacgtttgaaggagggcacttacaaaggaaagaagtttaatgcaatctgtcacttctttggctaccaagctaggggagcactgccttccaagtttgactgcgattatgcctatgtcttggggcatgtgtgctaccacatcttaactgccggtttgaacggttacatggccacaatg

SEQ ID NO: 92704 - DNA, 530 bp, Zea mays
  unsure (1)..(530): unsure at all n locations
tggatgaagtgactctgatactagngacctaaagcgctagcatcagctccggaattcccgggtcgacccacgcgtccgctccgccactgatctgctctgttgctggtgactaggagcagtagcgagagggattctggagggccgagtcgaagaaccacacggcgcataaccaatcgttcaaggcgcacaagaacggcatcaagaagcccaagcgccaccgccagacctccaccaaggggatggacccgaagtttctgaggaacttgaggtactcaaggaagggcaacaagaagagtggcgaggctgattccgaggagtaagatgatggtgattgagtttgtggcgacaaatgcatctcttgtatcgctaagagtcttatctgtgaacttagttctcacttttgtgtgactgtgatcaaaggagatccatcaattggtaccgaagtgtattttatgtcttgttggttacctggaaattaattaaaaccatcagttgtatccttttgagaaatgggcaattgatgtgtcttn

SEQ ID NO: 92705 - DNA, 540 bp, Zea mays
  unsure (1)..(540): unsure at all n locations
taggggnagagatgcttttagcctagcttaagcacgagtccgcatacagctccggaattcccgggtcgacccacgcgtccgcggacgcgtgggtatttatgatgagtgtgcgtctgttttatatcaggaaatagactatatggaggaggcatttaacgctgaaaaatttgctgaaaacttcaaaaaattggattatgtgaaggttcctgaaatttactgggcacacactactcctcaggttttaacaatggaatatgtcccaggaattaaaattaacagaataaagcagttagataagttaggagtcgatagaaaaagattaggtcgttatgctgttgagtcctaccttgagcagatcttatcccatgggtttttccatgctgacccgcatccaggaaacattgcntgtgatgatgtcaatggagggagacttatcttctatgacttncggatgatgggaagtatcagtcataatatccgggaaggattgcttgaagnatctatggagtttatgaaaaggatcctgacaaagtgcttcaa

SEQ ID NO: 92706 - DNA, 480 bp, Zea mays
  unsure (1)..(480): unsure at all n locations
aggtntagggagtgggtctgagccatgcattacgtaaagatcgcacagcgctcggaattcccgggtcgacccacgcgtccgcttactcctgcgtctccatcttggcccaaccgagcccaaacctctccccttttctccggcctctggtagtccacacggcagacgccgtcgccgggggagaggagaggaggggaggggatcggctccaagggaacaggtgagatggcaatcctgtacgcgctggtggcgcgcggcacggtggtgctggcggagcacagcgcggcagccaccaacgcgggcgctatcgcgcgccaagtcctcgagcgccttcccgacggcggcgccgacagccacgtctactacacgcaggaccgctacgtgttccacgccaagcgcaccgacggcatcaccgcgctctgcatggccgacgacgccgncggaagaccgattcccttcgcatttttggaggatattcatggc

SEQ ID NO: 92707 - DNA, 486 bp, Zea mays
  unsure (1)..(486): unsure at all n locations
nagggttaggaagtaggctcagtgcccattcccaatgtaccagtcagcatcaccgtcggaattcccgggcgcaccgcgcctgtccaccctgccagcgccgacgccgcgccgtctcagcaactgtcaccgtcgctatggcccgtatcaaggtgcacgagctccgggggaagagcaagacggacctgcaagcgcagctcaaggagctgaagtctgagctctccctcctccgcgtagccaaggtcaccggcggcgcacccaacaagctctccaagatcaaagtggtgcgcacctctatcgcgcgcgtgctcacagtgatctcgcagaagcagaagtcggcgttgcgggaggcgtacaagaagaagaacctgctccccctcgacctnncgcctaagaagacccgtgccattcgncgtcgtctgaccaagcaccagctttctctgaagacggagagggaaaagaagcgtgagaagtactttcccatgagga

SEQ ID NO: 92708 - DNA, 467 bp, Zea mays
  unsure (1)..(467): unsure at all n locations
agggaagggaggttttgagccagcccactcgnacngtcgtaccgcctcggaattcccgggtgcgacccacgcgtccgctgcgcctctacatttcttctctctctgctcctccgtctccgcctgatccatccaaggcagggatggccatgtcggactcggaggagcaccacttcgaatcgaaggccgacgctggggcgtccaagacctacccgcagcaggctggcaccgtccgtaagaacggcttcatcgtcatcaagaaccgtccctgcaaggttgtggaggtttctacctccaagactggtaagcatggccacgccaaatgccactttgtcgccatagacatattcnatgggaaaaagcttggagatattggtccttcatcacacaacctgtgacattccgcatgtgaaaccgtactgaggatcaactgattgatatttctgaggatggatttgtgagcccttctt

SEQ ID NO: 92709 - DNA, 544 bp, Zea mays
  unsure (1)..(544): unsure at all n locations
tgtaagagagatgctttttaggctagccctgcagtaatntgtatgcttctactcggttcggaattccagggtcgacccacgcgtccggtgttggtgcaaacaatgagatcgcagatgttgatcggttaccgttggccgtgagggagttgggaagctgtgacctttatccacaaagtttaaggcacaatccgaatgggagatttgtagttgtatgtagtgatggagaatacataatatacacagcacttagcatggataaacagatcatttgggtctgcacttgaattcgtttggtcaactgatggagaatatgccatcagagaaagcacctcgcggataaagatatacagtgaacatatccaggagaagaaaagtataaagccatcctttttcgctgaacggatatctggtggagtgttacttgctatgtgtacaaatgactacatctgcttctatgattgggctgaatgcagattgatacgtcgaatccatgtcaatgtgaacaatcgttactgtgctgacagtgctgatttagtaactattg

SEQ ID NO: 92710 - DNA, 486 bp, Zea mays
agggtatagtgggagatgctttggtgccatgcacatctgttccagtcgctactaccgctcgaattcccggatcgacccacgcgtgcgcagagcctgattcatctccattcgaaacaccctatcacccacactctcacttcgtccgcagcctgaatcctcgtaacgatggctcgcacgaagcatactgcgcgcaagtccacgggcggcaaggcccctatgaagcagctgtcgaccaaggcggcgcgcaagtcagcccctgcgaccgtcgtgctaaagaatcctgaccgtttccgtccgcgcaccgtggcgctgctctagatccgcaagtaccacaatagcactgagcttctcatccgcaagctgtcctttcagcgcctggtccgcgagatcgcgcaggacttcaagacctacctccgcttccagaactgcgtcgtagccgcgctgcaagaggcccttccatggctaactcgtcctgacactcaaaga

SEQ ID NO: 92711 - DNA, 533 bp, Zea mays
gtagtgagtgcttgtgcgctagcctcacctgggtcgcattgacgtaccggtccggaattcccgggtcgaccgcacgcgtccgctcaagttccccaggaagttctggcctgaatggaaaggaagggagttcttcctctgctcgggcagcaggagaggttactacggagtgtggcaggagttcgagaagcagtaccctgacgccaatgtcctcctggtcaccgtgaccgacgaggagtcgaggcgcatcgagcagcagtcggacgagcagaccaaggcggagatcatgcaggtgctgcggaagatgttccccggcaatggacgtcccggacgccaccgacatccttgtcccgagatggtggtccgacaggttctacaagggctccttctccaactggccagttggcgtctaccgctacgaatacgaccagcttaaggcaccggttgggagggtatacttcaccggtgagcacaccatcgagcactacaatggctatttccatggatcctatctttcatggttcgacttcagtgag

SEQ ID NO: 92712 - DNA, 531 bp, Zea mays
tgtagaaagtgacttagaggaatttccatgttgtactagctatcttctccggaattcccgggtcgacccacgcgtccgctagaagtcttgattaagcctaaagatcaaaatgttgcactaattgtcacaaaaactaatggcaagcgtctgtattggacggtgactcagcagctaacacaccacactatcaatggatgcaacatgaggccgggggatatatttgcaactggcacactcagtggacctgaaccggactccctcggatgtctattggagctaacatggaacgggcagaaggagataccagtgggcaatttgacccgcaagtttctagaagatggagatgaggtcatcttgacaggatgctgcaagggtgaaggctacaacattgggtttggaacttgcacttggaaggtcctgccggcacttacctgagccaacacgtgtttacatcaattctcgagtccaaacactcaacaatctaacaagatgctatgtatctgaacaacgggagtaggtttcgcataagag

SEQ ID NO: 92713 - DNA, 538 bp, Zea mays
  unsure (1)..(538): unsure at all n locations
aggggnagcgtgctcttagtattgcatctgcaagaatgtgtaactggccctgaattcccgggtcgacccacgcgtccgggcaatttaaatcttgaacacttgccacaggattatagtggatccgcgttgacactggttgagtcagttatcaagtcttgttgtcttaggtaacctcacagagtttgagagaggagttctctggctttcagaaaatctgacatttgatgttgatgctcggattaatctttttgagtgtaacataagacttcttggggggcttatttctgctcatattcttgcaaaagactacagcagccagtttaagcatgggctgtatcaagatcaattactacgtcttgctgaaagtttaggcaatcgttttctaccggcatttgagacacctactggattgccgtattcatggattaatcttaagtatggggtgatggaaaatgaaacaactgaaacaagcacatcanggtgtggctcccttatacttgaaatgggtgtgttgtcacgnttgacttgtgattctaga

SEQ ID NO: 92714 - DNA, 534 bp, Zea mays
tgatatgagatgtttgtgttgccttttacgtacgctcatggcataccggtccggaattcccgggtcgacccacgcgtccgtattcatggacaatttcatgatcttgctgaactctttcgaattggtggaaagtgtccagaggcgagcgtacctgtttatgggagattatgttgaccgtggttactactctgtcgaaactgtcacacttttggtgtctttaaaagttcgatatcctcagaggatcaccattctcagaggaaaccatgaaagccgacagattactcaagtttatgggttctatgacgaatgcttaaggaagtatggaaacgcaaatgtctggaaaacatttacagatctatttgattacttccccttgactgcattggtcgagtcagaaatattttgtttgcatggtggattatcgccatccattgagaccctcgacaacatccgcaacttcgaccgtgtccaaaaagttcctcatgaaggtccaatgtgtgatcttctgtggtctgatccagatgatcgatgtgg

SEQ ID NO: 92715 - DNA, 541 bp, Zea mays
  unsure (1)..(541): unsure at all n locations
naggggntggagcttgtagctcagctcaagaccgatacagtcatctnctgccggaatttccgggtcgacccacgcgtccgcgccaaaaccccccgagccaacacctactacgccgccgcgccgccgcgtcaaacaacggcgagagggcgcctatggcattcacttcccaatccctaatcttccgggcacccgcctcgccctcttgtgcccgcataaccccgtcatccggtcgcgtcaccctccgggaccacagcgccgttttcccgctcgtcgcggcggcctccacctcgatggcgtcctcggagagcgaagataagagggaaaccaagctgtggggcgggcggttcgaggagggcgtcaccgacgccgtggagcgcttcacggagtccatatcctacgactggcagctctacaaatacgacataatgggcagcaaggcccacgcctccatgctcgctggccagggtttgataacagctactgatagggatatcatcttagaggggctngatcagatagagaggctgatccaagatgcaan

SEQ ID NO: 92716 - DNA, 542 bp, Zea mays
  unsure (1)..(542): unsure at all n locations
gggagagagagcttgantgctagcttaagcagtataatcattgactctaccggtctcggaattcccgggtcgacccacgcgtccgaagatcggcaaggctggacaagagacccacgatgcctccacagagtttgacaggggcgagggggacatcactcccatgggtggcttcccccactatggtatcgtgaagggtgactacctgatgatcaagggatgctgcgtgggtccaaagaagagggtggtgaccctccgccagtccctcctgaagcagacttcccggctggcgctggaggagatcaagctcaagttcatcgacacatcgtccaaatttgggcatggtcgcttccaaactaccgatgagaagcagaggttctttggtaagctcaaggcgtaaggtgctgcagtgcatcgacaagtcccatttgtcaaaatcatcaaactgtgaaactcttgcttgttaccttgctgtaccaagttttgtagcatgatgatttgggagcatgttcntgtcttctgtggatagttctacgcttcagaac

SEQ ID NO: 92717 - DNA, 535 bp, Zea mays
  unsure (1)..(535): unsure at all n locations
agtagagagaggtcttgtatgaataggcagaggatagtatcctcccggaattcccggggtacggattagcaccaaaaggcacaagcattgtcctgtacagaaatcatgaaattagaaagcatcagtttgttgctggtactgagtggaccggtggcctttacgtttctcccacaattgctggaagcaggccaggtggattgatagcgggagcttgggctgctatgatgtctctcggactgaacggctacttggacagtacaagccgtatcatggatgtttcaaagaaaatacaaagagggattggagagatcccagggttgtttgtgatagggaaaccggatatgaccgttgtggcgttcggctcagacgttgtcgacatatttgaggtgaacgacataatgtcatcaaaaggttggcatctcaatgctctgcagagacctaacagcttgcatatctgtgtgacccttcaacacacgactgtgtacgaccaattcctgaaggatctgcaagactctgtcaacactgtgaaagcaan

SEQ ID NO: 92718 - DNA, 533 bp, Zea mays
tggtgtaggtgatttagtgcctggcactacgctcctggcataccgctccggaattcccgggtcgacccacgcgtccgcacgccacaaaatcctctcctactccggcagttctgctcgccgccgcctccacgatgacggaggacgtgcagatgaacgactcggagccccagcctgcggcctcagctcccgccgtcggggcgccggcgctctccacactacaccatctgaaggagatcgcgtccgcgatcgaggccggttctctgtccaaggaggtccgacggatctaccgcgccttgcgcctcaccgtcgcgctccgtctccgcctcgccgcgcgggacgtctccggcttcctcgccttcgcgctacccgcgtcctccgaagcctacggacgcctcactgccctggtgcccaaggaagatgatactgagatggatgttgatgctgcagctccagcaactcagatttcaatcaaacatggtcctcctgagattgaaatatattgctacttgctcgtactggatttccctattgat

SEQ ID NO: 92719 - DNA, 533 bp, Zea mays
gattgaggtgcttgtacgctgagctcagcctccctacgcattgacgtaccggtccggaattcccgggtcgacccacgcgtccgatgctttgaagcctttcatgtgtgatgctcctaagcaggaacccgagcctttacggtactgagccgaaaagaatcacataaattatgacattcctcttgaagtctggattaagccgaaagatcaaaatgacgcatcaattgtcacaaaaactaatttcaagcatctgtattggacgctgacacagcagctagcacaccacaccatcaacggatgcaacatgaggccgggggatatatttgcgactggcacactgagtggacctgaaccggactccctcgggtgcctgctggagctgacatggaacgggcagaaggagataccggtggggagtttgacccgcaagttcctagaagatggagatgaagtcatcttgacagggatttgcaagggtgaaagctacaacattggtttggaacctgcaccgggaaggatcttccggcactttcctt

SEQ ID NO: 92720 - DNA, 544 bp, Zea mays
agggtaaggtgttttagcgcctcacctcaaagcctaggttgcatcaccgtatcagttctgaattcgagggtcgactcacgcgtacgccgctggccgtggcgccatgggcatcctggaccacatgtcgcatgtatacagcgtgactgggacgaacgaagcgctcaagctcaagaagaagcgaccgctgcagacggtgaacatcaaggtgaagatggactgcgaaggttgcgagcgtcgcgtgaagagcgcggttaattcgatactcggcgtgactagcgtgactgtgaacgctaagcagagcaagtgcacatgaaccggatacgttgagcccggcaaggtgctgcagcgcgtcaaggccaccgacaagaacgccgacatgtgcccctacgtgccctacacgctcaccacctacacgtacgtctgcagcgcctacgaacagaaagctctgcggtctctgtacgcaacgcgccttaggccatggcataccccacctctccgtaagtcaaggtcatgttcattgttaacgactagaacgttaacgcct

SEQ ID NO: 92721 - DNA, 543 bp, Zea mays
  unsure (1)..(543): unsure at all n locations
agatgagaggatgcttgtagagtagcgcaagccngagtaagcatctgatatactcggtctcggaattcccgggtcgaccgcacgcgtccgcttcgaggggtcctagccgctcctgcgacagctgcggcaagggggacgactactacggcaggtggatcgtgctcacctgcaacggcgtcgaccacgctcacggcggcacgcccaccatggggggattctccgacgtcctggtctcgagcgagcactacgtggtccgcgtccccgacggcctggcgctggaccgcaccgcgccgctgctctgcgccggcgtcaccgtgtacagccccatgatgcgccacggcctcaacgagcccggcaagcacctcggcgtcgtcgtgcctggcggcctcggccacgtcgccgtcaagttcggcaaggccttcgggatgaaggtcaccgtcttcagcacgtccgacagcaaacgccatgatgccatcaagaacctcagcgcggacgatgtccttaataaccggtacgaggaccaaatgaatgcggcgacaggga

SEQ ID NO: 92722 - DNA, 535 bp, Zea mays
agcatgaggtgtttgtgtggctgcactcgttagctagagtcattttcgtctcggaattcccgggcggcgctttgcggaaacttcttggagagagagagagagagagagacggccccgcagcggcggaagcggagatgggggcgtcggatctagaccggcagatcgagcagctgaagcggtgcgagccgctcacggaggcggaggtcaaggcactgtgcctcaaggccatggagatcctcatcgaggagagtaacgtgcagcgcgtcgacgcccccgtcaccatttgtggagacatacatggacagttctatgacatgaaagagctgttcaaagttggaggtgactgcccaaagacaaactatttgttccttggggattttgttgaccgaggattttattctgttgaaacttttttgcttcttttggctttaaaggttaggtatccagaccgtattaccttaatacgaagaaaccatgagagcagacagatcacacatgtttatggattctatgatgaatgccttcgcaaatattg

SEQ ID NO: 92723 - DNA, 492 bp, Zea mays
  unsure (1)..(492): unsure at all n locations
tagggtgaggagctgggtctgaggcccgccttcgcccgccatcagcgattgccccgtccggttccgaattggcgggcggacggcattcgccgaggcctcagtagcaacagctgtcctggcgtctcccttgccagatccatcgacgcnctgtggccgaccctgccgtcgtgcccgttcgaaggtgcggcagccggcaggcgagcgatttcattcgacatgaatcccgagtacgactaccttttcaaacttctgcttattggtgattctggtgttgggaaatcatgcttgcttctcagatttgcagacgattcttatttggacagctatatcagcacaattggggttgatttcaaaattcgcacagtggagcaagatgggaagaccatanaacttcagatttgggatacctgctgggcaagagcgcttcangacaatcactagcagctactaccgcggagctcatggaatcattattggatatgacgtgacaga

SEQ ID NO: 92724 - DNA, 483 bp, Zea mays
  unsure (1)..(483): unsure at all n locations
agggtaatggagtgtgtctgaagcccgccacnccgcncacttgcgatctctgtacgaatttcggaattcgagccacgcagtcaggactgagagagagagagagagagagattgagactcgatccaccgacagaccgtcatgggctgggggctgtacggtatattcatatcacaactcttgagtgtatacacaaacacaaaaccatgacgctcgttatacaggatccaagcttacatacgcctacatgcgacgatatacctctcgtatcgtgtcacctagctagaactgactggacatgattatacagccaccagactggcaaaacgatgtcgtactgcatcttaatggtctagcacgacataaagaattagtccgatgcctgaatggttagcacttgcctgaccattttttcaaatgaagaatcctacaaaaaaggccgttttgaacgatttgttaaagcccaaattttaacaaggcggaagt

SEQ ID NO: 92725 - DNA, 548 bp, Zea mays
  unsure (1)..(548): unsure at all n locations
gagggtatatgatgnnttntnatggcaatcgcatagacttagttgcactgacgcttgaatttccgggtcgacccacgcgtccgcgcttctcttcggttcagctctcgagtttccaggatgaaagtaatagctgcctacctgctggctgtgcttagtggaaacactatgccgactgctgatgatgttaagagcattctggaatcagatgatgctgaagctgatgaacaaaaactagagttcctgctcacagaactcaaagacaaggacataacagaagtgattgcagctggaagggaaaggttatactctgtgccttcagatggtggtgcaattgacatgggagctccagcagctgtagctggcggtggcgcagcacctgctgaagaggcaaagaaggaagaaaaggttgaagagaacgaagagtctgatgaagatatgggtttcagcttgttcgattaaaacaccactggcaatttacagattctctcgcgaatggtctcacaatattcgctggtttccacaaaattagattgtcaatagctactact

SEQ ID NO: 92726 - DNA, 546 bp, Zea mays
  unsure (1)..(546): unsure at all n locations
ggtatttagtagggtggggaggtgtcagcctcatcgcacatngtattccttcaccggtcctgaattcccgggtcgacccacgcgtccggtaggcatttcctgaggcgttgtttcatcaacttcttttagcaatgctctatccagattgtgggacgcatttaggagcacatcggattttctctgttgttcttgttccctcttccgttgctccgttttcatttgcagacacttcacagacaaggaagattgatctccgaaggacattatctagaacaacatcagtgttttcatcttctgctgctttgtttgggaaacttaaaagagatatgctttcatttcgtgaaagtgcactccaggataacacaaagctactgcccatcagtgagaatgcaaatgagatcagtgcaaatgatgcaaaattattcaagtcacagactattcaaaggatggttagtacaagagatatttctcttccctcttccacagatacaagtacttcgagcgaaccaactttaaatcangaaaaggatgctgtcaccctcatcn

SEQ ID NO: 92727 - DNA, 532 bp, Zea mays
  unsure (1)..(532): unsure at all n locations
gaagattttatnccagctgggacagaagtagcgtggctaccggtcctgaattcccgggtcgacccacgcgtccgcaaacgtgttcccaacagcgcattatggcttttaagattcccggcagctggtgaaacgggagtgagagcatatgctgctgccagaggagtaagatcagatcaaattgtattcacagacgttgccatgaaaaatgagcatatacgacgcagtgccctggcagaccttttcctggacactcccctctgcaatgcacacacaacaggcactgacatactgtgggctggtctgccaatgatcacccttccactagagaaaatggcaaccagagtagctggttccctctgcgtagctactgngcttggggaggagatgattgttagcagcatgaagaagtatgaagatagagcagtagaactagcgctgaantccgtgaagcttcaagcgctgactaacaagctcaaggaagttcgtatgacctgcccngtgtttgatacagctcgatgggtgcgcaaccctt

SEQ ID NO: 92728 - DNA, 539 bp, Zea mays
gggtgagggttccgtgtagaggggaaggtgagaagagagtgctgcaccggtcctgaattcccgggtcgacccacgcgtccggtgggttggcttctcctcccccaccggttcgtgttcaggttctggttcgtgggcgagggggaagagatggcggcgtcggacgttgagtaccgttgcttcgttggcggcctcgcctgggccaccgacgaccactccctcaacaacgccttcagcacctacggcgaggtcctcgagtcgaagatcatcctggatcgggagacgcagaggtcccgcggcttcggcttcgtcaccttctccacggaggacgcgatgcgcagcgccatcgagggcatgaacggcaaggagctcgacggccgcaacatcaccgttaacgaggcccagtcccgcggcggccgtggaggcggcggtggcggatacggtggcgggcgccgtgatggaggcggctacggcggtggcggtggaggctacggcggtggtcgtggaggctacggcggcggtgggggatacggtggtgcaaa

SEQ ID NO: 92729 - DNA, 523 bp, Zea mays
agggagagggtttctgggaatgcatcgataagtagcctgactcgctccggaattcccgggcttgaaagtctacctcaagacgctgctgacgaggaagaaccacttgacaggggtggagtacagggacgaccccaccatggtcgggtgggagctgatgaacgagccccgctgcaccacggacccctccggcgacacgctgcagcgctggatggaggagatgtcggcgtacgtcaagtccatcgacaagaagcatctgctcaccgtcggcaccgaggggttctacgggccgacgagcccccaggagaagctggacgtcaatccgggcacgtggaaggacaacaactacggttcggacttcatccgcaacgccaagatcccagacatcgacttcgcttccatccacctctaccctgacacctggctgctgcagcagcacgccacggtggacgagaagctcaagttcgtgaagcggtgggtggcgtcccacatcgaggacggtgacaaggagctgggcaagccggtc

SEQ ID NO: 92730 - DNA, 534 bp, Zea mays
  unsure (1)..(534): unsure at all n locations
gtggatgtntgtctgcgcatcgtatcgtacgcatacgcacttacttaccggtcctgaattcccgggtcgacccacgcgtccggtgaagggcgacgtccagagagtaagaacgaggcgacacagtatggacttgatatgagtgagcaacaatatcttgagcattcgattccatggatagctgccaatgatgctgcttggcgtgcgttatgtcgttactgggcttcgactgaatttaaggcaaagtctgtgcgacacagttccaatcgtggaaccgagtcgtatcacaggtatggaggtgatgatcactttcgtttggcaaaacgaatggaagctagcactggtgcagtgcctagtgatgttcaaatataccttaaggggcacagaggatcagatcctgcaaatccagatgtgttgtgcagccaaaaggcaacagatcgtgtgctgggtgtttggaaatgtttggtaggttctgtttatatggatttttgtatgtaagattacattgttcttttgtatgaagctgcatatggcgag

SEQ ID NO: 92731 - DNA, 550 bp, Zea mays
  unsure (1)..(550): unsure at all n locations
ggttagtagtgggtgaagttgttgtaatgtggggggagggacgggagtcctcgtccggaattcccgggtcgacccacgcgtccgcaccatttcccaaaccctacccatacccccgccgccgccgccgccatgccgcccaagctcgagccgtcgcaggtggtggaggtcttcgtccgggtgacgggcggcgaggtcggcgcggcgtcgtccctggcgcccaagatcggcccgctcgggctctccccgaagaagatcggcgaggacatcgccaaggagacggccaaggactggaagggcctgcgcgtcaccgtcaagctcaccgtccagaaccgncaggccaaggtctccgtcgtcccctccgncgncgcgctcgtcatcaaggcgctcaaggagcccgagagggaccggaaagaaggtcaagaacatcaagcacagcggcaacatcggcctcgacgacgtcgtcgagatcgccaggaccatgaggaacaggtccatggccaaggagttggccggcaccgtcaaggagatcctcgggcacctgcgtcagccc

SEQ ID NO: 92732 - DNA, 530 bp, Zea mays
agggaaggttagtgctagaggggaagggatagtattcatcaccggtccggaattcccgggtcgagccacgcgtccggaagccctctagtggtactgagtctgaagctgctccctcaaccaatgatgaaactcctgcagcggtagaagacaagaatggaacttctgaagtacaagatgctgctgaaaatccagaggcagaagaaactaacactgctgcagaggaaacacctgctgtagaggaagcaagtgagactaccgaggaggaagaggctgagaaacctgagatcaagatcgaaacagctccagcagattttcgtttcccaacaacaaaccaaacaaggcattgtttcacacgctatgttgaatatcacaggtgtgtggctgcaaaaggtgaggatgcacctgagtgtgataagttcgccaagtactatcgatccctgtgcccaggtgaatgggttgatcgctggaacgagcaacgcgaaaacggcaccttccctggacctctgtaatcctacaatgcaaaagaagta

SEQ ID NO: 92733 - DNA, 532 bp, Zea mays
  unsure (1)..(532): unsure at all n locations
ngaagtgtcntcctagaggaaggatggaagagagtattcaccggtccggaattcccgggtcgacccacgcgtccgcctcctcaccactggtgccagggagagcgctttcaggaacatcaaaaccattgctgagtgcgttgcagatgagttgatcaacgctgccaagggctcttccaacagctacgccatcaagaagaaggacgagattgagcgtgttgccaaggccaaccgttgagtggagcttgtatcctggtgcacttgcactagaactacgtttctggcagtcgtatttttttcttgtgtttttacccatgtttagactttgagacctatatctaaggttttggttctcagtgaacaatgaaaattactgtgaaatgcagttgttttggtgcagaaatgcgcactgagatattctgcttgtgaatttgtgagtgctgttggcgtcgccgctggcttgccgatgtagtatttcttgtcactcagatgtcaccggntctatgttggcaatcttctgtaggttagacaattg

SEQ ID NO: 92734 - DNA, 523 bp, Zea mays
tggaagtgtgtgtagaggcagggaagagaggcttcaccggtccggaattcccgggtcgacccacgcgtccggagcaagaagctcacgtggaacacccgcgtaaggatagcgctaggcactgctcgcgccttagagtacctgcatgaggtgtgcctacccccagtggtgcatagtaggaccttcaaggcatctaacatcctgcttgatgaagagtacagcccgcatctatctgactgtgggcttgctgctgctctcactactgctgtggtctccgctgaagcggttggctcctttggatatagtgctcctgaggtcgccatgtcaggaacatacactgcaaagagcgacgtgtacagcttcggagtagtgatgctggagctgctgacaggccgcaagccactagacagtgtgtgtgtgtgtgtgtgttttataccagctccagagagaggtcagaacagtctctcgtcagatgggcagccccgcagctccacgacatcgatctcctcgccaggatggtcgatcc

SEQ ID NO: 92735 - DNA, 534 bp, Zea mays
tggtggagcggcgtgctgtccatgccactacgaattatgatgacctcgcgcctgaattcccgggtcgacgccacgcgtgcgccgctgcctccgcctctcgagtctcgtccacccgtggtcctcctagctgctctactcgccaggggggatgggcaagattgagatcggaatcaacggcttcggaaggatcggcaggctcgtggccagcgtcgccctccagagcgaggatgtcgagctcgtcaccgtcaacgaccccttcatcaccaccgactacatgacctacatgttcaagtacgacaccgtccacgggcactggaagcacagcgacatcacactcaaggactccaagacccttctcttcggtgacaagccggtcaccgtctttggcatcaagaaccctgaggaaatcccgtcgcgtgaggctggcgctgactatgtcacggagtccaccggcgtctatactgacaaggacaaagctgctgcacatatcatgggtggtgccaagaacgttgatatctcttgcccaagcaaaga

SEQ ID NO: 92736 - DNA, 546 bp, Zea mays
  unsure (1)..(546): unsure at all n locations
gggggtaggggggagaagttggtcatgtagggaggaggatgaatatcatgcaccggtccggaattcccgggtcgacccacgcgtccgtgaagttgaactcattggatttgatgatgttaaagagggtaaatcccgaagtgacatgacggttgaagagaggattgcagctgcagacaggagaaagattgagggcaatgcatatttcaaagaaaagaagcttgaggaggccatgcagcaatatgaaatggcgattgcatacatgggagatgatttcatgtttcaattatttggaaagtacagagacatggccttggctgtgaaaaatccatgccatctcaatatggctgcatgcctgatcaaactaaagagattcgatgaagctattgcgcagtgtagcattgttttgacagaagatgaaagtaatgtcaaagcgctgttcangcgaggaaaagctaaatctgaacttggccagacagaatcagcgaggggaagatttcctcaaagcgaagaagtacttcccagaagacaaggagatcatttcggagc

SEQ ID NO: 92737 - DNA, 524 bp, Zea mays
ctggaggcgtctgcctacgagggggagtatcgtacctcgcgcctgaattcccgggtcgacgccacgcgtccgcggacgcgtgggccaagctattgaattatctgctgagattctagcaaatgtgaaattcattcgagaggggaagttaattggcaagtattttgaagagatcagtcaggatactgggaaatatgtctttggtgttgatgacactctgaaggctcttgaaatgggtgctgtcgagaccctgattgtgtgggaaaatctggatatcaacagatatgtgatcaagaacagtactactggggaaattattataaaacatctgaacaaagagcaggaagctgaccagagcaatttccgtgacccatctaccaatactgatctcgaagttcaggaaaaaatgtctctcctggaatggtttgccaatgaatacaagaagtttggttgctcgttggagtttgtgaccaacaagtctcaggagggatcccagttctgtagaggatttggtggcattggtggca

SEQ ID NO: 92738 - DNA, 529 bp, Zea mays
gtagagaagtgaagggaagtgttcgcgcccccgtaaaaagaagcgtacctctcctaatttccggtcgagccacgcgtgcgtgcaagtgacggccccgacccatcatgcgccattcgaatcaaaccactacctgatttgtttaggccccggaaatttgccgggtcgctcgtgtcgctcctctccctgcgcagcccccagatccggcaccgaccgctcctcgatccccgcaccccacgcccacacgcctggaccagcagtgtcgcgcgcctggtatgaggaagagaacacgaacggcggcatggcggctccgcccgcgaaggcccgggccgactaccactaccttatcaagctgctcctcattggagacactcctgttggcaagagttgcctcctgttgcggttctctgatggctccttcactacaagctttattaccacaatatggattgacttttacatacgaacgatacaaattggatggcaaacgtataaagctacacatttgggatccggctggccaataacgctt

SEQ ID NO: 92739 - DNA, 520 bp, Zea mays
  unsure (1)..(520): unsure at all n locations
agggacgcgtgtgngttaccagcaggagcatngtaccacttcctaatttcgggtcgggccacgcgtgcgggagagcagcccggaggagggggagcaagcagtagccgtcggtggaagatgtcgtacctgctggcgcgtctgcactcggggtgggcggtggaccaggccatcctcgccgaggaggagcgcctcgtcatcatccgcttcggccatgactgggacgagacctgcatgcagatggatgaagtgctagcagcagtagctgagaccataaagaactttgcggtcatctaccttgttgacatcacagaggtccctgatttcaacaccatgtatgagctgtacgacccttcgacagtgatgttcttcttccggaacaagcacatcatgattgatctcgggactggaaacaacaacaagatcaactgggccctgaaggacaagcaagagttcatcgacattgtggagaccgtatacaggggcgcccggaaaggccgtggtctggtgattgctccaaaan

SEQ ID NO: 92740 - DNA, 518 bp, Zea mays
  unsure (1)..(518): unsure at all n locations
ntgggaagggtttgtcatgcaggaggtgggatgtttgcccctcctgaattcccgggtcgagccacgcgtgcggcagcagcagcagaggggcctgcacgcggcgttcctgggcccgcgggcgcagccgatgaaggagtccgggtcgccgccggcgctggcgccggcgccggcgcagtcgaagctgtaccgcggcgtgcggcagcgccactggggcaagtgggtggcggagatccgtctcccgaagaaccgcacgcggctgtggctcggcaccttcgacaccgccgaggacgcggcgctcgcctacgacaaggcggccttccgcctccgcggcgacacggcgcgcctcaacttcccggccctccggcgcggcggcgcgcacctcgccggtccgctgcacgcgtacgtggacgccaagctgaccgtcatctgccagtccctgtcggagtccaagtccaagaacgggttgtcgggcgacaagtctgccgcgttcccggcggacttccccaagtgcttggcgt

SEQ ID NO: 92741 - DNA, 534 bp, Zea mays
  unsure (1)..(534): unsure at all n locations
ntaagagtcttggccacccgcaacatagtatgtcatcaccggtccggaattcccgggtcgagccacgcgtccgagtaaatccattcacaccaagttcaacgctattgttgactctggcacctctttcacagctcggtcggatccgatgtacagtgcagatcactagcagcttcaactcacaagtccaggataagccaagccagcttgactcttctctgccctttgaattttgctactctataagtccaaaggcttctaccaatcctccgaacataagcttcacggcggaaggtggaagcgtgtttcctgtcaatgatccaataattaccattacggactctgtatctaatccgatggcatattgcttggctgttatgaagagcgaaggtgttaacttaataggggagaattttatgtctgggctgaaggtcctgtttgatccaaagaagaaggtcttgggctggaaaaactttgattgttacagcgtgagcaactcaagaagcaaccttccagtgaacccaaattcttctggtt

SEQ ID NO: 92742 - DNA, 547 bp, Zea mays
tggatgtggttgggagaggaggtgtgatttaggaggggaagaagggatgtattctctcgtccggaattcccgggtcgagccacgcgtccggtcccacccggtgaagctggtgccgttcaacccggagtaccaggacgagtcggtgctgtgggcggagagcggcgacgtgggcaagggcttccgctgcatccgcatggtgaacaacatccgcctcaacttcgacgccttccacggcgacaagggccacggcggcgtgcacgacggcaccaccgtggtgctgtgggagtgggccaagggcgacaaccagagctggaagatcctgccctggggcgacgaggcctacgccgcgggaggcagcagcgccgtcaacgcgccccgcttcggcggcggcggcgagcccaccgtccgcatctactgcaaggccgacgaggggttcagcgccacggtccgcaacggcgccgtgtgcctcgcgcccaccaacccgcgcgacgagtaccagcactggatcaaggacatgcgccacagcaacagcgtcaaggacgaggat

SEQ ID NO: 92743 - DNA, 541 bp, Zea mays
gatgtagggaggtgaggcgtttttgagctcatgttctaacgtattcatgcccggtccggaattcccgggctaggtctagatcgcgagcgccgcccttttttttttttttttatcagcaattcagcatcttgttactcatacggaaggaggagtagacgctacaagctagaacttgtgaacacacgctattgacctctaaaccaccttaacaaaatctcaaaattcacgcctgggctttgattctgcaaccgtgactcggatctgtctaccatccaagtcgatgccatcaaggtttgatatggcattgttgacctcctcggcagagccataagtgacgaaaccaaacccccttgacctgccgctatccctgtcgtagatgaccttagcatccagcacctgtccttgctcactgaataggttctccagagtcgagttgtcaacgccccatgcaaggttccccacgtataccttgttccctgaatcgacaaagctgctgctgccgacaccaccaccaccaccccttggtgctcttggtgcggaa

SEQ ID NO: 92744 - DNA, 531 bp, Zea mays
gatttggtcttgcctagcccagagagtaggtgcgcctgcaccggtcctgaattcccgggtcgaggaggacatgttataatgcttggcgcaaatccttcaagccaggctgctgcactggaggcactacgtgcaggtcgtggtggtttgcaagttggaggtgggataaatttggagaatgcaatgtcttaccttaatgaaggggccagtcatgtgatagtgacctcttatgtgtttagtgatggcaagatgaacactgaaaggttaagaaaacttgtcgagctggttgggaaacagaggctcgtgctggacctcagttgtcgaaaaaaggatggccgatataccattgtaactgacaggtggcaaaagttcagtgatgtgtctgtggatgaaccaacattagaatatctcgctgcctttgcatatgagtttttggttcatggtgttgatgttgagggcaataagctaagaatggattaagaactcgtggaactattggtgcactattcaccaaatccaatcacttatgctggg

SEQ ID NO: 92745 - DNA, 548 bp, Zea mays
agtaggggagtggggagagaagtgtctttgtattgctaggaaggaagtattgctcaccggtccggaattcccgggtcgacccacgcgtccgagctacgcaagcacagaagctaggcgtttatctgaagcagcatttggtgaggctatgcgtcgcactattgggtatagttgggtgcggcaagcagcaagagaacttgggaaaagtagaatttatatgggtgtaccgtttatagctgagtgggttagagacaaaggacaccacattaaatcgcaggttaatgctgcttcaggtgctatttctctaatacaacttcaagaagggatgaaaaagatggaaggaagcgagaacagtgaagagcaacttatgaagagttttgaggagaaaaaagatgccatgcttagctcgctatggaaaattaatgtggtcgatattgagtcaacactttcacgtgtctgccaagcagttctgagagataacacggtctccaaagatgtcctgaagctgcgagcgaaagcgttgaaaaagctcggaacgatattcccaggcg

SEQ ID NO: 92746 - DNA, 523 bp, Zea mays
  unsure (1)..(523): unsure at all n locations
atggggcgtcgttgtgngttacnctagcaagtanctcactaccnactgaacttccggntcggggcacgcgtgcgtgcaaggtcaccgtcaacgaggcccagtcccttggcgtccgtcgacgcggcggctgcgccgtgtacggtgttgaccgtgggggcggcggctaccgaggtggccggcgccgtgatggcggcggcggctacagcggtggcggcagctactgtggtggcagcggcagctacagtggtggtggcatcggctacggcggtggcaaccgtggcggccgctactgcaactccgacgggaactggaggaactgaccggtggggcccgcgcggccaagttatcctgatcgctaccgagttgtttaccctagtccagagtgtttatcttcgttcgtctcgtgttcgttgttgcccatctgtgtttttgattgaaggtcgctctgtgtcagatgctagtgctgtgttcatactcagctccagcagacccatgcatcaaccagcatggactgcggatcgat

SEQ ID NO: 92747 - DNA, 524 bp, Zea mays
atggagtggtctgtcatagcaggaggaaggtattcatccctctccggaattcccgggtcgaggcacgcgtgcgaccacgcccccgctcctctcgtctctatcttcgcctcttccatcgcaggattcagcggccatgggcggcggcaacgcccagaagtccaagatggcgcgcgagaggaacgccgagaagaacaagggcggcaaaggcagccagctggaggccaacaagaaggccatgaacatccagtgcaagatctgcatgcagaccttcatctgcaccacctccgaggccaagtgcaaagaacatgcggaggcgaggcatcccaagaacgacctctaccagtgcttcccccacctcaagaactagtaagcagcagaagcatatgctctgctcagctaaaagacaagtactacatatatatatatatacgctgtgtgtcaattaatgggttctaggctgctgctgatgcggctgcttcgttcgtgttgccccgtctgattatgtactgtaacccttggctgtc

SEQ ID NO: 92748 - DNA, 515 bp, Zea mays
gaggctttgtctacgaaggggaaagtatgtcatccacgtccggaattcccgggtcgacccacgcgtgcgaacaaaaagaaaccaaactcggctcaagagagatcgcatcttgcctgcccacccagcttccctggcgtgcctcctcgcccgagcgacgcggcctcccgtagaccgagcaaggcaacccaccactgagaggcacgcagaggagcaggaagccggagaccaagatgtcgtcggtgttcagcggcgatgagacggcccccttcttcggtttcctcggcgccgccgccgccctcgtcttctcatgcatgggcgcagcgtacgggaccgcgaagagcggcgtcggcgtggcgtcgatgggtgtgatgcggccggagctcgtcatgaagtccatcgtgcccgtggtcatggctggtgtgctcggtatctacgggctcatcatcgccgtcatcatcagcactgggatcaaccgcaaggccaaaccctactacctttttgatggctacgctcac

SEQ ID NO: 92749 - DNA, 530 bp, Zea mays
ataattgtgttatagtaggaaaaaagaagaaagtagtcttcgtccggaattcccgggggaacctggcaatggcttgacatatggaacgctctgtaccgtgagcggattatcttcattggggacaatatagatggagaagtcagcaaccaagtgttggcaagcatgctctatcttgacagcattgataattccaaaaagataatgctatacattaatggaccaggaggagatcttactccgtgtatggcactatatgataccatgctaagtctaaaaagtcctattggcactcactgcttgggctttgcattcaacctggcaggattcatccttgcagccggtgaaaagggttcacgcactggtatgcctctatgccggatttcactccaatcacctgccggagcagctcgaggacaagctgacgatatagaaaacgaagcaaacgagcttatccgcatcaagaactatctctatggcaagcttcgcgggcacacaggccattctgtcgagaagatccatgaggacctgtc

SEQ ID NO: 92750 - DNA, 523 bp, Zea mays
taaggtgtcctaggggggaggaaagagtgctcaccggtccggaattcccgggtcgacccacgcgtccggcccaaggtgtccacaacgaggaaggcgactcggatcacagcgcctacatgaaacccggctgcttcgacgcgcgcatcactacgttgggctggaaccaggttgacctcctgcgagagcatgtgaaggaatctgggcttgcggataagattgagctggttatttgttctcctttgtcaaggaccatgcatactgcagtgggagtttttggtggctaaagctgcagtaatggtgtgagtgtgcctccactgatggtggagaatgctggacgtacggcagtctcaagtatgaactgaccaccatctctcgctgctgaggcctgcaaggagcgcttgggtgtccatccttgtgacaagaggaggagcatcacacagtaccgtgctctcatacctgccattgatttttcgctgatagagagtgacgaatatgttctatgggtaccagatgtcagagacac

SEQ ID NO: 92751 - DNA, 529 bp, Zea mays
  unsure (1)..(529): unsure at all n locations
tgtgaggttcgttgcctcgtagaggtagtacgtattgctcaccggtccggaattcccgggtcgacccacgcgtccgcctcccgttagactaggttaggctaggctagggtgtcgaccagctcgcggtaatggtggccgtcangttccatcagtacgaggtggtggggcgcgcgctgccgacgcccggcgacgagcaccccaagatctaccgcatgaagctctgggccaccaacgaagtccgcgccaagagcaagttctggtacttcctgaggaagttgaagaaggttaagaagagcaacggtcaggtcctggccatcaacgagatcttcgagcgtaacccgacgacgatcaagaactatggcatctggctgcgctaccagagcagaaccggctaccacaacatgtacaaagagtaccgcgacacaaccctgaacggcgctgtagagcagatgtacaatgagatggcttttcgccaccgcgtgaggtccccctgcatccagatcatcaagaccgncacagtacacttcag

SEQ ID NO: 92752 - DNA, 524 bp, Zea mays
tggatgaggcgtgtgtgctacgccatgggaagtatgcgtgcaccgctcctgaattcccgggtcgagccacgcgtgcgcgacgaagcaaggaacgcaccccgaatcccaactcctgtgtccgccatcgcctcgtggcggtggctccggctcctgctgctgctgctgctcccccagccgctcccgcccggagcacgccgccggcgccgacgccggcgcgtcgcatggatatggcccccgcgtctgtctacttcaatccgcgctcggtcgaggaaatcttcaaggacttctccggccgccgcgcggggctcgtccgcgccctcacctccgatgtggacgatttctgcagcttgtgcgacccagataaggagaatttgtgtctctacggccttcccaacgggagctgggaggtgtcgccgccggcggaagaagttcctccggagttgcccgaaccggcgctcggcatcaactttgcgcgcgacggcatgcaacgccccgactggcttacacttgttggcggccaattt

SEQ ID NO: 92753 - DNA, 552 bp, Zea mays
  unsure (1)..(552): unsure at all n locations
gtttgcgagaggagtgagaattgtgtgtgagtcatgtcatggaaagtatgcatgcactctcgtccggaattcccgggtcgacccacgcgtccgtctcaaggccacgtatggactgttcagtgatgatggagttctgaaactcccttactgcattgggagtgtcaggattcgtctgtgctcttttcgccattggaatcccttatttatctgccctcaggatttggttggggttctccacgcttttcagcctcatgtatattgtgatagcagttgtgctgtcgtcgagagatgggataaccgcacctgcaagggattacagcatccccaaatcatcgcagtcaactcgagtcttcactacgataggttccatagcagaccttgtgtttgcttacaacaccggcatgctgccagaaattcaggcaaccatcaggcctnctgtggtgaagaacatggagaaagctctatggttccagttcaccattggctccttgcctctctatgctgtagttnttgtgggttactgggcttatgggtcctcaacatcaggctacc

SEQ ID NO: 92754 - DNA, 673 bp, Zea mays
  unsure (1)..(673): unsure at all n locations
ngggagttgtctgtggcctcccaacccttngtantcgcatcacccagtccggaatctcccgggntcgagcccagcgcgtgccggcaacaacaattggtgacttcaaaccagtggatgatgtccttctacagtgtacaatgatgctccagaatcgagtacgcagcatagtaacggcccgtgggtgaatggtcatcaacgacaacatngcttgtgaacaatcggttgatcatatgcaacaagccactttgtctcaggcgcagcattacctacgacataccaatgtacctttaggactgtgagccttgcgtgcacatgtccaacatcttgatgaagaatgacacgggaatttacctttggttaaatggggcatcaatgaataccctgcaaaagcttggcatgagtcgtttccttgaagggtactgtcattcacagaacagtattgtccccaatgattatagcggtgtaggggaattccctgaggacttgagcattactcaaatctcaacaagaccccacgaatgaatattcaatttgaaaaatgtgcaagcacttgttggcgtatcgttcttcagaatgtactgatattgacagggacaangctttcacaatcctttcaattccttgaaaaaaacccaaccacgaaacaaggaatgaaaggggctgtgaaaaagac

SEQ ID NO: 92755 - DNA, 533 bp, Zea mays
atggagtgtcgtgttatgttggagatgtatagtattgcatgcaccggtccggaattcccgggtcgacccacgcgtccgtacagaaaataaacctgtgtaggttttggctgcattggagaggattgaacagcaagcggaggtgacctatgatcaattgctaatgctggaggctaatctattttttggcgcctttgcctactatgatcggcatagagacatgcggatggatattgatgatatgtcctatgaggaattattggccctggacgagagaataggctctgtgagcacagctctttcagaggagcagttcacataatgcctcacaagaagcatatatcgtcaggtcgctctagaagtgaacacatcaaccgttgatgacatgaaatgcagcatctgtcaggaagagtacgcggagggcgaacaggcttggaggctgccatgcgagcaccggtaccatgtgtgctgcataggccaatggcttgggcagaagaactggtgtacagtatgcaaagcgtttgacgtgccattca

SEQ ID NO: 92756 - DNA, 526 bp, Zea mays
  unsure (1)..(526): unsure at all n locations
tggaggaggtggtgtagtctacgtatagcacagtatgtctgccccgtccggaattcccgggtcgagccacgcgtgcgcggggaagttcatcatcccagagatcagcaacttcgctagtatctggttcatctctctcttgagctgggtcttcgccacgggtatcctggagatgaggaggagcggcgtgggcatcgacgagtggtggaggaacgagcagttctgggtcatcggaggcatcttcgaccacctcttcgacgtcttccagggcctactcaaggcgcttgccggcatcgacaccaacttcaccgtcaccttcaaggcctcggatgaagacggccacttcgctgagctgtacatgttcaagtggacgacacttctgatccgcgccaccagcaatctgatcatcaacctggtctgcgttagtggctgcagtctctacgccatcaacaagcggtaccaaatctgggggtccgttcttcgcaagctcttcttcgccttctgggtgaatcgtcacctgtacccngcn

SEQ ID NO: 92757 - DNA, 528 bp, Zea mays
  unsure (1)..(528): unsure at all n locations
ntgggagctgtggtgttacggagcagagggaggtatactcgtccggaattcccgggtcgacccacgcgtccgggacatgaatggtttcagggcattggatgctaaataacctactggggatttccatatgtatggcgtttgtcagccatgtgaggcttcccaacataaagatctgtgcactgcttcttgcctgcttgtttgtgtatgatattttctgggtgttcttctcagaaaggttctttggagcaaatgtcatggtttctgttgccactcagaaggcatctaatcctgttcacacagtagcaaataagctcagcctgcctgggttgcaattgattacaaaaaaagctggagcttccagtcaagcttgtatttcctaagaatttgttgggtgggattgttccaagaagcaatcctggtgattacatgatgcttggccttggaaaccatgccattccagggatgcttctagctctggtactctttttttgataaccggaagttaaaggatgtgaacgttgttccatc

SEQ ID NO: 92758 - DNA, 539 bp, Zea mays
ggtggaggtaggtataagtttttctagaggggagagggatagtagtactggtccggaattcccgggtcgacccacgcgtccggtgaagtactcgcaggagccgggcaaccctaccaagtcggctaaggccatgggcagggatctgagggtccacttcaagaacacaagggagacagcctttgcgcttcgcaagttgtctttgaccaaggctaagcgataccttgaggatgttattgctcacaagcaggcaattcccttccggagatactgtgggggtgttggtcgcaccgcgcaagctaagtcgcgccactccaatgggcagggccgctggcccgttaaatcagccaggttcatcctggatttgctgaagaatgctgagagtaacgctgatgtgaaaggcttggatgtggacaacctctatgtttcacacattcaggtgaatcaagcccaaaagcataggcgccgtacctaccgtgctcaccggcgcattaatccctaaattgtcctaacctgccacattgagctgaacttgtcagaac

SEQ ID NO: 92759 - DNA, 549 bp, Zea mays
gctatatatgacggataaattcgtttctttgtttcctatccctcgtattgtactactgtcctgaattcccgggtcgggccgtgcgtaccgtcttcttagtactttccttgcaagtgtcgttccgtccctgtagtgaggcagtatactttcgaatgtcttcacttcatggtcgctccactcctgttagatctggactcttatcctgcattctgtacttgccctaagcatctatgatgcctgttttaaaaaacaatcttttctatcacaataataatgatctactcacccgcataacgtataatcttatatccacacacagtaccataagactctattcgtacctaaaagcccctcctacctatatgcctaagcttacgaacgcttatatcccacatactagcccttcattatcgacaccaaaaaataatccattgccctagtttataacaatttagtccttggaaacccattccctatcctaattttatcaacttttaacacttcctttttttcctaactaaacttaatatcgatataacccctaccctc

SEQ ID NO: 92760 - DNA, 551 bp, Zea mays
  unsure (1)..(551): unsure at all n locations
ggtggtntgagagggagaaacagctgtgnntcaatagaggtgaggataggatagtattgcatgcaccggtccggaattcccgggtcgacccacgcgtccggtcccataatacatgtgggccggcatcatgaaggggacttgatcattcatcaagctagcacggagccctcatatagttatgtgccatcaatctttttaccacaatggtgtaatatatcttgttcttgagtacatggaccgtggatcgcttgcagacattgttaagcaagtgaagactattctggagccataccttgcagtactttgtaagcaggtcttggagggtttattgtatcttcatcatcaaaggcacgtgattcacagggacataaaaccatctaacttgttggtcaaccgtaaaggtgaagtcaagattaccgacttcggagtgagtgctgtgctagcaagctcaataggtcagcgagatacatttgttggaacctacaactatatggcgcctgagcggattagtggtagcacttatgactacaaaagtgacatatggagtttgg

SEQ ID NO: 92761 - DNA, 537 bp, Zea mays
gttgagtaagagggaagagggtgcgttattgatgcgggaggtatctttaccccctccggaattcccgggtcgacccacgcgtgcgcaactacccactggccactgcagccgagtgttcctttctagccttcacttctcagcacggcgaggctgggatcccccgactgcagccgccagccgcgccatggagcaagcagccatgccgcaggttccccgcgtcaagctcggcatccaggggcttgaggtgtcgaagctggggttcgggtgcatggggctcacgggcacctacaacgcgccgctcggcgacgaggccgtggccgccgtcgtcgcgcacgccttacgccgcgggatcaccttcttcgacacctccgatgcctacgggccccgcaccaacgagaccctactggggaaagcgctcaagcagctgccgaaggagcaagtgcaagtggccaccaagttcgggataagtcaaggcgccgctggcatgaccgtgtgcggcacgcccgaatacgtacgcgcctgctgcgaggccagact

SEQ ID NO: 92762 - DNA, 529 bp, Zea mays
  unsure (1)..(529): unsure at all n locations
agagaagcggtgtgtgccctccgtaataagtanggtacacccgtccggaattcccgggcacgaagactgttatttggaacggccccatgggagtgtttgagttctagaagtttgcagctggcactgacgcgattcgcaaggagctagctgagcgtacagaccacgaaaggtgtcactaccatcatcggcggcggcgactctgttgctgctgtcgagaaggctgggctggccgacaagatgagccacatttcgaccggctgctgtgcgagcttggaactcttggaaggcaagactctacctggtgtccttgccctcgatgactcctagatccgctgctgctgctgctactcaagttctgccagctttgcgtgtcatcttgtttcggaccttggtgtaacactgcaaggctaaagtttactcctncgcacatggacttctggcgataggcttgccaccgtgtattgctagatgagtcgtggaataagcttttacttcctcgctcctgtgggtgaaatgactggaattcgtt

SEQ ID NO: 92763 - DNA, 535 bp, Zea mays
  unsure (1)..(535): unsure at all n locations
atgggatggnnnntnnttngnggctaacgccntagtacgtagncgactgtactgaattcccggatccgggtcggcccacgcgtacgctgggagatagagagaggagagggattgttttctcaaagagaaccttaacccaaacggcatgttcgcactgcagagcgaggatgtcaagctcgtcgccgtcaactaccccttcatcaccacggattacatgacctacatgttcaagtacgacaccgtgcactgccaatttaagcacatcgacatcaccctcaaagactccaagacgcttctcttctgctagaatccggtcaccgtctttggcatcatgaacccctaagagatcccgttgcgtgaagctttcgcttagtatgtccttgagttcaccggtgttctcactgacaaggaccaagcttcttcacatcttaaaagttgttccaaaaaagttgatatctattccccaatcatatattcacccattttgatgttggtttcaatgactacaattacaacttccattttacattgtttt

SEQ ID NO: 92764 - DNA, 524 bp, Zea mays
tgggaggttcgtccctacgtacatctactgatcatcaccggtccggaattcccgggggctgtggtaaaactgtcattagtcaggcactttccaagtacttcaattccgaagctgtggtttatgtgggctgtggggaacgaggaaacgagatggctgaggttctcatggactttccccagttgacgatgacattgcctgatggccgtgaggagtctgtcatgaagagaacaacactggtggctaacacatcaaacatgcctgtcgctgctcgtgaagcttccatttacacaggaattacaattgctgagtatttccgtgatatgggctacaacgtcagtatgatggctgactccacctcccggtgggctgaggcattgcgtgagatctcagggcgtttggctgaaatgcctgctgatagtggttacccagcttacttggctgcacgtttggcatccttttatgaacgtgctggtaaagtaaaatgtctgggaagtccagacaggaatggcagtgtcacaattgtt

SEQ ID NO: 92765 - DNA, 532 bp, Zea mays
  unsure (1)..(532): unsure at all n locations
gatgggcggtgtgtgtgcctagctaagcantgtatcgtacgactcaccggtcctgaattcccgggtcggcccacgcgtccgctgggagatagagagaggagagggagggttttctcaaagagaacctgaacccaaacggaaggagagaacactagcgttgggtcaccagggcgggcgtccatcccagcagccatggcgatggcgtacaagatggcgacggaggggatgaacgtgaaggaggagtgccagcgctggttcatggagatgaagtggaagaaggtgcaccgcttcgtggtgtacaagatcgacgagcggtcgcgcgccgtgctggtggacaaggtgggcggccccggggaagggtacaacgagctcgtggccgcgctgcccggcgacgactgccgctacgccgtcttcgacttcgacttcgtcactgttgacaactgccagaagagcaagatcttcttcatcgcctggtcaccggcggcgtcgaggatcagggccaagatcctgtacgcgacatcgaagcaaggcc

SEQ ID NO: 92766 - DNA, 529 bp, Zea mays
  unsure (1)..(529): unsure at all n locations
gaggcggttcttgcctccgaacacngatgtaatcactcaccggtcctgaattcccgggtcgacccacgcgtccggctggtggaccacgccctcagcagcggttactcggagcgcgagccctccgtcttctccgggagcaccaagttcgaggaggagctccgcgcggtgctgccccaggaggtggaggccgcccgcgtcgccgtcgccgagggcaccgcccccgtggccaaccggatcgcggacagccgctcgttcccgctgtaccgcttcgtgcgcgaggagctcggctgcgtgttcctcaccggcgagaagctcaagtcccccggcgaggagtgcaacaaggtgttcctcggcatcagccagggcaagctcgtcgaccccatgctcgagtgcctcaaggagtgggacggcaagccgctgcccatcaacatcaactaaaagacgccaggcgccgccatccatgctgccgcccgcgcatggccggaggagaagaggaaaatacatgaaaaaataaaacttgtacacgtgt

SEQ ID NO: 92767 - DNA, 523 bp, Zea mays
  unsure (1)..(523): unsure at all n locations
gagggatggtcttttgacctcgaataganagtatgactacccgctcctgaattcccgggtcgacgccacgcgtccggccggcacccccatcaaggtgggttccttcggcgagggccgcatcaccatgcgcaagaccgtgggcaagcccaaggtggcggcgtccggcagcccctggtacggccccgaccgcgtcaagtacctcggccccttctccggcgagcccccgagctacctcaccggcgagttccccggcgactacggctgggacaccgccgggctgtccgccgaccccgagacattcgccaagaaccgcgagctggaggtgatccactcccgctgggccatgctcggcgcgctcggctgcgtcttccccgagctgctctcccgcaacggcgtcaagttcggcgaagccgtctggttcaaagccggctcccagatcttcagcgagggcgggctggactacctcggcaaccccagcctgatccacgcgcagagcatcctcgccatctgggcctgccaggtn

SEQ ID NO: 92768 - DNA, 535 bp, Zea mays
  unsure (1)..(535): unsure at all n locations
gaggtagacggctgtcnggngctagcctcatgtataagatactacgcctcaccggtcctgaattcccgggtcgggtcgatctcagcgttctccattgctgtcgatgtacggcgattgcagtctgccgctcttggtatgctgagcacggtcgggactggtcttgctattgatgcttatggtcccatcagtgacaatgctggtggtattgctgagatggctggaatgagccacagaatccgtgagagaactgatgctcttgatgctgctggcaacacaactgctgctattggaaaggggtttgccattggttcagctgctcttgtgtccctggcgctttttggtgcctttgtcagcagagctggagtgaaagtcgtcgacgtcctgtaccccaaagttttcattggtttgattgttggagccatgctttcctactggttctctgccatgaccatgaagaagtgtggaagcgcccgcctgaagatggcggaagaggtccccaagcagttcaacaccatttctgggttgatgggaggaa

SEQ ID NO: 92769 - DNA, 532 bp, Zea mays
  unsure (1)..(532): unsure at all n locations
naggatgagggnnntnnanccatgaaatcggaacgtcancttacgactcaccggtccggaattcccgggtcgacccacgcgtccggaaatctaagccagcccaagcgcggaaggtctaaccgattgctgctcccccgccgaggcgtgacaaatctccaccagcagttgtgtagaaatggctgatggtgaggacatccagcctcttgtctgcgacaatggcaccggaatggtcaaggctggttttgctggggacgatgcaccaagggcggttttacctagcattgttggccgtcctcgccacactggtgtcatggtagggatgggacacaacgatgcatatgttggcgatgaggcacagtccaagagaggtattctcacgctcaagtacccgattgagcacggtattgtgagcaactgggatgacatggagaaaatctggcatcatactttctacaacgagcttcgtgttgcaccagaggagcaccctgtgttgctcactgaggctcctttgaacccaaaggccaacatggaa

SEQ ID NO: 92770 - DNA, 543 bp, Zea mays
  unsure (1)..(543): unsure at all n locations
atgaggataggggtgtctgttgncctttacgctncgctgcactttctcgtcctgaattcccgggtcgacccacgcgtgcggctacaaccggtcgacggggttcgtgtggctgcggtaggccgacaggctgacccacaccttggggtcgatcggcaagcatgggtggtacgacagggaggttacggcgttcgtggagccgggtcggatgcacggcctctccggggtgaagagcaaggagctcctcatctgggtcaccatctacgagatcgtactcagcctctcctgcaccaagatcgtgattcgcacccccgcggggcgtcggacgcgccttccctgtcaccgccttacagctcgagcccgagggggaccacaaggccgacgacgccgtcgtcggcggcgaccactgatctgctctagcttccggctgcggcttgcttacatgggctgctcgatcaccgaatagcaatggctttgcgagacagtcgagtcgactgctgttactcatacttcgacatgttcgtgtaacggatgatgatacatgaa

SEQ ID NO: 92771 - DNA, 540 bp, Zea mays
  unsure (1)..(540): unsure at all n locations
atggagcggntatgagtgccctgcncagcacaggatcgcacgcactctaccggtccggaattcccgggtcgacccacgcgtccgggctttagcgatggtcctgttcatggctggcgccgcgctgctcgccggggctgccggggccggcgcgcagcagggcgtgtggagcatcatcacccggcccatgttccagagcatgctgagccaccgcggcgacagcgggtgccagggcgccttctacacctacgacgccttcatcgaggccgccagcaagttccccggcttcggcaccaccggcgacgagcagacgcgcatgcgggagctcgccgccttcttcggccagacgtcccacgaaaccaccggtggatgggcgactgctccggatggaccgtttgcctggggatactgccgggtgaaggaacagaaacagacggacccaccctactatggacgaggacccatacagctaactcataagtacaactacaggctcgcctggcaagcgctgaacctgaccctgtgggcgacccggacctggtg

SEQ ID NO: 92772 - DNA, 539 bp, Zea mays
aggggggaggtcgtttgtgcatgataagcaaacgatcgtatgactcaccggtccggaattcccgggtcgacccacgcgtccgaaaagagatactgtccccaaactgcaagtctgccaagagactgaaagcattggtggcgttcggttcggcgacaactgaccagagcaaagaaccggatcaaattgggatcaaaatgtatgcctgggacgatttcttgaaagtggggaaggataatcctcgtcaaccttgccttccgcaggcaagtgacatctgcactgacatgtacacaagtggaacaggcggacagcccaaaggtgtgatgctgacccatgaaagccacgccatgtatgtgaaaggggtggacctcttcatggaccagtttgatgataagatgacaacagatgatgtcttcctgtcgtttctcccgcttgctcacatccttgaccgcatgatcgaagagtatttctttcacaaaggggcctcaattggctctaccaacgagatctgaatgcctttgaggaacaacattgtggactta

SEQ ID NO: 92773 - DNA, 536 bp, Zea mays
  unsure (1)..(536): unsure at all n locations
aggngaggtgcgtgcgtgcatgagtccgcatttgactgacgactcaccggtccggaattcccgggtcgacccacgcgtccgggccccgaagcctaagccaaagaatccccttgatttgcttcctacgagcaagttgatgcttgaggattggaagaggctgtattctaacacgaaaaccaacttccgtgaggttgctattaaaggtttctgggacatgtatgacccagagggctactccctgtggttctgtgactacaagtacaatgacgagaacacagtgtcgtttgtgactatgaacaaggttggtggcttcctgcagcggatggatctgtgccgcacatacgcctttggcaagatgcttgtggttggctctgagccccctttcaaggtcaaggggctctggctcttccgtggccccgaaatccccaagtttgtcatggatgaggtctatgacatggagctctatgagtggaccaaggtcgacctctctgatgaggcccagaaggagcggntcaatgccatgatcgaggaccatg

SEQ ID NO: 92774 - DNA, 537 bp, Zea mays
  unsure (1)..(537): unsure at all n locations
tagagggtctgtctacgnccaaactagancgcagatacgactcgctcctgaattcccgggtcgagccacgcgtccgctggaacacgcacatcaagcgcaagctccttttccgcggcatggacccgcagacgcaccgcgggctcgccagcgcgaccgcggggcagcagcattaccagcttcaggagccgaaaaaccaagcggccggcggcggtccatcaggccatcctgaccaggaccacttggaggtcgtcgtcattttgaattgcccgaccaaggctctaagccgaaccaccaccaacaagccctgtgccgcacaccaccgaggggcgcaccttgacattgaccttaacctgttcattaagctatagggctaacaagcgcccgaggaaacccgctttattaaacacacactctgtgaaaatcacgagcacgagaaaccgtgggggggggccccaagatccggggtgtgcccctgcctctaaaaaatcttgtacacgccgcgcgtctagagcgccttctgtgacaacagaatcttcg

SEQ ID NO: 92775 - DNA, 533 bp, Zea mays
gatggacgtgtgtctgagcctaccctgattctatgcgtaactttctattcgatcctcaattccggggtcgacccacgcgttcgctccaaggagatgcaaggaggtcactctagtatatctacagttgaggcgaaggagcagttagatgccctgtctgggtgtgtaggaaatgttgattatactaacaccccacaagaagtgcacgatcatttccaagcttgaggaactgtcaacagggtcacaatcttgactgacaagtttgggcagccaaaaggttttgcttatgatgaatttctggaccaaaaactttccaagaacactgacatctcaattaaatactattagaatgttctataaattaactatgcgccaaacagcttacgatcatgaaccctaacgaaatccacccacgtgagattaacccttaacatgtaccccagtacaacataatttttcactgacaagttccccccttgctgaatatattaagggttctaacattaacgttgttatttcttttcaaaacaaatttc

SEQ ID NO: 92776 - DNA, 525 bp, Zea mays
  unsure (1)..(525): unsure at all n locations
ggaggntagtgctgtgtggctgacctagcactatgatgtatgcactcaccggtcctgaattcccgggtcgacccacgcgtccgtgtctgtcttggtggctgattgcaacggtcatggcaaccacgtctcaccggatacccgtgcggctgctatgcctgggcagtgctggtgacctactccttcgaagcaggcagcttggaccacgagctggacatcacgtgctgcgactgacggtacaaggtccttgacaacagacagctgctgacgctgacgctagaccgcacatacggctccaggttccaatccctgcacgagtacctgttcagcaagatcgacatgcagctgcagctggtagccgatcaactacgacggcaccgtcaccgactactaccatgatgtgcaaagccagacgcacgacgagatcgacttcgagttcatgggcaacttgtccggcgaaccctacacgctgcacaccaacatattcacgcggggacatgggcatcatgagcagcagttccgactctg

SEQ ID NO: 92777 - DNA, 538 bp, Zea mays
  unsure (1)..(538): unsure at all n locations
aggggaggtgcgtctgttgctacctagaacacggattcgtactcacgtccggaattcccgggtcgacccacgcgtccgctcaggtcgctgctgctgtgccacgcgctgcccaagtactactcgctggccgagttcgaccgggtgagcgcgctcggcccggtggccaccctcgccggctcgcagtacacgctgaacctcacctacgacatgggcaccgtccgcgtgaagtccatgtggtccgaccccaagatcagcagcagcgtgtactccacccgccccgtcgcggtgtacgaggtcggcaaggttctcctgccgatgcagatcttcaagagcgaccccccgctggcgcctgcccccgctccggcaccggatgccaaggcatccgacgtcgctcccagcccggcgtcggggaaatcgtcagcgagtgcgaaggcgaaggagaaggcgggagagaagagctcgtcgtgccgagccggtgtcgtcgcccattacttggcgatcgctgtctccggcggcctggtgctcttgtgtgaggatn

SEQ ID NO: 92778 - DNA, 541 bp, Zea mays
aggcgggaggagcggtgtgttgcctacttgaaactcgaagcgtaacactcgtccggaattcccgggtcgacccgggcgtccggcggcgccggcgtgcttgtgatctcaacccaagtcgtgcctccgctccggtcacccgtcgctgcacggaaccatgtcgaggaggaagaccagggagcccaaggaggagaacgtcacccttggacccactgtccgtgaaggagagtatgtctttggtgtcgctcacatctttgcatccttcaatgacaccttcattcatatcactgatttgtctgggagggaaactctggttcggatcaccggtggcatgaaggtgaaggctgaccgtgatgagtcgtcaccttacgctgctatgcttgctgctcaagacgtcgcacagcgctgcaaggagcttggcattactgcactgcacattaagcttcgtgccaccggaggcaacaagaccaagaccccaggacctggtgcccagtctggcctcatggcgcttgctcgttcccggatgaaaatcggacgcattgag

SEQ ID NO: 92779 - DNA, 523 bp, Zea mays
  unsure (1)..(523): unsure at all n locations
nagggagaggcnttctgtgatgcgagggggaggggaggagagcagtcaccggtccggaattcccgggtcgacccacgcgtccggcgaggagggcaggaagaccgaagaccgagccgtgcgggggctcgggacgggaacgggacaggaccccaaaatctgagatccttgctgcccgcccgcccgtgcccgtcgacgcgtcgttcttgccggccgcgccccacctccgccctctcctcctccagggggatcggatacgccacaggctgcgcgatggtgctgtgggtcttcggctacggctccctcatctggaaccccggcttcgacttcgacgacaaaatcctcggcttcatcaagggctacaagcgcacctttaatctcgcttgcattgaccacagaagcacaccggagcatccggcgaggacctgcacgcttgaaaccgaccaccaggccatatgctggggaattgcatattgggtcaagggtggtccagaaaaagagctaaaagcaatacagtacttggaga

SEQ ID NO: 92780 - DNA, 538 bp, Zea mays
  unsure (1)..(538): unsure at all n locations
gtgggagagcntttgtgccatcgctgccacgtancgtacgcactctaccggtccggaattcccgggtcgacccacgcgtccggtgcggattcaagcacaccaaccagtaccccttcatgtccatgggctcctgcggcaacgagcgattgttcaaggacggcaagggctgcggctcctgctacaagattcggtgcaggaaggacccgtcctgctccgggcggacggagacggtgatcatcaccgacatgaactactacccggtgtccaagtaccacttcgacctcagcggcactgcgttcggcaggctggccaagcccggcctcaacgacaagctccgccactccggcatcatcgacatcgagttcaccagggtgccgtgcgagttcccgggcctgaagatcgggttccacgtggaggagtactcgaaccccgtctacttcgcggtgctggtggagtacgaggacggcnacggcgacttggtgcaggtggacctgatggaatccaagatggcgcgcggcccgccaacggggctgtggac

SEQ ID NO: 92781 - DNA, 542 bp, Zea mays
agtggaaatcggttttgccacggggcgaagatgaatccctcactcggtcctgaattcccgggtcggcccactcgtccggtgcgtattcacgcacaccaaccagttctgcttcatgtccatgggctactactgcagccagcgattgttcaaagacggcgggggcgtttactcctgctacaagattctattcaagaatgacccgtcctgcttcatgcatacagagaccgtgatcatcaccgacataaactactacccggtagtccaagtaccacttcgacctcagcatcacttgcattcgacttagctgtctcaaacgactgacctcaaccactagctccgccactccatcatcataaacatcaagttcaccacattgccaatcgagtttccgggcctgaagatcgttttccacgtgcaagagtactcgaacacgatatacctcgcgatactattctagtacgaagacgtcttccgcgacttgattcacgtggacctgatgcataccaagaactctcgcattactccgacagagctgatgaccc

SEQ ID NO: 92782 - DNA, 526 bp, Zea mays
  unsure (1)..(526): unsure at all n locations
tgggaggtgtgtgttaggggttaggggggagaagtaatgactcaccggtccggaattcccgggctcgccgacctcgtctggctctcaggggctcacacgatcggcatctcccaatgcaactccttcagcgagcgcctgtacagcttcacggggcgcggcgggcccgacgacgcggacccgtcgctggacccgctgtacgccgcgaagttgcggctcaagtgcaagacgctgacggacaacacgacgatcgtggagatggaccccggcagcttccgcaccttcgacctgagctactaccgcggcgtgctcaagcggcggggcctgttccagtccgacgccgcgctcatcaccgacgccgcctccaaggccgacatcctcagcgtgatcaacgcgccgnccgaggtgttcttccaggtcttcgccggcctcaatgtcaagatgggcgccatcgaggtcaagaccggctccgagggcgagatcaggaagcactgcgccctcgtcaacaagcactaggcggcggaattac

SEQ ID NO: 92783 - DNA, 520 bp, Zea mays
tggagagggttagtcaatgatgggggcgggaagtatgcatcaccggtccggaattcccgggtcgacccacgcgtccgcggacgcgtgggtcgccaacgccgcctcctacgggttcacggtgaccaacgccgggtgctgcggggtgggcaggagcaacgggcaggtgacgtgcctgccgtaccaggcgccgtgcgccaacagggaccagcacatcttctgggacgccttccacccgtcggaggcggccaacatcatcgtcggccgccggtcctaccgcgccgagtcgcccaacgacgtctacccgatggacatcagcacgctcgtcttcatctgattctgattctcatccttccattaatataaacataaaaatatatgatataatccacccaacaattcgcaaaggctggcatattaaacaaggctccaagaagaagtagccgtgccattctttactggggaccagctcgggccttatctggaatttttcatgctttcatacatttgcatcgggtactta

SEQ ID NO: 92784 - DNA, 540 bp, Zea mays
  unsure (1)..(540): unsure at all n locations
gaggggnaggtgatgtgtgccatcncagcacgtacgtggcactccgtccggaattcccgggtcgaccgacgcgtccgctgacctccaatccacgataaggcaagataagctagctaggaaggcaagggatccgatggacgagtaggagcccgttcgcgagagcggggcgggcaacttcggggtggccaagctgatgaggaacaaggacacgagggagctggtggccatgaagttcatagagcgaggaaacaggatcgacgagaacgtgttccgcgagatcgtgaaccaccgctccctccggcaccccaacatcatccggttcaaggaggtggtgctgactcccacgcacctcgcgatcgtgatggagtacgctgcgggcggggagctgttcgagcgcatctgcgacgccgggcggttccacgaggacgaggcgcgctacttcttccagcagctggtttgcggcgtcagcttctgccacgccatgaacatctgccaccgggacctcaaactggagaacacgctgctggacggcagcccggg

SEQ ID NO: 92785 - DNA, 535 bp, Zea mays
  unsure (1)..(535): unsure at all n locations
gagagggagtggtgtgtcctccagaaaatagtatgctgctctcgtccggaattcccgggtcgaccgacgcgtccgggtgggctggcttctcctccccctcttaccaagtcctcttcgggttagggttacttagggttgtgtggaggggcgatggcggcggctgatgtggagtaccgttgcttcgtcggcgggcttgcctgggccaccagcaacgagtcgctggagaatgccttcgcctcctacggcgagatcctcgactccaaggtcatcaccgaccgggagacggggaggtctcgcggcttcggcttcgttaccttctcctccgagaactccatgctcgacgctatcgagaacatgaacggcaaggagctcgacggccgtaacatcaccgttaaccaggcccagtcccgtggcggtggcggtggcggcggtggctacggcggcggtcgcggcggcggcggctatggtggcgggcgccgtgacggcggttatggcggcngtggcggctacggcggtcggcgcgagggtggtggcc

SEQ ID NO: 92786 - DNA, 541 bp, Zea mays
  unsure (1)..(541): unsure at all n locations
agggggaagtgcttttttgtatgtagggggaggggaaggtatgcctgcaccggtccggaattcccgggcccggggattctgttgatcatccttgtggcactgctcacagaggcatccatcgacatgcttgtaaggtgcagccaccagggcaagattacatcatatgggtggttgatgggcgaggttttcgggcagtgggggagaattgcgctgcaggcctccgtcatcataaacaatgtcggcgtgctaattgtttacatgattatcattggtgatgtattatctggaacaacatcaggcgatgttcatcatcgtggtatattggagggctggtttggagctcatttgtggaattctcgtgccattgttcttcttgccacagctcttttggtgtttgctccgttggtgagctttaagcgcttggattcattaagatacacatctgcgctatcagttgccctggcagtagtttttgtcgtaattactgctgggattgccatcatcaaactcttcaatggaactgtagcgatgcccaaacttn

SEQ ID NO: 92787 - DNA, 536 bp, Zea mays
gaggggaggggctttgtttatgatggaggagggaaggtatgcatgaccggtccggaattcccgggtcgacccacgcgtccggataaactatgtcgaaggtgacatgttcagtttcattccacctgctcaaactgtcgtgctaaagcttgtgctgcaccacctgaccgatgaggagtgcgtcaagctcctggctcaatgccggaaggcgattcctccacggaaggacggcgggaaagttataatcggtgatattatgattgaccactctgggcttatgctggaaactcacctcctgatggacatcggcatgatgaccatgacaaaaggacggcagagagatgaaaaagaatggagcgagctcttcaccaaagcagggttcagcgaatacaagatcctgaaggaatttggagctcgtgttgccttcgaagtctatccgtgagatatatatatatatttacatacatatatgtatgtgtgtgggtgccttgcgtggcttggcgtgatgatgtcataaataaagagggtgggtgtgcttg

SEQ ID NO: 92788 - DNA, 530 bp, Zea mays
  unsure (1)..(530): unsure at all n locations
atgggagtgcgtcagtgccatgccatgcantgtatttcatcgagttaccggtccggaattcccgggtcgacccgcgcgtccggcagcgccgccagacactccgtagtctgtaccccaagcaccggcgcggcggcggcgggtgccggggcagtcgggaagaacaagaggatctccaagggaaagaagggtggtaagaaaaagaccgtcgatcccttctctaagaaggactggtatgacatcaaggccccatcggtcttcagtgtgcgcaacattgggaagactctcgtgtccaggacacagggtaccaggattgcctctgatggtctgaagcacagagtctttgaggtttgtctagctgatcttcaaggtgacgaggatcaggcttacaggaaaatcaggctccgtgctgaagatgtgcaaggcatgaatgtgctcacaaacttctggggcatgaattttaccaccgataagctcagatctctagtaaagaagtggcagacattgattgaagcccatgttgatgtcaagaa

SEQ ID NO: 92789 - DNA, 518 bp, Zea mays
  unsure (1)..(518): unsure at all n locations
gggtggagggtttgtttagtatcgggggaggaaaggtatgactcaccggtccggaattcccgggtcgacccacgcgtccgatcgacatggctgccgccaccatggctatcacctcccgcgcgctcgtcggcaagccggcggcgggcacgagggacgtcttcggcgagggccgcatcaccatgcgcaagaccgccgccaagcccaagccggcggcgtccggcagcccatggtacggtgccgaccgcgtcctgtacctgggcccgctgtccggctcgcccccgagctacctgaccggcgagttccccggcgactacgggtgggacaccgcggngctgtcggcggacccggagaccttcgccaagaaccgcgacctggaggtgatccactgccgctgggccatgctcggcgcgctcgggtgcgtgttcccgaactgctcgcccgcacggcgtcaggtcggcgaaggcgggtgggtcaaggcgggcctccagatcttcagcgagggccggctggactacctt

SEQ ID NO: 92790 - DNA, 548 bp, Zea mays
  unsure (1)..(548): unsure at all n locations
agtagatagtaggaagggttttgtgccttcgacccntcgtatttcttctcacgtcctgaattcccgggcacagacacacagacaagtggtgtccaaagccaagtgtgtgtactagcatccagctagctcgggcggcagcaggcagccatcatgtctaaggagaagcacggccacttcttcaaccaccacaagaaggacgaggagcagcccgccggcgagtacgggtactccgagaccaaggggtgaaccgcacccgccaaggccaattccaaaagtgccagaaagaggagaaagggcacacacgcacaaccaacctttgcgagagcccggccctatcctcccgggccctttcactctttgagaaacactcggcgcaaaaagagccccagcacacgcacacaggcacgataacagcggaggaggctttcccggggacctcgtcggcccgcgggtataaatataccaggaccaccacgagaaaaaagaccaccacggcgactctgaggacaccagcgacaagaagaaccaccaccacctttggttgaacc

SEQ ID NO: 92791 - DNA, 539 bp, Zea mays
  unsure (1)..(539): unsure at all n locations
nagggtgagtgggtgtgtgcctccagatacaagtatcgtactctcttccggaattcccgggtcgaccgacgcgtgcgacactaacgaacgaactcttgctccgatcacgagctagctgaggtcgacgatggcggctgtggtgagcagcaggaagacgccgcaggcggtggtggccgtgctggtggcggcggcgctgctggcttcgtccgcttcggcggcgatcacctgcgggcaggtggggtcgtcgctggcgccgtgcatcccgtacgcgacggggagggccagcgcgctccccgcgtcgtgctgcagcggcgtcaagagcctcaacagcgcggcgcggaccagcgcggaccgccaggcggcgtgccgctgcctcaagagcctcgccaacagcgtcaagagcgtcaacatgggcaccgtcgccaccatccccggcaagtgcggcgtctccgtcggattccccatcagcatgtccaccgactgcaacaagatcagctaagttacgacgaccaagctaataagcctaccgaacgtacacg

SEQ ID NO: 92792 - DNA, 547 bp, Zea mays
  unsure (1)..(547): unsure at all n locations
tgatagggaggaggggagggcgtttgtgtatagacaggcgggagggatagtattgcatgcaccggtccggaattcccgggtttgcactgctcataattaggttctaaggaacaagcctgattttcgtaagaggccttggtcaagcatcagcccaggtgcgaaagattttgttagaaggttactagtgaagaatccaagggccaggctaacagctgctcagctcttcacatcggggtagagaagaggagaagcatncgatttcccggtcgacatatctgtgtaatcaaacatgcgtaagtttgtcaagtacagccgtttcaagcaattcgcgcttcgggctctggcgagcacccttaacgaggaagagctatcagatctgaaggatcagtttgatgcaatggatatcgataaaagtggatcgattagtatcgaggaaatgcgtcatgcccttgcaaaggatcttccttggaaattgaagggtccccgtgcgctggagattattcacgcaattgacagccacactgatggcctcgtgacacttagggag

SEQ ID NO: 92793 - DNA, 539 bp, Zea mays
  unsure (1)..(539): unsure at all n locations
tatggggaggcgtctgtgccagccagaggacgggacgtattgctcaccggtccggaattcccgggtcgaccgacgcgtccgggcaggcaggtcggcgaggagggcaggaagaccgaagaccgagccgtgcgggggctcgggacgggaacgggacaggaccgcaaaatctcagatccttcctgcccgcccgcccgtgcccgtcgacgcgtcgttcttgccggccgcgccccacctccgccctctcctcctccagggggatcggatacgccacaggctgcgcgatggtgctgtgggtcttcggctacggctccctcatctggaaccccggcttcgacttcgacgacaaaatcctcggcttcatcaagggctacaagcgcacctttaatctcgcttgcattgaccacagaggcacaccggagcatccggcgaggacctgcacgcttgaaaccgacgacgaggccatatgctggggaattgcatattgtgtcaagggtggtccagaaaaagagctaaaagcaatacagtacttggagagaagn

SEQ ID NO: 92794 - DNA, 521 bp, Zea mays
  unsure (1)..(521): unsure at all n locations
ntgggatgagcgtcnatgcctgcncggggtgtgaagtatgcctcactggtcctgaattcccgggtcgacccacgcgtccgttattttcttggaaaatgaattgctttatggagaatctttcccagtttctgctgaagtgctggattctagtttttgcctaccgattggcaaagctaagatagaacgtgggggtaaagatgttaccattactgcattctccaagatggttggctatgctctccaggctgcagagatactgtccaaggaaggaatcagtgctgaggtgatcaaccttcgatcgatcagaccacttgatagagctgctattaatgcatctgtcaggaaaaccaaccgattggtgactgttgaaaaagggttccttcaccttggaatggttcccaaaatatccatgtctgttgtaaaaaaaggccttgagtccctggatccccaatttgaaaggatccttgaacctgattacctattccctatgcttgccaacttgaaagaattgcttgtccaca

SEQ ID NO: 92795 - DNA, 522 bp, Zea mays
agggaggcttgtgtgtatgaagggggaaggaagtatgcactcaccggtccggaattcccgggtcgacccacgcgtccgctcaactttcccagattgagactgaaaagctgctagcccagttagttgagactgagatgaacggacgtttgaaggagggcacttacaaaggaaagaagtttaatgcaatctgtcacttctttggctaccaagctaggggagcactgccttcaaagtttgattgcgattatgcctacgttttggggcatgtgtgctaccacatcatagctgccggattgaacggttacatggctacggtgacaaatcttaagaatccagtgaacaagtggcgatgcggcgcgactcctatttcgtctatgatgactgtgaagcgatggtcgcgtggcccttcagccacccaaattggaaagcccgctgttcacatggctagcgttgacttgaaaggaaaagcatacgatgtgttgagacagaattcttccagctttttgttggaagatgtctaca

SEQ ID NO: 92796 - DNA, 525 bp, Zea mays
  unsure (1)..(525): unsure at all n locations
aggttgggtttccactatgttgatggggtggagaaggtatgcctcactggncctgaattcccgggctagctaggcacatatatattcagaaaagctcgtccatttgcctcattgctattttgtcaatgactacaagcagaaaggtcgagactgtctgactccagtatgtccacacaaaagatctgattatggattacctgaggataaatttatttttgcttgcttcaatcagctttacaaaatggaccctgagatatttgacacatggtgcaatattctcaaacgtgttcccaacagcgcattatggcttttaagattcccggcagctggtgaaactagagtgagagcatatgctgctgccagaggagtaagatcagatcaaattgtattcacagacgttgccatgaaaaaatgagcatatacgacgcaatgcccttgcaaaacttttcctggacaactccctcttgaatgcacacacaacaagcactgacatactgggggctggtcttgcaatgatcacccttc

SEQ ID NO: 92797 - DNA, 534 bp, Zea mays
  unsure (1)..(534): unsure at all n locations
naggggaggggtttgtctatgcagagaaggatgcgtactcctctccggaattcccgggtcgacccacgcgtccggtcttcctcccgtggcctgtctgtcatctggctctgaaacgatggcagtcctgcaagttgctgctggtgcccctccccctgtctgtgtgattgggttcgagggatttgagaagcgccttgagatcagcttctctgaggcacctgtcttggctgaccccagcggaaggggactgcgtgcgctctcgcgtgcccagatcgactctgttcttgaccttgctcggtgcaccattgtgtccgagctctcaaacgaggacttcgactcttatgtcttatctgagtcgagcctgtttgtctacccatacaagattgtgatcaagacctgtggaactacaaagcttctgctcgctattccgaggatccttgaacttgctgaagagctcctgttgccactcgctgcagttaaatactcccgtggaacgttcatattccctgaagcacagccttccccacacaagaactt

SEQ ID NO: 92798 - DNA, 539 bp, Zea mays
  unsure (1)..(539): unsure at all n locations
ggagggagaggtggtgtgtgtatagtaagaganagtatgatgcaccggtccggaattcccgggtcgacccacgcgtccgagaccattcatgttcctactggggagaagctttctgtttttgatgcggccatgagatacaaagctgagggccatgctactataatcctcgctggtgctgagtatggaagcggcagttctcgtgattgggctgctaagggtccgatgctcctgggagttaaagctgtaattgccaagagctttgagcgtatccacagaagcaacttggtggggatgggaatcattcctctgtgcttcaaagctggtgaggatgctgattcgcttggcctcactggacatgagcggtacagcatcgatctccctaccaacctcagtgagatccgtcccggccaggatgtgactgttactaccgacaatgggaaatctttcacttgcatcgttcgctttgacactgangtggagctggcgtacttcaaccatggaggcatnctnccttatgtcatccgcaacttggcagctgg

SEQ ID NO: 92799 - DNA, 535 bp, Zea mays
  unsure (1)..(535): unsure at all n locations
agggaaggggtttgtggatgatgggaggcgagaggtatgatcaccggtccggaattcccgggtcgacccacgcgtccgcccggccatgtaccgcgaggtgctcggcggggacgccgcctacgccgcggcgcgcggctcggggggaggctccgtcgacatcctgcactgcatcgaggactgggcgcccgacaagcagcgccacgcgtacgaggtcatggcgcgcttcgagcgggagggcctcgaccgcctccagatcatgcccggggcctcggagctgtgtggcttcctggacgcgaagcagatcagaagaggtttgatcacccgtaatgtgaaggacgcagttgatttgttccaccaaagatttggtatgacgttcactcctgcactgagcagagaatttcgcccctataaaccaaatcctgctccactgcttcacatatgctccgctcggaacattccaccacacgaagtgatcatggttggcgacagtctcaaggatgatgtngtttgtggaaaagaggcaagagctttcact

SEQ ID NO: 92800 - DNA, 522 bp, Zea mays
tggaaggcgtctgttctagctaggggagggatagtatgcctcaccggtccggaattcccggggccaggcaggcatggcgcccaccgtgatgatggcctcgtcggccaccgccgtcgctccgttccaggggctcaaggccagggccagcctcccggtcgcccggcgctcctccagaagcctcggcaacgtcagcaacggcggaaggatccggtgcatgcaggtgtggccggcctacggcaacaagaagttcgagacgctgtcgtacctgccgccgctgtcgacggacgacctgctgaagcaggtggactacctgctgcgcaacggctggataccctgcctcgagttcagcaaggtcggcttcgtgtaccgcgagaactccacctccccgtgctactacgacggccgctactggaccatgtggaagctgcccatgttcggctgcaacgacgccacccatgtgtacaaagagctgcaggaagccatcaaatcctacccggacgccttccaccgcgtcatcggctt

SEQ ID NO: 92801 - DNA, 526 bp, Zea mays
  unsure (1)..(526): unsure at all n locations
ntggaagaggctgtccgngattgaatgggggtgggacgtatgcctcaccggtccggaattcccgggtcgacccacgcgtccgggttcctctgcgatgctgcggccggagcctcctcaggtcccgctggagaagccaagccccagggatttgcagagagatacccagctcttgtcacaggtttcttcttcttcttgtggtattttctgaatgtaatatttaacatcctcaacaagaagatcttcgactacttcccctatccatattttgtgtcagtgagccatctttttattggagtactatactgccttattggctggagcttcggcatcccaaagcgcgcgccaatcaactcaacacttctgaagcagcttgttccagttgcggtttgccatgccattggccatgtaacaagcactgtgtcatttgctgctgtagctgtgtcatttgcccacactattaaagctctcgagccattcttcaatgcggctgcttcccaatttatccttggacaaccagttccattga

SEQ ID NO: 92802 - DNA, 539 bp, Zea mays
  unsure (1)..(539): unsure at all n locations
atgggaagggtgtgtgctacctgccacaagtatcgctgacttcgtccggaattcccgggtcgacccacgcgtgcgccagcaagcaaaaattccccaatcctctcgtctccgcggctaagatgtcggggcgcggcaagggcgggaagggcctgggcaagggcggcgcgaagcgtcaccggaaggtgctgcgcgacaacatccaggggatcacgaagccggcgatccggaggctggcgcggcggggcggcgtgaagcgcatctcggggctcatctacgaggagacccgcggcgtgctcaagatcttcctggagaacgtcatccgcgacgccgtcacctacaccgagcacgcgcgccgtaagaccgtcaccgccatggacgtcgtctacgcccttaagcgccaaggccgcaccctctatggcttcngcggctaagtctgccgcggccgctctagaggatccaagcttacgtacgcgtgcatgcgacgtcatagctcttctatagtgtcacctaaattcaattcactggccgtcgtgttacaa

SEQ ID NO: 92803 - DNA, 533 bp, Zea mays
  unsure (1)..(533): unsure at all n locations
nggagggaggctttgtgatgtatggggagggaaggatgcctcaccggtccggaattcccgggtcgacccacgcgtccgatttcgagcgccagttcgtcaacatggaggtccaggccgagttcatggagggcgccatggccggctccacctccctctccacgccggagaccgaggtcaacagcctcatgcagcaggtcgcggacgactacgggctcgaggtctccgtcggtctgccgcaggcagccgcccacgccatccctgccgccaaggataaggagaaagtcgacgaggatgacctttctcgccgcctcgccgagcttaaggcccgcggctgagaggttgtttcaggctttatcagatgcgattcaggcttatgctgttgagccgcaatgacccattgtcctgtggactgctactcatgtttggtagattcgtaaatactactgttatatgcttgaaggcgtgtgttggcattgccatgtggngtttgtgtgactcgatggaaaccttgctgtcttattgtactttaaaaa

SEQ ID NO: 92804 - DNA, 540 bp, Zea mays
  unsure (1)..(540): unsure at all n locations
nagaggaggtnnntnnttaatgtaacggcgatgtagagtgatgactcaccggtccggaattcccgggtcgaccgacgcgtccggtgcttttttgcagggaagaaaatgcctaccacaggcgtgattgctggtaccagagatggcgtttcatctgagagcatctctagatttctgctgcctgcttctgaatgcgagtttgtattgaactcagttatagaagaaatacaaaaggacccttggcctgttccagctgatcagcgtgcgtctaggtgcactggagctgccttaagtgttgcagccaatctccttggggtttgtgttcctggatcaggtgctaggataatggcatttgttggtggtccatctacggagggccctggtcctattgtatccaaatccttatcagagcccattcgctcacacaaagaccttgataaagactcggcaccactctatgantaaagctgtaagtnntatgatcaaattgcanagcagcttgtgcaccaagggcatgtgctggatttgtttgcttgtgcagtt

SEQ ID NO: 92805 - DNA, 518 bp, Zea mays
  unsure (1)..(518): unsure at all n locations
cggggagtgctgtgtgatgataggggggggaagtatgccgtcccggtccggaattcccgggtcgacccacgcgtccgagattacacatactttgctaaggtgtgctttgataacttcggcgacaaggtgaagaattgggggacctttaatgagccccagacatttacttccttttcctacggaactggggtctttgccccaggtcggtgctcacctggactagactgtgcctacccaactgggaattcactcgtcgagccttacactgctggccataacattctcctagcccacgctgaggctgttgatctttacaacaagcattacaagcgcgacgacacccgcatagggcttgcgtttgacgtaatgggtcgtgtgccatacggaacatcgtttctggataaacaggccgaagaaaggtcctgggacatcaacctaggatggttcttagagccagtggttcgtggtgactaccccttctccatgagatcattggctagggaacgactacccttctn

SEQ ID NO: 92806 - DNA, 535 bp, Zea mays
  unsure (1)..(535): unsure at all n locations
gggggggagaggnaagtgctttagtaggggcggggaagtaactgtatgactcaccggtccggaattcccgggtcgacccacgcgtccggcagaccccagcagaagaagcgaagtcgtcgccggagcaggaggaagagcgagcagcaagatgtcgtggcaggcgtacgtcgatgaccacctgctgtgcgacatcgaaggccagcacctcagcgccgtcgccatcgtcggccacgacggcagcgtctgggcacagtccgagaacttccccgagttaaagcctgaggaggttgctgggatgataaaggactttgatgaacctggaactcttgcaccaactggtctttttgttggaggtacgaagtacatggtgatccaaggtgaacctggagttgtcatccgaggaaagaagggcactggaggcattactatcaagaaaactggcatgtccttgattatcggtatctatgatgagccaatgactccagggcaatgcaatatggtggtggagaggctcggcgattacctgatcgaacag

SEQ ID NO: 92807 - DNA, 535 bp, Zea mays
  unsure (1)..(535): unsure at all n locations
nagggggaagctttttataggggaacagggaaagtatcacctcgtccggaattcccgggtcgacccacgcgtccggctctgtccacctctctcgctctgggccgccgccgccgccctaagccacgtgctgaggctttggttggtctcttcgccggcgacgagcacccagcagttctgtagaaatggctgatggtgaggacatccagcctcttgtctgcgacaatggcactggaatggtcaaggctggttttgctggcgatgatgcaccaagggccggtttccctagcattgttggccgtcctcgccacactggtgtcatggtagggatgggacagaaggacgcatatgttggcgatgaggcacagtccaagagaggtattcttacgctcaagtacccgattgagcacggtattgtgagcaactgggatgacatggagaaaatctggcatcatactttctacaacgagcttcgtgttgccccagaggagcaccctgtgttgctcaccgaggctcctttgaacccaaaggccaacag

SEQ ID NO: 92808 - DNA, 533 bp, Zea mays
  unsure (1)..(533): unsure at all n locations
gggggaggctttgtgtcgatggcgagaggatagtattgctcaccggtcctgaattcccgggtcgaccgacgcgtccgcggtatagttgggcgaacaggaagtggaaagacaactttaattggtgcactgtttcgggttggtgagccaactggagggaaaataattatagactctatagacatcaccacaataggcttacatgacctgcgttcacgtttgggtatcattccgcaagatccgacactctttcaaggaaccataagatataatctagaccctctttggcaattctctgatcaacaaatatgggaggttctaggcaaatgtcagcttcttgaagctgtccaggagaaggagcagggattggactcacttgttgtggaagatggttcgaactggagcatgggtcaaaggcagctcttttgtttgagacgtgcacttctaagaagatgccgtatcttagttcttgatgaggccacggcatctatagacaacgctactgatgctatccttcagaagacgatcaggacaan

SEQ ID NO: 92809 - DNA, 542 bp, Zea mays
  unsure (1)..(542): unsure at all n locations
nagaggaggngngtntatcctcgtatagggatgtgacgtatgactcaccggtccggaattcccgggtcgaccgacgcgtccgcaccaagccacgggccgcttctccaacgggctcaacatccccgacatcatcagcgagcaccggggggccgaacctgcgctgccgtacctgagccccgagctccgaggggagaagctgctcgtcggcgccaacttcgcgtcggccggcgtcgggatcctcaacgacacaggaatacaatttgtgaacatcatcaggatcggcgaccagctgcagtacttccgggagtaccagcggaagctgcgagccctcgtcggcgagccgcaggcgacgcagctcgtgaaccaggccctcgtgctcatcacgctaggcggcaacgacttcgtgaacaactactacctggtgcccatgtccgtgcggtcgcgccagtacgcgctcccggactacgtccgcttcatcgtctccgagtacaggaagatcctctcgaggctgtatgagctgggcgcgcggcgcgtgatcgtga

SEQ ID NO: 92810 - DNA, 519 bp, Zea mays
tggtgaggcctgtgtgcatacaagcatagatgtacgactcaccggtcctgaattcccgggtcgacccacgcgtccggtcatggagaagctacagacggaggtgaggacgacgatgcgctcgccggacggcaagaggcgggacatgctagcgggggaggacctcggcagcatgccctacctcaaggcgaccatcaaggagacgctgcgcctgcacccgccggcgccgttcctcctcccgcactactccaccgtcgactccgagatcgacggctacttcgtcccagccgggacgcgcgtcctcgtcaacgcctgggcgctcgggagggaccgcacgacgtgggagaagccggaggagttcatgccggagcggttcgtgcaggaaccgggcgccgtggacgtccacatgaagggcaaggacctcaggttcatcccgttcggctccggccggaggatctgccccgggatgaacttcggattcgcgaccatggagatcatgctggccaatctcatgtaccattt

SEQ ID NO: 92811 - DNA, 521 bp, Zea mays
  unsure (1)..(521): unsure at all n locations
tggagagtgctgtgtgttgtatgggggaggatggtatgcatcaccggtccggaattcccgggcagctctgctggccctggccctggccgtgtcgaccgccgaggcgaggaacatcaagacgacgacggagaagaaggacggggcggtggtgcagccgcagaccttcccgcccttcgaccgcctcggcggcggcgcgtccccggcgttcggcggcctccccggcggcagcattcctggcagcagcattcccgggttcagcatgcccggcagcggcagcagccttcccgggttcagcttgcccggcagcggcagcatgcccctcttcggcggcggctccccgggcttcagcggcttcggcggcatgcccgggtcccccaccgccggctccgtccccgagcacgccaacaagccctgaactccgtctgtccgtccgatccgtcgctggagcgaggtcgggctagccagcgtgcgtggtagtagagtgatggtactgtagtacgtcgtcgtcttcatgcatgcgn

SEQ ID NO: 92812 - DNA, 528 bp, Zea mays
  unsure (1)..(528): unsure at all n locations
gagaggtcncntcntctctgaactacgtcatgcatatgctccgaatcccggtcggccggctaccgtcgattaagtgcggctatggaagtcttcacagaatgcttaacactctaccttggcgtgcggtatcgatgatcaaatgtcatgtatacacggtggactcatctcccgatctagcacacttggatggatcgaaaacttgcaacgtcctaccgaggcccaaaccaaggtcaactgtgaaactaactttggtaaaatccaggaaaaaatgttcaagggtgctacatgaatgatgtaggggtctaatatacctgtggtgcccacacggtttcagaattcctgcaaaagcatgatctcgatcttattggacctgctcatcaggttgacaggatgcgtatgagtactttcgatacctacagcttttcacaattttttcggcttccaaattatttgggcgaattttgaaaaacctgaccaatgttggaggataaacaacacttgatggagaccttccaaattttaaaaccg

SEQ ID NO: 92813 - DNA, 560 bp, Zea mays
  unsure (1)..(560): unsure at all n locations
ngtgggtagtgaggggtgggttgtctgtttttgtatagcatggtactgatcacctcgtccggaattcccgggtcgacccacgcgtccggcaacgggggccgtggcaaggtggggaaggcggcgcacctggaggaggcggtggtgtcgctgaagtccacggcggacggggagaccgtgtaccgggtgagcttcgagtgggacgagtcgcagggcatcccgggcgccgtcctggtcaggaacctgcagcacgccgagttcttcctcaagacgctcaccctcgagggcgtccccggcaagggcaccgtcgtcttcgtcgccaactcgtgggtctacccgcacaagctctactcccaggaacgcatcttcttcgccaacgacacctatctgccgagcaaaatgcctgcggcattggtgccttaccggcaagatgagctcaagattcttccgggcgacgatnacccttgaccataccaagagcatgaccgcgtntaccggtacgactactacaacgacctttgtgatcccgaccagggcgaagaccacgctcgggcgattctcgn

SEQ ID NO: 92814 - DNA, 558 bp, Zea mays
ggggggtgtgagggggaggtcgtttgtgtatgatagaggatataaagtatgcatcaccggtcctgaattcccgggtcgacccacgcgtccgcccacgcgtccgctctcttgatctgtccaggaacaagattgccagcgtcgagggcctgcgggagctcacaaagctacgcgtgctcaacctcagctacaacaggatttcgcggattgggcatggtctgtcgaactgcacggccatccgggagctgtacctggcgggcaacaagatcagcgacgtggagggtctgcaccggctgctgaagctggcggtgctggacctgagcttcaacaagattacgacggccaaggcgctggggcagctggtggccaactaccactccctcctggcgctcaacctcgtaggcaacccggtgcaggccaacatcggcgacgacgccctgcgccgggcggtcacgggcctttctccgagccttgcctacctcaacaagcaggccgtgaagccgcagcgcatcgcgccggaaggtgccacggacagcattgcgcgcgccggcttcaccgctc

SEQ ID NO: 92815 - DNA, 552 bp, Zea mays
  unsure (1)..(552): unsure at all n locations
gtttggtgagggtgtgcgtcngtttacgcatagcatgtatgtctaacacgtccggaattcccgggtcgagccacgcgtccgcatcggcatctcctccaaggccatgtccatcatgaactccttcatcaacgacatcttcgaggggctggccggcgaggcgggcaagctcgcccgctacaacaagaagcccaccatcacctcccgggagatccagacctccgtccgcctcgttctacccggcgagctcgccaagcacgccgtctcggagggcaccaaggccgtcaccaagttcacctcgtcctaagctcctttcgagtaggtccttaagcgccgtggcgccttttgactgtatggaatgtttgtcatctgaaagttgatctgagcagtgcaatatataattctggcatactattctcgcaatcgttttggggttcaaaatgggactgacatcacagtaatatgtggcataccttctgatcctctgtactcgagagggattttgtgtggataagccacttgcttgcctttgtaggtggataattgcttcgagca

SEQ ID NO: 92816 - DNA, 558 bp, Zea mays
  unsure (1)..(558): unsure at all n locations
tggtgttgtgtgatgaagaggtcttctgtgcttagtaagcanattattgatcgacttaccggtccggaattcccgggtcggccgattcgtcatcagatctctcaaacaatcatcttacttcagaaactccgttcaatatcggtttcctgcgaggggctacgctatctttgcgaggtaacacgttctctggtactataccatcagtgattggccttatgcacgctcttgcagtgctagatctcagtttcaatgagctatctactccaataccctctatactgggccacttgacatacactgagaaattatacctgcagggcaatacgctcactgcattgatactgtcagagctcgttaatatctctacactgcattacctggaactgaactacaatctgatgactgggttcatatctactgatcttggataacttacagaatagtccgaatcgaaccttgctaacaactaccttatacgacctatccctgagatttaagtacatgtgcaaactcattaagttcaatgcttaatgcaatgaattggattgcagcctttct

SEQ ID NO: 92817 - DNA, 486 bp, Zea mays
  unsure (1)..(486): unsure at all n locations
gtaggtntatctgcgctagcntatgacgcacgactcaccggtcctgaattcccgggtcgagccacgcgtccgccggctcaaagggactgtgctggactctggatggagccaggctagcttcctgatgcaggcggccacgctcacgaagcgggcgttcgtcaacatgtccagggatttcgggtactactggctgaggctcatcatctatgtcgtcgtcacgatttgcatcgggactatatacttcaatgtcggcaccggctacagctctatcctggcccggggggcatgcgcttccttcatcttcggcttcgtcacgttcatgtcgatcggggggttcccgtcgttcgtggaggacatgaaggtgtttcagagggagaggctgaacgggcactacggcgtggtcgcgttcgtgatcagcaacacggtgtcggcgatgccgttccttgtcctcatcaccctggtgtcgggcacgctgtgctacttttt

SEQ ID NO: 92818 - DNA, 489 bp, Zea mays
  unsure (1)..(489): unsure at all n locations
atagctntatcggctcctagtctaagaagtaagctggaaccgctcctgaattcccggggaaaagaccgatgtttttggatatgggatcatgcttctagagcttattactggacagagggcatttgatctagctcgtcttgcaaatgatgatgatgttatgcttcttgactgggtgaaaggactgctgaaggagaaaaaggtggagatgttggtggacccagatctacagaatgcctacgaggagatcgaggtggagaaccttatccaggtggcactcctctgcacgcagggctccccgttggagcgtccaaagatgtcggaggtggtgaggatgctggaaggtgacggcctggcagagcgttgggacgaatggcagaaagtagaggtggtgaggcaggaggctgagtcggcaccgctccgcaatgactggatcgtcgattccacgtacaaccttcgtgccgtggagctgtccggtccaaggtagtaaaa

SEQ ID NO: 92819 - DNA, 552 bp, Zea mays
  unsure (1)..(552): unsure at all n locations
ggaggggaggtntgtgtgtttctagaaaggtancgtaantgcacgnctcanccggncctgaattcccgggccagccgcttcgggatcgggacgcggagaggggaaaggcgagtcgtcgactcgtcgtccgggcagcttccctgcctggcctctccgcccccgctgacctaggccggccccgcctacgcccccctcccgccgccgcacgatgagcacttctcccgccgccgccgacgtttcgcctttgccgcctactgctgccgccgacgaggccgcgcgggcgacagagacggtggtggtcgatgagagggtcgcctcacacgtggacccgttcctcgtcgaggcgctcgacaaccctcgccaccgtctcatggttctacggatggaactggatatacaaaactntatgcagaaccctcagctgcaggagtttgaattccagaactntccgacttcttacctncgctgtgctgctcatcgtgttgcacaaaacatatggctagagactatagtaacagatagtttagtagaaggcttcagtagcagggatgt

SEQ ID NO: 92820 - DNA, 553 bp, Zea mays
ggcggggagaggcgtctgtgccctcccaagccaagtatcgttaccacgtaccggacctgaattcccgggtcgagcgacgcgtccggtcccagttatactatagtcctaattattgttcatgacaagatcattgcgtacatgggaacgtggatcgaccacgcaggagaacagtgctaccacaagggtggtatgggacgcccttggctgactaattaggaaagctagtggaagacaaccttacccgaaaggagcacttgcagtacaggaacatgcgtatatagaggttctcgggtcaatcatgtaacgctggctttatggagagttttctcatttccaaagacatgtttcccataatgaatatatttgctcataaaagatcaaatgcaaacaacactaggtaaatcaagagcattcacatatggacctatacattgataggtaatctgtaaagacatgtaagttaaatcatatctcagcatgaattaatcaatacaaatgcttttttaaataaactaattaagtcgtaagaagcattcgcttaactaagatactt

SEQ ID NO: 92821 - DNA, 564 bp, Zea mays
  unsure (1)..(564): unsure at all n locations
ngtaggggcggtggggggatgtgtgttctgnctcagaatcgcatagtattgctcacccgtccggaattcccgggtcgacccacgcgtccgcttcgagatcggtccccaggtgctcaggaactcgacggtcggcgtgctgctgccccccaaggagagaggacgcgacgtcgccgcgtgcccggctggatcatcgagtcgctcaaggcggtgcgattcatcgacgcggcccacttctctgtccccgcggggcagtacgcggtggagctggtggccgggcgggagagcgccatcgcgcaggtcatccgcaccgtgcccaaccgcgcctacaacctgtcgttcgccgtcggcgacgcccggaacggctgccacggctctatgcttgtggaggcgttcgcgggcaacgtcacgcagaaggtgccgttcgattccgccgggaaaggtgggttcaagacggcggcgttcaggttcgtggcccgcggcgttcggacccgnctcaccttctacagctcctactaccacaccaaggtcaccgacggcgtctcgctctgcggccccgtgctggaa

SEQ ID NO: 92822 - DNA, 547 bp, Zea mays
  unsure (1)..(547): unsure at all n locations
gtggggggcgttcattgtatagatagaggaaggtatgtatgcctcaccggtccggaattcccgggtcgacccacgcgtccgattggtgacgctgacgccccagtaccatcgatccccatggtcggcccgatggtattggtgaggctgacgccccagtacttccatatcggtgcgctgccattgggatcgaggctctcaagtacatcagctacccggctcaggtgttggcaaaatcttctaagatgattcctgtaatgttgatgggaactcttctctatggtgtgaagtacacacttccagagtatttatgcacctttcttgttgccggcggtgtgtcctcctttgcgttgttgaagacaagctccaagacaattaagaagcttgccaaccctaatgcacctcttggttacacattgtgcttcctcaacttagcttttgatggatatactaactcgacccaagatttaataaagtcaaggtacccaaaaacaaacccatgggatataatgctnggcatgaacctcttggggaccatatttatggcgga

SEQ ID NO: 92823 - DNA, 488 bp, Zea mays
  unsure (1)..(488): unsure at all n locations
natggnaggcgtctttctgtgctacgctagcacgtaagctgcaccgctcctgaattcccgggatctgtgtggccctgttactacgaagccctgccctggggatcctcccttttccccaccgcctccattcaatcctccgggtcccgcaacccaatcaactggtgcttctggccctggagcaatcgctggaggtgttgctgctggtgctgcattggtttttgctgttccagcaattgcatttgcaatgtggcgccgtcgtaaacctgaagagcatttcttcgatgttcctgccgaggaggatccagaagttcatcttggtcagctcaaaaagttttcgttgcgggagcttcaagttgctactgatacttttagtaacaagcacattttaagaagaagtggttttggaaaagtgtacaagggaaagcttgctgatggctcattggtagcagtgaaaagacttaaagaagagcgcacacctggtgggttgg

SEQ ID NO: 92824 - DNA, 488 bp, Zea mays
gagatgtctgtctgtccacgcatcgcacgtaggctgcaccgctcctgaattcccgggtcgacccacgcgtccgatctgaagcgcgcgagagacagacgcgtatacccaggcggcggttgaggaggaggagaaggagaagaagaagatggcttcctgcgcgtacgcctcatggtccaagcggtggatccgtcccgaggtgtacccgctgttcgtgccgatggccgtggccctgggtatctgctcgtaccagcttgtgcgcaacatcacgggcaaccccgaggtgcgggtgaccaaggagaagagggcggccggcgtcctggacaaccacgacgagggcgagaggtacgccatgcacggcctcaggaagttcgtccgcgggaagaagcccgagatcatggcttccatcaactccttcttcgccgaccctcccaaggacgattaagctagattccgtcatggatggatgagtatgttttaccaatcatttt

SEQ ID NO: 92825 - DNA, 550 bp, Zea mays
  unsure (1)..(550): unsure at all n locations
ngaggngatggggnntctttcctttgataagcactatatagtatgcttcaccggtccggaattcccgggtcgaccgacgcgtccgcctcacggtgtcacctgattctatccagttagtcgctgagcatgctgcggtaaattacatggtgtttctgatgaacctctctgatgccttcatctgctagtttttctgtgatgcccaagacaaggtgctcccgtatgctgacttcatattcggcaatgaaaccgactgctgaatcttcgccaaagttcgaggatgcgagacagacaatgtcgaggagattgctttgaagatctctcatctacctttggcttcaggcaagcataagaggactgctgtgattactcatggcgctgatccagtggctgttgctgaggatgggaaggcgaaaacgttacctgtgatcctattgcccaaggagaagctcgatgacaccaacggctcaggtgactctttcgtcggagctatctctctcggatagaccatagcacgagcatctaagactgcgtgacagctgagtgctacgct

SEQ ID NO: 92826 - DNA, 558 bp, Zea mays
  unsure (1)..(558): unsure at all n locations
ngttggtgagtggggggggtgtgtgtctgancacgaacagcatgtattcctcacccgtccggaattcccgggtcgacccacgcgtccgcccgcaagggatactggcagttcgacatgggggaccttctcatcgacggccactccaccgggttcggcgccaaggggtgcgctgccatcgtcgactccgggacttccttgctcgctggcccaacggccataattgcccaggtgaacgaagcgatcggggctgacgggatcatcagcacggagtgcaaggaagttgtgagccagtacggagagatgatcctcgacatgctcatcgcacagacggatccacagagggtgtgcagccaggttggtctgtgcgtgttcgatggcgctcgatctgtcaggtgagaggctctgttttgcttgacacagcaagcatgttcttgttcttctcatgctagtggtaaactatcatcagatcacgcgaaaactttctgcaacgaaggggatgaatctgtcgtncggaaaagaaaccttggctcagatgtcaagtgctccgcctgtcagatg

SEQ ID NO: 92827 - DNA, 488 bp, Zea mays
gaggagtgcgtctgtctatgcatggggaagtatggtgacccgctcctgaattcccggggaagaacatgatacttctggggggaaatcaaaaggacaaggaaccggaaatgttctcattgttactcttgttgatgcggagacagaaagtagcataaacgctaccatgcttgaggaagggcttgcccggctcgaaagaagcaagagatgggacactagggagaggaagacggctctccagaacctggaacagttccaggacaaggcaaagaaggaaaggctgcggatttggcagtacggagatgttgaatcggacgaggacgagcaggccccgcctgcaaggaagcctggaggtcgtcggtagagactgggcagtgtaaggctgcagtctggcatgctatgaaagttttggacaaccacaaatgttggactctgccgggagttatagatgaagacttactgaagggtaccgtatttatattcggttaaaa

SEQ ID NO: 92828 - DNA, 487 bp, Zea mays
  unsure (1)..(487): unsure at all n locations
natgggaggtgcgtctgtctatgcataggaagtacgatgcatcgcccctgaattcccgggtcgacccacgcgtacgcggacgcgtggggtcacacacatcgaaaactaccagtgtatttttctctggttacaaggttgggcagccaattgagggagatgaaatggatcttgattctgaggatgaagaggaggagctaaacattccagtaatcaaggaaaatggtgatgggaaggaggagcagaaaaatcaagagaaggcagtagctgctacagcttcaaaatcaagtcttggccttgaaaagaaaagcaaggatgactctgatgattctgatgaggatgagtctgatgattctgatgaagatgattctgatgattctgatgaaggcgaaggattatctcctgaccaaagcgatgatgattcaagtgatgaagatgataccagtgatgaatgacaagaagaaaccccaacttctaaaaagccagaggg

SEQ ID NO: 92829 - DNA, 486 bp, Zea mays
  unsure (1)..(486): unsure at all n locations
gtggaggtcgtccgtctagtatggagaagtatggtgacaccgctccggaattcccgggtcgacccacgcgtccggctgacaaagccattgagatgttcaaccgctatgatattagcgggaggcttctgaatgtagggagggcatcttctaggggcactcgcatggaaagacctcagagacaatttgcaccagctttcagagcttatgttggcaacttgccatggcaagttgatgactctaggctggtgcagttgttcagcgagcatggagaagttgttgatgctaaggttgtctacgacagagaaactgggcgctcacgaggattcggttttgtatcaatggtgtcaaaggaggaactcaatgatgctatttcggccctagatggacaggaattggacggccgncctcttcgagtgaatgttgcagcagagcggccacagaagggcttttgatgcggttgtatgagagagatgactgcttgttttt

SEQ ID NO: 92830 - DNA, 559 bp, Zea mays
  unsure (1)..(559): unsure at all n locations
tggggtnaggtgggaggtgtcggtcgtcttttgatatgcagagtgaagtatcgcctgcaccggtccggaattcccgggtcgacccacgcgtccgtaaacaaatacaacgagattagatcagtgatggcaatgaaatttgttgcttgcttcttgggagttgtcctggtttgggaagttccaggtgtctttgacatagtatggagcccattcacattccttctaggctataccgatccttctaaaccagatcttccccggttgcatgaatggcaattccgatctggactggatcgctacatttggattgtggggatgatatatgcatattaccatccaactgttgagaagtggttggagaagctggaagaaactgaaatgagaaccaaactctatattaagacctcaatagttacagtgtcaatgatggctggttatttgtggtatgaatacatttataagctggataagattacttacaacaagttgcatccatatacatnctggatccccataacttgctacatatgcctacgcaacttcactcaagaattaggggctt

SEQ ID NO: 92831 - DNA, 487 bp, Zea mays
tgatggaggtcgttagtattgacgcgtgaaggtacgtgtcaccgctccggaattcccgggtcgacccacgcgtccgggttattcttgttggtggctcaactagaataccagctgttcaggagcttgtcaagaaaatgagaggaaaggaccccaatgtgacagtcaaccctgatgaggttgttgcacttggagcagctgtgcaggctggagttctgtctggcgatgttagcgacattgtacttcttgatgtgacccccttgtccctagggttggagacactgggtggtgtcatgaccaagattatcccacggaatacaaccttgcctacctcaaagtcggaagttttctcaacagcagctgatggccagactagtgtggagatcaatgttctccaaagagaaagaaaagttgtgagagacaacaagtctattggtagcttccggcttggtggaatcccttcttgcccacgtggtgttccacagatttc

SEQ ID NO: 92832 - DNA, 555 bp, Zea mays
  unsure (1)..(555): unsure at all n locations
nggggggggggaggggtgggggtttgtgatagggggggaaggtagtattgctcaccggtccggaattcccgggtcgacccacgcgtccgtccaggtgcatcggctcgtggtcaaccgggaccccaagttcaccaacttcgtcgagggccgtgcgcacaaagttatctataggagatatgcaggactttttttctctatatgtgtggacatcaccgacaacgaattggcatacttggaatgtatccatctgtttgtcgagatattggaccatttcttcagcaatgtgtgtgaacttgatttagtatttaatttccacaaggtaactttatgcttcactacgctaatctagcaatctgcaataattcaatactttntatcttttcacatcttgtatttaaactttaaagagcagtttccaactaaatattctctttatcaacatgttctttggtaaccaaatttgcatatattgagctagtgttagttggtactgtattctggctaagacttanaaaagactgctggcatngattgtgttaatcatgtactccgccc

SEQ ID NO: 92833 - DNA, 563 bp, Zea mays
  unsure (1)..(563): unsure at all n locations
gggggggaggggagggaaggcgggtctgtgtaaggggggaaggcggagaagtatatcnctcgtccggaattcccgggtcgacccacgcgtccgctgggagatagagagaggagagggagggtttcctcaaagagaacctgaacccaaacccaaggagagaacactagcgttccctcaccagggcgggcgtccatcccagcagccatggcgatggcgtacaagatggcgacggaggggatgaacgtgaaggaggagtgccagcgctgttcatggagatgaagtggaagaaggtgcaccgcttcgtggtgtacaagatcgacgagcggtcgcgcgccgtgctggtggacaaggtgggcggccccggggaagggtacaacgagctcgtggccgcgctgcccggcgacgactgccgctacgccgtcttcgacttcgacttcgtcactgttgacaactgccagaagagcaagatcttcttcatcgcctggtcaccggcggcgtcgaggatcaaggccaagatcctgtacgcgacatcgaagcaaggcctgcggcggcttgctgacggg

SEQ ID NO: 92834 - DNA, 485 bp, Zea mays
  unsure (1)..(485): unsure at all n locations
tggggggcgtgtgttatgaagtggggggtacggtacaccgtctccggaattcccggggctagctctctgtctcctgctcagagtcgcagttcgctttgttgtactagagcgctgagcagatctttccttgtttggtcattccngtacgaaggggaggggtccaagtgaagagaagagaaggcctgcgagcgatgggcatcgtcgacgtcgtctccgagttctgctccttgccgaggactcgccggcatctcaagaagaggaagcagttccagacggtggagatgaaggtgcgcatcgactgcgaagggtgcgagcgcaaggtgaagaaggcggtggagggcatgaaaggcgtgagctccgtggaggtggcggccaagcagaacaaggtgacggtcacgggctacgtggacgccaccaaggtcatgcgccgcgtcgcctacaagacaggcaagcgggttgagcccttgccctacgtgcccttaaac

SEQ ID NO: 92835 - DNA, 486 bp, Zea mays
  unsure (1)..(486): unsure at all n locations
gtggacgtttttgctaggggatggatgaatagtctgcaccgctccggaattcccgggagaattcgctggaggcgcttttttcgaagtcggagagtacaccaagtacgaaaaggtcaagctcccacctaggctatgcgttcttggggggtcttaccttcatgggtaaaaacgagatgcccgttatctttccgtattctgcgtcgcttaagaaactggacctgcagtacactttcctcaccactgaagatcactgtcagcttatcgctaaatgccccaacctaatggttctcgaggtgaggaatgtgattggggatagaggactggaagttgttgccgatacatgcaagaagctacgaaggctgagaatcgagaagggggacgatgaccccggccaagaagagcanggaggagtctctcaaataggcctgacagccgtagctgtccgctggcgggaacttgagtacatagcggcatacgtatccgccc

SEQ ID NO: 92836 - DNA, 549 bp, Zea mays
  unsure (1)..(549): unsure at all n locations
aggatgagatgctttgtgtacgatacgcaaaggtacgtatgcctgcaccggtccggaattcccgggtcgacccacgcgtccgctagcgccggcgcctccatttcgttttcctcactctctcctccagctcagggtccggcggggaagggaaggcaagatgtacaccgcgaggaagaagatccagaaggagaagggtcttgagcccttcgagttcgaggactccgttgcccaggctttctttgatctggagaacgggaaccaggagctcaagagcgacctcaaggacctgtacatcaacaatgctatccagatggatgttaccgggagtaggaaggctgttgtcattcacgtcccataccgcctgcgcaaggccttcaggaagatccatgtcagactcgtcagggagctggagaagaaattcagcggcaaggatgtggtaattgttgctacacggaagattgtgaggccacccaagaagggttcagctgttctgcgccctcgcaccangactctgactgctgttcacgatggcatcnttgaggatgttgt

SEQ ID NO: 92837 - DNA, 545 bp, Zea mays
ggccggtgtctgtgtattagaaggagacagtatgtcttgccccgtccggaattcccgggtcgacccacgcgtccgctggagaagcgtggtgctttgatagtccgtcgcctctgcgttcttctgggtgctgaaaaaggatagcgtgagttctccgctattcttgagagtgaagttgaccttgattttgcatccgtcatggttcaggctttgaatttgattttgctcacatcaactgaacttggtgagctccgctctcttcttaagaagtcgttagtggattcctgtggcaaggacttgtttcagtcattatatgcttcgtggcgccactctccgatggctacaataagtttgtgtttacttgctcaggcatacagtcatgcgagctgtgttattcagtcgctgggagaagaagacataaatgtgaaatttttggttcagttagataaattgatccgtctcttagagacttcaatatttgcttacttgcgtttgcagcttcttgagccctggaagcacacctggcttcttgaaactctttatggtct

SEQ ID NO: 92838 - DNA, 546 bp, Zea mays
  unsure (1)..(546): unsure at all n locations
agtntgaggctttatctaagacgggggaaggaacgtatgcctcaccggtccggaattcccggggaagcaaggagttttgacttctggtcgtgttcgtcttctgctccataggggcactccctgcttccgtggttatggcaggcgtaatggtgagcgcaggaggaagtctgtccgtggttgcatcgtgagccaagacctatctgttatcaacttggtgattgtgaagaagggtgagaatgatctgcctggtctgactgacactgagaagccaaggatgaggggtcccaagagggcctccaagatcagaaagctgttcaaccttaacaaggatgatgatgtacgcaagtacgtgaacacataccgcaggacattcactaccaagaacggcaagaaggtcagcaaggcacctaagatccaacggcttgtgacacccttgacccttcagaggaagcgtgctagaatcgctgacaagaagaagaggataactaagaagaagtctgaggctgctgagtaccagaagcttcttgcccagaggcttgagggaca

SEQ ID NO: 92839 - DNA, 556 bp, Zea mays
  unsure (1)..(556): unsure at all n locations
nggttgtagtggggaagtgtntngtccatgataagaaatagaacgtattgctgcaccggtccggaattcccgggtcgaccgacgcgtccggtcgtcgtcgtagcagagatgacctagctacgtgtgtgtcatgcatcaaactggcgggtagggcagaagcagaagcggcgggagctgcagctgagccagatgcgccgggacatcgccaagctcctagaggccggccaggaggccactgcccggatcagggtggagcacatcatccgggaggagaacatgatggccgcgcaggagatcctcgagctcttctgcgagctcatcgcggttcgcctgcccatcatcgaggcccaaaaggagtgtcctattgatctcaaagaagcaatatcaagtgtctggtttgccgctccaagatgtgcagatctacctgaactgatgcangttcaaatgatgtttgcaactaaatatgggaaaggaattgtcgctgcagcttcagagttgatgcctgattgggggtcaatcgtcagataattgaattggcttctattcgtcctcctct

SEQ ID NO: 92840 - DNA, 541 bp, Zea mays
  unsure (1)..(541): unsure at all n locations
nggtgagggtgttatccatagtaatgcactgtactcatctactcaccggtcctgaattcccgggtcgacccacgcgtccgcggaagccggttgcctacaccataaacacgttggccggtgctctgtacaaggtcttgagcggctcgactgatcaagctaggaacgagatgcgccaggcctgttttgattacttgagcctcggaagcgtcttctcgaatgggcctattgccttactctcgggtcttaatcctcggccactgagtttagttgcacacttctttgctgtcgctatctacggtgtcggtcgctagatgctccctcttgcttcacctaaacggatgtggattggagccaggctgatgtctagtgcatgcggcatcatacttgctatcatcaaagcttaaggcgtgagacagatgttcttacctgccactgtacccgcatatacccggctgcgcctacnggaggatangtaagcgcgcgagaaccgattctgngctgctgntaatccaccatgatctgatggcactgatgtgtaatg

SEQ ID NO: 92841 - DNA, 486 bp, Zea mays
  unsure (1)..(486): unsure at all n locations
gtggnaaggtatttgtccacgcatagcacgtaagtcgtaaccgctcctgaattcccgggtcgacccacgcgtccgggatcatcagtcccgagcggatcgaggcgcacgccaagcactggaaggatgctgactacctgggcttgaacacctacatgtggtggatgaacaacgccgatatcaaagtcaggagacccaattcgaggtactggtctgacaacgatgaggttcccaggattgaggcgtacggccgtgtgttcaagacatggtctgattggctcaatgacaacatcgatcctgcccgaacgtccatcttcttcatgacgatttctcctcctcacctcagcccacagaattggggaaacccggacggtatcaaatggtgtagaaagacgcttccatatcagaactaccggccacacttggatctttaacatgacatgcggctgtattacttaatggtcaatgtggccagctccatggaggaaa

SEQ ID NO: 92842 - DNA, 550 bp, Zea mays
  unsure (1)..(550): unsure at all n locations
atggaagggagggtgtgtgcacgataagcaaagtatcgtatcgctgcaccggtccggaattcccgggtcgacccacgcgtccgagaccacagccagtcagccacatcactagctatctgtgcagaggcaatggcgtccaaggtggagctggtggtggaggtcaagtccccggctgacaagctgtgggcggcgctgcgtgactcgacggagctgttccccaagatcttccccgagcagtacaagagcatcgagaccgtcgagggcgacggcaagtcggccggcaccgtccgcctcctcaagtacaccgaggcggtgccgatgctgacgttcgccaaggagaagcttgagacggcggacgacgagaacaaggtggtgtcgtacagcgtggtggacggcgagctggcggacttctaccagaacttcaagatcacgctgaaggtgactnnncgccaagcgganggcgagggcngngccgtcgtcagctggggcatggaagtcgacagggcccacgaccaagttcccttacccgacgttattaaagggaccgccc

SEQ ID NO: 92843 - DNA, 544 bp, Zea mays
  unsure (1)..(544): unsure at all n locations
ngagagtcgtttttcctaaccgcacgtangtactacttantcctttnatnnttcgggtggantggaacatacggtctccatcacataaaaccantgcatttagaagcagcgcaatggcgagcagcaccatggtccgtctcctacacaggcttggccggcaaggcagtgaacgtgccgtcgtctctcttcggcgaggcccgcgtgacgatgcgcaagacggcggcgaaggcaaagccggcggcgagctccggcagcccgtggtacggccccgaccgcgtgctctacctgggcccgctgtccggcgcgcccccgagctacctgacgggcgagttcccgggcgactacggctgggacaccgcggggctgtcggcggacccggagacgttcgccaagaacccggagcctgaggtcatccactcncgctgggccatgctgggcgcgttgggctgcgtgttcccggagctgctcgcccgcaacggcgtcaagttcngccagggccgtgtggttcagggccgggtcgcagatcttcagcgagggtgggctt

SEQ ID NO: 92844 - DNA, 552 bp, Zea mays
  unsure (1)..(552): unsure at all n locations
cagtattgtgtcgtctgtcaactgccacgcccagtanngcatgttcttaccggtcctgaattcccgggctggcatgagcatggaccgcatggcgcggcgttccgtgtccttgctcctcgctctggctctcctggccgtcggggcggtctcagactcgtggctgtacgagaagttcacgacggagggcaacgtgcgcgcggactacaacgcgcaggggcagcaggtgacgtctctgatcctgacgcagcagtccggcggcgccttcagctcgcggcagaagtacctgtacggggagttcagcatccagatgaggctgatcccgggcaactccgcgggcaccgtgacctccttctacctgtcgtcgggcgacgggcccgggcacgacgagatcgacatggagttcatgggcaacgccagcgggcagcccgtggtgctgaacaccaacgtgtgggccaacggcgacggcaagaatgagcaccagttctacctgtggttcaacccggccgtcgacctttcacacctacaccatcatttggaacgacaagaacgttt

SEQ ID NO: 92845 - DNA, 559 bp, Zea mays
  unsure (1)..(559): unsure at all n locations
ggggtggggggatttggtctttcngtcctttgagtcgaantgtantgtgtgtccccgtccggaattcccgggtcgacccacgcgtccgtgaacatgctgggacttgcaaagagagttggagctaggattttgttgacatcaacatctggggtttatggtgatccacttgagcatcctcaaaccgaggcctactggggcaatgttaacccaattggagtcaggagttgttatgatgagggtaagcgtgtagcagagacgctgatgttcgactatcacaggcagcatggcattgaaatccgaattgccaggattttcaacacctatgggccaaggatgaacattgacgatggccgtgttgttagcaacttcattgctcaagctgtgcgtggcgaaccccttactgtccagaaaccaggaacacagactaggagcttctgctatgtcgccgatatggttgatggtcttattaggctgatgaacggaaacaacactggaccgattaacttnggggacccangtgaattcaccatgctggaactngcttagaatgtgaaggagt

SEQ ID NO: 92846 - DNA, 551 bp, Zea mays
  unsure (1)..(551): unsure at all n locations
tggggtggccntnntgtcaactgaccgctatagtacgtgacctcgtcctgaattcccgggcgctcgctcgacactgtcactagctagttgctctactagagggcgggtatagagctgcctgcaatccgccgctgaggagggaggatcggaagcgacgatgaggtcgtttgctcctgtctttctgtcggcggtcgtggcctgcttggacctgccggcacccggccagggcggaacttctaccaggacacagagatgacctggggcgatggccgcggcaaggtagtggacggcgggcgcgggctggacctgacgctggaccccacgttcggctccgggttccagtccaagagcgagtacctgttctgcaagatcgacatgcacatcaagctggtgccaggcaacttcgtggcacggtcaccaccttctaactgtcgntccacggcgacacgcacgacgagatcgacttttaagttctggggcacgtgagcggggagcactacacgctgtacacaaacgtgttcacacgcggacaggggccccgggagcaaaag

SEQ ID NO: 92847 - DNA, 524 bp, Zea mays
  unsure (1)..(524): unsure at all n locations
agaggtcgtcttttggggcatgncgagatcaatacaatccattttctccggccggcgaacttaacatctgcacttcatagagagttttctatgattttgttgacatcaacatctcgagttgtatttaatccacgggagcatcctcaaaccgatgcctactgtggcaatgttaacccaattggagtcacgagtttttatgatgaaggtaaacttctatcatatactcttatgttcgactatcacaggcatcatggcatttaaatcctcattgccaggattttcaacacctattgtccaaggatgaacattgactatggccttcttttaagcaacttcattgctcatgctgtccgtgtcaaactccttactttccaaacaccttaaacacatacttatatctttttctatgtcctcaattattttaatggcctaatagcctttttaacgtaaacaactctgtacctattaacttgtgaaacccatttgatttcaccttctgaaacttgcttaaaattttaaggctt

SEQ ID NO: 92848 - DNA, 554 bp, Zea mays
  unsure (1)..(554): unsure at all n locations
ngtggtagaggtcgtctgtccatgatcagcacatggactgcacgactctaccggtcttgaattcccgggcttgcgttctcaaaccaacctaggcaattcgccgcagcctctcaccctcgcgagtcccgacctcccgcagccggcgcgcagatggcacccaaggcggagaagaagccggtggccaagaagcccgcggaggaggagcccgcgacagagaaggtggagaaggctccggcggggaagaagcccaaggccgagaagcgcctcccggcgggcaagtccaaggagggcggcgagggcaagaaggggaaaaagaaggcgaagaagtccgtggagacctacaagatctacatcttcaaggtgctgaagcaggtgcaccccgacatcggcatctcgtccaaggccatgtccatcatgaactccttcatcaacgacatcttcgagaagctcgcggccgagtccgccaagctggcgcgctacaacaagaagcccaccatcaccttccgcgagatccagacctcggtgcgcctcgtnctccccgcgagctcgccagc

SEQ ID NO: 92849 - DNA, 548 bp, Zea mays
  unsure (1)..(548): unsure at all n locations
gggggggttcttctttcaatggctcagcccagtacgcacgacctaccggtccggaattcccgggtcgacccacgcgtccgagggcacaagcagaagttgcggttgtacttttcttcctccgccgtcggctcagatctctgggtgcgggctagcgatggcgtcgttctcggaggctcccccagggaacccgaaggcgggcgagaagatcttcaagaccaagtgcgcgcagtgccacacagtcgagaagggcgccggccacaagcaaggtccaaacttgaatggtctttttgggaggcagtcgggtaccaccacaggctactcctattccgcgggaaacaaaaacaaggctgtgatctgggaggagaacactctgtatgactacctgcttaaccctaagaagtacattcctggaaccaagatggtcttccctgggctgaagaagccgcaggaacgtgctgatctcattgcgtacctgaaggaagcaactgcgtaatataatgacancgccttgccatgaagagaaaatcggtttgcagtttaataataaa

SEQ ID NO: 92850 - DNA, 488 bp, Zea mays
  unsure (1)..(488): unsure at all n locations
ggatggtgtcntgcgccaccgtatacgatngtanctactgcaccgctccggaattcccgggtcgacccacgcgtccggacgacgtcgtcgacctgccgagatgggtgcactcggtggtccgggaggagtggacggccggggtgtttgacgtggagctgatgaagcaccagaacatcgaggaggagctggtacagatgctgcagatagccatggtgtgcactgccaagtcgccagaccggcgcccgacgatggaggaggtgatcaggatgattgaggggctccgccagtccacctcggagagccgcgcgtcttctgatgagaaatccaaggagtcgaaccctccatcggtgtaaatcctgcgcagctcccttcgtccgcttgatcggttgttgttgccagttgcacctcatttgatttgttagctaatttatttatgattgagtttcttgtaaaccgtggttagcatctgctgcatttagcctcagnga

SEQ ID NO: 92851 - DNA, 561 bp, Zea mays
  unsure (1)..(561): unsure at all n locations
gaggaggccgtctgtttatgaacagcatagtattgctcacncgtcctgaattcccggatccaggtgttttggatttgtcaattttgaaaatgcagatgctgctgttcaggctgttcaagagttgaatggcaagatgttcgatgataaggaactgtatgttggaagagcacagaagaagtctgaaagagagatggagttgaaggagaaatttgaaaagaatgttcaagaggtagctgagaagttccaaaacacaaacttgtatttgaagaacttagaggagaacattgatgatgagaaattgcgtgaactctttgctgagtatggcaatattacttcctgcaaggttatgcgggattcgaatggtgtcagcagaggttctggatttgttgctttcaaatctgctgaagatgcttaccgagctcttacggagatgaatggcaaatggtttggngcaagcccctttatgtagctcttgcgcaacggaaagaagacagaaaggcaaagctacaggcacaattttcacaaatgcgtnctgttgcaatggcgcctttagtagggccc

SEQ ID NO: 92852 - DNA, 565 bp, Zea mays
  unsure (1)..(565): unsure at all n locations
nagaggggcgtctgactcagctaagatcgaacngtattctcactcggccgaattccgggtcgaccacgcgtccgggcggctgtgctgaacagcaggaagacgcctcaggcggtggtggccgtgctggtggcggcggcgctgctggcttcgtcggcttcggcggcgatcacctgcgggcaggtggggtcgtcgctggcgccgtgcatcccgtacgcgacggggagggccagcgcgctccccgcgtcgtgctgcagcggcgtcaagagcctcaacagcgcggcgcggaccagcgcggaccgccaggcggcgtgccgctgcctcaagagcctcgccaacagcgtcaagagcgtcaacatgggcaccgtcgccaccatccccggcaagtgcggcgtctccgtcggattcccatcagcatgtccaccgactgcaacatgatcagcttaattacgacgacccaactaataagcctaccgaacgtacacgttcggccccgggcgcttcacgagtgatgaaacccagggaggaaatatattaaagctagctgtattgccagaacaacatgcat

SEQ ID NO: 92853 - DNA, 562 bp, Zea mays
  unsure (1)..(562): unsure at all n locations
ttggaggttgtctgtgcctgcatgctnatcantgcatgacctaccggtctggaattaccgggtcgagccgacgcgtccgggaaggaactgcttgaagtgatggcccacatgtctcatgttgacagcagcgttgaggtcatgggaagccttctgtttggctccgatgacggtccaagggttctgaaagccgtccgtgcacctggtgaacctctggttgatgattggagctgcctcaagtacatagttcgcacttttgaggcgcgatgcgggtccttggcgcactatgggatgaagcacatgcgatccttcgcgaacatgtgcaacgctggcatccttcctgaagcagtgtcgaaggtggccgttcaggcctgcagcatcattccggtcaacccctggagctctatccacaagggtattagcgcttaagaaccataggtgaggctaacttcattacgctgcatgttctaagggaggtcttaattcttgaacaaccataggtgaagcagacttatgtataacctgccacaatgcgtacttattagcaagttccggggtacatata

SEQ ID NO: 92854 - DNA, 495 bp, Zea mays
  unsure (1)..(495): unsure at all n locations
ggatggnnttttgngccgaattgagccaagccngcctacngcatgnacgtaccggtcctgaattcccgggtcgacccacgcgtccggggacttgcaaagagagttggagctaggattttgttgacatcaacatctgaagttggtggtgatccacttgagcatcctgaaaccgaggcctactggggcaatgttaacccaactggagtcaggagttgttatgatgagggtaagcgtgtagcagagacgctgatgttcgactatcacaggcagcatggcattgaaatccgaattgccaggattttcaacacctatgggccaaggatgaacattgacgatggccgtgttgttagcaacttcattgctcaggctgtgcgtggcgaaccccttactgtccagaagccaagaacacagactaggagcttttgctatgtcgccgatatggttgatggtcttattaggctgatgaacggaaacaacactggaccgattaacctt

SEQ ID NO: 92855 - DNA, 483 bp, Zea mays
  unsure (1)..(483): unsure at all n locations
gatggcctcnctgcctccnccgcatgtaaagtatgctcactcggtcctgaattcccggtgcatcgagtgccaggcgaaccaagccagcgcgaccagcgatgagtgcactgctgcttggggagtctgtaatgatgcgtttcacttccactgcgtcagcaggtggcttaagactcgtcaagtgtgcccattagataacagtgagtgggagttccagaaatatggccactagttcctgggcaccctcatgtgatgttggggcttacttctagtgactgctaccactcgagtgtatttttttctgccaaacagctccatcttttactgctttggatgcttgcatgtatcacaggtcaattatcactagtagtacgtccacctgggactgtatttggattgttcgttgagaggatagtagttccattttataaatgttatgtggattttcatacaanaacaaccaagccaacccaaaaacaagggggg

SEQ ID NO: 92856 - DNA, 571 bp, Zea mays
  unsure (1)..(571): unsure at all n locations
ngagggtcgtggtgtgttcctcgatccgcanatnactcgtcacncgtcctgaattcccgggtcggcccacgcgtacgccgaattcccaggcaggcaggtcggcgaggatggcatgaagaccgaataccgagccgtgctgaggcgctttacgggaacggtacaggaccccaaaatctcagatccttcctgcccgcccgcccgtgcccgtcgactcgtcgttcttgccggccgtgccccacctacggcctctcctcctgcacggggatcggatactccacatgctgcgcgatggtgctgtgggtcttcggctactgctccctcatctggaaccccggctttgacttctacgacgaaatcctcggcttcatcaagggctacaagcgcacctttaatctcgcttgcattgaccacataggcacaccggagcattctgcgaggacctgcacgcttgaaaccgactactaagccctatgcttgggaattgcataattggtcaagggtggttccacaaaaagaactcaaagcaataccgtactttggagaggataaagtgtgaattcgtccccaaaag

SEQ ID NO: 92857 - DNA, 568 bp, Zea mays
tgagaggagaggtctgttctagctaggagaagtatgtatgcatcaccggtccggaattcccgggtcgacccacgcgtccgggctgggccaagttcaccggggggttcttcttcggcggcatctacggcgtgctctgggccgactttctcctctacgtgctcgacctcccctacttcttcaagtagaaatcatcaaagatgcgtatatatatagctccggccgatcctcctctctagctgcatggtatgtaagtggtgtggtccttgtttcatttcactccagcggtgatcagcgccgtgtataaatgtaattcctctgctttgcacatggatggattgagatgtaacctgttcaaaaaataattttaattggaagcctattaatctttaacttgcaaattctaacttacaaaaaaaaatggcctgccgctttaaaggatccaagcttacgtacgcgtccatgcaacgtcaaactcttcaatagggccccttaattcaaatcaactggccggcgtttaacaacgacggaactggaaaaaccctggtgttcccaactttaatcgcctgcg

SEQ ID NO: 92858 - DNA, 566 bp, Zea mays
  unsure (1)..(566): unsure at all n locations
ngaggatgaggtctgtctatgatggagatgtactgctcacccgtcctgaattcccgggtcggcccaggcgtacggtggaggctggaactggtattgcagaactcattgctcttgagatttcaaaacagacgtcgggtccgattgaagagtgccgcaagaagatttggttggtggactcaaagggtttgattgttgactctcgtaaaaactccgttcagtcattcaaaaaaccttgggcacatgagcatgagcccttgacaaccttgtacgatgctgttcagtccatcaaacctacagttctgattgggacgtctggagttggaagaacattcacaaaagaagttgttgaggccatggcttccttcaatgagaggcctatcatcttttcactgtcaaatccaacctttcattctgaatgtactgctgaagagcatataacttgactcanggtcgtgtaatatttgccagtggcagtccatttgaccctgtggagtacgattgggaaggtttttggacctggacaagtcgacaaacgcctacatttgtcctggatttggccctcggcg

SEQ ID NO: 92859 - DNA, 561 bp, Zea mays
  unsure (1)..(561): unsure at all n locations
agttggccgtgtctgtctacgaatgcgatagcattgctcatcccgtcctgaattcccgggtcgacccacgcgtccgccacgccagccgccgcagccacaccggcacaccgccggccagcagcagccatgccgcccaaggtggacccctcgcaggtggtcgaggtcttcgtccgcgtgacgggcggcgaggtcggcgcggcgtcgtcgctggcgcccaagatcggcccgctcggcctctccccgaagaagatcggcgaggacatcgccaaggagaccgccagggactggaagggcctgcgcgtcaccgtgaagctcacggtgcagaaccggcaggccaaggtctccgtcgtcccctccagcgccgcccttgtcatcaaggcgctcaaggagcccgagcgggaccggaagaaggtcaagaacatccggcacaacggcaacggtcgcctcgacgacgtcgtcgagatcgtcaggaccatgcgccccaaggtcattggcaanggagatgccggcaccgtcaagagattctgggcacctgcgttaagctcggctggacggtgaccg

SEQ ID NO: 92860 - DNA, 551 bp, Zea mays
  unsure (1)..(551): unsure at all n locations
gagggcgtttgtcttactaagatatattgcttaccgtccggaattcccgggaggaaaggggcgcttgctttatattctttctaacctgcgatctccgtcgatccagccgagaggtcgtgtgcgcgtggatgtgtgcgtagaagggatgaagattacggcgctcctggtgctgaagccgtcgacctccggagccgggagctcctcgtccggcggcgagtcgggcccggaggcggtggtgctcgcgaacgcgatagacgtcagccacttcggctatttccagcgcagcgccgcccgcgagttcatcgtctttgttgcccgcaccgtcgctcagcgcacccagccaggccagcggcagtccgtccagcacgaagaatacaaggtccactcccacaatagagatgggctttgggctgttgcattcatggatgatcaatatnctgtaccgagtgcattttctcttctgaatcaggttcttgatgagtaccaaaagggttattgggacttctgggaatttatgactgcanaataaacttaacagtgggcttttcctg

SEQ ID NO: 92861 - DNA, 566 bp, Zea mays
  unsure (1)..(566): unsure at all n locations
natgggaaggtctgttcctagctaagcanatgattgcactgctctaccggtccggaattcccgggtcgacccacgcgtccgatccccaagcaaacaaacagggtagagggagaggagaggagaggagaggagaggttgggtctgggacaccatgggtccgatgaagctgtacggggcggtgatgtcgtggaacgtgacgaggtgcgcaacggcgctggaggaggctggctccgactacgagatcgtgcccatcaacttcgtcaccgtcgagcacaagagccgcgagcacctcgtccgcaacctgtttggtcaggttccagctctgcaggatggtgacttgtacctcttcgaatcacgagcaatctgcaagtacgctgctcgcataaacaagccagagctgttgagggaaggaaacctctatgatgcagcaatggtggatgttttcatcgaggtggaggctaaccagtacaccgctgcactgaatccaattctctttcaggtcctcattagtcctattgcttggggaaccaccgaccaaaaagttttggttgaaacccttagaagct

SEQ ID NO: 92862 - DNA, 559 bp, Zea mays
  unsure (1)..(559): unsure at all n locations
gtgggggcgtcttcctcgatacgcacatgattgcactgctctaccggtccggaattcccgggtcgacccacgcgtccgggttgccgctgctaggtggattgcaaagctctcagggccttgtctggcacaagcatggcaggtgtacccagacttcaaaataaaggttgttggacattcactgggaggtggtacaactgctctgttgacatacgttctgagggaacataaggagtttgcctctactacttgtctggcatttgctccagctgcatgtatgacatggaaactggcagagtcaagagtgcattttatcactacagtcatcaacggagctgatctggttccaacattttctgctgcgtcagtagatgatcttcgttcaaaggttacagcgtcggcttggctaaatgatctncgtcaccaaattgaacaaaccagaatcctaagcactttttatcgttctgcatcaggcttgggatcccggctttcatctattgcaaatgcttaagcaagaatagcttgtgctggcgccattttaagacatgtatctacttggacg

SEQ ID NO: 92863 - DNA, 490 bp, Zea mays
  unsure (1)..(490): unsure at all n locations
gatggaggccgtgtgtgcatgaccaagcactatatggtatgactcaccggtccggaattcccgggtcgagccacgcgtccgcggggctgacgggccccatcccggcctgcctggccgcgctgtccaacctgcagttggtgacgggtctcccacaccaacgtgtccggcgccatcccggagtccctggcgcggctgcgcggcctcgactcggtggacctctccagcaaccagctgacgggcggcatcccggcgtcgttcgccgacctgcccagcctccggtcgctggacctcgggcacaaccagctgacgggcagcatcccggcggggctggtgcaggggcagttccggtcgctggtcctgtcgtacaaccagctgacgggcccgatcccgcgcgacgacgcgcgcgacgagatcaacaccgtggacctctcccacaacaagctgacgggcgacccctcccacctgttcgccgncggccggcccatcgggg

SEQ ID NO: 92864 - DNA, 485 bp, Zea mays
tggagagagctctgtgtactatacgccatataacgtactgctcaccggtccggaattcccgggtcgacccacgcgtccgcattctcgcatgctcttcaactgtggttgcgggatcagttgcttcatactactgggcgcgtggtgaaatatcacatgagataccatttctcactgtagtctcttcactgaagcgactgatgcgctacagccttggatctgttgctctgggttcacttgttgtatctgttgttgaatgggtgcggtttatactagaatgccttcgtcgcaagttgaagctagttgattctgcccgagagagctgctttggaaaagcgacgtcctcctcttctgaatgctgcctgggttgcatagactggaccctcaagtcagtaaatcgaaatgcctacattatgattgccatcaccgggaaaggtttcttcaaagcttcagtgctcgcaactggattaataatgaagaacattttt

SEQ ID NO: 92865 - DNA, 462 bp, Zea mays
  unsure (1)..(462): unsure at all n locations
gtggaggccgtctgtgcatgatcagcatataagtacgctcaccggccgaattcccggtcgagccacgcgtacggcgcggagtgcaacctcactgggagaggaggatgaggatcgccgtggactccgggaagggatcgctacctgccgacagcgcgacccgacatcatccacagagacgtgaaggcgagcaacgtgctcctggacgccgacttcaggcgcggtcgccgacttcggcttcccaagctggtcccggacggcgcgacgcacgtaccaccaagtaaaggcacgctgggctacctgcgccggatacgcgatgctcgggaaggcctcnagagctgnacgtcttcacttcgggtcacgctgctggagctggccagcgggaggaggcccgtggagaagctgagccccaccacgagcgcgaagcagaccgtgacggagtgggcgctcccgctggcccgcccc

SEQ ID NO: 92866 - DNA, 562 bp, Zea mays
tgatggggaggtctgtctatgcatgggatgtactcctcacccgtcctgaattcccgggtcgacccacgcgtccggtaagcacctgtttctccatggaccatggctatgtttagcatcctccgtttggatttcgatgtgtgggtgtttgtgtctgcctaccttctctcccatttgggggtgcagttaccctgcaggcacagaaagattacccaccagacatgcaatgcaaggataaattcttgattcagagcacgaaggtggccaccggtaccgagatggatgagatccccctgatacgttcaacaaggaaggctgataaggtaatcgaggaaatgaagttcaaggttgtctacacattacctagctacggaggttcaaatgactctagcgtatcatttttaggaagccggagcttcaaagcagcgtctgacgatctgatgatgctgaagaatgcaagccttggagagcagcagcgaaaacatttttcttcgcggcagaacgagagcggatttagtccgtggcaccgggcctgtcattggacccggggcattcgggttcacca

SEQ ID NO: 92867 - DNA, 557 bp, Zea mays
  unsure (1)..(557): unsure at all n locations
tgagggtggggtctgtaatgtacgcggggacgtgactgctgancccgtccggaattcccgggtcgacccacgcgtacggccgcggtgaagaactgcgtgacgcaggtggccaagaagtcgctgagcctgaacgcccggggcgggctccacaacgcgcgcttctgcgagaaggacctgcagacggcgatcgaccgcgaggcggtgttcgcgtacgcggacgacccgtgcagccccaactacccgctgatgcagaagctccgcgcggtgctggtcgagcacgcgctggccaacggcgacgccgagcgcgccgcggagacgtncatcttcgccaaagtggccgagttcgagcagcaggtccgcgccgcgcttgccaagggaggtgaggccgntcgcgcggccgttgagagcggcaggccccttggtcccaacatgatcagggagtgcccgttctacccggtgacccggtcgtgccccagaggtcggaaccgaatacctgacggncaagaggaccaggtcctcnggcaggagctcaccaaggggctcgtggcataaaccac

SEQ ID NO: 92868 - DNA, 561 bp, Zea mays
  unsure (1)..(561): unsure at all n locations
atggggaggtctgtaattgagagagaatgtactgctcaccgctccggaattcccggnggaggatgtgcaagtgatgaaaccgacaatattctgtggtgttcctcgtgtttatgatcgtatatatacaggtataagcatgaaaattcagtctggagggatgatagccagacacctttttcagtatgcctacaactacaaacttgccaatatgaggaaagggctgaaacagcatgaagcatcaccgtttttcgacaagatagttttcagcaaaataaaggaagggcttggagggcgtatacgtctcatgatagctggagcagcacctttgccagggcaaatcgaagaattcatgcgggtaaccacctgcagcgttgtagtacaaggatatgggctcactgagagttgtgcaggatgcttcacgtcaatcgccaacattttctcaatgattggaacagtcggcccttctgtcacaacaatagaagcacggctggaagccggccctgaaatgggctacgacgcactttcagacacgcccccgggccagaacttctttgaggcccc

SEQ ID NO: 92869 - DNA, 559 bp, Zea mays
  unsure (1)..(559): unsure at all n locations
agagcgatagcgatctcttgctcgcacccgctcgtacntgattacgttcgaattcccgggtcggcgcacgcgtaccaagacccgagccgtgtaggctgctacagtctcttcctccccgtcaagccgcggcggtcggggcccgcgccctcatatggtatagtcgccgcctccttgtcaccgccgattcgattaggttgatacagggaggagtcgcgaggggacgtagatgccgacgctgacaaagctgtacagcatgaaggaggctgcccttcacaacacgcccgacgactgctgggtcgtcgtcgacggcaagatttatgatgtgaccaagtatttggaggaccatcctgggggcgccgatgttctgctcgaagcaaccggtaaggatgctacagaagaatttgacgatgcaaggcacagcaagagtgccaaggagctaatgcaggactacttcggtggggagttggaactcgaccccacttctgagattctgagatggaaggttttcagaaaggaacaggacaccggatttggccagaaacctattgaccaacttggt

SEQ ID NO: 92870 - DNA, 565 bp, Zea mays
  unsure (1)..(565): unsure at all n locations
ngggaagagttntgtgatggaagggggatatatggattgctgcaccggtccggaattcccgggtcgacccacgcgtccgcgctcgaaggaggtattaatcaggccggcatcaagtactacaaaaagctcatcaacggattgatagagaacggaatagagccatttgtaacaatttttcattgggacgtccctcaagcactggaagacaagtacggtggctttttaggcgacaggattgtaaaggattacacagacttcgctaaggtgtgctttgagaacttcggtgacaaggtgaagaattggttgacctttaacgagccacagacatttacaaccttttcgtacggaacgggagtttttgcccctggacggtgctcaccaggagaaaaatgtgctcagcctattgctaactcactcaccgaaccatacattgctggccacaacatccttcgagcccacgctatgactgttgacctctacaacaagaattacaagggtacagacggccgcattgggcttgcgtttgacgtaatgggtcgcgtgccatatggaaatacatttcttg

SEQ ID NO: 92871 - DNA, 557 bp, Zea mays
aggggggtggtctgttatgaatgggactgtattgtatcgctctaccggtccggaattcccgggtcgacccacgcgtccgtgcgtgcgttggaagctaatccgacaaaccttgaagttcttcttgctcttggtgttagtcagacaaatgaattggagcagggagaagcattaaggtatctttataggtggcttcagaatcatccaaaatatggtggccttgtccctccgcagtcaactgattcaccttatggtcctgatgttgttagattgtttaatgacgctgctcagatgtcacctgaagatgcagatgttcatgtagttctgggagtcttatacaacctatcaagagagtatgatcaagctataacttcatttaagacagcagtacagctcaaaccacaagactactcactctggaacaagcttggtgcaacccaagcaaacagcatccagagtgctgatgcaatattggcgtatcagcaggcactagacttgaaacccaactacgtgcgtgcatgggcgaacatgggaatcaactattccaaccacggtctgtt

SEQ ID NO: 92872 - DNA, 489 bp, Zea mays
  unsure (1)..(489): unsure at all n locations
aggnagagggcgtctgtttaagtatgggggatagatggtatgactcaccggtccggaattcccgggtcgagccacgcgtccgcagatcttcagatttcactctgcaaggaaatggtagaatggacccgtgcagagaagcgtactttcctccggcaacgtgtggaggcaaggttggcagctctcctgttagagaatcaggagtatactgaagcccttaccctgcttactagtcttatcaaggaagtcaggagacttgatgacaagttacttcttgtggacattgaccttttggaaagcaaacttcacttctccctgagaaatctgccaaaggccaaagcctccttaactgctgctagaacagcagcaaatgccatttatgttccacctgctcagcaaggcactattgatctccagagtggaatcctccatgctgaagaaaaggattacaagactgcttacagctacttctttgaagcatttgaagctttt

SEQ ID NO: 92873 - DNA, 562 bp, Zea mays
  unsure (1)..(562): unsure at all n locations
gatggggaggtctgttatgaaggagacggtagtctacacctctcctgaattcccgggtcgacccacgcgtacgtgccaaatgggtctctgaacttcaaaccaatgggtctctggtagtgccgagaattgtcttggaagcgcttcctgctgttttactattcgaaaagaagcaaaaggcaaaagctattgatataatagtgagtgaatgcagggataagggctatgacggtattgtgctcgagtcctggtcaagatgggctatttatggcgtgctggatgatcaagagctacgttacatggcacttgaatttgttaagcagctgggagaggctttgcattcagtcaattccaaatcaagtagccaccatttggaactaatttatgttattccggctccaagaatgcaaaagctcaataatcaggactttggacccaaagatctcatgcatctggctgacactgtaaatggtttttctcttatgacatacgacttctcaggaccttagaaatnctggtcccaatgcacctntgaaatggatacatcattctttatcaacacttc

SEQ ID NO: 92874 - DNA, 559 bp, Zea mays
  unsure (1)..(559): unsure at all n locations
agaggagtggtcagtctatgatggagattgtatgtgtacacccgtccggaattcccgggcacaagttcacctgtgtataaagggaagtttctcatggctgctagaagacttatgcgtggtccccatactgagtacggtatggctcttgatgcagaggacgtatcacaagggagcaattcatacatgggaaaactgagatctgatttctgggggacaaacttcaaaatatatgatagcaagccaccatatgacggcgctaaagcatcaagtagtcgatctagtcgtcgtttcggaagcagaaggattagtccccaagtatcgtctggtaactatgaagttggacaggtttcatacaaatacaacttgctcaaatccagaggccccaggagaatgaattgcactcttgaatgcccttcagcgcaagagacctgggaaaactcactcaaagacaagttcangaagccctttgngtcccacaacttttgcgaaacaaaacgcctcgcttgcattaacagctgcagtggctgtgctaaaacttcaatggccggtacaaatgcat

SEQ ID NO: 92875 - DNA, 568 bp, Zea mays
  unsure (1)..(568): unsure at all n locations
ggatagttaggagggaagcgtgtgtgttagctagagacagtactgtcacctctccggaattcccgggtcgacccacgcgtccgctttgagggcagttcttatgatgcttctctctcctagccaattcattttctctgagaaagtgagaggcggngattgtgtgccatgaatgcagagatcattacaacgaaggtttggttggagtccttaaacaagccttgtgtcagaacatgagcccagggcccaagtcttatattgcacatatactgagtatgtttggcctctgtggttttccaagcaagctaggaggaaatatgagaaatgttttgtgtgacagtgagttagttgatctggaactgttgcttgcagatggcgaatctctaagtgctcatgcgggtatcctatcagcaagatgtcctaaattattaccatctgaaaaaacttttgtccgtgatgggtcagtaacttatgaaatgggcagaaagggatgccttcatgttcgaatgtctgatccggaaaaaggtcctcctttaagaaaaatttggggtttgcatacaccggggtgggt

SEQ ID NO: 92876 - DNA, 558 bp, Zea mays
agtggggcgcgtccgtttatgaagggagacgcactgcttaccgctccggaattcccgggtcgacccacgcgtccggcgcgcgcgagagagagtgagggcggaggaaaggggagatggcgcaggcggtggaggagtggtaccggcagatgcccatgatcacgcgctcctacctcaccgccgccgtcgtcaccaccgtcggctgcaccctcgagatcatttcgccgtatcacctgtacctgaacccgaagctcgtggtgcagcactacgagatctggcgcctcgtcaccaacttcctctacttccgcaagatggatttggattttctgttccacatgttttttctcgcacgatactgcaagcttctggaggagaactcatttagaggaagaactgccgactttttttacatgctcttgtttggtgctactgtcctaactagcattgttctgatcggagggatgataccttacatttccgagacatttgccagaattctgttcctgagcaattcattgacgtttattgatggttatgtctggagcagcaccatccttttat

SEQ ID NO: 92877 - DNA, 571 bp, Zea mays
gggtgtttggtgggggcttctgtatatagatggaggaaggacagtatgctcaccggtccggaattcccgggtcgacccacgcgtccggaagatttttggaagttggatgacacaatcatcaaaaccattgagactgctcccaacaatggactgaaaaaagcaaaagaaatcattcaacgtattcgccgaagagaactttacaagttttgcaaccagtattctgttccaaaggacaaactggagcatttcaaaaatattactgcacaggacatagtttgttcgcagaaatcttctgaggtgctgctgaaggaagaggatgttgcagtaagcaatgttaagatagatcttactcgtggaaaagataacccccttgaaagcatcaagttctttaaagattttgggtgcgacgagaagttccccatcacagatgatagggttaggcacttgctacctgcatacaacgaggatagaaatgtgagggtctatgccaagaagcctgaattggttgatgtggtgtcaaaagcctttgaaaatcttcagattagaatgtatggtgagaaaactcaagtgc

SEQ ID NO: 92878 - DNA, 557 bp, Zea mays
  unsure (1)..(557): unsure at all n locations
naggggggctcagtttatgatacgagtcgtcattgcantgctctaccggtccggaattcccgggtcgacccacgcgtccgatctgctgcagctgaataatgttgccagcctgtggttcatgtcactttttatctgcatttgggctacgagcatcctagaaatgagatggagtggtgttggaattgatgactggtggaggaatgagcagttctgggtcattggaggtgtgtcctcacacctctttgctgtgttccagggacttctcaaggtcatagctggtgttgatacaagcttcaccgtgacatcaaagggtggagatgatgaggagttctcagagctatatacattcaaatggactaccttattgatacctnctaccaccttgcttctattgaacttcattggtgtggtcgctggcgtttcaaatgcgatcaataacggatatgagtcatggggccccctctttgggaagctattctntgcattttgggtgattgtccatctttatccctttctaaaggtttggttggaaggcaaaacaggacaccaacgattgg

SEQ ID NO: 92879 - DNA, 491 bp, Zea mays
  unsure (1)..(491): unsure at all n locations
gagganaagggcatctgtgtatgtataagacatagtacgtactgcctcaccggtccggaattcccgggtcgagccacgcgtccgcaaggatctgaagaaggaattctgctgcaatggtactgtagttcaggacccagagctaggccaggtcattcagctccaaggtgatcagcgcaagaatgttgctactttcctagttcaggctgggattgcgaagaaagagaacatcaagattcacgggttctaagggacctgtaaatgcttgtgccctatattgtgtgcctccacatattggggagcttgaagcatcgacaagttactagtcattgcttacttatataagaacataagtagtatttgctattgtcaagtgtgccttgcttgatgcaagttgtgttttcgtatcattattattatgcacggccatcgtacgtgtatggcttgtatgggttattgccaacttaataaaagcacactctgtttgcctaaaa

SEQ ID NO: 92880 - DNA, 493 bp, Zea mays
  unsure (1)..(493): unsure at all n locations
gaggtggccatccgttcctacgtacgatncgcgttcgcactgcacgtaccggtccggaattcccggggtagaagattacacatactttgctaaggtgtgctttgataacttcggcgacaaggtgaagaattggttgacggttagtgagccccagacattgacgtgtccttttcctacggaactggggtctttgccccaggtcggtgctcacctggactagactgtgcctacccaactgggaattcactcgtcgagccttacactgctggccataacattctcctagcccacgctgaggctgttgatctttacaacaagcattacaagcgcgacgacacccgcatagggcttgcgtttgacgtaatgggtcgtgtgccatacggaacatcgtttctggataaacaggccgaagaaaggtcctgggacatcaacctaggatggttcttagagccagtggttcgtggtgactaccccttctccatgagatcattat

SEQ ID NO: 92881 - DNA, 566 bp, Zea mays
  unsure (1)..(566): unsure at all n locations
gaggtgctatgtgtgtccctagtcggtacgcactgcatntaccggtcttgaattcccgggtcggcccacgcgtacggtgatcactgatttctggtcatggcaaccgttactgaggaagttgcttcggtcgtcaccgtgtccgatgagccggcgcgggaggcggcgaatgaggtggcggagaagccggaggaggggaagaagcccgacgaggagggtggcgaggggaagaaggcctgccccgtcgcctagaatgagaagaaggcgaggaagccgctgagcatgaagcccaagtccgccgggccgcaccacccgccctacttcgagatgatcaaggatgcgatcctgtcgcatgacggcgggaaggtcggtgcgagcccgtacgcgatcgccaagcacattggggagaatcaccgggacgtgcttccgtccaatttaccgaaggtgcttgcagtgcaacttcgcgggttcttcggcaaaggccgtctttttaaggtgaagggttttctttaagctttgcggcgccatgataaggaagcctttgagtgcgctttataaggttcaagctt

SEQ ID NO: 92882 - DNA, 563 bp, Zea mays
  unsure (1)..(563): unsure at all n locations
tggaagggcgtctgttctcgcatccgtccgtcatcgcatgacgcaccggncttgaattcccgggtcgacccacgcgtccggctattgccattacatgcaaatatgccatatagatctgaagctggagaatgttctggtggagggcagcccagctccacggcttaagatctgcgattttggctattccaagtcatcagtgttgcattcaagacccaaatcagcagtaggaacgccagcatatattgcacctgaggtgctatcccgtcgcgagtatgatggaaagcttgcagacgtatggtcctgtggggtgactctttacgtcatgcttgtgggagcatacccatttgaagacccagatgaccccaagaatatacgcaagaccattcagcaaataatgcaagtgcaatacaagataccagatcatgtccacatatctacggaatgccagcaacttattgcccgtatctttgttgccaatccaatgaggaggntcacaatgaaaggaaataaagagccattccatgggttttggaggaaccttccacgggaaactcacgagactg

SEQ ID NO: 92883 - DNA, 504 bp, Zea mays
  unsure (1)..(504): unsure at all n locations
ncggtgtcttctctacgacaagacggtaggcatgcccggtctcggaattcccgggctgctcgatctgggtgatcctccatctctaccccttcctcaagggtctcatgggcaggcagaaccgcacgccaaggatcgtcatcgtttggtgcatgctccttgcgtctatcttctccttgctgtgggtgaagatcgatcctttcatctccccgacacagaaagctgccgccttggggcaatgtggtgtgaactgctgatccagattgtgactcttatctgaagaggctcagccaaagatctgccccctcgtgtaaatacctgagggggctagatgggaattttttgttgtagatgaagatggatctgcatccaagttatgcctcttgttattagcttcttcggtgccggtgctgctgcagacaatcatggagcctttctaccttgcttgtagtgctggccagcagcgtaaattgggaatctgcatttttttatacgtggtgtttatgg

SEQ ID NO: 92884 - DNA, 508 bp, Zea mays
  unsure (1)..(508): unsure at all n locations
nggtaaaggtgtgtgtgtgaccagcacaaggaggatagtatctctcgnctggaattcccgggtcgaccgcacgcgtccggtggatcggacacccaagatttgagctcatccgccatgatgtcactgagccacttctggtggaggttgaccagatctatgaccttgcttgccctgcttcaccaatcttctacaagcacaatcctgttaagaccatcaagacaaatgttattggtaccctgaacatgctgggacttgcaaagagagttggagctaggattttgttgacatcaacatctgaagtttatggtgatccacttgagcatcctcaaaccgaggcctactggggcaatgttaacccaattggagtcaggagttgttatgatgagggtaagcgtgtagcagagacgctgatgttcgactatcacaggcagcatggcattgaaatccgaattgccaggattttcaacacctatgggccaaagatgaacattgacgatggccgtgttgt

SEQ ID NO: 92885 - DNA, 505 bp, Zea mays
  unsure (1)..(505): unsure at all n locations
agctttgtgntgttacgagccgcacgtacgtatcactctaccggttcggaattcccgggtgcacagcctcgcctccgtaagcagagtgtgtcgttgcggaggcaggaagagagacgacggcggccatggggacgtccttccaggggacgaccaccaagtgcaccgcctgcgacaagacggtgtaccttgtggacaagctcaccgccgacaaccgcatctaccacaaggcctgcttccgctgccaccactgcaagggcaccctcaagctcgccaactacaactccttcgagggagtgctctactgcaggcctcacttcgaccagctgttcaagaggacagggagcttggacaagagcttcgaaggaactcccaaggttgtcaagccagaaagaaacgttgggaatgagaatgctactaaagtctcaagcgcctntgctggcaccagagagaaatgtgttggatgcagcaagacagtctatcccacttgaaagggtcactgttaatn

SEQ ID NO: 92886 - DNA, 504 bp, Zea mays
  unsure (1)..(504): unsure at all n locations
gaggcgtttattgtacgtaccccgcatgtacggtacgctctaccggttcggaattcccgggtggacccacgcgtccgccgacgttcgcttcctctccagcctccactccgccagatctcattgcctcctaaggccgatcgtccaccccgatcaccgcgcgggtatcggagcatggcgtctgcggcggctgtggacgccggcgacgcgccggagcccacggtgcggaacctcctagaccaggagtccctcaagtgggtcttcgtcggcggtaagggcggcgtaggcaagaccacctgcagctccatcctttccgtcctcctcgcgggggtccgccagtccgtgctagtcatctccaccgaccccgcgcacaacctcagcgatgccttccagcagcggttcaccaagtgtcccaccctcgtccgcggattcaccaacctctacgccatggaaattgacccgaaggtagaaaatgatgatttagccaatgaaagaatggagggattn

SEQ ID NO: 92887 - DNA, 506 bp, Zea mays
  unsure (1)..(506): unsure at all n locations
agctatctttctgttactgaantccatcgctagcnatcgaccggtttctaattcccggtccgacgcactcgaccgccgccgttcacttcctctccagcctccattccgccagatctcattgcctcctaaggccgatcttccacccaggtgacggggcgggtatcggagcatggcgtctgcggcgcctgtggacgccgtcgacgcgcctgagcccactgtgcggaacctcctagaccaggagtccctcaagtgggtcttcgtcggcggtaacgacggcgtaggcaagaccacctgcatctccatcctttccgtcctcctcgcggtggtccgccagtccgtgctagtcatctccaccgaccccgcgcacaacctcagcgatgccttccagcagcggttcaccaagtttcccaccctcgtccgctgattcaccaacctctactccatggaaattgacccgtaggtacaaaatgatgatttatccaatgaatgaatggagggattccttt

SEQ ID NO: 92888 - DNA, 521 bp, Zea mays
ggaggagtgattagataagatcggcgcggaagtaggtagtaccggtccggaatttcgacccacgcgtgcggtcgttcgtccagctaactgcactgcactgcactgcacgcaatggccaccacggcgaccgaggcggcgaatgctgcaccggcgcgggagcagcaggccaacggcaacggcaacggcgagcagaagacgcgccactccgaggtcggccacaagagcctgctcaagagcgacgacctgtaccagtacatcctggacacgagcgtgtacccgcgggagccggagagcatgaaggagctgcgcgagatcaccgccaagcacccatggaacctgatgaccacctccgccgacgagggccagttcctcaacatgctcatcaagctcatcggcgccaagaagaccatggagatcggcgtctacaccggctactcgctcctcgccaccgcgctcgcactcccggaggacggcacgatcttggccatggacatcaaccgcgagaactacgagctaagcct

SEQ ID NO: 92889 - DNA, 499 bp, Zea mays
  unsure (1)..(499): unsure at all n locations
ggtctctctttgtaactgancatcgctacgcactacgcgtctcggaattcccgggtcgaccgacgcgtccgggcttctcctccccctccggttcgggttcgggttcgtgaggttctccggggttcggttgcgggggtgagcggatcgagagggcggcgtctgatgttgagtaccgctgcttcgtcggcggcctcacctgggccacggacgaccactccctccacaacgccttcagcacctacggcgaggtcctcgagtccaagatcatcctcgatcgggagacgcagaggtcccgcggcttcggcttcgtcaccttctccacggaggaggcgatgcggaacgccatcgagggcatgaacggcaaggagctggacggccgcaacatcaccgtcaacgaggcccagtcccgcggcggccgttgaagcggctgcggcagcgggtacggtggtggccgtggaagctgcggctacggcggtggctgacgccgtgatggcggtgg

SEQ ID NO: 92890 - DNA, 515 bp, Zea mays
aggtgttaagcggtcttcgtcatcgaatgatagtaggctagctactggtctcggaattcccgggtcgacccacgcgtccgcggacgcgtgggtcggagcgcacacacacacaaccagatctcccccaaatccacccgtgggcgcctccgcttcaagaggcggatctttgtgaaaaccctgaccggcaagactatcaccctcgaggtggagtcgtctgacaccattgacaacgttaaggccaagatccaggacaaggagggcatccccccagaccagcagcggctcatcttcgctggcaaacagcttgatgactggcgcacgcttgctgactacaacatccataaggagagcaccctccaccttgtgctccgcctcaagggaggcatgcagatctttgtgaaaaccctgaccggcaagactatcaccctcgaggtggagtcctatgacaccattgacaacgtcaaggccaagatccaggacaaggatggcctccctccagaccagcagcggcttat

SEQ ID NO: 92891 - DNA, 510 bp, Zea mays
  unsure (1)..(510): unsure at all n locations
ngagggaggtgtcttgtatgagggggagcgatggtacgcttgtccggtccggaattcccgggtcgacccacgcgtccggttaaaaccgagaagagaccaggccgaaggaaaacaatcctgaaaccaagccatgggtgagcaggaggaatttgaggagcatgctgagaaggcaaagaccttgcctgagagcacgagcaatgagaacaagctgatcctctacgggctctacaagcaagccacggttggagatgtgaataccgatcgtccgggcatattctaccaaaaggacagggccaagtgggatgcctggaaggctgttgaaggcaaatcgaaggatgaggcgatgaatgactacatcaccaaggtgaagcagctccaggaggaggctgccgcctcttaaaagtctcttaatagtgttgccaaacagctatttgtcagatgagctttgtgccatttcctcattagaagtatatcattcgatccattggggatctgtgaaccatgtacctg

SEQ ID NO: 92892 - DNA, 511 bp, Zea mays
  unsure (1)..(511): unsure at all n locations
ggttgtggaggggttntgtgaactaccagacatagacagtactgctctaccggtccggaattcccgggtcgacccacgcgtccggtgagaattcttaattcatgagttgtagggagggacttatgtcaccacaaacagaaacgaaagcaagtgttggatggaaagctggtgttaaggattataaattgacttactacaccccggagtacgaaaccaaggatactgatatcttggcagcattccgagtaactcctcagctcggggttccgcctgaagaagcaggagctgcagtagctgcggaatcttctactggtacatggacaactgtttggactgatggacttaccagtcttgatcgttacaaaggacgatgctatcacatcgagcccgttcctggggacccagatcaatatatctgttatgtagcttatccattagacctatttgaagagggttctgttactaacatgtttacttccattgtgggtaacgtatttggtttcaaagcctn

SEQ ID NO: 92893 - DNA, 520 bp, Zea mays
atgggaggtatttgttagggggggggtgcgaaagtagtattggtccggaattcccgggcagcactgaacacttgattgattcagtaggtagctagctagctgaatcacaatggatcctaccaagttccgtccgtccggtagccacgacacgacggtgacgacgacgaacgcgggcgctcctgtgtggaacgacaacgaggcgctgactgtggggcctcgcggtcccatcctgctggaggactaccacctgatcgagaaggtggcgcacttcgcgcgcgagcgcatcccggagcgcgtggtgcacgcgcgcggggcctccgccaagggcttcttcgagtgcacccacgacgtgacgtcgctgacgtgcgccgacttcctgcgcgcgcccggcgtgcggacgcccgtgatcgtgcgcttctcgacggtgatccacgagcgggggtccccggagacgatccgcgacccgcgcgggttcgccgtgaagttctacacccgcgagggcaactgggacctgctgggc

SEQ ID NO: 92894 - DNA, 521 bp, Zea mays
  unsure (1)..(521): unsure at all n locations
ntgggatggttgtgatgatacagcacgggatggaaatttgtacccgtccggaattcccgggtcgacccacgcgttcgcccacgcgttcggacagagagcacggctcccatagtcgaagtggtgactgcctcagtatagcgaaacatctggagtctgctaacacaatgttctcatttgtgtggtggataattggattttattgggtatctgctggtggagaagttcttacccgtgatgcgcctcaactttactggctttgcatcgtatttttggcgtttgatgttttctttgtcgtcttctgtgtggctttggcctgcatcattggtattgctgtttgttgctgccttccttgtatcatagcaattttatatgcagtgtcggatcaggagggagcatctgaagatgacattcgtcaaattccaaaatacaaatttcggaagatggaagagcctgaaaagcagtctgttggtgtgcctggatcttctggtggaataatgataggatgtggaacccatcaacct

SEQ ID NO: 92895 - DNA, 505 bp, Zea mays
agtgtgtcgtagttattcgaacatcgtaacgtactactggtccggaattcccgggctgccagccgtcgtctgctgcggactccgcctccagtttggtctgtttcttgcaagttgctcttgcggtagttcgcccgactgtcaccatggagaacgaggagggtaagactgtggacctctatgttcccaggaagtgctcggccacaaacaggatcatcactgccaaggaccatgcctctgtccagatcaacattggccacttggatgcgaatggcctgtatgatggtcacttcacaacatttgctctctctgggtttgtccgtgctcagggcgatgcagacagctccttggacaggctgtggcagaagaagaaggctgatatcaagcagtagattttacatctagtttaccaagaattggacactgccttagctatgttttgaattcatgtcactatatgcaatgttgtgatttcagctggtaccttaaatctgaagatttagtatct

SEQ ID NO: 92896 - DNA, 515 bp, Zea mays
  unsure (1)..(515): unsure at all n locations
naggggcnagagggcctttcgtcgtacgacacgccaaggaaagtaacgctctaccggtccggaattcccgggtcgacccacgcgtccggcatttcgggctgccactgccgccaccgtcgcaggccaagggcaaggacttcaagaagggcgccaacttcgccatcaccggcgcgacggccctggagtactccttcttcaaggcgcacggcatcgaccagcgcatctggaacaccggctccatcaacacccagatcggctggctccaggacatgaagccgtccctctgtaaatcggagcaagactgcaaggattacttcagcaaatccctgttcgtcgtcggggagttcgggggcaacgactacaacgcgccgctcttctccggcgtcccattttctgatgtcaagacttacgtgccccttgttgcaaaggctatcgccaatggcgttgagaaactgatcgagcttggggcaacagacctnctggtgcctggcgttctcccaattggctgctttccg

SEQ ID NO: 92897 - DNA, 529 bp, Zea mays
tgttggggggaggaggaggtttgttagggggggggcggagaggaagttttctccggaattcccgggtcgagccacgcgtccgctggtcaccactgttgtaggtcctagaagatcagggctatgatggtgcaatggctgatctgtggtgatgtggagttatcctgtgtgttctgctagctgggtatttacctttcgaggactctaatcttatgacgctgtataagaaaatctcaaatgcagaatatacatttccaccatggacgtcgttccctgccaagaggttgttaacaagaatccttgatccaaatccgatgacggtatgcaagagcacaaaagctgctcgaaataaaatactacccaaaacaatgtaggaattttggagagtctaaaagttcctactgcacttactagcacatagccagagatagatgtatttgggggaaagattcttttagggaagtatagacaacatgcatatatcgaaatgaaactatttgtgtgaggaaagagttgcaacctccctccagtc

SEQ ID NO: 92898 - DNA, 525 bp, Zea mays
  unsure (1)..(525): unsure at all n locations
gttttggaggtagagagtgataaccgagggggtagaaagtagtccccgtccggaattcccgggtcgagccacgcgtccggattactacagatacctcgctgagttcaagactggagctgagagaaaggacgctgctgagaggacgatggtggcatacaaggctgcccaggacattgctctggctgagcttgctccaactcaccctattaggcttggactggcacttaacttctcagtgttctactatgagattctgaactcacctgatcgcgcctgcagtcttgcaaagcaggcttttgacgaggccatctcggaactggacaccctgagcgaggagtcctacaaggacagcactttgatcatgcagctccttcgtgataacttgaccctatggacttctgacatctcggaggaccctgctgaagagattagggaggcacccaagcgcgactcgagtgaggggcagtaaagccggctntatgtgcctagaaactagtagctagtgtttgctgctgtcgaatgacc

SEQ ID NO: 92899 - DNA, 500 bp, Zea mays
agtgtgtgtgagaaaagcaagattgtacgtctctaccggtccggaattcccgggtcgacccaggcgtccgccaagatgaaggtgtgcatgcttggtgatgcccagcatgttgaggaggccgagaagatgggagttgactacatggatgttgaggctctcaagaaaatgaacaagaacaagaagcttgttaagaggcttgccaagaagtaccatgctttcttggcatcagaggccatcatcaagcagattccccgtctccttggtcctggtctcaacaaggcaggcaagttcccgaccctggttactcaccaggaatccctcgaatccaaggtgaacgagactaaggcaaccgtcaagttccagctcaagaaggtcctttgcatgggcgtcgccgtcggcaacttgacgatggaggagaagcagatccagcagaacatccagatgagcgagaacttcgttgcctcccttatgaagaataactgacagtatgggagcatcct

SEQ ID NO: 92900 - DNA, 513 bp, Zea mays
  unsure (1)..(513): unsure at all n locations
ngggcgagtgtgtcgtcgacaaagaccngataganagttattctcggtccggaattcccggggcgaagttgaggacacaactattagagcctccaaagggttccagcggaggtggagatggttttgaagtcacaaaggttgggcatggtcgtgttgcacttattggatttcccagtgttggaaagtcaactcttttaacgatgttgactgggacacattctgaagctgcatcatatgagttcacaacgcttacttgcattcctggaattgttcattacaatgataccaaaatccagcttcttgatcttcctggtatcattgaaggagcttctgaaggcaaggggcgtggtaggcaggttattgctgttgcaaagtcatcagatcttgtgctgatggttctggatgcctcaaagagtgaaggacatcgtcaaatattaactagagaactggaagctgttggactccgtcttaacaaaaggccttcccagatatacttcaagaggaagaagacgg

SEQ ID NO: 92901 - DNA, 505 bp, Zea mays
  unsure (1)..(505): unsure at all n locations
gttaggtgtcgtcttctacgaccaagatagtaatcttccccggttcgaattcccggtggacccacgcgtccggcagactttacttaggccgtccacaaggagaccctcctcagctagtaccagtagtgggggcatttgcaggcagatgtgagttagccggcggatccgatccgtgcgcctgctgtgtgtgtgtcggtggagatggccacagcttacgctcccatggcgagccaggtgatgaagagcagcctcgtcgtgcactcgaggccgaggggcctgtcaggcgctgctgcgctcacgaggcggccccggttcaccgtcaaggccatccagcccgagaaggcaacgtaccaggtggtgcagcccatcaacggcgaccccttcatcggcagcctggagacgccggtcacctcgagcccgctcgtggcgtggtacctctccaacctcccggcctaccgcaccgncgtgagcccgctgctgcggggcgtcgaggtcggcctcgcgg

SEQ ID NO: 92902 - DNA, 502 bp, Zea mays
ggggccgaagccgcgtgtacgagggggggaagtactcttctccggtccggaattcccgggtcgacccacgcgtccggttggcttctcctccccctccggttcgggttcgggttcgtgaggttctccggggttcgggttcgtgggtgagcggatcgagatggcggcgtcggatgttgagtaccgctgcttcgtcggcggcctcgcctgggccacggacgaccactccctccacaacgccttcagcacctacggcgaggtcctcgagtccaagatcatcctcgatcgggagacgcagaggtcccgcggcttcggcttcgtcaccttctccacggaggaggcgatgcggaacgccatcgagggcatgaacggcaaggagctggacggccgcaacatcaccgtcaacgaggcccagtcccgcggcggccgtggaggcggcggcggcggcgggtacggtggtggccgtggaggcggcggctactggcggtggcggccccgtgatggc

SEQ ID NO: 92903 - DNA, 513 bp, Zea mays
  unsure (1)..(513): unsure at all n locations
tggataggntgtcgttgaccgcccgacaagatagtaactctctaccggttcggaattcccgggtggacccacgcgtccgcccgctgctgcaaatcccggggccgcccggggcgccgccgccagcagcgccagcggtgagacatgacgccgccggcgaccgggcaagggggaggaggccataaaaatagaaccagactggtgttggccattgcattgcctttagctgctgcaactgcaatattagctctcgcagtagcatgtttgtattaccggagtagaagaagaacaacagcgcaaagggactcatcaggaaagccatgttctcctagtccagatgacattgataagagcatcgattcgctcctttttgacctaccggcattacgggcagcaaccaataacttcgctgaaagcaataagcttggcgaaggagggttcggtgcagtttataagggaatcctttctgaaggccaacaagtagcagtgaagaggctctcacttggctctacacaa

SEQ ID NO: 92904 - DNA, 525 bp, Zea mays
ttttgtagtgagggtgtgtgtaccgcacgagaagtatgttgtccccgtccggaattcccgggcctagcagcccgtcggtgctccctctctgcagatctcccttcgcagccgccgaggaaccccttcacagcgcggaagatggctgaacaggatgcccgagtcgtggttgaggcaccaaccccagttcttggggagcctatggacttgatgactgctctgcagctcgtgatgaagaagtcaagtgctcatgacggacttgtgaagggtctacgtgaggctgccaaggccatcgagaagcacgccgctcagctttgcgtgcttgctgaagactgtgaccagccagattacgtcaagctggcgaaggcactctgcgctgagcacaatgttcacctggtcactgttcctgccgcgaagactcttggcgagtgggccgggctttgcaagattgactctgagggcaaggcaaggaacgttgtacgctgctcctgtgtcgtcgtcaatgactacggtgaacaatccgagggc

SEQ ID NO: 92905 - DNA, 530 bp, Zea mays
tgtaggagtgaggaaggtgtggttacagaccgcatggaaagtagtatctctccggaattcccgggtcgagccacgcgtccgatttgttttccaaatacgggaatgtcacggatttgcaaattttgagaggttcacaacaaacgggcggagctggctgtgccttcattaaatatcaaacaaaagatcaagcattggcagctattgaagctctaaacgggaagcacaaaatagagggttctagcgtgccgttggttgtcaaatgggctgatacagaaaaggaaaggcaggctcggaaagcacaaaaagctcagtcacagctatctcatatacccaatgcaagtccaatgcagcagcactcttcagtatttggtgctttacagatgggatatatgcctcaatacaatggatttggttatcagccaacagggacatacggacttatgcagtaccctctatctcctatgcaaaatcaaggccccttccagaatatggttcaacctcttactcaagggaactcgataagaggagtc

SEQ ID NO: 92906 - DNA, 503 bp, Zea mays
  unsure (1)..(503): unsure at all n locations
atgtgtgtgntattattagacacgaagtagagnatgtactggtccggaattcccgggtcgacccacgcgtccgggaacatgcaccatccattatatttatggatgaaattgactctatcggatctgctagaatggagtctggaactggcaacggtgacagtgaagttcagcgtactatgcttgaacttctaaaccagcttgatggttttgaagcatcaaacaaaattaaggttttgatggcaacgaacagaatagacattttggatcaagcccttctgaggcctggccgcatagacaggaagattgaatttccaaatcctaacgaggattcacgtttcgatatcttgaagatccattcaagaaaaatgaacttgatgcgtggcattgatctgaaaaagatcgcggaaaagatgaatggggcctcaggagctgagctcaaggccgtctgcacagaggctggaatgtttgctcttcgtgagagaagggtgcacgttacccangag

SEQ ID NO: 92907 - DNA, 509 bp, Zea mays
tatgctgtcgtcgacaagacacgaacgtactgctctaccggtccggaattcccgggtggcacaccccccgagctcagcttacctccactccagctccaatcacagtcgtgaccagagcgagagctagctggagggccgtgaaaatgccgatcaataggatcgccctggggagccaccaggaggtgtaccacccgggcgccctcaaggcggcgttcgctgagttcatctccaccctcatcttcgtcttcgccggccagggctccggcatggccttcagcaagctgaccggcggcggcccgacgaccccggcgggcctgatcgcggcggcggtggcgcacgcgttcgcgctgttcgtggcggtgtcggtgggcgcgaacatctccggcgggcacgtgaacccggccgtgaccttcggcgccttcgtgggcggcaacatcaccctgttccgggggctcctgtactgggtggcgcagctgctggggtccaccgtggcgtgcttcctgctccgg

SEQ ID NO: 92908 - DNA, 510 bp, Zea mays
aggattaagcctgtcgtggtactgcaccggcaagatagtaatgctctaccggtccggaattcccgggtcgacccacgcgtccgcgacgaatctcgcggggcggaggtggtggcgcgactgaggcggtgtcgactccgacgaggtcgcagccaccgggggatacgcagcagcagcaccggcgtactccatcgacgttcatatttaaggacttggtttggataattctactcgtcaacaaaagtgattaaaaatggtggttcttgcagcttcaatcgtttcaaagtcgggaaaagcacttgtttcaagacagtttgttgacatgtctcgcataagaattgaaggattacttgctgcgttcccgaaactggttggaactgggaaacagcacacttatgttgaaactgaaaatgtgcgttatgtttatcaacctattgaaggattatatcttctacttatcacaaacaagcagagcaatattcttgaagatctggacacattgaggctcctctc

SEQ ID NO: 92909 - DNA, 512 bp, Zea mays
  unsure (1)..(512): unsure at all n locations
nggataggtgtcgtgtacgacggcagtggatagtaatgctctaccggtccggaattcccgggtcgacccacgcgtccgctcaactggctatatacggatgtaactcagaaactggaagccaaggacttctcgagcgtgcaggaagctcatgcatgcactgctggtttgaaagctgtgacaacatcagtaacagctgatgcaattgaagaatgccgaaagctctgtggtggacatggttacttgaacagcagtgggcttcctgagttgtttgcggtctatgttcccgcttgcacttacgaaggagacaacgtcgttttgcttttgcaggttgcaaggattctaatgaaaaccgtttctcagttggcatccgggaaacagcctgttggcacaatggcctacatgggcaaagtgcagtatttgatgcaatgcaaatctgctgtcagttcagctgaagattggcttaaccctgatgccatacaagaggcatttgaagcaagagcgctcagaatggc

SEQ ID NO: 92910 - DNA, 525 bp, Zea mays
  unsure (1)..(525): unsure at all n locations
ngaggagcgtagtttgtaaccgaacgaggacagaaagttatcacccgtccggaattcccgggtcgacccacgcgtccgacatgccttgccttgcctttgcctacctgttgatcgagccgagcgagcagggagagacacgggaccgagtgaggccgccgcatgctcctcctctccgatccgtacgtttcctcctccctagcaatcgcaacccgttcagccaatcattgccgtctccaccaactccgttcccctattacctagttagtccagtccgcctgctgcctgcctcaacggatcgacgcgacaggagggagggaggaaggagacggtcgatcagagtctgagacggaggccgatccaccaccgcagcgacgagcgggaggagatgaagatcatcattgacacggatcccggcatcgatgacagcgtggccatcctgatggcattccagatgccgggcgtccaggtcctagggctcaccaccatcttcggaaactgcaccacagagcatgccacacgcaacgc

SEQ ID NO: 92911 - DNA, 519 bp, Zea mays
tgagcgttgtgtgtacacgcacaggacagtactttgtccccgtccggaattcccgggcttcaccttgggtatcctaagtaacataatctcgctgatggtgttcctttcgccgctgccgacgttctaccgcgtgtgccgcaagaagtcgacggaggggttccagtcgaccccgtacgtggtgacgctgttcagctgcatgctgtggatcttctacgcgctgctcaagtccggcgccgagctgctggtgaccatcaacggcgtcgggtgcgtgatcgaggcggcgtacctggccgcgtacctggtgtacgcgcccaatgccgccagggcgctcacggccaagatgctgctggggctcaacgtcggcgtctttggactcgccgcgctcgccaccatggtggtctccagcgccggcctccgcgtgcgcgtgctcggatggatctgcgtcagcgtcgcgctcagcgtattcgccgcgccgctcagcatcatgcggcaggtggtccggaccaagagcgtggaatt

SEQ ID NO: 92912 - DNA, 511 bp, Zea mays
ccgtttgtcgtcgacccaagaaccaaggtaggctcctctcggtccggaattcccgggtcgaccgacgcgtccgcccacgcgtccgccgccctataatggggctgtagttcctcctgccggaaggacaagcgggaggttcaactccacagaagtctctccaaagctgccttcagtcagttacaacatcgcacaggtatcgtatgagttaaatgtccttggcacgagaggtcctaggcggatgcgttgcatcatgcactccatacctgcatcatcagtggagccaggtggcacagtgcctggacagccagagcagattgtacctcgagccctggaggattcattccgcagcacggcttccttctcgcagtcgttccgtagcactgcctcattctccaagtccatcatggactcatccatggatttcaatagcgctcgcttctctgacatcgctggcagcagcgctcgcttcacgggcgttcctggtagcagcgctcgcttcgcgggcgttcct

SEQ ID NO: 92913 - DNA, 506 bp, Zea mays
gggttagtcctttctaacctgacacgatagtacgtctctaccggtccggaattcccgggtcgaccgacgcgtccggaataaggaggccgagcaggaggagcagcagctaccgcacgcgcagaaggataacgtggccggcgccgccgaggaagacgaagcggattcggaggagaccgagcgccgcaaccgcgacctcaagtccggccttcacccccttaggcacaaactcgtgctctggtacactcgccggacgcctggagcgaggtcgcagtcgtacgaggacaacatcaagaagatcatcgatttcagcacagtcgaatcgttctgggtttgctactgccaccttgcgcgcccttcttccctgccgagccccactgaccttcatctcttcaaggatggcatccgtcccctctgggaggatcctgcaaaccagaatggtggcaagtggataattagattcaaaaaggcagtttcaggtcgattttgggaggatttggtgctagtgg

SEQ ID NO: 92914 - DNA, 520 bp, Zea mays
tgggtagtgttttggtagttaattagaaccatagtacgtcatctcgtactggttcggaattcccgggtggacccacgcgtccgcaaagcgatactagctagtccctaccaaagcatacttcctgaaacactcttgcaggggcgctgagttctgtttgttgagacgcatagagctagagtcgacaatgtcgctcgtgaggcgcagcaacgtgttcgaccccttctcgatggatctctgggaccccttcgacaccatgttccgctccatcgtcccgtcggcgacctccaccaactccgagactgccgccttcgccagcgcccgcatcgactggaaggagacgcccgaggcgcacgtgttcaaggccgacctccccggcgtcaagaaggaagaggtcaaggtcgaagtcgaggacggcaacatgctggtcatcagcggccagcgcagcatggagaaggaggacaaggacgacaagtggcaccgcgtcgagcgcagcagcggccagttcgtcaggcgcttccgc

SEQ ID NO: 92915 - DNA, 502 bp, Zea mays
ggtaggcttggtgtacgcacgcatagaagtcacgctctaccggtccggaattcccgggtcgacccacgcgtccgccattacaagctgagggggaatattgtcagctacaacctcggcgggatgggctgcggcgccgggcttctgtcgatggacctcgccaaggatctgctgcaggtgcaccccaactcttacgccctggtgatcagcatggagaacatcacactgaactggtactttgggaacaaccggtccatgcttgtgtcgaattgcctgttccggatgggtggcgcggccatcctgctctcgaacaggcggtctgacaggcggaggtccaagtatgagctggtgcacacggtgcgcacgcacaagggcgccaacgacaagtgctttggctgcgtgacacatgaggaagatgagattggcaagattggcgtgtcactgtccaaggacctcatggcagtggccggagacgcacttaagaccaacatcaccacgctggggg

SEQ ID NO: 92916 - DNA, 509 bp, Zea mays
agtctgtcgtgaaagacacgacaagtaagttattctccactggttcggaattcccgggtggacccacgcgtccgcgcagagataggcgtcttcgtactcgcctacctccgcggctcaaacctttcccggttcgcccaattcccgccgccggtccatcccgtaacgcgacaccatgagggagtgcatttcgatccacatcggccaggccggtatccaggtcggaaacgcgtgctgggagctgtactgccttgagcatggcattcaggctgacggtcagatgcccggtgacaagaccattgggggaggtgatgatgctttcaacaccttcttcagtgagactggtgctgggaagcacgtgccccgtgctgtttttgttgaccttgaacccactgtcatcgatgaggtgagaactggcacctaccgccagctcttccaccctgagcagctcatcagtgggaaggaggatgcagccaacaactttgcccgtggtcactacaccattggcaagg

SEQ ID NO: 92917 - DNA, 531 bp, Zea mays
gggtggggggggaggggcgtgatgtgaaaagcggcgggtgggaagtaatctctctccggaattcccgggtcgacccacgcgtccgaagatcataagctctaatacggatgatgctaaatatgttataaatgtaaaacaaattgcaaggtttgttgttggactgggggataaggtgtctccaactgacatcgaggaagggatgagggtcggtgttgatcgcaataagtaccagattcaaatccctcttccaccaaaaattgacccaagtgttaccatgatgactgtggaggaaaagccagatgtgacgtacaatgatgttggtggctgcaaggaacagattgagaaaatgcgtgaagttgttgaacttcctatgcttcacccagaaaagtttgttaagcttggtattgatcctccaaaaggcgtcctttgctatggcccacctggcactggcaagacacttcttgcaagagctgtagcaaatcggactgatgcttgtttcatccgtgtaattggaagtgaattaattcaaaa

SEQ ID NO: 92918 - DNA, 520 bp, Zea mays
tgagctcagtctgtgaccagaccgcatagtatgtctgcctggtccggaattcccgggtcgacccacgcgtccggaaaatgatgtagatcaagaattggatgatgacaatggcgtggagcgtatacttagtgggaaattgggtgagagcagtggatatgctggcagtgacctctatgactacaagtctcgagaaccagattactgcattggagaacaagtgctcaggtgattaccaatggattggtttctgtcacaatgatcttcagaatggcaatatcatgattgatgaaaagaccaacgtgctgaccatcattaaaatggccatcggtgtccctaaaaagcggaatgacaaatgggtggctaatcagcttttaaagctacatctggagtaaaaagcttcgaaggatgctcatcttcagtttatgcgctactatttgttgactgacatggacttgcaaaagcgcacttaatacttggtagttttggatccaatttgtgcattggtccatgtcttccgcga

SEQ ID NO: 92919 - DNA, 503 bp, Zea mays
gtggagttatgttagtcatgctagtcgctggatctaccggtccggaattcccgggtcgaccgacgcgtccgcggacgcgtgggcggacgcgtgggtgcggatgtcagattgctaaaggaaataggcatgggcgggtacagattctcggtctgttggtccagaatactgccgaagggaacgctcgaaggaggtattaatcaggccggcatcaagtactacaaaaagctcatcaacttattgatagagaacggaatagagccatttgtaacaatttttcattgggacgtccctcaagcactggaagacaagtacggtggctttttaggcgacaggattgtaaaggattacacagacttcgctaaggtgtgctttgagaacttcggtgacaaggtgaagaattggttgacctttaacgagccacagacatttacaaccttttcgtacggaacgggagtttttgcccctggacagtgctcaccaggagaaaaatgtgctcaggctat

SEQ ID NO: 92920 - DNA, 513 bp, Zea mays
  unsure (1)..(513): unsure at all n locations
cagtctctggtcgtatcagacagacagtangtctcgcctgtccggttcggaattcccgggtggacccacgcgtccgcgctgaggctgttgatctttacaacaagcattacaagcgcgacgacacccgcatgggggttgcgtttgacgtaatgggtcgtgtgccatacggaacatcgtttctggataaacaggccgaagaaaggtcctgggacatcaacctaggatggttcttagagccagtggttcgtggtgactaccccttctccatgagatcattggctagggaacgactacccttcttcaaggacgagcagaaggagaagctcgccggttcctataacatgttggggttaaactactacacctcacggttctccaaaaacatcgatatctcaccaaactactcacctgtgctcaacactgacgacgcctacgccagtcaagaagttaacgggcctgacgggaagcccattggtcctcctatgggaaatccatggatctacatgtaccctg

SEQ ID NO: 92921 - DNA, 520 bp, Zea mays
  unsure (1)..(520): unsure at all n locations
atgaggtcagtgtgtatacagaacagcanagtatgataacctcgtccggaattcccgggtcgagccacgcgtccggttgaagagctagagatgttgctggaggcatatttcatgcaagttgatggcacattaaacaggttgacaacgttgagagagtacatcgatgacacggaagattacatcaatatccagcttgataaccaccgtaatcagttgattcagctagagttattcttgagttctggtaccgtctgtctgtcgctgtactcattagttgctggagtctttggtatgaatattccgtatacctggaatgacggccacggatacatcttcaaatgggtggttcttgtatcagggcttttttgtgcctttatatttgtctccattgttgcttacgcacgacacaaggggctcgtcggatcctgaatagctgaaataaccgcgtacttgcttccctcaactgtaaatctgaaccaatgagcatcgactttgccgggtgattaatctggtgtaccaa

SEQ ID NO: 92922 - DNA, 522 bp, Zea mays
gtgaggtatttagttaagaaggggggcggaaaggtatcccgctccggaattcccgggtcgacccacgcgtccgatttttttccccaacccgtcgtcggctgccggctgcggcactctgggaggaaggccccaagggcttgccgtctgagacgaaccgaaacgatggtgggcgccaatgaagtgggcggtctggagtgcgagcggaagccgctggcggaggtggtcggcgactgcgtccagcgctggttccaggacgcgtacatggaggcgcgcaaaggcgacgtcgccaaccaagtgcttgtagcgcagatgttcttctcgggttatggaacccccaagaacgagtataagggaaaacaatggatggatagggcgtcaaggttcaggtcttcagctatgaaggttggcatgaaacgtccaggatactatgcaagtgactcggactccgatgatgccaaccaatgacagtcagttacaaattgagttatgattagctaggagattcacatggtaagaaagtgt

SEQ ID NO: 92923 - DNA, 559 bp, Zea mays
  unsure (1)..(559): unsure at all n locations
agggtagcgtnntgtggtgatgcctagggaaccttacgcacgtacttaccggtccggaattcccgggtcgacccacgcgtccgccccagaccccaaaccctagcttcgctcgttgcggcgagccggcgatggcgaagtctctgcgatccanacgcgagaagcggcttccgacgttgcgccgggagatagcggagcccgtctacgacaaggaagaggcacgtcaagctcggcgcgcaggccgnagccctagctgcttgcccgcttccggtcccggggcccctcgcgttccaggatgccggcaccttccgcgcagctagctcgggctcgggtatggatgttgaagatgtctggtgcaaggaacagcaggtctaagacctttcttgaggcacttgcagcattagcaaggagaggtgcagcttcatttgacgatcaggaaggacaagagtatagctaaggatgaacggaaagtttctgtttaagagtacaagaatgtatgataattaatgcaggttttgttccaaggttgtaaaacaaacgcactgcantcatgtgcacctac

SEQ ID NO: 92924 - DNA, 550 bp, Zea mays
  unsure (1)..(550): unsure at all n locations
agtctagacggttgtctcgtgccaacncgaacgcatcgcactactcgtccggaattcccgggtcgacccacgcgtacgaaaaggttccttcgcttatggaatctatttgggggctcttcctgttatatcgagcaattcggtcggggtccaaatactctatgctatattttggggccttatgacactcactacttttggtaacgaacttgccccaacaagcaatggcattaaggcgatattcaacataatcaatgtcctcaagggccctattctctttaacgtgctgatcggaaacattcagggattttttaccgcggtccttgaaaggaaacgaaaaatccagttccgggtccgggacttggaaaggtggattaaggcaaggcaactaacccttcccgtttaagcaaaaaggtctgcacattcaaaccccaaaacctttgccccccttattgggaaacccggagttgtggattttaaaagattttccctcaagagcttagggggactattaaagcctactttggctttagatctttataaaggtttccct

SEQ ID NO: 92925 - DNA, 550 bp, Zea mays
  unsure (1)..(550): unsure at all n locations
aggtagagtgtgtctgttttgggaacagagagaatattgtactcgctcccggaattcccggggtttgagaggctcaacaaaattaatgagggaacatatggtgttgtatacagagcaagggataagaagacaagtgagagtgttgcattgaagaaggtaaagatggagagggagcgagaaggtttcccattaacctctcttagggaaataaatatcctcttgtctttccaccatccttcaatcgtggatgttaaggaagtagtagttggaagtagtttagatagcatttttaatggtatggagtacatggaacatgatcttaaaagtgtcatggagaccatgaaacaaccatatacacaaagcgaggtcaaatgtttgatgcttcagctgctagagggtgtaaaatatctacatgacaattgggtactccatagggatctgaagacctcaaatcttttgctgaataaccgtgggccccagaacttgtgttaagaacaaaggagtattctactgctattgatatgtggtccgtgggctgtattatggcttn

SEQ ID NO: 92926 - DNA, 550 bp, Zea mays
aggtttagcgtgtgtctagtctatgcatcgcatagtatgtgtctcactgtccggaattcccgggtcgaaccaggcgtccgcccacgcgtccgcggacgcgtgggcaagtactccaactggtgttgaaacacctgatgttatggaccgttctgaagctgcagaggaaggagactgacaagcaagcagaacggccgctgtaccaggttcttgaacaaaaggaagaaaggatagcccctgggactctatatgggtcaagccatacgtatgtgctgggaacacaagataaatcatcagctccgaaaagggtggatctgcttaagaatcaaaagtcagacaaggtggacgtcaccatccaacccgaggaactggaagccatggatgatgttctggcagccaagtatgaagaagctcgagaggaagagaagcttcggaaccaacaggaggacttcagtgacatggtggcagagaatgctcacaagaggaagacgaaacatgagaacgaaggccagtcgaagaagactgaatctaagttttaagggctatgctgcga

SEQ ID NO: 92927 - DNA, 549 bp, Zea mays
  unsure (1)..(549): unsure at all n locations
agggtggtgggtntnccaatgagnatgactgctcattcattgacgctccggncctgaattcccgggtcgacccacgcgtccgccaagatacagtttccattatggattgagttgggagaaggaagcaatcaatagccgggttgagaaggcaatatgtgaagctgacaagaaaggagctaaagttgttaccctcggactccttaaccaggcacataacctcaacagaaatggagaactttatcttcagaagtgcccaaagttgggagtaagactcgtagatggcaccagcttagctgctgcagtagttgtgaatagtgttcctcaaggcacagatcaagttgttctcgcagggaatatttccaaagttgctcgtgctgttgccgcagcattgtgtaggaagaatatcaaggtagtaatgaccaacaagcaggattaccattttcttaagcctaacatggcagaagatgcagctgagaaccttttggtttcaaagacaactactgcaaaagtgtggttaattggngatggtctagatgcttctgagcagtt

SEQ ID NO: 92928 - DNA, 555 bp, Zea mays
  unsure (1)..(555): unsure at all n locations
ttggaggagtgggttctgttcacgcatcacgacctaagctgcatcagcgcctcaatcttcaatgtgcgaggtcgacccacgcgtccgctttgcccttccctccctccctctccccgtttgccgacagaggcaatttcgccctggattgggccccgattcgtccgaccgcgaccgggattacctccggcaagcgcggatctgaacgctgcgctccgtgttctcgctcgaatccgccatgaatggggccaaattcaatggcgccgtcaaagccgatgccaagctggcggcgaaaagcaagggggcggagaaacccgccaagggcatgaaggggaaagccagcaaggaccccaacaagcctaaaagggctcccaccgctttctttgtgttcatggaggaatttcgcatggaagttcatggagaagaaccctaagaacaagtctgccgctgncgtgggaaagctgctggcgacaggcggaaatccctgagcgagtcggacaaggctccctatgtagccaaggctaacaagctcaagctagagtacaacaaggccatccg

SEQ ID NO: 92929 - DNA, 546 bp, Zea mays
  unsure (1)..(546): unsure at all n locations
agggaagagggctcnggttacgaaccagcaatgtaacgtatcgctctaccggtccggaattcccgggctagggtttttgattttagccgccgccgctgctcatctcacatccctcgagaagacgcctgctcctcgccgagcgatacgatggccgtcttctccgacctccacaccgccgacggcctcaagtccctcgaggctcacctcgccggcaaaacctatgtgtctggtgactccattactaaggatgacattaaggtcttcgccgcggtgccgtcgaagcctggcgctgagtttcctaatgccgcccgctggtacgagaccgtctctgcggctgtagcctcaagattccctggtaaggctgttggtgtaaatctgcctgcgggatcagctcctgcggcagctgctcctgcggatgaggctgaggatgatgatgaccttgatctttttggtgatgaaactgangaggacaagaaggcagctgatgagcgtgccgncgctgccaaggcctcttctaaaaagaaagaaagtggtaaatcctccgtc

SEQ ID NO: 92930 - DNA, 546 bp, Zea mays
  unsure (1)..(546): unsure at all n locations
agtagaccggtgtgcgcgtctgcatcccgcctatattgtacgactncggaattcccgggtcgacccacgcgtccggttctgggtttgctactgccaccttgcgcgcccttcttccctgccgagccccactgaccttgatctggtcaaggatggcatccgtcccctctgggaggatcctgcaaaccagaatggtggcaagtggataattagattcaaaaaggcagtttcaggtcgattttgggaggatttggtgctagtggtagtaggcgaccagcttgagtatagcgatgatgtctgtggtgttgtgcttagtgtccgtttcaatgaagacattctgagcgtctggaaccggaacgcatcagaccatcaagctgtgatggcattgagggattctatcaagaggcacctcaagctgccgcacagctatctgatggagtacaaaccccatgatgcttcgcggcgtgacaactcgtnctacaggaacacatggctgagaggatagataaacctcatgatactcggcagcttcactgggaccggtcttaa

SEQ ID NO: 92931 - DNA, 547 bp, Zea mays
  unsure (1)..(547): unsure at all n locations
agtaggctagacctcttcggtttgaactnnngntnagntcnattcacgcatcaatttccgggtcgaccgcacgcgtacacttctggatttgctactgccaccttgcgctttcttcttccctgccaagccccactgacctggatcatggttaataatcacaatgcgtcccctatcgcaggatccttcaaaccagaatggtcgcaactggataattacattcacaaactcactttcaggtcgattctggcaagattcggtcctactaatagtacgcgaccagcttgagtatagcgatgatctctgtcaagttcgtcttaatgtcccattcaatgaacacattcttagcgtctgaaaccctaacccattagaccatcatgctttgatcgcatctaaggattctatcaagacgcacctcaagctgtcgcacatctatctgatggactacaaaccccatgatgctttccagcctgacaactcgtcctacaagaacccatgcttgataagatagataaacccatgatacttcatactttactgtacagttctg

SEQ ID NO: 92932 - DNA, 552 bp, Zea mays
  unsure (1)..(552): unsure at all n locations
aggtgttaaggggtctctgttacgagacagcgctantancgtattgctctaccggtccggaattcccgggtcgacccacgcgtccggaaggcggcggccagcggcgagaggaggaggggtgggtcagccatgacggggaaggcgaaggcgaagaagcacacggcgaaggagatcgccgcgaagatcgacgcggcgacgacgaaccggggcggcggcaaggccgggctggcggaccggctggggcaggacaagggcgggcatgcgaagctggcgtgcccgctctgccgcaccccggcgcccgacatcaagtccatgcagatccaccacgaggcgcgccaccccaagctccccttcgagccggagaagctcctcaacctgcactcctcncgccccgctgctgctgttgccgncgacgncgncgncgncgncgctgccgaggccaccacctncaagcccaagcccggcgtccgcggcagcctcaagaagtaagcttgctggctnggttggctcggccggctgcatggggcacaaatcccttcggtttcatcccat

SEQ ID NO: 92933 - DNA, 544 bp, Zea mays
  unsure (1)..(544): unsure at all n locations
naggtatgagtgtttgttacagaatagatggaaatgtacatgctccggaattcccggggaagagatttggccaatctgcagcttttgttgcgtccactctgatggaatatggtggtgttcctcagtctgcgactgcgataggtcttctgaaagaagctatccatgtcataagttgcggctaccaggacaagactgaatggggaactgagattgggtggatctatggttctgtgacggaagatattctcactgggttcaagatgcacgcacgaagctggcggtcgatctactgcatgcctaagcggccggccttcaagggatcggctcccatcaatctctcagaccgtctgaaccacgtgctccagtgggctctcggctcagtggaaatccttttcagccggcattgcccactatggtacagctactgaggacgcctgaagttctaggagagatacgcctacatcaacaccaccatctacccgttgacgtccctcccgttcctaattactggattcctgctgccatctgcctgctcacggggaaa

SEQ ID NO: 92934 - DNA, 558 bp, Zea mays
  unsure (1)..(558): unsure at all n locations
nagggtagcntagagcttntattatagtactgggggggaagatagtagtgcatgctaccggtccggaattcccgggtcgacccacgcgtccgccccaaactgcaagtctgccaagagactgaaagcattggtggcgttcacttcggcgacaacgtgaacagaacaaagaagcggatcaaattgggatcaaaatgtatgcctgggacgatttcttgaaagtggggaaggataatcctcgtcaaccttgccctacgcaagcaagtgacatctgcactgtcatgtacacgagtgggacaagcggacagcccaaaggtgtgatgctgacccatgaaagccacgccatgtatgtgaaaggggtggacctcttcatggaccagtttgatgataagatgacaacagatgatgtcttcctgtcgtttctcccgcttgctcacatccttgaccgcatgatcgaagagtatttctttcacaaaggggcctcaattggctactaccacggagatctgaatgccttgagggacgacattgtggagctgaagccgactctactggttggag

SEQ ID NO: 92935 - DNA, 555 bp, Zea mays
  unsure (1)..(555): unsure at all n locations
aggaagctgagagtcngcttcatgcatggcgaggatgatagtagtgctgtaccggtccggaattcccgggtcgacccacgcgtccgccaaaagctatgtaccttgcaagaggaaatcatgaaagcaagagcatgaacaaaatatatggctttgagggggaagtgaggtcaaagctgggtgagaagtttgttgaactttttgctgaagtcttttgttggttacctcttgcccatgtcatcaacaacaaggtctttgtggttcatggagggctatttagtgttgatggggttaagctttcagacattaggtccattgatcgtttttgtgaaccacctgaagaaggtctaatgtgtgaattactatggagtgacccttaacctcagcttggaagaggtccaagtaaacgtggtgttgctctttcctttggcgcagatgtgacttaaaaagttttacaggaaaaataccttgaacctaatggcccgtcttattgaagtaaaggttgaaggcctggaaatggaccttgtggaaagcttattaccatcctcttttgcgcta

SEQ ID NO: 92936 - DNA, 552 bp, Zea mays
  unsure (1)..(552): unsure at all n locations
gagtagccagagtctatacagcatcggggagatgatggtagtgatgctaccggtccggaattcccgggtcgacccacgcgtccggctatgcagaggacaagacaggttggatgacagatgaggagtttggacgggagattctcgccggcgtgaaccccatgctcgtcaagcgtctcacggagttccctccgaggagcagtcttgacccgagcaagtacggcgaccacaccagcaccatcagggaggcggacctcgagaacaagctcgagggcctgacggtgcagcaggcgctgcacggcaaccggctctacatcctggaccaccacgacaacttcatgccgttcctggtcagggtgaacagcctggagggcaacttcatctacgcaaccagaaccgtgctgttcctgcgcggcgacggaacgctggtgccgtggccatcgagctgagcctgccgagcttcgggacggcttgacaaccgncaagaggcacgggtacaacgcccagttggacaacggcnccgaaggcctggttgtggaacctgcccaaggccaa

SEQ ID NO: 92937 - DNA, 556 bp, Zea mays
  unsure (1)..(556): unsure at all n locations
nagtagaggcagtagctantgagtccgattccgcnaagttgaatgtactgctctactcggtccggaattcccgggcagcctcacgctgctcgatggcggcgccgtatcaccagcctacgagcctggaggaggtccgcactctgtggatcggggacctccagtactggaccgacgagaactacctctacagctgcttcgctcacaccggggaggtacaatctgttaaaataatacgcaacaaagtaacaagccttcctgagggttatgggtttatagagtttgtttcacatgaagctgctgagaaaattctccagacttacaatggcacacagatgcctggaactgatcacacattcagattgaattgggcctctatcagctctggtgagaggcgccctgatccaggatctgatcattcgatcttcgtaggggacctggcacctgatgtcacaaattacttactacaggaaacattccgagtgaactattcatctgttacaggtgctaaagttgtcacggatccaaataccgcgagatctaaggatatgggattgta

SEQ ID NO: 92938 - DNA, 556 bp, Zea mays
  unsure (1)..(556): unsure at all n locations
nagtaggcggtggtcnctcttgattacgagggtcgatgcattgctctaccggtccggaattcccgggtcgacccacgcgtccgcggacgcgtgggcgcagcttagatcgagtccaagaggttccccatgagggacctatgtgcgatctcttatggtcagatccagacgaccgatgtggttggggcatctcccctcgcggtgctggctacactttcgggcaggacatatcagagcagtttaatcacacaaacaatctcaaactcgtagctcgggctcatcaattagttatggagggatataactgggctcatgagcaaaaggttgtcaccatattcagtgctccaaattactgctatcgatgcggcaatatggcatccattttggaagttgacgactgcaacagccacacattcatccagtttgaaccagcccctatgagaggtgagccagatgtgacgcgaagaacaccggattatttcctttgagctgtcgatgttacccgttnccagcctgtgtcgtgataatcgatgcccacgtctggtggatcaggggccaa

SEQ ID NO: 92939 - DNA, 550 bp, Zea mays
cgtcatgccgtgtttctgtgttcaaatccgatcgtaggcctcacatgctcctgaattcccggtgcttctgctgcccctccggttcgggttcgggttcgtgaggttctccggcgttccgtttcgtgggtgagcggatcgaggtggcggcgtccgatgttgagtaccggtgcttcgtcggcggactcgcctgggccacagacgaccactccctccacaacgccttcagcacctacggcgaggtcctcgagtccaagatcatcctcgatcgggagacgcacaggtcccgcggcttcggcttcgtcaccttcttcacggaggacgcgatgccgaacgccatcgagggcatgaacggcaaggagctggacggccgcaacatcaccgtcaacgaggcccagtcccgcggcggacgtggaggccgcggcggcggcgggtacggtggtggccgtggacgcagcggctacagcagtggcaggcgccgagatggccgcagcagctacagcggtggcggcggctacagtggtggcggcagctgctacagtggtggtggccg

SEQ ID NO: 92940 - DNA, 546 bp, Zea mays
  unsure (1)..(546): unsure at all n locations
nagtnttgagtgtttttgttacgcacgggaagtatcgtagacctctccggaattcccgggtcgacccacgcgtccggtttcctatcttgctccccaaaccagcgcataccctgccctgacaccggcggcgccatggtgctcgaggcaacgatgatctgcatagacaattcggaatggatgcggaacggcgactacgctccgtcgcggttccaggcgcaggccgatgccgtcaacctcatctgcggcgccaagacccagtcgaacccggagaacacggtaggcgtgatgacaatggccgggaagggtgttcgcgtgcttgtcactcccaccagcgacctcgggaagattctcgcctgtatgcacgggttagaagttggcgctgaggcaaacttggctgcggcaatccaggttgcccagcttgctctaaagcatcgccagaacaagaggcagcagcagaggattatagctttcattggaagtcctgtgaagtacgacaagaaaagtttggagaccattgngaagaagctgaaaaagaacaatgttgct

SEQ ID NO: 92941 - DNA, 552 bp, Zea mays
  unsure (1)..(552): unsure at all n locations
nagggtatgagagctgnctaacagagtccgcaaaggatagtattgcatctaccggtccggaattcccgggtcgacccacgcgtccggtggagtgtcgcttagcagcgattgttcttgccatcaaacttgggatggataggaaaaaggctatctcctccgttacaaccctctccgatgttgaggggctatgtgtttcttttgctgggagagaaggttcatctgatcctgcagtagctgtgaagaaacttctgcatgaggacccatatacagctggagaaatagagaaaattacaggagaaggcctgacatctgtcttccagggctctcagacgtcattggaagttataaaagcggcaaagcactacaagctatttcagcgtgcgacccatgtctactctgaagcaaggagagtttatgctttcagggatactgtctcttcaaaactcagtgaggaaggcaagcttaagaaacttggtgatcttatgaacgagagccattacagctgcagcgtgctatacgaatgcagttgccctgagctggaagagcttgtga

SEQ ID NO: 92942 - DNA, 553 bp, Zea mays
  unsure (1)..(553): unsure at all n locations
ngggggaaggagagcctactgtttaagaatccgcagatgaagtattgctctaccggtccggaattcccgggctagttctagatcgcgagcggccgcccttttttttttttttttagaatcttctgtgttgagtttttgagagagatccggagtcaacacgatgaaattgaggccaagtttttttgaagaacgagctgcccttgaggcaaagtaccagaagctttatgaacctttatacacaaagaggtatggaattgtaaatggagaagtggaggtagatggtgtttgtgatgaaccggccagtgagaatactgttgagggaaaagaaccagacgctaaaggagttccagacttttggcttactgccatgaaaacaaacgaggttttgtctgaggagatacaagagcgcgatgaagccgctttgaaatatctaaaagatatcaagtggtctagaatcgaggatcctaagggtttcaagctggattttttctttgatacaaacccattcttcaagaattctgtcctgacaaaaacgtaccacatggttgatgaa

SEQ ID NO: 92943 - DNA, 555 bp, Zea mays
aggtggagagagccgtctctttccagtcccgcagagtatagtactgctgcaccggtccggaattcccgggtcgacccacgcgtccggtcacacacacacacacagacaagtggttttcaaagccaagtgcgtgtactagcaagcggcgggctcgggcggcagcaggcagccatcatgtcggaggagaagcaccaccacttcttcaaccaccacaagaaggacgaggagcagcccgccggcgagtacgggtactccgagaccgaggtggtcaccgccaccggcgagggcgagtacgagaggtacaagaaggaggacaaggagcacaagcacaagcagcacctcggcgaggccggcgccatcgccgacggcgccttcgcactctacgagaagcacgaggcgaagaaggaccccgagcacgcgcacaggcacaagatcacggatgaggtcgctggcgcggcggacgtcggcgccggcggctacgtaatccacgagcaccacgaggagaaggaggaccacaaggacgccgaggaggccaacggcgagaagaagcccacc

SEQ ID NO: 92944 - DNA, 558 bp, Zea mays
  unsure (1)..(558): unsure at all n locations
gagagagtgtttttggtctgtatcagattcgaatcgnattgacgcattggtcttgaattcccgggcatggaacgatatgctcctactgcaaaagatcttgcttctcgtgatgttgtttcaagatcaatgacaatggggattagagaaggacgtggtgtagggccattgaaggatcacatttatttgcatctgaaccatctgccacctgaggttctcaaggaaaggcttcctggtatttctgaaactgctgctatttttgctggtgttgatgtcaccaaggagcccattccagttttgcctactgtgcactacaatatgggcggtattccaacaaactaccatggngaggtagtggatatcaagggtgataatccatatgctgttgttcctggtctaatggctgctggtgaagcagcctgtgcatctgttcatggtgcgaatatgctaggcgcaaattcgcttcttgacataattgtttttggcaaagcttgtgcaaacagggtagcatatatttctaaaccaggtgagaagcacaaacctctggaaaaagttctgggg

SEQ ID NO: 92945 - DNA, 553 bp, Zea mays
tgaggagagtgcgtctgtgtacgatcccgcaaaggatagtagtgctgctactcggtccggaattcccgggtcgacccacgcgtccgtccacactaacgaacgaactcttgctccgatcacgagctagctgaggtcgacgatggcggctgtgctgaacagcaggaagacgccgcaggcggtggtggccgtgctggtggcggcggcgctgctggcttcgtccgcttcggcggcgatcacctgcgggcaggtggggtcgtcgctggcgccgtgcatcccgtacgcgacggggagggccagcgcgctccccgcgtcgtgctgcagcggcgtcaagagcctcaacagcgcggcgcggaccagcgcggaccgccaggcggcgtgccgctgcctcaagagcctcgccaacagcgtcaagagcgtcaacatgggcaccgtcgccaccatccccggcaagtgcggcgtctgcgtcggattccccatcagcatgtccaccgactgcaacaagatcagctaagttacgacgaccaagctaataagcctaccgaacgtacacgta

SEQ ID NO: 92946 - DNA, 518 bp, Zea mays
  unsure (1)..(518): unsure at all n locations
agagaagggtctgtgntttacgaacggcgacgtatagttatcgactcttccggaattcccgggtcgacccgacgcgtccggcctccgccgacgaccccagccccgacccgctccactacggcctcacgctctcccgaccggatgggcgcctcgacggcgtcctcgccgcgtacaccagcttctccatccactccgtggtcggcgccggacaactggaggccaaagtgcgcgacgaggccgatgccgtcgcgtactggacggccgtcgcgcccaacgtggaggcgtacggaagcgcagtggccatgaccatcgccacgggcgccgagcacctcgccaaagggatactgtggtgcagggaggtcacgtagagagcctacgctgggggaatgaggtcctcaaaaagaggatgcaagccgtcgacgccaacgtcgaggtcagccccaatatgctcaagcgaatcaaaagggctaagacggtgagccaaatatctgagaaagtggcgactggtattctgtccc

SEQ ID NO: 92947 - DNA, 503 bp, Zea mays
  unsure (1)..(503): unsure at all n locations
aggagagtctcgataacgagagganagtaagtctcaccggtccggaattcccgggtcgaccgacgcgtccgaggccattgagacctgaatatagagatgatcacatggtggggcttgtgactgaattcttggacgcagtacaacatttcataagtcttgggaaaagctatatcatatagtctagatttcttagctcagtacaaattgctcctagattcttatggaagaatgtcatcagtctattgtttcatgggtgtgcacccatctgactcaaataatattgttgtatggtgtgcacccctttgacttcaggagaaacttatcctatattttgcagatgtttgggtctgtgatatggtttcctttgtctacaccgaatgttctaattatctatatcgttcctttgtacagctcttggtgtagcttgccactctcaccaatcaagttttcatgtctgatctcgacattcagatcccaactgccttcggtacgctagttgaaat

SEQ ID NO: 92948 - DNA, 517 bp, Zea mays
  unsure (1)..(517): unsure at all n locations
tgggtagaggntttcngttacgggggggggggcggaaaggttacactctaccggtccggaattcccgggctgagattgagatcctgaggaagaaggggcactcctactctgagatcatcaacgagagcgtgattgagtcggtgggctcgctgaacccgttcatgcacgcccgtggggtcgccttcatggtggacaactgctccacaacggctcgcctgggatccaggaagtgggcgcctcgcttcgactacatcctgacgcagcaggcctttgtggcggtggacaaggacgccccgatcaaccaggacctcatcagcaacttcttgtcggaccctgtccatggtgccattgaggtctgcgccgagctgaggcccaccgtcgacatctctgtgcctgccaacgccgactttgtgcgcccggagctccggcagtcttcctagattgaggcagtgagcggagagggagagggagagagaaagagaggatttcgtgtcccgagttagaacagagtgctgta

SEQ ID NO: 92949 - DNA, 513 bp, Zea mays
cggagatgtttattcgtaccgcaagacatagatagtcatcgcctctaccggtccggaattcccgggtcgacccactcgtccggtttgagagcattccaccggcagactccgtcttccttaagtgggttttgcatgactggggcgatgctgattgtatcaagatactcaagaactgtaagaaagctataccttccagggatgcaggaggaaaggtgataatcgttgatatggttgttggaggccagtcgtcaaacattaagcacaaagagactcaggtcttgtttgatctcttcatcatgacgatcaatggcgccgagcgagacgaacatgagtggaaaaagataatttccgaagctggatttagcgactacaaaatcatacccgttctaggtgttcgatccatcatcgaggtctacccatgattatttggcgaatacgtgtttcgtttttttctgaataagttgtttggttaactagcatgggacgagtgtccatgagatcatgtgtgatgaa

SEQ ID NO: 92950 - DNA, 531 bp, Zea mays
  unsure (1)..(531): unsure at all n locations
ggaggagggaaggaggtggtcagtacgcgacgggatgananggtaatcctcaccggtccggaattcccgggtcgacccactcgtccgaggcagcacagcagcagccagctccatccatcctctttcccctcctcgcttcgcttgctcgtgtgattcctcctgcctgggccgtccccgtcccctttttcggctcgcgagctcgcccgagatggcaaacgcgagatcgggtgtcgctgtgaatgaccagcgcatgctcaagttcggcgagctgcagacgaagaggctgcaccgcttcctaactttcacgatggacgacaagttcctggagatcgttgacgaccaggtcagggatcgcgctaccagctacgaggacttcacaaacagcctccacgacaatgactgccgatacgccatctatgacttcgactttgtcactgcagacgatgtccagaagagcacgatcttctatatcctatggtccccatactccgtcaaggtgaacagcacgatgctgtatgcaagctcaaacca

SEQ ID NO: 92951 - DNA, 516 bp, Zea mays
aggggagaggctgtgtaacagacgggcagggagatagtcatcactcgtccggaattcccgggtcgaccgacgcgtccgccgagctactcgtccgactggggcgtccaatattactttcaaaggaatggcgtgcaaatgggggagatggcgcactcaattgtggctttacatcgtcccatcgggcatgtatggagtcgtgaactacctaaaggaaaagtaccataatccaatcatcatcatatcggaaaacggaatggatcagcctggaaacctcacgcgcgaggagtacgtgcacgacgccgtgaggatcgacttctacaagaactacctgacggagctaaagagagggatcgacggcggcgcgaacgtgatcggctacttcgcgtggtctctcctggacaacttcgagtggctgtcgggctacacgtccaagttcggcatcgtctacgtcgacttcgcgacgctgaagcggtaccccaaggactcggcgtactggttcagagacatgctttcggg

SEQ ID NO: 92952 - DNA, 503 bp, Zea mays
gagagagttttgaaccagaaagatagtactactcaccggtccggaattcccgggtcgacccacgcgtccgatcgctcacacagtcagaccgacggactcattaacacacacacggacacacaacttctcggacgcgccgtagccatggctggcgctgcgcagaagaagatggcaattgtttgcttgatgctgctggccgtcgtcggccaaatcgtcgctgatgctgatgttaccgtagaacatcccagccgcatctgcaccgaaacggtgattgatcctcgtgttcccaacaacgagtgcatctgctccaagaactgcgcctgtgccggcaagtgcatccttgagtcgcctgatgctgtccagacctgctttgtcgactgcgtcctcaagaacgactgcatctgcagcagcaagatcatccccggcgctgacgacccaaaggctaatgccaagtgaagtagtactgctatcatcatccccaataatggcgtacgtacctaaat

SEQ ID NO: 92953 - DNA, 512 bp, Zea mays
  unsure (1)..(512): unsure at all n locations
cgagggagaggtgtgngattacaagaatgattgtacttctctccggtccggaattcccgggtcgaccgactcgtccgctgaggaaaaaaaaccccgcaaccgcacccacaccctccgcgtgctctctctgccccatgggcgggcccctcctcctggaccgcccgtcccgccgccgccgccgcccggccgtctggtggcgatggcgtaccgggcggacgacgactacgactacctcttcaaggtggtgctcatcggcgactccggcgtcggcaagtccaacctgctctcgcgcttcacgcgcaacgagttcagcctcgagtccaagtccaccatcggcgtcgagttcgccacccgcagcatccacgtcgaggacaaggtcgtcaaggcccagatctgggacaccgtcggccaggaaagataccgcgctatcacgagcgcgtactaccgcggagcggtaggggcgctggtcgtgtacgacgtcacgcggcacgtcaccttcgagaacgtggagn

SEQ ID NO: 92954 - DNA, 508 bp, Zea mays
ggggaagcttgtcgacgatcgacaagtaagtcatcgcttaccggtccggaattcccgggtcgacccactcgtccggccaaccagaagagcttgcagttactgagagtgtgtgtgagagagaggatgggtggcaggggcagggctgctctgctgctggccctggtggtggtggccgtgagcctggccgtggagatccaggccgacgccgggtacggttactgcggcgggtacaccgcgactccgacgcctgccaccccgaccccgaagcccgagaagccccacaccaacgggccgaagccggacaagccgaccaaggagcacatgccgcccaaggagcacggtcccaagccggagaagccgtccaaggagcacaagccgacgccgtccacgtacaccccgagccccaaaccgactccgacgacggacactcacacccggactccttccaagccgactccaccgacatacactgccgcgcctacgccgaacaaacgcacaccaaaaccca

SEQ ID NO: 92955 - DNA, 515 bp, Zea mays
aggaggatagcggtgttatacgcaggcgaggcggatagcatctctctaccggtccggaattcccgggtcgacccacgcgtccgatgtcattgagggttttgtaatgctcttgcagtcagcagaagacactgcactcgggatgggggatgctcctagtgaacttgctctcttcctagctagggcagtgattgatgaagtattaattcctctcaatttggatgaaatcagcattaagcttcggccgaacagcagtggcagccaaactgtccagatggcgcgtgctctactgtcagctcgccattctggtgagcggatactgcggtgctggggcggtggcactggatgggctgtggaagatactaaggacaagatcactaagctattggaggaatacaacactggtggtgacctaggagaagcctgcagatgcatccgtgatcttgggatgcccttcttcaaccatgaggtggtaaagaaggcactggtcatggcgatggagaagcagaatggcaccc

SEQ ID NO: 92956 - DNA, 539 bp, Zea mays
ggtgaggtggggagggaggatgggtgagtacgacgcggaggagggggacggaagtctttcaccggtccggaattcccgggtcggccgacgcgtccggggcgagttcggcggcaacgactacaacgcgcagatcttcggcggctacaccccggggcaggcgagcgggcagagcgcggccatcgtggacgccatcggcaagggcgtggagcagctcatcagcctgggcgccatgtacgtggtggtcccgggcgtgctgcccgtggggtgcttcccgatctacctgacgctgtaccagacctccagcgccggcgactacgaccagtacggctgcctgaagcgcttcaacgcgctgtcggcgcagcacaactcgctgctgcaagccaaggtgtcgagcctgcagagcaagtaccccggcgcgcgggtcatgtacgccgacttctacagccacgtgtacgacatggtgaagagccccggcagctacgggttcagcaccaacctcagggcctgctgctgcgccggcggcggcaagtacaactacc

SEQ ID NO: 92957 - DNA, 531 bp, Zea mays
ggggttgaggaggtgaggcttagtgtaagaggcggagggtagtagtctttctaccggtccggaattcccgggtcggcccacgcgtccggcgacacgatcgcgagcgcacgcacgtaagcacgttgtcggaagctcaagttagaagaagcggcagtgcctgatcgatggcggcccaggctctcctctccggccggcagctgctgggccgccccgtgcagtcggccgtctctaggtcgtcggcgaggaaggcgcccttcgtcgtcagggccagctccagccctccagccaagcaaggtgccgacaggcagctgtggttcgcgtccaagcagtccctctcctacctcgatggcacgctgcccggcgactatggcttcgacccgctgggcctctcggacccggagggcaccgggggcttcatcgagcccaagtggctggcctacggcgaggtgatcaacggccgctacgccatgctgggcgcggtgggcgccatcgccccggagatcttcggcaagatgggcatcatcccgccgg

SEQ ID NO: 92958 - DNA, 531 bp, Zea mays
  unsure (1)..(531): unsure at all n locations
ggagtnnagggagagggagctgagtgacggcggggggcggaagcggaagttgtaccggtccggaattcccgggtcgacccacgcgtccgggcggctctagaagacgatgggcaaggacgacgtgatcgagagcggcgctggcggcggcgaggtcgctgccaaggactacacggaccctcccccggcgccgctgatcgacgcggctgagctggggtcctggtcgctgtaccgcgccgtgatcgccgagttcatcgccacgctgctgttcctgtacatcacggtggccaccgtgatcgggtacaagcaccagacggacgcgtcggcgtcgggtgccgacgcggcgtgcggcggcgtgggggtgctgggcatcgcctgggccttcggcggcatgatcttcgtcctcgtctactgcaccgccggcatctcggggggccacatcaaccccgccgtcaccttcggcctcttcctggcgcgcaaggtctccctggtgcgcgcgctgctctacatcgtggcgcagtgcctcggcgccat

SEQ ID NO: 92959 - DNA, 511 bp, Zea mays
gggggaggggtgagtgaccgacggagatgtaattctctaccggtccggaattcccgggtcgaccgcacgcgtccgcatgaggaaagcaaggcacaacttcaggctcgacgaggttggaatacgaaggcaactgaggatggtctctcagattatcaagcgcaaagattcgcacctgtataggcatctgcagaagttgcaggccgaggactgtttcttcgtgtacagaatggtggtggttctgttcaggcgagagctcacctttgagcaaaccgtgtgcctgtgggaggttatgtgggctgaccaggcagccatacgagccgggatcgggaggtccacctggggaaggataaggctgcgtgctccgccaactgacgacctgttgctctacgccatcgccgcctgcgtcctgcagaggaggaagctgataattgagaagtatagcagcatggacgagatactgcgagagtgcaatagcatggccgggcagctagacgtctggaggctgctagaa

SEQ ID NO: 92960 - DNA, 512 bp, Zea mays
  unsure (1)..(512): unsure at all n locations
gaggagtgtggattcaatgacaagacatggattgtcatgcctctaccggtccggaattcccgggcggcgtggcgcctccccagcgcccagctgtcgcgctggccatcgggggcacgcatcgccgccgcgcagccggcgcgggcgtacaaggtgacgatggagcacggcggcgagtcgcgggtggtggaagtggcggaggacgagacgatcctgtcccgcgcgctggacgagggcctggacgtgccgcacgactgcaagctcggcgtgtgcatgacgtgcccggcgcggctggtctccgggacggtggaccagagcgacggcatgctcagcgacgacgtcgtcgcgcgggggtacgcgctgctctgcgccgcgtacccgcgctccgactgcaccatccgcgtcatccccgaggacgagctgctcaaggtccagctcgccaccgtcgacgactgactgacgctccgncgatgaccatcggaccggccagcaggcatcaaccttcggcggtgtaa

SEQ ID NO: 92961 - DNA, 518 bp, Zea mays
  unsure (1)..(518): unsure at all n locations
agggagaagtgtttcntattacgacacgacacggatagtcacgtctctaccggtccggaattcccgggtcgaccgcactcgtccgcgaactcttgctccgatcacgagctagctgaggtcgacgatggcggctgtgctgggcaggaggaagactccgcgggcggtggtggccgtgctggtggcggcggcgctgctggcttcgtccgcttcggcggcgatcacctgcgggcaggtggggtcgtcgctggcgccgtgcatcccgtacgcgacggggagggccagcgcgctccccgcgtcgtgctgcagcggcgtcaagagcctcaacagcgcggcgcggaccagcgcggaccgtcaggcggcgtgccgctgcctcaagagcctcgccaacagcgtcaagagcgtcaacatgggcaccgtcgccaccatccccggcaagtgcggcgtctccgtcggattccccatcagcatgtccaccgactgcaacaagatcagctaagttacgacgaccaagctaatan

SEQ ID NO: 92962 - DNA, 513 bp, Zea mays
aggagagaggtgtagtgttacgaacagacaaggatagtcatgcctctaccggtccggaattcccgggtcgaccgactcgtccggctagctagccttccctacagcaactgcatacatacaacacttccatctgcccgctcgtgttcgatcaattcccaaggcaaataataatataacagcaatggtggttcccgtgatcgacttctccaagctggacggcgctgatagggctgaaaccctggcgcagatcgccaatggctgcgaggagtggggattcttccagctcgtgaaccacggcatctcgctggagctgctcgagcgcgtcaagaaggtgtgctccgactgctaccgcctccgggaggccgggttcaaggcgtcggagccggtgcgcacgctggaggcgctcgtcgactcggagcggctcggtgaggtggtggcgccggtggacgacctggactgggaggacatcttctacatccacgacggatgccagtggccgtccgacccgccggc

SEQ ID NO: 92963 - DNA, 534 bp, Zea mays
  unsure (1)..(534): unsure at all n locations
nggaggggtggagggaggaggttagtgacgcacgggggcgagaagaatagtttgtaccggtccggaattcccgggtcgacccacgcgtccggtgctcaacctcaagggcctcagctacgagtacgtggaggaggacctcctcaacaagagcgagctcctcctcaattgcaacccggtgcacaagaaagtgcccgtgctcatccacgccggcaagccggtcgccgagtcgcagtccatcgttcagtacctcgacgaggctttccccggcggcacgtgcccgtcggtcctcccagccgacccctacgcacgcgccaccgtccgcttctgggccgtcttcgtcgacgacaaggtcgggtctccatggcacacggtcctgttcgcgcgggagcacgggaagaatgctgacgcggcgtcgcggatcgtcgcggcgctggagacgtctggaggcgcgttcaagactgctccggcgggaaggactacttcggcggcggcgccatcggcttcgtggacgtggtcctcggcagcttacctggc

SEQ ID NO: 92964 - DNA, 525 bp, Zea mays
  unsure (1)..(525): unsure at all n locations
ngaggggagaggtttagtgtacgccgggggagggacggagtgttttaccggtccggaattcccgggtcgacccacgcgtccgccgggggctggaaggaccggacgacggtggaggatatggacctggctgtccgtgcgatgctgcagggctggaagtttgggtacgtcggcgacataaaagtacgccggtgctaacgatcatcactactttctcgcacggaactcaagagcataacaagaaacgaattctaacgatcctcaggatatataactgcatctgtatgtatgtgcgttaggtcaagagtgaattgcctagcacgttcaaggcataccggtttcagcagcacaggtggtcttgtggaccggcaaacctgttcaagaaaatgatggtagagattttagaaaacaagaaagtgtcattgtggagcaaaatctacttatggtacaatttcttcttcgttgggaaggtcgctggccaaacggtgacattcatctactactgctgtgcgatccccgtgtctgttt

SEQ ID NO: 92965 - DNA, 501 bp, Zea mays
gaggagtcttaaacaaaagaaatagtaagtatcaccggtccggaattcccggtcgacacgcttccccacaccagcagtcgagctgagcacgacacaaatccggctggggccgcctcgccatggctatcgggaggagcaacaacgtgatcggcgcgctgaacctggtgacactcctgctctcggtccccatcctcgtctcgggaatctggctgcggtcgcgcgcctactgcaccgagtgcgaccaccttctgtccaccccggccatcgcgctgggcgcggtgctcatggccatcgctgtcgcgggcctcgccggcgcctgcttccgcgccacctggctgctatggctctacctcctcaccatgctcgtgttcatcgtctcgctgctctgcttcaccgtcttcgccttcgccgtcaccaacaggggcgccggggaagccgtgtcgggggtaggctacagggagtaccgtctcggggactactccacctggctgcggcgccacg

SEQ ID NO: 92966 - DNA, 518 bp, Zea mays
  unsure (1)..(518): unsure at all n locations
nagggtaactggtntcgttcgtacgacacgacgacaggacagtcatgcctctaccggtccggaattcccgggtcgacccactcgtccgagagaattgacacacccaaaaattattatatatatcggatacacttgaagaggctgaggtgataggtatgtaaacacgatctcgtacgactcaccaaaccaaagtccggaagttccattttttttgttaagaagagaacaaatatgtatcaattgttgaatcggatacaacaatgggccaaaaaggccaaaggggcaataagaactgctgttaaaaaaatgataaactttttttttatctttaggctattcacttttcacgtgctcagaatgttctgcagaattagggacttttttcttctattggctgatcttatgatgagaactttctccatttatgttttatttcccctaattctaattgggtggggtataaaggaatttgcgctcttcatatacccctatggctggatagtaattttcagtgatat

SEQ ID NO: 92967 - DNA, 514 bp, Zea mays
  unsure (1)..(514): unsure at all n locations
nggagaagtgtgtcntatccaccagaacatagacgtcatgctctaccggtccggaattcccgggtcgaccgcactcgtccggcattccccctttccccttccgtccggtgcattcctgctctcttgctctcctcgcgtgtcggaccacagttgccgtcgccgccgccctaagccagggtgctgaggctttcgttggcctcttcgccggcagcgagcacccaccagcagttctgtagaaatggctgatggtgaggacatccagcctcttgtctgcgacaatggcaccggaatggtcaaggctggttttgccggcgatgatgcaccaagggctgtattccctagcatcgttgggcgtcctcgtcacaccggtgtcatggtagggatggggcagaaggatgcatatgttggtgatgaggcacagtccaagagaggtattctcacgctcaagtacccgattgagcacggtattgtaagcaactgggatgacatggagaaaatctggcatcacactttc

SEQ ID NO: 92968 - DNA, 541 bp, Zea mays
  unsure (1)..(541): unsure at all n locations
nggagggggggggaggaggagggctttagttacggacggcggacgggacggaaagttttcaccggtccggaattcccgggtcgacccacgcgtccgctagatccgttcatcctggtggttttgtgaggtcgaaagcggcgagcgaattagaagatgggggacaagctgtgggacgacgtggtggccgggcctcgcccggagacgggcctcgagaagctccgcaaggccaccaccgcccgcccgctcgtcatcaacaaagacgcggacggcggcagctacaagcgggcgcagtcgatgccgtcgaccccgacgacgccggtgacgccgtcgtcgtcgtcgtcgtcgacgacgccgcgcggcgccggcaacgtgtggcgcagcgtcttccacccggngagcaacctggccaccaagggcatgggcgccaacctcttcgaccggccgcagcccaactcccccaccgtctacgactggctctacagcgacgagaccaggagcaaccaccgctagatcgggcgagatggatggacagtgaagaggc

SEQ ID NO: 92969 - DNA, 535 bp, Zea mays
  unsure (1)..(535): unsure at all n locations
nnggggagggagaggttagtatactacggggatagaaaggaatgatgtaccggtccggaattcccgggtcgacccacgcgtccgcccacgcgtccgcagggaagctatgtgcttccttatggatcctaacctaggaaggagtgtcggctatgttcagtttccccagaggttcgatggtattgataggaatgatcgatatgccaacaggaacaccgtgtttttcgatattaacttgagaggtcttgatggcatccaaggaccagtttatgtgggcactggctgtgttttcaacagaacagctctatatggttatgagcccccaattaagcaaaagaaaggtggtttcttgtcatcactatgtggtggcaggaagaagggaagcaaatcaaaggaagggctcagacaagataaaagtcacaggaagcatgtggacatgttctgtgccagtattcacatcctggagattttaaaggagggagttgaaggcgctggatttgatgatgaggaaatcacttcttatggctaaaatgaactt

SEQ ID NO: 92970 - DNA, 508 bp, Zea mays
tgggaaggttcgtagtcacccagaacatgtactcctcaccggtccggaattcccgggtcgaccgactcgtccgcacctacgttgctctgctgccgtctgggttcgccatcctgcctgatggcccaagcagtgtcggggccgatcacaagacaggcggctcgctgctcaccgtcgccttccagatcctcgtcaacagccatccgaccgccaaactcaccgtggagtcagtagagaccgtgaacaacctcatattctgcaccatcaagaagatcaagacagcgctgcagtgtgacgcttgactgtcgcgtgtcgccgcaagggggggtggtcggtgatgacgagcctgagtcaagaacgaacctcgtgcgggaaagaaacctttgctaggtgataaggatccagcttggactggtctttagcactgagcaatggtggtgttccggtattgactcggtctctgtcatctgctccttctccatggcaacctgttgtctgatacgggatcttg

SEQ ID NO: 92971 - DNA, 508 bp, Zea mays
  unsure (1)..(508): unsure at all n locations
aggtttttcngattactagaaacgantgtaatgcctctaccggtccggaattcccgggtcgaccgactcgtccggtcagtactgcacttgcaggtggcggcggtggcggtgctgctgatggcgactgggctgcgcgcgcatctgcgggtgggctgctacgacagctcgtgcccagcggcggagatcatcgtgcagcaggaggtgagcagggcggtggcggccaacccgggcctcgccgtcggcctgctccgcctccacttccacgactgtttcgttgggggctgcgacgcgtccgtgctcatcgactccaccaagggcaacaccgctgagaaggacgccgggcccaaccttaaccttcggggcttcgaagtcctcgatcggatcaaaggcccccgtcaagcaggcctgcttcggcgtcgtctcctgcgcggacatactcgcgttcgcggccagggacagcgtcgcactcgccggcgggaacgcgtaccatgtgccggcggtgcggcgg

SEQ ID NO: 92972 - DNA, 505 bp, Zea mays
  unsure (1)..(505): unsure at all n locations
ngggaggggttttcgacgacggcgatggatgtacgacctaccggtccggaattcccgggtcgacccactcgtccgctcacatccctcgagaagactcctgctcctcgccgatcgatacgatggccgtcttgtcggacctccacaccggcgacggcctcaagtccctcgaggctcacctcgccggcaaaacctatgtgtctggtgactccattactaaggatgacattaaggtcttcgccgcggtgccgtcgaagcctggcgctgagtttcctaatgccgcccgctggtacgagaccgtctctgcggctgtagcctcaagattccctggtaaggctgttggtgtaaatctgcctgcgggatcagctcctgcggcagctgctcctgcggatgaggctgaggatgatgatgaccttgatctttttggtgatgaaactgaggaggacaagaaggcagctgatgagcgtgccgccgctgccaaggcctcttctaaaaagaaagaaagtgg

SEQ ID NO: 92973 - DNA, 502 bp, Zea mays
gggagggttttatcagcacgacaggacgtacgctctaccggtccggaattcccgggtcgacccacgcgtccgggcgggctccgacgtcttctgcggcatcgcgcagctggagttcttctacggtgagggccgcgccgcgatgcgcagcatctgctcggccttctccttcctggcgctgtcgctggggttctacgtcaactcgctggtggtgactctggtggcggtcgtgactaagcggcccgggtggctggcgacggacctcaacaccgtccacctggactactacttgtggctctggaccatcatcagcgtcgccaacctgctgctctacatggtgctcgccggccggtacacgcccaatcaggtcgccgctgacgtggtggatccgatgcgtcccagcaacagtggcggcagcgacgaatgattaatttggcacatcgatcgactgcaacttgatccgcttactatacagtaaaaaaacgagatatggtcgagtaggata

SEQ ID NO: 92974 - DNA, 504 bp, Zea mays
agggaaggttcgtcgatgaaagcatagaatcacgcacttaccggtccggattcccgggtcgacgactcgtccgattcttattgatgatctgattaaatcagagatatattcagattatgtgcatgctcatctgtcccctagtggtgaccggaagatacccactgatatggaagattatttgaagggttgcaaatttcttccaaagcttaacaatgatatcccaagtgcaagaaatactacctataaagaaagattcagcagcttggaaaacttggtactgatcatgtctgaggactatgcagtattaatacctctggaaacagcgtggtttggttattaccctgatggagcctttagcccagtgctgccccctcaagagacgaagctgtatacagaatattggattggcttgaagaccctggacgaggctgggcgtgttaaattcgtgtctgtgccatgaggtcacctgcgtatcaccagaagcgacatgaagaagtacatcgt

SEQ ID NO: 92975 - DNA, 537 bp, Zea mays
aggatggtaggggagggaagagggtttgtgacggagggaggcgggacgagcagtttgtatcggtccggaattcccgggtcgacccacgcgtccgaaaagcaaagcctgcaatggcatctgcagccaccgccgtggcgctcgtggttgttgccgccgtggcctcgctgacgcagctggccgcgtcggagtgctcggcggcggaccgcgacgcgctgctttcgatccgcgcggcgctgtcggaggaggagcggcagctgggcgtgttctcgacgtgggcggcgggcacggactgctgcgccgggtggtacggcgtggcctgcgacccgaccacggggcgcgtctcggacctgtccctacgcggagaggccgacgacgcggcgatggcgcccgcagtgcggcccgcgtcgggggtcatgtccgggtacgtctccgacgctgtgtgccgtctggaccgcctcttgacgctggtgctggcggactggaagcggatctcgtggcccatccgggcctgcgtcggaacgtcgctcccgtacttcc

SEQ ID NO: 92976 - DNA, 534 bp, Zea mays
  unsure (1)..(534): unsure at all n locations
nggaggggggagggaggcgtgagtgacgggcgggggaggggtgggcagtttttcccggtccggaattcccgggtcgacccacgcgtccgcgcacccagcacagacagaagaccctcgccggacgctcgctctcgccggggacaactgaatcgctaggccaggatggcccgctacgatcgcgcgatcaccgtgttctcacccgacggccacctcttccaggtcgagtacgccctcgaggccgtccgcaagggcaacgccgatgtcggcgtccgcggcgtcgacaccgtcttcctcggcgtcgagaagaagtccacccccaagctccaggactccaggtccgtgcgcaagatcgcgagcctggacacccacatcgcgctggcgtgcgcggggctcaaggccgacgcgcgcgtgctcatcaaccgcgctcgcgtggagtgccatagccaccgactcacagtctatgaccccgtcaccgtcgagtacattacgcgctacatcggccgtcctgcatcaagaggtcacgcagagcggagg

SEQ ID NO: 92977 - DNA, 509 bp, Zea mays
gagaatagggtggtagacgagggaggacggatagcatcctcggtccggaattcccgggtcgaccgacgcgttcgcaagaagctgctggacttctacacgggcttcgagggcgtgtcgactctggtggacgtgggcggcggcgttggctccacgctgcacgccatcacgtgccgacacccgcacatcttcggggtcaacttcgacctgccgcacgtcatctccgaggcgccgacgttccccggcgtgcgccacgtgggcggggacatgttcgcgttcgtgcccgacggcgacgccatcctcatgaagtggatcctccacgactggagcgactcgcactgcgccacgctgctcaagaactgctacgacgcgctgccggaaaatggcaaggtcatcgtcgtcgagtgcgtgctgccggtcaacacggaggccacccccaaggcgcatggcgtcttccacgtcgacatgatcatgctcgcgcacaaccccagcggcaaggagcggtaccagcc

SEQ ID NO: 92978 - DNA, 507 bp, Zea mays
gggagaggcctcgtgtccgaacgacatgtaatgcacgactgtccggtccggaattcccgggtcgacccactcgtccgcgttgctgtcactgttggtttccgtaacaccaagcacatggggaacgcgtctgggtggggcgtgatcacggtgatgctggtgaccacgtgcctcatgcccctggtgatcatgctgtgctgggaccgctccccctggctggcactcgccttcttcctcttcttcggctccatcgaggcgctctacttctcggcgtcgctgatcaagttcctggacggcgcgtgggtgcccatcctcctggccctcatcctgctcgccgtcatgttcgtgtggcaccacaccaccatcaggaagtacgagtacgacatgcacaacaaggtgaccctggagtggctgctggcgctgggcgacaagctgggcatggtgcgcgtcccgggcatcggcctcgtctacaccgacctcacctccggcgtgcccgccaacttctcccgg

SEQ ID NO: 92979 - DNA, 506 bp, Zea mays
  unsure (1)..(506): unsure at all n locations
tggacgggtattctcaccgccgggtagtaggcatccctctaccggtccggaattcccgggtcgacccactcgtccggggttgccgccgcgtgctggtgactggcacggagcctctggggtgcgcgcctgcggtgcgtgcgcagcgcatgcgcggcggcgagtgctctgcggagctgatgcgcgcggcggcgctcttcaacccgcagctggcgcgcgtcctggaccagctcaacgcgcgctttggcgccgggaccttcatcgcgggcaacgcgttccgcgtccacttcgacttcttcagcgatcctgccgccttcggcttggcacggccaaaggcgcntgctgggaacaggcccccacaacggccttggccttttgaacccggttttcaaccctgtgcccgacccgaacaaggcctttttttgggaaccctaccaccccaagggaccgcccaaccgggtaattgttagccaattcattttaggctcggttgaataccttagccccaa

SEQ ID NO: 92980 - DNA, 529 bp, Zea mays
gggatgtagtggagggaggggtgatttaaggaggggaaggacggagtgttttaccggtccggaattcccgggtcgagccactcgtccgccagagtggaatcctccatgctgaagaaaaggattacaagactgcttacagctacttggttggagcatttgaagctgtcagtgcactggatgacccgatggccatatttatcctgaagtacatgctcttgtgtaagataatggttaaccaagctgactatgttacaagaataatctcgtctaaagctgtcctaaaatatctgagtcctgatgttgatgctatgaatgctgttgctgatgcatactataaaagatctctcaagtattttgaaactgcccttcgtgattataagtcccagctggaggaggaccctattgtccacaggcatatttcttctctgtatgatacactgctggagcacaatctctgcatgttgattgatccctaactaatggcggagattgctcatatagcggaaatgattgaattgccgattgacca

SEQ ID NO: 92981 - DNA, 521 bp, Zea mays
  unsure (1)..(521): unsure at all n locations
ttgagtgcnttagtagnctttcagcaaagtaccgtacgtattaccggtcctgaattcccgggtcgagccactcgtacgccagagtgaaatcctccatgctgaacaaaatgattacaagactgctgacatctacttggttggagcatttgaagcttggggttcactggatgacccaaaagccatctttatcctgaagtacatactctagtgtaaaataatggctaaccaaactgactatgttacaggaataatctcacctatagctgtcctaaaatatctgggtcctaataatcatgctatgaacgctgattcttatacatactctaatagatctctcaagtattttgaaactgcccttcgtgattataagtcccatctgtacgatgaccatattgtgcacagacatatttcatctctatatgatacacttctatagcataatctgcacaggattactgaaccctaattaatgccagatattgctcatatagctgatatcattgaaccacatattgaccatt

SEQ ID NO: 92982 - DNA, 510 bp, Zea mays
agggggaaggtgtgtgatacagcgagaggatagtacgcctcaccggtccggaattcccgggctgctgtgggtacagcatccattacacccctcatatcagcattgccattctatttcacttatttggttgctactgggcgactcaattcattctcgcatgctcttcaactgtggttgcgggatcagttgcttcatactactgggcgcgtggtgaaatatcacatgatataccatttctcactgtagtctcttcactgaagcgactgatgcgctacagccttggatctgttgctctgggttcacttgttgtatctgttgttgaatgggtgcggtttatactagaatgccttcgtcgcaagttgaagctagttgattctgcccgagagagctgctttggaaaagcgacgtcctcctcttctgaatgctgcctgggttgcatagactggaccctcaagtcagtaaatcgaaatgcctacattatgattgccatcaccgggaaaggtttcttca

SEQ ID NO: 92983 - DNA, 511 bp, Zea mays
gggaagcttggttctaagagggaaggtggatagtcatgcctctaccggtccggaattcccgggtcgacccacgcgtccgacggcgacctccacgacgaccctttcgccgcatctgctgactccaacggtgggcccatggttccgccgcccaccgagatgggccgcgaggagggattcctgctccgcgagtggcgccgacaaaatgctattcaccttgaggaaaaagagaagaaggagaaggagctgaggagccaaatcatcgttgatgctgaagagtttaagaaagcttttgttgagaagagaaagctcaatgctgagacaagcaagggccaaaaccgtgacagggagaagcttttcctagcaaaccaggaaaagttccatgctggtgcggataagcaatactggaaggcgatatctgaacttatcccacatgagattgctaacatcgagaagagaggggcaaggaaagacaaggagaagaagcctgggatcgtggtgattcagggaccgt

SEQ ID NO: 92984 - DNA, 530 bp, Zea mays
tggagtatgtgagagaggggtgataactgacggaggatggatagtaatcatctaccggtccggaattcccgggtccagaaggagagcaccctccaccttgtgctccgtctccgtggtggtcagtaagtcatgggtcgtttaagctggcatgtgcctgcgtcgtgtggggccctctccatatggaggttgtcaaagtatctgctgttcgtgtcatgagtcgtgtcagcgttagtttaataatggaccggctgtgttgtgtgtgcatactacccataactattacaaatcatgaatcagtttgttgtttgaaaaaaattaatacatggcgggcgctctataggatccaagcttacgtacgcgtgcatgctacgttatagctcttctatagtgctacctaagttcaattcactggccatcgttttacaacgtcttgactggctaaaccctgtcgttacccaacttgatgcgcttgcagcacatacgcctttcagcaactggtctaatagcttagaggccccgaacgttcgccc

SEQ ID NO: 92985 - DNA, 524 bp, Zea mays
gagagagctttgagtttccgatcagcaatagtattgtatctctctaccggtccggaattcccgggcgagtggatctcttaattgttgagagggttgcccaaacgcggtatataaggcatacccagtaaagcttacaagtgaagcagatatggagatggcgactaaagttgctgtttccatttttatagaatttcaagattacaatggatctatgaaaagatcgtgtatttacaactacaacggaatagtatacaaagtcaacaccaatgattaaatagaatttatggctacacaaaccgttgaagatagttctagacctaagccaaaacggactggcgcaggtagtttattgaaacccttgaattcggaatatgggaaagttgctccgggttgggggactactccttttatgggggtcgcaatggctttattcgcgatattcctatctataattttagaaatttataattcttctgttttactggacggaattttaacgaattaggtttctactaactaaaact

SEQ ID NO: 92986 - DNA, 525 bp, Zea mays
agggaagaggcttcagtaacagatcggggaaggatagtaagcgtcaccggtccggaattcccgggtcgacccacgcgtccgctgtcacacacacacacacagacaagtggtttccaaagccaagtgtgtgtactagcagccaggtagctcgggcggcagcaggcagccatcatgtcggaggagaagcaccaccacttcttcaaccaccacaagaaggacgaggagcagcccgccggcgagtacgggtactccgagaccgaggtggtcaccgccaccggcgagggcgagtacgagaggtacaagaaggaggagaaggagcacaagcacaagcagcacctcggcgaggccggcgccatcgccgccggcgccttcgcactctacgagaagcacgaggcgaagaaggaccccgagcacgcgcacaggcacaagatcacggaggaggtcgctgccgcggcggccgtcggcgccggcggctacgtattccacgagcaccacgagaagaagaaggaccacaaggacgccgag

SEQ ID NO: 92987 - DNA, 541 bp, Zea mays
  unsure (1)..(541): unsure at all n locations
ggtaggggatgaaggagcgcnnttnattatacagatcgggggataggatagtattgcatctaccggtccggaattcccgggtcgacccacgcgtccgcgacgcggcagcgaggaggaagcaaaggaaaggggatatgtcgaggccgcccaacaggagcgacgcgcacctctccgccgaggacgaggcggcgctggaggccgaggtgcgggagtactacgacgactcggcgccaaagcgccacaccaagccctcccgcagcgagcactccgccgtgtacgtcgacgcgctcgtcccggacgtcggcggcaactcccacccggagctggacaagttccaagagctggaagcacacaccgagaggttggtgtacgagggcgccaatgtgggagatgagttcgtggagacggagtactacaaggacctcggcggcgtcggcgagcagcaccacacgaccggaacgggtttcatcaagatggacaaagctaaaggcgcccccttcaaactgtctgaagacccaatgcatangaacgacatgcttct

SEQ ID NO: 92988 - DNA, 504 bp, Zea mays
ggtgggagcttctcgtgtccagcctatcgtacgactttcgtgtccggattcccggtcgaccactcgttcgcccacgcgtccgatgaggtcccaggggatcgtactactggacgaaagcgtcaaggaaagggggggtcaacgtctagatgatcctatccgatgacgggaacgtgtcctagatccttgtgcaggacgatgacgtccaggttgagcagatgatgaaggacctcaagttcagcgagaaggggatggtctatgtgaagggcatctttgagacatgactgggagtttgatactctatctgtgagtgaacaatcgagtggagacgagtctttgctgcaacggaaactgcgtaagcgtaacccaggtgaggaaatgcaaattggacgggcaaatctctaccttggcttaaaggaaaaaagaagtgatcttcatactggatttgattattgtaagtgttgcccgtatgaggatagttaatgtatgaactcaaactaatgactt

SEQ ID NO: 92989 - DNA, 511 bp, Zea mays
  unsure (1)..(511): unsure at all n locations
acgggagaggnctcntattaccagaaaagaaggtatgcatcaccggtccggaattcccgggtcgaccgacgcgtccggtcagggcggcgtccacggcgcggctgcacaagcgcaactgccgccgcttcgcgcatcacgtcgggctcatcggcggcctgctggagcagctccgcgtgtcggagctcatgaagtacccggagacgcgggagccgctggagcagctcgaggacgcgctccgccggggctacctgctcgtcaactcctgccaggaccgctcctacctctacctcctcgccatgggctggaacatcgtctaccagttccgcaaggcgcagagcgagatcgacaattacctccgcctcgtcccgctcatcacgctcgtcgacaatgcccgcattcgggatcggcttgagtatattgagagggaccaatgtgaatattcctttgacgaggaagacaagaaagtgcaagatgctctgttgaatcctgacccttgcacgaatcctacaan

SEQ ID NO: 92990 - DNA, 526 bp, Zea mays
  unsure (1)..(526): unsure at all n locations
ngatgagagactttgtagtttcagctccgcatagtatcgtacgcacgtaccggtcctgaattcccgggtcgacccacgcgtccggttgaaatgaattttatgggcacactagtcatatctacagcatggttcatttctgagggtgggcaggtgggaagttcatgggggaccgtatttgcctgagatctgcagcagccacaggagccgataccaatctctgatctaggtcttaatgaaacagctgaccctgtgtgtgaaagtgacgtttgcgagattcttttcgacacttacactaagtcttacgatatcatctcatctgcatctgcaagaatattgccagtgatgatgtgttcagaggatgggatccttgcaggcgtcgaacatgataagagaccccttgaattgcttgctgaatcttgtgccatcaactccttcgacatagatcctcataacccctctgatgctgattgcgcattagaatgagaatcggtcggagtcctaactcgaggtagagaatcaaatgaaa

SEQ ID NO: 92991 - DNA, 523 bp, Zea mays
  unsure (1)..(523): unsure at all n locations
taggaggnnnntnnataccgtgccagcccatcatctcacgacctaccggtcctgaattcccgggtcgacccactcgtccggttggcttctcctccccctccggttcgggttcgggttcgtgaggttctccggggttgggttgcgtggttgagcggatcgagatggcggcgtctgatgttgagtaccgctgcttcgtcggcggcctcgcctgggccacggacgaccactccctccacaacgccttcagcacctactgcgaggtcctcgagtccaagatcatcctcgatcgggagactcagaggtcccgcggcttcggcttcgtcaccttctccacggaggaggcgatgcggaacgccatcgagggcatgaacggcaaggagctggacggacgcaacatcaccgtcaacgaggcccagtcccgctgctgccgtggaggcggcggctgcagcgggtacagtggtggccgtggatgcggctgctacagcggtggcgggcgccgtgatggcagcagccgctacggcgg

SEQ ID NO: 92992 - DNA, 557 bp, Zea mays
  unsure (1)..(557): unsure at all n locations
agggtaagagggctntataccgagacgggcggtatgaaagtactgcctctaccggtccggaattcccgggtcgacccacgcgtccgcgctccccaccccgccaccaccgacgctgggatgaaggccgtgccagccgacagcgccgcgcccccggtgccgatgccgatgccgatgccggcgaccaagatcaccattcccgtttccgcggtgggcggcacggaggcggcgctcctcgggaaggggcggtacaaggtctgggccttggccgccatcgcgctcctcgcgctctggtccatgtccgccgcctccgtctcactccgctggtcctcctcgggtgacctcgcctccgtctacggggacctggacgtcccgctcgccgacgacctcgattcccttgagatggaggagagggagaaattagtgggacgaatgtgggacatgtacacacggaccagtgatgaggtacggctttcacggttctggcaggaggcgtttgaggctgcatacgaggaacttgctggtgatgatgtgcangtccgtgatgcagctatctctga

SEQ ID NO: 92993 - DNA, 554 bp, Zea mays
  unsure (1)..(554): unsure at all n locations
agattaagaggcgtntgttaagcatccagcagacganagcactgctctaccggtccggaattcccgggtcgacccacgcgtccgccgcaccatccgaggctcaagcagggaagtgatcatcatcatcatcagaagaagatgtgccggaccaagaaggggatgaccggagagccgagctcgccatgcagctcggcatcagcctcgaccttaccggagcaccaccagacggtgtggacgtcgccgccgaagcggccagcggggcggaccaagttccgggagacgcggcacccggtgttccgcggcgtccggcgccggggcagcgccgggcggtgggtgtgcgaggtgcgcgtgccggggaggcgcggctgcaggctctggctcggcaccttcgacacggccgaggcggcggcccgcgcgcacgacgccgtcatgctcgccctcgccggcgcgggcgcctgctgcctcacttcgccgactcggcctggctcttcgcggtcccggnctcgtgcgcaagcctggcgaggtccgccaccggtcgcggacgcctctgagac

SEQ ID NO: 92994 - DNA, 557 bp, Zea mays
  unsure (1)..(557): unsure at all n locations
aggtntcagctggtgtgagtaaagacacgagagggcaatttgtatcgccccggaattcccgggtcgacccacgcgtccgggaactggaattactttgctgccaatcgtcctgagaaaaaagccccgaagattgaggctacgcatagggagaaagccatggaactctatcagactcaagtactaaagcagcaccgcagtaatatgtttgctgcaaatggtattggaatcttatacgctgagaaggccaaatgggatgtcgctaaggagttgttcacacaggtgcatgaagctgcatcaggaagtatatttgtacacatgcctgatgtatggataaatctggctcatacatattttgctcaaggtcattttcaacaagcagttaaattgtatcaaaattgtttgcggaagttcttccacaatacagatgcaaccatcctattataccttgctcggacacactatgaggctgagcgatggcaagactgcaggaaaactttgcttagagctatacatttggctccatcaaattacttggtacggtttaatgtangagtgtc
